United States Patent Application Publication US 2025/0215492 A1 - sequence listing, part 2

SEQ ID NO: 14948 - DNA, 120 bp, synthetic construct
  source 1..120: mol_type = other DNA
tccaggaaccttgccacacccgcacgtgcaccctttactccttggccctcccacagctgctgtggcacacctgtgctctgcacttgcctcaccagctctctgctcgctttttttttttat

SEQ ID NO: 14949 - DNA, 120 bp, synthetic construct
  source 1..120: mol_type = other DNA
tttaatgattgccattctaactggtgtgagatgatatgctcgcttttctctctcctgtcttctctctgctttctctccaactgccagccaatcggctcaggcaagtccatcccatcctga

SEQ ID NO: 14950 - DNA, 120 bp, synthetic construct
  source 1..120: mol_type = other DNA
ccggcactctggaggcacagacagaacaggccaccaggtgcagacaggagagggagacaaggggatagaacggaagatgccggggctgggtggaagtcagtgcccttaggtgctggtacc

SEQ ID NO: 14951 - DNA, 120 bp, synthetic construct
  source 1..120: mol_type = other DNA
aaaagaatcccgtaacttctttttcataacttttttggtaacttttcataatactgttttctactttgttcccacaagtttttttgccacaacgtttttacattttttatcccataactt

SEQ ID NO: 14952 - DNA, 120 bp, synthetic construct
  source 1..120: mol_type = other DNA
cccagaggtacaaaaacatatttcactttgtaaagaagtttgtgagaaaatataactctgtggttgtatagacacgtttcctgataatacattgacattcacgaacaacagtagattgca

SEQ ID NO: 14953 - DNA, 120 bp, synthetic construct
  source 1..120: mol_type = other DNA
gctcatcagcagagttgtgggcagcggccaggaattttctgtgcccattgttgtagttgctgtaagccgcaataccatctgctgcagctccagcagcttcacctggagggaggggtgctc

SEQ ID NO: 14954 - DNA, 120 bp, synthetic construct
  source 1..120: mol_type = other DNA
tacccgtctggtttttgagtttggacaagctccactccagctgctctacccaacgcatatcctgcttctctttctttaatgtgcaaatctgcccaaagcacagggggaaagggccctgga

SEQ ID NO: 14955 - DNA, 120 bp, synthetic construct
  source 1..120: mol_type = other DNA
acattctccggaggacaggaggaaactgcacaccctccactcacctctagcaccctttcggctttctgtctctcgttgtttgctttcttttcctgtaggaagaggaagacagagctctta

SEQ ID NO: 14956 - DNA, 120 bp, synthetic construct
  source 1..120: mol_type = other DNA
cctgttcactcctgctggaactctaggtctgtttttctgccaatattcttttaactgttggaaagaagagcagtaatattcatgagaaccgtcagcccctacagccacaacctcctttac

SEQ ID NO: 14957 - DNA, 120 bp, synthetic construct
  source 1..120: mol_type = other DNA
tctgccattgcagggtggggagggaggaagggttggggccacagcagcaaaatcccaataagaaccgatcaaggcctccagtcacctaccaggcagctgtgtgactgagccagaggaggc

SEQ ID NO: 14958 - DNA, 120 bp, synthetic construct
  source 1..120: mol_type = other DNA
gccaatgagacctcccgaccatgaccagttgtgaccacaaaaatgtctccagatatttccaaacgtcccataggaggcaaaatactcctgcagttgaaaattactgtgtaaaccagatct

SEQ ID NO: 14959 - DNA, 120 bp, synthetic construct
  source 1..120: mol_type = other DNA
tattccagaactgaaaatttaaaaaacatttagaaataacgtgagatataagactcaagacaagaggtctaaaatccaattaacagacacttccaaatgaacaaataaaatggaaaagag

SEQ ID NO: 14960 - DNA, 120 bp, synthetic construct
  source 1..120: mol_type = other DNA
gaacaggaagagaggcttcggaagcaggaggagaggcttcaggagcagcacgagaagcttcggcagctggccaagccacagagcgtcttcgaggagctggtgcgttgccccaactgggga

SEQ ID NO: 14961 - DNA, 120 bp, synthetic construct
  source 1..120: mol_type = other DNA
cagtcaccaagttgcctaagggtggctgaactggccaaggtcagaaagggagcaggtcagaactcccacatcgaccagtagtgggagtgtgcctgggcggaatagcaagatcttgattct

SEQ ID NO: 14962 - DNA, 120 bp, synthetic construct
  source 1..120: mol_type = other DNA
taatgttattgcagcatgtatattcactacagcattcagacaaaatttgcctatgttctgctgttgtttgatgtaatcttaatcacagtgagctcttccttagctcaatatgtagtttgc

SEQ ID NO: 14963 - DNA, 120 bp, synthetic construct
  source 1..120: mol_type = other DNA
agagctggtgaggcaagtgcagagcacaggtgtgccacagcagctgtgggagggccaaggagtaaagggtgcacgtgcgggtgtggcaaggttcctggaaaagaggggctggaagggaaa

SEQ ID NO: 14964 - DNA, 120 bp, synthetic construct
  source 1..120: mol_type = other DNA
atgcacctcagagcccgtgccaagaacgagcagtagtcctggattcaaggtccgtagaaatcagtcaactgaagaacaccatcaaatctctggtaagagtccactggggtcccctgattc

SEQ ID NO: 14965 - DNA, 120 bp, synthetic construct
  source 1..120: mol_type = other DNA
ggatgtgtgccatctagtggcactaaaagcaaagcctaatgcttaacgaaagatttcccttttcatcgtcagggaactcagtgaggttttcagtagtgttttcctacttttagaagtagg

SEQ ID NO: 14966 - DNA, 120 bp, synthetic construct
  source 1..120: mol_type = other DNA
tatcgatttagcaaacatctaggagtttgacaattcattctattggagaggctgcagagaaacaggaaatgctgctggtgtgaatacaaaactgcacaacccctatgaaggggaatttgg

SEQ ID NO: 14967 - DNA, 120 bp, synthetic construct
  source 1..120: mol_type = other DNA
agaacagtgtggagtttggggaagagatgtggctaaagacagcgtaagcaattttttaaagttatgtctgaagcaagaagaaaagacaaggaataggttcagtttcatctctgatacact

SEQ ID NO: 14968 - DNA, 120 bp, synthetic construct
  source 1..120: mol_type = other DNA
tccaaatccaacaccaagcttctgcagctgccacctcccgtagacttcgcatttcttccgcactctcctctcacgacgggtcttctttgttgtacttaatttcctacgcaataagatttc

SEQ ID NO: 14969 - DNA, 120 bp, synthetic construct
  source 1..120: mol_type = other DNA
agttgcctgagcagccggctggtccggcggccaggctagggcgggggcgagcgcccagttgagcctgctggggctggaggagcgagaagggttctcttcacatttcagagcgaaccagac

SEQ ID NO: 14970 - DNA, 120 bp, synthetic construct
  source 1..120: mol_type = other DNA
gggacaaaaactctacccctccacccttgttttagagtaaggttgtagagggacaagggagaccagtgcattttctacatgaatctgtagatgaagtatgacagaacattagaaataggc

SEQ ID NO: 14971 - DNA, 120 bp, synthetic construct
  source 1..120: mol_type = other DNA
cctgttttcagagtcggatagacctgagtttgagtgctgttccacccctactacatctgtaaacttgggctgcttgtttgatttccctaagcttcagttttatatctataaagtgggaac

SEQ ID NO: 14972 - DNA, 120 bp, synthetic construct
  source 1..120: mol_type = other DNA
atttactgactaaccactaaccaaattgactttatgatcagattggaaacttgagtttactagattatttgaggggaatgacattatcttggccatctttgtactcccagcactcagcat

SEQ ID NO: 14973 - DNA, 120 bp, synthetic construct
  source 1..120: mol_type = other DNA
ggctgacattcagccactgtgcaccaatacagctgtatcaattgttggtagccgatattcattctaatttgtgggtcccagctgttcaatatctaggtatctaaagccaacattgagatt

SEQ ID NO: 14974 - DNA, 120 bp, synthetic construct
  source 1..120: mol_type = other DNA
ttcataccgaagggctttttcggaaatcaggatctgtgattcgcctaaaagcactaaaggtgagcatattgttgaactataatttttcatttgagccattttctgatttggtttttaaaa

SEQ ID NO: 14975 - DNA, 120 bp, synthetic construct
  source 1..120: mol_type = other DNA
ctgttgctctcctgtcttctggctgaccacacagttcatgtattaagatacttctttaactttctcaggaatgtttctcttaggtaagtggtaattaaaactcttggcaaataatagttg

SEQ ID NO: 14976 - DNA, 120 bp, synthetic construct
  source 1..120: mol_type = other DNA
taacagaatttgtttaaatgaggaaaatctctgtttctttcaaaggaactatgaaggcaactgttagaaagttggtatattactgacctcacccccaccctacagtaccggcccctcctg

SEQ ID NO: 14977 - DNA, 120 bp, synthetic construct
  source 1..120: mol_type = other DNA
acttccatctctactgatcttttaaatacttttattcgtgcctccatttccatggttcttgcctcagttcagaccttcatcttttgccttaacatgtaatgatttctttttccctaccct

SEQ ID NO: 14978 - DNA, 120 bp, synthetic construct
  source 1..120: mol_type = other DNA
catatgcatcttttagtctgttagatttaagtaactgctgtctcttaagagtcttgcctctgcgacttccttattttcatttaagtaattgcagagtgttttagttaaacaacatctact

SEQ ID NO: 14979 - DNA, 120 bp, synthetic construct
  source 1..120: mol_type = other DNA
accagcccagccattttcttccatattaactacaagttctaatgtggccaaccagagccttcagagagtaatagagtatgatcatgctaatccggagattagtctgggtcttagattcaa

SEQ ID NO: 14980 - DNA, 120 bp, synthetic construct
  source 1..120: mol_type = other DNA
caccactccccaagccataagcaacctcaagtctactttttatctctgtggatttccatgttctagacacttcatatgaatgcagtcctgtaatatctggtctttggagatcagcttctt

SEQ ID NO: 14981 - DNA, 120 bp, synthetic construct
  source 1..120: mol_type = other DNA
ttggtttctcacctctgacaagggtttcacatcaacactttcctgtcttccgggttggtagagtcagatgagcccagtgcaggccaaaagtaaaagctgcacccctgtaaagagtgtaca

SEQ ID NO: 14982 - DNA, 120 bp, synthetic construct
  source 1..120: mol_type = other DNA
gaagcgggtgttggctgtttccaaagagagcacttaatttaatttttcctttaaatgacccagggctgttccgtctgatagatggaagggtaacattgccttaaaacagaaatatgcagg

SEQ ID NO: 14983 - DNA, 120 bp, synthetic construct
  source 1..120: mol_type = other DNA
cctgaaacagcctccattttcttcaaacatgcagaatgttttcccagactgcgtctatttcagggtcttccatttttgtggtttatggccatgcttgccagttttggtggggttgaggaa

SEQ ID NO: 14984 - DNA, 120 bp, synthetic construct
  source 1..120: mol_type = other DNA
caagttgtaatcttgctaatggggggtctctcctccacgttgatggcatctgattgatcaggctggtagttgctgaaggttagggtggctatggcaacttcttttattattattattata

SEQ ID NO: 14985 - DNA, 120 bp, synthetic construct
  source 1..120: mol_type = other DNA
tggctgcaccactttccattcaaaaccagcagcgtacaaatttaccagtttttccacatccttgctgagatttggtatgctcagtattgttggttttagtcattctcataggtgtgtagt

SEQ ID NO: 14986 - DNA, 120 bp, synthetic construct
  source 1..120: mol_type = other DNA
gaggaggtaaaaagagaccagctaggcagatagttagggcagagagtccttggcagaacttcccttctaacaaaaagcagcccaggaaatcactcctcttctaatagaaagcagcctgga

SEQ ID NO: 14987 - DNA, 120 bp, synthetic construct
  source 1..120: mol_type = other DNA
ggctggtgagcacaggcactttccatggctctgtatcagccccaggcactgtttcctctaatcctctcaggtggttctctccccagctgcacacagcttcctcacacacaggcactgatc

SEQ ID NO: 14988 - DNA, 120 bp, synthetic construct
  source 1..120: mol_type = other DNA
tataaaataaggcacaaccaaacacaagctgcagcagaagtccacaaagttccacaggagggcaaggaattatcagtgaatccttacctcgtcatagaaacttcttcctccagacatcca

SEQ ID NO: 14989 - DNA, 120 bp, synthetic construct
  source 1..120: mol_type = other DNA
caactcgggtacagaagcaggaaaggggtctctaccgttctaagaaagtctggaaatctctaatttatcctttttttttttctttttcttctaaaattttttcttctctgtgccccagac

SEQ ID NO: 14990 - DNA, 120 bp, synthetic construct
  source 1..120: mol_type = other DNA
ggccgagcttcctatcatctgagtcccagaaggaaagaaaaaaagggcagaacatagaaacatggaaagaaatagctgaaagtctggtttaccactagaaggcaatcagtttaatctagt

SEQ ID NO: 14991 - DNA, 120 bp, synthetic construct
  source 1..120: mol_type = other DNA
ctcagggtaagggaagtaaaataatttgtcctatatctcatagttgataagtggctgaatctgaactcaaactcggatttcactgccgaccttattccaagcctgcttctccactctgct

SEQ ID NO: 14992 - DNA, 120 bp, synthetic construct
  source 1..120: mol_type = other DNA
gacttaatatcggtaagatgtaacacaaagcaaagcccacttagtgctcaagtaccactgtcatcaggtattggaaatcttcttatttggaaggtggttatgcccagaatggtggtgtgg

SEQ ID NO: 14993 - DNA, 120 bp, synthetic construct
  source 1..120: mol_type = other DNA
cttgtaatacttccacaatgtgatgaatgttacccactctattccaattatgcctttatcagtgtgccatcctaccccctcagctctcaccccttacttggctattaggaaagactaata

SEQ ID NO: 14994 - DNA, 120 bp, synthetic construct
  source 1..120: mol_type = other DNA
tatttgacctgatgtatatggtaccaattaggaaattgatttcttccttctctccatgcactggggcctcggccgggagagtctcttctttcgtcactgccacctgggggacagatcaga

SEQ ID NO: 14995 - DNA, 120 bp, synthetic construct
  source 1..120: mol_type = other DNA
gcaaagaggcttctcacccagttcaaattgttacaaagttcagctggagacttccttctccctgtggtgtttttcccccctcctctggcttccctcccaaaggatccctgtggtgccagg

SEQ ID NO: 14996 - DNA, 120 bp, synthetic construct
  source 1..120: mol_type = other DNA
atcaatacagaattttttgtggaagctgacaaacagtttctaaaacttagaagaataagccagtaattccaagacaattttgaagaaaataagttgcatgtttgttctcccacacttcac

SEQ ID NO: 14997 - DNA, 120 bp, synthetic construct
  source 1..120: mol_type = other DNA
aagtgtgctggagaccctgcctgatgttgaccatggcccttgcctttgtgtttctaggtcacatttcttggcctcccaaggccaagcaaggtgtggccacgtgacttaagttccatgaaa

SEQ ID NO: 14998 - DNA, 120 bp, synthetic construct
  source 1..120: mol_type = other DNA
tccagatcccagaatcgtagatccaccaacagcttgtactgtgcacctagaaaagtcgcagacactcaacacaagcctgtgaaagcagccaggagcgggtctataccctgcaataccaca

SEQ ID NO: 14999 - DNA, 120 bp, synthetic construct
  source 1..120: mol_type = other DNA
ctggagaatccatgcaggctgtgctggcacaaaccccggggaaaggcagggctagttttgagttgaggttttgccattctcttcaagtgtggtctttaggaagtcactaaacccctgtga

SEQ ID NO: 15000 - DNA, 120 bp, synthetic construct
  source 1..120: mol_type = other DNA
gcaaattaatgaggcagttatatgatgcttagagctatgagagacaagatggtgtcaggcacaagggaagggcacccatgctagactggagtggaggagagagtgagagaggctctgagg

SEQ ID NO: 15001 - DNA, 120 bp, synthetic construct
  source 1..120: mol_type = other DNA
agtttcttgggttttcatttttagtcactagaaacacttatataaatacaaatccatgcaggtattccaaaaattcctggggacaatttatgtgtagtccctggttctcactgactcagt

SEQ ID NO: 15002 - DNA, 120 bp, synthetic construct
  source 1..120: mol_type = other DNA
tcttccaagcttactcatgtgatcattcacagaattgtttctgagggttgttgaactaagaagctcagttctttgccacgtgggcctttccataggtgagatcacaacatcagagttgtt

SEQ ID NO: 15003 - DNA, 120 bp, synthetic construct
  source 1..120: mol_type = other DNA
gaattcagtgagtgatacttaattgaacactaggcagggaaaaacagctatgatgaatatttgggggacaatcaggggtatctgggtagggacaacatatttggataatatcactttatc

SEQ ID NO: 15004 - DNA, 120 bp, synthetic construct
  source 1..120: mol_type = other DNA
ttttatagtttaaaaattaaatattaatgtttcaaatttttaaatgattttaaatatttaacatgcatttgaaattggctggtgaatcccacagccctgaatcccactcccaacacacga

SEQ ID NO: 15005 - DNA, 120 bp, synthetic construct
  source 1..120: mol_type = other DNA
ctaatttccacataggataaggtccctagttcaatctaattcccatctcttcctctgatacctgctatattttgttgaaatcatttaaaatgttgatttgaaattgcttttgatttttgt

SEQ ID NO: 15006 - DNA, 120 bp, synthetic construct
  source 1..120: mol_type = other DNA
accttgaacagctgaagtgatcctgagcaaaaagaacaaagctaaaggcatcatggttgtgttttcaaatgatactaccaatctatagtaaccaaaagagcatggtactggcatagaaac

SEQ ID NO: 15007 - DNA, 120 bp, synthetic construct
  source 1..120: mol_type = other DNA
ggctgaagtgcttctcgaaatgccaatacctctagagggaaatgcaagaaaatagccattgggtaaaataagttcagatccacaacaaaacaaaagggaggggggtaaggctatcagcta

SEQ ID NO: 15008 - DNA, 120 bp, synthetic construct
  source 1..120: mol_type = other DNA
ctctggcatccctcggctgggggcctcctccctcaggctacctggatcctgggctcttaccgctctccttgtcccccactcctacctaggttttgctgtcttttttcattcagttctccc

SEQ ID NO: 15009 - DNA, 120 bp, synthetic construct
  source 1..120: mol_type = other DNA
cattgctaacttctctcaggtaaattctctcacacacacctgaggaagaggggctcaggcacacacaggcctgtccttctactgccccacggaggagaattctccgcagagaacctccag

SEQ ID NO: 15010 - DNA, 120 bp, synthetic construct
  source 1..120: mol_type = other DNA
caaatgcagccaggagaggaaaatagaggaggagtggggagtccaagcatcttgttgctcagcaaaagctgcctttgtgcccaggcatcaaggtcagggagaggagactgctgctctgtc

SEQ ID NO: 15011 - DNA, 120 bp, synthetic construct
  source 1..120: mol_type = other DNA
cagaggcatctccgccatctaaaaagtcattccctgataatcgagcccatggtcctgctactgctcatcaggcagcttcactgactcccaccaggacagcagccaagcattgttccttcc

SEQ ID NO: 15012 - DNA, 120 bp, synthetic construct
  source 1..120: mol_type = other DNA
gctcacaataattgctgtccacttctttcttcatcacttactgcgttctctgcactctcctatcccctgcctacatctggattccatccctaccacctgactgaaaccacagccacagaa

SEQ ID NO: 15013 - DNA, 120 bp, synthetic construct
  source 1..120: mol_type = other DNA
ctaatgacaaatggaaaaatggtaactttgcactagagaaacctgacagatagcaccttagtcaagggaccaaggtcaacatgccagtataagacatatcaatagcatgtgcaccagcac

SEQ ID NO: 15014 - DNA, 120 bp, synthetic construct
  source 1..120: mol_type = other DNA
attaaattcagaatttaaaagcctcctccaaagaaatgtccaggcctagatggtttcactggagaattctaccaaacatttaaatatgaattaacacctattctactgtctcttccagaa

SEQ ID NO: 15015 - DNA, 120 bp, synthetic construct
  source 1..120: mol_type = other DNA
cccaaattgatgtataaattgacagacaattcctgtcaaaattcagcaagatttttaatagatatggacaaagttattgtaatatttatatggagaggtagaagaattagaatagttaaa

SEQ ID NO: 15016 - DNA, 120 bp, synthetic construct
  source 1..120: mol_type = other DNA
ctgtttgtgggaacgaaaatgacacagccactctggaaagcagtttctcctaaaactaaacataaaactaccatgcaacccagcaactggattcctgagcacttatcctagagaaatgga

SEQ ID NO: 15017 - DNA, 120 bp, synthetic construct
  source 1..120: mol_type = other DNA
tcatagcagtttaatctggacaaatcatggactctgccaatttctgtttcctcatccacttccttgctgttcacagagctactttaattaaagatatctctttaattaaaggtacggtga

SEQ ID NO: 15018 - DNA, 120 bp, synthetic construct
  source 1..120: mol_type = other DNA
caggcagaatcacacactcacagctctgcgtactcacaggaccggatccacaccccagggacctcactatcttaaggagcatcccatctcattcacctgctatctcctcactgggaagtt

SEQ ID NO: 15019 - DNA, 120 bp, synthetic construct
  source 1..120: mol_type = other DNA
ctgcaagctgacggttcacaagatgcactcttttcttctggaaatctgtcccggaatattcggtaacattgacatgactgccataatttgcagaagcaaagttcttttcctcctcttaaa

SEQ ID NO: 15020 - DNA, 120 bp, synthetic construct
  source 1..120: mol_type = other DNA
gtgttggcatccaattttattcccttccaacatcattgattacaacaagatacttattaaatatgccatcttttccaagtgagttaaaatatatctatactttgatctgtttgcaaaatc

SEQ ID NO: 15021 - DNA, 120 bp, synthetic construct
  source 1..120: mol_type = other DNA
agccctcctctttaagactgatttatattcagaatcaaagaggccactgatcagccctgagccttagtgctgacttttcttaacctccttagcaagaatatcctctagaaatccaggttt

SEQ ID NO: 15022 - DNA, 120 bp, synthetic construct
  source 1..120: mol_type = other DNA
cactgatggaaaggctgagggcgggaagagacagaacacagagcacaggaggacacatcagttagaggaaaataaagctccatttgctttgcatatctgtgtgtggtggttctatatgca

SEQ ID NO: 15023 - DNA, 120 bp, synthetic construct
  source 1..120: mol_type = other DNA
cagctgggcagtaagaaataagaagaatgtgtgttcttctgctgccgggtggaatgatctgtgaatgtctgttaggtccacttggcctacactgctgttcacacccacgcttcctttttg

SEQ ID NO: 15024 - DNA, 120 bp, synthetic construct
  source 1..120: mol_type = other DNA
aaccaggaatgacaaaggcatcacctccctaacatctcttagagcaagatactttgcaaaactgcactgcttttaagttagagagttgattccatgttttatactgaggttcaaagaaca

SEQ ID NO: 15025 - DNA, 120 bp, synthetic construct
  source 1..120: mol_type = other DNA
tcttgatcctcagcctaaaggctccaggtgaggggtaggtcaccttccccaagccccagaaacagaaggacattgagttgacagtggcattctaacagctttttcaaaaatttctcttca

SEQ ID NO: 15026 - DNA, 120 bp, synthetic construct
  source 1..120: mol_type = other DNA
gagaaggtgaaaagcaacctacacagagagaaaacatcattgcaatccatagactcagtaaaggactggtaccctgaataaacacttcagaagttaataagaaataaacagtcaattcaa

SEQ ID NO: 15027 - DNA, 120 bp, synthetic construct
  source 1..120: mol_type = other DNA
ttctgtcagcacacatttttgaaaaacagcattactggcattcagctggacatttgctggtgtgctattgatcagttcatttagtttaagtatttttactaacatgagcaaaccacagtc

SEQ ID NO: 15028 - DNA, 120 bp, synthetic construct
  source 1..120: mol_type = other DNA
tgggaccttagtacacagttcaggggatgctgcagccactcagtgaaaacaagttgaagaaataaatgaaaattataaagtcaactggccattcaacacattcctctgctttatctctga

SEQ ID NO: 15029 - DNA, 120 bp, synthetic construct
  source 1..120: mol_type = other DNA
atcattctctccacatacaagtctgttctacagatactattcaggtttcatccattgtcccaacaatgtcctttgtaacaaaatggttgttttctgtccaggatcccacattgcatttcg

SEQ ID NO: 15030 - DNA, 120 bp, synthetic construct
  source 1..120: mol_type = other DNA
cagagatatactctttgtaaatattgtttctcattaaatttctccgccattggttttagcatggaatgaaatttctgtttgcaacaattagcacttggtggtcatcaaatggtgactatt

SEQ ID NO: 15031 - DNA, 120 bp, synthetic construct
  source 1..120: mol_type = other DNA
ggctggtatttccttgcaaatcaaactctcctgtaatcttccacatctctgatcagggcaacctcaagcttccatttgttcagaccaaagatgcaggagtcaactttaacatttttgaca

SEQ ID NO: 15032 - DNA, 120 bp, synthetic construct
  source 1..120: mol_type = other DNA
tagagtgtttatgtagcttccatctgtgccacatccaatagttgttatttacagtcatgtgcagatagatcatgatgttccagtcaatggtctgcatatacaatggtggtcctatcagat

SEQ ID NO: 15033 - DNA, 120 bp, synthetic construct
  source 1..120: mol_type = other DNA
atatttcagtacaaggcagcagatggtttacaactggggagaaggcattagaacagtatcatgaggtttgtgtgaaggccatgctgatgctgcttcaaatgtccacactgtaaacacaca

SEQ ID NO: 15034 - DNA, 120 bp, synthetic construct
  source 1..120: mol_type = other DNA
gggtgtaggatgagctctgattggtatggacacagtcagtccctcctcacctcagccacgcaggaatggccctgaagtttccaagcctgccacagctcccatctagagaaaaccaagctg

SEQ ID NO: 15035 - DNA, 120 bp, synthetic construct
  source 1..120: mol_type = other DNA
gtcaccagagagagctagttcatttcccccgacttgctgcattgctttcccttgtgtacatgtactgtgattcctttaaccatttttgtttcatgggctttgtcttcctattacaaaaca

SEQ ID NO: 15036 - DNA, 120 bp, synthetic construct
  source 1..120: mol_type = other DNA
ttatcatacacaatatgcctctgatgcaatcctaaggagataggaatgggtgatagaagctggagtggggcttcaaggaactgggattgtttctgctactcacagaatgggggcatacat

SEQ ID NO: 15037 - DNA, 120 bp, synthetic construct
  source 1..120: mol_type = other DNA
ggattgattgatttgtgtttgaaaggccagagttgtttactatctctccaaggggcctccagagtcagcaaagccccagatgtcaacacatcagaatccagaaaataaaagacaaggcta

SEQ ID NO: 15038 - DNA, 120 bp, synthetic construct
  source 1..120: mol_type = other DNA
tgctccatcaaagacagaccccagggcttcgggaaatccacagcctggtggcactggctcatgcagtccttttcctgtttctagtgctgatgagcgctttgacgccacattccacactaa

SEQ ID NO: 15039 - DNA, 120 bp, synthetic construct
  source 1..120: mol_type = other DNA
ccactcacacacagccactcacacataccacacaccactcacccctcacacacaccactcacacacatcactcacataccacccacacgactcaacactcacacaccactcacacaacca

SEQ ID NO: 15040 - DNA, 120 bp, synthetic construct
  source 1..120: mol_type = other DNA
tttctcgccaggcctgcgtgttgcagcttctgttatgagggctattttagaaaacagcctccggtagtcaccagtgtagaatatgctgctgcaggttgtttggaaggctgaggctatttt

SEQ ID NO: 15041 - DNA, 120 bp, synthetic construct
  source 1..120: mol_type = other DNA
ggaaatccacttccaacctgtcctagcctggaatagctcttttcagcggaaactcttccttcaagcaccatctcttcagcttaaacctatctatctgttcttgtttttgtttgtttgttt

SEQ ID NO: 15042 - DNA, 120 bp, synthetic construct
  source 1..120: mol_type = other DNA
ctgtgtattttcagcacatctcagtcagcttccgtttcagtcttctgtttccatcacccacacaggcatattcaagagttcctgctacatcgatgtacgctggtttccctttgatgtgca

SEQ ID NO: 15043 - DNA, 120 bp, synthetic construct
  source 1..120: mol_type = other DNA
cacattgaaataaacagggtaatttattgtattctaacaatggctccttctctcctcctccctatggaggaatccccggcaagaggagtgaaaggttctatgagtgctgcaaagagccct

SEQ ID NO: 15044 - DNA, 120 bp, synthetic construct
  source 1..120: mol_type = other DNA
agcgcctccctttcttttgagtgtcaggttaggagccctcgttagacagaattgaggccttcttgtctgtttttgtctgaggaaccgctgtgtgtttatgttttagggataacagtctta

SEQ ID NO: 15045 - DNA, 120 bp, synthetic construct
  source 1..120: mol_type = other DNA
agtattttggccagagaaactgttggtatgaaaagcctttgtgggtatcatttttctcttggtaccatccagacagggaagaaccacctttccacctgattctgactccattctttctac

SEQ ID NO: 15046 - DNA, 120 bp, synthetic construct
  source 1..120: mol_type = other DNA
aaggtttaataattagagctgcccactaaagaatgccccctcctttctcctagacatcttggcctgtgtaattgctcatcattgcacaaatcctgcaaggaagaagttcctattttaatg

SEQ ID NO: 15047 - DNA, 120 bp, synthetic construct
  source 1..120: mol_type = other DNA
tatttcttattataaatcacaatctcatacctcccaaagccccacctccagataccatcccagttaggactagggttttaacccatgaacttcgtggggacacaaacgtcatcctttgta

SEQ ID NO: 15048 - DNA, 120 bp, synthetic construct
  source 1..120: mol_type = other DNA
ctaaggatttggggagctaaaaaggccctcacattccaaaagttgtctgtctttggagagcacttgtgtcccagttcagaagggaatctaggaatcaccaacaagctaaatgcagctgta

SEQ ID NO: 15049 - DNA, 120 bp, synthetic construct
  source 1..120: mol_type = other DNA
ctgcatttttctttcattccatgtgtatgtgaaacacaaacagcctccgagggacttttattatgatctgttgctatgaagaagatactgccgggtgcagtggcattatgtgacatttgc

SEQ ID NO: 15050 - DNA, 120 bp, synthetic construct
  source 1..120: mol_type = other DNA
gaaatcaggatctggataatttcagggaaaaggcccacttttcatacactttacatggatgggcttgcaagaatgcttctttacctggattgaggcttcagttgtctctcttctttccat

SEQ ID NO: 15051 - DNA, 120 bp, synthetic construct
  source 1..120: mol_type = other DNA
cagtgtgcctgccccggagaacaatttagcttgttcccagggtgcatcagttttagtcttgcctcacgttgaactcgactgcttgtcatacgcaagcactgcttgcctgctaaaatcatc

SEQ ID NO: 15052 - DNA, 120 bp, synthetic construct
  source 1..120: mol_type = other DNA
tgggggtgctaatccaggacagcattacacgccacaactccagtgttcccttctggctgtcagtcgtgttgcttacggtttctttgttactttaggtagtagaatctcagcactttgttt

SEQ ID NO: 15053 - DNA, 120 bp, synthetic construct
  source 1..120: mol_type = other DNA
ggagtctgcctgctccaagccagtccaccccagctgcagccccaaaagctggctcaaagtccttgggtggattcactggagatgggcaacttaaaacaagagaaactttaatttttaaac

SEQ ID NO: 15054 - DNA, 120 bp, synthetic construct
  source 1..120: mol_type = other DNA
tcttatcattatcccaaaattgatccctcccacatttttgctttaaaaagaaacctttttggttttgtattttatacaggaacacaaaatgcaaacaagttgtgcatattttggactctc

SEQ ID NO: 15055 - DNA, 120 bp, synthetic construct
  source 1..120: mol_type = other DNA
tacatttatatattttacccagttcctaattgggttatttggctttttcttaatttgctcatgcactttgggacatttttgtcttatgtctttaaaatatttttatcatttgtctttcga

SEQ ID NO: 15056 - DNA, 120 bp, synthetic construct
  source 1..120: mol_type = other DNA
tttgagatcagtgttgagtcacagtgattcaggtggcatgcttatcttgttcgtgacatcagtgggacgttttaatgtctcagcgtttaacttgtatgaagacatgtattttccttgcca

SEQ ID NO: 15057 - DNA, 120 bp, synthetic construct
  source 1..120: mol_type = other DNA
tgtgggacaaactagtcggggcagcatggtgggttagatgtagctggtcattgcactcacggggaccccagtgagttggagaaaagactgacagaagctttaagcagagccccctggagg

SEQ ID NO: 15058 - DNA, 120 bp, synthetic construct
  source 1..120: mol_type = other DNA
ccttcttcaagctgactttttaaataaaggctagtgaagtgaagcagcagtggaaatggaaaaggagcaaagaaacctgtaactgcttgtaatcaattccttgtacaccccactgcactc

SEQ ID NO: 15059 - DNA, 120 bp, synthetic construct
  source 1..120: mol_type = other DNA
ctgtacttaggaatttttaaggaggcttcatcatgtaggcatgattgattattgattcaatctccaactcctctttcctccctagaggatggggtgtggggctgaaagttccaagcttct

SEQ ID NO: 15060 - DNA, 120 bp, synthetic construct
  source 1..120: mol_type = other DNA
atgatgtgttttattcctcttattccctttggagatctgaaattcttcctctatgatggtagctttgttatttttggcattgtctattctgtttcctgctatttacagttcgggtaggtt

SEQ ID NO: 15061 - DNA, 120 bp, synthetic construct
  source 1..120: mol_type = other DNA
tgctgtgccctggcctcccactcactgatggcgtctgtctcgccagtggtggatgaagcagagttcttttttcaccagctcactcaggtctgccttctccttcaggtggtccataaagct

SEQ ID NO: 15062 - DNA, 120 bp, synthetic construct
  source 1..120: mol_type = other DNA
tcctgctcctgaatcctctcttcttgtcgctggttcaggagacttatgcgctgattctttttgacctgggcctggagctctcctgccactctctctagttccttcctcaggtgctgcagc

SEQ ID NO: 15063 - DNA, 120 bp, synthetic construct
  source 1..120: mol_type = other DNA
cggaagttgaaacaaattcttaaaacttgcacaactttttttctagtgcttgaatgacctctagtggctccttaaattatcacagccaattgctcacagcaggaaataggttgatgtaaa

SEQ ID NO: 15064 - DNA, 120 bp, synthetic construct
  source 1..120: mol_type = other DNA
aacaagctgaggctcccctcttagacttataagtctatagccagtggcatccagctgcatgccctcctttcctcccccagggacccttcaagggttcctgggctttctgaccccccagag

SEQ ID NO: 15065 - DNA, 120 bp, synthetic construct
  source 1..120: mol_type = other DNA
tcagattctggggcccctctgatggctctgtagctccccctgccgtgccctggcctcccactcactgatggcatctctcttgccagtattgaatgaagcgaagttcttgttttttcacca

SEQ ID NO: 15066 - DNA, 120 bp, synthetic construct
  source 1..120: mol_type = other DNA
cctgcttccgaagcctctcttcctgttcccgaatcctctcttcttgtcgccggttcaggagacttatgtgctgattgtttttgacctgggactggagctctcctgccactctctctagtt

SEQ ID NO: 15067 - DNA, 120 bp, synthetic construct
  source 1..120: mol_type = other DNA
ctccctcggaaaacctcacctgtgtcagctgcgctttcagcagtgcctggtcctgtagggactgctctaactcccactctgtatgtgctttgctgcagctggacaactggatggtgaaga

SEQ ID NO: 15068 - DNA, 120 bp, synthetic construct
  source 1..120: mol_type = other DNA
gggagaggtagagagaatgatcgttagggctggggtgtgtgggctgtctcagctggcagaggggcacccagtcccacctggaggaggaggttggagggttgacccgaagggtcactgcac

SEQ ID NO: 15069 - DNA, 120 bp, synthetic construct
  source 1..120: mol_type = other DNA
ctcttagagtgggtggggagagcggttgccatgggcagctttccttgtgagccacagggccctctggacacgctgctgtctggccacgccctttccctttcatctttctcattgaccaat

SEQ ID NO: 15070 - DNA, 120 bp, synthetic construct
  source 1..120: mol_type = other DNA
gaaggcagcatggccatttcttgctacttttttgtatggtttttagtggcagcctggggccgagtcagctgctgtgggtgagttggggggtactgtggggagtgagcactggacgcagag

SEQ ID NO: 15071 - DNA, 120 bp, synthetic construct
  source 1..120: mol_type = other DNA
ttgtgacatcaaaaaaagtacttcagcattcacagagcagatgcatgtaaactaaattaacatgtgagattatgcatacccacttaagtttgaataaccagacatttacaggcttgaatt

SEQ ID NO: 15072 - DNA, 120 bp, synthetic construct
  source 1..120: mol_type = other DNA
tgtttgaacttgttagtgacatggattagttaggagtacgaactaaataatgaaggaaatattatcaaggaagaatcagaaagaccaaaagaccatcataagatggtagagttggtaata

SEQ ID NO: 15073 - DNA, 120 bp, synthetic construct
  source 1..120: mol_type = other DNA
acaggtgtgagccactgcacctggccaaggcttacattttaaatgtataactctactcaagtatctcacacacatacccttcagaaattttaattggtaatagggatatttatagcttgg

SEQ ID NO: 15074 - DNA, 120 bp, synthetic construct
  source 1..120: mol_type = other DNA
gactcaagtaccttttgtaaaagctttagaactttgttgacgctgttccttgtgccatggcttccagatcccttaccagcccagccattttcttccatattaactacaagttctaatgtg

SEQ ID NO: 15075 - DNA, 120 bp, synthetic construct
  source 1..120: mol_type = other DNA
aacaatagtaatcgtattatttttacaccacttttctttgaccctactttctcagccacaattcaacaaattccatttgcaaaattgaaaatagattgatttctaagtttagattataac

SEQ ID NO: 15076 - DNA, 120 bp, synthetic construct
  source 1..120: mol_type = other DNA
tgcacccaaaagtttctaaggtggttgtattttttccgttttcataattgaaaaaatgtgaatgtctctgggaaactttgtgaattctttattaataactcagatgaattgagagggttc

SEQ ID NO: 15077 - DNA, 120 bp, synthetic construct
  source 1..120: mol_type = other DNA
agttcactctctcctgtactcattggtggaaaccatttgatcactgcaggtgtgccaaggcgaagtaaaagaattgcaggcaaaaaagtttgcaggtactttatccaggacattttgttt

SEQ ID NO: 15078 - DNA, 120 bp, synthetic construct
  source 1..120: mol_type = other DNA
tggttgcctagggacaggggagtggggaatggggaatttgtgtttaaagggtataaagtttcagttggggaagtaaaaatgttttggagatagaactgcatagcaaaatgaatgcacttc

SEQ ID NO: 15079 - DNA, 120 bp, synthetic construct
  source 1..120: mol_type = other DNA
gattttctaagagataatcagagtatccaaataatggcagattgtcttgtcctctctcaggtttaaatgagtcatttctttttcctttcagctgcctgggtaaagttggtccattcgtgt

SEQ ID NO: 15080 - DNA, 120 bp, synthetic construct
  source 1..120: mol_type = other DNA
tcacccccaccctactaaagtcgaccctccttcccctgcactactatgtgattgacagggtttatgtttagtgtttgttaatataagctccacagggcaaggatttattattattattat

SEQ ID NO: 15081 - DNA, 120 bp, synthetic construct
  source 1..120: mol_type = other DNA
aaaattcagaagatatggccaaaatagcaggcacagatttcatgaactattggctccctttgccatctgccactcaaaaccttctgaaacatttcatgaaaccagggaaagcaccaacag

SEQ ID NO: 15082 - DNA, 120 bp, synthetic construct
  source 1..120: mol_type = other DNA
aattgggaaaccttaaaaagatgtacaagacccttccagaatcttgcctcttgcctttctccaccgcactgttttcaacccataggccatcatcgatcagtgagatagcatattaacata

SEQ ID NO: 15083 - DNA, 120 bp, synthetic construct
  source 1..120: mol_type = other DNA
ttttgccattcaaatctccagcgggagggtggttgcaggtcatttcccatgacttcactgttttatgtcatttataatatccacaacataattcttcagttttgtccaagtgcgtccccc

SEQ ID NO: 15084 - DNA, 120 bp, synthetic construct
  source 1..120: mol_type = other DNA
cctacctcctggactagtgctttttgagcatggcttttacaggtctctaacaacctacatttccccttgtaacaatgatatattctcaatgctaaaattcttgcctcaaaggacatgggg

SEQ ID NO: 15085 - DNA, 120 bp, synthetic construct
  source 1..120: mol_type = other DNA
tgtagacataaggtttcagcctaattgggtaaattcctaggagcgtgaatgctagatgtatggtaagagcaggtttagtttataagaaactgccaaactgtcttccaaagtggctgcacc

SEQ ID NO: 15086 - DNA, 120 bp, synthetic construct
  source 1..120: mol_type = other DNA
cccctttctgtggcttatcttctcatcctcttaccagtgtctttcatgtgtttttaaattttatggccattttctttactctcagagaatagctctgagaattagggttgaattcttctg

SEQ ID NO: 15087 - DNA, 120 bp, synthetic construct
  source 1..120: mol_type = other DNA
caaagcataatgtctttttcatcagatcatttctggtatcacttggaaggcccctcttttaacttcctgatagagctttttcttccctgcttctttagtctccatgtaatggaggcttat

SEQ ID NO: 15088 - DNA, 120 bp, synthetic construct
  source 1..120: mol_type = other DNA
gcagatagactacaagtttctgaaccttattgcttagagcatcctctgtgatattaaaggaggaaatcaaggttgtcttaggatcccgagcaaggttaacactggcaccatttattgagc

SEQ ID NO: 15089 - DNA, 120 bp, synthetic construct
  source 1..120: mol_type = other DNA
cacatagcttgttcacctgcacttaaattttctttacccctggatttcgttggtctagtataagcagatcaaaagctcttcccaaccccatgccatttgactgaaattcatttctggctg

SEQ ID NO: 15090 - DNA, 120 bp, synthetic construct
  source 1..120: mol_type = other DNA
acaccagaaccttactaaggtagaagagttcaagtctgtggttaaaccagctaggtcaccattgatgatgtgagctctgtgttctcatttctcatttctgaactctatggtaactgcgaa

SEQ ID NO: 15091 - DNA, 120 bp, synthetic construct
  source 1..120: mol_type = other DNA
tccttcagatgataagcgctagcaaaggtgatttccctagtttctggatgggcttatgtaacttccacaaagatatcatgctgtgacatacagccattattaaagagccctgctaaggcc

SEQ ID NO: 15092 - DNA, 120 bp, synthetic construct
  source 1..120: mol_type = other DNA
gaaagaacacgcactggatactgcagctacataacaggaaggcactgacaggccttcattaggatcttactcctcttttctggtaaatgaaactgaaaccactgacagctaatactaaaa

SEQ ID NO: 15093 - DNA, 120 bp, synthetic construct
  source 1..120: mol_type = other DNA
ggatgctgtatggtgttcaagtacatttggatatgctgcacgttaaactatttcctggaatttaaatatattaaaaaggccctaagaagttggcacaattttaatccatgattcccagac

SEQ ID NO: 15094 - DNA, 120 bp, synthetic construct
  source 1..120: mol_type = other DNA
tagtgaataaaaagagataatctttttttttttttgagacagggtctcactttctcactttgttgcccaggatagagtgcagtggcatgataacggattactgcagcctccacctcctgg

SEQ ID NO: 15095 - DNA, 120 bp, synthetic construct
  source 1..120: mol_type = other DNA
ccacccacagtgctggcattacaggtatgagccaccaagcccagccaaatcaccttttttagaacataagctttcatgggtaacaattatttagttaatagtctaacatcctgtggattc

SEQ ID NO: 15096 - DNA, 120 bp, synthetic construct
  source 1..120: mol_type = other DNA
gaagaggacttccttaaggacagattaaggtgtctctgaggacacatgctgagtatagagaaaggatggcaattagcaacttgattctcttgaacaggggacacttccgcatgtgttttt

SEQ ID NO: 15097 - DNA, 120 bp, synthetic construct
  source 1..120: mol_type = other DNA
ggatctgagtggagtgctagccgccccccgctcctgcctgctcaccccgcctgggggctctactcaccaccatgcttgtcggcagccccgagctcctggggggctggggctcctggactg

SEQ ID NO: 15098 - DNA, 120 bp, synthetic construct
  source 1..120: mol_type = other DNA
actattcccattttaaagaggcccagaaagatccagtgacctatcttaagttgttggtggggggggggtggggcgggaggctgaagggtcagatctcacctcctgcgacattttcctcat

SEQ ID NO: 15099 - DNA, 120 bp, synthetic construct
  source 1..120: mol_type = other DNA
atgatacattcacatagtccaaaactcggaaggtatcaaagggaagtatctcccagccaccctgctgctctctcctgagttgtttacgaacacttgcagacatgttttatgtatattatc

SEQ ID NO: 15100 - DNA, 120 bp, synthetic construct
  source 1..120: mol_type = other DNA
cgtcaggagtagtatggactgtggcagcggtcttgtcgtcggaggggatctgtggctgggttagcgggccatgacccggtacgtctttacctttttcttggctgcagctaatttactctg

SEQ ID NO: 15101 - DNA, 120 bp, synthetic construct
  source 1..120: mol_type = other DNA
ggaagtgtgagccatcacacccggccggcttcatttcagaactctttccccagcactccatatactatgaataattcctttcttcttctttggatagcattttagtcatatctctattac

SEQ ID NO: 15102 - DNA, 120 bp, synthetic construct
  source 1..120: mol_type = other DNA
accacactataggtcttcagagctcaagtcctatcctaaatactgtgaaattaatgttctgtgaggttttgaaagtactagggccagagacaatatggctgcttggatgactttccatcc

SEQ ID NO: 15103 - DNA, 120 bp, synthetic construct
  source 1..120: mol_type = other DNA
taaaatgtctttctaagtcccaaattaatacttgtggcactttcaaggtggctcctggatagacatgcagtagtgaaaactctgtcactctttgcacacgtcccaagctaaggtcaaaca

SEQ ID NO: 15104 - DNA, 120 bp, synthetic construct
  source 1..120: mol_type = other DNA
ttgttagaatgtttgggaaagacattctaaaagggcaagaaagaccttgatcttttttgtgtaactgattgactggttgactgactgagatgggatctcattatgtagcccaggctggtc

SEQ ID NO: 15105 - DNA, 120 bp, synthetic construct
  source 1..120: mol_type = other DNA
cttccaagtttctagacagcctgatagaaggtagtcgaaagcaaatacttcaagcactagccatcacaattaccttaggtatttacgctacccttctacgagtctctgaatatttcgagg

SEQ ID NO: 15106 - DNA, 120 bp, synthetic construct
  source 1..120: mol_type = other DNA
tggtggctcacgcctgtaatcccagcacctcgggattattgatgaataaatcaatttgggaaatgcttggtaaattcaacgggacctctcagaacaatgaatttatatggccacgatgtt

SEQ ID NO: 15107 - DNA, 120 bp, synthetic construct
  source 1..120: mol_type = other DNA
ccttctgtcacctttagaacttccatttctctcactttccaatataattttaatatctcctcctgggattccactaagacgtattttagacctcattctgatctccctctccccgccaac

SEQ ID NO: 15108 - DNA, 120 bp, synthetic construct
  source 1..120: mol_type = other DNA
gagaatgtcaggattacacaaggttctcaaatttggctccccaaccttgctcatttatatacagaagactagactgcttagtataggtgatgactcacttcctcctaccctggaaaaaac

SEQ ID NO: 15109 - DNA, 120 bp, synthetic construct
  source 1..120: mol_type = other DNA
ttctttgtacgatgaccggttctgtcgagtaggcactgcttcagccctacaggaaggaaaaaacatctctagaaaacagcagcattcctgattcccacttgaggaggcctaacaaaacgg

SEQ ID NO: 15110 - DNA, 120 bp, synthetic construct
  source 1..120: mol_type = other DNA
cctgtacatctttccaagtcatacctgctattctccaaagtctgtgaatcccgacactaataacttggaaattcagtttaaggtcctcttcagaaggtcagttagctcaaggcatcacat

SEQ ID NO: 15111 - DNA, 120 bp, synthetic construct
  source 1..120: mol_type = other DNA
ttaggcctgcgtgctttattcgttaccccgtatgaatccataaagaagtagccattagcaaattcaggcaatacataccggattcatacttcaggaagacaacccagttgacaacgacaa

SEQ ID NO: 15112 - DNA, 120 bp, synthetic construct
  source 1..120: mol_type = other DNA
ctccactgcaggcgatattgcctccactaagaatgtatgccctaaccaacattagttttccctattgttgaactctatatagaggaaattgtacaaaataggttttggggctctggtctc

SEQ ID NO: 15113 - DNA, 120 bp, synthetic construct
  source 1..120: mol_type = other DNA
ttttcgtttgtttgtttgtttgtttgttttaagagacaaggtgtctcgctctctcacccagggtggaatataatggtgcaatcacagctcatgtgcagccttaacgtctccaagctcaaa

SEQ ID NO: 15114 - DNA, 120 bp, synthetic construct
  source 1..120: mol_type = other DNA
cgaagatctcacttcctagatatgtaaccatgacctcatttcctatctataaaatatgagaagtttctcctatctctaaactatgaagagcacctatttcacacagcggctatgaagact

SEQ ID NO: 15115 - DNA, 120 bp, synthetic construct
  source 1..120: mol_type = other DNA
aaggaaagtaagcagagaaaacagcataaacaggctggaaaggggcatatacagggatcagcaggtggttccaggatgtgaacagcagatgaacagggtaaaaagtggctgttcatagat

SEQ ID NO: 15116 - DNA, 120 bp, synthetic construct
  source 1..120: mol_type = other DNA
tatctatcctacggggagagaggaaaagcccccacattccattcaagaggctcccaccttctatatcctacattttatttaaaagctacactctgggtaaagcagatttcaaagctttac

SEQ ID NO: 15117 - DNA, 120 bp, synthetic construct
  source 1..120: mol_type = other DNA
gcggcaggaaatgaaaagtgctcagtgattggtgggatagtggtgtctagcacaatgattcctgccaaaatcttaatggtggttgggcatagtggctcaagcttgtaatcccagcacttt

SEQ ID NO: 15118 - DNA, 120 bp, synthetic construct
  source 1..120: mol_type = other DNA
atgaagttacttaaaaattcaagtatttagagtttcagggcccatcgtcttgatttttggggcaatacctcaatttcatactgtgttattcttttccagagagatgggtcactgaataac

SEQ ID NO: 15119 - DNA, 120 bp, synthetic construct
  source 1..120: mol_type = other DNA
tacacaccacacaccaaccacacacattacacacactgcatacatatcacacaccacaaacactacaccacgcacacaaaacatacatacacgctcaagccttccacactacattacact

SEQ ID NO: 15120 - DNA, 120 bp, synthetic construct
  source 1..120: mol_type = other DNA
ctcactgtagtacgtgttgccctgcctctttaaaaatgccaccaactcttccagcacgtgaactctgccgtcatttttttaaacattctcttatttatgggtacttaggttgtttccagt

SEQ ID NO: 15121 - DNA, 120 bp, synthetic construct
  source 1..120: mol_type = other DNA
agtatgaccagcatcaccagcaccagtgaggccatccccgagcatggacctgagccagggcctgcggactctgcagagggctgcccacccatcaaggccagctgcagccccagcaggcaa

SEQ ID NO: 15122 - DNA, 120 bp, synthetic construct
  source 1..120: mol_type = other DNA
tgtggcggcatcactcatttaccctcgtctcatcagcctctgtccttcggctcatctgcttgcaggtggcctctgattctgcctctggagcctgtctgccccctcttgattcattcattg

SEQ ID NO: 15123 - DNA, 120 bp, synthetic construct
  source 1..120: mol_type = other DNA
aaatatccaaactgtatcacccacaaagaagcaaaaacattttgggccaaatcaaaactattttgatgtagccacagtagggatgagctgtgattacacccattcaggcctgtggacctg

SEQ ID NO: 15124 - DNA, 120 bp, synthetic construct
  source 1..120: mol_type = other DNA
tgtcattaaactatgcacacagggcttcttgcttttaagttagcaggatggaaaaattgcaggtgtttgcagcaaacatgaagaaccagccatgctggcccctaagcaatggtattacaa

SEQ ID NO: 15125 - DNA, 120 bp, synthetic construct
  source 1..120: mol_type = other DNA
gtgtgatctcggctcactgcagctgaagggctatattaagtttcatttatccattcatccactgagggacatttgagttgtttctaccttttgattaatgtgaattctgctgctgtgacc

SEQ ID NO: 15126 - DNA, 120 bp, synthetic construct
  source 1..120: mol_type = other DNA
catttgtcatcttttttaaaatgcccccttttgttcattcatatttgagagaaggactaaaagactgactgggaggctgggtgtggtagctcacatctataatctcagtgctttgggagg

SEQ ID NO: 15127 - DNA, 120 bp, synthetic construct
  source 1..120: mol_type = other DNA
cagtgttcagttttccttctgtaagacacctgcaacctgtgtttttcacagaatagaccatggacttaaagcataaagagctactttgtttttcatgattgtgccttcaattctatgtag

SEQ ID NO: 15128 - DNA, 120 bp, synthetic construct
  source 1..120: mol_type = other DNA
tccatttaaatgcaaatttcggaacaaagatctgtgtctctgcactgaccaaatagaaggtatgtgaatgttatggtcttgattgttttacaagattttttctgcaggtacttttgcaag

SEQ ID NO: 15129 - DNA, 120 bp, synthetic construct
  source 1..120: mol_type = other DNA
tcgggtaaccacgagcctggggtatcacaaagagaagcctcagtgtaaaatcaacaatctcagtggagtggcttcatcagggagtgacaggggcgtgatttactactggaggacaaggca

SEQ ID NO: 15130 - DNA, 120 bp, synthetic construct
  source 1..120: mol_type = other DNA
cactcgaaataaaacccatcccattaggaacactgtcattgcagcccatctccagcactctgctctgtataaaagactgactgtggcaagataagggtttaaaattgaaaatcaaagagc

SEQ ID NO: 15131 - DNA, 120 bp, synthetic construct
  source 1..120: mol_type = other DNA
tctatctacatgaaattaacctcacgtataaaacatattcctggttcattggcaaacaggcagctctgagcagcacattcagaagttgccaactttgggaggcagaggagttcgagatca

SEQ ID NO: 15132 - DNA, 120 bp, synthetic construct
  source 1..120: mol_type = other DNA
ctccgcctccaccggctctgaagacagcacagacaactgttccacctcttccacttccactgagcagaggaactgcgtctgaatgaagccagaaatggggcatttggggaccgcaacaga

SEQ ID NO: 15133 - DNA, 120 bp, synthetic construct
  source 1..120: mol_type = other DNA
caccataaaacccacagagcaaccttaatcaaaatcccaatcagaatatgggatgaatttagtttattctaaagtttatctagcggccgggtagggtggctcatgcctgtaatcccagaa

SEQ ID NO: 15134 - DNA, 120 bp, synthetic construct
  source 1..120: mol_type = other DNA
ttgccagagatgtctttaaacaaattcaaaggacaagtggcatctgagagaaaatatccgcaatatatatagaaaatgaggaataaccctgtgtaccaagaacacctagaaatcaacaag

SEQ ID NO: 15135 - DNA, 120 bp, synthetic construct
  source 1..120: mol_type = other DNA
gttgaggaactgggggagggcttggtttcaacctatttgccaaatcaccagcaaaacaagacatgttcaaaagaaacaagtgcacataaataagccagggctctactccccagcccatca

SEQ ID NO: 15136 - DNA, 120 bp, synthetic construct
  source 1..120: mol_type = other DNA
ccaccggctctgaagacagcacagacaactgttccacctcttccacttccactgagcagaggaactgcgtctgaatgaagccagaaatggggcatttggggaccgcaacagagaatggat

SEQ ID NO: 15137 - DNA, 120 bp, synthetic construct
  source 1..120: mol_type = other DNA
aaagaagaggaatgaagaggtaatggccctttaagataactaagtcttaccaaaagccaccgtaacttacacggtagatagtggcacaacaataaagcagtaaattagaatggagaaccc

SEQ ID NO: 15138 - DNA, 120 bp, synthetic construct
  source 1..120: mol_type = other DNA
atttggcaatatctgttgacactctgaatgcccaaaccattcagccccgcaagtccacttctaggaatctatgctacgaaaacaaccccacgcagatgcaagggtttaatgtacgagact

SEQ ID NO: 15139 - DNA, 120 bp, synthetic construct
  source 1..120: mol_type = other DNA
agtataaccagcatgaaaagaaatttcacatacacagaaatgtaggatactaatggttgaaagcccagagccttttctttcctctctgacatatctcctcttttttggggggggtggggg

SEQ ID NO: 15140 - DNA, 120 bp, synthetic construct
  source 1..120: mol_type = other DNA
aagcaaggcaagctttggggacaagctggatccacactcatgttagtatagaggaagaggaggaaaaaatttaagaggtggactggaaaaaaggttaaggcagctttaagacttttctgg

SEQ ID NO: 15141 - DNA, 120 bp, synthetic construct
  source 1..120: mol_type = other DNA
gatagactttgaagtaacagtcattgagcagctcattagctgagtgatgtattagagggaggcttcctgattggagtgaatgtatttcaatttatttatatgtaaaacaacaaagatgtt

SEQ ID NO: 15142 - DNA, 120 bp, synthetic construct
  source 1..120: mol_type = other DNA
agagatagtctattctgtcacttaaggactgatttctgtttgtttgaaaaatgtccttttgttttaatttcattcccaatatatagccataggaatcatagcaaagaccaaagactaggt

SEQ ID NO: 15143 - DNA, 120 bp, synthetic construct
  source 1..120: mol_type = other DNA
acaaaaagaaaagagtaaagcactataaagcctattgggaactacagtcgttattagggatggttaatgtcaggttttggagctggccgatgtgctgtggcaattcttaatgccaacgtg

SEQ ID NO: 15144 - DNA, 120 bp, synthetic construct
  source 1..120: mol_type = other DNA
gtccctttccaaacacctgacagatacagaaaagtgaagagtgattagaacagggattgaagaccatcattcatgcattttctttaataaacattcagcactttgtatatgtcaggtact

SEQ ID NO: 15145 - DNA, 120 bp, synthetic construct
  source 1..120: mol_type = other DNA
gctataagtacatttcagaaaaattaataaaaataagcaaggtaattatttatcagcttattctaattcagagtctcaagtggccagagtctatctgtgcagctcagagtcccaggtggg

SEQ ID NO: 15146 - DNA, 120 bp, synthetic construct
  source 1..120: mol_type = other DNA
gttttaagccatttggtttgtaggagtttgttacagcagtcttaggaaactaatgcggccaagctctatgctgtagaataggtagaaatgagaaaaataagatataaagtttcattattt

SEQ ID NO: 15147 - DNA, 120 bp, synthetic construct
  source 1..120: mol_type = other DNA
ggtttaacacttttgagttatttgaatatacgggcaaccaacagtaggcaagagggttctacagaatgccaagaaatcaaacacagaatttagatgaactgggcagaggcaggaagtgac

SEQ ID NO: 15148 - DNA, 120 bp, synthetic construct
  source 1..120: mol_type = other DNA
ttttgatgaagtcattgatcctcagtttccatttctgtaaaatggggctaacattctctcgctttcagggtttatgtgagggtccactgaagtgctttaggtgagagttccctataaact

SEQ ID NO: 15149 - DNA, 120 bp, synthetic construct
  source 1..120: mol_type = other DNA
cttctttagtctaacttggtcatgaaagaaagaaagaagaaaagtgaaagagaagggaagagggagaaagaaagaaggaaaggaggggaaggaaaagagagggaaggagggagagaagga

SEQ ID NO: 15150 - DNA, 120 bp, synthetic construct
  source 1..120: mol_type = other DNA
atttccatggatattttaagcatccaaacaaaaagagggaaaattaatgcagagaaacacaatagtttcccagagctttccataaggggcatttgcagcactcacgatctcaggaaatga

SEQ ID NO: 15151 - DNA, 120 bp, synthetic construct
  source 1..120: mol_type = other DNA
aagaaggggtttcaaaaccagtttagtttccaaaaagtgtacatttgtggggggggggggtctaatttgagagcgagagtgtgtatgtgtgtgtgtgtaagtgtgtggatttttttatca

SEQ ID NO: 15152 - DNA, 120 bp, synthetic construct
  source 1..120: mol_type = other DNA
ccagctacatgtcctctgtgaggactaaccattaaaatgcagaaatacatttacttcactacggctgctttatgggaatgggcagtttacttaaagaataaaaccagtagtgctgggcgt

SEQ ID NO: 15153 - DNA, 120 bp, synthetic construct
  source 1..120: mol_type = other DNA
gatgtaaattgtagaatggcatacagaacttcttgatagtatgattttacctcagttgggtttcattgcgtctatattgatataagtgtttttactcctgtactgagttcaggctgtctt

SEQ ID NO: 15154 - DNA, 120 bp, synthetic construct
  source 1..120: mol_type = other DNA
cattaactgaaccttcatctggcaatggttcccaaatgtttcctaggggagggcacataagaattactgtgagagatggtttagaaaaacaaaaacagattttggagcctgacccacaga

SEQ ID NO: 15155 - DNA, 120 bp, synthetic construct
  source 1..120: mol_type = other DNA
aaaatgtcactggctcaactgagctccagggaaatgactcagatcagatcagagcctacgatccctacccctagtcttttcttgaccctattatcccctccctttcctcagaaagacagt

SEQ ID NO: 15156 - DNA, 120 bp, synthetic construct
  source 1..120: mol_type = other DNA
gcattctttcacaggagcttttcatgcatttgacaaggatggagatggtatcatcaagctcaacgttctggaggtaaagcataggcacagcacattccccctacacattaaaactcaagg

SEQ ID NO: 15157 - DNA, 120 bp, synthetic construct
  source 1..120: mol_type = other DNA
ctccttgtgctagagccctccatcaccttcacgctgtcccaccatgggccaggaaccaaaccagcactgggttctactgctgtggggtaaactaactcagtggaatagggctggttactt

SEQ ID NO: 15158 - DNA, 120 bp, synthetic construct
  source 1..120: mol_type = other DNA
agaggctggaaagagtagcgggaacggggagatagggaaagatttgttaaaggatacaaaattacagctagagagaaggaataacttctagtgttccatagcactataggatgattacag

SEQ ID NO: 15159 - DNA, 120 bp, synthetic construct
  source 1..120: mol_type = other DNA
cttaaacaattcattttgatcacgctagagatcagaatatttcgagagaaatgaggaagcaaagaaaagaacccaacacagagaacccactgcacaagaagggtggtaggagacagaagc

SEQ ID NO: 15160 - DNA, 120 bp, synthetic construct
  source 1..120: mol_type = other DNA
gatagatagctacagagtgcactgtactctccttctgcagaatctgcaagagaataaaaatacatttaataagcacattattcttacctggtcaatctgtgcattagagtttcttcactg

SEQ ID NO: 15161 - DNA, 120 bp, synthetic construct
  source 1..120: mol_type = other DNA
aatggaatcttctttcccaggcatttctgatgtattgtcatacatgagtttatgagtttcaatgaagtttttctgtaaggcagacatctgagccatgatcttctggcgatgtagcctagc

SEQ ID NO: 15162 - DNA, 120 bp, synthetic construct
  source 1..120: mol_type = other DNA
aggttcatgatttacacaaaaagggccagttttccatgcctctgtgtctccacagtcacagaaccctcctccagtagaagtatgcatctgataaaggaaaaatgagtttgtcttgatttc

SEQ ID NO: 15163 - DNA, 120 bp, synthetic construct
  source 1..120: mol_type = other DNA
ctaagtgctgctagcttagtttggccttgatttcttgacttgatgatttacacaaccttctcatcttcaatccagtggttctcaagactggatgcatgttagaatcaagtggggagcttt

SEQ ID NO: 15164 - DNA, 120 bp, synthetic construct
  source 1..120: mol_type = other DNA
taatttagttccccacaattaacatgatatttggagaacttaaaggttccaatagagagcaacagaaacttaggtttaaagaatggatcttggccgggcgcggtggctcacgcctgtaat

SEQ ID NO: 15165 - DNA, 120 bp, synthetic construct
  source 1..120: mol_type = other DNA
tgtggacttatcaagaggtaatatgaataccagaggctaaactacatgtcaacaaccacatattctgcaatttccacttactcctgaaatccctttcccactcactattcccaaccctac

SEQ ID NO: 15166 - DNA, 120 bp, synthetic construct
  source 1..120: mol_type = other DNA
tctctagctcctcagagtggctagaaaaacatttggatttgaagatggtggtagtagagggttagagtgataagaacagattccaaggcaagagattactcctgtattgaacagaactgg

SEQ ID NO: 15167 - DNA, 120 bp, synthetic construct
  source 1..120: mol_type = other DNA
gtattaggcagttggcacaggagactggcaggaaaccaggtgtagaactcctttaaaacggtatgtgtggaaaatggaatcagtatgtgaaaataccaatattgactaaccatcctgtac

SEQ ID NO: 15168 - DNA, 120 bp, synthetic construct
  source 1..120: mol_type = other DNA
tgtgacttacctgcaactacagacaaaacatccactttgtaattgctggtcagtcaagcaagatcttggccatggagaagagccttcatatttcttgagggtcaaattgaatctagataa

SEQ ID NO: 15169 - DNA, 120 bp, synthetic construct
  source 1..120: mol_type = other DNA
acaaataaggataccaaggataaaactttgaaagagagtgagcctgggttctcctgctataccctacaaagagaccatacccttcaatttatggtttacagagatctccaagctctccca

SEQ ID NO: 15170 - DNA, 120 bp, synthetic construct
  source 1..120: mol_type = other DNA
cagtgtcgaaactcagagttaagtgtctagaggtgacatggtgaggaggaatgacattgagtcagaagcaaacgtaccgttagtcggatgctttgcaaacgacacagaaaatcgttttac

SEQ ID NO: 15171 - DNA, 120 bp, synthetic construct
  source 1..120: mol_type = other DNA
tatcacacagaactatacacaacttcacatgataacatcaagacacacatgcagccattcagagccaccaccatgtggccattccacataaccacaaatggctttacacttctccatagt

SEQ ID NO: 15172 - DNA, 120 bp, synthetic construct
  source 1..120: mol_type = other DNA
gaagaaactgagatccaaaagggacctcctttgctcaaggtcacatagttttttagaagctaagctggactagaatccaggtctcctgactctgaggaccaactgtattgttagaaaata

SEQ ID NO: 15173 - DNA, 120 bp, synthetic construct
  source 1..120: mol_type = other DNA
agcaacttcctccacctttcatgttcaaacaggctctggaatgagattccagagagtaataacagttgctaaatatgactgcttttcttcagagaagctaaaactagctggctctatccc

SEQ ID NO: 15174 - DNA, 120 bp, synthetic construct
  source 1..120: mol_type = other DNA
gttaccaaaacctttctcccccttgctagtccaaaagctgaccattttggggccaagaaaatggctgccaaggacaaaggcaacagaacaattagaggcgctaaatagagagaataatag

SEQ ID NO: 15175 - DNA, 120 bp, synthetic construct
  source 1..120: mol_type = other DNA
taatcattttgccacctcaaccccaaagtataaaactcaggtcctggattcctgtccctacaaagccaagcaatgttagaaagtttggaagtaccaaaggatttataggggaagagggat

SEQ ID NO: 15176 - DNA, 120 bp, synthetic construct
  source 1..120: mol_type = other DNA
gataaacattaacattagtatcataaggctttgtgaccaaggagcagagagatgattttcttgcaaagctgaggaaaatatcctggacaaccatcaccctggataagccagggtctaagc

SEQ ID NO: 15177 - DNA, 120 bp, synthetic construct
  source 1..120: mol_type = other DNA
gggtgaacacggtcattaggacagagcagaatctaaatcagacagtcaaagtctctgagacagggataaattgtggtgtcaaaatgaatgtaagtgatacagaaagagcaagatagggga

SEQ ID NO: 15178 - DNA, 120 bp, synthetic construct
  source 1..120: mol_type = other DNA
aggttctccatactgccttggttggttttcatctcctcattctatacaacaaaaggcagataagagaggtgttaatggcctccaaaatcctaatcccagactacctagcccttttacttc

SEQ ID NO: 15179 - DNA, 120 bp, synthetic construct
  source 1..120: mol_type = other DNA
gtggagccgtatgcagaaggtatatgtataaccatgtttgaggaaataagactcataacattgtcccaaattccatactcttctaatgccagagctgtgttctaggttacctctctggct

SEQ ID NO: 15180 - DNA, 120 bp, synthetic construct
  source 1..120: mol_type = other DNA
agtggaagacagaagcccacagcaatttccagtttctcctcccgactgatcccgtactcctaggggccacaggccaggaataaatacctcaataaatcttgttttctcatgcctcatatt

SEQ ID NO: 15181 - DNA, 120 bp, synthetic construct
  source 1..120: mol_type = other DNA
attcttaggttactgggcatactagcagttctaggccttcaggtaagggcactgctctagcatatagtcgtctaagagggattgattttaagagtccagagaaaataaaacagacctaag

SEQ ID NO: 15182 - DNA, 120 bp, synthetic construct
  source 1..120: mol_type = other DNA
cttcggtttgtattagctggatgacatgaggaaaattgcttagattcttctgagcctaggtttcctcatctgtaaaatgggaggaaagtccttgtggtctacagtccttgtagtgcttta

SEQ ID NO: 15183 - DNA, 120 bp, synthetic construct
  source 1..120: mol_type = other DNA
ttcatgttggcactcttcaccatttgcaccaaaatgggtgtcagctccccttctagagccagaaggccctaaagagaaagcacaaggtctatttgtttcccttgcaggttagcatcccta

SEQ ID NO: 15184 - DNA, 120 bp, synthetic construct
  source 1..120: mol_type = other DNA
atcttaccttgcccctcattagaagcttttactccatgagggtagtaagtcaattgtaccttccggtttatacctgagaagtgaccatacctgcaggataaagtcacagtttatgttctg

SEQ ID NO: 15185 - DNA, 120 bp, synthetic construct
  source 1..120: mol_type = other DNA
tataaataaatacaaggaatgacaaacaccaaattatggattgtggttccctctggggatggggaggggatgttactagggaggagtacataggggcttcgattatatacacacacacac

SEQ ID NO: 15186 - DNA, 120 bp, synthetic construct
  source 1..120: mol_type = other DNA
cacctgcaggtacatagcatcactgagtatgcccacagctcaccctgtatatgagaagacaatatgagcactaggtctgtagacgagtttcagagtaaaacaacaacaacaaaaacaaaa

SEQ ID NO: 15187 - DNA, 120 bp, synthetic construct
  source 1..120: mol_type = other DNA
taaaatctctatataacaggtccaaccctctgtccgaagactcatggctctaaccccacccataatccaataaccaaaaccccacatagataggtggtatacaggagatgtctagaagat

SEQ ID NO: 15188 - DNA, 120 bp, synthetic construct
  source 1..120: mol_type = other DNA
tttccacaggttcattaaggattacatcttctcccagaatgacaacagtcaggtagtcaaatctgcagagtcgctctaggatttgagtcattggcttggacttggatttcttggtcatgg

SEQ ID NO: 15189 - DNA, 120 bp, synthetic construct
  source 1..120: mol_type = other DNA
taggatagggcctgtttatgacagggagtctatgcattcggaaagaacagagaggtatctctaaccaatagaatcttaactctttaggacagaggctccaaccccaagttacatcatttt

SEQ ID NO: 15190 - DNA, 120 bp, synthetic construct
  source 1..120: mol_type = other DNA
ttcttcccaaagattaactcaaaaaatatttattgagggcaccctacattctaagcattatatcagaacattaaggccaggcacactggcttacacctataatctcggcgctttgggagg

SEQ ID NO: 15191 - DNA, 120 bp, synthetic construct
  source 1..120: mol_type = other DNA
ctcacaaccaagaattatccagccttaaatctcagtagtgctgaggtagagaaaccctgctgtagagaaattctcctacataagacttttgtgaggaacttcttaatcctcttcatctct

SEQ ID NO: 15192 - DNA, 120 bp, synthetic construct
  source 1..120: mol_type = other DNA
aaaaaataaacagaaagaaagttctagcggacctttatatagacctcgacctctcgacctttccagttttcattatctgctgtctttatttctcaactgccacgggggtgcgacattctc

SEQ ID NO: 15193 - DNA, 120 bp, synthetic construct
  source 1..120: mol_type = other DNA
aatttcctaaatcactatgcacttgatggtggactccattggtagcgaagaggaaatatcaatacaaattccaggcaggaatacttccaacacagaaaaactcctcaggccaccaacact

SEQ ID NO: 15194 - DNA, 120 bp, synthetic construct
  source 1..120: mol_type = other DNA
gaacctgcaggcagcgacacctgacagcggcccaatcaaagcgcgacttctttgcggttccaccaatcagcgaagggcgcgcaccggtaacagagtcaggctgcgttggccggcgcttct

SEQ ID NO: 15195 - DNA, 120 bp, synthetic construct
  source 1..120: mol_type = other DNA
cccagcctggtgagaaagccagactccttctcaaaaaaaaaaaaagaacccaaaaaaaccccccaaaaacctaattaaggccaattgtagtggctcgcgcctacaatcccagtacgttgg

SEQ ID NO: 15196 - DNA, 120 bp, synthetic construct
  source 1..120: mol_type = other DNA
tattgttcacatttgggaagctactctctaaacttgggtaatttctctactcctctggctgtcttatttctccttcggtaattatctcttcccacttcctattccttagtaacaccctct

SEQ ID NO: 15197 - DNA, 120 bp, synthetic construct
  source 1..120: mol_type = other DNA
gaaaacgcagagggcatcctgtgagcagcaaacacatctgagcctggaaaagacgcagagaagtaaaagatcaaaggtgaggtaggggacgtggaggaaagtgggagagacaaaaggaaa

SEQ ID NO: 15198 - DNA, 120 bp, synthetic construct
  source 1..120: mol_type = other DNA
ccctcggtctatccggttgcatcctccctccctgttccggatcttatcttgcgccagcgcctactccaggatcccgtagccagacctcaagccatggctggtcccttctcccgtctgctg

SEQ ID NO: 15199 - DNA, 120 bp, synthetic construct
  source 1..120: mol_type = other DNA
catacttaagttttctgaaccagtgaaatcaatgcacaattgaagtctggggagggattccctctccttaaccatctctccctcttaactccccttaggtatttgctgacctgtttgacc

SEQ ID NO: 15200 - DNA, 120 bp, synthetic construct
  source 1..120: mol_type = other DNA
ttcttaacccaagtcccgttactcttcccaggaccactttctgtttgataagcctgtgtccccgttgctgactgcagcaggaatggctcgagactggccagatgctcgtggaatttggta

SEQ ID NO: 15201 - DNA, 120 bp, synthetic construct
  source 1..120: mol_type = other DNA
gactatgagtgggtagggaagtacctttaaattatatgcctcagtttcctcatctgtaaaattgggataatgagattttctacattttaggttgttgtggggattaagtgaaatacaggt

SEQ ID NO: 15202 - DNA, 120 bp, synthetic construct
  source 1..120: mol_type = other DNA
ttcatgtggaatgagcgtttgggatacatcttgacctgtccatctaacctgggcactggacttcgggcaggagtgcacatcaaactgcccctgctaagcaaagtaaaggagttgtggggt

SEQ ID NO: 15203 - DNA, 120 bp, synthetic construct
  source 1..120: mol_type = other DNA
agtaaactatttgattgattgtgaacggcgtctggagagaggccaggatatccgcatccccacacctgtcatccacaccaagcattaactccccatcgccagctgatgactcaagattcc

SEQ ID NO: 15204 - DNA, 120 bp, synthetic construct
  source 1..120: mol_type = other DNA
atcagtgcatgcatgtagtccccattgggccctggctctcctgtggtcaccccagtccattaatacttacagcaaatttaggaggagggatgacagaaatggcaagaggagtaacgccct

SEQ ID NO: 15205 - DNA, 120 bp, synthetic construct
  source 1..120: mol_type = other DNA
tgttactgggttatattctgttactattaagacctaaggagtcatggggaaggctgaggactcagaaaagaaaaggaaagaaaaagaggaagcctccaggaaaagaggtaggagacagta

SEQ ID NO: 15206 - DNA, 120 bp, synthetic construct
  source 1..120: mol_type = other DNA
atgcatttactcccttcccttcttccttcatctcaccctggggatcaaggaaattgcctcagtagacagagtgaatactaggcgtccagcttgctctacttcatcctggctccacaactc

SEQ ID NO: 15207 - DNA, 120 bp, synthetic construct
  source 1..120: mol_type = other DNA
aggttttgtagtgccctctctgccagggctgcctggtggaggggggtcagtgccagcagctgctctggagctctttgcaccagctccaccaccaacataatggattcattggatagtctg

SEQ ID NO: 15208 - DNA, 120 bp, synthetic construct
  source 1..120: mol_type = other DNA
gactgtaacaccagcattttcctatcctgacttacagtgcggatggcaacggggtggtggtaggggtaaaatgagaaaagcagcatatgagtaacatactaataaatttctccatgggta

SEQ ID NO: 15209 - DNA, 120 bp, synthetic construct
  source 1..120: mol_type = other DNA
tgtgggtgtgtgagtggggagaggctcattcaacacatacaacagcctgtttgctccttgatatcagtactctcaacacaagtacagatgttcatccaccgtaatttatggtttgagaaa

SEQ ID NO: 15210 - DNA, 120 bp, synthetic construct
  source 1..120: mol_type = other DNA
aatccaggttttctgagtcctttggctctagtcaggataggcatggcactgtggaaggaaaggagggcaaagggaggtgctaggagaacgtccacgaggcagggactatgcatcattcat

SEQ ID NO: 15211 - DNA, 120 bp, synthetic construct
  source 1..120: mol_type = other DNA
gcaacagagtgagactgtatctcaaacaatcaaataaaggatagtagggataagctggccaaatagggctaagggataggtaaagaaggtagactacattgagggaggaagttctgaaat

SEQ ID NO: 15212 - DNA, 120 bp, synthetic construct
  source 1..120: mol_type = other DNA
tgtgtaagtggggaggtatgaaaggccttccctggcctcagggaagatgccttcctcccaaccagaaagagccggtatccctgattatctcatcctccttgccactctcatacccgaaag

SEQ ID NO: 15213 - DNA, 120 bp, synthetic construct
  source 1..120: mol_type = other DNA
ctccagatgagcgcaacacacccagaagttcatatgccacctgtaaccaaagaaggtttaggactggagagaaaagacagatgaaccttgaacttcctctctaatcccacatctgaattt

SEQ ID NO: 15214 - DNA, 120 bp, synthetic construct
  source 1..120: mol_type = other DNA
ccactgagagacatgccattgactctttgtccccactagcagaagatgggccagtcaagtaaagaagatgattctcatacctggtgagggctgagctgcaaaaagttctccagagggagg

SEQ ID NO: 15215 - DNA, 120 bp, synthetic construct
  source 1..120: mol_type = other DNA
tggtggtacctgtaggggcacaggaatggattctgcctctggagatgctcagtatccctgccatttcctctctggagttcctcctcccactaaagcaagccctctgaacactaggctcca

SEQ ID NO: 15216 - DNA, 120 bp, synthetic construct
  source 1..120: mol_type = other DNA
ctgccagcctccaattctcactctctaggggaaaaatttagagtcctctaacttgatcctttttctttctggtgcagaaagtgagagagtcaaagagcccaaaagaataacaaggtaata

SEQ ID NO: 15217 - DNA, 120 bp, synthetic construct
  source 1..120: mol_type = other DNA
agcagcccttctaggaagcaagtgtcattgcccccacgacttatcctgcattggcctgctagccaaggccagaagggcaccaggacctcatacatggtgtcattggcacagaccatcacc

SEQ ID NO: 15218 - DNA, 120 bp, synthetic construct
  source 1..120: mol_type = other DNA
gcaagcataggcttttctacaagcgaggtccctgagagtttaggcgttactggttgaaatgctgcaacggggcaaaaaagagaaagctgccctgccaaggtccaaaatcacctaggagaa

SEQ ID NO: 15219 - DNA, 120 bp, synthetic construct
  source 1..120: mol_type = other DNA
aaagagcctccttggagcctagctcccctgttggggtaagcaaacccaacagaccctgcaaaaagtgaggagctgcctccctcccatcgaggcctgtggcattggtggggtccacactgg

SEQ ID NO: 15220 - DNA, 120 bp, synthetic construct
  source 1..120: mol_type = other DNA
tcatttttcccttttgcacaagtctctgcctctctcctttgtccttctatctaacaggttcacctccatattcttaaagtctttttccagccaccctcctcctcatccccagttctgctc

SEQ ID NO: 15221 - DNA, 120 bp, synthetic construct
  source 1..120: mol_type = other DNA
tgagttagaaccttagctctacctcttacttggtatgtgctcttgggcaagctacttaacttacttaatttctttaggccttagttttctgatctctaaaaatgtgacgctatcttccat

SEQ ID NO: 15222 - DNA, 120 bp, synthetic construct
  source 1..120: mol_type = other DNA
cttttacttgaccttatgcctttcaatatcccttatctcagggtcacactactgagcagctatcaggagtatttataagacacttatacagagtctcactctgttgcccaggctggagtg

SEQ ID NO: 15223 - DNA, 120 bp, synthetic construct
  source 1..120: mol_type = other DNA
gggaaaaacccagataacacatattaaatcattaaaatccacccctaaatcttctgtttttggtttgtcttgagacggagcctcattcttttgccaggctggagttcagtggcgtgatct

SEQ ID NO: 15224 - DNA, 120 bp, synthetic construct
  source 1..120: mol_type = other DNA
gggaaagggtgcatcagtaagaaaccactttttacaacgagcaaagagggccacagccacacttacccgaagtgaagaagaagtacaggggaaattaagaagcaaaaacaaagtaattaa

SEQ ID NO: 15225 - DNA, 120 bp, synthetic construct
  source 1..120: mol_type = other DNA
agtcacaatggcctctgctgtttctcaaacaaaccaagcatgcttccagcttcggagctttgcaccgtttcatctgcctattaacaatcttcttacagatatccacatggtaatcccctt

SEQ ID NO: 15226 - DNA, 120 bp, synthetic construct
  source 1..120: mol_type = other DNA
gctaatttttgttcatagagacaggattttaccatattgcctagtttagtctcgaactcctgagctcaagtcatctgcccaccagttttccaaaatgctggtattacaggcatgagtcac

SEQ ID NO: 15227 - DNA, 120 bp, synthetic construct
  source 1..120: mol_type = other DNA
tcctaacctgtcctctattttgctatggcttgacgtcagtgcttcatgtgacatgttttttctcctgcagagcaaaaaaaaaaaagagcaaagacagttatattcaagcaaaagtgtggt

SEQ ID NO: 15228 - DNA, 120 bp, synthetic construct
  source 1..120: mol_type = other DNA
tcttcttaacactgttgcttcaacctgtgaaatacagggaaggacagaattgaccataaaacacagccacaaccaatctgttcatatagttatgtctgcccagctacaagtcacttgcga

SEQ ID NO: 15229 - DNA, 120 bp, synthetic construct
  source 1..120: mol_type = other DNA
tttacagggtagagttcaccatgaacagtcatctattgctactccctattctagaaaaacaacagtaggtcacctcacagaataccaggtaaattcacattggtttcaaggagtccaata

SEQ ID NO: 15230 - DNA, 120 bp, synthetic construct
  source 1..120: mol_type = other DNA
ctcgcacgagtcatcatacttggtaacatctttatattgacccctcagtgaccccccacaatgacgacctgccatccattctttcctcacatcacccctccctccaggctgtcttctctc

SEQ ID NO: 15231 - DNA, 120 bp, synthetic construct
  source 1..120: mol_type = other DNA
agctggatttgaatcctggccttacctctaatagctgtgcagccttgagcgactcacttaatttctctgagcctttatttttctcatccataaaaataggattaaaaacctagggctggg

SEQ ID NO: 15232 - DNA, 120 bp, synthetic construct
  source 1..120: mol_type = other DNA
aatggacatagaaatgattctaatggcttgaatagattattctaagaggaatagatgcctccctagttcatgctcaggctcataccccctccaccactctagcccttcaaactagctatt

SEQ ID NO: 15233 - DNA, 120 bp, synthetic construct
  source 1..120: mol_type = other DNA
atatgggggaattttctatgtaaagggaattctctttcccaaatactctctgttaagatttccaagtatctgtcttgtgggtacaccaggatagcagagggaagggactaatgccacggt

SEQ ID NO: 15234 - DNA, 120 bp, synthetic construct
  source 1..120: mol_type = other DNA
aaagcagaggaaaggttgggcagtgtcacccttgcacacccacagggtagacggatcgagtttcagcttaaaccgaggggtgtgggggaagggtgttgggttcagctagtccacgtgggt

SEQ ID NO: 15235 - DNA, 120 bp, synthetic construct
  source 1..120: mol_type = other DNA
tagtgttgtgtcatgggaggaaagaactgagcagatctgaagaaactgagctggccagccagaggcaactagaactattaggaaagcatagactctgaaagtccctaaagagattaccaa

SEQ ID NO: 15236 - DNA, 120 bp, synthetic construct
  source 1..120: mol_type = other DNA
aagaatcatatcttaaggggcagcatatatggagatggaaggatagataagaatgaccatgacccaaggtgggtggtttggggaaaggtctgcaatgcccccttcaattccagtgctttc

SEQ ID NO: 15237 - DNA, 120 bp, synthetic construct
  source 1..120: mol_type = other DNA
taatgcaaagaaggaataactgagatggcacgtcagtgcctgggatgtgtgcagtgggatggtgaggtgtgcagataaggaaaacattcgagcttagattgatgttggcggggagaggtt

SEQ ID NO: 15238 - DNA, 120 bp, synthetic construct
  source 1..120: mol_type = other DNA
gatattttttcacaatctcattattatgcacatcataattttgcatcatgcatgcatgaaaacaataacaaacctttttcatttaaaaaaagaccaatgtcattcattcacagccaagtt

SEQ ID NO: 15239 - DNA, 120 bp, synthetic construct
  source 1..120: mol_type = other DNA
gtgagtgagcctccgggatgtaacataatctgaaatgaaattcaggttgagtggggaggcaattggaaatgagcaggcaagtcagtcagtgataaagaaaaactcagactgtaggaagca

SEQ ID NO: 15240 - DNA, 120 bp, synthetic construct
  source 1..120: mol_type = other DNA
gtgcactctaagagccagacagcaccaaattaggggtttgattctgggtcaggagatggaggatcaagctgtgcagctgggaactcaccttgctgttctgggctctcctttccctcatgt

SEQ ID NO: 15241 - DNA, 120 bp, synthetic construct
  source 1..120: mol_type = other DNA
acagtgggaaggaaggaagaagaattcggcttcagtgaaagggactgtggtcatgagacaaaggaagagatggcttcaaatgagttcccttcctccatgggactataacttcatgatcct

SEQ ID NO: 15242 - DNA, 120 bp, synthetic construct
  source 1..120: mol_type = other DNA
agaaaagaaaaaaaaaaagctctatgaacaagtatagaggctttctggtctccagacttaaaatgatacctcttatagtcatctctcagtctgagatgtccagaaatgggtatcttagag

SEQ ID NO: 15243 - DNA, 120 bp, synthetic construct
  source 1..120: mol_type = other DNA
aggtacatagtacaagtgggagcagcatggaccttattcccaaagaactgtggctttgacctgtctggtgcttccatgaagtattacataaaaggcttgccattagtttgtttaactcag

SEQ ID NO: 15244 - DNA, 120 bp, synthetic construct
  source 1..120: mol_type = other DNA
gattaagagacataaaaaagaggtataaaagacatttggagagcaattgggaaaatttaacaatgaactgtataatgggtgatactgtattacattttattttcttaagtgtgatagtgg

SEQ ID NO: 15245 - DNA, 120 bp, synthetic construct
  source 1..120: mol_type = other DNA
ttaatttaaaaagacaaacaaacatggccttgccattgtattaggaacagtttataagaggccttctcattgcaggcttatacatgatctagtcctagcttcatattttccaattcagtt

SEQ ID NO: 15246 - DNA, 120 bp, synthetic construct
  source 1..120: mol_type = other DNA
taggtgtctacttagagccttttctctgtggaaacaccagagggtgcagtgtgaacacagataaaatataccctcaatttacctgctgaagcatttgttagcatagtactagggacgttg

SEQ ID NO: 15247 - DNA, 120 bp, synthetic construct
  source 1..120: mol_type = other DNA
ttgggaatactcaaaatgatcttccagagaatttctgccataagagtgtgtgccctcattaggaatggctctctcattatctgtccgtgattggaggactgctttctctgataaaacctt

SEQ ID NO: 15248 - DNA, 120 bp, synthetic construct
  source 1..120: mol_type = other DNA
gcctttcttaggaattcccttctccctcccaatttatctggataacacaggaacagacatttttttaaacatgagcttgctccccatgctcaacatttgctttgagagtgaatgctgatt

SEQ ID NO: 15249 - DNA, 120 bp, synthetic construct
  source 1..120: mol_type = other DNA
atttctaaatgctcctctcaatttctgtacattgcattacaaatcagttcatcaatcaccctctgagtgcactttatctcccttcttcctgaaagctggctcttccttcaggcaggagca

SEQ ID NO: 15250 - DNA, 120 bp, synthetic construct
  source 1..120: mol_type = other DNA
aattcaaaacaggaaattaaatccagtaaacactcccacctccaccaacagctctggaaaggcaatgcctttgtctgtgaaagaccatgaggcacaaaggtagcattttcctctcaaagt

SEQ ID NO: 15251 - DNA, 120 bp, synthetic construct
  source 1..120: mol_type = other DNA
gttcgagattgtggtgagctattaatgtgccagcctgggctacagaatgagaacccatctcttaaaacaacaacaacgacaaaaaaaaaaaaacaacagggaatgaaccgtggcaagtag

SEQ ID NO: 15252 - DNA, 120 bp, synthetic construct
  source 1..120: mol_type = other DNA
ccattttgagacatttagaatcacaaaacattattatatatcaatagccctacctggatgtcccaagacacctcagtcccagcatgtccaaacctaagtgtctcgtaattcttgtaggaa

SEQ ID NO: 15253 - DNA, 120 bp, synthetic construct
  source 1..120: mol_type = other DNA
tcggtatcctggagtaggggaaggattggctccaggaaccctttgtggatgccagaatccaaggattctcaagtcccttgtatgtaataaaatggtctagtatttgcatataacctacat

SEQ ID NO: 15254 - DNA, 120 bp, synthetic construct
  source 1..120: mol_type = other DNA
cattccctttcatgattatcattatatgaaggaggaaattggggcacacaggggttacataactaccctgaggtcacgcagctggtgggggaagcctgggttgcatgttgacaggcagtt

SEQ ID NO: 15255 - DNA, 120 bp, synthetic construct
  source 1..120: mol_type = other DNA
cagatctagaaacccaaagatcccttctgcctagagttacatggactgtgctttttccttagtcctggcgaagttgcaccagtgggtgggatgaggtcagcaattagagtcagctcttcc

SEQ ID NO: 15256 - DNA, 120 bp, synthetic construct
  source 1..120: mol_type = other DNA
gaattcttcctcttttgacctaatgacagtgtaccctatctaccagaagctgctgttggagtggccaagtgtcctaaccctaacccaaactttgaaaaggagtgagtctacagaacttaa

SEQ ID NO: 15257 - DNA, 120 bp, synthetic construct
  source 1..120: mol_type = other DNA
ttctatgggtgctgagtaagtattgtatagttagggttcaaggattttcaccaagataccatgttcagagaagtgaaagagttacctcactgtgtcctgaaaagttgaccgttgattcca

SEQ ID NO: 15258 - DNA, 120 bp, synthetic construct
  source 1..120: mol_type = other DNA
atatatgtgtatgtatgtatgtgtgtatgtgtacaaagggcaggctggaaattcaggtaagagttgatgttgcagtcttgaggagaattccttctccttcagaaaacctcagtctttgcc

SEQ ID NO: 15259 - DNA, 120 bp, synthetic construct
  source 1..120: mol_type = other DNA
atgcagggtgtgattagtgtattttacccagacccttggttcatttgaggaagggacaattaatccaacatctggagccaggtaagaaataagccaggtaaagggctggagaaaacattt

SEQ ID NO: 15260 - DNA, 120 bp, synthetic construct
  source 1..120: mol_type = other DNA
aattaggtgtgggaaagaataggctttaggagttcaaagggcatttgttgtgggcagaggtggttaaagagttcatggaggagataggtctttgagctagacatctaacagtagtaacat

SEQ ID NO: 15261 - DNA, 120 bp, synthetic construct
  source 1..120: mol_type = other DNA
agtaaaagggatcattggttccagtcacaggtgtagtaattgtgggtactttaaggtttggagcacttacaaggctgtggtagaaacaattatcccatggatcccacgtgttaaaccatg

SEQ ID NO: 15262 - DNA, 120 bp, synthetic construct
  source 1..120: mol_type = other DNA
tttcatggaaggcagaagagcatagtggtgaagcccactggtctctgccaattacaactgtgtgaccttgggcaagtcacttaaattttgtaacctcaatatcctcgcctgtaaaataga

SEQ ID NO: 15263 - DNA, 120 bp, synthetic construct
  source 1..120: mol_type = other DNA
cacggttggctgtgttgggtgcaggcggatgaggcagcatctgcttaatcagtagagtattcttcctgataacaatcttccctcatcaccttccccaatcccatctctcctcgatgtagt

SEQ ID NO: 15264 - DNA, 120 bp, synthetic construct
  source 1..120: mol_type = other DNA
catgaggattaaatgagataatggatgagcgtgcttcctaatctgtaaagctttatgcaaatatttgctatcgtcatcagctgtattattgatagggtcaagataccagtggaagtgaaa

SEQ ID NO: 15265 - DNA, 120 bp, synthetic construct
  source 1..120: mol_type = other DNA
cctatccatggcctggacaagtgggagagcagatgtttaatatttcacgaacatattccatcttctgctttgtttagggccaatcgggatggtcactttgctcgtggccaaagcaatggg

SEQ ID NO: 15266 - DNA, 120 bp, synthetic construct
  source 1..120: mol_type = other DNA
ggttggcttcatgatcatatttgttaaaagtgcagtagttttggtaaaaagaccaagaagaaaaacagggaaccatgccttaattgtatgtgggaaatccccgtcttattttattgagga

SEQ ID NO: 15267 - DNA, 120 bp, synthetic construct
  source 1..120: mol_type = other DNA
ttgagggctaagacatgagtaggttgcatctgctgtcttcaagttgtcagcaggtaagtgacctccaccccgcagagaggcagtataagctgggggacttaaaggacatggctctccttc

SEQ ID NO: 15268 - DNA, 120 bp, synthetic construct
  source 1..120: mol_type = other DNA
aaatttcactgctgcctgtgacccactccaagtggggaactgataaggcagataaacattcaaggaagacaaaacccattatggctcatactgttgaggtaaacatctctggaacaaaaa

SEQ ID NO: 15269 - DNA, 120 bp, synthetic construct
  source 1..120: mol_type = other DNA
ctggccacactgatagctgtgtgatataacagggatccaaagagagaacactcactgccagttaaagaatgggaggaacagaaggatggatggagggagggaaggaggggattttgaagc

SEQ ID NO: 15270 - DNA, 120 bp, synthetic construct
  source 1..120: mol_type = other DNA
ttaaagatacaatctgggatagtttgggggaacttgtagccagaatgccctgttcatgctgagcaaagttcagcaagtagagcagagtttggcaggcaggtgccaggaactccccttctt

SEQ ID NO: 15271 - DNA, 120 bp, synthetic construct
  source 1..120: mol_type = other DNA
aagaatgaggatatagtagccatgacatagcttgagctatagcctttaattccttactttggctatgggtggagggtgagtttgaagaggttctgattttcttgtaacctgggaaagcca

SEQ ID NO: 15272 - DNA, 120 bp, synthetic construct
  source 1..120: mol_type = other DNA
taccagagaatgtctgctggtgtcttggaggcacttcctgcagcctatgcatgcctcgtgaagccatttcactgctgccccttcatcctcctcctccctgagccctaggtagaagtcagt

SEQ ID NO: 15273 - DNA, 120 bp, synthetic construct
  source 1..120: mol_type = other DNA
tagctaataccccgtcaatccatgccatattttccctcatctaaaaaacagaaaaaattacttttttttcccccaaagacagggtcttgatcagagctcactgcaatatcaaactcctgg

SEQ ID NO: 15274 - DNA, 120 bp, synthetic construct
  source 1..120: mol_type = other DNA
ttttagaatgaaaatagctggggttaagggtacacacatttttaaggtgacctggttagacaagaaaacacagtattgacattcagactgtctaagaaaatctctgggggtgccccaggc

SEQ ID NO: 15275 - DNA, 120 bp, synthetic construct
  source 1..120: mol_type = other DNA
ccatggtagagaagaactgctcagaggccaccacaaattccggggagatgctggggtctaggaaaggacggtatcctgcaggaaggagacggtgatgatggggagacaggcttcttgcct

SEQ ID NO: 15276 - DNA, 120 bp, synthetic construct
  source 1..120: mol_type = other DNA
gggacagctggcgtcggggcccgaccccgcttttccccgagactcgcagaaccccctgctcatgtgggcggcgcccgaccccgccaccgggcagaacgggccccgggggctgtacggtga

SEQ ID NO: 15277 - DNA, 120 bp, synthetic construct
  source 1..120: mol_type = other DNA
gcttgcgtgtgtcttgcggggtggggtggggactacgttggggattttagggctaaattcttctgtcctctcttctcctatttccccaggataccggccatttctggaccccagcatctc

SEQ ID NO: 15278 - DNA, 120 bp, synthetic construct
  source 1..120: mol_type = other DNA
gggaatcaagttcttcataaatgagtttgtggcttatcagcaactgtctcaatacaagaacaaacgtctctctggaatggaggagtggattgagggagagaaacagtggatttctgtaag

SEQ ID NO: 15279 - DNA, 120 bp, synthetic construct
  source 1..120: mol_type = other DNA
cttgaactacagatgaattttactctatgcctggtttatttctgagaggcagcagaatgcaatggttactggtattggacatgacgccagattacttgaattctgattcaagctctgcca

SEQ ID NO: 15280 - DNA, 120 bp, synthetic construct
  source 1..120: mol_type = other DNA
atctttgggaatttccacataggaaatcatctgggaacaaagacagtattattgctttcttctcaatttgtataccttttatttctttttcttgtcttgctgtattagcttggacttaaa

SEQ ID NO: 15281 - DNA, 120 bp, synthetic construct
  source 1..120: mol_type = other DNA
tcccagactaggtcaggttatcccttgatgtgctatcacagcattctgtgatttagtaattatttgtgtcattatctggtaatgcctatctcactcactagatggagttcctgaagggca

SEQ ID NO: 15282 - DNA, 120 bp, synthetic construct
  source 1..120: mol_type = other DNA
attgcatctttttgtgctatggagttgtttacattaagcatgaccgaacgagagacaatactatttcccacaggagtccattgggttcagctttgaaagaggaatagaatcgaggctcct

SEQ ID NO: 15283 - DNA, 120 bp, synthetic construct
  source 1..120: mol_type = other DNA
ctgttatctcagctgtgaaacagggtgattacaactttcagttcatagtgctgtgtgacaagtgcacgaagaaacacaagtgaactgcttacacaagtacctagcacatagaaaacattc

SEQ ID NO: 15284 - DNA, 120 bp, synthetic construct
  source 1..120: mol_type = other DNA
tgcacagaatgtgagtttccggtggtacataacctctaatagctaaatatttgaggagacttaggatgtaagtaataatgatagatcttaaaggactagcaggctgcaggctaatgtctt

SEQ ID NO: 15285 - DNA, 120 bp, synthetic construct
  source 1..120: mol_type = other DNA
ctccttttaattgaatttgaggcatcccaagttaagagggaatttgagaacggtcactttctcagtttctataaatcaggctgtgtcaaatgccagccatgaaagcaaaccaggtgggga

SEQ ID NO: 15286 - DNA, 120 bp, synthetic construct
  source 1..120: mol_type = other DNA
gccgcccgatcacaacttgaaaatggagtctgaattcttatccatgctgcatccgccgcatcacaacttgaaaatggagtctgaattcttatccatgctgcatccgccgcctcatcacaa

SEQ ID NO: 15287 - DNA, 120 bp, synthetic construct
  source 1..120: mol_type = other DNA
tttcctcccatagtaacctatgcaaatatggacttggtttccaaagaaaaatgttcatgtgttctttcagcatgcgtactctacagtcattggaaagatcaacaaagaaggtgggcatga

SEQ ID NO: 15288 - DNA, 120 bp, synthetic construct
  source 1..120: mol_type = other DNA
ttagttcattcattaaaagggagaaagtggaaagaaaaatcaaatctgcatgggaagaagcacaaagcagctacatccacatggctgttcccaagcctgtccacagggataatgactgaa

SEQ ID NO: 15289 - DNA, 120 bp, synthetic construct
  source 1..120: mol_type = other DNA
aaaggagggcaggcagggcaaatgcaatttgaggcacagagatttcaccacgagcactgaatcttgcttgtatgtcataacaaatatctggatgtagcaattagagcagagaataagaag

SEQ ID NO: 15290 - DNA, 120 bp, synthetic construct
  source 1..120: mol_type = other DNA
ggggatcctttaatgtaccttccctctttttgatttatcttacggctcatatcatattctgtcatagcagggactaaatgatgtttctctgtgctcccaaaggactgtatttggccgact

SEQ ID NO: 15291 - DNA, 120 bp, synthetic construct
  source 1..120: mol_type = other DNA
tgagtaggttgtgaaaattttctcctattttgtatacatatatatatatgtatactaaaaattgataagctatagaggagatgatcatagacctcagggaaggataaagtgagtagttcc

SEQ ID NO: 15292 - DNA, 120 bp, synthetic construct
  source 1..120: mol_type = other DNA
aagggagaattagcagctctaaatacattttatccaagattctgcagtttaaagatataccatgcattcagctctaaatcctagacatcaaagtttttctcctgttttactcataattca

SEQ ID NO: 15293 - DNA, 120 bp, synthetic construct
  source 1..120: mol_type = other DNA
ttcacagaaaaagcatgatacctctttcgccttttaacaatgcaccctaaacatggagaaaggcaaacatggataaagagtgttaagacattgttacaacttgtcccaaagaggaaataa

SEQ ID NO: 15294 - DNA, 120 bp, synthetic construct
  source 1..120: mol_type = other DNA
aattttcatggctgaggattcagaaacttccaggttcttaatttaaggcccatgaatgccatgtccaaagaacagaggagaacaaaatgtgggttaatcttaccaaaactgggggcgagg

SEQ ID NO: 15295 - DNA, 120 bp, synthetic construct
  source 1..120: mol_type = other DNA
agggacctcaggcttgctcaattacttttgggattttatgccagagtttaaactactgtctttgaccaggcccatcaagtttgggttgacgtgtccatactacagcctccttttatatta

SEQ ID NO: 15296 - DNA, 120 bp, synthetic construct
  source 1..120: mol_type = other DNA
atgcatcagctaaatggacacacaacggaggggaaatgtttgttgccttaaatcaaaaggggattcctgtaagaggaaaaaaaacgaagaaagaacaaaaaacagcccactttcttccta

SEQ ID NO: 15297 - DNA, 120 bp, synthetic construct
  source 1..120: mol_type = other DNA
gaaactatgcctgcttcttcatctttgtcccttctttaaacaccttgaaaggtcttattccctcccagcccctcctgcccctaggttttcctagatgcctccatatttctgctattcaca

SEQ ID NO: 15298 - DNA, 120 bp, synthetic construct
  source 1..120: mol_type = other DNA
gactgtttctttgaagttgttctttattgatgtaggcacttacagctataaatatgcctcttagtactgctttcaccctattccatggattttggcatgttgtgtttccatagtcgtttg

SEQ ID NO: 15299 - DNA, 120 bp, synthetic construct
  source 1..120: mol_type = other DNA
actcctgattaatgccttcattgtcattccacactcttgcttaatctgcctgagtatcttgataaacttcaaagtgattttcagcataagaaacaataccaaaagatgctgtgtacccct

SEQ ID NO: 15300 - DNA, 120 bp, synthetic construct
  source 1..120: mol_type = other DNA
aatgtatacattgaaaatcctcaatggaagtatttacactgctcactgctcctccttggcccaccctggacccacaaccccaacaagttattacctttactagtttcatgagtatccttc

SEQ ID NO: 15301 - DNA, 120 bp, synthetic construct
  source 1..120: mol_type = other DNA
ttaaaagatttagtatactactttgtttggtaccaagccttttatctgtttctgaggtctcattctttttcctttgctttctccttctttttctcccccagttcccccaccccccccctt

SEQ ID NO: 15302 - DNA, 120 bp, synthetic construct
  source 1..120: mol_type = other DNA
catctggcttcactggacgacagtctcctgctggcatttctcttggttcagatgtatctgggaatagtgctgagacaggactgaaagagtaagttcatttcttattaaaattgaggttat

SEQ ID NO: 15303 - DNA, 120 bp, synthetic construct
  source 1..120: mol_type = other DNA
actattttttagacctcttctctggatggaggcactatgttgggtgctagggagtataacagttaaaaactacgcacagttcctacgttagaggaatttctagtctatggaggagacatg

SEQ ID NO: 15304 - DNA, 120 bp, synthetic construct
  source 1..120: mol_type = other DNA
aatatatggggtttgtctatacaggctaagcagagtgaaaagttgaacaactacccaggtaatttgattctgggagagtttgcttggatcgttcaaaccaacacttctcctcttcctgtc

SEQ ID NO: 15305 - DNA, 120 bp, synthetic construct
  source 1..120: mol_type = other DNA
ttctggaacaagggtaacatccgctttgtcaggctgcattgtgatggcaaatttgtcaccgcactgtccagttttctgtgaaatattatcttaagaaaaagaggaatgtcagttgccatg

SEQ ID NO: 15306 - DNA, 120 bp, synthetic construct
  source 1..120: mol_type = other DNA
aagaatgcctgatacattgtataatgaaaccagaataattgagctacttgttcattacaaagatctctagctgaatactcaaaattcttcagcagctgagtgggcttggagcgaattaac

SEQ ID NO: 15307 - DNA, 120 bp, synthetic construct
  source 1..120: mol_type = other DNA
agtcaccttctcatccttttcacccttcttacccctcccctcctcattcccaggaagcaattacttaataattacctatgaacccttcctgaaatgttcaatatataaaagtatatcttt

SEQ ID NO: 15308 - DNA, 120 bp, synthetic construct
  source 1..120: mol_type = other DNA
cattcatcagtcatccactaaatacctactatgtgtcaggaatgttctaggcttaggtacaaagatgaaaatggtccctgccccacaaccaaaaaagagaattttagaccaatatccttg

SEQ ID NO: 15309 - DNA, 120 bp, synthetic construct
  source 1..120: mol_type = other DNA
tctgccctcttgctcaaatataagcctctctgaggacaaggatttttgttttctcttactgctagagcacagtagaagcctgacaaatagtcttttttgaatgtatgagtgagagctttt

SEQ ID NO: 15310 - DNA, 120 bp, synthetic construct
  source 1..120: mol_type = other DNA
cagtacaaggtcaggcacctgccttaatttctgtgaggtccattacttaccttatcttttgggataaaagacaaactaacaaggacaataggtggggaaggaaaggagggaggtttattt

SEQ ID NO: 15311 - DNA, 120 bp, synthetic construct
  source 1..120: mol_type = other DNA
gactacccctaaatcatttgagttgctttaatccttaacagctagcaaaaagcagaagcttgccgaaacgtgacatggatgtgtaagttttgagagaacgagaatggaagaatgacctgg

SEQ ID NO: 15312 - DNA, 120 bp, synthetic construct
  source 1..120: mol_type = other DNA
agaaatgcaaaagatacttttaacaaaataatcaataaaacaaacaaaccactaacaaatctaatcaagaagcaaagggaaaattcacaaatacacaaaatcaaaaatgaaaggggaagg

SEQ ID NO: 15313 - DNA, 120 bp, synthetic construct
  source 1..120: mol_type = other DNA
aatcccccataccattaagtaatcattccccattctccaccctcccacaaccacatctcctgacaaccaccgatctgctttctggttttatggatttgccttttttggatatgtcatata

SEQ ID NO: 15314 - DNA, 120 bp, synthetic construct
  source 1..120: mol_type = other DNA
tgtgtacacgtgtgttgggaggggggcggggctgatcaggtatttctgaaactccctgtaccttccagtcagttttgctttaaacctaaaactgctttcaaaaatagtctattgaaatac

SEQ ID NO: 15315 - DNA, 120 bp, synthetic construct
  source 1..120: mol_type = other DNA
gcgggcgggggaagacaaacgtaccatacacctacgttttgtttaacagaacgtcgttaactgtattgaaatggatacaaaaatgctataataagtggggaagatggtataagtcagcac

SEQ ID NO: 15316 - DNA, 120 bp, synthetic construct
  source 1..120: mol_type = other DNA
atagcagattgtggtcccacgatctgtggtgtcaaagatagtctctctaatttcctacaacattcttctgggtctttgctttatagctgtagtcaaggcctcaataatggtctaggctat

SEQ ID NO: 15317 - DNA, 120 bp, synthetic construct
  source 1..120: mol_type = other DNA
ttttccccactgcttagtctctctattcaatgtactatatcacagtctttcaaatatagagactttagtacatatttcagtatctggtaacactagctgctgatcagatagctgtggttc

SEQ ID NO: 15318 - DNA, 120 bp, synthetic construct
  source 1..120: mol_type = other DNA
agttctgggaagcattaatgtggctctgtccctctatgactgagaatgtgtggtgtaactggcacatgtcagtaggtacttgatgatcttatgactgagaaggactaagaagaatttgag

SEQ ID NO: 15319 - DNA, 120 bp, synthetic construct
  source 1..120: mol_type = other DNA
ctatgggagatattacagattcaggcaactcttcagatataagcactcagaggaggaagcattccttgtagttgttccatcttagtgtggtttgcttttctacatttagcctggcggaat

SEQ ID NO: 15320 - DNA, 120 bp, synthetic construct
  source 1..120: mol_type = other DNA
gcctactcattatcttgaggcttagactctaaggtgccaggtaggaaaggccaaaccaggggatttgtagaagccatcactgctgagaatcatctgtataaatctttttatacaagatga

SEQ ID NO: 15321 - DNA, 120 bp, synthetic construct
  source 1..120: mol_type = other DNA
ttgctttttccatttagccaatgggacttgagaagggaacattcccacattgcttctgaggaaaagacacatgataatgtgatacactgacaaatacaaagaacttcgaattagaaggcc

SEQ ID NO: 15322 - DNA, 120 bp, synthetic construct
  source 1..120: mol_type = other DNA
gctgggccattaggtcagaatgcaagaagtggaatagggcactattgatgaggagcttcaggagggggacagatggcaaaacatcctattgtaacaattctacaacatacatttttaata

SEQ ID NO: 15323 - DNA, 120 bp, synthetic construct
  source 1..120: mol_type = other DNA
attaggggaagggtaggaggcttgtttgcctgttttggtgcttttggtaagattgagaacctatcaacatcaaaacctgtagcatagtggtttgctacttgggatgaaaaagacaataat

SEQ ID NO: 15324 - DNA, 120 bp, synthetic construct
  source 1..120: mol_type = other DNA
tttacgtcctttctcttcctaatttttttgtgtgtgctctaccagtgggttttatccttttgtgcatttttatgatggtggatgtcatccattcacttccaggtgtagaactggcttaag

SEQ ID NO: 15325 - DNA, 120 bp, synthetic construct
  source 1..120: mol_type = other DNA
gaagggaggtgccagacacattttaacaattagattttatgggaactaaaagtgagagttcactgaatcccacaagaaggataccaagccattagtgtgaagacatccatccccatgact

SEQ ID NO: 15326 - DNA, 120 bp, synthetic construct
  source 1..120: mol_type = other DNA
tctcctggcaccattattgaagagggtatctgttcaccaaggtgtgttcgtggtgcctttgtaaaaattcagttggctataaatccttgaatatatatgctgtccagtgcttcaagtgct

SEQ ID NO: 15327 - DNA, 120 bp, synthetic construct
  source 1..120: mol_type = other DNA
gaacaagaataggaagaaaatcctctctcacacatacctgtgccctccttactttcatggaagtgagaaacagcctttcagtggccaccatagttctaacatcaaggagctagaatattt

SEQ ID NO: 15328 - DNA, 120 bp, synthetic construct
  source 1..120: mol_type = other DNA
tatccattcatccattgatgggtagattgattgcatatcttagctcttgtggatagtgctgcaataaacatgggagtacagagagcaaatacccttttgatatatctgatatacatctct

SEQ ID NO: 15329 - DNA, 120 bp, synthetic construct
  source 1..120: mol_type = other DNA
cattctatgggttatctcttcattttgttgtttcctttgctgtgtagaagctttttagcttgatataaatcccatatttctattcttgtgttggttgcctgtgttttgtggtcttacaca

SEQ ID NO: 15330 - DNA, 120 bp, synthetic construct
  source 1..120: mol_type = other DNA
atcccagacaacagatttgaggtattcattcctatagaatttggctgtgcttcctactctgaccaaaaagattcatgtgttcagatacaacaaagctagctttctaacttactaacttat

SEQ ID NO: 15331 - DNA, 120 bp, synthetic construct
  source 1..120: mol_type = other DNA
aactgatagcttatcttcaaagatgtgggacagaaagtcatctctgctcatctgagacaaatgcatatctgatcggtttctctgccctgttgtttatgtaaaaatggagattcactgagc

SEQ ID NO: 15332 - DNA, 120 bp, synthetic construct
  source 1..120: mol_type = other DNA
gagttgggaaatgccctccattttctgaacgtgtttgtgtagaatttttatttttttttccctaaatgtctgatagctgcatccagtgatatcatgtgggcctggagttttctttgtggg

SEQ ID NO: 15333 - DNA, 120 bp, synthetic construct
  source 1..120: mol_type = other DNA
tagaagagactgcaaagacatgccacgtaaaagcaatatatgttcccagataggttcttagaccagaaaaggaaaaagagaaattattagtaacatttatcaaaatttggatggtatctg

SEQ ID NO: 15334 - DNA, 120 bp, synthetic construct
  source 1..120: mol_type = other DNA
aaaaaaaccaaaaaaacaataccagggcataggccccaccctaaaaccattaaatcagaatcagaatcagaaattctgagggcaaaaacctggatccagacaagtgtatctaaaagttct

SEQ ID NO: 15335 - DNA, 120 bp, synthetic construct
  source 1..120: mol_type = other DNA
tgcccctcactagttttgtcacactggtagagtcacttaacttctctaggtttcaaatgttttcatctataaaaagaggataggaacatagtggaagacctacaaggtctgttacaacac

SEQ ID NO: 15336 - DNA, 120 bp, synthetic construct
  source 1..120: mol_type = other DNA
ttacctattaaccatccttatctcccacccctgcatcccccattacccttcccagtctctgataaccattcttcaactctctatctccatatgttaagttgttttgattttcagatccca

SEQ ID NO: 15337 - DNA, 120 bp, synthetic construct
  source 1..120: mol_type = other DNA
caaaggtgacaggatatatatgatttttgtgtacgtgattatgttacctaagactgtaagggcatcttgctaaggactcactctcacctgctagctttgaggaagcaagcagccttattg

SEQ ID NO: 15338 - DNA, 120 bp, synthetic construct
  source 1..120: mol_type = other DNA
aacaaaaaaaaatcaggtagtttacctcacaattcaatcacacaagtgcttttcctcaagacaactatcatacttcagacacagaggtactttatgcacactacccatgtcatcacacag

SEQ ID NO: 15339 - DNA, 120 bp, synthetic construct
  source 1..120: mol_type = other DNA
aatgactccttgacccatgggcagcagaatggatgttgtgttagcaaacatgaaaacaacattaatcttcttgtacacttccatcagagctcttgggtgactagatgcactatcaatgag

SEQ ID NO: 15340 - DNA, 120 bp, synthetic construct
  source 1..120: mol_type = other DNA
ctgatacatgctacaacatgaaactttgaaagtgaaagaagtcagtcacacagtttgattctatttatatctaatattcagaataatgggtaacaggtttccttttgaggagctgaaaat

SEQ ID NO: 15341 - DNA, 120 bp, synthetic construct
  source 1..120: mol_type = other DNA
aaaatgtaaacatgaggcagtaggagtagaacctctagtcatcttagctcactgaattccaggactacctaatgctgcctgacttcttcaagttcattctagaatcccagactgttagag

SEQ ID NO: 15342 - DNA, 120 bp, synthetic construct
  source 1..120: mol_type = other DNA
ttataatccagaaggggagtcttcagggagataccgagaagtaagggatgaagatgacgattggtcctctgatgaattctgaagataatctcctaaatcactgacgttgagatgtcatca

SEQ ID NO: 15343 - DNA, 120 bp, synthetic construct
  source 1..120: mol_type = other DNA
tttttaaataacctcatgttacttcaggcaaatctggtacaggagaagcccaagctaactgagctgggtgaaggcttgtgcatcacctggcttgagttccttgctgtcacagatgatagg

SEQ ID NO: 15344 - DNA, 120 bp, synthetic construct
  source 1..120: mol_type = other DNA
agactgttcacatttgcttccaggtgtaattattgctttcattccttacccccctcaagcaaatgtgaaaagtatactgacctaagattctcattagttttagttcttaaaacgaatagt

SEQ ID NO: 15345 - DNA, 120 bp, synthetic construct
  source 1..120: mol_type = other DNA
gtttggggtgaaaaggaaatttttaatccatctcaaatgtatttggttatattatataaggtagggatttgattttatttcgaagaatttaccaattggttcagtatgtgaaaccaccat

SEQ ID NO: 15346 - DNA, 120 bp, synthetic construct
  source 1..120: mol_type = other DNA
tgcattgtaaactgcaaaaataattgtggttctctctgggccgccttctacttcacaacaatactgagctgaccttacagataagctgaacagatggttgcctccatggtagtatttgaa

SEQ ID NO: 15347 - DNA, 120 bp, synthetic construct
  source 1..120: mol_type = other DNA
accctgaaacacaccccatcagagagcagcaataatgtaaaatggcaatgtgttctctcttgccttgtcaaatgcctaaaaggcatatattctttgatttacgaaaggagaccctcacca

SEQ ID NO: 15348 - DNA, 120 bp, synthetic construct
  source 1..120: mol_type = other DNA
ctgctgtgatcaaggaaacgtagtccgcggaacagctgaaatacagacgcgtcagattttgtatggagttggcttgttggtcatttaaaaagaaactgatgtttttactattgtccttcg

SEQ ID NO: 15349 - DNA, 120 bp, synthetic construct
  source 1..120: mol_type = other DNA
gaagtggcacattaatgaagcgccgctacaggggtcttttctgctcctgtcaccgcttaaaactatcagatggttcgagggaggacatggaggcagccacctagctcagcggagacgcgg

SEQ ID NO: 15350 - DNA, 120 bp, synthetic construct
  source 1..120: mol_type = other DNA
gacaagggagatgttccagaaggaaaatgcaaaagcctagaagccagaaaacacatggcacacttgaggtgtagaaaatgggatgggtctacgggaagaggtggttcgtttagggaaggg

SEQ ID NO: 15351 - DNA, 120 bp, synthetic construct
  source 1..120: mol_type = other DNA
tggtttctggaatcaacagtaggaggtgcatatgtggggctttggcagtcagatggaacaacagagatttagtaggattttaaatgaaggtccccaaattgccatttaactcgggattta

SEQ ID NO: 15352 - DNA, 120 bp, synthetic construct
  source 1..120: mol_type = other DNA
tgaaagaaacagtctttgccataactggataggtaactcttgggtgagagagtagagttgctaaacctacaaagtcacttgcaaactacaaatggcttggcctgaagaaaatcagaggag

SEQ ID NO: 15353 - DNA, 120 bp, synthetic construct
  source 1..120: mol_type = other DNA
aaataaaataaaaataaatccaattgctggatatgagattcagcttcaaagatgcttatttcagcattgtatacaatattgaaaagtaaagtagaaaaaacacctgtgtccaataagagg

SEQ ID NO: 15354 - DNA, 120 bp, synthetic construct
  source 1..120: mol_type = other DNA
agatttcctctgaaatcaagtgcattcactgtagtgcttgaactttgggtctctgttttggcaacctaaaggcctatttgcttacttcctaacttctcagatggtttgtgacagagaagg

SEQ ID NO: 15355 - DNA, 120 bp, synthetic construct
  source 1..120: mol_type = other DNA
aatatagtgagaccctgcctcaaaaaaaaaaaattagccgagtgtggtggtgccagtctgtgcctgcctgtagtctcggctactggtcggggagaggggcctgaggtgggagggatcact

SEQ ID NO: 15356 - DNA, 120 bp, synthetic construct
  source 1..120: mol_type = other DNA
gtaagcaaacacaagaaatacaagtgaactcagaatctggaatcctgggtccaggatagtttcacacttgtcattagctttctacatcacatcgggcaagccattttacctttcaggaca

SEQ ID NO: 15357 - DNA, 120 bp, synthetic construct
  source 1..120: mol_type = other DNA
tcaacaccccccgaggtgtgcagagccctccagctcatctttagatgccccctcccttgcactctgttcctccattctgatcttttaaaaaaaattttatatttcattgacaataatagt

SEQ ID NO: 15358 - DNA, 120 bp, synthetic construct
  source 1..120: mol_type = other DNA
tcccctaaaccgtaaaaacggcagatctggaggtcccaacttctaattttcaatccgtcggcttagtcttggtttttcattactgaggttcccttgactatatagtatctcacaatgtct

SEQ ID NO: 15359 - DNA, 120 bp, synthetic construct
  source 1..120: mol_type = other DNA
cttatctcctgaaggtgttagctgacaacttttctgaggcagaagatgtgaccaatataggtgctgggagaacggaaggaaggggttgagttacatttattcagtactttttcactcatt

SEQ ID NO: 15360 - DNA, 120 bp, synthetic construct
  source 1..120: mol_type = other DNA
agtggcattagtgctatccacagacaacaacaccacccctatggccacctgtgggcatctataggggtggatgatgccttgatgatttccttggatgtcatggctaagccattgtttttt

SEQ ID NO: 15361 - DNA, 120 bp, synthetic construct
  source 1..120: mol_type = other DNA
gaattgagagaaagcttcctaaccttcatattgtcaactggtgtcttgctgcatttgccacagatcccatagtgtggtgttagaaatggtgttgacacactcccacatatctttagcatt

SEQ ID NO: 15362 - DNA, 120 bp, synthetic construct
  source 1..120: mol_type = other DNA
tcacctattgacctatgtggggtttctactggatttaacaaaagtgaaagaagcctgttgccaaaaacttcaagggcaaattctattaaaccttgaagtttcaagtgaaatgccaaatct

SEQ ID NO: 15363 - DNA, 120 bp, synthetic construct
  source 1..120: mol_type = other DNA
aatcctctttagaggaagtagaggtttgccttgttgctattagattgcttcacatctccattggtttgcgtttactatagggcggaaagcacaaagcaggatatgtatgtgcttcaggaa

SEQ ID NO: 15364 - DNA, 120 bp, synthetic construct
  source 1..120: mol_type = other DNA
ctgccacttaaggagcatacaaacaccttactggataaagacaaacatctgtcaattgtctataaggtcctgatgagatttagcttttgcctacttctcccctcatgttttagcccactc

SEQ ID NO: 15365 - DNA, 120 bp, synthetic construct
  source 1..120: mol_type = other DNA
cattctactccaactcttcaaaaaaaaaactgcagagcggggaatacttctaaactcattttacaaaggccagcattaacctattactaaaaccagacaaagatacaacaacaactacaa

SEQ ID NO: 15366 - DNA, 120 bp, synthetic construct
  source 1..120: mol_type = other DNA
atcttctaagctcaataaagtgccattatcctgtcggttataaaagaatggtttggaagatccttcacagcccaccactctcacacaaagtttgcctgacaaactttctggccaaaatgg

SEQ ID NO: 15367 - DNA, 120 bp, synthetic construct
  source 1..120: mol_type = other DNA
aggggtggtacagaataaggattctagcatactgtgaatatttaccaagttgctcaactggatggattaaactcaatgtcctaaacttagacaaattcaggttttgctctggtatcagtg

SEQ ID NO: 15368 - DNA, 120 bp, synthetic construct
  source 1..120: mol_type = other DNA
aaaattatttaatgataaaacggatcttagaggaagtccttgcaagtccctgtatccactatgctttctcacatactcacacttttatgcctgttcctctttctgccttgccccagaccc

SEQ ID NO: 15369 - DNA, 120 bp, synthetic construct
  source 1..120: mol_type = other DNA
taaccatgtccttctttttctgtttctctgccagtctaccaccctaccattcttcttcctcttctttccttattgaggccctctccatataagtagtcataaggcaaacttgtctggtat

SEQ ID NO: 15370 - DNA, 120 bp, synthetic construct
  source 1..120: mol_type = other DNA
aagacatagactcagctgcctcgtgttaaattctcttcttacctgaccaattatctttctggtttcatatttgttctagcaccatgttctgtctttcatctcaatggcagatacaccatg

SEQ ID NO: 15371 - DNA, 120 bp, synthetic construct
  source 1..120: mol_type = other DNA
aagtactactgggaagctgtcgatctcaagttggcaaatacaagttttccaaaattctactcaagagctcaaattttatcactgacaacaaatactgccagttccttttccttgaagtgg

SEQ ID NO: 15372 - DNA, 120 bp, synthetic construct
  source 1..120: mol_type = other DNA
atcccaaggatttattattatgtgcaaaatactctcccaggtactgtgggagatgtgggagacacgttttgtgtactcaggttgcttataatctagagacgctggtgataaggacttaac

SEQ ID NO: 15373 - DNA, 120 bp, synthetic construct
  source 1..120: mol_type = other DNA
gaacttgctttatgttcaggtacagtatttactgctcagacactgaggttggtgagattgcaggaagctcctggctgtatcttgtggcgagcaggagggcggcgctggcttctgccacat

SEQ ID NO: 15374 - DNA, 120 bp, synthetic construct
  source 1..120: mol_type = other DNA
atccaacactgtcctctcctgttactctgatgatattaatgttagatcttttgttactgtcctataagtccgtgaagctctgttttttagtttcttttctctatattgttcagattgact

SEQ ID NO: 15375 - DNA, 120 bp, synthetic construct
  source 1..120: mol_type = other DNA
tcgtatcagcagcccctctttcattttcctgaacccagagagtagggtggtcatgattctgtggtggtgcaggcatgtttttttagcattatttaccatcatattacgtataagaaagct

SEQ ID NO: 15376 - DNA, 120 bp, synthetic construct
  source 1..120: mol_type = other DNA
cttgtcctcggttttctgattctaaagacagttgtttgtagagagattcccatggggtagtgaagaaggctctaagatcttagctaaggtacttcagctttccacaacttgatttcctca

SEQ ID NO: 15377 - DNA, 120 bp, synthetic construct
  source 1..120: mol_type = other DNA
ctgatttaggacacctggagggaccaccaaaggagaggaggtggctcgttcctagcaactggccttttgactgtttcttgctgtgcgtccctgtcctctatgccttgtgtctcgttatat

SEQ ID NO: 15378 - DNA, 120 bp, synthetic construct
  source 1..120: mol_type = other DNA
agctggcagatgcagccaggaatacagtgaggactttctgcaagcaaatgggtttagagttaacttgaaaaagaaacatcctccctgaagcaagtcttttctctagtctttgtattaagt

SEQ ID NO: 15379 - DNA, 120 bp, synthetic construct
  source 1..120: mol_type = other DNA
ctaagaagttagagcaactgaagccaagagcaaaaccaaaagtaagtgttcatttatggttggctgtccgatgtcagtgggttcttccagtgggtggctgtgaaatggagctaggagtgc

SEQ ID NO: 15380 - DNA, 120 bp, synthetic construct
  source 1..120: mol_type = other DNA
cggaccatggataactgaaactgaggaaagcgaaaccacagataaggggtaactactgtgtagaacaatccattaactgagtacttgcaggtaacacttatgggtagataaaactcagaa

SEQ ID NO: 15381 - DNA, 120 bp, synthetic construct
  source 1..120: mol_type = other DNA
ggtaaggctctgcgcaaagtgatttgggtgcagaaatgaataagacagacaaaatctctgctttcatgagcctacagtctaatgggaaagaaagaccctgagcaagaaagtataaatgtg

SEQ ID NO: 15382 - DNA, 120 bp, synthetic construct
  source 1..120: mol_type = other DNA
aagcagaggggggaaaagatggaaaacaggaaggaaaacacaagaaaattaagaggactggctcaggaggtcaagtatcccaataataaggagttccagagagaaagaaagaacacagaa

SEQ ID NO: 15383 - DNA, 120 bp, synthetic construct
  source 1..120: mol_type = other DNA
tgtggcctaacatatggtccatgcttgagaatgatccatgtgctgagcagaatgtgtattctgcaactattagatgaaacgttctgtaaatatctattaggtccatttggtctataatgc

SEQ ID NO: 15384 - DNA, 120 bp, synthetic construct
  source 1..120: mol_type = other DNA
ccaggggaagggccagtggtgcaagtatttctttttaacaggtgaagtttttggaaaaagtcactctccctacccctcagtatccttaccatcaactttggttttatccttccagtcttt

SEQ ID NO: 15385 - DNA, 120 bp, synthetic construct
  source 1..120: mol_type = other DNA
acagaagcagtgtgtcgtcagtgcgtcgtaatcagcatataatgtcagttggtcccattaatgttgttaactctgttcaccgcttaggttggtgtctgccagatttcattttaaatttac

SEQ ID NO: 15386 - DNA, 120 bp, synthetic construct
  source 1..120: mol_type = other DNA
tcagaagagaatgaaggcaggtggtggacacctcatggcttaggtttcctttcagttgattctttgactgtttagatgacaagaagttctcaacatgctggagtcaaaatcgatccaaat

SEQ ID NO: 15387 - DNA, 120 bp, synthetic construct
  source 1..120: mol_type = other DNA
aaagctaaatactacattccaaattcatgacattctagaaaaatcctaactatggagatggtaaaaagatcaatggttgccagatattgtgggtggggaggggggcgggtgaacaggtgg

SEQ ID NO: 15388 - DNA, 120 bp, synthetic construct
  source 1..120: mol_type = other DNA
aagaatcactggtgttcctgagagaaaagaaaaaccagaaagtttggaaaactgatttgagggaataattgaagaaaatttccctgactagctgggagcagtggcccatgcctgtaatcc

SEQ ID NO: 15389 - DNA, 120 bp, synthetic construct
  source 1..120: mol_type = other DNA
aatcaccactccctcagtaaagtccagttttattctgggcagcctaattaccttgcagcaaagggctaatgaagttgctaggtagaacttctgtgaaaccactttaaggtcatgtatgtt

SEQ ID NO: 15390 - DNA, 120 bp, synthetic construct
  source 1..120: mol_type = other DNA
atgagttccagctgagaaaagatgtttagagggtaagaatgtttccaagagtgttgggggtataccattggggcaacaggatggagcacaagaatcaaacctggtgtttgataaataaaa

SEQ ID NO: 15391 - DNA, 120 bp, synthetic construct
  source 1..120: mol_type = other DNA
gtgtttatcatcctcggcggctctgctcagggtgggaggaggcggcgcagggagtggatagatggatgagtgggtgggtgtggggtcacgcgcgcggggtcgatctctgcgggctaagtc

SEQ ID NO: 15392 - DNA, 120 bp, synthetic construct
  source 1..120: mol_type = other DNA
agacaagcaggatagaaggttctagtactaatccctcattaaaaacaaaatcagctcatgatgaaaaagccttaaacgctgtgatacccactgacgtggtacataatggggcaaccacag

SEQ ID NO: 15393 - DNA, 120 bp, synthetic construct
  source 1..120: mol_type = other DNA
cttcttccctttcttttcttttctcttttttcttttcttcttcctcttcttttcttcttcttcctcttccttcttcctgttttcttcttcctcttccctcttctttcttctcttctttct

SEQ ID NO: 15394 - DNA, 120 bp, synthetic construct
  source 1..120: mol_type = other DNA
cttctttcttctccttcttttcctttcttcttcttagttctccttttcttctcctcctcctcccttcttcttcctcctccttccttttcttctttcttctctccttcttcttcttcctct

SEQ ID NO: 15395 - DNA, 120 bp, synthetic construct
  source 1..120: mol_type = other DNA
cctctccttcgtcttcttagttctttcttcttctccttcttttcctttcttcttccttcttagttctccttttcttctccttctcttccttcttagttcttccttcttcttcctcctctc

SEQ ID NO: 15396 - DNA, 120 bp, synthetic construct
  source 1..120: mol_type = other DNA
agcgctattctcaaaactttcatcctgacattaaaaaaaaaaaagaagtggtacagagggagctggggggcctggagggaggcagaggaggaattggagagccgtgttcaggatgaaaat

SEQ ID NO: 15397 - DNA, 120 bp, synthetic construct
  source 1..120: mol_type = other DNA
gctaacatattgacaatgtattgtgaactgtcacatgctataagaacataaggaataattgttagtgggtctgtcagcaactaggtgacagtgagaccaggtagctcctgagcactggga

SEQ ID NO: 15398 - DNA, 120 bp, synthetic construct
  source 1..120: mol_type = other DNA
tttttctctccattcaatacccagaaaacgcttgattatatctcatccttaagccagcaactttgggttcagcgtctaagacagcttcatggtaacatgagtaggtctattaccgctagc

SEQ ID NO: 15399 - DNA, 120 bp, synthetic construct
  source 1..120: mol_type = other DNA
catactaagtcttggaaatccaatgtgtattttccacttcacatctcaattcagaactagccacatttcagtttgaacaatgttttgttctgggccttgctctgcagaccaggggcaacc

SEQ ID NO: 15400 - DNA, 120 bp, synthetic construct
  source 1..120: mol_type = other DNA
acgggaagagggaagagagtggatatgtgcatttgctctctaatgtgctgagcactgagttagaccttttactgttatcatttcatttggttctcacagataggcattctccctacttta

SEQ ID NO: 15401 - DNA, 120 bp, synthetic construct
  source 1..120: mol_type = other DNA
ttcaaaatgctacgctaaggctcatttcatgttcccttctctacataactacccctgtcagagaagtcacagaagaatatactgactcactaccctaaggacccaaatcactcatacaga

SEQ ID NO: 15402 - DNA, 120 bp, synthetic construct
  source 1..120: mol_type = other DNA
actatcatcactgccaggacaggatgccaattgttatggtgacagaagatgaagaggcaattcagcagtatggaagtgaaacagaaggagtattcgtgattactttcaaggtatttccag

SEQ ID NO: 15403 - DNA, 120 bp, synthetic construct
  source 1..120: mol_type = other DNA
gtacatactcttttcgtgcctggcttctttcacagagcacatatacacattcctagaatttgatttcctataggtagttgaacagcctctcctagagtaacctgaaggattgaggtatgg

SEQ ID NO: 15404 - DNA, 120 bp, synthetic construct
  source 1..120: mol_type = other DNA
tgtattagtttctaggaaataggagtagctgaaaggagaggaggagtgaacattcttaagcatggagttatgttctaggctgcgattgacatatgcagtctaccactatgcaaggacgaa

SEQ ID NO: 15405 - DNA, 120 bp, synthetic construct
  source 1..120: mol_type = other DNA
gtatgctgaatgggtccatgagtgatctcttaaaaaaacataaaccattgtcaggcctaattttcagcagagtgaaatggccacccagaagattctgtgaagcctggcaacttttccctt

SEQ ID NO: 15406 - DNA, 120 bp, synthetic construct
  source 1..120: mol_type = other DNA
acatttggcaatgtttagaggtattttttttcagttgtcacagctgcaggtgggtcacagctaccggcatccagtgtgagggagccagacatgctgttaagcattctatatctgtctcta

SEQ ID NO: 15407 - DNA, 120 bp, synthetic construct
  source 1..120: mol_type = other DNA
ttgcagtgagacctcaattatctagaacctggccaaccacatacttgacctcactagatgtctttgtggcaccaaatgaaaagaacaggctaatgttggaaatggagtttaaataaacaa

SEQ ID NO: 15408 - DNA, 120 bp, synthetic construct
  source 1..120: mol_type = other DNA
cactgtctttgctcttcattccttgttgcatctctgactttcaatactgcattcacttccatctccctaaattatattctttcaatttccactagtacaagcctgtttctgctggtggta

SEQ ID NO: 15409 - DNA, 120 bp, synthetic construct
  source 1..120: mol_type = other DNA
ctgtagcaggtattttctacccatacatggcaaagctttttaaggtttagactaatacctataataaactcagaaggcggtttgggaggtggcttatcacaggctcccacacttagtcat

SEQ ID NO: 15410 - DNA, 120 bp, synthetic construct
  source 1..120: mol_type = other DNA
ggttttgtttagtctatattcatttttcactgaacatcctgtcactgtgccaaggactattccaagcatgtacagtccagttgtgaacaagataggcaaggtccctatccagaactcaca

SEQ ID NO: 15411 - DNA, 120 bp, synthetic construct
  source 1..120: mol_type = other DNA
cacaaggttgtgtagtcatcaccactgtataattccaaaacactttttaccacccccagaaagagacttcctacctattagtactcactctctactttctctttcctcaagtccttggca

SEQ ID NO: 15412 - DNA, 120 bp, synthetic construct
  source 1..120: mol_type = other DNA
gactgaaggaagtgtgacctgttgataaggtggggaacaaagaaaatcagagagacataaaagaaaagaaagagaaaagggaggggagaatttccaagagtagattttgtgatgaaaata

SEQ ID NO: 15413 - DNA, 120 bp, synthetic construct
  source 1..120: mol_type = other DNA
ttagtatggataaaaccgtgggtcttagtctcagtattctttctgtatatattatcttgattaaagatttagggatggaaaaaacacatgaaaaaatgctcatcatcactggccaccaga

SEQ ID NO: 15414 - DNA, 120 bp, synthetic construct
  source 1..120: mol_type = other DNA
tgggtttatgttaattcaagacctgtgctcttaatagcttgctattctgtttttttgttttgttttttggagacagggtcacctaggctggagtacagtggtgtgatcacagctcactgc

SEQ ID NO: 15415 - DNA, 120 bp, synthetic construct
  source 1..120: mol_type = other DNA
tgggggtgaggggctgggtttcagatgggctagaatgcagacagatctacgctgaaaagagaggacattatgtagcccagaaatatgtacaattattattacgtgtttattaaaattttt

SEQ ID NO: 15416 - DNA, 120 bp, synthetic construct
  source 1..120: mol_type = other DNA
ggtgccaaacacttaatgcacacagctctgctcagggaacactccaatgcagcttttgcgatcagatggaaggaatgactctgtcagagagtaagtgagctgtggaagcagatgatgcag

SEQ ID NO: 15417 - DNA, 120 bp, synthetic construct
  source 1..120: mol_type = other DNA
aatgtgcagattcctgcctcctccccaccaaggttggcgagtcagaatgcacatttttacaaactctcatgtttctggcaagaacatattgcagtttgggaaccactagtcattaggtga

SEQ ID NO: 15418 - DNA, 120 bp, synthetic construct
  source 1..120: mol_type = other DNA
ccgaggctggtgggttccatgccaagcttggctctaccctagactgaggcagagcaactttgtccctttacgtagaattcttatgcatccctctgggggtaagaattggaattggaatta

SEQ ID NO: 15419 - DNA, 120 bp, synthetic construct
  source 1..120: mol_type = other DNA
ctgcgctattttcttgtttgaacataaagtgtggaacatggggcaggagaagagaaccttgcaggaacaatgaggaggatttggatttccaagcccttcctggagccctctgtccactag

SEQ ID NO: 15420 - DNA, 120 bp, synthetic construct
  source 1..120: mol_type = other DNA
atatatgcatatgttaagcttgttttctatgatcctggtggagggaactaaggccaatcaaatggagatagattccaggaggacagatttgagccaatgaaggagaactttccagccctt

SEQ ID NO: 15421 - DNA, 120 bp, synthetic construct
  source 1..120: mol_type = other DNA
tttgtgttcatggtggagggtgagtgggcctttgtgttcatggtggagggtgagtgggcctttgtgttcatggtggagggtgagtgggcctttgtgttcatggtggagggtgagtggccc

SEQ ID NO: 15422 - DNA, 120 bp, synthetic construct
  source 1..120: mol_type = other DNA
gtgttccaggttctttgcatggaggtttgtgactgcactgtatatgacagacatcaagaatgacagctactcctggcccatgcttgtgtacatgtgcaccagctgcgtgtacccacttgt

SEQ ID NO: 15423 - DNA, 120 bp, synthetic construct
  source 1..120: mol_type = other DNA
acgtttaatttttttccaaaaaagttttgcattgacagctgtacaatactttggtgttaacctgtggtcttccttcacctcagtgaactctgccctgcccatctgtccagaggaagtctt

SEQ ID NO: 15424 - DNA, 120 bp, synthetic construct
  source 1..120: mol_type = other DNA
aagatccaataatctttaaatatttgttcactttaatttcttggttcccaaacacactaaactctgcttgcctcccacccctacttgtggggggagatggctctcaaagagcttgcttgt

SEQ ID NO: 15425 - DNA, 120 bp, synthetic construct
  source 1..120: mol_type = other DNA
ttctattttcttgatgagaaaaccaagagttaaagggaatgttccttgccacttccttgtaagtggcaggacttagaccagaccttccaacattagcttctaaatccaggcacttatcct

SEQ ID NO: 15426 - DNA, 120 bp, synthetic construct
  source 1..120: mol_type = other DNA
ctacttagccataaaaaaagaatgaaaccatgtctttgctgcagcttggatgcaatcagaggccactatcccacgcaaattaatgcagaaacagaaaaccaaatcccacatgttcctgct

SEQ ID NO: 15427 - DNA, 120 bp, synthetic construct
  source 1..120: mol_type = other DNA
aaaaatatcaccactaaccaaactgggattatactaatagtcctccagcttgcttctttttacatattttgacatcttggcatgtcacatatatgtaaatatggacaatttgcacattcc

SEQ ID NO: 15428 - DNA, 120 bp, synthetic construct
  source 1..120: mol_type = other DNA
acccattcattcgttcatccattcatttgtccaactgtgattgcatgcccgccctgtgtcggcagcatgtctaatggaagggcatttgtaaagaggactgaaagagtctacctttaagaa

SEQ ID NO: 15429 - DNA, 120 bp, synthetic construct
  source 1..120: mol_type = other DNA
ggtatgtctagtatctattaagggagatgatctcctctctttcaacttctagactctcctgtgcctgccattgtcagctagcaagtctgcccaccatattgtttatgaggatgatttaaa

SEQ ID NO: 15430 - DNA, 120 bp, synthetic construct
  source 1..120: mol_type = other DNA
ttggggtcagttaatgaagacttattatgctcctttaggggtataatatttccttgctttttcatgtttcttgtgtccctgtgttgatgtctgtgcatctagtaaaacagtcattttttt

SEQ ID NO: 15431 - DNA, 120 bp, synthetic construct
  source 1..120: mol_type = other DNA
agaaggccgaaggaggcctcttgggtgcattgggatccttgaacttcttttttgtctcccctttgggagggatgtaggttttcatttctctttcataatgggccttgtccacctttgcca

SEQ ID NO: 15432 - DNA, 120 bp, synthetic construct
  source 1..120: mol_type = other DNA
taatagtagattccctggcaatcccctactgtatattttattagtgaccttgtttaaaaatagcctatgtcaacagccactagtgatgcaccaagaagcaaactggcctccctggactct

SEQ ID NO: 15433 - DNA, 120 bp, synthetic construct
  source 1..120: mol_type = other DNA
cctgcacattcctgggcgcagcatgcttccctttcatttttgtgactcttcttttagccagaaaccacattgcttctcacataggtctgttgttcaccgagtcattgttggtccagacag

SEQ ID NO: 15434 - DNA, 120 bp, synthetic construct
  source 1..120: mol_type = other DNA
tggagataaaaaatgatacatactctacagggtagttgtgaggggtcaatgagtaaactacatgtcaagggcttaatgtcagtaacaaccagagtgttgctggtccagagtgaacactca

SEQ ID NO: 15435 - DNA, 120 bp, synthetic construct
  source 1..120: mol_type = other DNA
agcctcagccgcttccctgtgtaaactggtggagctgataagttcctggaaggattatgaggattaactggaaaaatgtatgtaaaatgccttgttgtacctagaaaagaattgtgctca

SEQ ID NO: 15436 - DNA, 120 bp, synthetic construct
  source 1..120: mol_type = other DNA
gggctggcaatgcaccaaaaaggccaaaatacaaaaatggaagtggagtcattggggcaataactggggacagtttgaattagaagggtaattgctccttgatgataacatcaagaactg

SEQ ID NO: 15437 - DNA, 120 bp, synthetic construct
  source 1..120: mol_type = other DNA
aactttaagaagatatagtaacatgcagtaggacttactaccctgcctctcaggagctggatctcctttattaagttcctaacttttctgagcctcattttccactttagtaaagcgggg

SEQ ID NO: 15438 - DNA, 120 bp, synthetic construct
  source 1..120: mol_type = other DNA
aattacaacacatcatgataaatattacactggagataatcagaggatatctggagacagaagccagggcagtgccctcagcttgacagggagcctgatgagatataactcctagaaaaa

SEQ ID NO: 15439 - DNA, 120 bp, synthetic construct
  source 1..120: mol_type = other DNA
aggaagctgcttatcacaaccaacaagcattatgcctagtcagtgctaggccctatggaagatataaaatgcacataggaataagcccatctctgaccctttacagttttcaaagcactt

SEQ ID NO: 15440 - DNA, 120 bp, synthetic construct
  source 1..120: mol_type = other DNA
taaaacattaacttgaggtaacacacccagtggcttggaagctgggacttttgactcaagaatgagatcctctacctctaaaaccagtactctccctgtggcatagtttcattgtcaaga

SEQ ID NO: 15441 - DNA, 120 bp, synthetic construct
  source 1..120: mol_type = other DNA
agttctgtgaggtcagcaggagcatctttgttttaatgcagagcagttggaatgttggagagattcattaacttttccaagggtatgcacctagcgaaaatagagatttgaacctcaggt

SEQ ID NO: 15442 - DNA, 120 bp, synthetic construct
  source 1..120: mol_type = other DNA
ctgggattacaggcgtgaggcactacgcccagtcttttttgcctagagcaatagaaagccattgaagaattttgagccatcgttggtaatctaatctacattctgaaaatactgttctag

SEQ ID NO: 15443 - DNA, 120 bp, synthetic construct
  source 1..120: mol_type = other DNA
actcttattccttaagaaattctgatatttaatagccaggtagagaaagatgagacagaaaagaaaacagaaatgagcagcctgagagcaggaggaaagcaaggggagtgtggttcccag

SEQ ID NO: 15444 - DNA, 120 bp, synthetic construct
  source 1..120: mol_type = other DNA
ctgaccaggtacatgagaaaatcatgtgaccctcttagctttagctttgccacttgtagtagacatgtaagtagagagaattataagaaaaattctgggccaggtgcagtgactaacacc

SEQ ID NO: 15445 - DNA, 120 bp, synthetic construct
  source 1..120: mol_type = other DNA
ttgctttctgtctctgtctctctgtctctctctgtctctcttgctctctgtctctctcactttctgtctctatctctctgtctctcttgctgtctgtctctctctcttgctctctgtctc

SEQ ID NO: 15446 - DNA, 120 bp, synthetic construct
  source 1..120: mol_type = other DNA
tgcagtttaactctatcgttctttgctgattttctgtctggttgtcctatccattgctgaaagtggagtgttgatgtcccctataattacagtattgctatctctctctccctttagggc

SEQ ID NO: 15447 - DNA, 120 bp, synthetic construct
  source 1..120: mol_type = other DNA
cagaacccacaggtacaaaaagttggtcctccataagggtggattttgcatctcacaaataccatattttgatccacatttggtcacagatgtagatccccctgatatggatgactgtat

SEQ ID NO: 15448 - DNA, 120 bp, synthetic construct
  source 1..120: mol_type = other DNA
ttttatttctgtgaaaaatgaaaatggaatgttatagggattgcactgaatcagtgaatcactctgggcaatatggagattttaacaatattaatttttccaacccactaacacaggata

SEQ ID NO: 15449 - DNA, 120 bp, synthetic construct
  source 1..120: mol_type = other DNA
accatgcttaatgaggaaaggttgaacatttttcccttgagatgagaaacaagacaaagatggccctataaagtcctatcaacattatgctggagatctcaggcagcaaaggaaagcagg

SEQ ID NO: 15450 - DNA, 120 bp, synthetic construct
  source 1..120: mol_type = other DNA
ggagaaggtaaccttggtcccacagacccagaagaccctcatctatgatttaggaagaaaaatccagcctatccaagtaacctaacagcagaaatagttcttaattaagtttgtagtgag

SEQ ID NO: 15451 - DNA, 120 bp, synthetic construct
  source 1..120: mol_type = other DNA
tgggccctttaagtctgacaattcatatttttggttttggaaattctcagctgttatttgttcagcataccttttctccattctcttgatgctttctggaattcctggatccatgttgaa

SEQ ID NO: 15452 - DNA, 120 bp, synthetic construct
  source 1..120: mol_type = other DNA
agagctgtagctttgtacagaatcagagcgtatcaagaatacttcattctggggttgtgctcatagccatcacgtacaattctgtgcatcacaaatcgatgcctcctatgtcttcttatt

SEQ ID NO: 15453 - DNA, 120 bp, synthetic construct
  source 1..120: mol_type = other DNA
gacggctcaactctgcctctgcccttataatgcaaaagcagccatagacttaaatgagtaggtataactgttccaagtaaattttatttactggctgggcatgatggctcaaacctgtaa

SEQ ID NO: 15454 - DNA, 120 bp, synthetic construct
  source 1..120: mol_type = other DNA
ctccagtatcccgtttccatttgtcctctttgctgatatttaaggagaaaatctcattgttttcattgtatttctttggtttctagtgcttttgaaacttttttttttttttgagatgga

SEQ ID NO: 15455 - DNA, 120 bp, synthetic construct
  source 1..120: mol_type = other DNA
aggtgttcgctgatgtggccccaaccctacctccctccccaccccatgatgttagaagaatctcgacagaataaattggcagcagccaagaaaaaggtaaaaagccaagaaaaaggtcat

SEQ ID NO: 15456 - DNA, 120 bp, synthetic construct
  source 1..120: mol_type = other DNA
tagtgctcccccattggacaagtggaaggtgaggcagtgccaagacccctctctggcttgctgtctacagctgtgcatggccctgaggcttctctggcttgggggatgcttggcctctgc

SEQ ID NO: 15457 - DNA, 120 bp, synthetic construct
  source 1..120: mol_type = other DNA
tggcattctgggggcatgtctcttgctgtgccatctctgcctccctgtgataagagctctgtcttcctcttcctacaggcaaagaaaacaaacaatgaaatacacaaagcacaaatggag

SEQ ID NO: 15458 - DNA, 120 bp, synthetic construct
  source 1..120: mol_type = other DNA
gtgtgtgtgtgtgtactatgataatatacaaaaacatgtctgcaagcattcataaaaaactcaggagagagtaacagggtgcctggagacacctcccttctgtaccttctgagttttgga

SEQ ID NO: 15459 - DNA, 120 bp, synthetic construct
  source 1..120: mol_type = other DNA
gatgacctggcaacctccgtgccttctcactctgtttcccgtccccttaggagcacctagaagctgccagccagcagaaccaacagctagagacccagctaagcctcgtggctctcccgg

SEQ ID NO: 15460 - DNA, 120 bp, synthetic construct
  source 1..120: mol_type = other DNA
aggaagtaaagaattaaaaatctatttaaagattgcaatatataatcatttttaaagtatttgtttaacctgatgggttttccagaaatgaaaacaagtcagttctaaaaccaaagctga

SEQ ID NO: 15461 - DNA, 120 bp, synthetic construct
  source 1..120: mol_type = other DNA
accctagaaatggcttggccttttccctcccctgagttccaaaaagaacacagccagcagaggacacattccctgacatacgagggactggaagactggtagagatgtcaggtcacaggc

SEQ ID NO: 15462 - DNA, 120 bp, synthetic construct
  source 1..120: mol_type = other DNA
ggaattcatctgaaggctgagttgggcgttcactccacagaactgctaatatagaggaacccgatgaattcaggatgacctagtcgctattttttgaggcatatatctataattggatct

SEQ ID NO: 15463 - DNA, 120 bp, synthetic construct
  source 1..120: mol_type = other DNA
tcgttcctgcttacattccatggttcaaaactacatgatagttacaagggaagtgggcagacatgcactcaagaagaaggaaataacagatttaagagttggccgacagtctgccatttt

SEQ ID NO: 15464 - DNA, 120 bp, synthetic construct
  source 1..120: mol_type = other DNA
aattctactaatatgcattgagcacctattttggtttaggccactgggatttcaatagtaaatagggcagtcaagggctagaaacaggaaagagtgagggactgtgtgtcaggaaatgct

SEQ ID NO: 15465 - DNA, 120 bp, synthetic construct
  source 1..120: mol_type = other DNA
ggatgctaaggtcaaggttagcgccatttttggtgcatccctacagcatcttgtatttgctgtgttgtggcacttaatcataatcagtggcttttgttggttggttgttcttcttgtttt

SEQ ID NO: 15466 - DNA, 120 bp, synthetic construct
  source 1..120: mol_type = other DNA
cctgacaccattgacaagtttctctgctggaaactctcacccctcttagcttccacattactctgtcctggacattaattcttggtattggctcttgttcttttgtctgatggtaaatta

SEQ ID NO: 15467 - DNA, 120 bp, synthetic construct
  source 1..120: mol_type = other DNA
aattaaatttcaacatgagtcttaaagcacccatgtcatctaggaagaagaaactgtatttgcagcaacactgtgaggtaggaaagggagtcctatgttgtaggaactggaagcagccca

SEQ ID NO: 15468 - DNA, 120 bp, synthetic construct
  source 1..120: mol_type = other DNA
atggactcagtttaactgggtgaaatggaatagtaacaaatgaaatatcctgtaaaactcctccccattctgaactccatcagaagaggatggcagaggtgtggattagcagcaatgagt

SEQ ID NO: 15469 - DNA, 120 bp, synthetic construct
  source 1..120: mol_type = other DNA
atagtctcctgttcgtattttgagatacctattttagatgtggtttccttttgtggctctgagcagtggcaatgctcatcgggtacggagacggggaagagaaggagggaaagtaagggt

SEQ ID NO: 15470 - DNA, 120 bp, synthetic construct
  source 1..120: mol_type = other DNA
caggaaacctttaatgagtgctgtattcaattagcattgtttcaaggttgatcttcccacattttgagtgtgcctgctttgctagtgctcgaagcacacaatctaaccattaccggagaa

SEQ ID NO: 15471 - DNA, 120 bp, synthetic construct
  source 1..120: mol_type = other DNA
cttgtgccccctctgtggtatgcccctgccctgttctataaatatctataaatactcatatgtatatatacctacacatggctgaccgcctcgcctctagcactgggaatctgtcaccgt

SEQ ID NO: 15472 - DNA, 120 bp, synthetic construct
  source 1..120: mol_type = other DNA
tttgccacaacctttccacaacattttttatcctgtaactttttcatcccacaaccttttttatcccataactttggtttgtgttcttcaaataaacacacttcatggttacattaaaat

SEQ ID NO: 15473 - DNA, 120 bp, synthetic construct
  source 1..120: mol_type = other DNA
ggtgctaaaggctagctgaagatcattcctagtcatttatatttatcagggtaaaagtgaagtgattgaactataaaaatacctttgaaataatttatcaatgtattaggtaaacccagt

SEQ ID NO: 15474 - DNA, 120 bp, synthetic construct
  source 1..120: mol_type = other DNA
tctgtcactccagaaggctggacgaatccaagctctcgtctctccacctgctccgtcccgtccgccttctccttcgggaggtccataaagctgctctggagccaaaataatggggtcaca

SEQ ID NO: 15475 - DNA, 120 bp, synthetic construct
  source 1..120: mol_type = other DNA
atttttccttttaagaaccaagatcttgctatattgcccaggcacagtcccactaccggtcggtgcgggagtcctgacctgctccctttctgatctggtccagttcattcatccttaggc

SEQ ID NO: 15476 - DNA, 120 bp, synthetic construct
  source 1..120: mol_type = other DNA
aggactggatggtgaagagtgagaagttttgatctggggagctcaggcagtgccccttaaaagggctaggctcaatatacaactcggtcagtaaaggtcaaggcatttccaagcccgtgg

SEQ ID NO: 15477 - DNA, 120 bp, synthetic construct
  source 1..120: mol_type = other DNA
gacgcagaggtagaaaagtaaacattacataggcatgaactacacgctgtgtggtttagagtcatacatcctcaaatgcctgttagtgtgaagaagtgcaccagtatctctcaaactttt

SEQ ID NO: 15478 - DNA, 120 bp, synthetic construct
  source 1..120: mol_type = other DNA
atagcatgtttgatgattaatgaatgaagtggactatattatccaacatcccaataaggtaaaataatcacaatgatttctcggctttggaaaaaacatttctcttattctcctacatta

SEQ ID NO: 15479 - DNA, 120 bp, synthetic construct
  source 1..120: mol_type = other DNA
aagtgttaaatgcatttgctgctgttagaagaaatacagtaaaaatatttaaaataaagaaaaaaatttgctggcagtggtaccatttgcccaaggttgggttgctgtgtcgtcatactg

SEQ ID NO: 15480 - DNA, 120 bp, synthetic construct
  source 1..120: mol_type = other DNA
gaccagggccgtttctaggtggcgggctggcttgtttgggtttgtttttttttttttttttttttttgcttcccagtgagtttctttcaaaaacatccacccatgtctccgctgaactaa

SEQ ID NO: 15481 - DNA, 120 bp, synthetic construct
  source 1..120: mol_type = other DNA
aagttgcaaagatagtacagagagctccaatctacccttctccagttccccctaatgttaccatcttacataaccacggtatatttgtcacaactaggcaactgacattggtgcattact

SEQ ID NO: 15482 - DNA, 120 bp, synthetic construct
  source 1..120: mol_type = other DNA
tgcaacaaagcttctcaaaggaattggttttactctttatttccatttgtcacctcctactcactcctcagcatactccagtctgatctctgtttcttccatgtccctgaagttccatgt

SEQ ID NO: 15483 - DNA, 120 bp, synthetic construct
  source 1..120: mol_type = other DNA
gagccaccacgcccagcctattctatggattttgacaaatgtgtaatgacatgtatccgccattgtagtatcacacagagtagtttcactgtcctaaaaattctctgtgcttcacctatt

SEQ ID NO: 15484 - DNA, 120 bp, synthetic construct
  source 1..120: mol_type = other DNA
ggcccatttgaaggtgtctcagacatttggccagtatgtctttctcaggggtttggtcacaaaggatggactcttcccacccagaggatgcagggaaagcacactgtgtctttccggtca

SEQ ID NO: 15485 - DNA, 120 bp, synthetic construct
  source 1..120: mol_type = other DNA
atacccatgagtacatgctgatataaataaatgactgaataaataaacaaatgggggagaagagaggaatctctggcataaaagaattccaagtaatgtctgaagatgctgtgtcctcaa

SEQ ID NO: 15486 - DNA, 120 bp, synthetic construct
  source 1..120: mol_type = other DNA
ctaattcaagctctgtcacccctaactagctatgtgacttcaggcaaattgttcaaccagttgagcctcagtttccgcttctgtgaaatgggggtaagagggttagaagagctcacaatc

SEQ ID NO: 15487 - DNA, 120 bp, synthetic construct
  source 1..120: mol_type = other DNA
ccagcaaatgcatttttttctttatttaaaattttttttctgtatttcttctaacagcagcaaatgcatttaacattttattgagattctcaacagctgccatttggtttgtttagcaaa

SEQ ID NO: 15488 - DNA, 120 bp, synthetic construct
  source 1..120: mol_type = other DNA
gaaatgtccaaaaaaggcaagttgatagagacagaaatggtctgatttacctcaagaagtagggattcaagctcttagggtacatgtgatacatacattagaagaaataaggaaaagaaa

SEQ ID NO: 15489 - DNA, 120 bp, synthetic construct
  source 1..120: mol_type = other DNA
atactccttacagcgtattcaagaattggagcgggctctctctgctgtgtctacacagcagcaggaagaggacagggtgagtccaaccagctgccccatcccctggcagcctggcttccc

SEQ ID NO: 15490 - DNA, 120 bp, synthetic construct
  source 1..120: mol_type = other DNA
actttccctgccccgctttgccaccttcctctgtggtccctcccagagcccgttatgctcttggttttcccaccttctgatttctctggcccctcaccccttccgggagccagtggtcag

SEQ ID NO: 15491 - DNA, 120 bp, synthetic construct
  source 1..120: mol_type = other DNA
cacaagtgcctttcctaccaccatccctacttgaggctggtgtccaggcacctgtggctccaggcagaaggctgagcgcagagccaggcctgggcagatgttctgcaggggctgcaggag

SEQ ID NO: 15492 - DNA, 120 bp, synthetic construct
  source 1..120: mol_type = other DNA
ctcctggctgtgatatgcatcactctctccatttatttatctgaaggacagggctgtgctgttctggggtcactgtgacaatgcagctggcctgtgtgagttggtggtggcctcctgaga

SEQ ID NO: 15493 - DNA, 120 bp, synthetic construct
  source 1..120: mol_type = other DNA
agttgcttggacagtggggctgacccaggacaaatgcatatattgggctggtcttcagggtgctggggtaggggcaggggcacttcagggataggaaggaggggcctgtgtgttccagaa

SEQ ID NO: 15494 - DNA, 120 bp, synthetic construct
  source 1..120: mol_type = other DNA
ctgtttccataaaaaaagaaaaaggtcgagacagtgtgtattactgattcaaaatcataacctgatgcttagagtaaatcattgtatctattgtttcaaaaaccaacgtcaggattatta

SEQ ID NO: 15495 - DNA, 120 bp, synthetic construct
  source 1..120: mol_type = other DNA
cagggacagcagtcgcatgggcagctttccttgtgatgtcacaggttcctctgggcacactgctgcctggccacgcctcctttccctttcatctttctcattgaccaatgggattggagc

SEQ ID NO: 15496 - DNA, 120 bp, synthetic construct
  source 1..120: mol_type = other DNA
attctgggtttgaatcctgcttcttcatctgctagcgatctgatttatggcaagttgcttgagctctttgggcctctcttttcacatctgtaaaataggggtagtattgtttgacttcca

SEQ ID NO: 15497 - DNA, 120 bp, synthetic construct
  source 1..120: mol_type = other DNA
aacaagtccagctagagcgagacgaatatgctaaacacataaaaggagagagggcccggtggcaggagaggatgtggaaaatgtcggtggaggtgaggtctgacccttcagcccccactt

SEQ ID NO: 15498 - DNA, 120 bp, synthetic construct
  source 1..120: mol_type = other DNA
tccagagcagctttatggacctcccgaaggagaaggcggacgggacggagcaggtggagagacgagagcttggattcgtccagccttctggagtgacagacggcatgagtgagcgggagg

SEQ ID NO: 15499 - DNA, 120 bp, synthetic construct
  source 1..120: mol_type = other DNA
atttcagaaaaatatccaaaaatatgtccaacagggttatcctgttggtaccaaagaccttcagaaatttcagagcataggatgttagcaagaagcacccaatggtgcccaggctggagt

SEQ ID NO: 15500 - DNA, 120 bp, synthetic construct
  source 1..120: mol_type = other DNA
taaccagctgctggcccaaactttttctacttacatggaacagtggaaagtgccaacagggttctcacgacgaatgtcttcatattcctcatagattccttgcttttgcctggcattaac

SEQ ID NO: 15501 - DNA, 120 bp, synthetic construct
  source 1..120: mol_type = other DNA
taacactgtattgtacacaagggcagagggacagcagtgtccaagacttctgggtttctgattcatatgactgtacagaaggagataccactcaggaggtattctgcttcagaaatattt

SEQ ID NO: 15502 - DNA, 120 bp, synthetic construct
  source 1..120: mol_type = other DNA
aagattctgccacaagcttctaaatcaactccaaataaatgttaaattggtttgagcaatagggcagcattacggagtgaatgtgtcagttcccatgaggaccactttgataaggctaac

SEQ ID NO: 15503 - DNA, 120 bp, synthetic construct
  source 1..120: mol_type = other DNA
cagactcagtgacacagacacacgagttcatcatatgctgacgcagtcacacatgtacacatgcgtgtgtgcacacacacacacacaggcccccctgctcaggatccgttcaggcctgtg

SEQ ID NO: 15504 - DNA, 120 bp, synthetic construct
  source 1..120: mol_type = other DNA
gagtggacacaacctctggaggcgcacacaactcccaggaggatgggtgtatagcaagctccccagaaactcctgggagcacaacatatacgggagcacatctgaggcacgtgcacacat

SEQ ID NO: 15505 - DNA, 120 bp, synthetic construct
  source 1..120: mol_type = other DNA
ctctcctgtccacctgtgaaatgtcctcatgctctttcaggaaaaaagcccaaagcaccttctgtgtccttggggtgcaaagacactcgctgcggcccagggggctgtgctgttgtcacc

SEQ ID NO: 15506 - DNA, 120 bp, synthetic construct
  source 1..120: mol_type = other DNA
catagagtcttcatggtgctccaggcagcgtggtcagagtccgggtggagccggtgaggagggaggaagcaggcgtctctgtggcctcgcccacccccagcctccagggtctaggggctg

SEQ ID NO: 15507 - DNA, 120 bp, synthetic construct
  source 1..120: mol_type = other DNA
ggctcagccaggctccagatgggtggccagaagcacacgggccccagatgcccagagatggaaccttggccaggggcagccacctggattccattaaaacatgtgggtggggggcctggc

SEQ ID NO: 15508 - DNA, 120 bp, synthetic construct
  source 1..120: mol_type = other DNA
ccttgacagcagccctacagctatcaccctacatcagagacaaaagtggcttcattggcaaccctagctttggggggagagggttttttgaaggggatttgcttaggctgtgagaaagtg

SEQ ID NO: 15509 - DNA, 120 bp, synthetic construct
  source 1..120: mol_type = other DNA
tgggggctcttcctgggctgctggggttcttggtggaactcagagtacttttcttcctctctggggcctcagtttccctctctatacaagtggaagattggcccagatggcctctagggt

SEQ ID NO: 15510 - DNA, 120 bp, synthetic construct
  source 1..120: mol_type = other DNA
cagcctctcaatttcccgtgcccctgcgagcctagcaccatgcctgcatgctgtcagggctaagaaggtatttgagaatggctctcagttgaagcccaaggaggtgggggtactggaatc

SEQ ID NO: 15511 - DNA, 120 bp, synthetic construct
  source 1..120: mol_type = other DNA
cattcctggcccagggcatctgaagctggaggacccacttctcactgtcgccgggtccctttggaccccaacatactcaccccaaacttgcctggcaaacaaagctcggccagcattggg

SEQ ID NO: 15512 - DNA, 120 bp, synthetic construct
  source 1..120: mol_type = other DNA
atatgaggtcaacaacagcacagactaaatagacctcaatttgtaagtgcaagagctgtaagatagcataaagatgcttggcagtaattgagaggccaccttatctgtgtcagcaatgac

SEQ ID NO: 15513 - DNA, 120 bp, synthetic construct
  source 1..120: mol_type = other DNA
gaattaatgtgtcatattctgaaatatatgttcagaatcattacacaggactttcagagtagtccaagtagcaagttaaaatcaagtgtttcctggccgggcgcggtggcttatgccagt

SEQ ID NO: 15514 - DNA, 120 bp, synthetic construct
  source 1..120: mol_type = other DNA
aagtctgatattttctatccacagattgtgatagctgaagggcaacttagtgatcatcattcaatacccactatttagtagacaaagaaactgagtttgcagacagcactcatcatgcat

SEQ ID NO: 15515 - DNA, 120 bp, synthetic construct
  source 1..120: mol_type = other DNA
actaaagttcaccatttagaagggttgggctcagacacagctgcctttgttagtcttaagatattttgagaagtgtctgttcggaacagaacttctcaaaagaagacatttatgcagcca

SEQ ID NO: 15516 - DNA, 120 bp, synthetic construct
  source 1..120: mol_type = other DNA
aataaataaataaataaataaagatattttgaaatttggtagcatgctcagattgtgggcatggagaggggctcctgaactcctctccagcctcactcgctcttgggcaagcctcatagc

SEQ ID NO: 15517 - DNA, 120 bp, synthetic construct
  source 1..120: mol_type = other DNA
gctctgccacttgcggtgtgaccttggtcaaattagttaatctctctgtgtctcactgttcttattttaaaaatgaggacagcattatacagttaatggtaatgagttatgagacaatat

SEQ ID NO: 15518 - DNA, 120 bp, synthetic construct
  source 1..120: mol_type = other DNA
gcatttgataaaatccaacaccccttcatgatgaaaactttcaacagattaggcatcaaagaaacataactaaaaataaggccaggcatgagggctcacgtgagcctgtaatcccagcac

SEQ ID NO: 15519 - DNA, 120 bp, synthetic construct
  source 1..120: mol_type = other DNA
gtagctaagttttgggcttgctacatagaaatagatattgggagtattcagttgtgcctcctctttttagcacaggattcagctagctcactccgtatgtttgtcagttaccaccatctt

SEQ ID NO: 15520 - DNA, 120 bp, synthetic construct
  source 1..120: mol_type = other DNA
cagatctcatgattcatttttcagtttcatattctgctctattttggtttctattaccaatcacatacatgattttcattcttttttttctgacaaagcgaagttgtaatgtgtctaaat

SEQ ID NO: 15521 - DNA, 120 bp, synthetic construct
  source 1..120: mol_type = other DNA
aagtctcacttgtcttattctgccctgcaatcccggaatatctgtggagatgcctaagaatcctagagatggaaatgtaaagatgggctcaagtgccagaaaaggcatatcttttcttta

SEQ ID NO: 15522 - DNA, 120 bp, synthetic construct
  source 1..120: mol_type = other DNA
agccaccgcgcccagccccattctagtttgtgtctattaaaatagactcatatagtatttgtctttttgtgagtggcttcacttagcataacgtccccaaagttcacccatattgttacc

SEQ ID NO: 15523 - DNA, 120 bp, synthetic construct
  source 1..120: mol_type = other DNA
agccgtggggtggtaatttaatgatcacactgccatcaagcctgaaacacaaatgttgacatttgatggtaatgttttccttatcaaagttgcttcaagtaaataccaatggtgtatcca

SEQ ID NO: 15524 - DNA, 120 bp, synthetic construct
  source 1..120: mol_type = other DNA
acaaataaagttttacatttttcaaaaaaaaaagaaaagtttaatatctcaatcactgctttactcagactatagcatgtatctttataatggtggtgagaccagcagttctaagtgtga

SEQ ID NO: 15525 - DNA, 120 bp, synthetic construct
  source 1..120: mol_type = other DNA
aaattgtgaattggtaggatgtatgtaacagcttatgaacatgtgaagatgcttgatagccagtacttgatagccatgtaaggaaactgcctccaaattttaagctgggaagtcactgga

SEQ ID NO: 15526 - DNA, 120 bp, synthetic construct
  source 1..120: mol_type = other DNA
gtttccttgtgattagattgaggttgcgcattcttggtgggattacttgcataggtggtggtgtgttctcaatatgtcacatatgcaggcacacaatgtccttttgtttctcactagtaa

SEQ ID NO: 15527 - DNA, 120 bp, synthetic construct
  source 1..120: mol_type = other DNA
cagcctttgcaaccttccaccccaaaggccacctcctccaggaggccatccttgacctactcagtcagatatcacctcttgtccccaacactgttattcttttttttttttttttttttt

SEQ ID NO: 15528 - DNA, 120 bp, synthetic construct
  source 1..120: mol_type = other DNA
gaaaggaaacatgcgcatgagtgagtttttgcaggggtggaagccctgcagatggggctaaccctatatcaggcccactgagcaatgagagacctgaggaattgaagtatgttggaagcc

SEQ ID NO: 15529 - DNA, 120 bp, synthetic construct
  source 1..120: mol_type = other DNA
agacaaacaagcctgtgactcaggcagggcatggcacagctggcggaaggaggcatgcctgttctttgtggctgggcggggggttatccggacacagggagtctccagcttccggctttc

SEQ ID NO: 15530 - DNA, 120 bp, synthetic construct
  source 1..120: mol_type = other DNA
aaaatagatatgtggaatctagaaacaccttgagaaaatagcctataaaaatataaactgtagtgagagtgtacaaaagtattaacagaggttcaacccataaaaaaccccatccattta

SEQ ID NO: 15531 - DNA, 120 bp, synthetic construct
  source 1..120: mol_type = other DNA
gacaaagacaatgacaaaacccatttttgatgcctgaaaagaggcaaaggcttctggctaaatatagaggccagctccgtctacccagtgaaacattagtggagttggttaaagacacga

SEQ ID NO: 15532 - DNA, 120 bp, synthetic construct
  source 1..120: mol_type = other DNA
agtaacctttccttccgccctatctgtgggcttcattcatatgcctatggccactgaactttcaacttttcctgctatattctgaaaaagcaatacagttttagagggaaatagcaccac

SEQ ID NO: 15533 - DNA, 120 bp, synthetic construct
  source 1..120: mol_type = other DNA
gagctgagttcttagtttttctataagtactaagaatgtagagtctatgaaagataatacacaagtgtggtattttagtcatgtaggcatggccgaggctgtggctgctctgctggggac

SEQ ID NO: 15534 - DNA, 120 bp, synthetic construct
  source 1..120: mol_type = other DNA
ttggattacaggtgtaagccactgtgcctggcttatatctagctcctaaagtctttaaagcacaatgatattggccattttctgatgagtcacagatgttaggcaaagtggtgaactagc

SEQ ID NO: 15535 - DNA, 120 bp, synthetic construct
  source 1..120: mol_type = other DNA
agactccatctcggggtggggggaaaaaaaagaagagaaatccttaacagagggtgaatcctgagcaattgaagttctaactaggagaagagagagaacatgagttggatgattttctct

SEQ ID NO: 15536 - DNA, 120 bp, synthetic construct
  source 1..120: mol_type = other DNA
ggcccacccagctatgatcttctccaacaccctcattctctttcaaagacaaggtgaggagggaccgtttactccattcctgtctgtttgcacagagctgctaacagatgctacattcca

SEQ ID NO: 15537 - DNA, 120 bp, synthetic construct
  source 1..120: mol_type = other DNA
cctgcctttagtctattctctacatggtagccagggtgatccctttacaatctcaatcccttctactaattgttctgctgccacatctcatccaaagtaaaagccaaagttctgcttaga

SEQ ID NO: 15538 - DNA, 120 bp, synthetic construct
  source 1..120: mol_type = other DNA
caggctcaggcatgtgcccgaggccagtcagggttgtggggaggaaggtcccccacactgccacagtctgcaggtcccatgagcctggtcctggggttgggaaggagggagtccccggct

SEQ ID NO: 15539 - DNA, 120 bp, synthetic construct
  source 1..120: mol_type = other DNA
caggctgggcttccaggccctcggcatttgggtagagctgggactgaggccagtggttgattctccagagctccaagctcaggtaagtgtcctgccctcaaagcctggtgacatggcaca

SEQ ID NO: 15540 - DNA, 120 bp, synthetic construct
  source 1..120: mol_type = other DNA
tcctgccagcctcccctcaggaaaactgagcatgacctaaggcctgtttccacatccagggacccaaagaggaggaccacaggtgtccaggctggcctaggctggggtgaggggtaaccg

SEQ ID NO: 15541 - DNA, 120 bp, synthetic construct
  source 1..120: mol_type = other DNA
gagcaacgtgtgcaaaacagaccggaggtgaggacacggagctggggtctcagaagcttcaggaggagactaccattctttggaaggccaaggggccacacacaagccgggttggcccta

SEQ ID NO: 15542 - DNA, 120 bp, synthetic construct
  source 1..120: mol_type = other DNA
caggcatccagggagacgcaggggggcgaggcctgactggaagggtccccagtgccaggaggcgtggtaggggctttgccttagaggtcatagagggtacgggctgggaagcccgatggt

SEQ ID NO: 15543 - DNA, 120 bp, synthetic construct
  source 1..120: mol_type = other DNA
tgcctgcaccaggctgtgtctactcactgggctacccccagtgcagggctcctcccattcaactgcgagcctggcctcaaatacttcaccccacatacaagttcaaaaccatggcagcga

SEQ ID NO: 15544 - DNA, 120 bp, synthetic construct
  source 1..120: mol_type = other DNA
caggtccaagttgacactggtgaaatgctgtgacctctccccagggtcccttaaagcacctgtcagtccggaaaggttcttagagttcttcaggtcaaccctcttggacaagctccagaa

SEQ ID NO: 15545 - DNA, 120 bp, synthetic construct
  source 1..120: mol_type = other DNA
tgcctgactcccaggatgcaaaggtgaaagtgtgaaaggaccttgggaggatggggttcttcttcctcccaaacacccctccattggggaggcacgtattgctctgcttctgtctggttc

SEQ ID NO: 15546 - DNA, 120 bp, synthetic construct
  source 1..120: mol_type = other DNA
tccactggaggccagcatccttgctcttacatccctaatggacctggtcacatccctgcttaagccccacagtgagtggacttctagaaaaatatggcatgttgagcagacagatttatc

SEQ ID NO: 15547 - DNA, 120 bp, synthetic construct
  source 1..120: mol_type = other DNA
acacccgagcggaggagatgcccacggccaccaggacaccctgttctctgggcccagggctgcccagagaagggaagctggcaggagtgtcttggacatgtccgccagcattcagagtcc

SEQ ID NO: 15548 - DNA, 120 bp, synthetic construct
  source 1..120: mol_type = other DNA
gggtagctttcctggagaaaagcagcctaaagggacctgtgaaggaacagtcataactgatgccccaaggaagagaagtcaactgctttttcagttacttagtccagtcaaacggaggtt

SEQ ID NO: 15549 - DNA, 120 bp, synthetic construct
  source 1..120: mol_type = other DNA
taagaaagggcaacaagaagtttaatcttggtccaggcatgtgttttgtaaaatgggaggcaatggagggacaaaataatgcactatagagcatgggctttgaaagtaacaagacccagg

SEQ ID NO: 15550 - DNA, 120 bp, synthetic construct
  source 1..120: mol_type = other DNA
tgttttatgtatttatgaaactattaggctcgtagggtttatcagactgtcaaggcacaaaaagttaatcgctgctgtgggaacaacctaaggatggctgttctggaagaagcgctttag

SEQ ID NO: 15551 - DNA, 120 bp, synthetic construct
  source 1..120: mol_type = other DNA
gcaaggagagagccaccttcctgctgcaccttctgtaggcaacagtgtctggcagactttaacacagctttgctttgttgccactgcatttattaaatattactttatacctatggcaaa

SEQ ID NO: 15552 - DNA, 120 bp, synthetic construct
  source 1..120: mol_type = other DNA
taggtaatgagtgaatgtgggtggggtggttagtgagtgggtgtgggtgtggatgggtagtgagtgcatgtgaatgtggagaggtaatgagtgagtgtaggtgtgagtgggtagtgaggg

SEQ ID NO: 15553 - DNA, 120 bp, synthetic construct
  source 1..120: mol_type = other DNA
gggtgggtagtgagtggggtgtggatggggtgggtagtgagggtgtgggtgtgggagcatagtgtgtggggtgtggatggggtgggtagtgagtgggttgtggatggggtgggtggtgag

SEQ ID NO: 15554 - DNA, 120 bp, synthetic construct
  source 1..120: mol_type = other DNA
aggcatggccagggtctcatttatagttttgtcctggtgaggagcacagtgtctggctcaggttgggtgttccctagagctattgggtgaaagacggaaagaacacggtgattctgaaga

SEQ ID NO: 15555 - DNA, 120 bp, synthetic construct
  source 1..120: mol_type = other DNA
cttgaagcctctactgctcatttattcaatccccagtgagtcttttaaataaaacttagtaccccaaccatttcctggccactcttcaagccccaggcaccaagctaaaatattcacata

SEQ ID NO: 15556 - DNA, 120 bp, synthetic construct
  source 1..120: mol_type = other DNA
tgtgaatagcaatatgctcataaacacggggagaaaataggcatggggcaaaataaacaaatagttccaagaacttggagttgtggttaactaggaaggcagcttgaaatcaggaattta

SEQ ID NO: 15557 - DNA, 120 bp, synthetic construct
  source 1..120: mol_type = other DNA
aggggtgggggaagggttgaagtggcaagaaaagagaatattgtgttttgttctctttcctgaatgtaagcctgcccaagccaaactttttattttttctgagcatttgcctcccttaat

SEQ ID NO: 15558 - DNA, 120 bp, synthetic construct
  source 1..120: mol_type = other DNA
ggcattcagagttctctttaaatttaaagttgtatgagaattttcatacatgcaatgggctaaggcagggcaacttttgtaggtgggggtaaaaaaatctcccccaccaccccatcagta

SEQ ID NO: 15559 - DNA, 120 bp, synthetic construct
  source 1..120: mol_type = other DNA
agagagtttttccatcccttgcattctaaagtaaaaggggtgggagaggaggggaaaatgagacagtttaattaaatgcagttgactcttcatttgaccagcatctcttgtctgctcact

SEQ ID NO: 15560 - DNA, 120 bp, synthetic construct
  source 1..120: mol_type = other DNA
taagtcataatatatactctcctttccacaatcattgaaatctccttcacagtggccctccctccctccactgaaagaaaagtaaaaatgccaaatgtggctggtagagaaggaaaaggg

SEQ ID NO: 15561 - DNA, 120 bp, synthetic construct
  source 1..120: mol_type = other DNA
gaataggtattgcttttaaaacaaaaaaattcaaattttgtattttttaaaaatgaaagctaaaacaccctaggattttgctatagtttgtgactactggatcctgaaaatggaacagtt

SEQ ID NO: 15562 - DNA, 120 bp, synthetic construct
  source 1..120: mol_type = other DNA
attcctttgtctttatacttagcagtagtgtaatcttagagaaagaactttaattgaagaagactttactgaagactcacttgggagtccctaggtgagtttaaaacagatcattgaaat

SEQ ID NO: 15563 - DNA, 120 bp, synthetic construct
  source 1..120: mol_type = other DNA
ggccaagtgttttttaaaagaccataatatattgtgttccagggaagaatctacgtgcttgcaacccctactgctcttaacataattctggaggttcagttgaggattttccttgtaaac

SEQ ID NO: 15564 - DNA, 120 bp, synthetic construct
  source 1..120: mol_type = other DNA
aacaaaagagtacttttcccccagaaaagtactcttttcctattttttttagtagcctacttaaattctttggattaaaaaaaattgcatttaaataaatgacattttttaaaaggggaa

SEQ ID NO: 15565 - DNA, 120 bp, synthetic construct
  source 1..120: mol_type = other DNA
ccagagtccagaaaacagacatgctctgaagacacataatcgtgggaattatgagtatgtagctgtcatttaaagtcttgagattgggtacaattatcaaaagagggactacagataaaa

SEQ ID NO: 15566 - DNA, 120 bp, synthetic construct
  source 1..120: mol_type = other DNA
ctattctccttttacaggttaggaaattgaaactgaaagaaatcaatgcctaagggcctgacagtaagagctgttcaaagggccaacaaagcagttggccaagttcttccctacagtttg

SEQ ID NO: 15567 - DNA, 120 bp, synthetic construct
  source 1..120: mol_type = other DNA
gttcaaatccacttaactccaaagaccatacctctaaccactacactcagaaggcagtaactttcacctcacatgccaagattccactgctaatgaattcctaaaacactgggtgaagca

SEQ ID NO: 15568 - DNA, 120 bp, synthetic construct
  source 1..120: mol_type = other DNA
cagagactgggtctccagtcaagttctttacagagtctaaaaatgcactcgtacagacatttcaggcttcctatacaacagtgctcttaccttttattggagttacagaccttttaggga

SEQ ID NO: 15569 - DNA, 120 bp, synthetic construct
  source 1..120: mol_type = other DNA
ttgagcctgtgtgctcagaaacacaagagattgaagcagtaggcaacagaaataaggtgaaaacagacaggataatagggtaagaagtcagggcaaggtgaatgtacaaagatgaagaca

SEQ ID NO: 15570 - DNA, 120 bp, synthetic construct
  source 1..120: mol_type = other DNA
tcctgtgtaataaatttctatcttttataaattaacttttggtatttagaaatacatattttggggtgaagtcaattctatggtatttcctagcttactatcttcctcatggagaaatag

SEQ ID NO: 15571 - DNA, 120 bp, synthetic construct
  source 1..120: mol_type = other DNA
tcttcagcatttaaaaatgtttttgctttgttttaattttcaagacgattatagagcttgggaccttcataaaagtgaactttataagccagaacaaacttaccacccgcctactgtgaa

SEQ ID NO: 15572 - DNA, 120 bp, synthetic construct
  source 1..120: mol_type = other DNA
cccacctgcctctcctgccatggactctccctcttctgcttttcccagcaggaagggcccagcctcacctatgcaacctgcagccccacgcccgccaaccagttgaggctcccctcttag

SEQ ID NO: 15573 - DNA, 120 bp, synthetic construct
  source 1..120: mol_type = other DNA
tctggggctcctcattgagtgggaaaaactgcaggacccagtgagggaaacaggaacatgccaggccgagcagtatggctaaatccatttattccaaaatcaaaagcgaaccaaaacaaa

SEQ ID NO: 15574 - DNA, 120 bp, synthetic construct
  source 1..120: mol_type = other DNA
tttcccacatctttttttgccacaacttttccacagtattttttatcccgtaactttttcatcccacaactttaattcctgtaattttttagtttgtgttcttttaataaacacacttac

SEQ ID NO: 15575 - DNA, 120 bp, synthetic construct
  source 1..120: mol_type = other DNA
gagccaccacacccgacataaggagcctcttataccactgtctcttcctctgtgattggggggctccatgcctctagctgggatgatgatgatgtccagacctgggagggccccagggct

SEQ ID NO: 15576 - DNA, 120 bp, synthetic construct
  source 1..120: mol_type = other DNA
ccataacctgtgtgcttcttatcccacaccaaactaagctttttttctagagctctgcaacttacagttagtatatgagagcagttctcaaaaatgtagtctctggactagcagctccag

SEQ ID NO: 15577 - DNA, 120 bp, synthetic construct
  source 1..120: mol_type = other DNA
gtctatatctcagttaaggtaatacttgtaattcttgtgctccatttgaagatgaaaaatataggccaaaatcatagactttgcatagaagctgcataatgaagacagctctggaggaac

SEQ ID NO: 15578 - DNA, 120 bp, synthetic construct
  source 1..120: mol_type = other DNA
tactgcagactctgccctcccctcctgctgccccaagctcgacctccctaggcttcttgggctggcgtctctgaggacctgggtcgaaaccgtgtgtttccctcccccatcgtggagcag

SEQ ID NO: 15579 - DNA, 120 bp, synthetic construct
  source 1..120: mol_type = other DNA
ggagctggagaggctgcgggagctggagaggatgctggagctggggtgggaagccctgtacgagcagcgggccgagccacgcagcggcttcgaggagctggtgcgttgccccacctgggg

SEQ ID NO: 15580 - DNA, 120 bp, synthetic construct
  source 1..120: mol_type = other DNA
agcgggtcaagaaattgaaaaaaaaaaacaaaacatttaaggggttaatatcctacacaattcatttacttcatttgaatgttagagccacttatgtttgtgtttctaatttatagttta

SEQ ID NO: 15581 - DNA, 120 bp, synthetic construct
  source 1..120: mol_type = other DNA
aagttaacaggaattaaagttgtgggatgaaaaagttacaggataaaaaaatactgtggaaaagtggcaaaaaaaagttgtggaaaaaaagtaaaaaaaaagttttatgaaaagttattt

SEQ ID NO: 15582 - DNA, 120 bp, synthetic construct
  source 1..120: mol_type = other DNA
ttcataggtagtgcctggggactgcggcggccctccccaccccacacacgctggcctctttcatggcacccaggcagtccacccatagttcagatgaatgctcagccccctcgggcttct

SEQ ID NO: 15583 - DNA, 120 bp, synthetic construct
  source 1..120: mol_type = other DNA
atgtgcccaggcctctggccgcctgagtccagccccccacacaaccccctccaagctcccagcccctacaccataaaccatgagctctgtgccctctctgatggttccacatctgccacc

SEQ ID NO: 15584 - DNA, 120 bp, synthetic construct
  source 1..120: mol_type = other DNA
cagttcctcaccatgtatgcctacctcagtcatgccccagactgcattgaagccaggctgccttgaagaagctctcccagactgcccttttccccaaggcagggtcatgatttaccaaag

SEQ ID NO: 15585 - DNA, 120 bp, synthetic construct
  source 1..120: mol_type = other DNA
gaataatttctgtttttcagatcaagaaactgagacttactatcatatttgggattaagctaaaaaaaaaaaagaaaagaaaagaaacagaggctgaacgctgtcaagtatttcacagcc

SEQ ID NO: 15586 - DNA, 120 bp, synthetic construct
  source 1..120: mol_type = other DNA
ctcatgtctttagacaacagctggaactgacacatgaaacattgtcccggggaagaaggaaatgtcttcgtgttttaagaataaagaacaggtctgagtacagatcttcctgagatgagt

SEQ ID NO: 15587 - DNA, 120 bp, synthetic construct
  source 1..120: mol_type = other DNA
aaacgcatctgaccacctgtcatcatggttcagatcaacatttgggatcaaaggcctaaaacaaagtggggctgacccagtgtggtagaacacaatgaggacatcaggaagtgttcatac

SEQ ID NO: 15588 - DNA, 120 bp, synthetic construct
  source 1..120: mol_type = other DNA
gggtttgtcatatgttttttttaacaagggaagtttaaagatcttttttgttttattgttgtaggttgcaagacaacagacagttcagaggcagggacaacagatgggggtggccaagtg

SEQ ID NO: 15589 - DNA, 120 bp, synthetic construct
  source 1..120: mol_type = other DNA
ggaaggaatcattgtcagtttgtgtcttgatctggtggtggttgggataagggtacacatcattttatacaaacactaaagctttttgctaacaacatagcaggtcaaaattcacacata

SEQ ID NO: 15590 - DNA, 120 bp, synthetic construct
  source 1..120: mol_type = other DNA
ccttaccttttacttttaaattatgttagccacatttcaagtgctcaatagccacatgtggtgtgagcagctatcacgtgtacatgccacccagtacggctgtagaagagaactaaaggc

SEQ ID NO: 15591 - DNA, 120 bp, synthetic construct
  source 1..120: mol_type = other DNA
tttcccccctctttataaatggctcagctgtcagtgactctcagcttctaaaacacacattctgcaacattcaagaggaaaccatctggaacatagtgcatgactcttactttgagtgtt

SEQ ID NO: 15592 - DNA, 120 bp, synthetic construct
  source 1..120: mol_type = other DNA
ctgttggtaagaagtggtcagatcctgaattcattctcaagaaagagcatcaagatttgttgatgggctgcatatggcatatgtgagaaagggtagaggagttgaggatatctctaaggt

SEQ ID NO: 15593 - DNA, 120 bp, synthetic construct
  source 1..120: mol_type = other DNA
tacctcattgaatccagaaataatttattacattactggacatcttaataaaaaaaagtcaaagtcttgcttgataaactgaacacaataaatggactttgtgtatggcaacttcacttt

SEQ ID NO: 15594 - DNA, 120 bp, synthetic construct
  source 1..120: mol_type = other DNA
agaaacaccattttggacacaggccttgggaaagaatttatgactaagtccttaaaagcatttgcagcacaaacaaaaactgaccagtgaacctaattaaactaaagagcttctgcacag

SEQ ID NO: 15595 - DNA, 120 bp, synthetic construct
  source 1..120: mol_type = other DNA
ggaccttttacagagaagggatccaggaccatggcaaactgagatagttttctgaaagataagcgaggtaaaattagctataacccggttaactgttccttttttcctgataccttccct

SEQ ID NO: 15596 - DNA, 120 bp, synthetic construct
  source 1..120: mol_type = other DNA
tcttgacagcatttattgttgaagaaggaagttcagggcacacctatgtgtgttctgacctggaaagtactaatagtcatattctttccatttctggaccttcttgtcttccagggtcct

SEQ ID NO: 15597 - DNA, 120 bp, synthetic construct
  source 1..120: mol_type = other DNA
tttccagagtcatatctcaagagttcagctttttgccacgtctcacgacatacaatttgcaggtcatgcatcattgccttctgctcttcttccttctctccttgaaaaggtacattttct

SEQ ID NO: 15598 - DNA, 120 bp, synthetic construct
  source 1..120: mol_type = other DNA
ttcctggaaaaataaaaaacagaccaagataaatcatagtatttagtgatgtacacttaggggattaaagtcagtgtagtaataggctatgagaggaggggggagggatacatggggggc

SEQ ID NO: 15599 - DNA, 120 bp, synthetic construct
  source 1..120: mol_type = other DNA
tcagtaaggtataaatatggagccaatcactggtccagccatgccttgtgaaatcgccttttcccatcccctaatggaatcttaggaagatccagttttggttattaaaagttcagttcc

SEQ ID NO: 15600 - DNA, 120 bp, synthetic construct
  source 1..120: mol_type = other DNA
agttcatttaaagttttgattctcaacttgatttaaatctcatctccctttcctctagtctgggcttgacacatggcttcaggtacctgaagttgcacagggctcttttccctctaccat

SEQ ID NO: 15601 - DNA, 120 bp, synthetic construct
  source 1..120: mol_type = other DNA
ctgggctggctttcctacaaaagatgttagttactgaaggtcttccatgtataaagcccagtgctgagcactaaagaacgttcagatatgtagagaagtcatacaactccatgtttaggt

SEQ ID NO: 15602 - DNA, 120 bp, synthetic construct
  source 1..120: mol_type = other DNA
aaacaagccccttcagtcttttcaaaaggtctaaagcagatctgaaaagtgtgtggcatgctgtggaaatttcatcctaggacatagtgttccagaaagcctcagtgactagcatatgaa

SEQ ID NO: 15603 - DNA, 120 bp, synthetic construct
  source 1..120: mol_type = other DNA
agagggtgagggagagggtgagggggagggggagggagagggagagctgaaaaatatttttaaaaaataatgaatgtgtctagtatttcacctaccctattctgctcataacaaaaacaa

SEQ ID NO: 15604 - DNA, 120 bp, synthetic construct
  source 1..120: mol_type = other DNA
ctggataactaagtttataaatttttcaggagctaagggagattaaattgaaagaaaacacaaagtcataccaaagtcatgtctggttaggtatttctggacacttgtggccattactgt

SEQ ID NO: 15605 - DNA, 120 bp, synthetic construct
  source 1..120: mol_type = other DNA
taaaaaatacatccagtgcactttagattagtgcactttacacattttatacatgtatttttaatgtcaatttttaaaaaatctggtatggtatatacccccacaaccccccccccaaaa

SEQ ID NO: 15606 - DNA, 120 bp, synthetic construct
  source 1..120: mol_type = other DNA
ctagtgtgcctgagtcttacattgtgaagatccttctctaaaacttcacatgtaagagaatataaatgatattggataagatcaggctggatgagaactgatacctgtaaatatgcgatt

SEQ ID NO: 15607 - DNA, 120 bp, synthetic construct
  source 1..120: mol_type = other DNA
cccccaaccccagcccctctgggctcccccaaccaaagcctagtcagtcagccccaccccttcagcaagcagcccagtccctgcccttgccaatcaccccagggtgactttgggcaggtg

SEQ ID NO: 15608 - DNA, 120 bp, synthetic construct
  source 1..120: mol_type = other DNA
tgtagctgtgtaacattctgtatcgtacctagcggaggttgcagctggcatatgaggaagaggttcttataattattcgcggctgggaaacttatttattgctagcataggagcgaggaa

SEQ ID NO: 15609 - DNA, 120 bp, synthetic construct
  source 1..120: mol_type = other DNA
aatatctacaccatcaaagcctcaggcaaacttgaagaacacacattttgtttttgacacatttcacttccctttaagaactcgcctctgcctctgcctctgcccctgaccatgcccctg

SEQ ID NO: 15610 - DNA, 120 bp, synthetic construct
  source 1..120: mol_type = other DNA
agtaatgaatgctctgtggagtttatcacaaaaagctttctggttccgtgggctgctcttcattgctaattaaattttcgaaggtgattctctacccctcccttccaatacacacaagga

SEQ ID NO: 15611 - DNA, 120 bp, synthetic construct
  source 1..120: mol_type = other DNA
ggtgttccgatgagttgagtggaggaggttggctttatagacagagaaaggctgaagaaagcagaaacagaaaataaatagcagattggttgtttcaaggtcactttccttataaaggtc

SEQ ID NO: 15612 - DNA, 120 bp, synthetic construct
  source 1..120: mol_type = other DNA
tatagggatattctcacaagtgttcaagaaatgcaaaattccaacatttgcaaaagcaagaaaactggacagcctaaatgcccagcagtacagtcataagctgggtaagttgccccacac

SEQ ID NO: 15613 - DNA, 120 bp, synthetic construct
  source 1..120: mol_type = other DNA
ctccgcacatccctcctattgctaatatctggatatttctagatctccacggtccagtacagtagccaccaaacacacatagctattgagcacttgaaatgaggctagtcgtattgaaaa

SEQ ID NO: 15614 - DNA, 120 bp, synthetic construct
  source 1..120: mol_type = other DNA
tactggtccaaaactcaaccctgtctctccctgctttttgacctttggcaagtttcataacctttcggggccctagctttttcttatttgtaaagtggtggtagttgtccagttttaatt

SEQ ID NO: 15615 - DNA, 120 bp, synthetic construct
  source 1..120: mol_type = other DNA
ggctgctttgccaaaagtgcttgtggcagtctaaagatgatcactttattagttagctcactgggatatgtgcccataaatggagagttttctttcccgagctcaaataaaggtaatggt

SEQ ID NO: 15616 - DNA, 120 bp, synthetic construct
  source 1..120: mol_type = other DNA
caccctttatgtatttagcaattactttagctgaaccagtttgttcatatagaagaaccagtcagaatgtctctgcccttcccttcctctaagcacacacaatggtcatctcctcccttt

SEQ ID NO: 15617 - DNA, 120 bp, synthetic construct
  source 1..120: mol_type = other DNA
ctacatatggctagccagttttcccagcaccatttattaaatagggaaggatcttagtcatttttgaatcctttggcagattcagttttgtatccctcttcccatttgtactgtctagca

SEQ ID NO: 15618 - DNA, 120 bp, synthetic construct
  source 1..120: mol_type = other DNA
ctttctgagctctagttcacatttcttcccttgactttgattctagtaccactttatatatgtctatgtaagtacccttgccctgcctacccaagccaagcagaatgggtattagactct

SEQ ID NO: 15619 - DNA, 120 bp, synthetic construct
  source 1..120: mol_type = other DNA
agtgtcagctttatgaggacaaggatctttgtttggtttcttcactggtatctgctaagaaggctgttctaggaaactgtcacttgatagaacaacatttcacacatccagcttcccaga

SEQ ID NO: 15620 - DNA, 120 bp, synthetic construct
  source 1..120: mol_type = other DNA
tctatattccgtatctctgtggtatttgaatagagtggccttcctaatacagcttctgtttcggacttcccaggaacatcctcaaattctgctcacttcctttcttgaagatctaacctg

SEQ ID NO: 15621 - DNA, 120 bp, synthetic construct
  source 1..120: mol_type = other DNA
ctacaaggaaactggagtggtagaaaatagtaagcactgtaacaaaggcccatgtgagctttgataggaacatagatgaagggttgagtcattttctctcagggttatggaaaagccaga

SEQ ID NO: 15622 - DNA, 120 bp, synthetic construct
  source 1..120: mol_type = other DNA
ggtcacctgctgctaagttaaaaaaatctctatcaacaggacctgtttatgaaatgatatatatactgtaacatttgacatcatggatcatcttttatgtactttgtttactgggaagta

SEQ ID NO: 15623 - DNA, 120 bp, synthetic construct
  source 1..120: mol_type = other DNA
attatctctataagcattgacttaacaagagatggcatgtttcattttgtgtaccctcatggtgtctaaagggaacgccactagatgtatattgaaaaatgaggacattctgcataaaca

SEQ ID NO: 15624 - DNA, 120 bp, synthetic construct
  source 1..120: mol_type = other DNA
atagctgaaccaagcctcgaaggatatgtagggtttaagtttctctctccggaaatctaactcttccacatatggagccaacccatagaaagtggatgtcaatacatacgtatacatgtg

SEQ ID NO: 15625 - DNA, 120 bp, synthetic construct
  source 1..120: mol_type = other DNA
tctggggggtgggtggggggtatttgtgttttatttttcattgactgttattttaagttctcaagtacatgtgtaggatgtgcaggtttcttacacaggtgaacatgtgctatggtggtt

SEQ ID NO: 15626 - DNA, 120 bp, synthetic construct
  source 1..120: mol_type = other DNA
agccaagaagacagaagccacacagtgtttgttcaggagaggatatgggagaagggaagcaacaggagcattggtgcttcacttctaaccagaagatacttttccctcaggcgcctccag

SEQ ID NO: 15627 - DNA, 120 bp, synthetic construct
  source 1..120: mol_type = other DNA
gtgaaaccgtgcactggtaaagactgtttaaaatcatacccgcatcttcctctaggtcagagcgtaaccagataacagaactgtggaaaaaaggaacagggttccttctctaacccagag

SEQ ID NO: 15628 - DNA, 120 bp, synthetic construct
  source 1..120: mol_type = other DNA
tgactccacagagagtcgacaacatgttcttcctggttggcttagggttgtgacaaagtcccttctgatgatcagcctcacttaagcaataatctcattcatatggtatcaagaacacaa

SEQ ID NO: 15629 - DNA, 120 bp, synthetic construct
  source 1..120: mol_type = other DNA
taaaatttagcatttagaaccatgtgttcacaagaattaaaaaaaaatttcagctccctctcactcttgtctcccctttccacggtctccctctccctcttctcccctttacacagtctc

SEQ ID NO: 15630 - DNA, 120 bp, synthetic construct
  source 1..120: mol_type = other DNA
ggactggcacatggtaggcatttggtactttatggaacgaaagaagaaagcctgactgaattgggacacttgtaatgcccaaactggtttttactaactctgtttttagactctccctta

SEQ ID NO: 15631 - DNA, 120 bp, synthetic construct
  source 1..120: mol_type = other DNA
tgtccatgttggatctgatacctctgctcaaattctgttaaattgccttctaaaaaaaaaaaaaaatgggaaacacttcctcccagccttgcaagtgttggagccccctccaatgtatgc

SEQ ID NO: 15632 - DNA, 120 bp, synthetic construct
  source 1..120: mol_type = other DNA
ctgttcctccaccattcttagtcataaaagataccctccaaaaagttcgagaatatctagataggcaacaacaggaacgagaaaataacatcccctggtatcaaaacatgttccactgga

SEQ ID NO: 15633 - DNA, 120 bp, synthetic construct
  source 1..120: mol_type = other DNA
cttttggcacagaatgaaactatcaggtgtgaggagggtcctagtgcaatctcttcttttcaaagatgatacatttgaagcccagggaggactgataatttgcccaaggtcacacagcca

SEQ ID NO: 15634 - DNA, 120 bp, synthetic construct
  source 1..120: mol_type = other DNA
caacaaaggtttgcttttgttgttgaaatcaagccagttaccctgtgggaagtgaagcttgctcccaccatagaactctgggcaatgatgtaaagcacacacctcacctcagatatgtct

SEQ ID NO: 15635 - DNA, 120 bp, synthetic construct
  source 1..120: mol_type = other DNA
tgagatcctagagggctctgcctctggagttggggatctcagtggacttccttctggagaagttctagagacctctgcctctggagtaggagacctcagtgggcttccttctggagaagt

SEQ ID NO: 15636 - DNA, 120 bp, synthetic construct
  source 1..120: mol_type = other DNA
gcgggcttccttctggagaagttctagagaccgctgcccctggagtagaggacatcagcgggcttccttctggagaagttctagagaccgctgcccctggagtagaggacatcagcgggc

SEQ ID NO: 15637 - DNA, 120 bp, synthetic construct
  source 1..120: mol_type = other DNA
agaagaagttctagagatttctgcctctggatttggggacctcagtggacttccttctggaggagaaggtctagagacctctgcttctgaagtagggactgacctcagtgggcttccttc

SEQ ID NO: 15638 - DNA, 120 bp, synthetic construct
  source 1..120: mol_type = other DNA
gttgcccaggctggccttgagctcttgggttcccagggcttctagtcttgctttgatatggattgttagtcacatataaaatgttatgctattattggggaaaaaaagagggatattaca

SEQ ID NO: 15639 - DNA, 120 bp, synthetic construct
  source 1..120: mol_type = other DNA
ctttctaagaagtccaaggtaaacattctcttattatgtgctaccattcccatttaccttcttgacagatctggcaaactgaagcagcacaactacaatggaggaaaagagactctgggc

SEQ ID NO: 15640 - DNA, 120 bp, synthetic construct
  source 1..120: mol_type = other DNA
acccaaaggctgccccttccctgggtggaatacagagacctcccctccccaaagctcaggttcagagcctgccctcaccgtttgccatatggcactattgtcagtgagcaggaactcctc

SEQ ID NO: 15641 - DNA, 120 bp, synthetic construct
  source 1..120: mol_type = other DNA
ttcttgatttatttcccgaggcagagtcagaactctacctatggacactagctgcactggctggtctacgtgcctggctcctcctaggaaaaagaactactggaaaggaggagctatgct

SEQ ID NO: 15642 - DNA, 120 bp, synthetic construct
  source 1..120: mol_type = other DNA
taccttatagtagatagtagttaaaattacccttaaaacttctggtatggttttaaaaatacagagctaagtgaaaggcattatgggtggccccttgtcccaggagccacagacacaggc

SEQ ID NO: 15643 - DNA, 120 bp, synthetic construct
  source 1..120: mol_type = other DNA
ttcagtcagtattggctgactaaatgagtacattcttgcgtacattcttgcaaacttaaagtcttaaatggctaatttggatttttgctgaggcggtgaggccccctgctcctgttaagt

SEQ ID NO: 15644 - DNA, 120 bp, synthetic construct
  source 1..120: mol_type = other DNA
gtaattatgattatccctattttacagatcagaaaactgaggcagagaggttaggaaacttgaccaacgacacatagctagtaagtggtagaactgggattcaaacctgagcagtcaggc

SEQ ID NO: 15645 - DNA, 120 bp, synthetic construct
  source 1..120: mol_type = other DNA
acaacatctataagcagctggcacacaaatacagatttcgtggtgtctaagcattctgcctatctctccactagcaaagctactctcacaggtgcctgataaaaaagacagcattggagg

SEQ ID NO: 15646 - DNA, 120 bp, synthetic construct
  source 1..120: mol_type = other DNA
aattttcaggaccaggtgtaaaatgaaaatgcaggtctcatgtttaaaagtcagtaaaatttaaagaacagcagagcacgaaaccaaatgtgagcccttccttctacacgtggggcccca

SEQ ID NO: 15647 - DNA, 120 bp, synthetic construct
  source 1..120: mol_type = other DNA
tgggggtggggcagggcatgggaaagggttaaatagataagcccaagacacagtcctggcccccctcatcctcttcacacaggaaccagaagggtcttcagcaacatgcatgggatcgtg

SEQ ID NO: 15648 - DNA, 120 bp, synthetic construct
  source 1..120: mol_type = other DNA
gggtgcctaccctttgtttgtttgtatcactgcaataaaactgctctccttaaatccatcagtgacttcctcagtgctaggctcaaaaagacactttgtagtccttagcgtcctaaataa

SEQ ID NO: 15649 - DNA, 120 bp, synthetic construct
  source 1..120: mol_type = other DNA
tgccaaactggggaacttcttctctcccaaagtagtgtccctgaaaaaaatctatgatcgagaacagaccagatacaaggtgagtccttccttgctttgtgcttagatttctgtcaactt

SEQ ID NO: 15650 - DNA, 120 bp, synthetic construct
  source 1..120: mol_type = other DNA
cagggctttaaggtgatcttcccttccctgctcgtctttatcagccaatcagatttctatgccttggttgaagtgtttcttttagtggtaagcaaagcaccctgattaagttcatatcaa

SEQ ID NO: 15651 - DNA, 120 bp, synthetic construct
  source 1..120: mol_type = other DNA
cctgtagcctgataatgttgtaatattatttattatagtgagtaattgatttcagtaaaatatgatctatcagctcagtgcagtttgaaattatgaatgtaaagacttcagctacatgaa

SEQ ID NO: 15652 - DNA, 120 bp, synthetic construct
  source 1..120: mol_type = other DNA
ccacctcgccataaattaatgatttagaaggaagagttgacagaacacaacggagagttagaggatcttgttattggtcactctttaccaattactagccgtggcgtgttgatcgtatga

SEQ ID NO: 15653 - DNA, 120 bp, synthetic construct
  source 1..120: mol_type = other DNA
tcggcatatcaggattccggcatcctgtgagccgggttgggaaagaaaggtggagatcttaagattcgatcgtgaaatttcttctaaagaataaaatacctaggaatccaacttataagg

SEQ ID NO: 15654 - DNA, 120 bp, synthetic construct
  source 1..120: mol_type = other DNA
tatcgttggagctgagtctccttagaggggtaacttttctaaccagtttgcccttttgcaaatttagttcaaggtactctaataaggttgtaggcagtcctggttgtgctaatgtaggaa

SEQ ID NO: 15655 - DNA, 120 bp, synthetic construct
  source 1..120: mol_type = other DNA
ctacagaggcgctgttttacatgatactttctgcattaaagtcaatacaacgcagagtccttgtgatttgtaacaagcaggttttgcagttctgacacttagctaggcagaaagtggaga

SEQ ID NO: 15656 - DNA, 120 bp, synthetic construct
  source 1..120: mol_type = other DNA
gggcttttgttgcattccagcctttgtatatgggcactggctctttcagctttcagcttttaatatttaacttcaccagtcagtcagtgctgagacagttattatggaggctaccctgtt

SEQ ID NO: 15657 - DNA, 120 bp, synthetic construct
  source 1..120: mol_type = other DNA
tgaggcctgctcacttggcttcatacatttttaatagaactcttccgtctcacgttatgagagataaaagatctatgattcaatcaggcaccttcttggctcaggtgaagagtctgtgaa

SEQ ID NO: 15658 - DNA, 120 bp, synthetic construct
  source 1..120: mol_type = other DNA
atttacttcttcctcaacctgccaaatagatgattgctgtccttggtttcttgtacatccttctggattttttactgcacataaaaggccctattctgtacctcactattttgtttggct

SEQ ID NO: 15659 - DNA, 120 bp, synthetic construct
  source 1..120: mol_type = other DNA
gtaggtaccggaaatgctctaccgtgagggtttcaaaactggttaccaactcattctgagctgggaatattaaatatccaggggaagcgaagttgtcagtatatatgcagatattttcca

SEQ ID NO: 15660 - DNA, 120 bp, synthetic construct
  source 1..120: mol_type = other DNA
ggagcactttcacagccttcttttgcttttaggacattgatgtttttgaagaatgcagtcttgcaagggactgtgttctttgcagaattacgaagagaccaattaccccgtcacgatttg

SEQ ID NO: 15661 - DNA, 120 bp, synthetic construct
  source 1..120: mol_type = other DNA
aaactgttgacaagacttcgagaaagggggaatcgagtgcttatcttctctcagatggtgagaatgttggatatcctggctgaatacctaactattaaacactatcctttccaggtaagg

SEQ ID NO: 15662 - DNA, 120 bp, synthetic construct
  source 1..120: mol_type = other DNA
cagactgccttcctcatggactgagataaggtagagagaaagaaaactcacagccacacagcacgtctgacttagttcttttccttttaatagcaacctagcacctctgagaatcagaaa

SEQ ID NO: 15663 - DNA, 120 bp, synthetic construct
  source 1..120: mol_type = other DNA
agagtgtagccaggagtttggggccagacacggaaacctagagtgccacctgtgcccattaggaagcaaatgtcgctcagcttcaaaccactttgctctctggtgcagggattctgcaaa

SEQ ID NO: 15664 - DNA, 120 bp, synthetic construct
  source 1..120: mol_type = other DNA
tatgcgtatatgcgtatgtacatacatacgtatgcgtatatttgtatatgtatgtatacacgcatatgtgtatatacgcatatgcgtatatacatatatatgtatacacatatgcgtata

SEQ ID NO: 15665 - DNA, 120 bp, synthetic construct
  source 1..120: mol_type = other DNA
gtttatatacgtatatgtatacacatatgcacctatgtttatatacgtatatgtatacacatacatatgcacctatgtttatatacgtatatgtatacacatacatatgcacctatgttt

SEQ ID NO: 15666 - DNA, 120 bp, synthetic construct
  source 1..120: mol_type = other DNA
ataattagagtttacagacacattattggagtgaaaaatgatttcaagaagatggttggaattagaatccacatataaaagtcaattgcttttctacatactatcagctcatgaggaaat

SEQ ID NO: 15667 - DNA, 120 bp, synthetic construct
  source 1..120: mol_type = other DNA
cccacaaacagggttggctcatgaggaagtaaaaactttctgagggaatgaaacagttttggacagaacgtcccaaaaagcccatggtgtcctctgattcaaccaaatccttcagaataa

SEQ ID NO: 15668 - DNA, 120 bp, synthetic construct
  source 1..120: mol_type = other DNA
agcgacacaactttcaatttcccattcatccaggaaaccctgcctcttcatccaacacaattcagaaaacttaaaaccggccaaatgtgtctaactaaaaatgaaggctggacatgatgg

SEQ ID NO: 15669 - DNA, 120 bp, synthetic construct
  source 1..120: mol_type = other DNA
ctggatgtgctggtgtttgcaggagtgagcagccaccattccttccaagttgaccttctggggctcagggtctccagctagtggctctcggggggtgcttcacagctccctgaaaaatgg

SEQ ID NO: 15670 - DNA, 120 bp, synthetic construct
  source 1..120: mol_type = other DNA
gtgttcagacctctaacactatatacaagaattggctcaaagtggatcaagtacttaatgtaagagctaaaactatataggctaagtcttcatgatcctgaatttggcaatggtttctta

SEQ ID NO: 15671 - DNA, 120 bp, synthetic construct
  source 1..120: mol_type = other DNA
aattggaattagtgccaccctcagcttggattttgaacaaggccttattctttcaggaagacaactaatggatgatagcaagttcatccacttactgggcttgtgccatgagcaaaattc

SEQ ID NO: 15672 - DNA, 120 bp, synthetic construct
  source 1..120: mol_type = other DNA
cagtgaggactactgagaaaccactttcagccttaaatcctgtataaaaaacactgattttgaggcttcagttaattagttcaaccccaagaatcgagatgggtgatcagccagggtctt

SEQ ID NO: 15673 - DNA, 120 bp, synthetic construct
  source 1..120: mol_type = other DNA
cacacatgctttttggaggttgggttaaaaaaaagctaatcacgatgagggcagaacaggcgaggaaagaaaattactattacagcttcctataaataggccccagatgtttaccaccca

SEQ ID NO: 15674 - DNA, 120 bp, synthetic construct
  source 1..120: mol_type = other DNA
ccatgtgaaggtcctttagtgtaggtctcttggttgttgtaaactctctggctttatctataaatgtcttcattgacattctcttggctttgagaaatggtgttcttgggcatttgattc

SEQ ID NO: 15675 - DNA, 120 bp, synthetic construct
  source 1..120: mol_type = other DNA
gaatgcttacagtgttttgctgttgaatataatgcgggcttacggttatatagagtgtataataacatctcatatataacatattttatgcataatataatcatattaaagacatataca

SEQ ID NO: 15676 - DNA, 120 bp, synthetic construct
  source 1..120: mol_type = other DNA
ggccacaagaaaaccagcttttaggattgtggcacaaaatattctacagcaaatctctcttagagaaatccattccttctggggagtttcaactgtgattggattccaggcatatggaat

SEQ ID NO: 15677 - DNA, 120 bp, synthetic construct
  source 1..120: mol_type = other DNA
ctctctaagctaaccagaggactgaagtgacaagcaagtactcaattcttgaatctatatacatgggattttgatgtaaggtgcatgagtcaggtacagccttcagtcaaagtagccttg

SEQ ID NO: 15678 - DNA, 120 bp, synthetic construct
  source 1..120: mol_type = other DNA
gttctctataggtatataggacaggtatatacctacacttacacgtacgtacatatatacacacatacatctccatacatttacaagattcacatcaagtaggcttttaacttttaccaa

SEQ ID NO: 15679 - DNA, 120 bp, synthetic construct
  source 1..120: mol_type = other DNA
tggggaagaacatacaaatcattcctctgtcatgtcaaaaatgtatatggtttcgttaaaataactgagtgccagcacatggctcaaactaggacccaagaggggacaaaggggacttgg

SEQ ID NO: 15680 - DNA, 120 bp, synthetic construct
  source 1..120: mol_type = other DNA
ttttatcttctccatcttgtaccaccctcggtaaaagacaagacctagaggagatggcccatagttcagcagcctacctcaggggctgtgtaggaagtataagtgtattattatatttat

SEQ ID NO: 15681 - DNA, 120 bp, synthetic construct
  source 1..120: mol_type = other DNA
gttggtttagtacgtggctactttgcaaagaatttattagcattctctctgtctctctctctgtgtgtgtaagatttagggttttctacatgtaataaatatgtcatctgtgaacagaga

SEQ ID NO: 15682 - DNA, 120 bp, synthetic construct
  source 1..120: mol_type = other DNA
tcatgaggtaaaataagaatctacaactccatgcagctaaacacaaccttggccaagtaacagaagttgacatccccaataatgggacagacatacagcatgtgcctcctgataagatgc

SEQ ID NO: 15683 - DNA, 120 bp, synthetic construct
  source 1..120: mol_type = other DNA
caactggtccctccctcaacatgtggggattacgggcattacaatttgagatgagatttgagtgaagacacagagccaggatgaatctgaaaagggtctaatatccaaaatctataagga

SEQ ID NO: 15684 - DNA, 120 bp, synthetic construct
  source 1..120: mol_type = other DNA
ttggaagtcaaaaacaaagatagcattctaagaacagcaacagaaatgtgtctagtcacctgtaagggaaccatcatcggactaacaacagaaaccttacaggccaggggaaaatgggat

SEQ ID NO: 15685 - DNA, 120 bp, synthetic construct
  source 1..120: mol_type = other DNA
cttggggaaaatggatccaatccctttacatattttccctttgccagctggtcaggaagctttgtcagaagagggtcatgtagcaacatggtgggaggaaagggttttgcttttgagatc

SEQ ID NO: 15686 - DNA, 120 bp, synthetic construct
  source 1..120: mol_type = other DNA
atataaaaaaataaaaaactaaaaataaaaatgagccagtgataaccacaaaaaaaccatgtcttggtaaaaagatactttacataattgatgttcacttcaaaatctcctcttaggtag

SEQ ID NO: 15687 - DNA, 120 bp, synthetic construct
  source 1..120: mol_type = other DNA
ccccagtgggaaaaatcagttttgcttccacctgtaaactcattttaacattccttcaccctacatagttcatggttttcttactgctcctttaaacaggttgtgcctggttcccttagt

SEQ ID NO: 15688 - DNA, 120 bp, synthetic construct
  source 1..120: mol_type = other DNA
gtcttggtcttacactgggtcttccatctacactacggcccactagcctagtcttggtcttaacatggcccactagcctagtcttggtcttacactgggtcttccatctacactacggcc

SEQ ID NO: 15689 - DNA, 120 bp, synthetic construct
  source 1..120: mol_type = other DNA
gtgtgtgtaaacccactgcaaaccctccacgtgtgcatgtaaacccactgcaaacccctttgtgtgtgtgcaaacccactggaaacccctccactgtgtgtgcaaacccactgcaaaccc

SEQ ID NO: 15690 - DNA, 120 bp, synthetic construct
  source 1..120: mol_type = other DNA
tcaacacacttcagctttcaatcggggctaaattatgggacagactgcattccatgagctttagcaatttcagaagctgctgatgacaagctctggtcctatcaagcttgccagggtgga

SEQ ID NO: 15691 - DNA, 120 bp, synthetic construct
  source 1..120: mol_type = other DNA
gaggctgcaggggaggatggagggcatttctgaccccttgcagcactcactggtaaacatggaataaggtgactctcatttaggattttttttaactttaaaaggctaacatataaatag

SEQ ID NO: 15692 - DNA, 120 bp, synthetic construct
  source 1..120: mol_type = other DNA
ctcaataactgcaacagatgcttacatactttggtatatgaatgctgagtgatacagcttggatctgtgtttccataaaatctcatgtcggattgcagtccctatgttggagggggacct

SEQ ID NO: 15693 - DNA, 120 bp, synthetic construct
  source 1..120: mol_type = other DNA
agcttaaaatcttaaaaggttttccagggtatactatcagtatgagcctacatcatcagatacagcaaacttaagttttcaaggccataaaaagatgaaggggtaggatacaaagtttaa

SEQ ID NO: 15694 - DNA, 120 bp, synthetic construct
  source 1..120: mol_type = other DNA
cttccacactgggactcaggatttagtgctgatcatctgcccacttttacagtcctggcccctgtaacgatgtctcagtcaacaactgaccccttagactgtggtcccgtaagattgtaa

SEQ ID NO: 15695 - DNA, 120 bp, synthetic construct
  source 1..120: mol_type = other DNA
gagttcatgatctcccaacatagggcaatattcagccagaaaagaggagaccagagcaaacagctcctcctttaacagctcatgtccaacaacagaagggtccagggccatcaaataaga

SEQ ID NO: 15696 - DNA, 120 bp, synthetic construct
  source 1..120: mol_type = other DNA
tgcgattcgaaatggcattcgacactgacccatttacacaatgtggcatgtggcagccctgtttcattttaaccacagcctcaactggctaagtactaggttgcaaaaggctggagcctg

SEQ ID NO: 15697 - DNA, 120 bp, synthetic construct
  source 1..120: mol_type = other DNA
aaaaagagagcaggaagaattcccagggacccagcagacaggcagcctcatgggaggaggctggactggaatggaagagagacttcattattattacactctctgtttgactttatgtgt

SEQ ID NO: 15698 - DNA, 120 bp, synthetic construct
  source 1..120: mol_type = other DNA
tcacttccgtctattctgaccagctgtcagcctattaacacagaagttcagatcacctctgtcctctgcctaaaatctctcagtgacttccaaccaagtccctgtgagggctgacaaagc

SEQ ID NO: 15699 - DNA, 120 bp, synthetic construct
  source 1..120: mol_type = other DNA
ttatatacaaacatctattttgaagccaaaacaagggagaaactcctctgcacctttggtgcttcctcacacacccttggcttagctgaaagcccctacgtgcctgcacagggaatcatg

SEQ ID NO: 15700 - DNA, 120 bp, synthetic construct
  source 1..120: mol_type = other DNA
acaaagttacacagaagcaaatatcagggaaggacttcaaaaggcctcctcagcattgagtgtccgtgtcttcctgagattcttcagtttatcaatggcagaagttactaaaatctctcc

SEQ ID NO: 15701 - DNA, 120 bp, synthetic construct
  source 1..120: mol_type = other DNA
agagcggggagctcttacagactcacagtgactccacctggcactagggcgcaaatgagagcggggagctcttacaggctcacagtgactccacctggcactagggcgcaaatgagagcg

SEQ ID NO: 15702 - DNA, 120 bp, synthetic construct
  source 1..120: mol_type = other DNA
ctattttgtatcctttgatctatatccccccatttcttccccccaacccctgaccatggtaagcactgtttaattctctgtgtatgtacctgagctctctcctttttttagattcatcag

SEQ ID NO: 15703 - DNA, 120 bp, synthetic construct
  source 1..120: mol_type = other DNA
ataaatacttccttcactagactctcttcagttaaacccttggagtgcatctttcaggactctccctgcagaagagctgaatgttttgaggcctgccatgttcacaaagacaagcttggt

SEQ ID NO: 15704 - DNA, 120 bp, synthetic construct
  source 1..120: mol_type = other DNA
gaggccccagtatctgccactggtggaaatggtatcagtgaaatcctgatcagaaatttgggatggaaaaggaaacaatgagaaaagggctgtgggaacctcctctccagagtggtagtt

SEQ ID NO: 15705 - DNA, 120 bp, synthetic construct
  source 1..120: mol_type = other DNA
tccccagcccgtgatactgaccatggcctttggcaccacagggcttcgtgggctgaggtgaaggtagcctggctgtccagctgacctatctggcctaaaaacgagaggtgcaggggatgt

SEQ ID NO: 15706 - DNA, 120 bp, synthetic construct
  source 1..120: mol_type = other DNA
tattttataaaaactgcacaaaagtctagcagaagtgccaccattaagcattaactgttgaccatcacgactaagcaacttaccagacaagaaacaggatcacacactccccacgctgag

SEQ ID NO: 15707 - DNA, 120 bp, synthetic construct
  source 1..120: mol_type = other DNA
gcacccagcctaaaactaatctttgtggtaaaagttttctcatctgcatgacaagaaatcgcctaccgaggatcacataagactcccagaggcaaaagccttctgaaaactatagcgtgt

SEQ ID NO: 15708 - DNA, 120 bp, synthetic construct
  source 1..120: mol_type = other DNA
acctacattctgcaaccacaggggccttctctcccctgtcctttccctacccagagccaagtttgtttatctgtttacaaccagtatttacctagcaagtcttccatcagatagcatttg

SEQ ID NO: 15709 - DNA, 120 bp, synthetic construct
  source 1..120: mol_type = other DNA
tcttctggtccccacagactcagagagaacccaccatggtgctgtctcctgccgacaagaccaacgtcaaggccgcctggggtaaggtcggcgcgcacgctggcgagtatggtgcggagg

SEQ ID NO: 15710 - DNA, 120 bp, synthetic construct
  source 1..120: mol_type = other DNA
agggttctactcagggagtcccagcatcgccaccctcctttgaaatctccctggttgaacccagttaacatacgctctccatcaaaacaaaacgaaacaaaacaaactagcaaaataggc

SEQ ID NO: 15711 - DNA, 120 bp, synthetic construct
  source 1..120: mol_type = other DNA
acttgtgtgatggttagaggactgcctacctcccagaggaggttgaatgctccagccggttccagctattgctttgtttacctgtttaaccagtatttacctagcaagtcttccatcaga

SEQ ID NO: 15712 - DNA, 120 bp, synthetic construct
  source 1..120: mol_type = other DNA
ccaacctaaattctaaacccaactcatctctccttcaagttcttttggcatgagcgcataacaccagtaccacagcacaacagtaacacagcacgaggtaccacagcatgccaataacac

SEQ ID NO: 15713 - DNA, 120 bp, synthetic construct
  source 1..120: mol_type = other DNA
accaataacatagcacccagtaccacagcatgccaataacacagcacctagtaccacaacacactaatatcacagcacccagtgccacagcatgccaataacacagcacccagcaccatg

SEQ ID NO: 15714 - DNA, 120 bp, synthetic construct
  source 1..120: mol_type = other DNA
ctttatcagtcctgtttgccagaactgcggttcttcactcagcgtgctcctttgccggagatgtgtcgcctccaggctgtaatccccagggcccacccaggtctctccaggtaccccggg

SEQ ID NO: 15715 - DNA, 120 bp, synthetic construct
  source 1..120: mol_type = other DNA
cggggcggtgcttgttctcccgggccccacttaccctacccgggaaggagcacagaaaaaatgtaaaaactcgtttagtttgaaaaatcaatgtagaatattaaattcaccaaacacaga

SEQ ID NO: 15716 - DNA, 120 bp, synthetic construct
  source 1..120: mol_type = other DNA
tctgaaggagtttggcagaatcgacattctcattaactgtgagtcggtgctgagtgaggttggtggcttctcacaggttggtggtaccatttggaggccctagaactctggtcatggggt

SEQ ID NO: 15717 - DNA, 120 bp, synthetic construct
  source 1..120: mol_type = other DNA
gcccaagtggacgccatgaacacagctcaatggtagagtcgggtgcccttgtgtcctgaaattccgtctttaaaaaaaaaagtaatagccttttttttttttttagacagcatctcactc

SEQ ID NO: 15718 - DNA, 120 bp, synthetic construct
  source 1..120: mol_type = other DNA
cttaggaatgaggacttttgtgagataagtggggagatgttttataaactccagttgtctccaggaagttggttgatgatggacttccgaggctagagtcacgctagcacacagagccct

SEQ ID NO: 15719 - DNA, 120 bp, synthetic construct
  source 1..120: mol_type = other DNA
ctgtggctgaatgctgcctcctttttcctttctccctggcccacacttctttcttctttgctctctttttctcttttgctgttcttgaagttttcattatggaagagttcaaacccatat

SEQ ID NO: 15720 - DNA, 120 bp, synthetic construct
  source 1..120: mol_type = other DNA
gctgtcgaaccagcctgttccaggctctgggacgtagcacgaaacggcagtgcagaacccctgcccttgggagctggctttctagtgggagacagaccacaaagtaaggcaggagctagg

SEQ ID NO: 15721 - DNA, 120 bp, synthetic construct
  source 1..120: mol_type = other DNA
ggtgctggggcctcagggaggaggtgcaggggcgttggaggaggtgcagggaagtcagggaggaggtgcaggggcgttggaggaggtgcagggaagtgagggaggaggtgcaggggcgtc

SEQ ID NO: 15722 - DNA, 120 bp, synthetic construct
  source 1..120: mol_type = other DNA
ctgggacctgcaggcaggtgccaccgcacctgggcaagctcctccgtcagtctcttgagtagctgggacctgcaggcaggtgccaccgcacctgggcaagctcctccatcagtctcttga

SEQ ID NO: 15723 - DNA, 120 bp, synthetic construct
  source 1..120: mol_type = other DNA
tcctgaagaacgggacctggcctgtggggagggtttgtaaaggtggcagaaaggtgagttatcctgacggttctagcatgtttagaggtatctgtgaaactgcttacctgtcttgagcct

SEQ ID NO: 15724 - DNA, 120 bp, synthetic construct
  source 1..120: mol_type = other DNA
acaaaaaatttaaaaaatcattagggaaaggaaaagaatgtcacaggctatgggagtaatgaggcactggttgggatgagtaaaaagaactctgcagagtgtagggacagcaggcacagg

SEQ ID NO: 15725 - DNA, 120 bp, synthetic construct
  source 1..120: mol_type = other DNA
cagggcttgtctcctcagagcgtttatggggaaaaagatggaaatgttcaagcccagtccgtactgagaagcaaatcgaacttcatacacttggtagacattttcagtggaaaaatatta

SEQ ID NO: 15726 - DNA, 120 bp, synthetic construct
  source 1..120: mol_type = other DNA
tcacctccttgtgcaccccctcacctcctgtaccccctcacctcctcctgtaccccctcacctcctcctgtaccccctcacctcctcctgtacccccctcacctcctcctgtaccccctc

SEQ ID NO: 15727 - DNA, 120 bp, synthetic construct
  source 1..120: mol_type = other DNA
acttctctagcatctcaagtctgctgacccaggccaagtcctcctctgctcccttcactccttctcctacctccgcaggtgtctgattctcatcttggtgtgaactctctgagggaggga

SEQ ID NO: 15728 - DNA, 120 bp, synthetic construct
  source 1..120: mol_type = other DNA
gaaggagcaggagctgagagcctgcgagatggtcctggaagagacccggcgtcagaaggagctcctgtgcaagatggagagggagaagagcattgagatcgagaacctgcagaccaggta

SEQ ID NO: 15729 - DNA, 120 bp, synthetic construct
  source 1..120: mol_type = other DNA
accccagaacctgcaggccaggtaggagtagttccctgatggcccgcccaccccagaacctgcaggccaggtaggagaagttccccgacggcccgcccaccccagaacctgcaggccagg

SEQ ID NO: 15730 - DNA, 120 bp, synthetic construct
  source 1..120: mol_type = other DNA
caacagctttgttgaggtagaacttaccagactcacctgttaaaagagtgcagtttggtcactcttagtggtttgtagagttgtgcagccgtcattgcaatccagcgttgcagcattcca

SEQ ID NO: 15731 - DNA, 120 bp, synthetic construct
  source 1..120: mol_type = other DNA
ctcaggaggtcaaggctgcagtgagccgtgcgcgagccactgcaccatcctgggcaatcagaccccatctctaaagttcaaaacaacatctttgtaagggtttcgggtctctgagcccat

SEQ ID NO: 15732 - DNA, 120 bp, synthetic construct
  source 1..120: mol_type = other DNA
tgtgcgcttcaggcatggtggagggggctggtccagaccctcctgaacacttcacgtggtccctacaggcaggagtgggcccttctctgctgcgcctgcctgtcttggtggcaaggtcgc

SEQ ID NO: 15733 - DNA, 120 bp, synthetic construct
  source 1..120: mol_type = other DNA
cggtgagactcgggcagtgtggttcagatcctcacccctgtggtctgcaggcttctgcggctccgaaacccgtggggccgtttctcctggaacggcagctggtccgacgagtggccacac

SEQ ID NO: 15734 - DNA, 120 bp, synthetic construct
  source 1..120: mol_type = other DNA
caggtcctggtgatcttgtcccagctagagggcaacgccggcttctctatcacccaccgcctggcacatcgcaaggcagcccaggccttcctcagtgactggacagcctccaaggggacc

SEQ ID NO: 15735 - DNA, 120 bp, synthetic construct
  source 1..120: mol_type = other DNA
tcattcacggggaggagagggaagtcttagtcttactactttatatggtcgacctccctacctgcctggtctgggaatggcttctcaagagcactcgggctcattcttagcagaggaagc

SEQ ID NO: 15736 - DNA, 120 bp, synthetic construct
  source 1..120: mol_type = other DNA
agaagagtagcttctgccctcccatctccttcggtagacacaaggcactttttttttttaaggtaaactttgtagatgaagcacaaagaatacacacaaagaaagcgcacagatcgtgag

SEQ ID NO: 15737 - DNA, 120 bp, synthetic construct
  source 1..120: mol_type = other DNA
tgtaggctgtactgcctgaagatccatggcctgtcctcactgtggcgtctgttccgggggaagaagtggaacgttctgcgccagcgcgtggactcctgttcctatgacctggaccaggta

SEQ ID NO: 15738 - DNA, 120 bp, synthetic construct
  source 1..120: mol_type = other DNA
ccatgcagagcatgttcttggtgactgtgtggccacgcaccgtcttgggtggtctggcccccacctgtctccctgcgagtcccctagtccgtggggtgtgggtggacagccctcctgcta

SEQ ID NO: 15739 - DNA, 120 bp, synthetic construct
  source 1..120: mol_type = other DNA
cgtggcatcagtcagcgtggattcagcaaggttttgttacctcgtggcattaatcagcgtggattcagcaaggttttgttcccttgtggcatcagtcagcgtggattcgcaaggttttgt

SEQ ID NO: 15740 - DNA, 120 bp, synthetic construct
  source 1..120: mol_type = other DNA
tccccagtgggtggatttttagtttggattcagtttatttataataaatacagggccgcaatagatggcctttctactccttttctgttattgctgacacatagtcctctcggtcctcag

SEQ ID NO: 15741 - DNA, 120 bp, synthetic construct
  source 1..120: mol_type = other DNA
cctctcatgctttgactctccttctgtctcatctgtagctcagccaggaaaggcggttaaggacttatgtagttaattggccccacccagataatcccggataatctcccacctcgagat

SEQ ID NO: 15742 - DNA, 120 bp, synthetic construct
  source 1..120: mol_type = other DNA
cacgtcgaggtgaccgtcaaggagaagcagctatggcctttgtggcaatcgtggtgtccaactttggcctctcaggtcagcctcatgggggcttcaacagccaggaccaaaatgaccaag

SEQ ID NO: 15743 - DNA, 120 bp, synthetic construct
  source 1..120: mol_type = other DNA
agacagccgccctggcctgtagaatcaagagcagggacagccgccctggcctgtagaatcaagagcagggacagccgccctggcctgtagattcaagagcagggacagccgccctggcct

SEQ ID NO: 15744 - DNA, 120 bp, synthetic construct
  source 1..120: mol_type = other DNA
ctggcctgtagcatcaagagcagggacagctgcccttgcttgtagaatcaagagcagggacagccgccctcgcctgtagaatcaagagcaggggacagctgccctcgtctttagattgaa

SEQ ID NO: 15745 - DNA, 120 bp, synthetic construct
  source 1..120: mol_type = other DNA
ctaccgcatcccgatggtgaactgctaactaccgcatcccgatggtgaactgccgaactctaccgcatccctatggtgaactgctaactctgccgcatcccgatggtgaactgcctaact

SEQ ID NO: 15746 - DNA, 120 bp, synthetic construct
  source 1..120: mol_type = other DNA
gagaccatccgtccatcctaaaattgggacgtttggttttctgttgttgagttggagttatttgtagagtctagagatcagtctctaggagacgtgtgatctgcagacatttccctccat

SEQ ID NO: 15747 - DNA, 120 bp, synthetic construct
  source 1..120: mol_type = other DNA
tgtgcaggcatttgcacaggtctggcggacgcactggggccatgtgtgcagtgtgtgcaggtgtggtgtacttggagctgtgtgtgtgcacaggtgtagtgggtgcactcggccatgtgt

SEQ ID NO: 15748 - DNA, 120 bp, synthetic construct
  source 1..120: mol_type = other DNA
aaggttcaggtctgtgccatgcagcttctggctcaggtgggtccgctctgggcaggaagctgcccaggtgcgagggggatggacactggagcttcgtcccatggcaagctcatttccttc

SEQ ID NO: 15749 - DNA, 120 bp, synthetic construct
  source 1..120: mol_type = other DNA
ccgccgacgggctccaccgcgggcatcccagccaccccccccgacgggctccaccgcaggcatcccagctcccacacagggaggtctgtgggacacgaggccagtacagtcgtgatttct

SEQ ID NO: 15750 - DNA, 120 bp, synthetic construct
  source 1..120: mol_type = other DNA
ccatccactttttccatcctcttctctcaccccgtcattgcctctccttccatcctctcctcccatccacttctcccaccccttcactgcctctcctcccaccctctcctcccatccact

SEQ ID NO: 15751 - DNA, 120 bp, synthetic construct
  source 1..120: mol_type = other DNA
accgagcgctcttcctccagaaggtgttctgcggccacgagcacacgcttagcaacctggagtttgcccagaaagtggagccctgcaacgaccacgtgagagccaagctgtcctgggcta

SEQ ID NO: 15752 - DNA, 120 bp, synthetic construct
  source 1..120: mol_type = other DNA
acgttttctgcaactccaggaccgtaaaatatctcgaagacggcgaaagtcgcagacccctgcagaatcagatgatccagaaggatgcccgctgtctttttggtccatttcagttgtaaa

SEQ ID NO: 15753 - DNA, 120 bp, synthetic construct
  source 1..120: mol_type = other DNA
ctgagtccactgcaacttcgggtgtcctttttgaggagccattttaccctcccagcaacagccgagtgactcgatttcttggtatctttgccagcatgtggggttgttgctacttttatt

SEQ ID NO: 15754 - DNA, 120 bp, synthetic construct
  source 1..120: mol_type = other DNA
ttcattccagtgcatgttacgacatttgattctcacaaccgccgtagggtagtgggtgatcagtttaaagctggaaagacagaacttgctcaggatcacacaagccagtaaggggcgcat

SEQ ID NO: 15755 - DNA, 120 bp, synthetic construct
  source 1..120: mol_type = other DNA
ggatgggattcaggcgtggttcccctaatggtgacatttacagtcttcacgggcgacgccaacctggatatatattatttccacattagcgggcccccatatctgagggcgcttggtgac

SEQ ID NO: 15756 - DNA, 120 bp, synthetic construct
  source 1..120: mol_type = other DNA
atgattccttcacaagtcagaaacaaactgtcccctcttcccgctaaccctaaaatcaccgctgagacacagattcacatccagcgtctctcacacactggtgcatgggaggtgaaactg

SEQ ID NO: 15757 - DNA, 120 bp, synthetic construct
  source 1..120: mol_type = other DNA
tttcgtaatggccgcctcccatcagcgagtgctcccctccgtgggcgtgctggggtgtcgggcctggctcctggtaccatgacactgggctcagggtttccacacgaaatggaattcggg

SEQ ID NO: 15758 - DNA, 120 bp, synthetic construct
  source 1..120: mol_type = other DNA
aaacattaatacctcccagtagcacggaggccagtgtttggtgatggaccagggaccccaggccagccaggccaacagaaaaccaaccacacacgggagggccttcggggcggccgtggg

SEQ ID NO: 15759 - DNA, 120 bp, synthetic construct
  source 1..120: mol_type = other DNA
tctctagggtcttgctgtacgtccctgccctcacatgccctgtgcccccaacgacagggagggcgccgaacacccgggagtgttactgtttaaagacctgaagggtgaactgttttaaaa

SEQ ID NO: 15760 - DNA, 120 bp, synthetic construct
  source 1..120: mol_type = other DNA
tcaggctctggctctggctgggctgattgtctttccagggctcaaagcacatggttttcatccggtgctcaacccagggaaggccgaggacagtctggctcagtgtggtgacctctgcac

SEQ ID NO: 15761 - DNA, 120 bp, synthetic construct
  source 1..120: mol_type = other DNA
atacgctcagcatttccctaatagccagtgcatctgagggatttttcaagtgccgtgagagccatttgcatgtttccttttgtgaagtgcctgctaaaatcctttccctctttaaaaaat

SEQ ID NO: 15762 - DNA, 120 bp, synthetic construct
  source 1..120: mol_type = other DNA
cggacctgacatctgagaatgcgccctgcacacatgctgccggcagactttgggggaagcttttcccctcccataggtttgcatgaaaacagctttcaccttcttcccagcccagaaaca

SEQ ID NO: 15763 - DNA, 120 bp, synthetic construct
  source 1..120: mol_type = other DNA
ggtttataatggaaatttaagatgaaatactcggaagagaaaatctgcagacaatggcgaatgccacatggcgcctcttggagtggcttcccagagctctagactttggaatcagttctc

SEQ ID NO: 15764 - DNA, 120 bp, synthetic construct
  source 1..120: mol_type = other DNA
aaaattttactgccttggaatcagatggaaacgtggtttctctgaactaaatatccgagtgctaatcagtaatgttccgtagtgactgacgcagagggccacacagctctcagccctaaa

SEQ ID NO: 15765 - DNA, 120 bp, synthetic construct
  source 1..120: mol_type = other DNA
ccatgctgcaaactcatcttgaaggcagagctaaagtcacgtgtatggggccatctgcagcccagcacacagaagcaatcctgtggggaaccaggcccaaagccactctcatgccggtac

SEQ ID NO: 15766 - DNA, 120 bp, synthetic construct
  source 1..120: mol_type = other DNA
ctggcctgtggtcacccagagccaagctctgcacaggaacctccagaaccggcctgagcttcacagctgcgtctgcccgctggccatgtctcacgtcctgaggacgtttcacaggagggc

SEQ ID NO: 15767 - DNA, 120 bp, synthetic construct
  source 1..120: mol_type = other DNA
ttgtgtggacaaacagctgagaaaaggcattactaacatggacgtgaagaaagtcgcctcggtttttgggtgtgatgtggtgttggtgtcgtgttgttgcgaaggccctgtctgaaagtc

SEQ ID NO: 15768 - DNA, 120 bp, synthetic construct
  source 1..120: mol_type = other DNA
ctactcaggaggctgaggtggcagcacagcttgagcccagtaggttgagactagcctgagcaacagagcaagatcccagctctaaaaaagagaaatcctccctaagagcactgctttaga

SEQ ID NO: 15769 - DNA, 120 bp, synthetic construct
  source 1..120: mol_type = other DNA
atcaggtgtgtggctgccccagtggctctgatatctttttaaatcatcccttacccggtagaggtccacactatttataggtaaaagagtacgaagtctagatttgcttttcactccaga

SEQ ID NO: 15770 - DNA, 120 bp, synthetic construct
  source 1..120: mol_type = other DNA
aatgacagagtcagccaacgacagaatcagagacaacgacagagtcagccaacgacagaatcagagacaatgacagagtcagccaacgacagaatcagagacaacgacagagtcagccaa

SEQ ID NO: 15771 - DNA, 120 bp, synthetic construct
  source 1..120: mol_type = other DNA
agacaatgacagagtcagagacaacgacagagtcagagacgacagagtcagagacgacagagtcagagccaatgacagagtcagccaatgacagagtcagagccaacgacagagtcagcc

SEQ ID NO: 15772 - DNA, 120 bp, synthetic construct
  source 1..120: mol_type = other DNA
acagcgtcagccaacgacagaatcagagacaacgacagagtcagccaacgacagagtcagagccaatgagagtcagagccaacgacagagtcagagacgacagagtcagagccaacgaca

SEQ ID NO: 15773 - DNA, 120 bp, synthetic construct
  source 1..120: mol_type = other DNA
tgcaacaattattaagctgtggctctctccgtcataaatgttgccaaacccccagatgtttaaatttctagaccaagaagacagacccccaaagtaccaaaacaaaaacgtgcaagtcca

SEQ ID NO: 15774 - DNA, 120 bp, synthetic construct
  source 1..120: mol_type = other DNA
cacgaaagacacaagagccatcctcagtctccatgcaaagcccagctgtcccattgagggcggaaccaagctgggcatgcaagagccagcgcatccccagcttcctacacatccacacag

SEQ ID NO: 15775 - DNA, 120 bp, synthetic construct
  source 1..120: mol_type = other DNA
acacagacacccaccccaaaccagcctcctacatgtccacacagacacccaccccaaaccagcctcctacacgtccacacagacaccccaaaccagcctcctacacgtccacacagacac

SEQ ID NO: 15776 - DNA, 120 bp, synthetic construct
  source 1..120: mol_type = other DNA
caaaccctagactcaggagtctgagtactttctcaagattttgggggaaacactggaaaagccaacctgcagcagacgcggtgtgtgcatacacgcatacacatctaagtgaactagaca

SEQ ID NO: 15777 - DNA, 120 bp, synthetic construct
  source 1..120: mol_type = other DNA
aagcaaactagatgcttgtatataaattccgtgtctgcagcagatgcagtgtgtatacacgcacacacatagaagtaaagtagacatgtgtatataaattgcgtgcctggctacacacag

SEQ ID NO: 15778 - DNA, 120 bp, synthetic construct
  source 1..120: mol_type = other DNA
aggtgagagtcagagtcatcggcatggaccaggttgaccttcgtatacttacagatggataggtggatacgacagagaagcaatcaaatgtgtgaaatgagatagtgacacacagagcct

SEQ ID NO: 15779 - DNA, 120 bp, synthetic construct
  source 1..120: mol_type = other DNA
atcacgacccagacacagactcacggtgacagcacgggatcacgacccagacacagactcacggtgacaacacgggatcacgacccagacagactcacggtgacagcacgggatcacgac

SEQ ID NO: 15780 - DNA, 120 bp, synthetic construct
  source 1..120: mol_type = other DNA
acagcacgggatcacgacccagacacagactcacggtgacagcacgggatcacgacccagacagactcacggtgacagcacgggatcacgacccagacacagactcacggtgacagcacg

SEQ ID NO: 15781 - DNA, 120 bp, synthetic construct
  source 1..120: mol_type = other DNA
tgacactgtcaaggtcggaatcctgcacaggaaagtctgggagactcacagaccagggagggagggaggagacgccaggacaaaaccgggtcccagaacggaacaggcacgggtggaaaa

SEQ ID NO: 15782 - DNA, 120 bp, synthetic construct
  source 1..120: mol_type = other DNA
tggcacaccgggcacctgcagatggtgagttgtggggtgggggcaggagatgggagggatggatgctgctgggagtggatgcacgcagcaccctgcacacagaagctcactcagtttcat

SEQ ID NO: 15783 - DNA, 120 bp, synthetic construct
  source 1..120: mol_type = other DNA
atcccacccacctggactcccacgcagcccgcgggctgtctccagaccactgtccttccggaatgcatgctccacaggcagccagagggagccgcaaacatggcgtgttggatttccatg

SEQ ID NO: 15784 - DNA, 120 bp, synthetic construct
  source 1..120: mol_type = other DNA
agcaccctgctccagtgaatctttcaaccctcttcccattcaccaattctctcttcagtgctgtccacactggagttggttctgaccacttttgtagtgtttttttccacttaaatgatt

SEQ ID NO: 15785 - DNA, 120 bp, synthetic construct
  source 1..120: mol_type = other DNA
cgggcaggtgcttggcaaatacgcaatgtcgaatgaatgtctcctcagcaagggtgcctggcacagcttttataagcagaatggcccctcggccgtgagggcgagtacctgggtgagcaa

SEQ ID NO: 15786 - DNA, 120 bp, synthetic construct
  source 1..120: mol_type = other DNA
cacacagtcgtcgctcaaccaatcacagcacacagtcggcactcaaccaatccctgcacacagtcggcgctcaaccaatcacagcacacagtcggcgctcaatcaatccctgcacacagt

SEQ ID NO: 15787 - DNA, 120 bp, synthetic construct
  source 1..120: mol_type = other DNA
cgcgtagagcacggccgcgggccgccggttcagcatgatgtgcaggtaggtctccttgtagttccaggtgtgcacgttgaggctgaggaagtagacgccgggcaccgtgcagaggaagcg

SEQ ID NO: 15788 - DNA, 120 bp, synthetic construct
  source 1..120: mol_type = other DNA
gttcacctgtgttgtggcgtgtggagctttcttccttttcatggctgagtaatattccagcgtgtgaccagaccacgttccgtttgttcacgggtctgttggtgaacaccagggctgttt

SEQ ID NO: 15789 - DNA, 120 bp, synthetic construct
  source 1..120: mol_type = other DNA
taggggccggaggcggggtgtgtgcagggccagggtgtaccgtgctggtcctcccagggctgcttggggagagcctgtttccttagtggtgttttgaataagaatgcgcggctccctcga

SEQ ID NO: 15790 - DNA, 120 bp, synthetic construct
  source 1..120: mol_type = other DNA
gtccttgccattggaggagctctctgggattgtggggctaattttgggtgggtgctgggggaaggggaggcagaggatctacgatgggtaggggccctgcagacccaagagctgggaccc

SEQ ID NO: 15791 - DNA, 120 bp, synthetic construct
  source 1..120: mol_type = other DNA
cactcggggtctctgacccagtaggctggcctggctgtgtggcctcaggcacactcggggtctctgacccagcaggctggcctggctgtgtggcctcaggcacactcggggtttcggtga

SEQ ID NO: 15792 - DNA, 120 bp, synthetic construct
  source 1..120: mol_type = other DNA
gcccacaggcatgcggatcctggtcactctgctgctggatacgctgcccatgctcgggaacgtccttctgctgtgcttcttcgtcttcttcattttcggcatcgttggcgtccagctctg

SEQ ID NO: 15793 - DNA, 120 bp, synthetic construct
  source 1..120: mol_type = other DNA
ccctcacccctggatcctctcagccctcaccccagggctgcctcctttccctcaccccaggcttccctcccctcgtcccttgccctttgcccctcatccgcttccaggagttgctgaggt

SEQ ID NO: 15794 - DNA, 120 bp, synthetic construct
  source 1..120: mol_type = other DNA
tccactggaggggatctccttggattcctggcctcctctctagacggcagctgattaggctccttttgagatgctgctgcagccctcttgaccctttgggtcttgatgcagccaaacctg

SEQ ID NO: 15795 - DNA, 120 bp, synthetic construct
  source 1..120: mol_type = other DNA
ccattctctgtcttgacccggttgcagggacctggctgtcctttataatcaactgagttgcccgagtggctctgtgtgacccgaatgctggatgcatcgtgtggggagaagccagcctcg

SEQ ID NO: 15796 - DNA, 120 bp, synthetic construct
  source 1..120: mol_type = other DNA
gatccaaatgattgcaagtgacttaactgcctgtgagaacacatctcaaaacgatgtcaaggaatagaacacaacccagcacgcaacaaaacactccagagagtactcacgagatccggg

SEQ ID NO: 15797 - DNA, 120 bp, synthetic construct
  source 1..120: mol_type = other DNA
agttttctctctcaaaaaatatttgaaagagaattggcagtttgaagcaacaacagcaaagcgagtgcaggtatcgtgtggtttatggaatacacaagggtgcggcgtgtgctacagtaa

SEQ ID NO: 15798 - DNA, 120 bp, synthetic construct
  source 1..120: mol_type = other DNA
gatgtaccacagttgttctacccattcgccttttgaaggacactttggttccttcaactttttggcaattatgggtaaagatgctatcaacatcatgtgcaggtttttgtgtgggcataa

SEQ ID NO: 15799 - DNA, 120 bp, synthetic construct
  source 1..120: mol_type = other DNA
atgagaacttggctagttacagggtctcaaggaatctttattctgcgtcttcattctgaactggatggaaccttcctgagcgcagagtcctttccactgtgaattatgggtttgttatcg

SEQ ID NO: 15800 - DNA, 120 bp, synthetic construct
  source 1..120: mol_type = other DNA
atgggatggagagcacagggagctggggccggggatgagaccatggggagctggggctggggctgggactagtccatggggagctggggctgaagttgggggtgagtccatggggagctg

SEQ ID NO: 15801 - DNA, 120 bp, synthetic construct
  source 1..120: mol_type = other DNA
ccatttcctctgaagcaggtgaaggtccccataatggaaaaccacatttgtgacgcaaaataccaccttggcgcctacacgggagacgacgtccgcatcgtccgtgacgacatgctgtgt

SEQ ID NO: 15802 - DNA, 120 bp, synthetic construct
  source 1..120: mol_type = other DNA
ccatcccaccttctagggatcacagagacagcacggggtgacccccagggaacactgagcccctagaagcacttccacacgcccactggaggttttgcggggtgggagtcggagggatga

SEQ ID NO: 15803 - DNA, 120 bp, synthetic construct
  source 1..120: mol_type = other DNA
aagtccccgtagtggaaaaccacctttgcaacgcggaatatcacaccggcctccatacgggccacagctttcaaatcgtccgcgatgacatgctgtgtgcggggagcgaaaatcacgact

SEQ ID NO: 15804 - DNA, 120 bp, synthetic construct
  source 1..120: mol_type = other DNA
tggacgcccatcctctctagtgctgactctcattaaagtgcatgatggaaagcaggtgtggccgtcactgtgtttctggtcgtgggtgtcacgggggaggaagggtctaggcatgtctcg

SEQ ID NO: 15805 - DNA, 120 bp, synthetic construct
  source 1..120: mol_type = other DNA
agttaggatgcagacgacagccaaacagtgctggggaaagcagggaggaccctgccctgagcagaggccatgcgcccgcctgtcctgttccctctgcagctgttctgggcaggtccataa

SEQ ID NO: 15806 - DNA, 120 bp, synthetic construct
  source 1..120: mol_type = other DNA
actgacaccatcatcacccaaacagtatgcagaatctccccgatccgtgcacagcacacagagacggctgcaggtgcacacacacacacgcacacaggctgcaggtgcacacagacacac

SEQ ID NO: 15807 - DNA, 120 bp, synthetic construct
  source 1..120: mol_type = other DNA
tgtacacagacacacgcacacaggctgcaggtgcacacagacacgcacacacacacacaggctgcaggtgcacacagacacacacaggctgcatgtctacacagacacacacacatacat

SEQ ID NO: 15808 - DNA, 120 bp, synthetic construct
  source 1..120: mol_type = other DNA
ccttcctagaattaggaagccatcatgaggaggctgagctcaggccaccagcccctgaagccacagcgtgtctcaaactcccgcagccactgcacagaagttgggttgggggtgaggggt

SEQ ID NO: 15809 - DNA, 120 bp, synthetic construct
  source 1..120: mol_type = other DNA
gggcacaccacacagggactgccggccaacaccgcacagagacctcagcagcgtggggcacaccacacagggactgccggccaacaccgcagagacctcagcagcgtggagcacaccaca

SEQ ID NO: 15810 - DNA, 120 bp, synthetic construct
  source 1..120: mol_type = other DNA
ccctgcctggtgctcggttcagacaagctggggcccagcagaagcaaagaggcggtcactgccccacctacccgacatcgagtcccgccctcgcagacctcctgcagcctcactccccac

SEQ ID NO: 15811 - DNA, 120 bp, synthetic construct
  source 1..120: mol_type = other DNA
tgacaggcaacgcagctctgcgctcacggacacgcaggcccggccagtgccaggatggggtcaggagccccggggctgttcttcacagaatttaacttgagtctcagtcagagccaccct

SEQ ID NO: 15812 - DNA, 120 bp, synthetic construct
  source 1..120: mol_type = other DNA
cccacacaagatttcaactcaccttgaaatctcgtttcagtgacgttgaccttccctgagagatcccggcggcaatcactgaacctgagtggatcatcggcccttcctggagaccagaag

SEQ ID NO: 15813 - DNA, 120 bp, synthetic construct
  source 1..120: mol_type = other DNA
gcatttctgtatgactactcatttcttacgtaatttaatatgtgcaaataccagttgttaccactttcagaaaaaaaggtgaccccttcacacccagccagcccatctgcacacagtgcc

SEQ ID NO: 15814 - DNA, 120 bp, synthetic construct
  source 1..120: mol_type = other DNA
ggccccagggaaggggagctcagcacacacttcggggccccagggaaggggagagcggcacacacgtcggggcctcagggaaggggagctcagcacacatgtcggggcctcagggaaggg

SEQ ID NO: 15815 - DNA, 120 bp, synthetic construct
  source 1..120: mol_type = other DNA
gacgtggggacagaaatgttgccggtctccagcatcaggagggtgtgtgcgggctgtgctcagatgatggatgatggcgggaaagctgagcggatataggagctgtggcctgggtgaggt

SEQ ID NO: 15816 - DNA, 120 bp, synthetic construct
  source 1..120: mol_type = other DNA
gatagcaagagaaacataaatgaaaattctaagaaacacttagacccaccagggagctgttctggatgaaaacactctgagatactactttcctgagcagttctgctactcacacgcaac

SEQ ID NO: 15817 - DNA, 120 bp, synthetic construct
  source 1..120: mol_type = other DNA
atgtgaccatcggtgtgagcatccgtgtgagcatgtgaccgtctgtgagtgtgcgacggtccatgtgactgtccgtgtttccgtgtgtgtccatgtgagtgagcgtccatgtgagcgtgt

SEQ ID NO: 15818 - DNA, 120 bp, synthetic construct
  source 1..120: mol_type = other DNA
gtgtaagcatccgtgtgagcgtgtgactgtccgtgtgagcgtgtgaccatccatgtgagcatccgtgtgaccgtgagcgtccgtgtgagcgtgtgaccgtccgtgtgtgaccgtccgtgt

SEQ ID NO: 15819 - DNA, 120 bp, synthetic construct
  source 1..120: mol_type = other DNA
ccatccgtgtgagtgtgaccatccatgtgagcatccgtgtgaccgtgtgagcgtccgtgtgagcgtgtgaccgtgtgagagagtgaccatccatgtgagcatgtgtgaccgtccgtgtga

SEQ ID NO: 15820 - DNA, 120 bp, synthetic construct
  source 1..120: mol_type = other DNA
ccgtgtgagtgtgtgaccatccgtgtgagagtgtgaccatccatgtgagcatccgtgtgagcatccgtgtgaccgtccgtgtgagcatccgtgtgaccgtccatgtgagcatccctgtga

SEQ ID NO: 15821 - DNA, 120 bp, synthetic construct
  source 1..120: mol_type = other DNA
gagcatctgtgtgaccgttcgtgtgagtgtgtgaccgtccgtgtgagtgtccgcataaccgtgtgagcatccgtgtgatcatccgtaaccgtgtaggcgtccttgtgagcctccgtgtga

SEQ ID NO: 15822 - DNA, 120 bp, synthetic construct
  source 1..120: mol_type = other DNA
gactgggcacacaccggcagccacagctccgaagctggcaagaaggtatggcgggcttggcccacagggaccaccctagcctctcccagaggctctctcagcttttgacgacgatctttg

SEQ ID NO: 15823 - DNA, 120 bp, synthetic construct
  source 1..120: mol_type = other DNA
tgaggttttagtgctgtgcctggcgccactgggaccctgctgacaatgaaggggtttaggtttgataggcagaacttcttgccttgtagagtgaaagacggctgcttctggacagaggca

SEQ ID NO: 15824 - DNA, 120 bp, synthetic construct
  source 1..120: mol_type = other DNA
cttgaagccccacgcctgtgccaccaggtgtgtctgggggaggagtgagtctatgtggtggggccctggagattttgggggtcttgcaccctctaattcagcccatgtggcccagctgag

SEQ ID NO: 15825 - DNA, 120 bp, synthetic construct
  source 1..120: mol_type = other DNA
tgtctcccatgaatggttgtctgattcttggggtggccagacaatggcctgttgagggacggccagtgtcattttcccaggcagttgagctgaggtcagggttttggtggcattttgaga

SEQ ID NO: 15826 - DNA, 120 bp, synthetic construct
  source 1..120: mol_type = other DNA
tttctgacacagatatgtcggtgtcaccctttgctggaagccaggtggttcccagcgcccttgggatgtaggcttctcctatggaaccaggccctggggccagccctgcctcagccctgc

SEQ ID NO: 15827 - DNA, 120 bp, synthetic construct
  source 1..120: mol_type = other DNA
cgtgttttttgtgggcatggctctctggggagcccaccggctctattctctcaggaactcgccgacatctgtgttgccatcattttaccaggtaaggcggtttctgtgtgcagtgagctg

SEQ ID NO: 15828 - DNA, 120 bp, synthetic construct
  source 1..120: mol_type = other DNA
ggcaggacccccagcccagcccaggacccccagtagagtcctcacctcagcgtggaggcctgagaacgtgaggaaggagctgtccagcacggacgagtccaggcagctgtcgatgtccag

SEQ ID NO: 15829 - DNA, 120 bp, synthetic construct
  source 1..120: mol_type = other DNA
ctggacacatgccccgtgctgtgtggaggagaggaggccacacaggtgaggctgaggggcaggaagggctgggcaggaagaggctgccccgacccctacggcacccacctgtaggcagag

SEQ ID NO: 15830 - DNA, 120 bp, synthetic construct
  source 1..120: mol_type = other DNA
gtgacatgcaaacatggctgcacacgcctcagtccacaccacaaccagtgacccgcactgcacacctgtccacgcctcagtcatgccacaaccggtgacccgcaccacacacccgtccct

SEQ ID NO: 15831 - DNA, 120 bp, synthetic construct
  source 1..120: mol_type = other DNA
agaagggcaattccaatgaaaggaaaatggaggtactgaagaaacagccacggggagggtgctggcgcctccgtctgagagacgagctatgcagtcaggatcgcgggtggatgcacagtc

SEQ ID NO: 15832 - DNA, 120 bp, synthetic construct
  source 1..120: mol_type = other DNA
tggagaggttcagatggtaactccccgctgggtctctgctcctgggcagggaaggggtagcggacgtgagcccaggctccgccaggttggatgtcgcagtctcagagcccatacccggtc

SEQ ID NO: 15833 - DNA, 120 bp, synthetic construct
  source 1..120: mol_type = other DNA
ccatgaaacagaaagcaaatttcaccagagacacccatggaagccctacgagaaacgccttccccccaagaacaaggccagggggccgcgtgtgccccacccgctgcacgcaccgtccag

SEQ ID NO: 15834 - DNA, 120 bp, synthetic construct
  source 1..120: mol_type = other DNA
gtagagaaaagagaagggagaagaagaggagcagggggaaagggaggggaagggggataagggaggggaagggggatgagggggatgaggaagatgaggggaatggacaaaaggacgggg

SEQ ID NO: 15835 - DNA, 120 bp, synthetic construct
  source 1..120: mol_type = other DNA
ggaggggaggaggggaagggctaggggaggggaggaggggaggggctaggggagggaagggggaggggaggggaggggagagtggagggcacagagcagcatcttcttagtccctcccca

SEQ ID NO: 15836 - DNA, 120 bp, synthetic construct
  source 1..120: mol_type = other DNA
cgcatgcagcagatgtgacgtcccctcccaggctgcactcacctcgttcagcacggtgaccagggccaacgagtactcgatgacgtgctggggatcggcctgccgcagcagccctgggag

SEQ ID NO: 15837 - DNA, 120 bp, synthetic construct
  source 1..120: mol_type = other DNA
agcagcaagagccaggcccggggagggcggggggcgcagttcaggggcccagcttccctgtccactccccccacgcctggcccctccctcaccccagtaggggcctaagccatcagccca

SEQ ID NO: 15838 - DNA, 120 bp, synthetic construct
  source 1..120: mol_type = other DNA
gggcagcatgaagcagagcagaaggcagaggtgaaggtggagcccgcccccgccctgccccgccccatcccctcccctccccacccccgcccacctactgagagcttgaagaccgccgcg

SEQ ID NO: 15839 - DNA, 120 bp, synthetic construct
  source 1..120: mol_type = other DNA
gagactcacgggggctcgtgtgaggtcagggagcagagttttaaattcattttgtgaaatgagacagtggaatgagttagcggagccactgtcagagccgtgactttccaggaatttaaa

SEQ ID NO: 15840 - DNA, 120 bp, synthetic construct
  source 1..120: mol_type = other DNA
tgttccgtggctgcaagcagccgcagggcacaggcagggcaggcccaagtgccctccagctgggctggcaagtggggcagccatgacgaggcgttggcggagaggtacggggcccgggga

SEQ ID NO: 15841 - DNA, 120 bp, synthetic construct
  source 1..120: mol_type = other DNA
agcccagtgctgcgtccgtctccggccagccgactgacccaggccggcccccaggcaggccccacccaatccacccccaggacacctggaatgagctggtgtctctggaacccctgctct

SEQ ID NO: 15842 - DNA, 120 bp, synthetic construct
  source 1..120: mol_type = other DNA
cgaaaacccccccaccagcccctcctcctcagcccaggctccaccgcgggcgctcggcaggcccctaaccacagccagcgtctcaggcccctgcctggccccccgcacacctccgggctg

SEQ ID NO: 15843 - DNA, 120 bp, synthetic construct
  source 1..120: mol_type = other DNA
caccattgccagggcggccccggcccaggcctgacactgctcctgcgcctgcagccaggccgccttctccaccaccaggcggtagcagtgcccgttgccagggaagatctccgtgtccga

SEQ ID NO: 15844 - DNA, 120 bp, synthetic construct
  source 1..120: mol_type = other DNA
tgctgttcccttggcccggaggccccccccagagaggccttcctgagccctgcccagtgtctgcagggcccaggtcccacctggctgggaaggacagagctggccccacccaccggcact

SEQ ID NO: 15845 - DNA, 120 bp, synthetic construct
  source 1..120: mol_type = other DNA
aagggcacggacccccaacccatcccacgcagggccaaggccccccatcccctgtccacagtcccccacagagccaaggtctcccaaccctgtccacagcccccacacagactcgagggg

SEQ ID NO: 15846 - DNA, 120 bp, synthetic construct
  source 1..120: mol_type = other DNA
gggcacggttgggggtgcagttcccttcccccaggggctgtgggacactcagagagcctatgcctgtgccctgggctccgggaggggagaggatctgggggccaggcacacagggaacgg

SEQ ID NO: 15847 - DNA, 120 bp, synthetic construct
  source 1..120: mol_type = other DNA
agacaggagccaggtgcagtcccccagcccccagggtgtggaagcgtctgccctgggtaggactcaggtgccccctgggtgtggaagcatctgccctgggcaggactcaggtgtgggctt

SEQ ID NO: 15848 - DNA, 120 bp, synthetic construct
  source 1..120: mol_type = other DNA
tggagcctcggcccctcaggggtgttcccagccaggcgctggctctcctgccctccccctgggctctgcccacagttggcgcgagggtgggtgaagcctgaggctggcagggccgggaag

SEQ ID NO: 15849 - DNA, 120 bp, synthetic construct
  source 1..120: mol_type = other DNA
tggaaagcagatcccaggcagggtctcccccacgagcagggggagaggcaccccaaggtgggggagcgagggcagtggcagaaccaccccataccctaggggacccagggaggggcttgc

SEQ ID NO: 15850 - DNA, 120 bp, synthetic construct
  source 1..120: mol_type = other DNA
tactttaacaaggtatgattgttggggctgccagtggctgagccaggtcactgctacactgccctgcagggtgcatctaatcatggagcccactttacaggtgaggaaactgaggctgag

SEQ ID NO: 15851 - DNA, 120 bp, synthetic construct
  source 1..120: mol_type = other DNA
actgctgggattccaggcgtgagtgaccccttgtccatgtttaaacggggtccctgtctgttgttgaatcatagtgttccctgtatgatctggatgcaagccgatactgcatggatgacc

SEQ ID NO: 15852 - DNA, 120 bp, synthetic construct
  source 1..120: mol_type = other DNA
gtgctcctatattttacatcagtgaaccaagcacctaccaagtccctcgatgtgcccagtcctggaccccagcatttgcgagacagcagcagacccaggtgacccccagccagggtgagt

SEQ ID NO: 15853 - DNA, 120 bp, synthetic construct
  source 1..120: mol_type = other DNA
cctgccagcagctgtgatctgtgtccttcacctctcccagcttgacccctcttccctggggaaaacccagccgtctccccgaggaggagtttgcagggtagacagcaaaatggctgggct

SEQ ID NO: 15854 - DNA, 120 bp, synthetic construct
  source 1..120: mol_type = other DNA
cgtgtcacctctccaaacctgtttcctcatctgtgaaatgcaaatctccacggtccctatgcctcggatggtcagagtcaggattccgcatgacgacccccaacaggagcctggcacaga

SEQ ID NO: 15855 - DNA, 120 bp, synthetic construct
  source 1..120: mol_type = other DNA
agctccgccccacgcgttcccggggcgcatgcgacgtggggcggagcgtctggaagctccgcccgtcgcactgcagagtcggccgaggcgcacgagctatttttcacgctccgccccgct

SEQ ID NO: 15856 - DNA, 120 bp, synthetic construct
  source 1..120: mol_type = other DNA
cctgggctccatctctcaagcccctcatttgtgctccacccacaggaggtgcttcccaaggaccgtagatgcctctctagagcatgagctcaggcaagagtgcccgctacaaccgcttct

SEQ ID NO: 15857 - DNA, 120 bp, synthetic construct
  source 1..120: mol_type = other DNA
gtgagtgctgtgtggcgcagcctggtcgcatggttaaacgtgtgagtgctgcgtggcctggcctggtcgcatggtttagcgtgttagtgctgcgtggcctggcctggtcgcatggttaag

SEQ ID NO: 15858 - DNA, 120 bp, synthetic construct
  source 1..120: mol_type = other DNA
gtcaccaccatcacaaaaggtgagcccttaagccaaggccagcccaggctgggaataaccggggcacccccatgcccaccctgctaaggactgagggacacttcccggtgagctggtgtt

SEQ ID NO: 15859 - DNA, 120 bp, synthetic construct
  source 1..120: mol_type = other DNA
gtctgactattttaaagaagtgaattccccctcggctaagctgtatgtgcaatgcaatgtcaacacatttgcttttgtttgtttgagggaggggatggagacctgagaaaatgaacgttt

SEQ ID NO: 15860 - DNA, 120 bp, synthetic construct
  source 1..120: mol_type = other DNA
atgtaccctgctgagggacctgctaatgatactctgactttgcaggttacgaaagtcgcctcttgttttagcaaaccctttaatttcagttggcaaagagtgactgagccagagcctcag

SEQ ID NO: 15861 - DNA, 120 bp, synthetic construct
  source 1..120: mol_type = other DNA
attttcacctgaggatggatagatcttcagggttcaagtgggtttgcatctggactttagggtggccctgtaggccctgtgtgagaagcccccttcccagtgaactttcccttgtgtgtc

SEQ ID NO: 15862 - DNA, 120 bp, synthetic construct
  source 1..120: mol_type = other DNA
cgttgccctgacagccagtccaagctgagtctagagctggcaaggtgagctcccagtggtaagagggaagtggtttgttctgcttttctgagatgtgttcttatgagaaggatccagcag

SEQ ID NO: 15863 - DNA, 120 bp, synthetic construct
  source 1..120: mol_type = other DNA
agacaattttcctgatatttaaactggaatttttgctccaagaaattccaggtcatttagaatgtgttaagattgagtttctgggctacacatcccttataagagcacctgattctggtt

SEQ ID NO: 15864 - DNA, 120 bp, synthetic construct
  source 1..120: mol_type = other DNA
cgttaaagtcccattctttaacctgttttttcccttttggaattaattcgactgcagtaggaaggggttgtagctgaaagtgaccgctgtgcattgaatgccatcagaaaaggctgatga

SEQ ID NO: 15865 - DNA, 120 bp, synthetic construct
  source 1..120: mol_type = other DNA
ggctggcacacagcactgcttggacttcccctgtgggaaaggatggggacagatcagtctttggaagaatggagcgctggctttgctcagccctgttcttgggaaggtttgatctggaga

SEQ ID NO: 15866 - DNA, 120 bp, synthetic construct
  source 1..120: mol_type = other DNA
ttctgctgggaggctgggtttgcatccaaactctgagaccttttggacaaaacatgccaaagaagttggtggtagtaagaaattcatactaaacttgttctgttagggtttttttccttc

SEQ ID NO: 15867 - DNA, 120 bp, synthetic construct
  source 1..120: mol_type = other DNA
ttttactttaccaaaaggaagcacataggcctgctctgctctctgctacttgggggttttgtgtcatagattgtaggacactggtggtaatttaatttcagaagggaccttcttgctcac

SEQ ID NO: 15868 - DNA, 120 bp, synthetic construct
  source 1..120: mol_type = other DNA
ccatctgtagaaaggatgccgatggtacccacccccagagttgttttgaggactaaccacgataatacatgtaaaatgctcagaagaatgtgtggcaaacagcaagcacttaataaattt

SEQ ID NO: 15869 - DNA, 120 bp, synthetic construct
  source 1..120: mol_type = other DNA
ccatgtcattagcctcattttagagaagagtcttgatgggtcggagagcggtggcttacccacaggtaagctgtaaatctggaactcaactggggcattggttttgctagtccaccacag

SEQ ID NO: 15870 - DNA, 120 bp, synthetic construct
  source 1..120: mol_type = other DNA
aaaaaaaaaaagaaaaaaaaagaaaagagagccttgctctgttgcccagactggagtacagggtctcggtgatagttcaccacaaccttgaactcccagcccaagtgatcctcccacctc

SEQ ID NO: 15871 - DNA, 120 bp, synthetic construct
  source 1..120: mol_type = other DNA
aaaatctaccctttacaacaatagtagtacaaataaacgtttagacacttcacgctcaaagagggcttttgctcgggctttttatttcacaattgatgcttaaaagtgcttttaaaggca

SEQ ID NO: 15872 - DNA, 120 bp, synthetic construct
  source 1..120: mol_type = other DNA
ggaagctgtgccatgtcatgtaaagcatgcagtgggaaagcagtggggtgggggcgtctttgtattacatcatctgttgttgccgtttcaaaaatccagaggcctttctacacttcagtt

SEQ ID NO: 15873 - DNA, 120 bp, synthetic construct
  source 1..120: mol_type = other DNA
catggacttcaggaccctactgagagatggaatcaagagctctccggggttctttgagtggggagttgtatcggaaaccaccatcagcgcgcctgagctcgcctcgcattgttcttctgt

SEQ ID NO: 15874 - DNA, 120 bp, synthetic construct
  source 1..120: mol_type = other DNA
gtatgacgccgtgcccatccagtccagcgtggtgttatgttcctgcccatccccatcaatggtgaggacccagactgagtccagcacgccccctggcattcctggtggcagcaggcaggg

SEQ ID NO: 15875 - DNA, 120 bp, synthetic construct
  source 1..120: mol_type = other DNA
gggggcacctcactctggagggcctgggtgagttcctgaataattctttcttgcctgacctttgtgaagaaaccgtaggtgaggtttattttccttttttctcttttttacacataggaa

SEQ ID NO: 15876 - DNA, 120 bp, synthetic construct
  source 1..120: mol_type = other DNA
tggaatccacagtactgggtctcagattacatgtgttaccctcagttctttctcagctttcctgaaatggagatcacataaaagttgatttccaggggagggggaaaggacagtgatagg

SEQ ID NO: 15877 - DNA, 120 bp, synthetic construct
  source 1..120: mol_type = other DNA
ccctctgtcctttacagccaggctctcttcatggtgcccacaagcaacatcatacaaaatgtatgataacagttatttccaaaaacgaaacttcagggcagcctttgcaatgaatgtata

SEQ ID NO: 15878 - DNA, 120 bp, synthetic construct
  source 1..120: mol_type = other DNA
cttctttgttaagctttacttcacatttcaggacgacgagaagctgtgtatcctttgcgtggttggtgccgtctgaagccacaccagtcacccctctcacttggaatcagaccctgtgtg

SEQ ID NO: 15879 - DNA, 120 bp, synthetic construct
  source 1..120: mol_type = other DNA
actctggacttccttctctttgtggcggggaacgtggggtttgctgtggcttctcctaggccaggcgggagaacgggcaggagagcaggggcaggggccgtggtcgaggtctgatgaaca

SEQ ID NO: 15880 - DNA, 120 bp, synthetic construct
  source 1..120: mol_type = other DNA
gagtgaatcttgctgactgatttccaaatgggattggccagagcggtgcaggtagtgggaactccaggtctttgtccagtggtccatgttgcccttcatcattaagtcaaattccaaagc

SEQ ID NO: 15881 - DNA, 120 bp, synthetic construct
  source 1..120: mol_type = other DNA
agacctgtacccgattttacacggctgagattgtgtctgctttagagtacttgcacggcaagggcatcattcacaggtaaccgcgggggtggctgggtgggtttgcaggacgtcagtttg

SEQ ID NO: 15882 - DNA, 120 bp, synthetic construct
  source 1..120: mol_type = other DNA
ctgaggagtgtttgcattgtgtcatcttcatcaacgactgaggtggggataccttggccgttctcaaacagatcttgaactttctctgggcaagaccctgccacgccagcaggtcttcct

SEQ ID NO: 15883 - DNA, 120 bp, synthetic construct
  source 1..120: mol_type = other DNA
actcagctcggcttttctgtttcttaggaattggccctgtattctgtgtgctgggaggtacccagctggtgcctgtggggcctctcttggcaccttgaggtagttgctcgtttcctccac

SEQ ID NO: 15884 - DNA, 120 bp, synthetic construct
  source 1..120: mol_type = other DNA
actcattcctgttaaatagtaaccgtcttactgactggtaatcctgtttctgtgtacacagtgtaacctcatctccctcagtgttgtctgtgacaaagttgaaccaaacaggaacttctg

SEQ ID NO: 15885 - DNA, 120 bp, synthetic construct
  source 1..120: mol_type = other DNA
tagttcagtatcttggaatttattcctgcgttgacttcttttgtgcagagatggcttccccaaaacaccttcaaatctagaataaaagtgttgatgggagcaaggcatagcgaggttcct

SEQ ID NO: 15886 - DNA, 120 bp, synthetic construct
  source 1..120: mol_type = other DNA
tcacgtggtttattttggtcttttccagattggcattcatttaggattggctatgatgcatggggctggggagaattactgcttattgtaaaaaattcactcggtgctagtgacctgatg

SEQ ID NO: 15887 - DNA, 120 bp, synthetic construct
  source 1..120: mol_type = other DNA
ggcggagtgagactccatctcaaaaaaaaagttcactccgaatgcgttagaggtctgaatgtaagggcgaagactatgacactcttagaagaaattataggattaaatgtgacaattggg

SEQ ID NO: 15888 - DNA, 120 bp, synthetic construct
  source 1..120: mol_type = other DNA
cgagtctagagatgagcttacgaggcgttaccattgttaacccacgttaagtcttctgagccatcaccatgggctgtctttctgtttatttagatctttctttcaaaaacactttgtagt

SEQ ID NO: 15889 - DNA, 120 bp, synthetic construct
  source 1..120: mol_type = other DNA
ggtaatagcttctcagtggagtccgcaggactttgtgcacacaggatcctgtcatctgtgattcgagctagttttatttgttccctttcaacctggctgccttttgtcttcttccctaat

SEQ ID NO: 15890 - DNA, 120 bp, synthetic construct
  source 1..120: mol_type = other DNA
agctcggatgtcacagatagaagtcaggggatctgtgaggctggataggaggaaattactaattttcactaacctttcagcaaagcgtaccatttccttccattatgaacatcagcaaca

SEQ ID NO: 15891 - DNA, 120 bp, synthetic construct
  source 1..120: mol_type = other DNA
tctctccagaggacaaaaacctagactttttaataatggcatttgaaaaagtacaagtcacaaaagcaacactcgatgatagtaaagaacagaaacgccgaatatgtaggtggagcaagt

SEQ ID NO: 15892 - DNA, 120 bp, synthetic construct
  source 1..120: mol_type = other DNA
tgtggaggaaggcccttgggctggaggcctgagtcttgttccctttgtagcgcctcagctcccaagctgtttgtgatggaaaggaggtttttctggcctgcaactgtttattgtgtgcct

SEQ ID NO: 15893 - DNA, 120 bp, synthetic construct
  source 1..120: mol_type = other DNA
ttcaaccagcagatactgagttgtcttttcattattattgaattcttttttaaaacagagatggggtcttgctgtgttgcccggtctcatcttgaactcctaggctcaggcgatcctccc

SEQ ID NO: 15894 - DNA, 120 bp, synthetic construct
  source 1..120: mol_type = other DNA
tccttcagctttctgggttgtctcactggaacagggtcagccccattccctcccatcctgccccctgcctggtctgtagccacgtggtgccaggagtgagctctgctctgcttcaggatg

SEQ ID NO: 15895 - DNA, 120 bp, synthetic construct
  source 1..120: mol_type = other DNA
gagaaacttttggtaaatatcgtgaatttccttttagaaaggtgatccgggacaccctgagtcctctgaacctgctttctgagtggctttcctggaggctcccgtgttcacaaaaaatgg

SEQ ID NO: 15896 - DNA, 120 bp, synthetic construct
  source 1..120: mol_type = other DNA
gcagccatctgcgctgtcataaccccagtcgctccagcaccagtaacttaaaatgctgtgcagtgttgagcaaatgctaaatggtacagtaatttccgttgatttctaaattttagtttc

SEQ ID NO: 15897 - DNA, 120 bp, synthetic construct
  source 1..120: mol_type = other DNA
gcctcctgcccggcctgtcgcatctgcgcttggcttggtgcttgtacaactgtgcggccaagatgctccagaacactgcctgtctttccacagaaacccccgagtgttgtgtgcttgaac

SEQ ID NO: 15898 - DNA, 120 bp, synthetic construct
  source 1..120: mol_type = other DNA
gcccaaactctaagggagccaggcttggggagcggagtctgtgccgcttgatgtggccacctgcagctttcatgtatgcagaggcctgggagcctcgaggcccttgcccccaccctgtgt

SEQ ID NO: 15899 - DNA, 120 bp, synthetic construct
  source 1..120: mol_type = other DNA
ttttggttcaagtttctcagagcccctcagagcttctacatctgtgcatcagaaatctcacagccttctcatgctgccggctcatctgggcccatagagtgggctttgccagttgctgtt

SEQ ID NO: 15900 - DNA, 120 bp, synthetic construct
  source 1..120: mol_type = other DNA
ctcatcagctattttacccatctcagaacgtcctgtgtctccatgtaggagagtggctctctcagatctctcagggcgtctggttatagggaaacaagtggagcagggacgtggctttaa

SEQ ID NO: 15901 - DNA, 120 bp, synthetic construct
  source 1..120: mol_type = other DNA
aaatgcctctgtaccacggctaccatgtggaaccttaacttgcagaaggcttgttaacaattgttttgagagagatggctggtcatgccacagctgctggggactccgcctactccagcc

SEQ ID NO: 15902 - DNA, 120 bp, synthetic construct
  source 1..120: mol_type = other DNA
attttttccaagagccaatttccttgttttggttgcaagaacctggctctgcctgcatgtcagctctctgccctccctgctgccgtggctttcaagcgcttggcagaatcttgtacttcg

SEQ ID NO: 15903 - DNA, 120 bp, synthetic construct
  source 1..120: mol_type = other DNA
ccaactgtttccattgctcatttgaccaagccctctactcagagaattgacctcccaggaaatgacagtcatccccaggatagaaataggcgtttgttagctgtgattttccttttataa

SEQ ID NO: 15904 - DNA, 120 bp, synthetic construct
  source 1..120: mol_type = other DNA
atcatccatttaaccaggtttgatttccaaatggtaaactcaaattcagaacatgaaggtaaagtagcagatacagtcgtctctgtctcatacaataattggagtaggggccgggcaagg

SEQ ID NO: 15905 - DNA, 120 bp, synthetic construct
  source 1..120: mol_type = other DNA
cctgctaaagcatcctatctggtagggaggggagctcttgacagacgggttgttagggagggtggtgaaagccacgcacatcaaggggctggcttgattgccctctggccccacatctaa

SEQ ID NO: 15906 - DNA, 120 bp, synthetic construct
  source 1..120: mol_type = other DNA
cagtttgaggccgttagtgggtgtctgcgacgctgatggactttgtttcacgcttcagttgaggatgtggctctgagcacgatcttcgctctgaccacaagtcatcttctattctggacc

SEQ ID NO: 15907 - DNA, 120 bp, synthetic construct
  source 1..120: mol_type = other DNA
atgtgatgcccccgccccgtacctggtgccaggtcagtgcagtcaggagaggttgtgcctggcggtcttcatttcatgtttgtacttggtttttattattaaataaataaataaataaat

SEQ ID NO: 15908 - DNA, 120 bp, synthetic construct
  source 1..120: mol_type = other DNA
aaaactaagtatttctaattaggttgattgcagatgttggtgcacaggaaattctatgccttcgcgtctagatttctgtggggcaatttgacagagtttatctcctggattggctcaggg

SEQ ID NO: 15909 - DNA, 120 bp, synthetic construct
  source 1..120: mol_type = other DNA
cagttggcctgctgctggcatcaccgcactgggccagctgtggccagactgaggtcaggagttccttcaaagcatcagccacaaaagctgcctcctaaagggggtgtttaatggaaaagc

SEQ ID NO: 15910 - DNA, 120 bp, synthetic construct
  source 1..120: mol_type = other DNA
agccctaattgattttatctcagccacaaaactcagtccctgtgatctaaaaagagcaggttgttgcaggtttgcggtggtggactttgggaaaatctcttgagaccactaggtcttagc

SEQ ID NO: 15911 - DNA, 120 bp, synthetic construct
  source 1..120: mol_type = other DNA
caggctggtggccatcagaggtgtccttctgaggctgagccctaggcccctgccctgcccgcgagggcatctctgggtgaggttttcgtgtgtgttttcctagaggtcttgcagttgtga

SEQ ID NO: 15912 - DNA, 120 bp, synthetic construct
  source 1..120: mol_type = other DNA
ttccctggcctgctctccctcaaggacagcccaagggtggtgaatgtctctgtgccatcacctggactgtgcctgctgctgccagctgccgtgttccattctgagtgatcgtggtgcagg

SEQ ID NO: 15913 - DNA, 120 bp, synthetic construct
  source 1..120: mol_type = other DNA
gtcctcaaagccagctatggaggatctccctggtgtcaaatctctgtcatgctgtgaatctgactttctccagaaaaagatgggcacacaggccagatgggcagcaattggtttgcccat

SEQ ID NO: 15914 - DNA, 120 bp, synthetic construct
  source 1..120: mol_type = other DNA
caagggcgtatgagcatgacaccgacaagcacatcgaggtgtggtgaggtcaaggtcagtggcagagaggattgagcccttggaatcaagattagaaagcccaagagtgctccagggagc

SEQ ID NO: 15915 - DNA, 120 bp, synthetic construct
  source 1..120: mol_type = other DNA
tcactcccctccctcatcctcaccccctccctcatcctcacccctgtctcatcctcaccccctccctcatccttcaccccctccctcatcctcactcctctctcatcacccctcctccat

SEQ ID NO: 15916 - DNA, 120 bp, synthetic construct
  source 1..120: mol_type = other DNA
tggggagagggagagggagagggagagggagagggacgttcttggactcttataacaagtttgtattaaattctattttgtctgatagagtatagtaacctcagctctcttttggttact

SEQ ID NO: 15917 - DNA, 120 bp, synthetic construct
  source 1..120: mol_type = other DNA
ctccatctcaaatatatatatatatatatatgaatatccacacatacacactgagtgactactagcacaagacaagacatacagagttccgctctccccaggtacacagggttgagatcc

SEQ ID NO: 15918 - DNA, 120 bp, synthetic construct
  source 1..120: mol_type = other DNA
tttgcagccccatattaactacattggctgctggggagcctgagtgacgggggaagggggcagccagggagggtgcctaggccctgtggagggcttggtaaggcagaggctggggaggct

SEQ ID NO: 15919 - DNA, 120 bp, synthetic construct
  source 1..120: mol_type = other DNA
ctcaacaccattacaaagaagggatcggggattgatagactgacagatgcatgcacagaggcaggtatggatgcatgcacagaggcagggatggatggacggacaaatgcatgcatagag

SEQ ID NO: 15920 - DNA, 120 bp, synthetic construct
  source 1..120: mol_type = other DNA
gcaccggaagttacagatgacatcgatgtcctgtcctgatgaaacaggaaacacatttgtcatttgagagttagtggctggggctgggtggaagcttgaggggctgtgggcctggaatgg

SEQ ID NO: 15921 - DNA, 120 bp, synthetic construct
  source 1..120: mol_type = other DNA
gcaccccaaatattaatcagctcatcagagaggaatggctgctgttaccttctcaattgtcatgtccctaaacattttttccttggccaactctcacctgggaccatagtggttgtggga

SEQ ID NO: 15922 - DNA, 120 bp, synthetic construct
  source 1..120: mol_type = other DNA
caatgagataggttatgtcgttgttggtttttttttctctcattctaaaccttcaaactctggcatgctttcctctaaggcacatctcaacttgcacaggccacatgtcaagggctccag

SEQ ID NO: 15923 - DNA, 120 bp, synthetic construct
  source 1..120: mol_type = other DNA
gttggtggtggggatgacacatgcagagagaggacaggcttaaccccttaagcaggggaaatgcctgatgaacatgggtgttttaggggaatcaacacagttctgtacagatatgcaagc

SEQ ID NO: 15924 - DNA, 120 bp, synthetic construct
  source 1..120: mol_type = other DNA
gattaagttggatggggaaggggatttaatgtcttcaagtatatgaaaaactgctgtgcagaaggtgaaggtaaccatgttcacctttaatgacacctgattctttagtaacagaattgt

SEQ ID NO: 15925 - DNA, 120 bp, synthetic construct
  source 1..120: mol_type = other DNA
ccttttgtttcttcaatccagggatgcaccagacacctatcactacgtggtcagtgagccactgggacggaacagctataaggagcgctacctgttcgtgtacaggtgggtggtctagaa

SEQ ID NO: 15926 - DNA, 120 bp, synthetic construct
  source 1..120: mol_type = other DNA
atctaggaataaaaagaacctagatgcctggattttcagtacaaaaggtccaagaacatgaaagggaaaaggtgatgctctcacaatgctacaagccctccacaaacttctctagcgtgt

SEQ ID NO: 15927 - DNA, 120 bp, synthetic construct
  source 1..120: mol_type = other DNA
atgcaaagctgtggcgccataaaacaaagaaaatgctcattaaatgtacacagctgccaacctgggaagaagcgataatcacctcagaggtgataaactggtaagaaacacaacatagct

SEQ ID NO: 15928 - DNA, 120 bp, synthetic construct
  source 1..120: mol_type = other DNA
gctctcatcaaccttctggggaaactgtgttctactcttattctccctcacccctacttgggactaaacaaatccaaagaacagcccaaactgattttctgttctgggatgtgctgaatt

SEQ ID NO: 15929 - DNA, 120 bp, synthetic construct
  source 1..120: mol_type = other DNA
ggccccttccaaggctggggatagcctggagatgccacggcagaggaaaggggctagtaatggcgaggctgcgctttaagacaaaggactaaagaaagggtttttttcctcctttgcaaa

SEQ ID NO: 15930 - DNA, 120 bp, synthetic construct
  source 1..120: mol_type = other DNA
attccatgccccgcagaggccctggggactcactaagatgtgagcggaagcaacagagtcgagggaaaactcaagactgagatgggattcggtgagaggagggggttctgtgtgagagga

SEQ ID NO: 15931 - DNA, 120 bp, synthetic construct
  source 1..120: mol_type = other DNA
ttccctttcttcctagtgcttttctgtagatttgccttcagtcaacaagtatcaactgagtccacacaccaggcacggtgccaaacacgttcaattcattgtgccgtttaattctgacaa

SEQ ID NO: 15932 - DNA, 120 bp, synthetic construct
  source 1..120: mol_type = other DNA
caggtgggaattctgagaaggaatagggattctggggcccccagtgggaattctgagaattcccagaagtccctgcaatacgtgaggttgaggaccatgtattctgagcatccttgaaat

SEQ ID NO: 15933 - DNA, 120 bp, synthetic construct
  source 1..120: mol_type = other DNA
taaggtgacttagcctggggtcacgaaatgtgtaaggatttcttggggtggctgtgacaaatgacctctaaccgtggcttgaaacagcagaaatgtattctctcaccatcacagaggcac

SEQ ID NO: 15934 - DNA, 120 bp, synthetic construct
  source 1..120: mol_type = other DNA
acaaatgcacgcccacttgcacatgctcacgcacatgttcacacatgcacactcacgctcacacatgctgtcacgcatacacacacgcacatactcctgcacatgttcccatgcatgtgt

SEQ ID NO: 15935 - DNA, 120 bp, synthetic construct
  source 1..120: mol_type = other DNA
ccctcaaattcatgtgcacccagacctcagaatgtgaccttatttggaaacacgggttttgatgatataattagttaagatgaggtcacagtgtattgggggaccctaaacccagtgagt

SEQ ID NO: 15936 - DNA, 120 bp, synthetic construct
  source 1..120: mol_type = other DNA
agaaagtttacagatttgcgttgggccgcaagttggacaagactgctatatgtatattctaggttttcccctataggtatacttatgtgaaaatgattattgtgataaattttgttttga

SEQ ID NO: 15937 - DNA, 120 bp, synthetic construct
  source 1..120: mol_type = other DNA
gagagggagaaggagagagggagaaggggagagggagaaggaaagggggagagggaaagagggagaaggagagagggagaaggagagggagaaggagaaggggagagagaaggagagaga

SEQ ID NO: 15938 - DNA, 120 bp, synthetic construct
  source 1..120: mol_type = other DNA
gatacttttcctccattaaccttgtctttttccttcctgtagatttttgcagcacattttgtctctccctcccttatggattgtttatcctgggtgatgatctgtgggcacatctcattc

SEQ ID NO: 15939 - DNA, 120 bp, synthetic construct
  source 1..120: mol_type = other DNA
ttgaaactttctggagacaaaaacataacaaaaagggttagacaagagtgatgtacgttttcccttccctccttctgcttgcctggagcatagaagtgataactggagctgtgacaattg

SEQ ID NO: 15940 - DNA, 120 bp, synthetic construct
  source 1..120: mol_type = other DNA
taaggcatgctggttcagctctgtgttctcttcaccctgcttacctaaccaccttcatctgctgttgcttagttgcttgctttcaccaggctataagagcagggactatctttttttccc

SEQ ID NO: 15941 - DNA, 120 bp, synthetic construct
  source 1..120: mol_type = other DNA
atatatgtatatatatatatgtatatatataaggcagtcagaaagaaaggatggtccaagaaggggaagaggttgggtaagaggactgaggcagaaggaggcaggcatgcccaaggtcac

SEQ ID NO: 15942 - DNA, 120 bp, synthetic construct
  source 1..120: mol_type = other DNA
cttgggatgcaaagtcaaaccattttctcccttcagggaactgataatctaggtttggagaggggcaagcaataaacatctgtgaggtagatgattatgtgataccttatgccgtatctt

SEQ ID NO: 15943 - DNA, 120 bp, synthetic construct
  source 1..120: mol_type = other DNA
ttgcaagttctcctgaaattattttggttgggtttaaaagaaaagagctgtggttagtttctaagcatttaccgatagtgaagaatctgtcggcaagctccaatgtcatgaaggccagga

SEQ ID NO: 15944 - DNA, 120 bp, synthetic construct
  source 1..120: mol_type = other DNA
ctgcccatgggagtctgcccctggaccctatcctgcttgatgagttcagaggtctttctgctgagcctctttgtcttgccagttaaacattctttttttttttttttttttttatttcac

SEQ ID NO: 15945 - DNA, 120 bp, synthetic construct
  source 1..120: mol_type = other DNA
agtcagaagatttcacgatgtcgcaagaactctgattctctcagatctgcttcctctcttggtaccaggcatcgttaggtttcttccacacgtagtcttcgagaagttagcatccttggc

SEQ ID NO: 15946 - DNA, 120 bp, synthetic construct
  source 1..120: mol_type = other DNA
agcattcacttgaagatactgcagcaaattgtagggaaggctttgattggctaatttgagtcatgtgcctacttctgagcaaatccctagacgatagggctggagtcttctgagtggctg

SEQ ID NO: 15947 - DNA, 120 bp, synthetic construct
  source 1..120: mol_type = other DNA
ccaatatgcaatagataatttgaatgaccctataactattaaggaaattgaattcataatttaacatcccccctccccccaccccaagggaatctccggtctaaatggtttcactggaga

SEQ ID NO: 15948 - DNA, 120 bp, synthetic construct
  source 1..120: mol_type = other DNA
gtatgtggactttgagtgcatttgtgtgtgtatatgtgggtgtgggatgcatttgtatgtgtgtgattgtgtatgtgtgggtttggagtgcatttgtgtgtgtgtgcatatgttgggatg

SEQ ID NO: 15949 - DNA, 120 bp, synthetic construct
  source 1..120: mol_type = other DNA
gggtgcatttgtgtgtatctatgtgtatgtgtgggagtttggtgcatttgtgttgtgggggcatggggtgcatttgtgtgtatatatgtgtggatgtagggtgcgtttgtctgtgtgtat

SEQ ID NO: 15950 - DNA, 120 bp, synthetic construct
  source 1..120: mol_type = other DNA
cctgtgcccaaaacgctttaaagaggttctttccgaatgctcaaaaacagtgtattttaaaagctgctctctgaaatttttaagatccatcagccagagtgtgatgttccccttcctgtg

SEQ ID NO: 15951 - DNA, 120 bp, synthetic construct
  source 1..120: mol_type = other DNA
ggagagattagattgcaaatgtttcttttcagacttaaggtctgtgttgatgaaatgctggctggcttttcctgaattccaaaagggagatgggtatcatgaggcattcctatcatggtc

SEQ ID NO: 15952 - DNA, 120 bp, synthetic construct
  source 1..120: mol_type = other DNA
agctgggattcgaagtcaggtctgcttaaacccagagcatatcttcatgccccacatttccctctgtctctctgagtttatggagttggttagaaatgtcgtatttctttttctttcttt

SEQ ID NO: 15953 - DNA, 120 bp, synthetic construct
  source 1..120: mol_type = other DNA
tttttgttctctgtctttccatctctttcttcttcctttcctccctccctcttttcctttcacacctgtgtctgtaagagcccttccatcacctcaaaagaaaacttcccttattaaggt

SEQ ID NO: 15954 - DNA, 120 bp, synthetic construct
  source 1..120: mol_type = other DNA
gaaatgtcgccaaggctgtgtttcttttggaggctctaggagagaatccttttttttttttttatcattctgattgcagtcagagtccaattccctgtagttgtagaactgaggtccctg

SEQ ID NO: 15955 - DNA, 120 bp, synthetic construct
  source 1..120: mol_type = other DNA
tttcccatgatactgggcctcacaatccatatgcaggaacagcagatgccacgtattgaaatttctagtttctctgccactaaaaatgatagctctgcttgcttgcaatatatgttgcct

SEQ ID NO: 15956 - DNA, 120 bp, synthetic construct
  source 1..120: mol_type = other DNA
tttagaggagttgaaaggactccaggttcttatattagccctctgagcatataaaggcccaaagaaacagacaccaattcctctgctgcacagacttttaaacctggaaagctgtaaatg

SEQ ID NO: 15957 - DNA, 120 bp, synthetic construct
  source 1..120: mol_type = other DNA
agcatcagtcagactctcaggtacttgatgaacaagagtgatttggattccatggcattttatccctagataacaacaaacccaacccattcttgagcaatgatacaattcccactggtg

SEQ ID NO: 15958 - DNA, 120 bp, synthetic construct
  source 1..120: mol_type = other DNA
tgttgtaatcattactttcccattttatacccaaggaaacaaagtcagagtattcaggaatgcacccagggcacattggtaaggaaaagtacagcaggattttccttccttcctccctcc

SEQ ID NO: 15959 - DNA, 120 bp, synthetic construct
  source 1..120: mol_type = other DNA
atatatataaatgtgaatgtcatgtttctgagatgggtgtcaggaatagctgaatcaaggtgaccaaatggcgatgctctaaggaatgggccttgctgaatctgtacactctgcttttct

SEQ ID NO: 15960 - DNA, 120 bp, synthetic construct
  source 1..120: mol_type = other DNA
gaaagggcctagtcacatcttcctgtcatctatgtagatgatgtccttattcagaagtcattatatgagaatatgagtgttatgggaaggcaggaaggaaggaagggaaaggaaaggaga

SEQ ID NO: 15961 - DNA, 120 bp, synthetic construct
  source 1..120: mol_type = other DNA
gcttccatagttaacttattcatctgcctgcctctaaatcccacagattttgagatgtagatcagctttgtcctctcaagggtttcacattcaggaaagggctgacccatcaggcatgat

SEQ ID NO: 15962 - DNA, 120 bp, synthetic construct
  source 1..120: mol_type = other DNA
gctcccgcgttgcgatggaaagggtggatggaagcctcctgctctctgtggagcccgggcacctcgcgctgagatgtttctgcacctgtccgaatactttaaaaccgcctgatgcccagc

SEQ ID NO: 15963 - DNA, 120 bp, synthetic construct
  source 1..120: mol_type = other DNA
tcatcttggataactgaaattttgtattctttgactaacatctccccattccctgctcccttcagcctctggcaaccactcttctcctgtctgtctattcctacgaatttgagtgtttta

SEQ ID NO: 15964 - DNA, 120 bp, synthetic construct
  source 1..120: mol_type = other DNA
gtggtggaggagatctcaaccctacactcattgctccctctggctcttagagactggcttctaaattcctggtgagttgcaaatattcttagattggactatgctaacattttgaaatta

SEQ ID NO: 15965 - DNA, 120 bp, synthetic construct
  source 1..120: mol_type = other DNA
aacgtgattaatctacctgggttctggatcttagggtggcaggaacatggtcttgtgcctttttgacaacctctaattttgcctaggatactaaaagactttgtcagaatgtctcaaaaa

SEQ ID NO: 15966 - DNA, 120 bp, synthetic construct
  source 1..120: mol_type = other DNA
aggggagaagcaaaagccttcctcagtgatccttttccacatccaagggtgtctatgtatcctccagggagcttgtgaactttctgaaatcgtatgcaaaatttaggtgtatgtgtattt

SEQ ID NO: 15967 - DNA, 120 bp, synthetic construct
  source 1..120: mol_type = other DNA
tatccctctctatatatatccatatgtatacctatatatatccccatatatatacctatatatatccccatatatatacctatatatatccatatatatacctctctatatatgcatatg

SEQ ID NO: 15968 - DNA, 120 bp, synthetic construct
  source 1..120: mol_type = other DNA
aactaagataattctatttcctcctgatctgctctgtagactgtcactgatgtatggagatggctctgaaatagtgaggaagggaaggtacatctcagcttttgatagtagagtcaccgt

SEQ ID NO: 15969 - DNA, 120 bp, synthetic construct
  source 1..120: mol_type = other DNA
ttacaattcatgtttaaagtcatagtcgcccaggaaagaaaatagagaggggcacactttgtgtgtgtacctagtacataagaaagtagaaggaatcagctgggtttgggggttgccttt

SEQ ID NO: 15970 - DNA, 120 bp, synthetic construct
  source 1..120: mol_type = other DNA
aactctgcttcaacacctagtccacatgaggaatgtgttggagagttgaattacattcaacaactggtccaaattcaacctcaagtgcagattattctgttataaaaaaatgagacagtg

SEQ ID NO: 15971 - DNA, 120 bp, synthetic construct
  source 1..120: mol_type = other DNA
catcgcctccacaaggcgcggcgtctcgactgttcttagagtgtatttctagtaaaatcagaagctcaccaaagcaacatgcttgagattttgtcattttaaaaatatggttacacgtac

SEQ ID NO: 15972 - DNA, 120 bp, synthetic construct
  source 1..120: mol_type = other DNA
aaagacactaagaaactgaccttggtatgttaccattaaccaaactccagacttttatttggctttcactcatttttcctttaatgtctttttctgctccaggatccaatccaggtacac

SEQ ID NO: 15973 - DNA, 120 bp, synthetic construct
  source 1..120: mol_type = other DNA
gatatcagcaagctcgttttgcacaaactccatttgaccatcttggtcccaacagatttcagctcgtttctccttgatctcataagcagagagagtttcagcattttcagcaagttgatt

SEQ ID NO: 15974 - DNA, 120 bp, synthetic construct
  source 1..120: mol_type = other DNA
ccgaatgtgtttacatctaaagcctggctttgttttgaaatgttgtgcgaatcccagatgccttggcagttggtgctgaaaaaaaatgtgtcaacaaacacatcagacacatttgcagtg

SEQ ID NO: 15975 - DNA, 120 bp, synthetic construct
  source 1..120: mol_type = other DNA
ttcttctttagccttattacttgacatttgctcattcattggttattgactgaatgcttccaatgtgccaagcactctttttggtgctgggatttgatggtgaatccacgttctccgtcc

SEQ ID NO: 15976 - DNA, 120 bp, synthetic construct
  source 1..120: mol_type = other DNA
ccagaacttgggcctcctgtcttatttttcccaagagaacctcatgtacaattggtgaccagttaagtaaccattcaagctaagatctgtgcacagactgaaaaaactgatctgatgcaa

SEQ ID NO: 15977 - DNA, 120 bp, synthetic construct
  source 1..120: mol_type = other DNA
ccctcgcagacaagactcaggccttttcacatttaaatctctccatacactcagatacatacagcccagcatggtttgctttaggaatgattcattcagctcaggatctcattaaaactt

SEQ ID NO: 15978 - DNA, 120 bp, synthetic construct
  source 1..120: mol_type = other DNA
tttgatgaatgaaagcctacaccagcctctgtggacactacaggacaccaaggacactcctactgccactaagtaaagtctgaggtacgatccaaggggaaaccaagacagtaagaaacg

SEQ ID NO: 15979 - DNA, 120 bp, synthetic construct
  source 1..120: mol_type = other DNA
caaactcatcatatgaggcgtgactgcattcgggtcatgggcaatgggaccacaatacagcttgtgagattttaggattaccctgttaaccgtaactcaaaaagtcaaatccacaatcta

SEQ ID NO: 15980 - DNA, 120 bp, synthetic construct
  source 1..120: mol_type = other DNA
ggggggcaaataccttgaaatttgtggacctggtcattttcccaaagatacaggtctgtaacacacatgctctgcagtaatgtctgtttattaattctcactagtgtccaaaaacacctg

SEQ ID NO: 15981 - DNA, 120 bp, synthetic construct
  source 1..120: mol_type = other DNA
atcacccagaaaggatgtagaaatgccccacaggaggtgaaaattaggtgtctgtattttcttgccaagtgattctattggatgcaaaatgtcaaaagcatctccataggcaagggcaat

SEQ ID NO: 15982 - DNA, 120 bp, synthetic construct
  source 1..120: mol_type = other DNA
agggacccagtgggggataaatgaatcatggggccagtttcccccataaggttcttgtggtagtgaataagtctcatgagatatgattgttttagaagagttttcctcttttacttggtt

SEQ ID NO: 15983 - DNA, 120 bp, synthetic construct
  source 1..120: mol_type = other DNA
cttgatttccccatctgacaggaaggaaaacataatctgtctcctatgtttatgcactggttgaatgaagtcccagccatgaatttgtttggtgaattgcaaagcactatgcgatgctgt

SEQ ID NO: 15984 - DNA, 120 bp, synthetic construct
  source 1..120: mol_type = other DNA
aattaaactagaaagactgaaggggaggattgattcaacctaagggttaaaaacatgtctgtggagtcagttggaccactgtttgagtcctacctcttccatttcctagctagatggctt

SEQ ID NO: 15985 - DNA, 120 bp, synthetic construct
  source 1..120: mol_type = other DNA
tacctcataagccccctacccacccagagaccctggtggcactctaagttctgaaaggaatcagcattcaagggaatataattagaaaagaaaatttgccttaaagtccactgttacttt

SEQ ID NO: 15986 - DNA, 120 bp, synthetic construct
  source 1..120: mol_type = other DNA
ttaagcagtcaactggttatttgaaccaaaatctttcagatttcaaaggctttgaattaaggtgcaccagcactcatttaacctccctacacctcagttgccctctctgaaaaatggggg

SEQ ID NO: 15987 - DNA, 120 bp, synthetic construct
  source 1..120: mol_type = other DNA
ggggagggtagtacaaagaagtggttaagaacagaagctttggacttaagagtccttgctttgtatctcagtattgctagttatgagtctgcctctttaattgtgccaactgggattcat

SEQ ID NO: 15988 - DNA, 120 bp, synthetic construct
  source 1..120: mol_type = other DNA
aaataaaataaataaataaaatattatattaggaaaaaaaaaagagagagagagagagaatagtttcaccctgtaaagtccttagaggaggaaaaaaagcaggcctgggctaaaggtgct

SEQ ID NO: 15989 - DNA, 120 bp, synthetic construct
  source 1..120: mol_type = other DNA
tttcatttttaaactgtaaaagatagagttgtttgtttgaaaatcgagacgctaaactctaagtcttttgctgaagctcctctccctaggggcaggatgggagcaaggcttaccaaggct

SEQ ID NO: 15990 - DNA, 120 bp, synthetic construct
  source 1..120: mol_type = other DNA
actcacaaatacatgaacacagtcacaaatataaatccacgccacacacaaatacatgaacacacattcacaccacacatccacaccacaaacacacatccacaccacataatgctgcac

SEQ ID NO: 15991 - DNA, 120 bp, synthetic construct
  source 1..120: mol_type = other DNA
agaggagaagagaagagaggagtggagaagggaggggagggaagagaaaaagaagagaggagaagagaagaggaaaaactagtatcaattaaccaaggcaaaaccaatagcaaatttgtt

SEQ ID NO: 15992 - DNA, 120 bp, synthetic construct
  source 1..120: mol_type = other DNA
atatttttagactcccccctggcctgtccctaacaagagccagatgcatctgattcctgccacagtgctgctgaaattgcattctttggctaacttctgcagggagccaggcttcaccac

SEQ ID NO: 15993 - DNA, 120 bp, synthetic construct
  source 1..120: mol_type = other DNA
aagaccctgacatgtacaacatagcaaggaacctagcccaattcctaacccacggaaactgagataacaaatgtggttctttcaagtcactaccttttggggtactttattacacagcaa

SEQ ID NO: 15994 - DNA, 120 bp, synthetic construct
  source 1..120: mol_type = other DNA
tatatacacaggcagagacacacacacacaccctccctctccaggtcaggtagaacaatctcttatatacacaggcagagacgcacacatgcacagagctggcatctctctgcccatccc

SEQ ID NO: 15995 - DNA, 120 bp, synthetic construct
  source 1..120: mol_type = other DNA
gaccacaggttgtgggacttctcagcctccataacctcacaagccaattcctacaacaaatctcctctcagatacatttctatatatcgtattgcttctgtttctctggagacccttaaa

SEQ ID NO: 15996 - DNA, 120 bp, synthetic construct
  source 1..120: mol_type = other DNA
gaaaaataccaaaaaaaaaaaaaaaacctcacaatgctgtgatatgcccacgatcatgacaggctcacagaaggcaccacctcatagctgctgtgacgagaaaatgaggtcacacagtaa

SEQ ID NO: 15997 - DNA, 120 bp, synthetic construct
  source 1..120: mol_type = other DNA
tattggagcatctcagtctgctggagtgtggcagtctattggagcatctcagtctgctggagtatgccagtctgttggagcatctcagtctgctggagtatttgtctattggagaatctc

SEQ ID NO: 15998 - DNA, 120 bp, synthetic construct
  source 1..120: mol_type = other DNA
cgcacggggacaaatttgttagtttcatgggcaaagagaagaaaaaatacaataccttactgttaaccacagtcacccttctgtgcaatagaacaccagatctcactcctcctgtctaat

SEQ ID NO: 15999 - DNA, 120 bp, synthetic construct
  source 1..120: mol_type = other DNA
aatggtgagtcagaggcctctgtgggaaggagttgggtgtatatgggatcaggagagaggccagcattcaagaaatatcctgggttggtggaagagagggacggttttcgttttatagaa

SEQ ID NO: 16000 - DNA, 120 bp, synthetic construct
  source 1..120: mol_type = other DNA
ctccacgcccagcccacattccagctcttggccatatctgtgtactgtttgctctgctgtttactggatagctttctttgaattgactcacttgtttttttcccaaaatttagccttatt

SEQ ID NO: 16001 - DNA, 120 bp, synthetic construct
  source 1..120: mol_type = other DNA
tcaagtctttaggccgtccctcacccaggtcatctccttggtatgacttagcctctttctgggagctggaaggaattcagaaaagcaagatatattgttacttcttattacatcaatgtg

SEQ ID NO: 16002 - DNA, 120 bp, synthetic construct
  source 1..120: mol_type = other DNA
tttaaaaagcccctccgtatggatatattgggaggtttatttatggaagggaggttagtggctgagacagataaacacccactcagagttacacatgtacatgcacatccatattttcgc

SEQ ID NO: 16003 - DNA, 120 bp, synthetic construct
  source 1..120: mol_type = other DNA
attagacttggcagccctcacaggcagaccttcacccgacagcaaaaacatttctaagggcacaattaggacacagagagaaagcaagatactgaaagaccattttttcttttctgcagg

SEQ ID NO: 16004 - DNA, 120 bp, synthetic construct
  source 1..120: mol_type = other DNA
taaagtaccttgcccaaggtcctgctggtgaggaatggggctgggatctgaaatgaggaagtccagatgggtttgtgctcttagttactgcacatgaatcgaacatatgtacaaataaac

SEQ ID NO: 16005 - DNA, 120 bp, synthetic construct
  source 1..120: mol_type = other DNA
ctttgtccaatttgctcttgttcatcttgggtactggcaccatcatccctgatagctcaagctgccaatcattcgtgcttccacatccctcatcactacctgagtccaatatgtcagcaa

SEQ ID NO: 16006 - DNA, 120 bp, synthetic construct
  source 1..120: mol_type = other DNA
ttataattctgaaaagaacaagagcaacaggccagaatagtaaaaaagactcataaccgctggtttggaagttttctaaataaattccacagtcttccctccctcaggccccaaggccag

SEQ ID NO: 16007 - DNA, 120 bp, synthetic construct
  source 1..120: mol_type = other DNA
tttttattttgttctactcagttttattcttattgctcaggcttgagtgcaatggcctgttctcagcttactcaacctccgcctcttgggctcgggtgatgatggttccacctcagcggc

SEQ ID NO: 16008 - DNA, 120 bp, synthetic construct
  source 1..120: mol_type = other DNA
gacgaaccatggaaacaggcgtggtcaatacgtgcttcagtgcggacgaaccatggaaacaggcacggtcaatacgtgcttcaacgcggatgaaccgtggaaacaggcatggtcaatacg

SEQ ID NO: 16009 - DNA, 120 bp, synthetic construct
  source 1..120: mol_type = other DNA
catgttatctgttgttgtctagaagtctctccacaaagcccagccccttgcagatgatttgtctttgccttctgagcttctcttttctctcatgtggggtgggggcatccatgtcctcct

SEQ ID NO: 16010 - DNA, 120 bp, synthetic construct
  source 1..120: mol_type = other DNA
gctggagtaagtgtttgctctgagctccggtctgtgcacgtgtcccccgctggagtgagtgttggctgagctcgggtctgtgtgcgcgcccccggctggagtgagtgtttgctgagctcg

SEQ ID NO: 16011 - DNA, 120 bp, synthetic construct
  source 1..120: mol_type = other DNA
aaagatgatgaatagaaactaaggtggagttctaatactcctttgggtaacttggggatcatctcaagcatcctgtgctggagacctctattaggatgcagtcactggggactaccatta

SEQ ID NO: 16012 - DNA, 120 bp, synthetic construct
  source 1..120: mol_type = other DNA
aggttttaaaaaaaaaaaaaaatggtgaacaaaggttagcaggcaaaggcagatgagcctcgacttgaaagactgagaaggcatgagaaagggaaaagctttgtctggcatccagcattg

SEQ ID NO: 16013 - DNA, 120 bp, synthetic construct
  source 1..120: mol_type = other DNA
caaaatcctttcagaggtcacgatgtagttccaacaacgcgttgggcatccaaattaagtattttccctttttatgaatttgacaactgagttgcagaaggattttggctgctgcactcc

SEQ ID NO: 16014 - DNA, 120 bp, synthetic construct
  source 1..120: mol_type = other DNA
cctctgctccgacatgagatcacaggtctatctatcctgttcaagttgggttttaaaataaaattgctccttgttctgactgcagctgtcatttcttttgttatttctgaggccgtttgt

SEQ ID NO: 16015 - DNA, 120 bp, synthetic construct
  source 1..120: mol_type = other DNA
ttgagctggctaaaacaaaacaattttttgccttatataagtaaaacattctgttgtagcttgatctagggtctcagctattctccttcctcctccctttctcccttcctcctcctccgc

SEQ ID NO: 16016 - DNA, 120 bp, synthetic construct
  source 1..120: mol_type = other DNA
ttttctgtacagcccacgggtgctccaaaactgaaacaaattgtgtcagtgtttctcaagcttgggtaatgaacccaaggaaagttctcccagactcctaccagtattgacttaaattat

SEQ ID NO: 16017 - DNA, 120 bp, synthetic construct
  source 1..120: mol_type = other DNA
ctctggggtccttcctgggatttttggatctttaagtcagtatacagctgcagttatttccagtagccatgctcgcagatggggacttgagaatacagagagagattgtacaagaccact

SEQ ID NO: 16018 - DNA, 120 bp, synthetic construct
  source 1..120: mol_type = other DNA
gttgagaggcaaaggtgatcccctatataggaaggttcatgcagagccagcctctccactctttcccacgtggggactagaatgactattagcctctccttttgctttttaaggttatta

SEQ ID NO: 16019 - DNA, 120 bp, synthetic construct
  source 1..120: mol_type = other DNA
cactgccaggaagactttggttcccactctggcaacactcggcagtgggtcaggggtaccaattcaagggatatcagaaactgtgtcccttacacatccttttcacgtccagtcatttaa

SEQ ID NO: 16020 - DNA, 120 bp, synthetic construct
  source 1..120: mol_type = other DNA
aagcaagcaagctcaacttctctaagaattataaaaaggaaattaataccacagtgaggacttatttcttcttctagccaaggaggaggaacacacactgggtttaccctcctgcctgga

SEQ ID NO: 16021 - DNA, 120 bp, synthetic construct
  source 1..120: mol_type = other DNA
caaagagtagctaaacaatatttaccactttgggactctttctgacttaacaatcgtaatgtccccactgtgaagctgccagaatggtatgcagcagataagagtgtccttcattagtgg

SEQ ID NO: 16022 - DNA, 120 bp, synthetic construct
  source 1..120: mol_type = other DNA
acctaaagcaaagaaaaagaggagtttattgggacgtgtctctcacctttaggcacacgtaggtctcaacagatgttctcggggctctgactttatggctctatctctagattttgtgtg

SEQ ID NO: 16023 - DNA, 120 bp, synthetic construct
  source 1..120: mol_type = other DNA
ttaccctatgcgtagatacaccggttccctactggagatcaaaggtttccggagtagctgattcatcaacacccttgaaatctggcgtcaatttcacaaagagaaatttctttctttctt

SEQ ID NO: 16024 - DNA, 120 bp, synthetic construct
  source 1..120: mol_type = other DNA
aggatgcaaaaaaaggagacttgagaatggattggaagaagtccagagtagataagaaacatgcttcagttgtataggtgagagatgattgtggtgtcttgggccaaaatggtactagtg

SEQ ID NO: 16025 - DNA, 120 bp, synthetic construct
  source 1..120: mol_type = other DNA
gtactttccaagtagtcctgtctaggatggaaagctcaggaagtgcttcatagtttattatcttccagttggttttgggagatgaactgaagagggaagtttggatagggaaggtctttt

SEQ ID NO: 16026 - DNA, 120 bp, synthetic construct
  source 1..120: mol_type = other DNA
atggcctgaatactttaacttttattttaggttcacaggtacttgtgcaggtgtgttatattcgtaaattgtgtgtcacagggatttgatgtagattcttttgtcacccaggtactaagc

SEQ ID NO: 16027 - DNA, 120 bp, synthetic construct
  source 1..120: mol_type = other DNA
ttccagaagctatcagactgtgcacccctagagatacactaaggtggaaagaactgcaaaagacaaatcttaagccatcctcgattattaaatcggtggcgaatgcactggttttgttat

SEQ ID NO: 16028 - DNA, 120 bp, synthetic construct
  source 1..120: mol_type = other DNA
tcctgatgccattagactgagatttgaagacattcagcagaataatgacatagtccaaagtcttgcagcctttcagaaatatgggaatgatcagattcctttagctcctaacacaggccg

SEQ ID NO: 16029 - DNA, 120 bp, synthetic construct
  source 1..120: mol_type = other DNA
gaaattccattttgtctttttatcagtggaaaaagtagcatatttatgttggaggacaaagatgaatcaaagaggaagaaaatgtaaaacgcatttggggccgggcgcggtggctcacgc

SEQ ID NO: 16030 - DNA, 120 bp, synthetic construct
  source 1..120: mol_type = other DNA
gcacctggggcggcgcaaaggcgtcctgatctctgtatcttggtcactgaaggggctccagaggccgcggggcgctggggacaggaccgggagtcaggcccagggaagtctcctcggaat

SEQ ID NO: 16031 - DNA, 120 bp, synthetic construct
  source 1..120: mol_type = other DNA
ccctcttgcatgggaaagcaaccagaaaacatgcattgaaaatgataattgacaactgaaatgttcaaatggcccatgaggtagccaaatgcacctgaagctttgattgtcttcccagga

SEQ ID NO: 16032 - DNA, 120 bp, synthetic construct
  source 1..120: mol_type = other DNA
taatttatttatgaatgatctacggggcgcagcccttcccagatgcctgaggccttttcttgctgaatggacatctatctggctgttacatgatcttaggaacagctattcatttggaaa

SEQ ID NO: 16033 - DNA, 120 bp, synthetic construct
  source 1..120: mol_type = other DNA
catctcaaaaaaattaaaaaaaaaaaaaagaaaagaaaatccgaggctttggtccctttgcctgcgacactctggagtaattctgtccctgcctgaacgtgatctcctcaaggcaaagtc

SEQ ID NO: 16034 - DNA, 120 bp, synthetic construct
  source 1..120: mol_type = other DNA
aataaataaataaataaataaataaagccggaggataatggtgagacatggagagaaggcatgctaggcagagagacctccgtaggcaaagtcgaagagacatgaaagagccagtgtgca

SEQ ID NO: 16035 - DNA, 120 bp, synthetic construct
  source 1..120: mol_type = other DNA
caatttccaacaatcagtcttggcctcagattcccgcccttcaggttccagtgttccttgggtcctctctctcccctgatcctctctgattaggggtggggtgtgtgagttgcaattaaa

SEQ ID NO: 16036 - DNA, 120 bp, synthetic construct
  source 1..120: mol_type = other DNA
ccaagttgctcccggaaaagctctcaggttctcaggcctgcagggagtgacagtttccccctgactggaacgtaaggctgcaaactcgaagccaggcattttctgcgtattcttaaatag

SEQ ID NO: 16037 - DNA, 120 bp, synthetic construct
  source 1..120: mol_type = other DNA
ccacatttgacaatgcccgcccatataatctaccaaataaatcgaatcacttaatacctctacaagatgagagatgcattctttagactcccgaagggatgcagctgaaaaatcccaaag

SEQ ID NO: 16038 - DNA, 120 bp, synthetic construct
  source 1..120: mol_type = other DNA
gtcacattgtcctacaataccaatttttcttgcatatttaggaaattgagggttttttcctaaaacacgcggacatatgggaaataggatgcaacatttgcactaatgtttccgacacag

SEQ ID NO: 16039 - DNA, 120 bp, synthetic construct
  source 1..120: mol_type = other DNA
tataaaaatgagaaatcactaatgctttttagacttaacattttctttctttgtaggtttcaggcacagaactgtatatccaataatagtgaaatggatcccactaattatgaccgaaat

SEQ ID NO: 16040 - DNA, 120 bp, synthetic construct
  source 1..120: mol_type = other DNA
ccttcccagatgcctgaggccttttcttgctgaatggacatctatctggctgttacatgatcttaggaacagctattcatttggaaaagggtgtcacaatgactttctcttttgcataag

SEQ ID NO: 16041 - DNA, 120 bp, synthetic construct
  source 1..120: mol_type = other DNA
ctcaaaaaaattaaaaaaaaaaaaaagaaaagaaaatccgaggctttggtccctttgcctgcgacactctggagtaattctgtccctgcctgaacgtgatctcctcaaggcaaagtctgc

SEQ ID NO: 16042 - DNA, 120 bp, synthetic construct
  source 1..120: mol_type = other DNA
aaataaataaataaataaataaataaagccggaggataatggtgagacatggagagaaggcatgctaggcagagagacctccgtaggcaaagtcgaagagacatgaaagagccagtgtgc

SEQ ID NO: 16043 - DNA, 120 bp, synthetic construct
  source 1..120: mol_type = other DNA
ttgcaattaaacccagcctttattggagtcctagggctggattctgcattgtgctctgttgtgtcattgcaccttctcgtttccgctctttctgcccagcttcttcctcttcatactcta

SEQ ID NO: 16044 - DNA, 120 bp, synthetic construct
  source 1..120: mol_type = other DNA
gccaagttgctcccggaaaagctctcaggttctcaggcctgcagggagtgacagtttccccctgactggaacgtaaggctgcaaactcgaagccaggcattttctgcgtattcttaaata

SEQ ID NO: 16045 - DNA, 120 bp, synthetic construct
  source 1..120: mol_type = other DNA
ccaatttttcttgcatatttaggaaattgagggttttttcctaaaacacgcggacatatgggaaataggatgcaacatttgcactaatgtttccgacacagttagaggtttccaagagat

SEQ ID NO: 16046 - DNA, 120 bp, synthetic construct
  source 1..120: mol_type = other DNA
catccgagggagatattacttccaatatcaaagtgggtgtgataatatctgagggagatattattcctaatatccgtgggagatattattcctaatatctcagtgggtgtaccgcgtcac

SEQ ID NO: 16047 - DNA, 120 bp, synthetic construct
  source 1..120: mol_type = other DNA
taagttgtaaagtcctgttaaatgtttatcagcccggtgggattatgacccagaaaggttcccgtaaagaggaaagggatggatggaggtaggggcagaatgtcatttgtcccggtagat

SEQ ID NO: 16048 - DNA, 120 bp, synthetic construct
  source 1..120: mol_type = other DNA
tccaccctcaccctcatactaatagtgaccttgagagcagagaacaggttttgtgacccatttcaaagtgtgttccttaagcccaagggctgcctgtccagatggtgtgggacactcatt

SEQ ID NO: 16049 - DNA, 120 bp, synthetic construct
  source 1..120: mol_type = other DNA
aattgtacaagtaatacatgaattcatgaactttgtgaaaaagaaagtcaaggtctttagaagtatgtgaaataaatttgtacccttttccctccaattttacctccctctgtagtgata

SEQ ID NO: 16050 - DNA, 120 bp, synthetic construct
  source 1..120: mol_type = other DNA
agagccaccacgcctggcctatatttatattttatattcatattttgtatcagtgatctcttctactgttgatggccatttgagttgcttaccgattttggccactaagagcagtgctcc

SEQ ID NO: 16051 - DNA, 120 bp, synthetic construct
  source 1..120: mol_type = other DNA
ctctgtgatcttgggagctcctttaacctttctgtgccttaatttacccctcagtaaattgcagctattactgcctgtctcttaagataattgtgaggattaaaggcactcagctcagtg

SEQ ID NO: 16052 - DNA, 120 bp, synthetic construct
  source 1..120: mol_type = other DNA
tgctggctggttgacctagggcaagttccttaacccctctgtgcctcagtttcctcttttgtaaatgaagataattgtggaacctatctcctaaggtactggaaagatgaaattaatatt

SEQ ID NO: 16053 - DNA, 120 bp, synthetic construct
  source 1..120: mol_type = other DNA
tttgcatcatcttgggtcagcgtccccctcagcctgtgcatctgttctgttctttttcaccccacttctcccttcccatgtgtttccttggacacttctgtccccttctccttgtcagtt

SEQ ID NO: 16054 - DNA, 120 bp, synthetic construct
  source 1..120: mol_type = other DNA
gaaggtatgtaagtgttctttagcatatctttttttgtttgactgaaatagtttatagtcaaagatcaaaaaaggaactccacctagtaggtgaggttctgtaatagccgtgaaagacca

SEQ ID NO: 16055 - DNA, 120 bp, synthetic construct
  source 1..120: mol_type = other DNA
cgtgattggaaagggtttatggacagaaaaagaaagtgacggacagaaagtggaagtgaggtacagaaacagttggattggttacagctggacgtttgtcttatttgcacatggtttgaa

SEQ ID NO: 16056 - DNA, 120 bp, synthetic construct
  source 1..120: mol_type = other DNA
agcccatgaaaggcgtgaagtttcttctcttttcttctttagtaactaaagaggtaagcaaagaaaagaacaaaagagatggtgtgaagggtaggagggtgggggattatagaccagaac

SEQ ID NO: 16057 - DNA, 120 bp, synthetic construct
  source 1..120: mol_type = other DNA
tggtaggaatgggcagtgtgatacatggcttgataaactgcctagaccctcacataaatggtaaatgtatttttcatctcacttacgtctcctttaattacagaagtagaaaatggttac

SEQ ID NO: 16058 - DNA, 120 bp, synthetic construct
  source 1..120: mol_type = other DNA
ctagaagcttgagtcagtgaccttttaacgagggaagtaagtctctagacttttctgttgtttgacactcagcagtgtgttgggaacacaacagagaagacagatgtgggtaaagtgaga

SEQ ID NO: 16059 - DNA, 120 bp, synthetic construct
  source 1..120: mol_type = other DNA
ctcttcaataggtacttggatggatggtaaatcctgaagatttggccgcaggtggcagccaggacctcaaatatgtatgtgcaagtagaattagaagaacagtaggccaaaaacagagtg

SEQ ID NO: 16060 - DNA, 120 bp, synthetic construct
  source 1..120: mol_type = other DNA
aagccagtatagatttgaggtttagggaaaataggcacttctttttaataagaatgtgggctaaaacagatcttatggttcaaatatttacaacttaaggaggcaaagagatttgatagg

SEQ ID NO: 16061 - DNA, 120 bp, synthetic construct
  source 1..120: mol_type = other DNA
ttttttccagtcttgatgtttattagtatcaggctgccagtcactcctctaccttcaggcttctggctgctgtagaatgtcgatgagtccaagaggacaccaaaaatgaactctactaat

SEQ ID NO: 16062 - DNA, 120 bp, synthetic construct
  source 1..120: mol_type = other DNA
actttctaaaactcaggtctcaaattgtatcacgaccatgtacctttccttgttttaagtcgtctttgcctcgtgaccttgactgcattatttagcgttggacaagcatggaggagtcca

SEQ ID NO: 16063 - DNA, 120 bp, synthetic construct
  source 1..120: mol_type = other DNA
cccaaggcccagccttgtgtctgtcacatagcaggtgctcaataaatattagttgattgaatgaaaaatagcacacttttgttggaagttttgggaggtttttaattttcctgtggcacc

SEQ ID NO: 16064 - DNA, 120 bp, synthetic construct
  source 1..120: mol_type = other DNA
ttggatgtgctacccgaggctgagcacgttgccaccctcaacataaccagggtttgttctcaaggcaggaaggatgcctgttgaggaaacaatgagccagcctgtgaggcagatgctgtt

SEQ ID NO: 16065 - DNA, 120 bp, synthetic construct
  source 1..120: mol_type = other DNA
cggagagtcgttgagggactgagttgatgagacatggcactaaagtgaccactgggttagggcgggagaaatgtcagggctggccctggtttctggtgatggggagccaggtttttagct

SEQ ID NO: 16066 - DNA, 120 bp, synthetic construct
  source 1..120: mol_type = other DNA
gacctctctgttggatatgactcttccgtgggcccctgtgccccaggctggactggtgttgccattgcttgaacatctgagtgagctttctctccaaggactttgcacttggcatcgctt

SEQ ID NO: 16067 - DNA, 120 bp, synthetic construct
  source 1..120: mol_type = other DNA
taaataaccgcatttggaactagcttctaagatctgttttagccacttttgtcatgggaaacccccaaccaagaagctcctgtctctgctaccaagccccatccttgtgtttatttcttc

SEQ ID NO: 16068 - DNA, 120 bp, synthetic construct
  source 1..120: mol_type = other DNA
cggtcctttctgggaagaagcgtgctgcgattgtacagagtgggtctggagatcgttgagaatgaatatttataaactataggccaaaggaaaagagtgacagattacatcgcataaaaa

SEQ ID NO: 16069 - DNA, 120 bp, synthetic construct
  source 1..120: mol_type = other DNA
cttgttttctgatcacccacttgtcactaagacagtgtaattaatttccctggccacaacggctgctctcttaggcatcttctcgttttgccacggaatcatgcttatgatgctgagtct

SEQ ID NO: 16070 - DNA, 120 bp, synthetic construct
  source 1..120: mol_type = other DNA
tggccagtattacttcaaacccatgatgaaggagttccggtttgagccatcctcacagatgatcgaggtgcaggaaggccagaacctgaagatcaccatcacggggtaccgaaccgctta

SEQ ID NO: 16071 - DNA, 120 bp, synthetic construct
  source 1..120: mol_type = other DNA
gggcacggcctgtggaaagggacagcctgtcacttggttccagcttattgtagccatgggggaagacagagtcagggttgccagatccttgaaattttaaaaagagaagtcagaaattcc

SEQ ID NO: 16072 - DNA, 120 bp, synthetic construct
  source 1..120: mol_type = other DNA
gttatcttaggttcagatgacctttttcctgctcccattttgtgggcagagtcttttgatactcaagatcatgacctagctaaattaatccctaaagaggacatccttcgagtcacagaa

SEQ ID NO: 16073 - DNA, 120 bp, synthetic construct
  source 1..120: mol_type = other DNA
gcctcaggaggcttccaatcatggcagaaggtgaagtgggagcaggcatgtcatgtgggagaagctggagcaaaagagagagttggggcatggtgccacacacttttaaatgatcagatc

SEQ ID NO: 16074 - DNA, 120 bp, synthetic construct
  source 1..120: mol_type = other DNA
ctagaattgaggctcagggttggtgtcacttcccagttttccggagaagctggaaattagaattatttgaaatcacctgatttttaaatatagtcggtgaattcagatttacttaagatg

SEQ ID NO: 16075 - DNA, 120 bp, synthetic construct
  source 1..120: mol_type = other DNA
ggatgtctccctccttggaactgggaagttttcagccattattctggccgtcatttactgattataaagtgcttattatcaattctatttggacagagctaacttgtagttggtgtgggg

SEQ ID NO: 16076 - DNA, 120 bp, synthetic construct
  source 1..120: mol_type = other DNA
ccactgatggaatagcccgctgaggttgatactttgaaggcagcaaccttggtttggatgtgtagtcttggggatttctttaaaaacataaagttctttacatcacagccatacgttagg

SEQ ID NO: 16077 - DNA, 120 bp, synthetic construct
  source 1..120: mol_type = other DNA
ggagcacgcaaatgactccacagggatgcaggacaaccacctggagcctgatttgtttgacaaataaattgcaaggaaaaaaaaaccaacaacagatggacagaatacctgtgggttaaa

SEQ ID NO: 16078 - DNA, 120 bp, synthetic construct
  source 1..120: mol_type = other DNA
gaagagtgattcatgctcagtgagcctgtaaatatgatcttacctgaacaagagagtttttctcatgacccacgaggaaacacttccttgttactcacagtagagacctggttagaaagt

SEQ ID NO: 16079 - DNA, 120 bp, synthetic construct
  source 1..120: mol_type = other DNA
tttatcatattagtaattaaaaccgagatgttgaaaacgcaagaactcacaagctacacattccgttagctgtgggcgtgatgacatcagggtgcgtagtctctggaaaagtccactgtg

SEQ ID NO: 16080 - DNA, 120 bp, synthetic construct
  source 1..120: mol_type = other DNA
tcatttcctcagttgggaggagggtccagaggctgaggaatgccttgtcattggaatctctttgtccctgagtttcagaagcaaatagtgaagctttgggcagaagaggattcatgggaa

SEQ ID NO: 16081 - DNA, 120 bp, synthetic construct
  source 1..120: mol_type = other DNA
ctgcacccatcctcacccctccgtagagcccctcgtgcaatgcaatgaatggaccctcctgtcactctgctgaacagaatttattttctgagtcaaatataatttattattatttttgtc

SEQ ID NO: 16082 - DNA, 120 bp, synthetic construct
  source 1..120: mol_type = other DNA
ttcgattatttcatcagcgttgtttctgtaaccaaagagctgcatgaccaaaccctgagatctagttccttaataggaacaattattcggcacgattccctttacttaaaagcaggggcc

SEQ ID NO: 16083 - DNA, 120 bp, synthetic construct
  source 1..120: mol_type = other DNA
tcaagtaacggagaaatccaagagtctctggcttcatgcatagcgggacccagtctcaatttccacctcctggctctgcttcccttgatgccaactttcaggaatcagctttctgaaaga

SEQ ID NO: 16084 - DNA, 120 bp, synthetic construct
  source 1..120: mol_type = other DNA
gacaacaaaggtctgtatggaccctgccaagctctgcccctctgcccctgcattggggcgccctgcgaacctgacctccctcccgcgcctctgcagggctcagccctgcccggttcctgc

SEQ ID NO: 16085 - DNA, 120 bp, synthetic construct
  source 1..120: mol_type = other DNA
gccaagaattcacatttgcaacccacgcaatacactactgattgtgtgacttcctctagagagaatgtcaaaagttacaatgtgatggcttttatgaatgtgagatgaggcccagtgtgc

SEQ ID NO: 16086 - DNA, 120 bp, synthetic construct
  source 1..120: mol_type = other DNA
cttgggagtctgcttgtccaatccagtgcatacccggtttttcatgcatgtggcattcaggagcaatgctcgtgttttaagacggctacattttaattttgagctggtaggaataatata

SEQ ID NO: 16087 - DNA, 120 bp, synthetic construct
  source 1..120: mol_type = other DNA
aggatcgcaagagggactgaaattccagtgtgtttaatattggagcattcacaaaaattgtagtgatcttttaggaattcagaacgtgtgggctggaggtttctgccttaggtcaatgtg

SEQ ID NO: 16088 - DNA, 120 bp, synthetic construct
  source 1..120: mol_type = other DNA
tgcagacctgtgataacagagccattttctcgtcacgatttgcttttcttccacaacagtatcagttttcttgtatctgagatcagtgatgtcccaataaatcagatgggttaattgagg

SEQ ID NO: 16089 - DNA, 120 bp, synthetic construct
  source 1..120: mol_type = other DNA
gcctgtcattgaaagtccctaatttagggaatctagagctacagttccggtttggtcaccactagccatatttggcagtttacattgagattaaaattaaacacaatttaaaattcattt

SEQ ID NO: 16090 - DNA, 120 bp, synthetic construct
  source 1..120: mol_type = other DNA
gtcttcatattctcacagacacactcaagcgtagagaccatgatggttaaaaataagactttcaaatgacaatatccagttcttagaagatgagaggagacggctgagcatggtggctca

SEQ ID NO: 16091 - DNA, 120 bp, synthetic construct
  source 1..120: mol_type = other DNA
gcattgatgaatgttacaattaatatacttttaaaaataaattttagactttctttgttatagaggctgcttctcttaaaagccttctcttggccgggtatggtggctcatgcctgtaat

SEQ ID NO: 16092 - DNA, 120 bp, synthetic construct
  source 1..120: mol_type = other DNA
agaccctgtctcagaaaataagtcccctacccacccaccccaaaaaaggtacagagcatttctgtctccctgaaaatgtccctatgtccctttgcagtggatccctgccctgctttctgt

SEQ ID NO: 16093 - DNA, 120 bp, synthetic construct
  source 1..120: mol_type = other DNA
ctgtcatgtttgagtaggaggaaaaatagcaaaaaagtaagtagctgactaaaattttcacaagacattagcagttaatctgggattagtatcccagcccagcttccctgagacaaactt

SEQ ID NO: 16094 - DNA, 120 bp, synthetic construct
  source 1..120: mol_type = other DNA
tttttatactctaagcagatctcaaggttcccagcttggggaagagctggtaataaatgaagcttgcattgttagaggctgttagtccaaacggacaagatccctatggaggaaaattag

SEQ ID NO: 16095 - DNA, 120 bp, synthetic construct
  source 1..120: mol_type = other DNA
cctaccatgttttcttctctagagacagacattaccagtttcttgtgtattcttccagagagattttatatgtattatacaccagcaaaatgtctatgcccaccctctctaatacataat

SEQ ID NO: 16096 - DNA, 120 bp, synthetic construct
  source 1..120: mol_type = other DNA
atataaaataatacctagtcccccatgaatttgctgtattattgcaataaataattcttatttgatgcatagacctgagatttaattcttttttttttttttttttgagatggagtctta

SEQ ID NO: 16097 - DNA, 120 bp, synthetic construct
  source 1..120: mol_type = other DNA
tattgtctcgctgcttggtaacctcagctgtaatgaggtgtcagccatctatgatgaggatgtttcacattcctgtcctctctgcctgataaaagtgacaattcctagcttgagaaaaga

SEQ ID NO: 16098 - DNA, 120 bp, synthetic construct
  source 1..120: mol_type = other DNA
atgttgccttcctggagaaactgattaaagatgatatagagcgaggaagactgcccctgttgcttgtcgcaaatgcaggtaggtagcatgatgctgaatctaccattttgaatatatagg

SEQ ID NO: 16099 - DNA, 120 bp, synthetic construct
  source 1..120: mol_type = other DNA
catactcttcaaagcttgtaataagtcaactcacaaacactgattttaagtccttccacaaagaaaatctcaataaaatagggatataataagtcacttccctcctagggcgataatgtg

SEQ ID NO: 16100 - DNA, 120 bp, synthetic construct
  source 1..120: mol_type = other DNA
agagttgttggaagatcacatggataatgcaagcctagtgactagtatggcatctagcccacactaagtgggtagcaaatggtagctggttagttctattatgagattgcaatggctttg

SEQ ID NO: 16101 - DNA, 120 bp, synthetic construct
  source 1..120: mol_type = other DNA
aaaataccttagagtgggtaatttataaacaacagacatttattgcttacagttctggacgtgagaagtctcagatcaaggtgccaggagattccatgtcgggcccgttcctcatagata

SEQ ID NO: 16102 - DNA, 120 bp, synthetic construct
  source 1..120: mol_type = other DNA
tggtgctagttaatcaccagttgttttggagcatctctgtaggccacactggcccaggcagaaagcctgctctgtcccttcttccaatggctgttttttcagtagaggatacaataattg

SEQ ID NO: 16103 - DNA, 120 bp, synthetic construct
  source 1..120: mol_type = other DNA
tctgggattcttgaaagcatgggctctctccgcactgagtctagtttcactgcttcttactggttttaatctttaatgttagacctatgtttatcccttattaaaatttccccctgcttt

SEQ ID NO: 16104 - DNA, 120 bp, synthetic construct
  source 1..120: mol_type = other DNA
ttctggggctgctgggtagattagcttgcccttatgatactccattctcctagagttattagcagctctttttggaggggcattttcttttcttttgggctaaatttaggtagattagca

SEQ ID NO: 16105 - DNA, 120 bp, synthetic construct
  source 1..120: mol_type = other DNA
gaattagaaggttggtggtaaagggattcaggagttactcaggaggaaatagtggttggtgaagagacttgctgaagaagcactgaaaaagaaataagcctttactgaaggagggacacg

SEQ ID NO: 16106 - DNA, 120 bp, synthetic construct
  source 1..120: mol_type = other DNA
gttcaatctcaaaagcatcaagcaggcaaaagcaacagctacagaatggtacacgcctttatttaccatatctgtacctaggcagagacttttatttcaatcccctgctcttagcctcac

SEQ ID NO: 16107 - DNA, 120 bp, synthetic construct
  source 1..120: mol_type = other DNA
aatttccaacgccatcaaagtataaaaacaatagctgtatcacagtatttcctgcaaggactgggttgtttttgtttgtttaagagacagggtctcattctggagcccagactggagtgc

SEQ ID NO: 16108 - DNA, 120 bp, synthetic construct
  source 1..120: mol_type = other DNA
agtctcaaggcttcaggcagagtttaatctatataaactcaaactttagggtcagccaaacctggcttcagttttctaatcctgccactaaccatgtgatcttgggaaaatgactttcct

SEQ ID NO: 16109 - DNA, 120 bp, synthetic construct
  source 1..120: mol_type = other DNA
aaggtgattggccaaacaggacacgttcaccaacacctctcaagagaaagacagtctggtggacttcagtattccctgatgcatcctagtcaagtcctatggtgaataattttgtggttg

SEQ ID NO: 16110 - DNA, 120 bp, synthetic construct
  source 1..120: mol_type = other DNA
cacagctggtatttgagttaattatgccaatcatggaaaaaaacagacacagcttctcaccaaagggtgtaacttccaacttctcctaaatagcgctgttctaaagctaggcacacccat

SEQ ID NO: 16111 - DNA, 120 bp, synthetic construct
  source 1..120: mol_type = other DNA
taaaagaagaaaaaatcatcaagttggattttttttaagttaacaaataatcaacggacagagggaactagaggtccacccctccaaaagaaacccacaaacctgaaaagcttttcttag

SEQ ID NO: 16112 - DNA, 120 bp, synthetic construct
  source 1..120: mol_type = other DNA
gatgcttcagctgtctttaaacagtaacacagttgagtcttttctggaagttctgcttcttacagaaggaaaagtatgttttcagaaaactgaaaaacgttcagtatggcaggcatgtat

SEQ ID NO: 16113 - DNA, 120 bp, synthetic construct
  source 1..120: mol_type = other DNA
tcatgttagtgcagccagagggcttggaaaaaggaaaatgataaactacatttagctatacttctgtattgacatttgaatataatagttgatactcctgcgaattctcaaaaagcatga

SEQ ID NO: 16114 - DNA, 120 bp, synthetic construct
  source 1..120: mol_type = other DNA
agtaagggaagggaaaggaggagaagggggctgttggggaggaggaggaggagaagaaaggggtctgggaaaggatccggttcaaattaagttctcaagcgctggtggaaggtttagcta

SEQ ID NO: 16115 - DNA, 120 bp, synthetic construct
  source 1..120: mol_type = other DNA
agaaaatgttaagtctaaaaagcattagtgatttctcatttttacattactaattataaccctgtttaatcacacaaggccttgtccgcggcaggtgctcaataaacacttgtcgaatca

SEQ ID NO: 16116 - DNA, 120 bp, synthetic construct
  source 1..120: mol_type = other DNA
tgcgtcccttcgggagtctgaagaatgcatctctcatcttgtagagatattaagtgattcgatttatttggtagattatatgggcgggcattgtcaaatgtggtgatactgcatgggagg

SEQ ID NO: 16117 - DNA, 120 bp, synthetic construct
  source 1..120: mol_type = other DNA
gtgcccaaaaaacatgagttattctcattagccccatttcccggatgagaaagtgaggtttggggaggtgcgggagatgatttttaaatttgcttatggccttctatgattctactggat

SEQ ID NO: 16118 - DNA, 120 bp, synthetic construct
  source 1..120: mol_type = other DNA
ggaatgggttctaccacttgctggctgtgtgacactttacctctctgagcctcagctgccttgtatactaaacaggcatcataaagcctttcttatgaagttgttgcaaagattaaatga

SEQ ID NO: 16119 - DNA, 120 bp, synthetic construct
  source 1..120: mol_type = other DNA
gtgaatgaattggtaggtgggtagggtggatggatgaattggtggatgggtaggtggatggatgaatgaactggtgggttgctggatgggtggatgaattggtaggtgggtggatggatg

SEQ ID NO: 16120 - DNA, 120 bp, synthetic construct
  source 1..120: mol_type = other DNA
ctagcagggcacattcctttggaatgagcttttactggcaactgctcagaagctgttctgtatataatgaccaccaacagtttaatccttttttcagccatcacctcaggaattaacagt

SEQ ID NO: 16121 - DNA, 120 bp, synthetic construct
  source 1..120: mol_type = other DNA
gaaatgaagagtctgggcttgggaacgttacaatgatgtttactcgtactagttacgcactcccctcccagatctgtctcgtaacaagagactgttattttctacttgtttttagccaaa

SEQ ID NO: 16122 - DNA, 120 bp, synthetic construct
  source 1..120: mol_type = other DNA
taattatttactctccgtctatcctcactagtgtctaatctctaccagacttagcctggcacatagtgggtattgtgtacatgtttgctggatggatgagagggtaggtgggtgaataaa

SEQ ID NO: 16123 - DNA, 120 bp, synthetic construct
  source 1..120: mol_type = other DNA
ggataaatgagtgggtgggatggataggtgggtgggtggatgagcatctaggtggatgatggaatgggtaagtaggtgggtggagatacatagcagtatagaagatgagaaacagtgtaa

SEQ ID NO: 16124 - DNA, 120 bp, synthetic construct
  source 1..120: mol_type = other DNA
caacctctcagggctctttgaggatccacagagatgacaaaaatgaaaatcctccaagatccctaaagcacgggaggcataataatgaataacatgcacgaaaacaccagattaacacag

SEQ ID NO: 16125 - DNA, 120 bp, synthetic construct
  source 1..120: mol_type = other DNA
taaagaaactgaggcagagagaagttgagcaacttgcccaaagtcacaggccttgtaagctcctacacaaggaatggaatccagggtgacgaaggcatgacaagggtgagacctttcatg

SEQ ID NO: 16126 - DNA, 120 bp, synthetic construct
  source 1..120: mol_type = other DNA
gagaatcatgataaaatacatttctgttgttcaagccactcagtctcagtctgtgatgctttgttatgtcagctgagcagacaccacttgaatctgggctggctacaaaaccggctttgg

SEQ ID NO: 16127 - DNA, 120 bp, synthetic construct
  source 1..120: mol_type = other DNA
tgagaagccaggtgttgttcccatttcacagatgagaaaactggggctcagagaagcgaacttgcccaagggcacacagctgagaagtaaaagaactggaatttgattccagctctctgc

SEQ ID NO: 16128 - DNA, 120 bp, synthetic construct
  source 1..120: mol_type = other DNA
taaaataataataaaaaaagaagcataagaaaaacctctggtgagctcaggtggccagacccttcaaggccaaggtctctgtcccacattattggtctgatctggtgtttggtttggcat

SEQ ID NO: 16129 - DNA, 120 bp, synthetic construct
  source 1..120: mol_type = other DNA
ggtccagcaagccatgcctggggtgagagagaactgatgttttggttctctcacactacttattctgtttggaaaaacacatgcccttcctttgtgggaacagcccctacccacttctgt

SEQ ID NO: 16130 - DNA, 120 bp, synthetic construct
  source 1..120: mol_type = other DNA
ttccataaatcatccttttttttcatccccataagctatgagctggggctaatgacatccccactgaacagatgagaaaactgaggcccaggaaaggaattgctcaggttatatagtaag

SEQ ID NO: 16131 - DNA, 120 bp, synthetic construct
  source 1..120: mol_type = other DNA
gctttggaggggaaggctgccccagtctctggacaggggttctgcaacagacaaaaatggagaagggaagtatgtggcaagggtaggaagacaggacgaactgtgtattttttttttttt

SEQ ID NO: 16132 - DNA, 120 bp, synthetic construct
  source 1..120: mol_type = other DNA
attaaagacttttggtcacctgggggagactgagacctcaaagtggaacaggaatgaggttggaacttggtgacttacagactgctgggggtcttcagggaagaaggggggttgatccgc

SEQ ID NO: 16133 - DNA, 120 bp, synthetic construct
  source 1..120: mol_type = other DNA
cttcctttgactcagggggaaaccaaggctcagagaagtgacagcaccttgttcaaggacacgcagatgatctggtccaaattgtgatgctcctgctgccacaccacaatgatttttgca

SEQ ID NO: 16134 - DNA, 120 bp, synthetic construct
  source 1..120: mol_type = other DNA
ttattgactatagtcaccctgttgtgctatcaaatagatattattctttctgtttttttgtacccattaaccatccccatttcccccacccactgtccttcctagcctctagtaaccttc

SEQ ID NO: 16135 - DNA, 120 bp, synthetic construct
  source 1..120: mol_type = other DNA
cactgttttccccactgtttctctcagaaagtttgttctgaatttgcctgagatgaactcgggctctgcactcccaagctttgtggccctgaggccgtcattcccttctcctagccttag

SEQ ID NO: 16136 - DNA, 120 bp, synthetic construct
  source 1..120: mol_type = other DNA
atacgagtggtgtgcagaatgagtgtgtaaatataggtgcataggaacatggggagggtgaatccatgacatgaggggaggtgtgcacggaggggtatgtgtgcacacaggtgtgtctgt

SEQ ID NO: 16137 - DNA, 120 bp, synthetic construct
  source 1..120: mol_type = other DNA
ccagctagcaacgtgccaatgtgaacaatgtgtaaagggcattgcagatcactcctgacctgtaactgtcatataaataatgcacaggaagggcttgagccaaccgagtgttttccaaaa

SEQ ID NO: 16138 - DNA, 120 bp, synthetic construct
  source 1..120: mol_type = other DNA
ctacaagaatggagtagaagaggatggatgagcagaaaggctcacacttggaatgccagtgtttatttaacacactaaggtaaatacatatcacatataaaaattgtcctataatacagc

SEQ ID NO: 16139 - DNA, 120 bp, synthetic construct
  source 1..120: mol_type = other DNA
ctggcttggtgaaagaaatccaacccgctgcagtgagggggccggagtaagtctcctcgcttcccgggtccaggaatttgggggtctctcctctccccagtatcgcagcccgagagatct

SEQ ID NO: 16140 - DNA, 120 bp, synthetic construct
  source 1..120: mol_type = other DNA
gagactgttcctaatatccgagggagatattattcctaatatcacgctgggtgaacaccacgtgtgtacagcctctgatacgattggtaatatccaagggagatattatcctaacatccc

SEQ ID NO: 16141 - DNA, 120 bp, synthetic construct
  source 1..120: mol_type = other DNA
agggagatgttactcctaatctcatagtgggtgtacaccttgtgatactatttgtaatgttctagaaagatattccttttaatatcacagtgggtgtacaccctgtgatatgattcgaaa

SEQ ID NO: 16142 - DNA, 120 bp, synthetic construct
  source 1..120: mol_type = other DNA
tatcctggggagatattattactcctaatagcacagtgggtgtacaccctgtgatattattggttatatcctggggaggtattattattcctaatatcacagtgggtgaacattctgtaa

SEQ ID NO: 16143 - DNA, 120 bp, synthetic construct
  source 1..120: mol_type = other DNA
cgttgtgggtgtacagcatgtttgtaaacactgtgatattattcataatatctgagagagatattactgccaatatcacagtgggtgtacaccctgtacaccgtgtgatacgattcataa

SEQ ID NO: 16144 - DNA, 120 bp, synthetic construct
  source 1..120: mol_type = other DNA
ttttagggagatactactcctaatatcatagtgggtgtactcatattttacagatatattacttttaatatcacagtgggtgtacaccctgtgtgtacaccctgtaatattattagtaat

SEQ ID NO: 16145 - DNA, 120 bp, synthetic construct
  source 1..120: mol_type = other DNA
tgttgttgcagtgagcaagtacttgtttcaagataggaatgaaatattcggctcttttagacagacaagcacaggtgctcagtttgggagaagaattaaaatcctctgcactctccatgc

SEQ ID NO: 16146 - DNA, 120 bp, synthetic construct
  source 1..120: mol_type = other DNA
gtaagatgagaggtttccataggcctacactttctaattggtggctttcaatcctctggtgatttgcataaaaggcatctatttcaattgtggttataaataacaaaccccaataaatag

SEQ ID NO: 16147 - DNA, 120 bp, synthetic construct
  source 1..120: mol_type = other DNA
aaatcatgtttcatcttgcagagctaattcaaagtatactgactgcatgcacttcttgcttaggggaagaaaactcatcaaaatttgtttctaggcatatgttattagagctaggattaa

SEQ ID NO: 16148 - DNA, 120 bp, synthetic construct
  source 1..120: mol_type = other DNA
ggctatgctgtccgcgggctccctgcagcccctccccagtcgcgctggaggggaggttcttatcatggggtcgtctaaggactgaggggtgccagacctcaggttcttcaaaaccccgac

SEQ ID NO: 16149 - DNA, 120 bp, synthetic construct
  source 1..120: mol_type = other DNA
ctgcgacctgcccttgctctaggtttcagtttttgtacctataggatggtgttgggagagaaacagtggaacccagcagatacatttctttaacaagcggatccgtgatcttcttcaagg

SEQ ID NO: 16150 - DNA, 120 bp, synthetic construct
  source 1..120: mol_type = other DNA
tgttaaaaaaaaaaaaaattatactggttgctaatactttaacaatcagcaggtttcacattaaaaactgggtgctttatttctctggaaagccagccgatctttaggctgccacacttg

SEQ ID NO: 16151 - DNA, 120 bp, synthetic construct
  source 1..120: mol_type = other DNA
aggtcctcagtgaatgtatactgactgagtgcattcaggtgtaacatgtgtagttaattcccaaaggcaatgttatgatttctgttttccttccttcctttccagataaagctgtacacc

SEQ ID NO: 16152 - DNA, 120 bp, synthetic construct
  source 1..120: mol_type = other DNA
tgatttctagagatggactagctgggtctgtcctgaaatctatttaattaatttttaaatagtatcagtatcagtctcaagaaaccaggaggctggacgtggtagctcatgcctgtaatc

SEQ ID NO: 16153 - DNA, 120 bp, synthetic construct
  source 1..120: mol_type = other DNA
ctagtgtctttagaactcatgaatgggcttcagcactgtcttctgattgtttagatgaaaacttctggtgttcagcttcagcttgtagcttctgaagagaatcagtgctcagtaccatgt

SEQ ID NO: 16154 - DNA, 120 bp, synthetic construct
  source 1..120: mol_type = other DNA
ttttgatgtagtttacatttttgaagaggagagactcttgatgtttcagtagagcaggtgtgggtgaccccagtccatggcttggggagaggagtagggatcaccgttgttgatatcagg

SEQ ID NO: 16155 - DNA, 120 bp, synthetic construct
  source 1..120: mol_type = other DNA
ttaaaaaatggagttaattgctgatattgaaaaatcaagagatggtatataaaatccagatttccagtttttcggagaagttggaagctctggcaaagcatggtagtggttggcagactt

SEQ ID NO: 16156 - DNA, 120 bp, synthetic construct
  source 1..120: mol_type = other DNA
gtatactaaatccttttttaaaaaaatgcaggatattttaacctggggactttgatcccacaagggacccatggataagtggcaagtgagcctgtgaactctgtacttcatccgtgtaga

SEQ ID NO: 16157 - DNA, 120 bp, synthetic construct
  source 1..120: mol_type = other DNA
cctctacctttgcggtgacggggaggcccttccatcccagctgtatgtgtgggcttcttgttagagatggggatcttgggtagttttttctttatcgatggtttgcaaaataatggtgaa

SEQ ID NO: 16158 - DNA, 120 bp, synthetic construct
  source 1..120: mol_type = other DNA
tcaggtgtctctgagaaacactgggaccgaagcaaagatccagtccacagttacacagcctggcggaaagtgagtagcgtcctgtctcttagtgttgccttagagccgggctctgacagg

SEQ ID NO: 16159 - DNA, 120 bp, synthetic construct
  source 1..120: mol_type = other DNA
tagctgaccttgctgagtcagatttaaagcatttatttaatggatgtatatagttgagttgtaaatgttaacagatatgccaagattaataccagaatagttcaaactgataattccgaa

SEQ ID NO: 16160 - DNA, 120 bp, synthetic construct
  source 1..120: mol_type = other DNA
tgctcaataagcgctcttttatgcagatttgtacagtgaaggattgaatttcattcatgctcatttaacaagctaatggaagtttgcgataattccaacattgttttcttgtgctgccaa

SEQ ID NO: 16161 - DNA, 120 bp, synthetic construct
  source 1..120: mol_type = other DNA
acctggctagacctcatgttctaatgacaggaagggtcaatacatgtatagatgtataagttagaaagtacagtagaaggtgataagtgttctctagaaaaataaaggaagaaaggaggt

SEQ ID NO: 16162 - DNA, 120 bp, synthetic construct
  source 1..120: mol_type = other DNA
gcttgcagagaaggatgggggcaggtgagcagagacagctattcccagattacagccaaatacatattttgaaaatgatgaatggaatttcagggaatggggccctgtaagttccctgag

SEQ ID NO: 16163 - DNA, 120 bp, synthetic construct
  source 1..120: mol_type = other DNA
ttgcaccaaacacacctcagctggctgacattgttgcaacagggtaagcttatcgtgtggatttggaagcaccagtaaatatgctggcagccagtgtagaaccaaatgacctgtgatctg

SEQ ID NO: 16164 - DNA, 120 bp, synthetic construct
  source 1..120: mol_type = other DNA
atgtaacctgcagaacagctttagacataacaggtgctcacaaaacagtagcttagaaggagactgcagggtctgcttgggagaagcgcggcatgagcaaagtcaggcagtctcacagca

SEQ ID NO: 16165 - DNA, 120 bp, synthetic construct
  source 1..120: mol_type = other DNA
ctagtgttccagagatggggctttcaccctaccagggagacagactgaagacaaatacatctgtggccaggcttaatgcctcacacctgtaatccatcccagcactttgggaggcagagg

SEQ ID NO: 16166 - DNA, 120 bp, synthetic construct
  source 1..120: mol_type = other DNA
aaagagttatcagttggcaagggagtgatagggatcatggtactttaaaaagtttgtttttcttcctggctgctgtgtggagaatggattggaggaaagccatggtgtgaatggaggggc

SEQ ID NO: 16167 - DNA, 120 bp, synthetic construct
  source 1..120: mol_type = other DNA
aggcacttctttttaataagaatgtgggctaaaacagatcttatggttcaaatatttacaacttaaggaggcaaagagatttgataggaaatagacaaggtgatgtgtcctctgacaggt

SEQ ID NO: 16168 - DNA, 120 bp, synthetic construct
  source 1..120: mol_type = other DNA
atcattaccttaatagggcttttcagttataagttacattgtggctcctacctcccaaggagttcaattttagctttgcattttttaacttaattaccttttctgttccaatctcccagt

SEQ ID NO: 16169 - DNA, 120 bp, synthetic construct
  source 1..120: mol_type = other DNA
gtctttacaatcctgcaccagtagaggagagtcagataggcatccagctaaaaaataatgccatctgcctctcttttttccagtcttgatgtttattagtatcaggctgccagtcactcc

SEQ ID NO: 16170 - DNA, 120 bp, synthetic construct
  source 1..120: mol_type = other DNA
gtcatccacatagtgttgacaggttcagagcttatgctacaagtgatccgaagccgggaaaagtgactgggatgtagtatggtttctagtatgtaagtgaggcgtgtccgcgttgcgggc

SEQ ID NO: 16171 - DNA, 120 bp, synthetic construct
  source 1..120: mol_type = other DNA
aatgcaacatcctgtggccctcacacacttcttgtctttgtaaactttctaaaactcaggtctcaaattgtatcacgaccatgtacctttccttgttttaagtcgtctttgcctcgtgac

SEQ ID NO: 16172 - DNA, 120 bp, synthetic construct
  source 1..120: mol_type = other DNA
ccttacttgcagcctgatcttacaggccccattagatttctttcttgatgtaatggaaattggttccagtttttctttctttttttttgaaatttagcctcgctctgtcacccaggccgg

SEQ ID NO: 16173 - DNA, 120 bp, synthetic construct
  source 1..120: mol_type = other DNA
ttgagatcttaatacctacttctcagggttatggcagggcttaagtgaaccctcttaggtatcaaagtgtccttggtgtacaccgctctgtactgccaagtgagtttctctgatatatat

SEQ ID NO: 16174 - DNA, 120 bp, synthetic construct
  source 1..120: mol_type = other DNA
tttatctcctcccactgtcccctcactcgccgggccccagccacagtggtcctctgcagtcccacaccaagctcactccctcctcggggcctttgcacatactctcccctctgcctggag

SEQ ID NO: 16175 - DNA, 120 bp, synthetic construct
  source 1..120: mol_type = other DNA
gataaaatacaaactccttaacctgatcttagctcctgtgtaacccagccctgtctgccactgtctctactccagccactctgtccttctgggtgtcagttcagctgcctttggctacat

SEQ ID NO: 16176 - DNA, 120 bp, synthetic construct
  source 1..120: mol_type = other DNA
tttttttttttttttgatggtaactactctggggcttgttgagtgcaatgaaaacagcagggtggttttagctaatttcaggtttttgtaggaagtgtggccaaaatactggttaatgat

SEQ ID NO: 16177 - DNA, 120 bp, synthetic construct
  source 1..120: mol_type = other DNA
ttctagataaggattttaagacacttggattagttactgaggaaccggagacaggatccctttcccaagaattctgtaaccccaggatagagggctgtgtttttgaagtgccttaaatag

SEQ ID NO: 16178 - DNA, 120 bp, synthetic construct
  source 1..120: mol_type = other DNA
aattcaaattgcctatttttctttagacttttgcttgaaggcttgggaaatagagatggcacctggtataagagaagggtcgtgagagaggaagtatttgaaaggcaagtccctcaccga

SEQ ID NO: 16179 - DNA, 120 bp, synthetic construct
  source 1..120: mol_type = other DNA
cctttcagcttgattacattcatttttgtaacttcacaagggtgtttgtgttgcttgcttgtgccggaggttgtatggaatgcatcttccagctagacagagccactcggattcccctgg

SEQ ID NO: 16180 - DNA, 120 bp, synthetic construct
  source 1..120: mol_type = other DNA
ccttgactgtccctttaatgtaaaacagtgctccgggctctccgtcttcccacactgctttatttttctttattgcacttttcctctggtattatttttctctttattttcagccccttc

SEQ ID NO: 16181 - DNA, 120 bp, synthetic construct
  source 1..120: mol_type = other DNA
gtaaatgtcaactcagcgagcgaatgtcacacacacctttgcagttgttcccttgcctgcatttacaagtagatttgtgatgttatagtgaagccatctttgtaagccaccttacatcct

SEQ ID NO: 16182 - DNA, 120 bp, synthetic construct
  source 1..120: mol_type = other DNA
ttggaactagcttctaagatctgttttagccacttttgtcatgggaaacccccaaccaagaagctcctgtctctgctaccaagccccatccttgtgtttatttcttcccctcttagaaag

SEQ ID NO: 16183 - DNA, 120 bp, synthetic construct
  source 1..120: mol_type = other DNA
gtctgacttctttcacgtagcataatttggagagctgttgactttagcatgtttgtgtaccttctgggaagtagttaaagctgtcatccataactgttccattttgaaggacacagaatg

SEQ ID NO: 16184 - DNA, 120 bp, synthetic construct
  source 1..120: mol_type = other DNA
tgccatttttatttcacctcctccacccactcaatgaacttgccagtctgtgaacaataatatgtaatgtttataaaatttgtgtgggcatagaaagagttctgggcggggcacggtggc

SEQ ID NO: 16185 - DNA, 120 bp, synthetic construct
  source 1..120: mol_type = other DNA
cgcttgtcactaagacagtgtaattaatttccctggccacaacggctgctctcttaggcgtcttctcgttttgccacagaatcatgtttatgatgctgagtcttgtttggtggttagctt

SEQ ID NO: 16186 - DNA, 120 bp, synthetic construct
  source 1..120: mol_type = other DNA
gaaaagaaaaattaaatatgacttctacctctctgagtcattgcaggcaggtgataccatcagctgccgttgttagagttgtgattgccactacctgactgtgagtggtgattatagaga

SEQ ID NO: 16187 - DNA, 120 bp, synthetic construct
  source 1..120: mol_type = other DNA
tgctcagttgaataaaacttcaaaatgctgaaaagagtatagtgtaaaatttcccctctgtctcgtctcctagccacccaagttcctcttctgggagacaaccagtacttccagtttttc

SEQ ID NO: 16188 - DNA, 120 bp, synthetic construct
  source 1..120: mol_type = other DNA
cctcccagttcttacctttaattggtagagtttgccttttttctagccaacaggtcagatcaaggatctgtggcacaatggagttggaaaaccatgggtttggtagggcttttccctagc

SEQ ID NO: 16189 - DNA, 120 bp, synthetic construct
  source 1..120: mol_type = other DNA
gaactgttgtatcctccccgcgacttgccctgtaagctctgatcattattctgcaagttaaggaacttaaggcctaagcagcatttcaaatcaagggacaataatagcacatgggcttaa

SEQ ID NO: 16190 - DNA, 120 bp, synthetic construct
  source 1..120: mol_type = other DNA
aaaatgctttgcatgttctcggtgtagtaacttaggccaggatcactagcataatgtggactgtggccgggcaggtatgaaagggaagggggccggccctctgggatctcgcaaactcca

SEQ ID NO: 16191 - DNA, 120 bp, synthetic construct
  source 1..120: mol_type = other DNA
cacaacacgtatttgggagagtgattgccagttgtgggagagaatgtggtccagtttcagataactgtctgccatcagttaatcttccaaagaattatagtagaagcctgatcaatgatc

SEQ ID NO: 16192 - DNA, 120 bp, synthetic construct
  source 1..120: mol_type = other DNA
cactctcttgctcctgagtgttgctgtgctagaattgaggctcagggttggtgtcacttcccagttttccggagaagctggaaattagaattatttgaaatcacctgatttttaaatata

SEQ ID NO: 16193 - DNA, 120 bp, synthetic construct
  source 1..120: mol_type = other DNA
tgattgtgtttcagtttcaaagcatgtctgactttgtttctccctccaggtcaagctttacaaaagcgaaaacctcgacaatccaatccagacagtttcccttggccagtccctgttctt

SEQ ID NO: 16194 - DNA, 120 bp, synthetic construct
  source 1..120: mol_type = other DNA
tatttaaccaaggcctactgttgggcatgatcgactcttgcactttgaacatatcaccccatgctttcctgctaagaagtccacttttaaaaatgccttgtaatttttaaaaattcctct

SEQ ID NO: 16195 - DNA, 120 bp, synthetic construct
  source 1..120: mol_type = other DNA
atgtgtggcagccttcttagctgagtgaccttgggcaagttactcttagtctcttcgtgcttgactttcctcgtctataagacggggtgatgatcccgaccttgccagtggtagaaagca

SEQ ID NO: 16196 - DNA, 120 bp, synthetic construct
  source 1..120: mol_type = other DNA
aacttgacggggtgaaagtgtagcacaggagtctgcattaaaaacaaaaatctggcctcatagctactgtgttggttgttgcttctaggccttttcagtgggcagaataagaactttatt

SEQ ID NO: 16197 - DNA, 120 bp, synthetic construct
  source 1..120: mol_type = other DNA
tggtctttttcaaccattttcagctctttgtatactaggaatattaaccctttgtaatgtttgttgtacatatttttcccaatttgtcatttatcttttcacttggtttctgcaaagatt

SEQ ID NO: 16198 - DNA, 120 bp, synthetic construct
  source 1..120: mol_type = other DNA
tggattttactcagtattccatgccctgctgagcatttcacatactcctttcatcaagtttcacagcatccacccccagtgggtgttgttcatatgatctccatgtcatagttgagtaaa

SEQ ID NO: 16199 - DNA, 120 bp, synthetic construct
  source 1..120: mol_type = other DNA
aagttctccttccatttatttgcttcctttatgagagtagagtgggccaatgggatataggttcacttgatgctttagaacccagcatttcaggggctttagcaagatggaaatgtctgt

SEQ ID NO: 16200 - DNA, 120 bp, synthetic construct
  source 1..120: mol_type = other DNA
tcactttggttccttcctttggatagaaggaatttggatcatgagggcccctgggtgtcctcaagtggccactttggaaggctgggtgggtggtggctgtggcattgtggatgatggaca

SEQ ID NO: 16201 - DNA, 120 bp, synthetic construct
  source 1..120: mol_type = other DNA
tcacccctccgtagagcccctcgtgcaatgcaatgaatggaccctcctgtcactctgctgaacagaatttattttctgagtcaaatataatttattattatttttgtcaaagaagtattt

SEQ ID NO: 16202 - DNA, 120 bp, synthetic construct
  source 1..120: mol_type = other DNA
acttggtgggcattcagtaaggaatgaatgaacgcacgcacagaggaatgaatagatgggcacacagtgtgtgccctcacagcacatggcccatcactgggtagaaggcaagtcagtaag

SEQ ID NO: 16203 - DNA, 120 bp, synthetic construct
  source 1..120: mol_type = other DNA
cacccgggctgttattagacttggaatgggacaaaagtcatatgagacagacttgtttgctgaggtatttaaaaaacaaaatggtctaagatggcagattcttggggaactctgctctgt

SEQ ID NO: 16204 - DNA, 120 bp, synthetic construct
  source 1..120: mol_type = other DNA
agttcttaaccaccatgttttcctgcccttgatgtatgaaatgagatgatgtagtcacatgccagcttgtctagggatgactcagaggtttagagatggatgtcacgtggatgttgtaca

SEQ ID NO: 16205 - DNA, 120 bp, synthetic construct
  source 1..120: mol_type = other DNA
tgcattacatacagtcccaaatcagtaatgacttcaagctgtgtcctctctttccaagaaagacaaagcagagaacaaagttcaacctacagtgtcttcccaaattcttgacccacggga

SEQ ID NO: 16206 - DNA, 120 bp, synthetic construct
  source 1..120: mol_type = other DNA
gaggtggcttctcatccctgtcctgagcaggtctgagctgccgcccgctgaccactgccgtcgtcctgcaggtggctgggagcctgagccccacacctgccgggcagtaggtgctggaca

SEQ ID NO: 16207 - DNA, 120 bp, synthetic construct
  source 1..120: mol_type = other DNA
gaagggcatgagcctgagaggagcctaggtgttacagcctggctgtctgggtttgaatcctacttcctggctgtgtgaccttggacaaattcctaacctctctgggccttggtttcctca

SEQ ID NO: 16208 - DNA, 120 bp, synthetic construct
  source 1..120: mol_type = other DNA
ttcaatctatagcaacaggattcaaatccaggtcaggctgatattgcatggcctcttctacatcgtagtggaatgacttgatggtgtagaatatgccagcattgctttgagtttgctttg

SEQ ID NO: 16209 - DNA, 120 bp, synthetic construct
  source 1..120: mol_type = other DNA
aaaaatgtcaagaataggcaaatcaagtccatagatacagaaaggagattagtggttgccagagactgaggagaggtttctgggaagtgactgcttaatgggtacagggttttcttttgg

SEQ ID NO: 16210 - DNA, 120 bp, synthetic construct
  source 1..120: mol_type = other DNA
ttttataactacgtcttggaataggccattatgcttggatttcacaggcaagtctgcattttcctcgtcttaaattccatcgcggtgagccaaactcagtcaaccttttctgtgctaaca

SEQ ID NO: 16211 - DNA, 120 bp, synthetic construct
  source 1..120: mol_type = other DNA
atggcccttggatgatgtattcgtttcttgccagctgccataacaaagcaccactaaatggcttaaacaatcaaaatgtattgcctcccatttctggagcctagaaatctaagatcaagg

SEQ ID NO: 16212 - DNA, 120 bp, synthetic construct
  source 1..120: mol_type = other DNA
agggttagcaaactttttggtaacaggccagatagtaaatgttttaggcttagggcccatacagtctttgttgcaactactcaattgtgctgtcatagcacaaaagcggccatagctgat

SEQ ID NO: 16213 - DNA, 120 bp, synthetic construct
  source 1..120: mol_type = other DNA
ccctttctggagctgtttattcatgatttctgcattctttctcatgcatgttctacttcaagagaagtttagcaagtttttataataaagtagcttacaattcaatcagcttcaaaaaca

SEQ ID NO: 16214 - DNA, 120 bp, synthetic construct
  source 1..120: mol_type = other DNA
gcccggccgacagtttttaaaagtaggtaatcaaaagaactgggaaatgaagatgaaagcaacacggaaataaaaaatgggaacacagccaggtgtggtggctcacacctgtcatcccag

SEQ ID NO: 16215 - DNA, 120 bp, synthetic construct
  source 1..120: mol_type = other DNA
caggaggtcacgtgcaagctgtgccttctcaggatagagccgagcccacccaggccctcctcgactctgcagaggctcccaggagcacagggtcactcacaggaaacacaaagcgtacat

SEQ ID NO: 16216 - DNA, 120 bp, synthetic construct
  source 1..120: mol_type = other DNA
ggctggaccacaacggagttggcggagctgcggtggccccgggcagcccagtccgagttgttgggcaccttcacggtgatggcgcgctctgaggccagccgctcgatggggatctgggcg

SEQ ID NO: 16217 - DNA, 120 bp, synthetic construct
  source 1..120: mol_type = other DNA
gacggggaggatcgggggggaaatggagaaaaggggagagagatggagaaaagggatggtaatagggaagggggagggggaggagaatgggaattgggggagggggataaggatgggaat

SEQ ID NO: 16218 - DNA, 120 bp, synthetic construct
  source 1..120: mol_type = other DNA
tggatgtgtgcccggcatctgcctctgcccctgcctctgagagcagtgactgagcaaacagtcctggacctggttgaaaggatgggcctgtctgtttctagcagagtggtctttcagaaa

SEQ ID NO: 16219 - DNA, 120 bp, synthetic construct
  source 1..120: mol_type = other DNA
gcctccggaactggaaggagtgtactgacaattgtatctttcgcaagctcttaacctttataccgtcaataaaaaccccattaacatttaaaagggatgtttctgggtgtccacttggaa

SEQ ID NO: 16220 - DNA, 120 bp, synthetic construct
  source 1..120: mol_type = other DNA
cttggagctaccagactatctctgcactggtcactcctggacacttgacatgagacagacatttccatcttgctaaagcccctgaaatgctgggttctaaagcatcaagtgaacctatat

SEQ ID NO: 16221 - DNA, 120 bp, synthetic construct
  source 1..120: mol_type = other DNA
ttttttttaactccctcttttacttaccgtgggattaaaaatcaaggtgatgtgtttatggtagcccactgcggtgaaagaaacttgaggcaagatgtagtcatactgggatctggggag

SEQ ID NO: 16222 - DNA, 120 bp, synthetic construct
  source 1..120: mol_type = other DNA
atcatatgatgtcaccttaactccaccaatctgttaaactcaaaacgcattccatcatgtacgtggctctccacgctgcttcaggaggcactggagtactttgtttctggctttatttct

SEQ ID NO: 16223 - DNA, 120 bp, synthetic construct
  source 1..120: mol_type = other DNA
tcattaatggtaacatggagattttgttagagctgaacaagattataagaggtctctgagtccaaaatctaggttttgcagaggacgaagtcgaggcatgtggaaatgaagtgactggcc

SEQ ID NO: 16224 - DNA, 120 bp, synthetic construct
  source 1..120: mol_type = other DNA
ggaaggtattcagaggaagtgatcacatttccacttaaatcaaattgattaatctgccggaaaactatgatgtttacatcatcgatgtcattattcccaacctagagagagaaagaggga

SEQ ID NO: 16225 - DNA, 120 bp, synthetic construct
  source 1..120: mol_type = other DNA
gatcattaagacaggagcatttctctcccctcatttcctaatctgtggcctgttaaccttaagagtccagagttcctttaagaacacccctagtgttgaaacatctgaaattttgcgact

SEQ ID NO: 16226 - DNA, 120 bp, synthetic construct
  source 1..120: mol_type = other DNA
tacctggctcatatttgaatttaatgaataaagaaactgaggctcagagaggcaaagtaacttgcctgataggacacagcaagtaaggagcagtctgcatcactgcaaagtggtgtcttc

SEQ ID NO: 16227 - DNA, 120 bp, synthetic construct
  source 1..120: mol_type = other DNA
gctcgctgagttgacatttacctccactgacaacggcttccattgaagggggataaaagagcagctctttagatgacggtgtaacagtgattttctctccagacctaaaataattaatat

SEQ ID NO: 16228 - DNA, 120 bp, synthetic construct
  source 1..120: mol_type = other DNA
aaggatcaaggctgctgggaattgacggcaatgtcctataagagagggaaggccatttgtatatacatctagagataagaaatcaaaactaatttccagagagcctattagagactcccc

SEQ ID NO: 16229 - DNA, 120 bp, synthetic construct
  source 1..120: mol_type = other DNA
aaaaaatagaagggaaaggcctaaagaatcacaaagacaccacccctaacatctaccagctgctgaacccatgctggcagccacgcactgccacacttctttattgagccaaataaacta

SEQ ID NO: 16230 - DNA, 120 bp, synthetic construct
  source 1..120: mol_type = other DNA
gcccgcaacgcggacacgcctcacttacatactagaaaccatactacatcccagtcacttttcccggcttcggatcacttgtagcataagctctgaacctgttaacactatgtggatgac

SEQ ID NO: 16231 - DNA, 120 bp, synthetic construct
  source 1..120: mol_type = other DNA
ttcagatttgagattctaaataaggagtaaggtgttgcaaggcatccctcgaataacacacgagaggcccccctacaacgaccatcatccttggagtgctggtcttcatttctgaagcag

SEQ ID NO: 16232 - DNA, 120 bp, synthetic construct
  source 1..120: mol_type = other DNA
tcacagtcatttggacagaagccaaagagtttgtttttacaataaattgagtaatttttttattttactttaaaggaagactaggcaccatggctcagcctgtaatcccagcactttggg

SEQ ID NO: 16233 - DNA, 120 bp, synthetic construct
  source 1..120: mol_type = other DNA
actccaaagcccaagttcttggcactacacaatcttgcttcagatgatggtaaaaccacatgaattcaaccacaagatgtccctgcctgtacttatagtataatgagtaactacaagcag

SEQ ID NO: 16234 - DNA, 120 bp, synthetic construct
  source 1..120: mol_type = other DNA
ataagacaaacgtccagctgtaaccaatccaactgtttctgtacctcacttccactttctgtccgtcactttctttttctgtccataaaccctttccaatcacgcaacagtgccacagtc

SEQ ID NO: 16235 - DNA, 120 bp, synthetic construct
  source 1..120: mol_type = other DNA
aaaaatgagatacagcttcaatactaacacagaagctaacatgtcaagatgtcccttaagtcttatttcaatttggtctttcacggctattacagaacctcacctactaggtggagttcc

SEQ ID NO: 16236 - DNA, 120 bp, synthetic construct
  source 1..120: mol_type = other DNA
gatggaaccccaatccattcttctcttaaaaggcatttaggttgtttacaatattttgctattacaaacaaagctgcaataaacattctcatacattctccttggtcacgcgtaccacag

SEQ ID NO: 16237 - DNA, 120 bp, synthetic construct
  source 1..120: mol_type = other DNA
aatcctcctaggtaagtgtcggaagcagatgcacgctctctctgggagaagctgacttcaattcacccacagggacagcaagatgccacaaggcttagagagtgcgtccttccaattcgg

SEQ ID NO: 16238 - DNA, 120 bp, synthetic construct
  source 1..120: mol_type = other DNA
attctgggaaaagtctccctctcacccctatccccctagcctcctggtttcctgccccagagggaattcgtgtttagagtataaaataattttacaacgcctttcagctaagttatatct

SEQ ID NO: 16239 - DNA, 120 bp, synthetic construct
  source 1..120: mol_type = other DNA
acaaactggtgcatccactttggatgtttgcaaacacctaaagctgagcatgtatcagctctatggctcagcgactttactcctgtgatacactcagcaaaaatgcagacacatgtatca

SEQ ID NO: 16240 - DNA, 120 bp, synthetic construct
  source 1..120: mol_type = other DNA
gtatacatatgcatgtgtacccgtggatacctgaataactataaatagaaagcaatctgttaggatgcccatcaaaattttataagagggccggaaacatcggctcacacctgtaatccc

SEQ ID NO: 16241 - DNA, 120 bp, synthetic construct
  source 1..120: mol_type = other DNA
aagggtggcagcctaaagatcggctggttttccagagaaataaagaacccagtttttaatgtgaaacctgctgattgttaaagtattagcaaccagtataattttttttttttaacagta

SEQ ID NO: 16242 - DNA, 120 bp, synthetic construct
  source 1..120: mol_type = other DNA
aagaagatcacggatccgcttgttaaagaaatgtatctgctgggttccactgtttctctcccaacaccatcctataggtacaaaaactgaaacctagagcaagggcaggtcgcagagctg

SEQ ID NO: 16243 - DNA, 120 bp, synthetic construct
  source 1..120: mol_type = other DNA
gagtagttgatctccacgtccgacttgacgaagccaccgcagcccaccacgatgtcctccgagccgtgcgccggccccacgccgctcagcagcagcaccaccgcggcggtgaccaccgcg

SEQ ID NO: 16244 - DNA, 120 bp, synthetic construct
  source 1..120: mol_type = other DNA
taattcacaaaagcgtcatttcttgctcttgctacacacccattgctgggtggctggatctctgcattgtcaccctcactcctgtgccaggcaaatgaagcagccgctcttgggcataat

SEQ ID NO: 16245 - DNA, 120 bp, synthetic construct
  source 1..120: mol_type = other DNA
cagctctaatgaccactccagcaggttacaaacattatgtataatcttcacaaccactacaggaaatgttactatcatctctctactaaagacaaggaaactgacgcacagaggcacagc

SEQ ID NO: 16246 - DNA, 120 bp, synthetic construct
  source 1..120: mol_type = other DNA
attaacaggttccaataagggcacagactgtttgtttgtgcacccttgtgtcccgtctgcctaacattgtctggacactatagacatctaataaacactgggaaagaccaggaaaacgca

SEQ ID NO: 16247 - DNA, 120 bp, synthetic construct
  source 1..120: mol_type = other DNA
cacgagtatagatgtgttgctgaatgtaggggtccttggcagtggttccctggtcttttgaatgacacatttctttcagcctctggtcagaggctccacggggtctctccatgaaaatgc

SEQ ID NO: 16248 - DNA, 120 bp, synthetic construct
  source 1..120: mol_type = other DNA
tcatgttaattacccacagcctcccaaacatcagaggccccaaacatgcctcccaactcacttctcacaaatgggggccgttatctgccccatctctagggccgttctgtaacattctca

SEQ ID NO: 16249 - DNA, 120 bp, synthetic construct
  source 1..120: mol_type = other DNA
cctcctatatcctcttctgattttctaatttgatttactgaaagggaaacaaagaaacaagaaactggtcttagaacacaaggaaacgcaggccgggagcagtggctcacacctgtaatc

SEQ ID NO: 16250 - DNA, 120 bp, synthetic construct
  source 1..120: mol_type = other DNA
cccacgcagcatatgtggaattgattccagaactacttgtaaaactttatgttgttataagcgactattttatctgttagaaatactgaatgctctccttgtgaaaaactacataggcac

SEQ ID NO: 16251 - DNA, 120 bp, synthetic construct
  source 1..120: mol_type = other DNA
aaccacttacctttaattttctccaacaactgattctggtacatagtataccttaatgcctgcatccatggcctcacgtcatgctgtttacatgaacgtaaagcttcactgaagagtgga

SEQ ID NO: 16252 - DNA, 120 bp, synthetic construct
  source 1..120: mol_type = other DNA
gttagggggcagtaagaggagcagcctgctctataataaaatgatattagcaagtcaagacatttgcttttggggatttttacattttatttcatttcaacctcagtttatgttggcaag

SEQ ID NO: 16253 - DNA, 120 bp, synthetic construct
  source 1..120: mol_type = other DNA
acagctctcccagcatcacaatcttgtatctcagtcctggcttctttcactgctggcatccctccgtctctccctttttcacctacttctcttttttcaaagacttcttctctttcatct

SEQ ID NO: 16254 - DNA, 120 bp, synthetic construct
  source 1..120: mol_type = other DNA
tatatctaggacacttcccttctcaatgtccctgtatttttttgaatggcctcctcttctattctttcacaaaaatgctaaactaggattctgacccaggcctgcctttctcttcactca

SEQ ID NO: 16255 - DNA, 120 bp, synthetic construct
  source 1..120: mol_type = other DNA
tttccacacaactccctaagttttggggaaaaaaaaacatatttccaatgcaattattcaatgaaagcttattctaacaaacatacctgaaaattattgacttttttcaaaaaaatcata

SEQ ID NO: 16256 - DNA, 120 bp, synthetic construct
  source 1..120: mol_type = other DNA
aacagttttccaaatgcttgtcgaatacgagttccactgtgcactagttgaacacggcaaacatcgacacatctatgaaagaacgaaatagacaaagcaggtgtgttaacatttccaggt

SEQ ID NO: 16257 - DNA, 120 bp, synthetic construct
  source 1..120: mol_type = other DNA
acttgaaacaaactgaaatgtgcaaatgagccacgttagtcattcacttaaactccaaaaaaatgggaaacaaaaccatttctcatttatgacaattctccaaattaaccctgtatttcc

SEQ ID NO: 16258 - DNA, 120 bp, synthetic construct
  source 1..120: mol_type = other DNA
gattatattcaaaggagctgaggcattgttttccatctgtttcctcagatcctcacacacacaaccatccccctcaccccatgatctgaaaagcggaatgaggaactcaccctaaaatta

SEQ ID NO: 16259 - DNA, 120 bp, synthetic construct
  source 1..120: mol_type = other DNA
tatttcctatcagtagataacccctattctatgtttcccttcttcaagctcccctccaaggacatgtgttaagggacaattttcttcccaagtacatcatgcatttttcccccttcattc

SEQ ID NO: 16260 - DNA, 120 bp, synthetic construct
  source 1..120: mol_type = other DNA
agagtacctggcaaataacagaccctcaaaaaaatatttgctgaaggaaacaagaaatgaataaccctaggccaaccgaacacctcaatccagaggactggctgggagagaaaaaagaaa

SEQ ID NO: 16261 - DNA, 120 bp, synthetic construct
  source 1..120: mol_type = other DNA
atttccccacaacgatcaaactgaagttaaagcctgatgtacatgccacatgagaggtaagtttctaaagctcatacctcaaaaatcgcatactgtataatatggagcctttgtgatgtt

SEQ ID NO: 16262 - DNA, 120 bp, synthetic construct
  source 1..120: mol_type = other DNA
ggggggaaggtgtccttgttcatctgggggttttaggccacagcagagtctaataatgtgacttatggtgggggctttgagtcacatggatcagcttgacctccagtggggctggagact

SEQ ID NO: 16263 - DNA, 120 bp, synthetic construct
  source 1..120: mol_type = other DNA
aatcaaaattattcagatgaaccataataaatgtgcctgcatctgaagatgttctaaaccttcatttaagcaagaagcaagatcaagatccgttctgtcagttacctggagtctgtcgtc

SEQ ID NO: 16264 - DNA, 120 bp, synthetic construct
  source 1..120: mol_type = other DNA
atttttttttttacgactaaacatctcaattctagactcaggcactaattattaaagtcatctagttatatacaccaattctcaacagacacagtatttggaaaggcatattaaatagac

SEQ ID NO: 16265 - DNA, 120 bp, synthetic construct
  source 1..120: mol_type = other DNA
aactgtaatgagatgatcttattctttaaggatgagaaggacatcaaggctctaagtggtgaaatgacctgtggtaaaaccaggagtctgtcttgacactcaagtcttgggcaagtcacc

SEQ ID NO: 16266 - DNA, 120 bp, synthetic construct
  source 1..120: mol_type = other DNA
agagaaaccctaccccatccaccgactgaaagggcagctcccacgcgaaccccatccattctcttacactgcctaatttgtcttgttttcctttttcatatttattttatgtttttaatg

SEQ ID NO: 16267 - DNA, 120 bp, synthetic construct
  source 1..120: mol_type = other DNA
gttttgaagaggattctattcctcaacttaatgtttgcatgaggcacttaccctaagccagtgaatctcaaacccggctacacattagggtcactgggaaaactttaaaaagctgggatg

SEQ ID NO: 16268 - DNA, 120 bp, synthetic construct
  source 1..120: mol_type = other DNA
tatatgttctatgaaaccagcttgggagaaaatcaatgcacagatgtttgggaagccccagctgtgtttaatttgaaatcctctgtttaaattctctctctctcacctcaccagtgggca

SEQ ID NO: 16269 - DNA, 120 bp, synthetic construct
  source 1..120: mol_type = other DNA
aataagctcaacaacggattattccgttaatcctaaagacagccctatgagaaacactgttgttattcccattgcacagaggagaaaatagaggtctgcagcttagctggagacagaaac

SEQ ID NO: 16270 - DNA, 120 bp, synthetic construct
  source 1..120: mol_type = other DNA
gggtaaaaggtcacacagccaagtcagactgagccaagcccaagaactcgggggtccccattccagccagagtgcgctaccacccatgtgcaagaaaatgcaggagagccctccagaccc

SEQ ID NO: 16271 - DNA, 120 bp, synthetic construct
  source 1..120: mol_type = other DNA
gatccagaaagttctcagtaaatatcagccagtgagaatgcattagagcatcattcccatgaattcactgccaacacaccaaggtctccttaaaaacaccaaggtctctctagaagctgt

SEQ ID NO: 16272 - DNA, 120 bp, synthetic construct
  source 1..120: mol_type = other DNA
ttagaaaggacctgtccagccagaaaatcagagcctggcaaaagcactgcactcaactgctgataacttctgtgttctttgtggctttgatttctttggttctggaagaattcaaaagag

SEQ ID NO: 16273 - DNA, 120 bp, synthetic construct
  source 1..120: mol_type = other DNA
tgtggtaagaatcatatgcgactgtggtatttgatttaatggggaacttttgtgaggtggagggtccagggtaaaccttagatgagttaggaacaggatattatagctaacatccagacc

SEQ ID NO: 16274 - DNA, 120 bp, synthetic construct
  source 1..120: mol_type = other DNA
gaggttatttacagtattttttattgttgtaataaatgctgcagtagacacctttgtgcagtcatttttgcgcattcgtctgctcatttgtataggagaatcctagaagtggaatttcta

SEQ ID NO: 16275 - DNA, 120 bp, synthetic construct
  source 1..120: mol_type = other DNA
tggtcttttttcttcattgaacaccagaaggttagcttacatccagggatgtctaaccaaagcaaaatattcctggcgttcagatactacttgaattccatctttgatttgtgagactta

SEQ ID NO: 16276 - DNA, 120 bp, synthetic construct
  source 1..120: mol_type = other DNA
cttcctgagttttaaagaggaggtgggcactggtatgtcagctgggaccaagagggtattctggggagaggaaacagcatacatacattgtcaaaagaaaaactttagacaaaattaaca

SEQ ID NO: 16277 - DNA, 120 bp, synthetic construct
  source 1..120: mol_type = other DNA
cttaaaccagagatcatctcaatggatatagaaaatgcatttgttaaaaatgttttcatgacaaaaacacttaacaaactgggaatagaaggggatttcctcaacctgataaagttatga

SEQ ID NO: 16278 - DNA, 120 bp, synthetic construct
  source 1..120: mol_type = other DNA
ggtgccaagaccatttaatgggggaaagaatagtcctttgaacaaatgatgctggaacaactggatattcacatgcgaaagaatgaagttagacccttacttcatatcttatacaaaaaa

SEQ ID NO: 16279 - DNA, 120 bp, synthetic construct
  source 1..120: mol_type = other DNA
tacattcacaacataatgcaaccatgaccaccatccatatcctttttcctctttctcaactgaaactatgtacccattcaataataacttctcattctccctcctcctagcccctggcaa

SEQ ID NO: 16280 - DNA, 120 bp, synthetic construct
  source 1..120: mol_type = other DNA
gcctgttggaaaaatgaccacagaggcaagcaggggtaagaggcagagaaaggggctgggtcctgaagttgtcgtttgagggcctgcattcagctataccaatgaatccccttaaagatg

SEQ ID NO: 16281 - DNA, 120 bp, synthetic construct
  source 1..120: mol_type = other DNA
gtcgagactgcagtgagctctgataatgccattgcactgcagcctgagtgacagagaaagaccctgtctctcaaataaaacagagcaaaataaaaaacaaaaacagaaaaccaaaaaccc

SEQ ID NO: 16282 - DNA, 120 bp, synthetic construct
  source 1..120: mol_type = other DNA
ttagaaacctatattccaccatgataatgttttttactcttttcttctttagttaaaatttgacatacttagactattttttctgagcctttttaggagtgtgtgtttgtgtgtgtgtgt

SEQ ID NO: 16283 - DNA, 120 bp, synthetic construct
  source 1..120: mol_type = other DNA
tacacgtgttatacttcactggagaatatgcactgaatcagcggacagtctaaaaggcagggcattcagaagactcagttaaaagtggtgggtgttcaggtgtgttttgatttgatttaa

SEQ ID NO: 16284 - DNA, 120 bp, synthetic construct
  source 1..120: mol_type = other DNA
tgttacataaatggagtcatacatcatgtagccttcgagtctggcttccttcacttggctccatgcgtttgctgttgtcccacgtgtttgggtgtgtgcgtagtcccttcctttttattg

SEQ ID NO: 16285 - DNA, 120 bp, synthetic construct
  source 1..120: mol_type = other DNA
actcttgagcacagttgctcagtccacaggggtcttaagaataggaaagagaattgctatttgggatcattagattcctggagtcaccttctacaaatcctagttctctgcatcctaaat

SEQ ID NO: 16286 - DNA, 120 bp, synthetic construct
  source 1..120: mol_type = other DNA
gaagcaaacgcagaccactcaagcccactgacttcccagccacgaggtgagacttgtgcaaagataaggtcccatttcagagtcctagggtgagcctctggatctcagagataactggtt

SEQ ID NO: 16287 - DNA, 120 bp, synthetic construct
  source 1..120: mol_type = other DNA
gggtctctcatgaggttgcaatcaagaggtcagcaaggtatgctcatgttcatagcagcattaacaataactaaaaggtgaaagcaacacaagtgtccatccacagatgaatgaataaac

SEQ ID NO: 16288 - DNA, 120 bp, synthetic construct
  source 1..120: mol_type = other DNA
atggcttgagcatactcaaaacatggtggcttgcttcccccagaacaagggatccaagaaaggcagagagaaagaatatccaagacagaagccatagtctttgtataaccgaatcttgaa

SEQ ID NO: 16289 - DNA, 120 bp, synthetic construct
  source 1..120: mol_type = other DNA
ttggagactcagaaggaagaaggtgagaggaggggcgtgaaggtaaaaaaactacgtattgggtataatgtacactactcagcttacagatgcactaaaatctcaggattcaccactata

SEQ ID NO: 16290 - DNA, 120 bp, synthetic construct
  source 1..120: mol_type = other DNA
taagtggaaaggctcttctttatctgtactgcgttctccccaggttgtcatctgtgccaatccaaaaggcatgaaaatcaagtctggatccatggggaaggcgtccccaccctacgatgt

SEQ ID NO: 16291 - DNA, 120 bp, synthetic construct
  source 1..120: mol_type = other DNA
agcccagaccccatcaggggagaggtaaccagtgcacccaagaacatggcctcctgcttctgtacctattagcacccagcagaacaagcaggaaggctcagattgtcctgtatttcacct

SEQ ID NO: 16292 - DNA, 120 bp, synthetic construct
  source 1..120: mol_type = other DNA
aaagtctggttcttggactgcttgcaactgtatcatctgagattcttgtttaaaatatagatttgtagacctaaagtcagacttaccaaatcatgattactgggaatgcagcccagagaa

SEQ ID NO: 16293 - DNA, 120 bp, synthetic construct
  source 1..120: mol_type = other DNA
catccacgcagacccccaaagacctagttccccttgcaagtgcctgcattttcctcaatcccacctgttcaaactcatgcctacctacctttctcattaggaaaatctggaagaaaatgg

SEQ ID NO: 16294 - DNA, 120 bp, synthetic construct
  source 1..120: mol_type = other DNA
atgatttccaagtgttttttgttttgtgtttggtcactaggtggcctttgtttcagaactgccaaagacggtttctggaaagatccaaaggagtaaattgcgaagtcaggagtgggggaa

SEQ ID NO: 16295 - DNA, 120 bp, synthetic construct
  source 1..120: mol_type = other DNA
atagatgctatttttatctccattttgtacaggaggaaactgaggcacagtgggtcagtgtgtgtgttcttttggtaagtggtacagccgagatttaaaatgggtcctctgatggcaatt

SEQ ID NO: 16296 - DNA, 120 bp, synthetic construct
  source 1..120: mol_type = other DNA
acacacaaatatagatacagccacacacatctgcagtttcactgccacacatagacactcacacatgcaagcacacacaaatatctagtcacacttctagacactcacacacatgaatac

SEQ ID NO: 16297 - DNA, 120 bp, synthetic construct
  source 1..120: mol_type = other DNA
gcaaggaaataaagtaggagagggagttatccatgtagatatctatgaaaaatcagtctgagaagaggaaacagcaagtgcagataccctaaaggcagagtgtgacttcaaggaacagga

SEQ ID NO: 16298 - DNA, 120 bp, synthetic construct
  source 1..120: mol_type = other DNA
ggaaattgttgccagggagtagggtattgctataaagatacctgaaaatatgacagcagctttggaactgggcaatggaaaaggttggaagagtttggatggctcagaagaagacaaaga

SEQ ID NO: 16299 - DNA, 120 bp, synthetic construct
  source 1..120: mol_type = other DNA
agagaattttcaggagaggagtccaagaaagtgtcagaacaactctgctaaagcatgaccaaaagggggcctggtgctaataggataataggaagaaggttccaaaggcatttcagaaat

SEQ ID NO: 16300 - DNA, 120 bp, synthetic construct
  source 1..120: mol_type = other DNA
atttgatgttggaagaactagaggaataggggtgacatttgctgagatggataaaaccatacctggaatgagagtggccagggaaggatgtgatcaacctcttagctttggacaaagtat

SEQ ID NO: 16301 - DNA, 120 bp, synthetic construct
  source 1..120: mol_type = other DNA
aaacttccacagatcactaggctatgaacacaatgcagccaagttctttgctaaaatataggaaggaggacctttgcttcagttcccgaaaagttccttatttgcatttgaaatctggtc

SEQ ID NO: 16302 - DNA, 120 bp, synthetic construct
  source 1..120: mol_type = other DNA
taaagagtagagtgatagataccagaggctgggaagggtgtgtgggtggggaagtgggggatgaagggaggttggtgaatgggtagaagcatacagttagcagcaataagttcgaatgtt

SEQ ID NO: 16303 - DNA, 120 bp, synthetic construct
  source 1..120: mol_type = other DNA
cttagaaaactccagtagaaaatgagcatgtttttctccaaaggcctcaacaaaattctctgggttgactctcactggaccaacttgggccatgtgtccattgctaaatgaatccctgta

SEQ ID NO: 16304 - DNA, 120 bp, synthetic construct
  source 1..120: mol_type = other DNA
ctcaggaatcagactgttgggttcaacgttcacctccaccagttactcaataacctctgtgatcctcagtttccttatttgcaaaatgagaataatgctgttaccccttcacagattgtt

SEQ ID NO: 16305 - DNA, 120 bp, synthetic construct
  source 1..120: mol_type = other DNA
tattcagttatacttaaacgttcagcattattctcattttgcaaataaggaaactgaggaacgcagaggttatcgagtaagtggtggaggtgaatgttgaacccgacagtctgattcctg

SEQ ID NO: 16306 - DNA, 120 bp, synthetic construct
  source 1..120: mol_type = other DNA
aggtgcatcacatggcaaaagcaggaacaagagagagagcgtggggaagtgccatgtatgttaaaacaacaagatctctcatgaactcactcataacgaaggggatggtgctaagtcatt

SEQ ID NO: 16307 - DNA, 120 bp, synthetic construct
  source 1..120: mol_type = other DNA
acaagggttctaatttctctgttttattgtaaaatagacccttcgcatatcccctgaaagagtctcatgtatcctcaggggttctcagatcatagtttgagagtaatgatgcaaaatcaa

SEQ ID NO: 16308 - DNA, 120 bp, synthetic construct
  source 1..120: mol_type = other DNA
aatttttctgaaagaaaaaaacaaccttttgtatttgactaacaagataggtgcaaaaaagttatttcagtaaaattctcacttgcattactcttattatgagggagggtgagaattttt

SEQ ID NO: 16309 - DNA, 120 bp, synthetic construct
  source 1..120: mol_type = other DNA
tgcaattcctgcccaggctgagaaacatacctgggacgcagcggggtattaggttaagggagaaacctccaaatgtttaacagacaaagtctcattacctcaagagtataaatattttta

SEQ ID NO: 16310 - DNA, 120 bp, synthetic construct
  source 1..120: mol_type = other DNA
agttttccttcaagtcagttggccggcaggcagtttcccgaccaccaggaacagaaactttggctccaaggcaaatgaaacaaacaaacaaaaaaaagtatttccacttacaacatgaaa

SEQ ID NO: 16311 - DNA, 120 bp, synthetic construct
  source 1..120: mol_type = other DNA
tggaggaacaaacaatacatttgtcaccccgtcccacttcctatagaggatacaggcaaagcctccagcctcattacctcggacacagatggttatcgtttatagcaaaggtgcacaaaa

SEQ ID NO: 16312 - DNA, 120 bp, synthetic construct
  source 1..120: mol_type = other DNA
ctgttatctttcacctgggttccatcaaaaaaagtgagactcatcataaggttcccaagttctgagattggtcattgtattgaatgtgtgacctatcaactgacagcactccttgtccag

SEQ ID NO: 16313 - DNA, 120 bp, synthetic construct
  source 1..120: mol_type = other DNA
tcaaaaaagagtagtgtatggttggcgtattctgtgtagaatgtattttattgatgtctgctatttttataatttctgagttaagtactttttaattaatgctttttagttttgggcaga

SEQ ID NO: 16314 - DNA, 120 bp, synthetic construct
  source 1..120: mol_type = other DNA
ttttttattggtttggcttcaggagtacccaaatagtagcattatgagaatgacgcagacaatttgaataggggggaaggaaggcttcagacttgggggaaggggagattattgcaaatt

SEQ ID NO: 16315 - DNA, 120 bp, synthetic construct
  source 1..120: mol_type = other DNA
tgctgtaaagtggaatcaatagtagctgccctaaaaatctcaaagagttgtttcttacacagcttggcatatgaaggggaaatttggaaaaggtggccctttacagatgcaaggtagtgg

SEQ ID NO: 16316 - DNA, 120 bp, synthetic construct
  source 1..120: mol_type = other DNA
tacttttctcaggagatgaattaagctctatagccacaaaggtaatgttgtgctccatcttaagaaggctgaaggagtttgaaggggagagaaagtgtggtcagttatacagcattgggt

SEQ ID NO: 16317 - DNA, 120 bp, synthetic construct
  source 1..120: mol_type = other DNA
cacatgctcagcagggcctgaacacacacaacttcacctaggatcacacgcagcacattctgaagtccagtcacagtaaaatcatattctggatgtctgaatatatagttataagcagtt

SEQ ID NO: 16318 - DNA, 120 bp, synthetic construct
  source 1..120: mol_type = other DNA
ccaaattcagagtgacagttacttctggggaaggaggaaggcaaagagtgaaggagggacttattatttatattgtgatgttttatttcttaagttgggttgtgaggacatgggtgtttt

SEQ ID NO: 16319 - DNA, 120 bp, synthetic construct
  source 1..120: mol_type = other DNA
atgcatttaaacaacaagatctcgagagaacgcacgcactattgtgaggacagtaccaaggggattgtatttaaccattcatgagaaatctgcccccatgatccaatcacctctcactgg

SEQ ID NO: 16320 - DNA, 120 bp, synthetic construct
  source 1..120: mol_type = other DNA
atttaaggggttttaattattattcctcttctttcatcttctttcacacagtttcctgagatccttctgcaagcagcttccaagatggccaggaccctgcccactaaagaattcctctgg

SEQ ID NO: 16321 - DNA, 120 bp, synthetic construct
  source 1..120: mol_type = other DNA
cctctgtgtgcctcagttttcatcctttatcaaatggggataatgaaagtctctacctcactgggttattgtgagaattaatgggtttaaacccagaaacatgtttaccggaatgcctgg

SEQ ID NO: 16322 - DNA, 120 bp, synthetic construct
  source 1..120: mol_type = other DNA
gactgtcatgtgaaaagagaatcatgaaggaacatcttattgagaaggtgacatttgaatgaagacccaagggagagtgggccatgtggatattttcaattagagtcttccaggcagaga

SEQ ID NO: 16323 - DNA, 120 bp, synthetic construct
  source 1..120: mol_type = other DNA
ttagcagaattaccgcttggttttatattaatttgtgtgtgtgtgttcactcactccacagatatttgctgaacacctacgatgtaccaggctctattctaagccctggacagacacagt

SEQ ID NO: 16324 - DNA, 120 bp, synthetic construct
  source 1..120: mol_type = other DNA
cataattttggaatctttatgctgggctgcaaactcaaaggcatagggggtaagataggcaacagaaattgtgtatcgagtgcttactgtatgcgtggcactgttctaagtgctttacat

SEQ ID NO: 16325 - DNA, 120 bp, synthetic construct
  source 1..120: mol_type = other DNA
gagcagttttcccatacatcatcttgaaattttactgcatcagctcagtgatattgtgatctccttatctgagaaaggaggaaatttccagttcctccctcttagggctgtggcagagaa

SEQ ID NO: 16326 - DNA, 120 bp, synthetic construct
  source 1..120: mol_type = other DNA
ttccctaagctggcaaacagaatggaccccgggacaggtgggtggatgtttctgggtcttttaactattccatatttataagagctgccttcatatccttactgttaatttcctcatgat

SEQ ID NO: 16327 - DNA, 120 bp, synthetic construct
  source 1..120: mol_type = other DNA
aattttaattgttttgattgggagaggagtttagggtgtctaatccactgtactgctggaaagggaagtgttagcccttccatgttatcttcgttcttaggcagctctctcagtggtcat

SEQ ID NO: 16328 - DNA, 120 bp, synthetic construct
  source 1..120: mol_type = other DNA
aataggaagctaatggagggtaattttccaaagaaaaagtgtggacgctgagcagccaaaaccaatgaatgtccccctactcttttgagctttttgtaatcacggtggccatgtttcata

SEQ ID NO: 16329 - DNA, 120 bp, synthetic construct
  source 1..120: mol_type = other DNA
aagtgttggtattaattgtcttggaatcattacatatacactggtctcgtcactcaaggaaatttattttaacttatcaccttgcaggctgagcttgcattttccgggtttcagtggcaa

SEQ ID NO: 16330 - DNA, 120 bp, synthetic construct
  source 1..120: mol_type = other DNA
agtagctgtgagctttgtaatcatggaggacaacttgatgaggacactgaccagtccgattttcagaaacatgagaaatcttcctgaagccagtctattacatgaaggcagcaaaatgaa

SEQ ID NO: 16331 - DNA, 120 bp, synthetic construct
  source 1..120: mol_type = other DNA
acaaaaaaaagcaaagagagttgggaagattgactatagcctgtgattttcgcttccacttaggggtctctccttggatgtctcctcatctttgccttgtgaggtcttataatctctttt

SEQ ID NO: 16332 - DNA, 120 bp, synthetic construct
  source 1..120: mol_type = other DNA
aaggaatttattgactcccattactggaaagttcaggggtagtgttcagatacagctggatccaggatcttcaacactctgggtgggaatctgtctcttatcatgtttttgaactttgct

SEQ ID NO: 16333 - DNA, 120 bp, synthetic construct
  source 1..120: mol_type = other DNA
cagggaaacaggtgatgggccttggaatttagaggcttgtgaccaggctctgctgatggggtcagaggagatctgtgtgagtttaggtgtttttaaaaaacatttttcttaaaattacaa

SEQ ID NO: 16334 - DNA, 120 bp, synthetic construct
  source 1..120: mol_type = other DNA
tgagagggtgaaattggatcatttgaaggaagggaagcagggtatctaatgacaggtcctttttttctgtctgtatacaagattaggggagtgtttggtgggaatagtctgctctgatga

SEQ ID NO: 16335 - DNA, 120 bp, synthetic construct
  source 1..120: mol_type = other DNA
ttgaaaacacagtgccgtaggcctagagattcaatctggcctgtgggtcgcaagtcagcaacattgataaaagagataatttttagaatacagactctgtgttaatggtatatggaagcc

SEQ ID NO: 16336 - DNA, 120 bp, synthetic construct
  source 1..120: mol_type = other DNA
attcttcagggcctttagaaaataaacatgatgatatagagtccccttcgtattccagtcccattggaacgagtcaccaagtcctttgatctggaagtgacttcagaagacaccttgttc

SEQ ID NO: 16337 - DNA, 120 bp, synthetic construct
  source 1..120: mol_type = other DNA
agtccactgcagctgcagagcctccagcaggcgctagatggcgccaagactcactcctggcaggacgcgcccgctagcgccggtcccactagaacctcatcctcgcgttctcccgcaggt

SEQ ID NO: 16338 - DNA, 120 bp, synthetic construct
  source 1..120: mol_type = other DNA
tagataaggccctcttgtaaatgaagaagatatttcaaatctgacaagaccagggagggtgatagtgactgagggctgagctaagatagagaagcctccccagggagtggcattggatcc

SEQ ID NO: 16339 - DNA, 120 bp, synthetic construct
  source 1..120: mol_type = other DNA
aagctacaggctacattggatttctcctctacgatatttagcagagctgaaataaatgaatccctgagcagaagccaatattcttgcctgattgctgggactaattgatgttttggtggg

SEQ ID NO: 16340 - DNA, 120 bp, synthetic construct
  source 1..120: mol_type = other DNA
tggagtgtattttcagaggtcacgtggttttatagaaaactaagactgcagtgtgaaaggtgtgatcctgtgatcctgcacgtgttatttaatgtctgacttggttttccttcatcctgg

SEQ ID NO: 16341 - DNA, 120 bp, synthetic construct
  source 1..120: mol_type = other DNA
acagtcctttgcatgcaggaaagcagcaggtcacgctggcaggtgctgctcccattcacctttcaatgtcagctctcctgatggatttctagcctccatccttcacagccctcctcagct

SEQ ID NO: 16342 - DNA, 120 bp, synthetic construct
  source 1..120: mol_type = other DNA
cgctaaaagggtggcagtaagtttaaaaaggttttagttactgttttaaaaaaataattgcatagcatatttcatttactcaatagccacatgtggatttttggatttgggatgctcaac

SEQ ID NO: 16343 - DNA, 120 bp, synthetic construct
  source 1..120: mol_type = other DNA
gagagagagagagataagaaagaagaaagagaaaagatcatcaaccatggctcttcacacatacatgagggagggatggcagtcacaggcagaaagaaagagagaaagaaagaaagaaac

SEQ ID NO: 16344 - DNA, 120 bp, synthetic construct
  source 1..120: mol_type = other DNA
cccgaaatccttctgtagcttcctattaaatagcattcccatggttcatttatttagacaacaaacatgtattgagtgcctgctgtgtactaggcacttggggtaccacaagggacaaaa

SEQ ID NO: 16345 - DNA, 120 bp, synthetic construct
  source 1..120: mol_type = other DNA
ttctaagatcgtttgatcttctttgcaatctgcagatgaagaaactgaggctccaaggaatgaaatgtacgtttaaaggtcactacctaggaggtagtagagctggaatttggacctcag

SEQ ID NO: 16346 - DNA, 120 bp, synthetic construct
  source 1..120: mol_type = other DNA
attaactttttcatactctcagaaggtgaacctaatttcaaatgaaagctgcctccagaatatattgttaagcgtattctagatataattcattttggcaaacatactgtagaaattcac

SEQ ID NO: 16347 - DNA, 120 bp, synthetic construct
  source 1..120: mol_type = other DNA
cacctaggtgctgtatgatttgaagaaaggtgattctcccaagtctcagcttcctcatcatggaatgggacctgtagtaactatcctagaaacgtgttgtgaagaataaatgcaaaactg

SEQ ID NO: 16348 - DNA, 120 bp, synthetic construct
  source 1..120: mol_type = other DNA
tttccttccctccttccatgttaacagaaagtcagttcacatatctgggtgtcagtctgctcacctgtgaaatggcaatgatgcctgaactgctttgcaaccttataaaaatcaagtaag

SEQ ID NO: 16349 - DNA, 120 bp, synthetic construct
  source 1..120: mol_type = other DNA
tgtgccaattgccaattgcaacgttttcattgcttaaggcactatcattagggattttcctttcttgggctgaaggcattcctaactgattaagtaagccttcaataaatgggaggtgaa

SEQ ID NO: 16350 - DNA, 120 bp, synthetic construct
  source 1..120: mol_type = other DNA
aagtattaaacggggagagatgcacactggccatgtagttcgtcagcaagaaagcaggaccttaacaaagcagatcctcagctagatgaccttttcatattttaacaaaatcatctcctt

SEQ ID NO: 16351 - DNA, 120 bp, synthetic construct
  source 1..120: mol_type = other DNA
cagttcaatgagacagtcaggttctggaaatctagcataaatttacaagttcccatggctgagaagtgggcaataacttgtcacagttgagggaaccaatggaattgtaatcctccctcc

SEQ ID NO: 16352 - DNA, 120 bp, synthetic construct
  source 1..120: mol_type = other DNA
gtaaatggtatataacgtgtcatcttctgtgtctggcttctttcactcggcacgttctcaaggttcgtgtgctgtaacacacgtcacccatgcatttttttttttatgatggttgggttt

SEQ ID NO: 16353 - DNA, 120 bp, synthetic construct
  source 1..120: mol_type = other DNA
tcctgggacatgtcgactagctctatgtccaggaggaaaagaaaacaggttttgatgaactcagtaaatctcactccagtctccaaagccataatttcctttgtctttctttgcggtgat

SEQ ID NO: 16354 - DNA, 120 bp, synthetic construct
  source 1..120: mol_type = other DNA
gatgagacaagactgaggaggaagacccagggaccctttttagcagagcttaccagcgggtgtccaaggattgaatttcccttcctagacatgttttgcttcaactaaaaagatatatat

SEQ ID NO: 16355 - DNA, 120 bp, synthetic construct
  source 1..120: mol_type = other DNA
ttcgaaacctaagttgtctggctccagtctctcacccctcaccattattatctgcacagtaatgatggtaactgtcatctcttgatgataatgcgttcaggaactgagctcaaaagtttt

SEQ ID NO: 16356 - DNA, 120 bp, synthetic construct
  source 1..120: mol_type = other DNA
ccttcccttccccttcccttccctttcccttccccttcactttcccttccccttcccttccctttcccttccttttcccttccacttcccctttcccttccacttccctttcccttcacc

SEQ ID NO: 16357 - DNA, 120 bp, synthetic construct
  source 1..120: mol_type = other DNA
tctgatcttgcctgtaataagggagggtgggaggtggatagagccggagacatctttttcattctctgctggagctgagtagcaatttccccttttaaacaggccatgtgtgcagtcccc

SEQ ID NO: 16358 - DNA, 120 bp, synthetic construct
  source 1..120: mol_type = other DNA
tgaacttgcaatttgcttttcctttctcctctatggatgctgttagcttgtgttttctctctgtgtgcctcatttcagcttccttattcctgcagttttacttcagcccaaccagatttc

SEQ ID NO: 16359 - DNA, 120 bp, synthetic construct
  source 1..120: mol_type = other DNA
tttcagttcttcaaattatggcaaagagaaaatctcagaggtctctgatatatcgttaacactctaacacttgctcttcgctgatctcccattaaaaaggggcaggggcaggctttcgat

SEQ ID NO: 16360 - DNA, 120 bp, synthetic construct
  source 1..120: mol_type = other DNA
gcatgccaggcacttcacagatattgtctcatttaatgctacagcaaattagtgagcccgtattattattatccctatttcacagaggaggaagctgaggttcagagagtgtaagcaagt

SEQ ID NO: 16361 - DNA, 120 bp, synthetic construct
  source 1..120: mol_type = other DNA
ctgagaggcttccctgacctcccactgtgacaggctatcctgcctccttgtttatttccttcatatgatccttctccatctctcccatattcacaaaggcaggagctttgtccctcagca

SEQ ID NO: 16362 - DNA, 120 bp, synthetic construct
  source 1..120: mol_type = other DNA
tgccactgcactcctgagtgtcacagaaagaccttgtctcagacaacaaacaaagtaaaaacaattcagacatgaaggaaatacgcagtactcatcccatacattcatttgtccacttgt

SEQ ID NO: 16363 - DNA, 120 bp, synthetic construct
  source 1..120: mol_type = other DNA
gccaggggccgcctgtgggaacagctattctctgcacattttccactttgttttccccaaaacatatcagtttgaatacttgaatcatgcaggccaatattataatgtgaaaaggtatct

SEQ ID NO: 16364 - DNA, 120 bp, synthetic construct
  source 1..120: mol_type = other DNA
cccatcaaaatgtgctgtgaaatctaaattattggggctgtggtatggggtttgcagcaagtcttaacctcactacactcttctcattaagggttctttgatgatttagtgaggactcat

SEQ ID NO: 16365 - DNA, 120 bp, synthetic construct
  source 1..120: mol_type = other DNA
tgtgagtccaggatgtaacacatcttcaccagcacttggtattgtcaattgttttaattttttagcttttccagtggttgtagtatatcatgtggttttaatttgcatttctctgaccac

SEQ ID NO: 16366 - DNA, 120 bp, synthetic construct
  source 1..120: mol_type = other DNA
cacttattttgactaggcgagtgttagatcctaatcaagcagagaggcgcaaattggccccaaattaaaaaccaaaagggaagaaggatcatttagaaagcatgtcaataggagcctctg

SEQ ID NO: 16367 - DNA, 120 bp, synthetic construct
  source 1..120: mol_type = other DNA
aggctttcttttggaaccttgctcctccataaaagcacatccagggtaacctgatggaggatgaaagactacatggaacaaagtcaagtaatcgcggttgatgccttcttttttttatag

SEQ ID NO: 16368 - DNA, 120 bp, synthetic construct
  source 1..120: mol_type = other DNA
ttaaaaaaataaacttagtctagtttagcagaaggggaacttcattactttctcacaggctctgaagcagtggagcttcacagaatcatctggatgtgaagaacagatggagccctccag

SEQ ID NO: 16369 - DNA, 120 bp, synthetic construct
  source 1..120: mol_type = other DNA
ccagcctaattcacaatttcctgtggaccaaacaaaatatacctgctggccagatgtggcctttagactaccaacttgcaacttctggtttagataatgaaagctttgtcagttcctgat

SEQ ID NO: 16370 - DNA, 120 bp, synthetic construct
  source 1..120: mol_type = other DNA
ccaatttggctttggagatttcaaaagcctacatccaggtgttccaagaaaaaggttgagaagaatacgctatcaagagagagacagtttctcttccccttccacctggagatcagctaa

SEQ ID NO: 16371 - DNA, 120 bp, synthetic construct
  source 1..120: mol_type = other DNA
caaagtagtcaaattcatagagataggaagtagaatggtgattgccagaggctggaaggagaggcagatgggaagtgagtgcttaatgactacagagtttcagtttgggaagatgaaaaa

SEQ ID NO: 16372 - DNA, 120 bp, synthetic construct
  source 1..120: mol_type = other DNA
gttgtgctaactcctcacatggatcatcccacttgattctcagaagaatcccacaaagtggacgctgttatccctattttacagatgaagacatgaagtcactaaaaggatcaacagcac

SEQ ID NO: 16373 - DNA, 120 bp, synthetic construct
  source 1..120: mol_type = other DNA
aaaagagtatattaagaagagaaaatcgcacagtggaaagcggaaaattgttgaagagagaagttccctagctcccatcccctcttcaagggagtccacagcgcacacacacataaatgt

SEQ ID NO: 16374 - DNA, 120 bp, synthetic construct
  source 1..120: mol_type = other DNA
aggggaaggggagggggaggggaaggggaaggggaggggaaggggggaagtaagggaagggaaaggagaagggggctgttgggcacctggaggaggtggaggagggggaggagaagaaga

SEQ ID NO: 16375 - DNA, 120 bp, synthetic construct
  source 1..120: mol_type = other DNA
atcagaaagattggttatattatcaaggctttgactgaaacatcctatttaagaatatgcagaaaattcctggcttcgagtttgcagccttacgttacagtcagggggaaactgtcactc

SEQ ID NO: 16376 - DNA, 120 bp, synthetic construct
  source 1..120: mol_type = other DNA
agtatgaagaggatgaagcaagtcagaaagagcggaaacgagaaggtgcaatgacacagcagagcacaatgcagaatccagccctaggactccaataaaggctgggtttaattccaactc

SEQ ID NO: 16377 - DNA, 120 bp, synthetic construct
  source 1..120: mol_type = other DNA
catgcaggggaagagggtgctcttctggttcctcctgcttaggtatcccagtctcgcaatcatgagtgtgagtaaatgttggatatgacacagattctatttctcaagctgtttcacact

SEQ ID NO: 16378 - DNA, 120 bp, synthetic construct
  source 1..120: mol_type = other DNA
gtgggagaagaatatattgtgcccctgtacaacaaacccctgtgaccaaaaaaaaaatatagatcatactgtccctatctcactatccatcatttggggtcactgtagagaggtctcctg

SEQ ID NO: 16379 - DNA, 120 bp, synthetic construct
  source 1..120: mol_type = other DNA
tggtgaaccctcagggtccaactgtcactactgtctccactatgtcttcctgatgttccacccccggtcacatcctcaatacatctgtgactttctttttaaaacggcgtctcgctttgt

SEQ ID NO: 16380 - DNA, 120 bp, synthetic construct
  source 1..120: mol_type = other DNA
cgtcagaaaagtctagtcagtgtgccccagaaaggccatctcccactcccaggacccagaaccttccagtcccacagcttaggaaaaaaatcccaactgccaacctctgccaataagggt

SEQ ID NO: 16381 - DNA, 120 bp, synthetic construct
  source 1..120: mol_type = other DNA
caacccaccagcgatgccctgagatgagcctcttcactgctctcaccttcatgtaggttgccaggttggggttgtagtcatagagagaggcgatgatattgaacttgatcttgacaatga

SEQ ID NO: 16382 - DNA, 120 bp, synthetic construct
  source 1..120: mol_type = other DNA
aatcttaccgatcagttcccttcttgcctcgtgcctgtaggatctcattcagtttcttgataacaacagcatgggtgatctcagttcccttggcaaacatttttggcttctcctgtatca

SEQ ID NO: 16383 - DNA, 120 bp, synthetic construct
  source 1..120: mol_type = other DNA
cattttgctccaaagctaacatctacagttttccaaagaatccacaaacaacttattttctttgataccagctgctttctccagactgaccaactaatcaatgaatcagttcccccaaat

SEQ ID NO: 16384 - DNA, 120 bp, synthetic construct
  source 1..120: mol_type = other DNA
acttctagcactaaagatagtatgatacacacctcaaaagggaaatgtactattgtatgaaattctaactgaaagacctaagacttggcttgacctctcctatgacagattatactctgg

SEQ ID NO: 16385 - DNA, 120 bp, synthetic construct
  source 1..120: mol_type = other DNA
ttccccctaataccttcagatcaccataagacaacagatggccttatcccacatcaaagaggctgaagctcatgagaataaacccactcctttacaagcttgttttgaccaaaagatgaa

SEQ ID NO: 16386 - DNA, 120 bp, synthetic construct
  source 1..120: mol_type = other DNA
tggttaataaaacaaagttaggtatatttattctcatggaactttccagaggtggttgtaaaccctccaagaaggggtgtgatagacaatgtggcccagaccttgaccagtgttccctga

SEQ ID NO: 16387 - DNA, 120 bp, synthetic construct
  source 1..120: mol_type = other DNA
gatcagggtatgtgtgtgtgtgtgtgtgcgtctacctggaacatatctgtctctaccattgtttcctgcatcttatttcattattcatcatatatcttgcagctcattctgtatcagtgc

SEQ ID NO: 16388 - DNA, 120 bp, synthetic construct
  source 1..120: mol_type = other DNA
tcctttatgagtgtagtaggctctgtgactggagacaaacgtaacatgggtgtatttaataggtgaattttgttaatacccagattctgatggggtccttaatggtcccagagtgggaac

SEQ ID NO: 16389 - DNA, 120 bp, synthetic construct
  source 1..120: mol_type = other DNA
cagcctccatataggagctgtcagttgctccaagagatgaaggagagagtggccagtctcaatggctcccaactcttttgcctcgaggtgacacgcttcacttccactcacatctcctgg

SEQ ID NO: 16390 - DNA, 120 bp, synthetic construct
  source 1..120: mol_type = other DNA
ttgaatcctacttcctagctgtgtgaccttggatgaattcctaacctctctgggccttggtttcctcatctgtgaaatgggggataagctgatttcaactcatatgaatgaaatgagata

SEQ ID NO: 16391 - DNA, 120 bp, synthetic construct
  source 1..120: mol_type = other DNA
aatacatctatctatatcctttctgtctctatctagtcatttcttggtatcctcaagggattggttctaggattcctgggagataccaaaacctgtacatactcaagtcccgcagttgcc

SEQ ID NO: 16392 - DNA, 120 bp, synthetic construct
  source 1..120: mol_type = other DNA
tgagtagctgctcttgttctactcatgtaaataaatctcgaacatgcgttagtaaggaggagacaccagtcaatctccctgtcttcttgctgatcctcttttcttccctctaaggatgaa

SEQ ID NO: 16393 - DNA, 120 bp, synthetic construct
  source 1..120: mol_type = other DNA
tttaagtagacacttggtctttcccagttgccagcatcctgcagtcctcctgcatgtaaacacataatttcgtgtcaaaaaaaaaaattatccaggcttggtagtgcttgagcccaagag

SEQ ID NO: 16394 - DNA, 120 bp, synthetic construct
  source 1..120: mol_type = other DNA
cttgaatatgcctggcccggttcttccacaggatcactgcgtttatttttcctttttataggatattctttccccagatgcctgcatgacttgctctctctttaggtctttattcaaaca

SEQ ID NO: 16395 - DNA, 120 bp, synthetic construct
  source 1..120: mol_type = other DNA
gggattacaggtgtgagccactgcgcccagaccaaccttgccttttgcaagtgttaatatggttaaaatggaggttcatccaggagggctgtgtgcctctccttacactcttaacactta

SEQ ID NO: 16396 - DNA, 120 bp, synthetic construct
  source 1..120: mol_type = other DNA
tttcctaggaagaatgtacatgaggacatgtgcacaatttgtcaacatttttgagggtttcggcagtcccctgaagtgcatctatggactgattgagttcaaacatttgtgcagatggag

SEQ ID NO: 16397 - DNA, 120 bp, synthetic construct
  source 1..120: mol_type = other DNA
ggatgcactgttacctgttcataacaagacaggtgccatcagtaagagggtgcattgagagactgggcctttgctctgatatctaagcatgtggttattttctgatcatttaagtttatt

SEQ ID NO: 16398 - DNA, 120 bp, synthetic construct
  source 1..120: mol_type = other DNA
tggacctgctggcccggcccgccgtggctgttgtccattttttaatgggattatttgggatttttgtttttgagttcttatatgttctgggtattaatcctttgatggatgaatagtttg

SEQ ID NO: 16399 - DNA, 120 bp, synthetic construct
  source 1..120: mol_type = other DNA
tttttaaattatctaataggttggcactcatgatgagcccctgttctcattctgcaaatggtgaagctctctattgtcctgaccccacagttcctgtcgcatgaccagagccagttcacc

SEQ ID NO: 16400 - DNA, 120 bp, synthetic construct
  source 1..120: mol_type = other DNA
aggacataagggcaaggatgaaggtcacgacttcttcctgtggtcccgtcactcaccatgtcttccttctccaacatccatttttttctttcgtcatagaactttacctttttttttttg

SEQ ID NO: 16401 - DNA, 120 bp, synthetic construct
  source 1..120: mol_type = other DNA
ggtaacttggggcctttgtgggacctcagagacttaggtgtaattgcagcgctgtgacactcctagaaggggtccctggagttctctctcttctgccacagctgagtcttatgagaacga

SEQ ID NO: 16402 - DNA, 120 bp, synthetic construct
  source 1..120: mol_type = other DNA
gatcaactctctcaatgttcccatcctcaaaactatcatctggggtaactgaggcagtcagagatttactgactcaatgtcactcagttgattctgagttcactgctgattacatctgac

SEQ ID NO: 16403 - DNA, 120 bp, synthetic construct
  source 1..120: mol_type = other DNA
cttgacgtctttgatgggtttctccagtgtcaaaatcctaaatcaagtctttttggcttaaaactaactttgggattttttcagctgcatcccttggggagtctaaagaatgtatctctc

SEQ ID NO: 16404 - DNA, 120 bp, synthetic construct
  source 1..120: mol_type = other DNA
taaaagcgagttttatcctaacagtaaaattttcatcagttagattaatttttttatgactgtatcacacatgcttctttctccttattcaaagcagagtacaatgcctggggttcattt

SEQ ID NO: 16405 - DNA, 120 bp, synthetic construct
  source 1..120: mol_type = other DNA
tcacctcccattcccagccacatggcagagaaaaaaatcataataaaatggctttattttctggtacctcccagactctgatgactggtcccctagacacgcagtttgctgaaccaacca

SEQ ID NO: 16406 - DNA, 120 bp, synthetic construct
  source 1..120: mol_type = other DNA
gtaaggtttggttcatatcaagcagggaccacccatggcgtcatttccaggccccacctcttcagtatgccatagaaaactacttgggcagtagaggtgtgggaagaaaacaaaaaagaa

SEQ ID NO: 16407 - DNA, 120 bp, synthetic construct
  source 1..120: mol_type = other DNA
aaaaacaaataaaacaaacaaggtcctagcaaccctactaacctgttatgaagactgatacaggggcatcacctgccccaattttctgactcaggtcagccttatattcctactctaatc

SEQ ID NO: 16408 - DNA, 120 bp, synthetic construct
  source 1..120: mol_type = other DNA
gtgacccaagagactggtgtccccaaggttgtagtccccaggccgtgggaacacgtacttggagagagggtctacatcgaaatactcgaagcaggggtcacgaaggcgggatcctcaagg

SEQ ID NO: 16409 - DNA, 120 bp, synthetic construct
  source 1..120: mol_type = other DNA
agggcgctttttcggcgtctacctgctctactgcctgaacccccggtaccggggccgcgtctacgtggggttcactgtcaacactgctcgtcgggtccagcagcacaatgggggccgcaa

SEQ ID NO: 16410 - DNA, 120 bp, synthetic construct
  source 1..120: mol_type = other DNA
gcaggtccctttgatgacgcggagcctgagccagaccagggggatccaggggcctgctgctccctgtgcgcccagaccatccaggtgaggtccccccgaggaatggatggctctagagtc

SEQ ID NO: 16411 - DNA, 120 bp, synthetic construct
  source 1..120: mol_type = other DNA
gactctgtatctcctacctgcccctctccttggtagctgtgagaagtcactgctttggggagacctgatctggctgtgccagatggacactgagaaagaagtagaagactcagaattaga

SEQ ID NO: 16412 - DNA, 120 bp, synthetic construct
  source 1..120: mol_type = other DNA
ctgtagagatgacatcccatctctacaaaaataaaattaacaacctggtatggtggcatagactgttcccagttacttaggaggctcagcggggaggactgtttatgcaaataggaagct

SEQ ID NO: 16413 - DNA, 120 bp, synthetic construct
  source 1..120: mol_type = other DNA
gatatgatggcattggtgcagattatattagtatagaatatggtctcaggaaccaggcaggactttggcttccgagcagggttcagatcccagcttggccctacctgtgcagtgagatct

SEQ ID NO: 16414 - DNA, 120 bp, synthetic construct
  source 1..120: mol_type = other DNA
gggtttctaggggaagtggccagatcccctctgaggttagagagggggacccgttttgttttgctccactgaggagccctctgctgctcagaaccccaaaagggagattcaaaagatcct

SEQ ID NO: 16415 - DNA, 120 bp, synthetic construct
  source 1..120: mol_type = other DNA
gcagcgtcactttttcttgggctccttagaagctaccaggtacctctgggccacactgagatgaggggagtagccgtctgcataggaggtgtcttcaaacaggatagaatagtcctcctg

SEQ ID NO: 16416 - DNA, 120 bp, synthetic construct
  source 1..120: mol_type = other DNA
gtgcctcttcagcgtccagctgctctactgcctgaatccctggtacccgggccctgtctacgtggggctcactgtcaaccctgttcgtccagcagcacaatggtggccgcaaaaaaggcg

SEQ ID NO: 16417 - DNA, 120 bp, synthetic construct
  source 1..120: mol_type = other DNA
gcagagcggcacatcctccagacgacttcggatcctgctgttgaggagccaggaaacgccctgacactgttgcggccctgtccacatctctaagatggggatggatgatagtacttctgg

SEQ ID NO: 16418 - DNA, 120 bp, synthetic construct
  source 1..120: mol_type = other DNA
aagatgtgaataatcgtcgcccctgcctcacaggattgagctgtgtaacccccctcccaccttttttctatgccatccactgcgggtctggggctttttactggaatgcaatacaaagtc

SEQ ID NO: 16419 - DNA, 120 bp, synthetic construct
  source 1..120: mol_type = other DNA
tgtttttctaggatcttctagcgaagctctgtaacttcccctgagagccatgaaactgggctggctcccagggtgatgggactccagcgtctttgttctttcttgttctatgcatccatg

SEQ ID NO: 16420 - DNA, 120 bp, synthetic construct
  source 1..120: mol_type = other DNA
cgactccggatccctcccacattagacctaccacaccctcagggcagacaacagctccacacaccccacactcagccaccagggcaagggagcaaaattccagaaagctcaggtgagtac

SEQ ID NO: 16421 - DNA, 120 bp, synthetic construct
  source 1..120: mol_type = other DNA
attcatatgagttgaagtcagcttaccccccatttcacagatgaggaaaccaaggcccagagaggttaggaattcgtccaaggtcacacagctaggaagtaggattcaaacccagacagc

SEQ ID NO: 16422 - DNA, 120 bp, synthetic construct
  source 1..120: mol_type = other DNA
tggagtgtgggttttgttttgttttttgaattttttattttgttctactcggttttattcttattgctcaggcttgagtgcactggcctcttctcagctcaacctccgcctcttgggttc

SEQ ID NO: 16423 - DNA, 120 bp, synthetic construct
  source 1..120: mol_type = other DNA
ccattgccatgacagtgcctcgaaaggtgatgctcccccgccccaccctgggctccaggctgggcactgactttgcggtcttgtggggggtgtcctggcataagcgctttcctcactatc

SEQ ID NO: 16424 - DNA, 120 bp, synthetic construct
  source 1..120: mol_type = other DNA
agccatgctgatgtgggccaggaggctgctctccgtttccgagctccttctcagagctgacacagctgaactatttaaggccctagcttagaacctcaataattcccaaatttaccaaaa

SEQ ID NO: 16425 - DNA, 120 bp, synthetic construct
  source 1..120: mol_type = other DNA
ctggactagaagcattggcgccttcaagactgccctgggaaacatgacctgccctgtttctgtctagtgagtacccatttttccccactcaccggctcacttcccttggctgggtcaatt

SEQ ID NO: 16426 - DNA, 120 bp, synthetic construct
  source 1..120: mol_type = other DNA
tcaggcaccttagatttgagaacagctatgttgctgctgaccagctgtgtgaccctgggctggtttccttccacacaatgggagtgccaatggctgcatgcatgcaaagaccgtctgagg

SEQ ID NO: 16427 - DNA, 120 bp, synthetic construct
  source 1..120: mol_type = other DNA
ttctgagttcactgctgattacatccgaccaaactgctttttctgaagtctactccgtttaatcatgctggtgatgattttgtgcggctctgggacaaactccacctggctgaagataaa

SEQ ID NO: 16428 - DNA, 120 bp, synthetic construct
  source 1..120: mol_type = other DNA
gcatcctatttcccatatgtccgcatgttttagaaaaaaatcctcaatttcctaaatatgcaagaaaaatcggtattgtaggacaatgtgactttttaaaaaatgttatttaaaaatctt

SEQ ID NO: 16429 - DNA, 120 bp, synthetic construct
  source 1..120: mol_type = other DNA
aaagagttttaccagaagtacgaccctaaggacgtcatcggcaggtaaggccgcggccagggaaacggaggtccaaagaggtcgagccccagcattcccgcttccgtttgaaggctggag

SEQ ID NO: 16430 - DNA, 120 bp, synthetic construct
  source 1..120: mol_type = other DNA
gccactgcacccggcccagcacttttgatttttgtatttggtttgagataaaggctcagtttcattcttttgcctgtggatatccagtgttcttaacaccatttgttaaaaagactgtcc

SEQ ID NO: 16431 - DNA, 120 bp, synthetic construct
  source 1..120: mol_type = other DNA
ccagcagttgccactgtgatcagtcagccgtgtcaccatcaggcaagaccctccaccagcaaaaagattatgccttgctaaaggcttaaacgattgttagcattttttaccaatcaaata

SEQ ID NO: 16432 - DNA, 120 bp, synthetic construct
  source 1..120: mol_type = other DNA
ccaggcaaaataatcctatggtgaaaaaaatcaacaagataatctctgcttgagaaaaaggaccaaagacaagtgaattttctgagggtgatgaaagtgttgcttcgaaaaggggtgaag

SEQ ID NO: 16433 - DNA, 120 bp, synthetic construct
  source 1..120: mol_type = other DNA
cttggctaaactctgtaatcacttggagaactttaaacaatactgacgtctgggccctactccagggattttgattttattggtctgttgcaatttaggttttgggaattgtagggcctc

SEQ ID NO: 16434 - DNA, 120 bp, synthetic construct
  source 1..120: mol_type = other DNA
ataaataaaaataaccttatatacaaggttaaatgcaaatatcccacagtgaaggccgggcttcagcataaggaggaagtcctgcctgaaaaaggctgcggcttggaacattttaccctg

SEQ ID NO: 16435 - DNA, 120 bp, synthetic construct
  source 1..120: mol_type = other DNA
tacatgttcagtaagtgctcacttaacatcattgataggtccctggaaactgactttaagtgaaacaaaatactatatgccatggaaaattaactcttgtttatatcaattagccaatgg

SEQ ID NO: 16436 - DNA, 120 bp, synthetic construct
  source 1..120: mol_type = other DNA
aatcagtgagtacttcagtcctgattaccaagagtcaggctatatccctgtggtcacttcatctggtctgcttaccattactaaatgcccgggtagtcatatgaacattgcttattattg

SEQ ID NO: 16437 - DNA, 120 bp, synthetic construct
  source 1..120: mol_type = other DNA
acattacaactggtaaaacagaaataaaaaaaggtcataagactgctatgtacacagactcctatgtacaatgatatcccaccaaatgggataagggagaagacatgaatatatttctag

SEQ ID NO: 16438 - DNA, 120 bp, synthetic construct
  source 1..120: mol_type = other DNA
aggaagtaaaggcacattcctgactactgttagttgatgagcttttcaccaaaagcagagatgtgagacctggcaggtttcaaagacccctcaagtgctccataccttgaaattcacttc

SEQ ID NO: 16439 - DNA, 120 bp, synthetic construct
  source 1..120: mol_type = other DNA
agcccgttcatgagtgtctgaaactgtcacttgactgccagaagtgaaaacatcgtgtccctagtcacctgccatttgccttttcaaaaccatttcctctgttctctaggctgtcacaaa

SEQ ID NO: 16440 - DNA, 120 bp, synthetic construct
  source 1..120: mol_type = other DNA
atggccttggtatggttttatttgtacttttgtgggggattcgtggatctttagattaaaaaaaaaaataggtttttgaacaatttttgcaagtttgcagctgttagttattgatttatt

SEQ ID NO: 16441 - DNA, 120 bp, synthetic construct
  source 1..120: mol_type = other DNA
cccaggattcatcatttttctgtgtgagagtgttagttcagttagctacttcatcattagtggaagccagaacctcagttttgatttttgagtgtaatataaaaaattacacagtatgga

SEQ ID NO: 16442 - DNA, 120 bp, synthetic construct
  source 1..120: mol_type = other DNA
attatctcttgtcactgaagcagctgcatttcctggaggactttgatctggagacagaaggaagggcaggattctgacaggtcctgggtggaagatgacaaagggaacttgtgggggtgt

SEQ ID NO: 16443 - DNA, 120 bp, synthetic construct
  source 1..120: mol_type = other DNA
tcatagataagacggaactgacactgccatttacaggggcatctggtaggctctcaggaaaggggtttgctgagtgctgcagtctcaggattcagtccaggactctgtcctcgcaagctt

SEQ ID NO: 16444 - DNA, 120 bp, synthetic construct
  source 1..120: mol_type = other DNA
attctagatttactcccagctttaacactcactgtgtgtgtaaccttgggcatgcagccaggccttcctgaaactgttttttcatctaggaagtgtgatgagaacaacaccttcctcaca

SEQ ID NO: 16445 - DNA, 120 bp, synthetic construct
  source 1..120: mol_type = other DNA
catctagatccagcgcttttctcttcgtggtgttcaaagaaagagtattattttttctctaacttgacctataacctacttattttgaagatatccaggctgcaggagatctctacccat

SEQ ID NO: 16446 - DNA, 120 bp, synthetic construct
  source 1..120: mol_type = other DNA
gagacagggtgtcacaattaccaggtgaaactagccgccctagctccaatgtctcttcagcaggagagatttggaaacagcaaggctcctctccgcagggcgaaactgctgggctgcgaa

SEQ ID NO: 16447 - DNA, 120 bp, synthetic construct
  source 1..120: mol_type = other DNA
agctgaaggctcactggagcctaggagttcttggttatagtgagctatggtcacgctactacactgcagcctaggcaacacagcaacactgtctcttttttttttttttttttttttaca

SEQ ID NO: 16448 - DNA, 120 bp, synthetic construct
  source 1..120: mol_type = other DNA
tgccagaaaactccttagaaaacaaaatgtagttggcccttaaagaatggatttctcactacctacccactaattttggtatgcttggctctattaggtacatacctaggagtattaatt

SEQ ID NO: 16449 - DNA, 120 bp, synthetic construct
  source 1..120: mol_type = other DNA
tgtcactatatgaccttttcggaagctccctgaaaagctctcttctcagggtttgtctttttttaatggactgagagcttgctctgtgtgaacaagctccatcactgtaaagtttcttga

SEQ ID NO: 16450 - DNA, 120 bp, synthetic construct
  source 1..120: mol_type = other DNA
ctgcctgaggcagtgattatcagctggggttaatgagaggttgaccaaatcttaaaaggaaaaatggaaatgagatattcacaggggactctgaaaatctctcacttatttctgggaatc

SEQ ID NO: 16451 - DNA, 120 bp, synthetic construct
  source 1..120: mol_type = other DNA
gttctgtagtaatgtttctttcttgaattcttgatttagtaatttgagtcttctttcttcttttcttggtcaatctagctaaaggtttgcaagttttattgagctttttaagaaactact

SEQ ID NO: 16452 - DNA, 120 bp, synthetic construct
  source 1..120: mol_type = other DNA
agaaaatgctgaaccacaaaatattttaatgtagtagtttaaaaataaaatgaaatattattttgacccaagaaggtggcaaggcctgtacacagttaataccaatgtaaattggtacat

SEQ ID NO: 16453 - DNA, 120 bp, synthetic construct
  source 1..120: mol_type = other DNA
tcccaaagaccccatctccagataccatcacactggagttagggcttcaacatttgaatttggagggggagaaagaattcagtccatagaatatggcttagttaaatgcacaaaatcatc

SEQ ID NO: 16454 - DNA, 120 bp, synthetic construct
  source 1..120: mol_type = other DNA
ccagtggctgctatcttgtctctttgatttctcctgaaacctctcacacgaagtcattgtgtgtaaatacattctactgaaggcttggggtcaacagagggaaagaattacatctttagt

SEQ ID NO: 16455 - DNA, 120 bp, synthetic construct
  source 1..120: mol_type = other DNA
cattcatctacatacacacccacctatccacccatccatccatcctccatctacccatcaatccattttccatctacccatccatccatctactccacccatccatccatcctccatcta

SEQ ID NO: 16456 - DNA, 120 bp, synthetic construct
  source 1..120: mol_type = other DNA
ctccatctacccatccatttatctatactcactcacccatccacccatactccatctacccgtccgtctccccacccatacatctacacacacacatacccatatacccattcatccatc

SEQ ID NO: 16457 - DNA, 120 bp, synthetic construct
  source 1..120: mol_type = other DNA
ctaagagttaatgtgtactcactcattcaatcctctcaataggctaatgagttagggactgttataatttccatttacagatgagaaaaccagggcacagagcgactgagtgacttgccc

SEQ ID NO: 16458 - DNA, 120 bp, synthetic construct
  source 1..120: mol_type = other DNA
gacactgcttccgctgctgtgcatggctctaacgccccctccttggtacagaggcctctctgaccaccccaacacagccggccctctcctcctcacctcccaccactctatctatctggt

SEQ ID NO: 16459 - DNA, 120 bp, synthetic construct
  source 1..120: mol_type = other DNA
gtgggagagggggtgattagggttagggttagagttaggattagtgccaggctgggatgggcaggaaagagggggattagggttagcattacagttagggttagggttagtagcaggctg

SEQ ID NO: 16460 - DNA, 120 bp, synthetic construct
  source 1..120: mol_type = other DNA
gggcaggggaaggcattgtcttcaaacaggaaaaagctgagaatggaaacaggcgaaacttaccaagtgtaacatcacctggaactgaaggagggtgggaaggttttaattattttaaaa

SEQ ID NO: 16461 - DNA, 120 bp, synthetic construct
  source 1..120: mol_type = other DNA
gggactcagagactgcctaaattttaagatatattttatttgaatgaatttaaatgtgaacttaaatagccccatgaggctagtggctacctcattggacagcacagccctggacgcatg

SEQ ID NO: 16462 - DNA, 120 bp, synthetic construct
  source 1..120: mol_type = other DNA
tgcaaaggagtgattcacagcaggtggtcatggaaagaaagctctcccccacaggaagtactggttaaccgtctttggggcctgtccagagcccccttccttgtaacatagctgtgttca

SEQ ID NO: 16463 - DNA, 120 bp, synthetic construct
  source 1..120: mol_type = other DNA
gtcactgccttatctcatcaggggctgcttttgtctctgggaatgcaaatgtcactatgatcacctggagaagtcacttgacatccatgagcctcatctttaaaaacaaagaaagaaata

SEQ ID NO: 16464 - DNA, 120 bp, synthetic construct
  source 1..120: mol_type = other DNA
ctaacctgccatgcatgcactctcttagtctcctgggctacctgctacacacgcactctaactcgccacacatgcactgttttggtcccacggactacctgctacacatgcactctcttg

SEQ ID NO: 16465 - DNA, 120 bp, synthetic construct
  source 1..120: mol_type = other DNA
ggtccatttccctggcctttgacattttagaaggcaaattcccaacaaagttttttcattttcacctcgttcttctgtgaacagagcaaaacttgcagtcacttgtagataccagcacgt

SEQ ID NO: 16466 - DNA, 120 bp, synthetic construct
  source 1..120: mol_type = other DNA
caccagtcgagtttcttgacttcctttttaagcattaaacttcactggtggtgaaaaagagctttttaagcccacgccttcctcatgggttttgtttggttttgcttttctatagcccag

SEQ ID NO: 16467 - DNA, 120 bp, synthetic construct
  source 1..120: mol_type = other DNA
ctgccaatccagctttcccatttttggaggaggcccaaccttttccagaactcttgggcttaacctcatctccccatactgatacttttgtgtttgttcaaataatattagaacacatca

SEQ ID NO: 16468 - DNA, 120 bp, synthetic construct
  source 1..120: mol_type = other DNA
tgcaagagtccagctactgcagttcgtgctttacaaaggaaagggataaccatcagcaccgctgtatacatatattcttggaggactccagttaaacagtttaactacctatgacattca

SEQ ID NO: 16469 - DNA, 120 bp, synthetic construct
  source 1..120: mol_type = other DNA
attgtgaagaaggtcgattttcaacaattctccaatagaaacaaagaacaactgatagagactaaggtcctgtgataggttactgagcacaagaattgaacttatagagtatcaaaaccc

SEQ ID NO: 16470 - DNA, 120 bp, synthetic construct
  source 1..120: mol_type = other DNA
tttatgtaaatgaatgggcatgactgtgttctagttaaactttattttgcaaaagcaggtcacgggactgatttgcctgtgatctctgcaacccagctcttgagtaagggtcacagactt

SEQ ID NO: 16471 - DNA, 120 bp, synthetic construct
  source 1..120: mol_type = other DNA
gcagtgttagatttcagaccaaacttaggggaaagagtatccaaagtcagatgtatccttaaaagtcacttagcagcattccttccttgcagagaccatgaacttggctttctgatgtgt

SEQ ID NO: 16472 - DNA, 120 bp, synthetic construct
  source 1..120: mol_type = other DNA
tggaaaagaaagcaggaaaaaaataactcaccccctggtcccccaccatgacactacctctgtgaacattttggtagatattctttgggctctgacacgtacacacatgttgacttttat

SEQ ID NO: 16473 - DNA, 120 bp, synthetic construct
  source 1..120: mol_type = other DNA
ctttcctgggcttgtgattcccaggatgtctccacttctagggccacattagctaaatggtaattatgaaaatatccagggcaagaagctaataaataagaactgacaggcattgcatag

SEQ ID NO: 16474 - DNA, 120 bp, synthetic construct
  source 1..120: mol_type = other DNA
gaaaggagggagggacaagtggtacagtaataacagcagctaatatttaactactgcttattctgcaccagggattctgccaagcattctgccagcatggtcttcttcaataacctataa

SEQ ID NO: 16475 - DNA, 120 bp, synthetic construct
  source 1..120: mol_type = other DNA
agcgttgagcaaaaccaggataggaccactaacattctgatgcctggcacctagtaggtcttcagtaaatatttattgggtaattgaaggatgggtgggtatataagtttggggaacttc

SEQ ID NO: 16476 - DNA, 120 bp, synthetic construct
  source 1..120: mol_type = other DNA
aacatttttacctataacttcccccagggtatttgaatatgtagccaagggtgagaaggaatagcaaggaaacctatataacacccccatccctgtctctacctttcttttctgttcctc

SEQ ID NO: 16477 - DNA, 120 bp, synthetic construct
  source 1..120: mol_type = other DNA
aaaggaggaagcacccaggctttcttatcagctttccaggtgtcagcaagaggggacaagggaaggctgaggcttaaaagccaccaggagtcaaacactgaaacgtgaatttggactaac

SEQ ID NO: 16478 - DNA, 120 bp, synthetic construct
  source 1..120: mol_type = other DNA
ctttttcctctggctgccttcaatattttctcagtgtgtgtctaaatgtgtatgtttttgttgctgttgttgctgttgttgttgaatcctgcttggggttttccaggctcttggacgtat

SEQ ID NO: 16479 - DNA, 120 bp, synthetic construct
  source 1..120: mol_type = other DNA
ttttgttgttgctatggctatcatcaatgcaccatctgcttcaaatgcttccagtgctaccttgtgctggttctggtgtgcttgtgtaaaggccggttttctgaacgattttcctaatgt

SEQ ID NO: 16480 - DNA, 120 bp, synthetic construct
  source 1..120: mol_type = other DNA
caggaaaagttatgattttgaggacaatccggcttcctcttgctgataaggcgggaatgacatgctttagagctttctacgtactaacagaatccagaaatcacccatgggattctgaaa

SEQ ID NO: 16481 - DNA, 120 bp, synthetic construct
  source 1..120: mol_type = other DNA
tttctggaaacagaatcaattagaattgccccaaagctgctgtgtgttcccaacaatcttcagagatgtgtgaggatgcccaagttatctctgtcaagaggcttgtatacctccagagat

SEQ ID NO: 16482 - DNA, 120 bp, synthetic construct
  source 1..120: mol_type = other DNA
tttaaactattgtataatgtaaactaaaaataaaatcctgacacccccaactgactgaacagaccctctctgggctaaggggagcctcgaaaaaccttcaactctgttcctgcctgggaa

SEQ ID NO: 16483 - DNA, 120 bp, synthetic construct
  source 1..120: mol_type = other DNA
aaaacaataacaacggctgcagctgggatacgcagacaaacagaaccctgacttgccagacttaactactgctttgattgcataagagactgatttcagtaactttctccagataagaac

SEQ ID NO: 16484 - DNA, 120 bp, synthetic construct
  source 1..120: mol_type = other DNA
ccagtgacattcaaccctgttatacagaatcaggaaactaagaccaggagaggacaaaattgctgaaggccaccacaccaagactggaacccaagtctctaactcctagctcacagacag

SEQ ID NO: 16485 - DNA, 120 bp, synthetic construct
  source 1..120: mol_type = other DNA
tgatacccactgagaagtgacactaagacggaaagagtcagggcaatgccaggctggtggagaaaatttacaatgtcctcccctttgggtacagtaagaaatttggaaaataaaaacaat

SEQ ID NO: 16486 - DNA, 120 bp, synthetic construct
  source 1..120: mol_type = other DNA
caggctgatgtgcttcttgttggtggggaaggcttatgaaactggaagtgttatgctaatttttaatcttagcatcccaaatgagaaagagaattaagaaatccacattcttatgcagtg

SEQ ID NO: 16487 - DNA, 120 bp, synthetic construct
  source 1..120: mol_type = other DNA
aaattcctttcagcttgaagctcttcaggtgttttcagcagcagcatcccatcaatcacagtgcccagaaggggttgactctggggagagagcagtgcagcacctgtgattccctcccta

SEQ ID NO: 16488 - DNA, 120 bp, synthetic construct
  source 1..120: mol_type = other DNA
cacagaatccatgattaatgaggaagagattatgctatctatctgtatttaaacaagagctgttattgatccacgggtggctttgaggaggtaccgaaccctggtcactcaaggagccta

SEQ ID NO: 16489 - DNA, 120 bp, synthetic construct
  source 1..120: mol_type = other DNA
actcatggaaacacaagcagagtccagtgatagaggccagccctgggatccaggagtagcctcaggtccaaggagagagtccaggctactcctgagcttggaattcacactcttccccct

SEQ ID NO: 16490 - DNA, 120 bp, synthetic construct
  source 1..120: mol_type = other DNA
gatggataagacaatcatagatagacggattaacgaatgggtggatggatgactatcctaggatgacaactgagtcagtctcagaaaatctagaaaactggaccaccactaggtctaata

SEQ ID NO: 16491 - DNA, 120 bp, synthetic construct
  source 1..120: mol_type = other DNA
ttccttgtctgctttcaaatcctggttgttccacttaccagccattaggcagacccagagagacacaagacaccatcactgcccaacatggcaccaggccctggcacataggaggagtgt

SEQ ID NO: 16492 - DNA, 120 bp, synthetic construct
  source 1..120: mol_type = other DNA
ggctccatccctccttcctctgcctgcctcccctagcccactggaccccacagtcacaaagactgtcgcctccttcttgggcatggacaagccatcagaccaccccagaggaattcccag

SEQ ID NO: 16493 - DNA, 120 bp, synthetic construct
  source 1..120: mol_type = other DNA
gtcattgatgaccgcaatgagaccaactgagtggcgtgttcaggaagaaacctgactggcatggatggaggagaaccttagaaaaggttcatagcagttgcgccttgaaggagatctgac

SEQ ID NO: 16494 - DNA, 120 bp, synthetic construct
  source 1..120: mol_type = other DNA
cctactgcacataccctggctgtcccttcctttctacccagcctccagtgcctcctccccgaaaggctcttgatgctgagaacatcatcatgggcatagcaaaggctaaggatgtcctct

SEQ ID NO: 16495 - DNA, 120 bp, synthetic construct
  source 1..120: mol_type = other DNA
gactgatcatatgtgatgattcccattttgaggaaacagaggcttagagaagttaagaaactcccaagtctctcagctagtcaaaagcagaaccaggatttaaacccagaccgtgtagtt

SEQ ID NO: 16496 - DNA, 120 bp, synthetic construct
  source 1..120: mol_type = other DNA
ggtggatgtgtatggcttcattgaagatgccagtgtgagagggaagagaaaaaaaaacaaaggtcaaacacagggaccactacggccaagaccaaagatccatcagaataggggagagag

SEQ ID NO: 16497 - DNA, 120 bp, synthetic construct
  source 1..120: mol_type = other DNA
gatcgggttgccatgccctggccactacccacctgccctaatcatgccagggctaggtacaaaacaattaggaacagcccctgtgccccagagcccctgaagtatcccaacttgccagtc

SEQ ID NO: 16498 - DNA, 120 bp, synthetic construct
  source 1..120: mol_type = other DNA
agggatatatatatctctacatatataaggatatagatatatatatcccttgaaatgtagagatatatgtgtatatacatatatacacctatacacatagatctctacatgtttctttga

SEQ ID NO: 16499 - DNA, 120 bp, synthetic construct
  source 1..120: mol_type = other DNA
tttttttaagtgtagatgatcattatgatataaaaacaaggtgctggctcccatctgtaatcctggcacttggggagtccaaggcaggatgatcacttatgcccaaggaatttgagacca

SEQ ID NO: 16500 - DNA, 120 bp, synthetic construct
  source 1..120: mol_type = other DNA
tctccagaactctaccttttgaataatgataaggtctcttttacttagtctcacagggctgtaaagaactttccaacaatttttttttccctctcctctctcttccagaggcatctgaaa

SEQ ID NO: 16501 - DNA, 120 bp, synthetic construct
  source 1..120: mol_type = other DNA
acagagaaattggggttttatctcagaggtaaatcagtttatctgctagtaaatgaacagtctggattggaaccaggtgtttgggttcacagtgtaatcttctcacccattccgtctaaa

SEQ ID NO: 16502 - DNA, 120 bp, synthetic construct
  source 1..120: mol_type = other DNA
tgagtccaatattaatcacaactaatcacagtcgttgggaggaaagtttggactaggttactcctgaagctacgtgattctaatgtgcagccagggttgagacccactcttctttttttt

SEQ ID NO: 16503 - DNA, 120 bp, synthetic construct
  source 1..120: mol_type = other DNA
tgaccagagaatatttagtagttctaatactgaggaagaagggaagaacagattttgggagacaactagttgtctctgccatgaggttagctcagactgagagcagcataaatggttcat

SEQ ID NO: 16504 - DNA, 120 bp, synthetic construct
  source 1..120: mol_type = other DNA
gacctggattccaggaacgagaccttggaccctgaacagagagtcatcctgcaactcaacaagctgcatgtccagggttcggacacctggcagtctttcattcattgtgtgtgcatgcag

SEQ ID NO: 16505 - DNA, 120 bp, synthetic construct
  source 1..120: mol_type = other DNA
gtcttctgcagcttgtctaacaatcaatttgatgaggagggcaccaaggcgctgatgagggcccttgaggggaaatggatgctaaagaggctggagtaagtagtgatggtggttgtgggt

SEQ ID NO: 16506 - DNA, 120 bp, synthetic construct
  source 1..120: mol_type = other DNA
gtgagtggtgttggtggttaatggggaagggggtgggtgagtggtgatggtggttaatgggaagggagtgagtggtgatggtggttaatggggaagggttgtgagtgagtggtgatggtg

SEQ ID NO: 16507 - DNA, 120 bp, synthetic construct
  source 1..120: mol_type = other DNA
ggatgaaggccaaatatgtattttacaatatcacactggccatgtcagagttctgcaacactggtattcctacaattaacatgctgcctccctgagatttcaagggtagctttgcttgta

SEQ ID NO: 16508 - DNA, 120 bp, synthetic construct
  source 1..120: mol_type = other DNA
tttcaagtaaatattccagtggcacaatcatctgacctactggcccagagccagacctgtccaaaaaccttgaattgtttacctcttttcacctgaaatattctaacagcgccttatcag

SEQ ID NO: 16509 - DNA, 120 bp, synthetic construct
  source 1..120: mol_type = other DNA
agacttctctcctggttagtccagctctttactctaaaccctttctgtccaaaatgagtcattttcagttgtaccttagatgtctggtgttgaggatcaagtgccatagcctttattcag

SEQ ID NO: 16510 - DNA, 120 bp, synthetic construct
  source 1..120: mol_type = other DNA
ccatctcctccacctctatcaccaccatcatcacctcctccaccttcatcatcaccatcacctcctccacctccatcaccaccatcaccatctcctccacctccgttatcgccatcacct

SEQ ID NO: 16511 - DNA, 120 bp, synthetic construct
  source 1..120: mol_type = other DNA
cctctatcatcgccatcatcacctcctccaccttcatcatcaccatcatcacctcctccatctcctccacctctgtcaccaccatcatcacctcctccacctctatcaccatcgtcatca

SEQ ID NO: 16512 - DNA, 120 bp, synthetic construct
  source 1..120: mol_type = other DNA
cagcttctcatgatggactcctaacatcagggcactgtactgcctggggcagcccattctatgctaggcagctctggtgtcctctttgctctagactcttactggggatatacctgcata

SEQ ID NO: 16513 - DNA, 120 bp, synthetic construct
  source 1..120: mol_type = other DNA
cccactgttctcccatccatccattgtcccactcatcctcccatccatccatcctcccatttctcctcccatccatccatcctcccatccatccgtcctctcatccatgcttccatccat

SEQ ID NO: 16514 - DNA, 120 bp, synthetic construct
  source 1..120: mol_type = other DNA
tcttttctggtccagacctatttatacataacaatgaacaacaagacagtcacagttctctcagagggaggcagataagaaaggtacttggtctcccatttcctttctgtggatgaaacc

SEQ ID NO: 16515 - DNA, 120 bp, synthetic construct
  source 1..120: mol_type = other DNA
acatatgcactggacagtgaggtttctatcgggaatgaaatgaagagtatgaagagttattctcaagatgtcacagcactgtttgccagtatgttgacctatccctttgtgcttgtctct

SEQ ID NO: 16516 - DNA, 120 bp, synthetic construct
  source 1..120: mol_type = other DNA
gacgggatgaatatgtcaatgcttggggtttccaaatgactgagttgttcctcctcacacttgtttatcggatagatgaatcgatagggggatggatggatgtaggtatggataggtggg

SEQ ID NO: 16517 - DNA, 120 bp, synthetic construct
  source 1..120: mol_type = other DNA
caagaccagttatgaagcatcatttctatcttcgacaatgcttagcacagtgctagccataaactaagcgttcaaatatttgctgacttctggaatctgtcaccctaagagctggcacat

SEQ ID NO: 16518 - DNA, 120 bp, synthetic construct
  source 1..120: mol_type = other DNA
aagtaacttgggcctgaaaactgctattgctaaaaagcaacatgttgctattgatccacccttatttaaagcatgccctcaaatttcacatcactcaagctctctctggccagtgtcaac

SEQ ID NO: 16519 - DNA, 120 bp, synthetic construct
  source 1..120: mol_type = other DNA
ggagagggagagggaaagggagagggagagcttgtctaaattttcaatggtatcagtacaatgttcagaatttcctttactatctttttaatgtcagtaggattacagtggtgtccttat

SEQ ID NO: 16520 - DNA, 120 bp, synthetic construct
  source 1..120: mol_type = other DNA
agacaataccaagtggtctgatatacgtgtaatcagagtcccagaaggggaaagaggaggcagaagataaataaagaatgaataaaatgaaaagttttgtcaccaagagatctgcactga

SEQ ID NO: 16521 - DNA, 120 bp, synthetic construct
  source 1..120: mol_type = other DNA
tgacagaagacataaaattgagcacaaaaatagccacttaatactgaagaagacagtttaagataaaaaataaaacagagtgaaccagcaaacacgaattgtagacttaaagttaacagt

SEQ ID NO: 16522 - DNA, 120 bp, synthetic construct
  source 1..120: mol_type = other DNA
atcaccaaatggcatgctttatttgcttcttctcttcatgttacaaggagaaactgccgtgatggtaagacactagggaagaaaatagtactcctaaggcaggggaaacagcaaagtttc

SEQ ID NO: 16523 - DNA, 120 bp, synthetic construct
  source 1..120: mol_type = other DNA
aagacactgtaggttgagaagtgtgccctgttctatccaatatggtaaccactgtggatttgggagctggacagctagcggtgtgaattcagtaaaattggaggagccaagatggccgaa

SEQ ID NO: 16524 - DNA, 120 bp, synthetic construct
  source 1..120: mol_type = other DNA
aatctgtaatgaaaggggagtacacacaaaccacttctggtacataccgaactatgagtgtcgactcaagagtgtagcctggagaggtgatcagggaggagccaagatggccgaatagga

SEQ ID NO: 16525 - DNA, 120 bp, synthetic construct
  source 1..120: mol_type = other DNA
aactgcagtataaataactgagcaaatggatgaattattgctaattcagagctgttccccctttttcattcagtttgcttacctgttgccctccttcctccctctcgccctttctttctt

SEQ ID NO: 16526 - DNA, 120 bp, synthetic construct
  source 1..120: mol_type = other DNA
tcaagagcattggcaatgtgtatgcatttgtgggggtgaaggtaattgaaaaaatagcggtagaatgactgaaagtattgaatatgggtgtatgggtgagcaggataatgggcactaatg

SEQ ID NO: 16527 - DNA, 120 bp, synthetic construct
  source 1..120: mol_type = other DNA
tggcaaaggtggtaatagatattgtggtggttgtaggagtggagatgataagggtgaaggtggtagcaatagtggtagaggtcgtggtggtagaagtagtggtggtaatggtagcaatgg

SEQ ID NO: 16528 - DNA, 120 bp, synthetic construct
  source 1..120: mol_type = other DNA
taaatgatgatgatggtgatgaaagataaatgttgatggtggtgatgatggaagtgatgatgatagtgatggtgatggtggtgaggttggggaaggacaaggtggtggtggtggtggtag

SEQ ID NO: 16529 - DNA, 120 bp, synthetic construct
  source 1..120: mol_type = other DNA
cagacaaaggaaccctgcaagagcaaacctggctcaagtggacagcggcagacgcagccacacactcggtggccaggctgagcaaaacagcacaagtgtcaccagccaccctgctctgct

SEQ ID NO: 16530 - DNA, 120 bp, synthetic construct
  source 1..120: mol_type = other DNA
ttgtatcgtttaaaacatatcagtaattgtttaagtaaagccccttcctgagtcctgtgagtcactgcagaaaatgactgaacctgaggggtggtggaaaccatcgaatctgtactcagc

SEQ ID NO: 16531 - DNA, 120 bp, synthetic construct
  source 1..120: mol_type = other DNA
atgatcaataaaaaaataaaataaaataaaataaaataaaaaaacacaagacgagtcacgccctagggctcagggctcagccagtggcccctgtgggtaactgccaactgttctcaaccc

SEQ ID NO: 16532 - DNA, 120 bp, synthetic construct
  source 1..120: mol_type = other DNA
agagaccaaaaaagagtagagaagaaagtttaagttggttacctttttagatgcaatgagtcctgaggtatctgggtttccttcaggtgcagatctttagccactaactgggaaaagaca

SEQ ID NO: 16533 - DNA, 120 bp, synthetic construct
  source 1..120: mol_type = other DNA
ttctttctgtaggcaggtcatcctgaggagtcaaggagtcctgaagtgggtagcttcttcccacagttggtagtattgacatctgtccaagtctggctgaatccagggtttttatgggct

SEQ ID NO: 16534 - DNA, 120 bp, synthetic construct
  source 1..120: mol_type = other DNA
tcatcttctccagggcctactgggaacaggcctgagaaggggcagcaaggcctgagggctggggtatcttgtccagggccagctcagctgagggcaacccacattcctcctgatctcttc

SEQ ID NO: 16535 - DNA, 120 bp, synthetic construct
  source 1..120: mol_type = other DNA
gcacaaagaggttaagtgacttgaacaaggtcgcagatgtagtatattgtctttcgtatcaatgtactattatttaggctgtctggctctatttttctgctgatggacctttgacagttt

SEQ ID NO: 16536 - DNA, 120 bp, synthetic construct
  source 1..120: mol_type = other DNA
atgcccaggccagcccactcttcactgacgacattttctcctgcagagttggtggctacaaattccttcggcccaaaagattttgattaaaagggctgggaggtcggagagaatccaaga

SEQ ID NO: 16537 - DNA, 120 bp, synthetic construct
  source 1..120: mol_type = other DNA
gggtaagccaaggacccacctggcttctgaggcaggcaggaggggctgtggaggcccctcccttatcccccacaaggtgaaagccattggcaggatgacagtaatctgttcacattaaca

SEQ ID NO: 16538 - DNA, 120 bp, synthetic construct
  source 1..120: mol_type = other DNA
gttatccttgagtcttctttttctctcacacttcacatctgatccattaacaagtcttgctggctctctaccttcaaaatataccctgcatccaagaacctctattgtgcagacatccac

SEQ ID NO: 16539 - DNA, 120 bp, synthetic construct
  source 1..120: mol_type = other DNA
gcacaggattaatttagtaaactgccattctctatgaaaaggatatgaagcagacccagaaagagaatccccattcattttaagaaagaagcacagggctggtcatgatggctcatgcct

SEQ ID NO: 16540 - DNA, 120 bp, synthetic construct
  source 1..120: mol_type = other DNA
tcctgcccctcaggctctcaagactctgctctgaaccttggcacccctggaaccgcttcattttttggagcctcccccacgtggcagggctgatcagtgcatgggtagtgtgacctaagc

SEQ ID NO: 16541 - DNA, 120 bp, synthetic construct
  source 1..120: mol_type = other DNA
ttgcatttgcctttctttcattcatggagtgcctattgagggtaggtactgaggtttagagacacagagagactaagaaaggagaaacacctctactatcaggatgtgtaaatgctagag

SEQ ID NO: 16542 - DNA, 120 bp, synthetic construct
  source 1..120: mol_type = other DNA
tggttgatctgccaaacatttaagtatataattggatatttaaatcagtatgaaaaggaggaagttggttggtttcttgtagaaatttaatggtgtgtttgtacagcccattaggaactg

SEQ ID NO: 16543 - DNA, 120 bp, synthetic construct
  source 1..120: mol_type = other DNA
ctgaaatttttgggaacttgagtattcatttttagggggaaggaaccgtggcttacctggccttcaaaacactgagaacccttgctacctagcattcttctaaagtctccatcaacttat

SEQ ID NO: 16544 - DNA, 120 bp, synthetic construct
  source 1..120: mol_type = other DNA
aatcacctagggcacttcatgcagacttgccctcttgcagattcactgagagccaatctccaagggtggagatctgaacttgacatttacttacttatttattttttgggatgaagtctt

SEQ ID NO: 16545 - DNA, 120 bp, synthetic construct
  source 1..120: mol_type = other DNA
aagaatcgatctctaaaaaaacaaattagtttttctcattagatgtttctgctttagacttgtgtcaagggagtgaaaaagcatggggcggggggcgggtagtgtaagtgtcaaaggagc

SEQ ID NO: 16546 - DNA, 120 bp, synthetic construct
  source 1..120: mol_type = other DNA
agtgaagtgtgttcaaaaacgtgtgtggatgctatgcatacacgtgatacttcccatcacattttaggattcccacgttggagggaatcaattactggtatttgtagcaatgggtggaaa

SEQ ID NO: 16547 - DNA, 120 bp, synthetic construct
  source 1..120: mol_type = other DNA
ttttgaacagacacacaagaaactgttaatggctttacctctagggtgtcaaataagactaaaggggtgaaagaaagagggggcatcttttcttccttttatgtctttctgtaatgttgt

SEQ ID NO: 16548 - DNA, 120 bp, synthetic construct
  source 1..120: mol_type = other DNA
caaaactgtataatatgtgggatctcttttgcataattgtataatgtcaagattcaatatacttcttttctgacttgtactgtataacttgtgaataaagcaggtcatttttgcagaaac

SEQ ID NO: 16549 - DNA, 120 bp, synthetic construct
  source 1..120: mol_type = other DNA
ttggagggaggaatccccaaaccctcttgagtggatagagtgcatctgtatatatttgaaaagattcatagattacaagtgaaaaatcaaagggcagagctttgggcctagaatgacctc

SEQ ID NO: 16550 - DNA, 120 bp, synthetic construct
  source 1..120: mol_type = other DNA
aaaaaaccccaaaaaccaaaaaactaaagtggcgataccatgggaaaggctttggaatgtgtgcatttgtggagtaggtgtcatagtttacctttctgtatttgaatttttttgatgagc

SEQ ID NO: 16551 - DNA, 120 bp, synthetic construct
  source 1..120: mol_type = other DNA
aagtgttattttatagaaacgtttagtactcaccaaggccctcagtggaactggctgaaaatagcagcagactcactcagaaaagaattggagagatccatggcagggaagagagattaa

SEQ ID NO: 16552 - DNA, 120 bp, synthetic construct
  source 1..120: mol_type = other DNA
gtttgtttttgctggggaaagtgatagtctaagagaaagaaacatagattgtgatatttgggaaccttctagtgaaatagctgagactcttcctggtcactctacagtctgcagccctca

SEQ ID NO: 16553 - DNA, 120 bp, synthetic construct
  source 1..120: mol_type = other DNA
ttctcgtccagaattgtgggtgctctggtttcaaactaactgcctaaacagtctcctataccgtgtccctgtgggaaccctcccagttccacctgctggagtctccatcccattagaggg

SEQ ID NO: 16554 - DNA, 120 bp, synthetic construct
  source 1..120: mol_type = other DNA
aatacgtgtgttttctcatttgttcctttgcctctgttgccgaatgtttttaatgtgttaactacaaaacagagttggaggaacttggattttatgagatgctgtaccctatctccccca

SEQ ID NO: 16555 - DNA, 120 bp, synthetic construct
  source 1..120: mol_type = other DNA
agaaggaccatagccgaggtcctcctcccagggcccggggctggggagcggaagccatcagtgggctcggaggacactgtcccagccaggacacggccatcggtcactaatctgcagcac

SEQ ID NO: 16556 - DNA, 120 bp, synthetic construct
  source 1..120: mol_type = other DNA
tctctctcagcctcgctccattgctatgccccacgtcccctgcacccaccacactcctctcccatcttgttttccaagggcagggacacatgcttattctgccgtgtgttgggttcaggt

SEQ ID NO: 16557 - DNA, 120 bp, synthetic construct
  source 1..120: mol_type = other DNA
gctgttgctgattctaagactttaaactggtttgcagacctgtatccattaggttttattgcatgacatactaccccaaaatttagcagcttacgattctgcaggtcagccacttgggtt

SEQ ID NO: 16558 - DNA, 120 bp, synthetic construct
  source 1..120: mol_type = other DNA
ctggatgatagcgaaagctgtgtccccctccccaggggtggttcacaatagggtttctgatcccctgtgtctcctgtagctcgtgtgggccacctcaagccagctgggctgtgggcggca

SEQ ID NO: 16559 - DNA, 120 bp, synthetic construct
  source 1..120: mol_type = other DNA
ttttctcagagtcccctcctcctctgaccagaggtccccaggaatccttgtcgcatgagctgccagaaccatggacgtctcaacatcagcacctgccactgccactgtccccctggctac

SEQ ID NO: 16560 - DNA, 120 bp, synthetic construct
  source 1..120: mol_type = other DNA
actgcttcatggtgtcttcagaggcagacacctattacagagccaggatgaaatgtcaggtgacagtcacccctagcttcctaggaaccccctagggcctcaagtgagggtcttaatgca

SEQ ID NO: 16561 - DNA, 120 bp, synthetic construct
  source 1..120: mol_type = other DNA
actaccccggcccagggctcacctacaagaccgccaaggactccttccgctgggccacaggggagcaccaggccttcaccagttttgcctttgggcagcctgacaaccacgggtaagtgt

SEQ ID NO: 16562 - DNA, 120 bp, synthetic construct
  source 1..120: mol_type = other DNA
ctcccggcagccccgtcggcaggtgggggcactggagcccctgagatgcagggtcctgatgggtggagggcttaggcctctcccggtccctgacttcactcttgcctcctgaccaccaca

SEQ ID NO: 16563 - DNA, 120 bp, synthetic construct
  source 1..120: mol_type = other DNA
accccacagggtattaaattatgaatcagctgaacctgtgcatgctcatttcaaagggaaattcagatgatccaggatgaccctggagagaccagagggggcctgaggcttcactgcagc

SEQ ID NO: 16564 - DNA, 120 bp, synthetic construct
  source 1..120: mol_type = other DNA
ctctgaagccgcccgcccttggctggctggtccttctcttcctcggctcccgccgggctgggccctgggccgccctcactccctcccctctgcagcctcccttgcgtttgtcattcactc

SEQ ID NO: 16565 - DNA, 120 bp, synthetic construct
  source 1..120: mol_type = other DNA
ccacacagcctaattttcatagcctctggtctccacatttcactctttcccaaataaagaccttttaaggtgtgggtccccttggtcattctgtaaccattggatcaagttttcagtttt

SEQ ID NO: 16566 - DNA, 120 bp, synthetic construct
  source 1..120: mol_type = other DNA
ggttctgctactcaacagtttggtaggaccttgggtgagtcacttccacttatctgtgcctgtttcctcaagtgtagaatagaaatgctagtatctacctcataaggttgtgaggattaa

SEQ ID NO: 16567 - DNA, 120 bp, synthetic construct
  source 1..120: mol_type = other DNA
ttggatgggatgtctgcctggacacagtctgtgcttgcattggttgcaattctgagagtcatctctgatggatggacatagataccttggccttggacaatttgtgctgactgtggagca

SEQ ID NO: 16568 - DNA, 120 bp, synthetic construct
  source 1..120: mol_type = other DNA
ctcattcacacacgcaaactctcaaatgtaaatttcataaagacagggacttccccattcttgttcactgctagcagaatatctgaaactcagaatgccctcaaatatttctttttttgt

SEQ ID NO: 16569 - DNA, 120 bp, synthetic construct
  source 1..120: mol_type = other DNA
catatgggtcccttgcaaaactgggtctttgggccctagcattactgtagcctttatattctgttgctaccacaaattagagaacatttttttcaatgtaaagtttatgtacttttgaat

SEQ ID NO: 16570 - DNA, 120 bp, synthetic construct
  source 1..120: mol_type = other DNA
cagtattaaatgagaaaccctgacctcgtattcacagatgacgtcaatctacctaatagcattttgcatccatcctgcaggctggctgctggctctaccaggttctgtgctggcatcctg

SEQ ID NO: 16571 - DNA, 120 bp, synthetic construct
  source 1..120: mol_type = other DNA
gggattacactcccccaagactaggaggagaaagggtgaaactgcctaaaaggtgggaagaatagggatggtcgaatccctgcccaaaactgtcttttttttttttcttttttttaaaga

SEQ ID NO: 16572 - DNA, 120 bp, synthetic construct
  source 1..120: mol_type = other DNA
atttagtgattgctatttggggtttgtagctgagcccaggcgttttatcaaaaggacctcctttggttcccatgagctcctttgactagctggtaaatatctcttcctttgatctcaaag

SEQ ID NO: 16573 - DNA, 120 bp, synthetic construct
  source 1..120: mol_type = other DNA
ctagagcatgttacagggaggtggacccaattctgacttttctttattaactctttatgaaaggatggccaaaatttccattaatacatttttttgtttttgtttgttttgcaagctaat

SEQ ID NO: 16574 - DNA, 120 bp, synthetic construct
  source 1..120: mol_type = other DNA
tagacatttgccttattcttttttaattttattcttagttttacttttttttttttatttcttgagacggagccttgctccgtgctcagactggagtgcagttgcacaattatagctcac

SEQ ID NO: 16575 - DNA, 120 bp, synthetic construct
  source 1..120: mol_type = other DNA
cttgctgggtctcttcccttctagaattacttgttattaacatggcgtgtggtatatttaatctagtatgttaagactaataagaagatacatgtaattttggagttgtccccttctaag

SEQ ID NO: 16576 - DNA, 120 bp, synthetic construct
  source 1..120: mol_type = other DNA
attctcagagcttcaggcttccgtgagtgactttcaccattaatccaccctacagcagcaagattgggagccacttcccatataaatacaaaacatacattcctgctctcactcccgtgt

SEQ ID NO: 16577 - DNA, 120 bp, synthetic construct
  source 1..120: mol_type = other DNA
tactttggaacctgtacaaatcataattgagcttgagcttctgcttggtgatatgacacttttggtagccaattctcatgaaatagaagtggcaggcacatagaaaatggggaaggcgcc

SEQ ID NO: 16578 - DNA, 120 bp, synthetic construct
  source 1..120: mol_type = other DNA
gaaaccaaataagatttgattgcttcctgatccttttgctgctacctggttttgattattttggggtctcacttttcagtttcttcatgatctctccaaccgaccagcaggtccactgtt

SEQ ID NO: 16579 - DNA, 120 bp, synthetic construct
  source 1..120: mol_type = other DNA
tagtaagcattaggatatgtttgaagtggatttagcttctctgaatttaaagtctgtatactttttggttgggcagatctccaccgggtactgatttggggttggggcttcttccatcac

SEQ ID NO: 16580 - DNA, 120 bp, synthetic construct
  source 1..120: mol_type = other DNA
tttgctctgctgcttggaggagtgacccatacgctcaacacctggcgagtgctgcatcctgtcagcctcctgtggaagcggttcacttcggtgctgtccaggactttccactttccttta

SEQ ID NO: 16581 - DNA, 120 bp, synthetic construct
  source 1..120: mol_type = other DNA
ctccttggcaccgcctgggcagaggtgtggccaccccagctgcaggagcaggctccgatggccggaggtaagggacacctggtgaggaggtaggtggaggcaccattatgagctctgagg

SEQ ID NO: 16582 - DNA, 120 bp, synthetic construct
  source 1..120: mol_type = other DNA
agcttcacgaggagccctgcaggatgggcggccgggccagggagggagaaggtcgtgctgggctggggaggggcttctgtgcggcaaggacccagcgcctcctcctgagcttatctgagc

SEQ ID NO: 16583 - DNA, 120 bp, synthetic construct
  source 1..120: mol_type = other DNA
tggatacatgtatatgatcacatgttcacatctgcctgctacaagccagtcttgtacatgtcatttttagtctctactggagagtttgtttcactcttcttatatattgcccatttgtgc

SEQ ID NO: 16584 - DNA, 120 bp, synthetic construct
  source 1..120: mol_type = other DNA
cccctataagaagggtgcctggtgttcgctctgcacagccagtgtctcaggctgcttcaaagcctgggaccatgcaggggggctctgtggtgagtgcatgagggctcagtctggtgaccc

SEQ ID NO: 16585 - DNA, 120 bp, synthetic construct
  source 1..120: mol_type = other DNA
caaagagccagctcctctcaagaccccccttcaatggggcatcagctcccaggagcccgctgtgtgcctctctttccaactcattcagtgacaacacgttgagatcttgaaactggccac

SEQ ID NO: 16586 - DNA, 120 bp, synthetic construct
  source 1..120: mol_type = other DNA
acagggagaagagaagcagacgggagcagaagggacccctgctcttggaagggaggctgtgcgggctgggggtgatgatagcccggccagcacacacacgtggcatcttaggccatgggc

SEQ ID NO: 16587 - DNA, 120 bp, synthetic construct
  source 1..120: mol_type = other DNA
tgcctgcatcagttacactgatgccagcattccttagctgtcacccacctgcactcattcacaatacaaccctgcacctgcagacccaccagccatcctgtagcaagaaccctctggtca

SEQ ID NO: 16588 - DNA, 120 bp, synthetic construct
  source 1..120: mol_type = other DNA
gaacctgttgggttccttggtgttcccgggagccccatgaactgtggtggaggcggaggtgaaacctagcatggcaccagctcccagcagcctctgctaggaaggcctggagcgccacag

SEQ ID NO: 16589 - DNA, 120 bp, synthetic construct
  source 1..120: mol_type = other DNA
atgcctgttatctgtggcgtttcatctggggaacttacttttccttgatagggtaaactattctcatccagagtatgtccctcagtctgtaaaagtccatggtgccctacatctattagg

SEQ ID NO: 16590 - DNA, 120 bp, synthetic construct
  source 1..120: mol_type = other DNA
ggggattgcttgagcccaagagtttgaggttgcagtgaaccatgatcataagctgtatttcagcgtgagtgagagattgagaccttgtctcacaaaataaaagttaaaaagcccttatct

SEQ ID NO: 16591 - DNA, 120 bp, synthetic construct
  source 1..120: mol_type = other DNA
gggaaacaggagatgtaggttggaggaagaggctacagcccaccctggaaataactgccatccgtcccacccatatggttaggctttgtgtccccacccagatctcatctcgaattacaa

SEQ ID NO: 16592 - DNA, 120 bp, synthetic construct
  source 1..120: mol_type = other DNA
gtaattttctgaatcttccctcaaatttttctcaaacctctataatcaaggggaaaaatgttttgttttgctttgcttttttgagatagggttgcctataatggagtgcagtagcttgac

SEQ ID NO: 16593 - DNA, 120 bp, synthetic construct
  source 1..120: mol_type = other DNA
cccccaaattctttccctttacccgaagttggtatgcattgacttacctgtggacaacagtgatttttgtctcctgtccttacttctctctgtctccaactctcagggactcattcatca

SEQ ID NO: 16594 - DNA, 120 bp, synthetic construct
  source 1..120: mol_type = other DNA
actccgtctcaaaaataaaaaaagaaagaaagaaaaggaactcccgcagaaaccagtagtcctgacttggtggaaggaaatgtacaggcatctgactggtagagaacggagcctactctt

SEQ ID NO: 16595 - DNA, 120 bp, synthetic construct
  source 1..120: mol_type = other DNA
agaaaaagctgttgatccaaggctgcacctgtggcttgatggctgtgctgttgagctccgtcagcccttcctgcacaaggacaaggtggagacatgtgacacagaaggcacgactcatcc

SEQ ID NO: 16596 - DNA, 120 bp, synthetic construct
  source 1..120: mol_type = other DNA
aggaagaaataaacttttaatcagtatcattagcatagtgcctaatacaggaaggcatttaaaatacaatgcctggccagcactggatcccaaagtaatcccagctctttgggaggccca

SEQ ID NO: 16597 - DNA, 120 bp, synthetic construct
  source 1..120: mol_type = other DNA
atgcttcggttttttcatctgtaaaactaggatagcaataccaatctcactgggctgttgaatgagtcaaacaggaaaccacacaaagtgcttaacatggtatgtggcatatagttcaac

SEQ ID NO: 16598 - DNA, 120 bp, synthetic construct
  source 1..120: mol_type = other DNA
agtggagatttgctcgtggattggaaatctcaatattgtaaagatattaattctccttctgatagacaggcccaagatggtcctcaataatccccacctctggggattcccagcctcgtg

SEQ ID NO: 16599 - DNA, 120 bp, synthetic construct
  source 1..120: mol_type = other DNA
gcagaacaacaatataagaggttactaagtctcaacataaagctggaataattgcttgctttaccagacatcaaaccttactctaagtaggtagtaattaggatgctctgatattggcac

SEQ ID NO: 16600 - DNA, 120 bp, synthetic construct
  source 1..120: mol_type = other DNA
gctcctttctaagataaaactcctgcactgagagaaatttatgaaagtagaatctatttgaccacaacagagacactaggggtaaaggaaagatagagctcagaaaaaggtggggatgag

SEQ ID NO: 16601 - DNA, 120 bp, synthetic construct
  source 1..120: mol_type = other DNA
cttcaaggcaaaatcattagtagagacaaagaggatcacttcgtaatgaaaacagtttcaagttaccagaaaaatactatcatttttacttaaccaaaatatagttcaaagtatatgaag

SEQ ID NO: 16602 - DNA, 120 bp, synthetic construct
  source 1..120: mol_type = other DNA
taaagacaagagcagaaatcaagtaaccagaaagcaagcatacaatagagtcacaatggagacaaaagatgcattttggaaagaaacctctggtaagactaagaaacagagagaaggcac

SEQ ID NO: 16603 - DNA, 120 bp, synthetic construct
  source 1..120: mol_type = other DNA
atttttcaggataactagacattgaaaccaacacaaatgaccagcctgaagaaggaagtcagctggagctggagtgaggggaactcgtcaggtgggctgaaggtggaaaaacagaagaga

SEQ ID NO: 16604 - DNA, 120 bp, synthetic construct
  source 1..120: mol_type = other DNA
tctccaacttgatggaggctgacgcaacttgccggactggggtcaccatctcgatggttttgatgatgcctgaagggatgaccctgaaactcacattgtagtacaagaactcatttgtca

SEQ ID NO: 16605 - DNA, 120 bp, synthetic construct
  source 1..120: mol_type = other DNA
tttaatttttattttgtaaagatgagggaactgaggcttcgcaaactcaagtatcttgcccaaggtcacacataaagaagagtcaggaccaagatttgaacccaggttagactgactcca

SEQ ID NO: 16606 - DNA, 120 bp, synthetic construct
  source 1..120: mol_type = other DNA
caggtgtgagccaccgtgccgggcctaaagtgactgtttatatgtttggcccgaagtctgcttccttgctagttattttccacttgtcccttttatttttcatttttctgttgttacttt

SEQ ID NO: 16607 - DNA, 120 bp, synthetic construct
  source 1..120: mol_type = other DNA
ttagtggataaagaatttttagatggactgtttcctttcctttcatcgctttacagatagcttccattatttcctaggtgaagccagaactctaggatagccattgttatcgctgtccct

SEQ ID NO: 16608 - DNA, 120 bp, synthetic construct
  source 1..120: mol_type = other DNA
cttgcaggtgcttagttgtaggcttttttaaagggctgataaagagaaggccttatactaagggaatggccctttctcctaagtctttcttctggcttttctagtattttagctgggttc

SEQ ID NO: 16609 - DNA, 120 bp, synthetic construct
  source 1..120: mol_type = other DNA
aggaaatgcttctcattgccttattttattcttccccttgctattttctatgttcaggtcatatgaaatatttatcttagattgtctttcaacagttgtttaaaattacctatcaattta

SEQ ID NO: 16610 - DNA, 120 bp, synthetic construct
  source 1..120: mol_type = other DNA
ttcatcccggttttctgaaacgttgctctaatgtatttagatgtgagtatttttttcattcaccctgtttggcaacttgatggacccattcgattagaagacttgatcttcttaaaaagc

SEQ ID NO: 16611 - DNA, 120 bp, synthetic construct
  source 1..120: mol_type = other DNA
acctgcagtgtatgagggtcccaatttctccacatccttgctgatgcttgttattatttcatttcattccatttctttgtcctcaagggctaaggtctggtgatattactcagctccatc

SEQ ID NO: 16612 - DNA, 120 bp, synthetic construct
  source 1..120: mol_type = other DNA
tgtgggaaaagaagttcagcttgtagtctttcttagagccagacagtacatcaatgtaatcaaggcccttcatagtgatgcttaggtccggcttctctggtttcagtatttccacgatga

SEQ ID NO: 16613 - DNA, 120 bp, synthetic construct
  source 1..120: mol_type = other DNA
gttattttgtgccaggaaacttacaagtaactaagcacagaaaagagaatctcgctagaggcttagtgttcaggaaatgcctggtcacatcagggaactttgtctctaactcctcgagcc

SEQ ID NO: 16614 - DNA, 120 bp, synthetic construct
  source 1..120: mol_type = other DNA
tacttgatgcttggtctggactccatttcagaactgagcccctggctctacgagaatccctgtacattaaaataaaaaatgaaaaaaggaagccaaagcttgataatctgcacaattccc

SEQ ID NO: 16615 - DNA, 120 bp, synthetic construct
  source 1..120: mol_type = other DNA
tctttttctttcattcactcaacacatacttacgggtaccttctatgtgctaggcactgttcttggtggtagagatgtagcaatgaacgaaataacaaaaatctctgcccttgagctgag

SEQ ID NO: 16616 - DNA, 120 bp, synthetic construct
  source 1..120: mol_type = other DNA
gttcaagggaagagtccaggctgcagataaagatttgggagttgtcagtatagcaatttcattgttgttattactgttgttgttttgtagagatagggtctcactatgttgcccacgctg

SEQ ID NO: 16617 - DNA, 120 bp, synthetic construct
  source 1..120: mol_type = other DNA
ccacatatatatgatcaattgattgtcatttacaatcaatgacaaaggtgccaaggcaattcagtagagaaaagagtcttttcaacaagtggtactagaacaattggatatccatgtaca

SEQ ID NO: 16618 - DNA, 120 bp, synthetic construct
  source 1..120: mol_type = other DNA
caaagcaggcttccttgagaatgtaatgtttcagatgagagctgaagaatggaaaggaataaaccaaatgaagaggggagaatgaatattccagcagtggaaacggtgtattcacaggcc

SEQ ID NO: 16619 - DNA, 120 bp, synthetic construct
  source 1..120: mol_type = other DNA
cactcgcttatctgtgaaatgggttggtagcagtcttggtctcatagaactgtagttggattaaatgatgtgtgccatgtcaaggcaggaaacaggcatggactaaatatcttctgttat

SEQ ID NO: 16620 - DNA, 120 bp, synthetic construct
  source 1..120: mol_type = other DNA
tcttagaatggtctggcacattacagatgcacaagaaatgtgagctgctagtgttgccagcatggccatcctcatcatcagggagcatgaaggggccgctaggagcccctctgagcacca

SEQ ID NO: 16621 - DNA, 120 bp, synthetic construct
  source 1..120: mol_type = other DNA
aggagggagagatgatggtggttggattagaacagtggcagtagaggcagagaaaagtagttatgcttccaagtcctcaggtaagacactgattaaaatggtgcctgggtcaggccaagg

SEQ ID NO: 16622 - DNA, 120 bp, synthetic construct
  source 1..120: mol_type = other DNA
gatacagtaaagtttggtattgaataagatctatgattcagtgagtctgatctggtgatttgcccctttctgttattaggaacatcatctcagtgggactcgctgacctacaacagagca

SEQ ID NO: 16623 - DNA, 120 bp, synthetic construct
  source 1..120: mol_type = other DNA
aggcacagtagggaggagtatatgttctagagtcaggcagagaggagtctggatctaggctccatcactaattacccaaatgatctctgaagagttatgtggcccacttgggtctctgtt

SEQ ID NO: 16624 - DNA, 120 bp, synthetic construct
  source 1..120: mol_type = other DNA
acattttcatcatgatggaaagttctctaaagtactgatagatagctttgagtaaacacaggtctttgggccagcccttggagattctatctcattaggtcttgaatggggctcagaacc

SEQ ID NO: 16625 - DNA, 120 bp, synthetic construct
  source 1..120: mol_type = other DNA
ctaggtgcaaatgcttcattttacaccttcctttgaagctcaggatggccatcagacatagttccagtcattgagatgtaaacagaagaggacaagagggtgttctatcttgaataaaga

SEQ ID NO: 16626 - DNA, 120 bp, synthetic construct
  source 1..120: mol_type = other DNA
ctgtcagttttgtttcatgtattttgggactctgtcgttacatgcatgtttataattgctatgtcttcttgatggagtgattcttttatcattataaaatatctttatctctaggaataa

SEQ ID NO: 16627 - DNA, 120 bp, synthetic construct
  source 1..120: mol_type = other DNA
atgcagttacctttactggtgatctatatttcttcatgtggatttgagttatcctttagtgtcctttcatttcagtctgaaggattccctttattacttcttgtaggccagtctgttagt

SEQ ID NO: 16628 - DNA, 120 bp, synthetic construct
  source 1..120: mol_type = other DNA
tgtggcaactgtgaaaatcagatcctccctcccccagggttggttactgttgttactcttagtttgtttagtaactttttcagtaaagtctatattcttatttatgcatggccaataaag

SEQ ID NO: 16629 - DNA, 120 bp, synthetic construct
  source 1..120: mol_type = other DNA
tgcaagcctattattaattttcagagttctgaaaaagttgatttcgaaaattttttccagtggtctcattgctattgaaaagcagcattttggatgtccttctctgccattcctgctgac

SEQ ID NO: 16630 - DNA, 120 bp, synthetic construct
  source 1..120: mol_type = other DNA
catatctacatacattctggggatagagctgctcttgcagtgtttctgttttcctggtctctctggcatttgaagcagaaagactcagctcatattcatttttactactttccccagtca

SEQ ID NO: 16631 - DNA, 120 bp, synthetic construct
  source 1..120: mol_type = other DNA
aaaagagtaagaaaggaaaaaagctgctgcatagcaaaagaaactacaaacagagaaaaaatgcaacctacagaatgggaggaattattcagaaactatgcatctgacacaggtctaata

SEQ ID NO: 16632 - DNA, 120 bp, synthetic construct
  source 1..120: mol_type = other DNA
gaccatgtgtaccccaaacctatacagtaaatccagtagcaaacctgcatgcatatcccttgaaactaaaataaaagttgaaaaaaccccacaaaactttgacgtaaatctcatacctta

SEQ ID NO: 16633 - DNA, 120 bp, synthetic construct
  source 1..120: mol_type = other DNA
ctgggattataggcatgagccaccatgcctggcctgaaaattaaatgtttaattgaaaaagagacttgccaggcaagcctgaacattgcactgtggattcacatatacagtgaatatagc

SEQ ID NO: 16634 - DNA, 120 bp, synthetic construct
  source 1..120: mol_type = other DNA
gacatactcaaaattattaattgctatttgaaattaaaatttatgcatcctgtattttatctggcaaccctagttgggattctaattggaacttgattaaatttgcatttaattttagga

SEQ ID NO: 16635 - DNA, 120 bp, synthetic construct
  source 1..120: mol_type = other DNA
ttagttgtattttatacacacagcagagatgtcacaaccatgggaaagatacatggggttataagggacatgacaattacttcgtttcaccttcccactgcctcctggccttccttattc

SEQ ID NO: 16636 - DNA, 120 bp, synthetic construct
  source 1..120: mol_type = other DNA
ttggaacagagtggtaaaagacacttctgtatgcttactccacatgtccctggagacttgtcagcacgagggtcatgagagttgatgttaccaggctattgctacctttctatagtccat

SEQ ID NO: 16637 - DNA, 120 bp, synthetic construct
  source 1..120: mol_type = other DNA
tggacccagctcctggaccttgtcacatttaactagatggcctgggtactgacattatgcagaggtcaaaaccaggtggagagtctacaaatatgttttgtttggtttgggaattgttaa

SEQ ID NO: 16638 - DNA, 120 bp, synthetic construct
  source 1..120: mol_type = other DNA
atcgtgtcctttcaccatttttggtccttttgacaaagataactttttatgctactctatgagtcctagggtccccaggcattggtgtccagttaccttttgctgcttaaatgttctcag

SEQ ID NO: 16639 - DNA, 120 bp, synthetic construct
  source 1..120: mol_type = other DNA
gctcatctatctgaattcttttagagttctttaggaccgatgtgaattcaatcaatgtaaacctaagcaactcaccggagattcttccctcctatgcccacagtggtgaactcaatcacc

SEQ ID NO: 16640 - DNA, 120 bp, synthetic construct
  source 1..120: mol_type = other DNA
accaccaccaccaccactaccacctaatgtttatcgtgcttattgtgtgccaggcactgttgtaagcactttatttgaattaactcatttaactttcccaacaattccaccagctgggta

SEQ ID NO: 16641 - DNA, 120 bp, synthetic construct
  source 1..120: mol_type = other DNA
tgccctagaataatgggctgtgaacatatttttttgagaatcattgttctaaagtaggggtttacaatctggggacccatggataagggcccattcaaaaggtctgtgcatctccaaagt

SEQ ID NO: 16642 - DNA, 120 bp, synthetic construct
  source 1..120: mol_type = other DNA
agaggaaacaaaatctatttcacaagacagcacctccctcaggaacaaattctacaggccctccctttctgaatcacctcccatcagaaacaatgtccctggctgggcagggtggctcac

SEQ ID NO: 16643 - DNA, 120 bp, synthetic construct
  source 1..120: mol_type = other DNA
aaatgatgatgaaataaatccacacgcccttcctggttttaggggaatagtaagagttaggagtttgggtgaggagtaggtctacagtgggacgtagagattagatttccactctctagt

SEQ ID NO: 16644 - DNA, 120 bp, synthetic construct
  source 1..120: mol_type = other DNA
tcagctggggaactaccttgtccaggaagccttccttgactctcttgatctgctttaaatacccctttgcttcatgcacatgacattatgctgtaatgaaaaattctcctgtttctatct

SEQ ID NO: 16645 - DNA, 120 bp, synthetic construct
  source 1..120: mol_type = other DNA
tggtaaaccaaggtttccttaaagcgcacatctcttgcttggcaatggtatgaagcgaaatccacattggcactgatttgaagctgcagttcttggtagttttcttctagtactgagtga

SEQ ID NO: 16646 - DNA, 120 bp, synthetic construct
  source 1..120: mol_type = other DNA
ataattgaaaaatgagcaaaaggcatgaaaaggcattcctgcaagggataacttgtatgactagtaatcatatgaagaaatactcagccttatttgtgatcagagatcaggacaatgcaa

SEQ ID NO: 16647 - DNA, 120 bp, synthetic construct
  source 1..120: mol_type = other DNA
tctggacacctgagggaaaagggaaacaactaaaagattagcattgacatttttgaagaaggaaaaggtgggaggacttgctcaactgcttatcaagacttaagctaaaggtctaccagt

SEQ ID NO: 16648 - DNA, 120 bp, synthetic construct
  source 1..120: mol_type = other DNA
ttatggacagaggaatacagtacactagcagttctccaaaggtgttctggtgaccttgggatccccaagaccttttcaggggataaatgaggtcaagactattttcatagtaatatgaag

SEQ ID NO: 16649 - DNA, 120 bp, synthetic construct
  source 1..120: mol_type = other DNA
aagggaaacagagcataaaagttcagaaaactttcagcctgatgatagaaaagaaaaacccattttctgaggagaaattcaagagggcttcagaagtttgcaaaagtagtgaggagccaa

SEQ ID NO: 16650 - DNA, 120 bp, synthetic construct
  source 1..120: mol_type = other DNA
gtggtataccagctctattcagggttggatttggaccatgacgaaacggaatggtcagggtcctaatgaactttacatcactccaaaaagcaaaatttatccctaatagcgctcaaagat

SEQ ID NO: 16651 - DNA, 120 bp, synthetic construct
  source 1..120: mol_type = other DNA
gctgccttaaggaggcatagtgcttcactcacatgcagtccttccatccttggatggctatatttgagaaacctagaatctctgagtaacaagatttctatcctcaaggaatctatctat

SEQ ID NO: 16652 - DNA, 120 bp, synthetic construct
  source 1..120: mol_type = other DNA
ttccaatttattgaggagtcttgtattctgatttgctaactctggcaatcctattatgggcatgaaatctgagttctgaacttagattcactgctggctcctgcttgagccttggtaaga

SEQ ID NO: 16653 - DNA, 120 bp, synthetic construct
  source 1..120: mol_type = other DNA
catttaaaacaaatgacccagtagccaacacttgccaacacttcactgctgtttctcccacctgccaccaagtcttccatatcattgtcctcgatgatctctgtgaactcagagatactt

SEQ ID NO: 16654 - DNA, 120 bp, synthetic construct
  source 1..120: mol_type = other DNA
tgttatctgagtgaggaactggaggtccaaggagtatgcagaactttccagatcacgtaggtagtgtcaaaatgtggttgccaacacctctgtcattaacagaggcagttataaaatata

SEQ ID NO: 16655 - DNA, 120 bp, synthetic construct
  source 1..120: mol_type = other DNA
tctgtgagagtatagaaatccagcaaggtcagtctcactttctgggcagtttttgtccgcccagagcatttgccagtcaggaaaaggtagacaggaggcttgtctgcacatttttttttt

SEQ ID NO: 16656 - DNA, 120 bp, synthetic construct
  source 1..120: mol_type = other DNA
aagcccagaggaaaagtgagtggaaaatatagtgagactagagacacagaagatatagtgagaaggtcttctatatatttaattatcatcccagaagtagagattagagagaatgaaata

SEQ ID NO: 16657 - DNA, 120 bp, synthetic construct
  source 1..120: mol_type = other DNA
tgcacactaccttggacagtagttaatgatatattgtggaatctggtttcttactttccttgaggacaaatgtcatgccagattcccctctgcatgtccctgacacataggttaatgtat

SEQ ID NO: 16658 - DNA, 120 bp, synthetic construct
  source 1..120: mol_type = other DNA
agtctgcaaactagggtggaggagaacatgtgatatctgcaaatcctcttataaagtctctctttagaaataagacttgtggctgggtgtggtggctcactcttgtaatcctagcacttt

SEQ ID NO: 16659 - DNA, 120 bp, synthetic construct
  source 1..120: mol_type = other DNA
cccttggtgacctccccaccaccctcaactgtgaacaatgccagctctggggcctgaggacctcctgggcccagattctactttcaggcagagaactgaagcagccttcataaaactaga

SEQ ID NO: 16660 - DNA, 120 bp, synthetic construct
  source 1..120: mol_type = other DNA
agaagatgaacttgttctcatcctcgacgaacagccccccgctctctatggtctgcaggatgtggtgcaggttggcactggtacatatctggtgctcttcaaatatcaaggcattgtttt

SEQ ID NO: 16661 - DNA, 120 bp, synthetic construct
  source 1..120: mol_type = other DNA
ttctctgagtctcagtttatttatctataaaatggggctaaagccccgaccccagagattgctggaggtttaaatgaaagaacaggtgtgaagcatgtagcatagcatctggtatggaat

SEQ ID NO: 16662 - DNA, 120 bp, synthetic construct
  source 1..120: mol_type = other DNA
ggtcttggaaatcaaggattcagaagcacctcagtttcttgtgatgtaagatccaggctctgaccattaaaataagttgccaatgtagaggagaggataagttcattgcaactgaaaggc

SEQ ID NO: 16663 - DNA, 120 bp, synthetic construct
  source 1..120: mol_type = other DNA
gttttgagaacttcctttagccattcttatagggtaagtctactggtgacaaattcttttagctttgtttcatttgagaaagtcgattttccatttatccctgagaaatatttttgctgg

SEQ ID NO: 16664 - DNA, 120 bp, synthetic construct
  source 1..120: mol_type = other DNA
caagggggtggggcacctcatgacagcttggagagggtggagtctagactctctatttggcctttgctagcagaggtggcgtgggaccaaatatttttctttggtgtttggctgtggtag

SEQ ID NO: 16665 - DNA, 120 bp, synthetic construct
  source 1..120: mol_type = other DNA
aatcgtgtcagagaacttggctgctctggaagagccagttttgtagaagctctcactttctcgggatcttgcatgtctgacgtggctggctctgattaaagaagcaagagtataccctta

SEQ ID NO: 16666 - DNA, 120 bp, synthetic construct
  source 1..120: mol_type = other DNA
attaaatcagaagtgcctcaggaatcggtaaaaaccatccttaatttgcccgaaaaagagtatggcagcccagtagaagccaaaagcactcaaaagacaaattgttttgggtgaattgat

SEQ ID NO: 16667 - DNA, 120 bp, synthetic construct
  source 1..120: mol_type = other DNA
ttgattttctatggtgaaggtggtgcttttacgagtgccacagatcaaagctccaaagttgatgacagaggagggggtgatgttgtatttggaatatactgcattcgcggaaaacttaat

SEQ ID NO: 16668 - DNA, 120 bp, synthetic construct
  source 1..120: mol_type = other DNA
gtgctttgtacatcgtgatcgcctctccttagccaggattgaccaggctaggaattgatgcttacggcaaagacagccatactctatcccatggtcaagagaggccattgcaggagatct

SEQ ID NO: 16669 - DNA, 120 bp, synthetic construct
  source 1..120: mol_type = other DNA
gtgacagtttaagagaatttgttttctgaaagtactgtggctagaaaagcctcttataattgaatctgggcaaacaaacaacagatgctgctcttgatgcactctacagggctggtccct

SEQ ID NO: 16670 - DNA, 120 bp, synthetic construct
  source 1..120: mol_type = other DNA
gacaccttgattttagcccagtgagacccattttgcacttgtgacttccagaactgtagggcaatatgtttgtgttgttttaagccagaaagcttatggggacattttatggcagtgata

SEQ ID NO: 16671 - DNA, 120 bp, synthetic construct
  source 1..120: mol_type = other DNA
tcaccaaactcaagttttaattcagaatttccatcttctctttcattagatgcttgccaatgtttcacagagcaaactggaccgacttgagtttcgccttctttctctgactgcttgccc

SEQ ID NO: 16672 - DNA, 120 bp, synthetic construct
  source 1..120: mol_type = other DNA
tgtgcagaggctggtgctaaaagcgttgaccagaacctctgggcttctacacattcatggagtgaatgaatctatcaatatctgttttcagccctttcagtgaagggctgtcattgataa

SEQ ID NO: 16673 - DNA, 120 bp, synthetic construct
  source 1..120: mol_type = other DNA
cttccctggagccttcagagagagcatggccctgccggcaccttgattttggacatctcgcctccagaacggtgagagaggaatgtctgttttttagtcacccagtatatgctaatttgt

SEQ ID NO: 16674 - DNA, 120 bp, synthetic construct
  source 1..120: mol_type = other DNA
gtgagactctgtctcgaaacaaaaaaaatccctgaagcttagagaggttaattgatggccccgaagtcacagatttagtggcaagacttgggctataactatatttatccagcttaaggt

SEQ ID NO: 16675 - DNA, 120 bp, synthetic construct
  source 1..120: mol_type = other DNA
actgaacccaagttaacaatctgttaattaaataggtttactaaccatcctggtttgcataggaccaaggagtttcccagggtgcagaactttcagtgctaaaaccaggagagtctggag

SEQ ID NO: 16676 - DNA, 120 bp, synthetic construct
  source 1..120: mol_type = other DNA
taaaggctccaggtgcgttacccagttcagtcctcacgaatttgttgctttcccattttgcagatgaggacactgaggctcagcacggtttaaaataataagtgaacaggcttggcacag

SEQ ID NO: 16677 - DNA, 120 bp, synthetic construct
  source 1..120: mol_type = other DNA
cccaattctgcctaaaaatctcagtctgtttctctaacatgctccctctcctactttccacaaaaactgtttttcataccccctctatttcctcaagattttaaactttcgccactcccc

SEQ ID NO: 16678 - DNA, 120 bp, synthetic construct
  source 1..120: mol_type = other DNA
gggctaagagaggcagcattagtaaaagctacatctatgtacacaggaatcctacttgcactgttcatgagcccaacccagcagtctgaaatctgctttaaaataatggaacacttactt

SEQ ID NO: 16679 - DNA, 120 bp, synthetic construct
  source 1..120: mol_type = other DNA
cttttcttttaaaatgaaacacacttactttgggtcttggcaaatgtatgggtaagtgcagatgcctcggcagtagagctggtactggcagcaagttcctaggatctcaaagttaaaggt

SEQ ID NO: 16680 - DNA, 120 bp, synthetic construct
  source 1..120: mol_type = other DNA
tgtagccttcttggtaccactaagccagttatccccatctgcttgctgtctacttcctaatattttgttggcatatacccctcaccaccagctctctctccttctctttattcttagaat

SEQ ID NO: 16681 - DNA, 120 bp, synthetic construct
  source 1..120: mol_type = other DNA
gctgtgaaagcaagtatggctttagttcttcccctgcctgtggagtctgcatgctggatttgtgcccttcccagagtcctggccaggaggcttctcgtccagttcaaattgttacaaagt

SEQ ID NO: 16682 - DNA, 120 bp, synthetic construct
  source 1..120: mol_type = other DNA
gtttttcttctttatcttttcaatttgaaatgtcaccagggactctctgcttgggtgaggcatgcccaccgacgctactgatctcagatgttgatttccttcttccttgtaaactgaggt

SEQ ID NO: 16683 - DNA, 120 bp, synthetic construct
  source 1..120: mol_type = other DNA
aaaagtctgattctatttccatttcttttttttcatccagagatatatcttcggatggtgggatcacaaatacaaaatgctccaggtcgtctgtcatggtcaaaggtggccgcttcaccg

SEQ ID NO: 16684 - DNA, 120 bp, synthetic construct
  source 1..120: mol_type = other DNA
tgttcttgttatagtcctttttttaaaaaaaaacatttccagggaaaaaatcacaattccttagctaaggctggcctgaggtgaaactgggaagggcgtagagctgatgttgtgtgtccc

SEQ ID NO: 16685 - DNA, 120 bp, synthetic construct
  source 1..120: mol_type = other DNA
caccccaaagcctcacctgccttgccattctgtagcacccatattatcaatattaaaaaccaaccattacaggtggcttcccataaggttggatggactaatctagatgtgtgacatttc

SEQ ID NO: 16686 - DNA, 120 bp, synthetic construct
  source 1..120: mol_type = other DNA
tattttcctttcgattgtctccatcttgacatccactttggtgagcggaggaacctagaaggcatgacacagaaaagatgcgtcaaacagttttttacggggtagtaaattgcataagga

SEQ ID NO: 16687 - DNA, 120 bp, synthetic construct
  source 1..120: mol_type = other DNA
ccaggtctagctctcctcctctctaagttcaggccagcatcaggcttggagacatgaacgaccaggggctggcttttcccctcatcttgctgcccttcctccttctttgcttctccatct

SEQ ID NO: 16688 - DNA, 120 bp, synthetic construct
  source 1..120: mol_type = other DNA
tgaaatgtccgagaggacataatagaaataatacaagtataacagaaataatggaagaggttaaaaagatagtaagacaaaaccattaatttcctcatgccaataaatgtgaaaatctga

SEQ ID NO: 16689 - DNA, 120 bp, synthetic construct
  source 1..120: mol_type = other DNA
tgaagctcagtttaaaatgatctcagtcctgattgagtcaaggtttctagtgctcctagcctagctgactgccagcatcaaacagtgattctctctggagggagacaacatcttccagag

SEQ ID NO: 16690 - DNA, 120 bp, synthetic construct
  source 1..120: mol_type = other DNA
ttactgaatgaagactcgacatcttaaaggtgttgagaccttaaaaacaaagagaaacatcttaaaggcagttagagtcagaatgaggtaggaggcggggctcagacactggaccagatt

SEQ ID NO: 16691 - DNA, 120 bp, synthetic construct
  source 1..120: mol_type = other DNA
aagaaaaacagaaaaatacactttatgtttctgcaaactgtgtcctcttccccatcctgtttccagaaccagaaaaccagggggtgtgatgatggaattaccatgtagctacacagtacc

SEQ ID NO: 16692 - DNA, 120 bp, synthetic construct
  source 1..120: mol_type = other DNA
atccaaggagggtacgatccacagtgtgaagctcatggaggaggacgtcaagcaagtcaaggcctaacccatgcccattagatctggaaatggagaggctggagccttggattcgaggga

SEQ ID NO: 16693 - DNA, 120 bp, synthetic construct
  source 1..120: mol_type = other DNA
gaaattgactttgtttaatggcaaaaataatggctgaaacacacaggtacacaaattctccctgctggcttcatgtacaaaatcaccggggagaggcagggatcagtcctggtaattttt

SEQ ID NO: 16694 - DNA, 120 bp, synthetic construct
  source 1..120: mol_type = other DNA
agtaagtgaggctgttacctgcttgtttgctgcttgagatttcttcatggggggctcctccttaatgggtccctgctttccttttttgaccctccgtttcagctcatcctcttccttttg

SEQ ID NO: 16695 - DNA, 120 bp, synthetic construct
  source 1..120: mol_type = other DNA
gcccctgctgctgacagcagagagtggaccaaagccaagcaccaagcacaaacaagtgagggaatggtacttctgaaaatagttaacccagctattttcatccaggaattcctaattgtt

SEQ ID NO: 16696 - DNA, 120 bp, synthetic construct
  source 1..120: mol_type = other DNA
ccagggaggggcagagaaagtggctgagggtgctggcttgtgagtctgcccacagtcccaggattgaggatctgcccaggctgaggatcccatggcagctagacctcaggggatgggcag

SEQ ID NO: 16697 - DNA, 120 bp, synthetic construct
  source 1..120: mol_type = other DNA
tcttccatagcagagggactctgcagatgtgattaaatttaaggatcttgaggtgggcagattattttggggggcccagtctaattataagggtcctttcgagggatgcaggagagtcag

SEQ ID NO: 16698 - DNA, 120 bp, synthetic construct
  source 1..120: mol_type = other DNA
ttgttatggcagtctgaaaagactaagacagtggtcatttgtcacagcaatgatagaagactcatataccacccactgacttgactcattatgagcatatgccactaacgggttcatggt

SEQ ID NO: 16699 - DNA, 120 bp, synthetic construct
  source 1..120: mol_type = other DNA
ttacatgcacccggttctcctactaattggcaatgtgatttggcacaagacttttgctatctctgagctacattctcctttagtgtaaaatggggacaagattcacagggtaattgtgag

SEQ ID NO: 16700 - DNA, 120 bp, synthetic construct
  source 1..120: mol_type = other DNA
acaaagcaaacacccagctccaggacctggtaagcaatgtagctgtgtctgcaaaccatgagcagaaacaggcttaagtgataccctcctcaatcctgctgatcttattttcttgtcttt

SEQ ID NO: 16701 - DNA, 120 bp, synthetic construct
  source 1..120: mol_type = other DNA
agacaatgtaggaaacaaaaaggagagtagtagaagactttgtcccaggctactccaatgactaggaatttggagattgagaagctggggaagtagaggaaggagttgctaatgaggtag

SEQ ID NO: 16702 - DNA, 120 bp, synthetic construct
  source 1..120: mol_type = other DNA
gttgaagctttgcttgagagtgtggtgaagggcaagttgcaagggggtgctatggtggcagaccatggcatccagactggatagggagggcacgaggtgggtgctaggtagtgaggatga

SEQ ID NO: 16703 - DNA, 120 bp, synthetic construct
  source 1..120: mol_type = other DNA
aacaaggccttctccaacctccattctccacttggcttctcccacccttagctgtgtctgttttttacctttactgaccccaaaggaagccggttctcttctcctttaattgtgctgaat

SEQ ID NO: 16704 - DNA, 120 bp, synthetic construct
  source 1..120: mol_type = other DNA
acctgtggtgtttcagactggtgtgagtgatgctgcttctgtgacccggagccatggctgtctgccttgcttttggtgatcaccacgctcccacgaacactctttccaggtttaatttct

SEQ ID NO: 16705 - DNA, 120 bp, synthetic construct
  source 1..120: mol_type = other DNA
aaaggaggtagatcagtattaggttagctagacaagtgggctgtgagattaggccagcaggaaggctccctgtccagcagggctctgagggacgtgaaactcctcctcgcttctcccttt

SEQ ID NO: 16706 - DNA, 120 bp, synthetic construct
  source 1..120: mol_type = other DNA
ttgtagtacttggccacgctaacggcattggctgactttcctattaaaaagaccagggggttgaatttcacggtgctcatttgctcagtgtcccagagagaaaaggtctcaagagcagag

SEQ ID NO: 16707 - DNA, 120 bp, synthetic construct
  source 1..120: mol_type = other DNA
caggtcaatcaaccatggaagtagcaggagagactgggagatgctatgctgatggctgggaaggaggaagaaggggccaggaaccaagggttgcaggcaacatttctagaagctagaaga

SEQ ID NO: 16708 - DNA, 120 bp, synthetic construct
  source 1..120: mol_type = other DNA
gccaccacaccctgtccatttccttccttgtcaaggctgaatagcattgcatcataccatattttgttttttccattcagccactgatggccatttggattgtttccaccttttggctat

SEQ ID NO: 16709 - DNA, 120 bp, synthetic construct
  source 1..120: mol_type = other DNA
agtttctatggatccatcaaccatccttctgacattccttttagtgcaacactaaaatggcctgagcctctgcaggtgtgtttgtgtagggggtcttcaaaacatttccagttatgttct

SEQ ID NO: 16710 - DNA, 120 bp, synthetic construct
  source 1..120: mol_type = other DNA
aattttcccaaaggcacacagctattaatgtatattcactaccctatgcagttcctcaaataaagtcattagtatttgccatgaccacacagctgatgttgccactctggaagccgcaga

SEQ ID NO: 16711 - DNA, 120 bp, synthetic construct
  source 1..120: mol_type = other DNA
gccaaaccttgatttatcaaatgcattggcctagaggaacgtctagaaaaaagcaagctgcaggatcatatgtgtattaattgtagagtagtgtgcagccagatacatatagtcatccca

SEQ ID NO: 16712 - DNA, 120 bp, synthetic construct
  source 1..120: mol_type = other DNA
aatgtcccccatccccataatgtttctctaaacacctcccagtctgccagaatcttagcaggaaagattcaggccttcatttagtctagttgaaacacaaattactgtgccaagaatgta

SEQ ID NO: 16713 - DNA, 120 bp, synthetic construct
  source 1..120: mol_type = other DNA
ggggttatattgtacatactgatgtgtagcctgctttcccttttaatttatcatgaccatttcctgtgtcattgttagggacagctatcctttcgttggcccaacaccttcctcattgat

SEQ ID NO: 16714 - DNA, 120 bp, synthetic construct
  source 1..120: mol_type = other DNA
gcaagatgggattcagaagaaagcaaccctgctgccactcagccttggacttctagccttcagatttgggagaaaagaaacttctgttggttaggccacccagtgtgtggtacttgcaat

SEQ ID NO: 16715 - DNA, 120 bp, synthetic construct
  source 1..120: mol_type = other DNA
attagctgtttttaggtcatactaccccaattgggccctagtgacagcagaatgtgttccagcctctgcatccataaaatggggataacgcgacccattttgtaagggttagaaataaaa

SEQ ID NO: 16716 - DNA, 120 bp, synthetic construct
  source 1..120: mol_type = other DNA
atgtccagtgtaatatttgagacatactaaaaaatatttgttatttatctgaaattcaaatttaactagacagcctgtatttttttctcctaaatctggcaatcctagtgtgtatgtgta

SEQ ID NO: 16717 - DNA, 120 bp, synthetic construct
  source 1..120: mol_type = other DNA
gaggaagcagaacccccactcagctaagccaccttcaaatttctgacccacagaaagcacgagatgacaaatgtttattgttttaagttggtaagtttggggctaatttgttatgcagca

SEQ ID NO: 16718 - DNA, 120 bp, synthetic construct
  source 1..120: mol_type = other DNA
gctgaggtctagtgggagtcagaacttttgtcattacccagtggtcctgggtagtacggctacccctctatttttccatgcagagtcagtggagtccgtgtggagagtagtaacaaggca

SEQ ID NO: 16719 - DNA, 120 bp, synthetic construct
  source 1..120: mol_type = other DNA
gggatgaaagaactgtcagctcagaattctatatccagtgagcaaatccttcaaggatgagaggggaagtcaaggcattctcagatgaaggaaaactaagaaatttctatcagcaggcat

SEQ ID NO: 16720 - DNA, 120 bp, synthetic construct
  source 1..120: mol_type = other DNA
aggtcaagggaagtaggtcagaaaaggctatagggaagtaatcactaaattgacaaggaagaattcaaggggaaaaagatgggaacgtgtagaaaaacagtttggtttgacctctgctca

SEQ ID NO: 16721 - DNA, 120 bp, synthetic construct
  source 1..120: mol_type = other DNA
catgttttctcaaaatggtacccaaatctacattgcatcccatagttcctagtctgatttcactggggaacctattaaacatgcagatcctcagattccatccctagaaatcctgactct

SEQ ID NO: 16722 - DNA, 120 bp, synthetic construct
  source 1..120: mol_type = other DNA
ttcccaagtgccttaggctttgaataaaagtctttacagtgcaacctcttgagattctctggttcgaggattttattaattttattatgttcctggtcagaagtagctttgagttgatta

SEQ ID NO: 16723 - DNA, 120 bp, synthetic construct
  source 1..120: mol_type = other DNA
tattcagaaaagcaaggcacaggtcactcgaagcttcccttgagacccaaacaagcatggactttgagtaaagctcaaagaggtccagagaatctaaatgaagccatatttctttaaagc

SEQ ID NO: 16724 - DNA, 120 bp, synthetic construct
  source 1..120: mol_type = other DNA
attctttacacgatctagctcagtactgaatcctggaccaagacaaaaaaaaatttcttcatggaaaagagaaacagcaaacaagagctgctctagagaaagcccccactgggtcagaat

SEQ ID NO: 16725 - DNA, 120 bp, synthetic construct
  source 1..120: mol_type = other DNA
atagctttggactataagtctttctacctccatctggagatgagcacttacctgaagcaagaaggaagagcaagtcagcaaattctttaggaacatgcattctcaacagggacaatacca

SEQ ID NO: 16726 - DNA, 120 bp, synthetic construct
  source 1..120: mol_type = other DNA
atgggagcctagcttccatggggccctgctagaaagacaagtttgtttttcctttggataaagccaattagctaacacagttggtcacctcaattaccatgtcgatttaggataaactat

SEQ ID NO: 16727 - DNA, 120 bp, synthetic construct
  source 1..120: mol_type = other DNA
gttaatgtgtgccatggcccacagtgaggcacaggaggtgagagtggaagtgtgacaaactgggagaggagcagcgtctgctgacagccttcccagttgtctggattctagagcagcaaa

SEQ ID NO: 16728 - DNA, 120 bp, synthetic construct
  source 1..120: mol_type = other DNA
tggggtattttggggctacattctgaatctgccttttttcctgctcactagacatacttcctagggaatctccccatttcctgtgattgcaatgatcatctgatgactctcaagtcacct

SEQ ID NO: 16729 - DNA, 120 bp, synthetic construct
  source 1..120: mol_type = other DNA
gtacctcagagaccatgtccttgcccctgggcttctgcacacagtgcccttctgcacacacaccccacacactgtgcacacagtgccctctgcacacaactcctatgcactctgcacgca

SEQ ID NO: 16730 - DNA, 120 bp, synthetic construct
  source 1..120: mol_type = other DNA
ttagggaaagtagatttcaaggagcttgaatagagattcataaagagtgagaggtttccctgatccatcgtcctgtacctgacgtcaggaagaaagagccagagacagtctatggctaaa

SEQ ID NO: 16731 - DNA, 120 bp, synthetic construct
  source 1..120: mol_type = other DNA
ggtgggcgatctgtatctggaaactccttttaaagacctcaggtactccaggtaggtagtaaacttttaatacctgctcttgatgtgaactgataaagccctacgcggtagaaagaccag

SEQ ID NO: 16732 - DNA, 120 bp, synthetic construct
  source 1..120: mol_type = other DNA
gtttatgacccattcaggaaatagaagagagagaaatgcccatttatttattctgatatccaaactgatcaaatgcagcatgaagaaggaaatttatgaaccaacgatcacttaacaaag

SEQ ID NO: 16733 - DNA, 120 bp, synthetic construct
  source 1..120: mol_type = other DNA
tcaaagaagagcattcaaagggaacaagaaggcaattgaaggtagacagaacacacagtccatgatgaacacttaatagtcatgagatcttctgtgtcaacacagaaacgaaagggtata

SEQ ID NO: 16734 - DNA, 120 bp, synthetic construct
  source 1..120: mol_type = other DNA
aaaaggggagttgacctaacagatattaagatgtatttctaaagccatagcagctaaaatagtacagtattaatgtagggacaaacagagcaatgaagaataaagagaccagcagtaaac

SEQ ID NO: 16735 - DNA, 120 bp, synthetic construct
  source 1..120: mol_type = other DNA
atgttcgtcagcgtgatttccctctctgtgacatggtcaaacagcttgagaagagaaggagaagagtgactccatcttgggatgcggctttgatagtgacaaaggtgcagaaacatgcct

SEQ ID NO: 16736 - DNA, 120 bp, synthetic construct
  source 1..120: mol_type = other DNA
ctagaatgaacttttccattcaaatggagaaccatgggtgtaacaggccagtcatgttctttttcctggaattttgctaacataattcaccagctgggttagcaggcccaataaccacaa

SEQ ID NO: 16737 - DNA, 120 bp, synthetic construct
  source 1..120: mol_type = other DNA
ttggtcaatatcacattgctttgccaaatgctgctgggattaattggtcagggactgacaggatgacaacaccattttggaaaatgtcgctggacttactgaatcagaatctgcacttga

SEQ ID NO: 16738 - DNA, 120 bp, synthetic construct
  source 1..120: mol_type = other DNA
ctggtgagatttaagtttctaatgtggggcagctgctcagttagaaagtaaagttagtgtctgataaggtcaggaatcacacggtgtcacttacttcttctatcccaatggaaagcatct

SEQ ID NO: 16739 - DNA, 120 bp, synthetic construct
  source 1..120: mol_type = other DNA
tgagtgttggctctggggtgtttggctgggaagaaatgtgggtaaagctgtacggctttgtcccaattaaacccaagcattgtactggccactctgctcctgattctgcctttgttttat

SEQ ID NO: 16740 - DNA, 120 bp, synthetic construct
  source 1..120: mol_type = other DNA
aatgtcacaaacctaccaaagcatgggacagggaatagggggagacaggagacatcagtttttgcaaatcagtgttcagtgggctctcagtttctaaggccaaactccaaatcctagacc

SEQ ID NO: 16741 - DNA, 120 bp, synthetic construct
  source 1..120: mol_type = other DNA
tatctcaagcccttgatgttaatttcaatctatttcacttatatactcattctggccccatctgtactcagaggctcagcacaaatgtcatctattatgtgaagctcccaccactggcct

SEQ ID NO: 16742 - DNA, 120 bp, synthetic construct
  source 1..120: mol_type = other DNA
aagggaaaacactgggctggcatgatcttggctgggcttattactgtatggaaggaggatccacggtgtcccctctttacataccctattgcacagggtcttatacatgcagcccaagct

SEQ ID NO: 16743 - DNA, 120 bp, synthetic construct
  source 1..120: mol_type = other DNA
gaaaaatacaaagctgtagagggtcttcatacctgaggaaaaacaacacctcagttgacaatgctacctggacaattgggaagtaagaggtctttctggaaatcaatagaggaaggcaga

SEQ ID NO: 16744 - DNA, 120 bp, synthetic construct
  source 1..120: mol_type = other DNA
ctctgagtgggacaaactgtgatgtaatttacactccaaagctccccacgggatcaggcagaggtgagacttctgaaatcacatcttcccctagttttcttctggccctatcttgcttcc

SEQ ID NO: 16745 - DNA, 120 bp, synthetic construct
  source 1..120: mol_type = other DNA
aaaagtaatctgtccaattccagtaagcacaactgtttgtaatacaactttgcttctcctcccatcaacagatggagtctattttcttcaggccttgcatctgggcttggcttgactcct

SEQ ID NO: 16746 - DNA, 120 bp, synthetic construct
  source 1..120: mol_type = other DNA
gtttccatatttattgtctagatttgtggtcctacacttgctgatcatcctacattgggaagcaaatgacagatggaaacagatgggctggcccagtgccttctctagcagcatggtcta

SEQ ID NO: 16747 - DNA, 120 bp, synthetic construct
  source 1..120: mol_type = other DNA
agcgactcccaaagcaggtcttctcattccaaaagtaactggaacccacaacgtaaggaatatacaatgtgttgtctagaacctttggaagaagaggaacccattctgattgtaatctga

SEQ ID NO: 16748 - DNA, 120 bp, synthetic construct
  source 1..120: mol_type = other DNA
agtcacttgcaggtcgactacaaaggcaggaaacttgtctctggaagctcagatttcagagatggcagacagtcctctcattagcctcagtgggtaatttgaccccccggtcagataaat

SEQ ID NO: 16749 - DNA, 120 bp, synthetic construct
  source 1..120: mol_type = other DNA
caagggccccaaccttcagtggatacctgaaagacaactgtagatttgaaaacattcatgtatttctaaaaagtgaaaggctcattttcctcttgagtcacagggaaggaaatggggtgg

SEQ ID NO: 16750 - DNA, 120 bp, synthetic construct
  source 1..120: mol_type = other DNA
agatcatcaaagcattaccctacattttcttcaaattaaaaaaactgacttacacttttcacgtttgtatctttaacccatttggaattaattttttttttttttttgagatagagtctc

SEQ ID NO: 16751 - DNA, 120 bp, synthetic construct
  source 1..120: mol_type = other DNA
ctggggaaaaatgacatctttactgaactgagccttttaaatcaatgaaacaagtatgtctcaccatttatttaggtcttatttaatgactttaaataaaattatcatttatccataaat

SEQ ID NO: 16752 - DNA, 120 bp, synthetic construct
  source 1..120: mol_type = other DNA
ttaagcaatgatagaaatattctctatctgtgctgtccaatacatagccactagccacatgtggccaactagtacttgagaggtaatttggtttagatgaggtcatgagggtgagaccag

SEQ ID NO: 16753 - DNA, 120 bp, synthetic construct
  source 1..120: mol_type = other DNA
aggaacagtctacccagtctgtggcaacaagtagggaatattgccctcctgtgatggtatcgtggcctcaaaagagagggtcaatgggaaagagtagcaggaagcaggctttgctgccaa

SEQ ID NO: 16754 - DNA, 120 bp, synthetic construct
  source 1..120: mol_type = other DNA
tacagaaaaattgggctttgatatgtcagtagaagacagtggttaaaacaggggctttgcagtcagtgcagaaatggggtcttggacttctcaaaagaagatatagcagtgaccaagaaa

SEQ ID NO: 16755 - DNA, 120 bp, synthetic construct
  source 1..120: mol_type = other DNA
gttaaaagagattttcccaatgtaaagatgtgaactgttcacactgtaccgatggtcttactctaaggcttcaaaaataggcaggttgcctttcatacagaaaacgggaaggtgcctgca

SEQ ID NO: 16756 - DNA, 120 bp, synthetic construct
  source 1..120: mol_type = other DNA
gtaagtttgagtcaggattaccgttgcttacaaccaaagcttctaatgatatggtcattaatagaggatccatttttaaagagagtaaagggagcacaagaactcaatgccagtaatgtt

SEQ ID NO: 16757 - DNA, 120 bp, synthetic construct
  source 1..120: mol_type = other DNA
gactgattgtgggagaaaatatctcaaagctgcctctggagtgctcaaatatggcctggtatcaacatcagagaggcacccatctcctcaatttcttcaataacaaagcggccttagcat

SEQ ID NO: 16758 - DNA, 120 bp, synthetic construct
  source 1..120: mol_type = other DNA
tgacccagcttcctgtcacgggcacaaactcacaggcttcaaaggcaatggctgccttttcctcttaccgaggacttatttagcatgcttgtccattttacttctttctttgttcttaga

SEQ ID NO: 16759 - DNA, 120 bp, synthetic construct
  source 1..120: mol_type = other DNA
agtgccagaagcacagagcaaatctggagaggaacgcagggaccagcacatgctgagccttgcagaatagagtgagtgctctgtactttattccaagaagcacaggtagttactaaaggc

SEQ ID NO: 16760 - DNA, 120 bp, synthetic construct
  source 1..120: mol_type = other DNA
gtgaccccgttcccaccccctccagtccatctggttcagagatcatgatccacagcctttggtggcgggcatgtgaccaggtcaaccatgatgagtgcatcaccctcccctgacagtgac

SEQ ID NO: 16761 - DNA, 120 bp, synthetic construct
  source 1..120: mol_type = other DNA
atttgaagtgcattaggtcgggttggctgatttttccataattatattaaatgttcaccatctacagaatttcattccaaacccaaacagtccctggcacttaatgagcagactccaatg

SEQ ID NO: 16762 - DNA, 120 bp, synthetic construct
  source 1..120: mol_type = other DNA
gctcaacgtcattaaatatcagggaaattcaataaaaaccccaatgagatatcacctcatacctgttaggacggctgttactaaagaaacaataaacaagtgttggtgaggatgcggaga

SEQ ID NO: 16763 - DNA, 120 bp, synthetic construct
  source 1..120: mol_type = other DNA
tttcttctgccacccagttgttcagatcgtttctgtaggaagggtcaaacttgatcagcaggtttttttcttcatcaatttccagtttaataggctacaaacaagataatggggaaatta

SEQ ID NO: 16764 - DNA, 120 bp, synthetic construct
  source 1..120: mol_type = other DNA
gccctaaggcagttgggaagaatggacacaggaatgaatctgttttcagtgcacctcatctttccactgggcttaaacgattctggtatttaactgtgcatttaatgacatgattagatg

SEQ ID NO: 16765 - DNA, 120 bp, synthetic construct
  source 1..120: mol_type = other DNA
caagggctggtaatcaggtttcaggatactgttaggtttctgcaaaaacagaaaaagaggaaacaaatcaacttatggtaaatacagtaagcttttagcaacaagtctcaggttcattgt

SEQ ID NO: 16766 - DNA, 120 bp, synthetic construct
  source 1..120: mol_type = other DNA
ttatactgacaaatgatcagacctatttcctgtaaacttttcctgataataccaggatagttgatttagaagtatctttttactctgttagatacattagatttaatttttctttttttt

SEQ ID NO: 16767 - DNA, 120 bp, synthetic construct
  source 1..120: mol_type = other DNA
ctttagggattaggtctggagtttaccatgagataccagcctttgtttccctccctctaatatggggtagcatggaagcggactcaccttgcctctgcgggttgtatactatggtttagg

SEQ ID NO: 16768 - DNA, 120 bp, synthetic construct
  source 1..120: mol_type = other DNA
aagagaagaaaaagagcactacccacacatttttattagtgtttatgggcttagagaaatctaataagaaactaggctgcatatttaacatatattacgtcttgcccagaatagctattc

SEQ ID NO: 16769 - DNA, 120 bp, synthetic construct
  source 1..120: mol_type = other DNA
aggcactgccacacccaatgtttttgtgtgacagcaaagatcacactgtggggcagtgacttacttaatgcttggtcttcccagcaggctgtgaaatttatcagggaggactgttctcac

SEQ ID NO: 16770 - DNA, 120 bp, synthetic construct
  source 1..120: mol_type = other DNA
tttactgtctacccttacgtagagccatttaagttaaagagtgtgaatctaatactttaagttgattattctccagcttaacctgtatctcagtttcctcgtgtgcatcacatcacacgt

SEQ ID NO: 16771 - DNA, 120 bp, synthetic construct
  source 1..120: mol_type = other DNA
aaggaagagcacacttttctgaacagcacgtttcagggactgctctttgtcacatgattatgtttttgttagttacacatggccttgatggattctgtatttatttctgactgccctgag

SEQ ID NO: 16772 - DNA, 120 bp, synthetic construct
  source 1..120: mol_type = other DNA
accttagagaagctaagcaagggactagctttccagctgtgtctactgggagacaaagttctttttgcttcctatttaatgtggggaaaagtcagtatcacctccaaatttggcaacaca

SEQ ID NO: 16773 - DNA, 120 bp, synthetic construct
  source 1..120: mol_type = other DNA
ttaaagtggtaatagtgggtatccaggctggaaaagacgaggcaggtgttgagaggattccatttagggatgttctgttcagctctacacccttgggatttactcttctggaagtattta

SEQ ID NO: 16774 - DNA, 120 bp, synthetic construct
  source 1..120: mol_type = other DNA
aggtataaccatttctagctacatatgttgtgaatctgtgtccacggggcacgctcaagggagcttctttacttggtagtttatggctaacagtaggcttttgggggaaataataaacaa

SEQ ID NO: 16775 - DNA, 120 bp, synthetic construct
  source 1..120: mol_type = other DNA
catgcaattcaaccatgtgacttgctttttacttaattttctactagtttatggtattttcaatcaagtcccatattttgtagatggagcagagggaaggattctggggagggctcctaa

SEQ ID NO: 16776 - DNA, 120 bp, synthetic construct
  source 1..120: mol_type = other DNA
tcagaggtgtctatactgtaccacagcttatttaaatatttagaccctctagcttttcctgggtaatcaggcaaagccaatggaaaccatctcagttgtcggtactatgggagtcaagta

SEQ ID NO: 16777 - DNA, 120 bp, synthetic construct
  source 1..120: mol_type = other DNA
atttccttacctaaaatgtgcccccaaattgagttctggagcaaagggcttatctgaaacaatagtggaaccagttccggaagcctgaacaggaatccgataggtactgctattttcaat

SEQ ID NO: 16778 - DNA, 120 bp, synthetic construct
  source 1..120: mol_type = other DNA
aatgacagggaaacattctaagaaatgtgtcattaggtgatttcgttgctgtgcaaacattgtagagcgagacagtggagtctactacacacctaggctatacggtataacctgttgctc

SEQ ID NO: 16779 - DNA, 120 bp, synthetic construct
  source 1..120: mol_type = other DNA
gaatgtcaccaaaatcctggtctggcgccactgcagattaaaaaaatagattcagtcagtgggcccgatggtcactctcttaggaataggctcacaggtacttaaataaggaaaatctaa

SEQ ID NO: 16780 - DNA, 120 bp, synthetic construct
  source 1..120: mol_type = other DNA
cttgaatttatattacagtagataggaatctttgacttttatcattttcagttggcatacacaatcaaagcaatacatggaaatggatttctcatgcttgagtaaccagacgttctcctt

SEQ ID NO: 16781 - DNA, 120 bp, synthetic construct
  source 1..120: mol_type = other DNA
gatgtgtaccatttctcttctgtttcctgctgacacaggttggctcttctggaaagacctgaagttgttcttcagggctgaattggtgagttttctgatgaagcttattaatcaatgctt

SEQ ID NO: 16782 - DNA, 120 bp, synthetic construct
  source 1..120: mol_type = other DNA
tgaagggatttagcacatgtaggtaaggtcccaaatcagctgactttcagatagggagattatcctcagcggtcgtgacttaaccagactatactcttcctggtgaaaagattccaagca

SEQ ID NO: 16783 - DNA, 120 bp, synthetic construct
  source 1..120: mol_type = other DNA
aagcagccagagctttataggtttccttattgtgtgtttaatatttgccacaaaaggcagaagtgaacaccattgtttgcacatgtcaccgcaacaatcaccgggagtgtggctaataac

SEQ ID NO: 16784 - DNA, 120 bp, synthetic construct
  source 1..120: mol_type = other DNA
gttattttccaaacttcccatccagttctccttcctgctggtaccctccccagtctacactgttgacagtgatagggacggggggcagaggaattctagaaaagggtgggtccctggcga

SEQ ID NO: 16785 - DNA, 120 bp, synthetic construct
  source 1..120: mol_type = other DNA
tatcctgcttcaacaggtttatctttcagtgatctgatcctgctgctctcctgctggggattctgcatggctctccagtgtctggatcagaggcactgagtctttttatcctctttgaga

SEQ ID NO: 16786 - DNA, 120 bp, synthetic construct
  source 1..120: mol_type = other DNA
ctaggagtgatatttttcaacactgctagggggtaggacataaactgtacaagttctctgggacagaattcacaagatgtatcgagacttttagttacatacatgtcatttgacccagca

SEQ ID NO: 16787 - DNA, 120 bp, synthetic construct
  source 1..120: mol_type = other DNA
acagtccaccactgtcagttcttttagcctttgctttttggatttgcctctatattgctaagtactctactgctacttcttaagttttcagtttgcacattattcatttatttttcccca

SEQ ID NO: 16788 - DNA, 120 bp, synthetic construct
  source 1..120: mol_type = other DNA
atgatttttttttaatctggaagtttctgcagccttctctttgtgtccagtgttctggaacttagttatggtgtgcctcgacatgggcctgtttccatccaccgtgcagcatatttgatg

SEQ ID NO: 16789 - DNA, 120 bp, synthetic construct
  source 1..120: mol_type = other DNA
tgggggagaagggcgctggaattgtacctttcagtgtgaagacttttttgtagttcatttgttttcataatggtatcctgccctcagcagtgtctgtgaaatcagctctcagtttaatat

SEQ ID NO: 16790 - DNA, 120 bp, synthetic construct
  source 1..120: mol_type = other DNA
ggcatgatttgaattgagggtctgttctagtttatccttgttcctagtgtgcatcctttcagagtcccaaccaaaagtccagacattttaccagagcccatcctcttctaatttttatct

SEQ ID NO: 16791 - DNA, 120 bp, synthetic construct
  source 1..120: mol_type = other DNA
tagagctcccatttcacagacatctgtactacgtggatcagtttgttctaaaccttaaggcctctctgagtgtcccttatttcttttccttttccttatctgagaaaaataaaagacctt

SEQ ID NO: 16792 - DNA, 120 bp, synthetic construct
  source 1..120: mol_type = other DNA
tgaccatgacagccatctcttaaaagggacataaatcgagttgatgatgatgctggtaatggggaagaaacataaatttttatgggggagagaaggtgggatttaaataaaacccacaac

SEQ ID NO: 16793 - DNA, 120 bp, synthetic construct
  source 1..120: mol_type = other DNA
tgtatctgttaaccaacctctcctttctccacctcccctctacccttcttatcctctgtggccacaattttactctctacttctatgatctcaattttcttttagctcccacatatgagt

SEQ ID NO: 16794 - DNA, 120 bp, synthetic construct
  source 1..120: mol_type = other DNA
ctgctctcttatgccaactgaaaacacattttaccatccttttgtaagtgttcatgtgataatacccaaaacactaaaaagtagttaagagggctgactataaatcaacgagttgaagct

SEQ ID NO: 16795 - DNA, 120 bp, synthetic construct
  source 1..120: mol_type = other DNA
ctgccaatgtaaatagatggaataaactttagacttgccaaaatcagacaggatttgcaaattgaaacatactgaagaggcaacagagagagatgaagaggtgaaaaatatatatgagaa

SEQ ID NO: 16796 - DNA, 120 bp, synthetic construct
  source 1..120: mol_type = other DNA
tagtcattatagaaaatgattcattagttacaatttccatacatttccatgcatctcctaacatccatagacacaccacgatcctgagactaaatggttttatcattaagcaatagatcc

SEQ ID NO: 16797 - DNA, 120 bp, synthetic construct
  source 1..120: mol_type = other DNA
gtctactctaacctctactattcagcattgcattgaaaagcctatctaatgcaatgagtcaggaaaaagcagcaaagaattaaggattgaaaaggaagcttgcagataaaagtctacgaa

SEQ ID NO: 16798 - DNA, 120 bp, synthetic construct
  source 1..120: mol_type = other DNA
attatgtaataaatataaaaacatggtttggacacacatcaaattcatgatacggttgcctatgggcagagagaaaggacataggactggcaaggagaatctatggaactccatagacat

SEQ ID NO: 16799 - DNA, 120 bp, synthetic construct
  source 1..120: mol_type = other DNA
accagttgctataagaagtttaaaatgagctctccggtaatagccacaattttcactctctctgaaaatggatagagtccagcactgacaatctcccttgatgttaaatgcctgccagcc

SEQ ID NO: 16800 - DNA, 120 bp, synthetic construct
  source 1..120: mol_type = other DNA
tttaaatgaggaaataacccagtggctgagggtctgaaggagctttgaaagcccaataattctcccttgctgccatatcactgtgtatggctgtggcaagtgatgaagaaaaataaatgt

SEQ ID NO: 16801 - DNA, 120 bp, synthetic construct
  source 1..120: mol_type = other DNA
tgtatagtatttgtttctgaggaattccaaattgctctaagtgtcatttatcttccaatatcactatggaggtaggcttcggcttcccatctcctgacccctctggctgataacaaacag

SEQ ID NO: 16802 - DNA, 120 bp, synthetic construct
  source 1..120: mol_type = other DNA
tctctggtgagctgtcacaagtcagcagaaaatgccattccttaaattttatgaaattaataatacttgattattcagaaatatctgacaaatgctgaaactaaatgttagttctcatcc

SEQ ID NO: 16803 - DNA, 120 bp, synthetic construct
  source 1..120: mol_type = other DNA
taagtctttcatccatcttatttttgcatatggtgtgaggaaggggtctagtttcaatctcctgcatatgactagccagttatgcaaatgccatttattgactagagaatcttttcccca

SEQ ID NO: 16804 - DNA, 120 bp, synthetic construct
  source 1..120: mol_type = other DNA
accatgcaaatctctgcttctggtgatcattttcaaagacatgttgcaaaaatagggccattgcctataagccaaagctgtgtttcatcatgtcccatgacttaccatgtgtgcctggaa

SEQ ID NO: 16805 - DNA, 120 bp, synthetic construct
  source 1..120: mol_type = other DNA
cttcctcttcctcttggagagagactatttctcttaacagcttgagtaggctgatggcacattagcttgagtaggctaatatgagccatgagtcaagttaatatacaagaaaagctcagg

SEQ ID NO: 16806 - DNA, 120 bp, synthetic construct
  source 1..120: mol_type = other DNA
cactttccttaggaaaaggaaaaggtccactttccactttccaagttccttaacctggccctctgcaccctcacgcatcatccccactcccttgccctttgtgctccatcaatagaggct

SEQ ID NO: 16807 - DNA, 120 bp, synthetic construct
  source 1..120: mol_type = other DNA
acgtaacagccccgtgacttgtgaaaggtagctgtgttatcctagctaattctattctgtttcagattaaacacacatatgattggatttgcagatgccatggattgccattttggttac

SEQ ID NO: 16808 - DNA, 120 bp, synthetic construct
  source 1..120: mol_type = other DNA
taaggtcatgtgttcaggaatgtggcacttcagagggatttctctttctcatcaagggaactcaatggaagaataattaatactgaagaaggagaaaggaactcacctgaggctggacct

SEQ ID NO: 16809 - DNA, 120 bp, synthetic construct
  source 1..120: mol_type = other DNA
gtctcagagtcccatttctctcataggtaaaatgaggataattctagggattgatattggcattataaactcttcttagggtgctggaagggcatagcccagcaccaggtaagtgcccag

SEQ ID NO: 16810 - DNA, 120 bp, synthetic construct
  source 1..120: mol_type = other DNA
gattttaacccagctgcctctctcaaaaagagagaggagttggagatggttctgaggagtataccttgttaaagatgagcctcatcttgggggcccactcctagcctgaaattcaagtca

SEQ ID NO: 16811 - DNA, 120 bp, synthetic construct
  source 1..120: mol_type = other DNA
tgacaagttacattgtggggtcagggcatgctgagtgttttcaaaggccagggtagaaaccaaatggctgttagtacaatggctttgctcatttctgaggaggttttgtcaaagaagcca

SEQ ID NO: 16812 - DNA, 120 bp, synthetic construct
  source 1..120: mol_type = other DNA
tttggcagaaggctgctagcaagacgctgtgtcttttaaaatcttcctgagatatctgggaagcaacaacaacaacaaacaacaacagcaaaagaaaagagggaagacagttaagggtga

SEQ ID NO: 16813 - DNA, 120 bp, synthetic construct
  source 1..120: mol_type = other DNA
ataaaagcccccccaacacctcccttgaccctcaatctcccctagaaactgctaagcttcttgaatgaactgtctgtgctattcattactacttaactccaacttgccctaaatattatt

SEQ ID NO: 16814 - DNA, 120 bp, synthetic construct
  source 1..120: mol_type = other DNA
gcccagactgcttccttaaagccagaactttttcacagaataaagccaattatgacctcctagttacaacaatttcttgtactagtacctgtaatatcccatattgcttgtcaagaagcc

SEQ ID NO: 16815 - DNA, 120 bp, synthetic construct
  source 1..120: mol_type = other DNA
tgacaaaaatgttttatcatacgtaaaacatcaccaccatagaagagaggaaataatctctgaataagaatcaatgggaaaatctctcctctgtagctggggatgtggctggctcctgcc

SEQ ID NO: 16816 - DNA, 120 bp, synthetic construct
  source 1..120: mol_type = other DNA
aggaaaaagatgcccatagaagctaaattattggctgaagacgtgttgaaaaatactctcactggggatcttaagtagaggttttctaaaaaaacagaaaaaaccttcagaagcagatga

SEQ ID NO: 16817 - DNA, 120 bp, synthetic construct
  source 1..120: mol_type = other DNA
cagactcctttttaggaatggaacttagtgtcaatacagggataatactgtcaactttagttagcttaatgtattccccactatattagcctctgcaaacctttttaaaccccacataat

SEQ ID NO: 16818 - DNA, 120 bp, synthetic construct
  source 1..120: mol_type = other DNA
aaagaaaagataacttgggttttgaaggtggattaagttggtttttgagataagtttccatgtctcaggtttgggaaatcttgggggtcatggttctgcagtgtcttctggcctcttgca

SEQ ID NO: 16819 - DNA, 120 bp, synthetic construct
  source 1..120: mol_type = other DNA
actcatggttctggaaggtagttgggttgagaacagtgaacttgccatgggtctgcaacagggctgccatagcaaaaggccaggcaaccatacctcaatggctatgaagggagaagagag

SEQ ID NO: 16820 - DNA, 120 bp, synthetic construct
  source 1..120: mol_type = other DNA
ccaatggataacaaattgtttctttgccttttatgaagcagcccatgcctccactgatctgaaatttcacattgagcatgtgtaaattcccctgtagtcatggctttgtttctattagtc

SEQ ID NO: 16821 - DNA, 120 bp, synthetic construct
  source 1..120: mol_type = other DNA
tgtctcctaaaacgagttaatagctttctacatttttctgtgatgtgagatacatccatttcttcaccatttggtagaactcacttgtaaagctgtttgacctagtgtcttttcttcagg

SEQ ID NO: 16822 - DNA, 120 bp, synthetic construct
  source 1..120: mol_type = other DNA
gctggctggaatgtgagtatgacggctaaggttagggcagaaaacttgaccaagacatagaagctacatgctacctatgatggagttacagaattgaaagagcatccagttgcacactat

SEQ ID NO: 16823 - DNA, 120 bp, synthetic construct
  source 1..120: mol_type = other DNA
gggttttgacaaacaatgctgtggttaacttattatcttatttctaccaatgaataggtgagaggcagagcagatggatcaccaaacaagggcacaaaatgttgttattttgaatgagac

SEQ ID NO: 16824 - DNA, 120 bp, synthetic construct
  source 1..120: mol_type = other DNA
tgtaagcctgggaggaatggccacagcaaagactcactgcaacaagtttcaggtctaactttctcatgagcatttattatatctcatgctaacgatctgaagtgattttaaagggagtgg

SEQ ID NO: 16825 - DNA, 120 bp, synthetic construct
  source 1..120: mol_type = other DNA
attagctaaaatactagcttatgcagtactgagaaatgagtacctggcaataaaaaagtaagaaacaaaattccagaacctacgatattaactttatagacatttcctgggctacgaggc

SEQ ID NO: 16826 - DNA, 120 bp, synthetic construct
  source 1..120: mol_type = other DNA
cctgcaccctccagccctaagcaaccactaatctacctcagatctatatagatttgcctactttaaccatttcatataaatggaatcatgtaatgtggtctttcgtgaccgggttctttc

SEQ ID NO: 16827 - DNA, 120 bp, synthetic construct
  source 1..120: mol_type = other DNA
tagtagctgtcttggttatcagatcaactgccacagtattgcagtgcttgtgtctgagtaaccctaattttacttttgcgctttggggcctaaaaatgcagataaagggaaactactgta

SEQ ID NO: 16828 - DNA, 120 bp, synthetic construct
  source 1..120: mol_type = other DNA
atgagccaccacaccgggcctatccatatgttgtcttctaacagttttatagtttcagcccttacatttcagtctttgatccatgtagaggcagttcccttctactcctagtttgttact

SEQ ID NO: 16829 - DNA, 120 bp, synthetic construct
  source 1..120: mol_type = other DNA
acatcccctactattttgctgaattgtgtatttctcccttcaattctatctgtctgcacttcacatattttggtgctctgttatcagatgtgtgtttataattgccatatctttttgatg

SEQ ID NO: 16830 - DNA, 120 bp, synthetic construct
  source 1..120: mol_type = other DNA
ggcagttagccttccttggctagcactttccctttctttcatctacctgaaaagtaaaactgctcctttaatatcctatactttccttcctacagatagggccattattccttctatctt

SEQ ID NO: 16831 - DNA, 120 bp, synthetic construct
  source 1..120: mol_type = other DNA
cttataaggacaccaatcatattggattaaagcccacccatctgacctcattttgccttaattacctctttaaaggccctatgtccaagaagagttacattccgaggtactgggtgttag

SEQ ID NO: 16832 - DNA, 120 bp, synthetic construct
  source 1..120: mol_type = other DNA
tagtttctacattcattataaatgtaccttacctaatggtcagtttcacaggctcaggtgacccattgacattgaccaggaactcttcttcaaagtttcccaggatggtagagctgaagg

SEQ ID NO: 16833 - DNA, 120 bp, synthetic construct
  source 1..120: mol_type = other DNA
atgctgtccttacacctagagggtgaacagcatgttttcctgatttatataggaaccaccctcaacctacacataaggctttggaggacaaagagcatgagagatctcaaagaaactttc

SEQ ID NO: 16834 - DNA, 120 bp, synthetic construct
  source 1..120: mol_type = other DNA
ccaaactgcctgggttcaaatctcagctttgccattgacttactagctctgtaaccttggacaatctacttagtttctctgtgctccagtttccccatgtgtaaaatgtaagtactacta

SEQ ID NO: 16835 - DNA, 120 bp, synthetic construct
  source 1..120: mol_type = other DNA
gtaggtaatgcaataaattgaaagagagatgcaatgaagcatcagcattaaatacgcagacagtgcaaaatattcccataagaagcaccttaccgtgtccttctctgccactgcacagct

SEQ ID NO: 16836 - DNA, 120 bp, synthetic construct
  source 1..120: mol_type = other DNA
gctaatggaatatgaatgtaagtgaaatgtgctaccatctataaaaatatcatatacgttcccccatgccctttccccttccacaatcttgtagaccacgtggtaggggtggccaagcat

SEQ ID NO: 16837 - DNA, 120 bp, synthetic construct
  source 1..120: mol_type = other DNA
atgtgaaaacagctatgctcattaggacgttctagaaaatgtaaaaggttatctatcctctgatctgtggaatttatgttgtcagagaacaagcactaaacagatggggagatgtattta

SEQ ID NO: 16838 - DNA, 120 bp, synthetic construct
  source 1..120: mol_type = other DNA
tatgagcatacaagctgtatttataaaggaataggtgaaaaagggcaaagtacaaatgcatgtcattatggttggtaactgcagacacccagctttataactgtgatcacctgaaatacc

SEQ ID NO: 16839 - DNA, 120 bp, synthetic construct
  source 1..120: mol_type = other DNA
ccaaagtttcttacaaagaaaagtaattctaaatcagagaagggtgaccattgattgatgcttctcataaaatgagagccaacctggggctccaagggacattattcacattgatcttcc

SEQ ID NO: 16840 - DNA, 120 bp, synthetic construct
  source 1..120: mol_type = other DNA
ttctgaaaaattttgagtcattatcttttcaaatattgtttcttctccacttttcacctctctgtcttttgtgtgtgtgtgtgtgttctttttctatattttgtctctgcatgcttcagt

SEQ ID NO: 16841 - DNA, 120 bp, synthetic construct
  source 1..120: mol_type = other DNA
ttctttaaccttacttatctttttggcctctctgcagtttttaccaaaaaggcagtgtctttaaggataaagtggcccccaaagtctgacggtcttgatttccttctcttggatcttggc

SEQ ID NO: 16842 - DNA, 120 bp, synthetic construct
  source 1..120: mol_type = other DNA
gaaccccaaattcatatgttgaaatcttaactcccaagatgatggcattaagacgtgaggcctttaggaggtgttatgatcatgagggtgtagcccttaagaatgggattagtgccttat

SEQ ID NO: 16843 - DNA, 120 bp, synthetic construct
  source 1..120: mol_type = other DNA
gtacgtaaaaataaatcaacaaaacatacttgaaaacttcaaagcaaaagttgtaaaactttatgggaagacattaacaaggatttaaataaatgaatgaataaatagagaactagacta

SEQ ID NO: 16844 - DNA, 120 bp, synthetic construct
  source 1..120: mol_type = other DNA
cccaggaatctccaaaaggaaccagccctgttgacacctgattttagctcagtgaaactgatttcagacttctgaattccagaactgtaagagaataaatgtgtgttgttttaagtcact

SEQ ID NO: 16845 - DNA, 120 bp, synthetic construct
  source 1..120: mol_type = other DNA
cataacagcattaagttagaaacaacacaaatgtccaactggataggaatttttatatattcaaataatagaatattaactgttaaactagagtctcatgcatgacatgagtgaatctca

SEQ ID NO: 16846 - DNA, 120 bp, synthetic construct
  source 1..120: mol_type = other DNA
tgagagttacaagaatggaatatgggttgcactatttcagcggaaccatgtctttatggggtagtgtggtacaggacagggaccaggactgtcacaacctagaattcaaatcttggatta

SEQ ID NO: 16847 - DNA, 120 bp, synthetic construct
  source 1..120: mol_type = other DNA
tcagtcctctgtatagatctcatatcctgcaaccttgtactagttaactacacttactttgtaggctttgtttaaaatgaatattctccagcatcgtctccacagattttgattcaataa

SEQ ID NO: 16848 - DNA, 120 bp, synthetic construct
  source 1..120: mol_type = other DNA
aagctaaaattgagttcataatacaaacatttcaagccatctgaagaaacaatctagtaggaggaaaatcagtgattactacaaacatgtgagctggtatcctaagagtttgaggtaata

SEQ ID NO: 16849 - DNA, 120 bp, synthetic construct
  source 1..120: mol_type = other DNA
aatcttcctgataaagttaggtatttccacattccattagaaagtcaaaatagatgaaagatcagtttcaagagccagatcaaaccatcagcaagtctttataaatatctagcatacaga

SEQ ID NO: 16850 - DNA, 120 bp, synthetic construct
  source 1..120: mol_type = other DNA
tcctgtctctgaacatatatttacataatggaacactgtacaacaatgaaaatgaaatacaactagagcaaaagtagcaacatagatgagacatgtaggctcatttcagatatgtacatt

SEQ ID NO: 16851 - DNA, 120 bp, synthetic construct
  source 1..120: mol_type = other DNA
agatgaaaatacacaactagaaacaaagtccaacatgggtctcactgggctaaaatcaacatattcccagggctgcattccttcctggagaccctggggtagggggaattcattttcttg

SEQ ID NO: 16852 - DNA, 120 bp, synthetic construct
  source 1..120: mol_type = other DNA
ccaggatgtgaattctgtgggagaattcagaattacaaacaaaacaatagggaaatctcacttgttgtgtaatggttgggaacctcctggagagtagccaaccccttggaataaggccaa

SEQ ID NO: 16853 - DNA, 120 bp, synthetic construct
  source 1..120: mol_type = other DNA
tcagggagcccatacttctgcacattcctagactgcctgagcctcttttacacagaaaaaagtgactgcatagatatggaccgaaaacagcacggtgtggcagaataggggaattgctgc

SEQ ID NO: 16854 - DNA, 120 bp, synthetic construct
  source 1..120: mol_type = other DNA
tggattcacaggttttccagacaaataaaatgaaaaaaaatggaggaaagaatatcaaagacacaataaaatttcttagagctgaagtgatgtgagtcatcagattcaaatggcccacag

SEQ ID NO: 16855 - DNA, 120 bp, synthetic construct
  source 1..120: mol_type = other DNA
cattctttgagtgactaggaaccagagcactgaacaaacaggataaaatgtaatcccagaacctatttggctctgcagtgtataatatttatgtaagaagaagacttaacagtggttatc

SEQ ID NO: 16856 - DNA, 120 bp, synthetic construct
  source 1..120: mol_type = other DNA
gtgctcactgctatagagtctcaaagcttccaggacttctcaatggacctagctaggaaatacacacatgcatgtacacatgcatatacacacatttacatgtatatttatttttatatc

SEQ ID NO: 16857 - DNA, 120 bp, synthetic construct
  source 1..120: mol_type = other DNA
aagcactttaaagtttgatctgttataggaagaagtgagaggggcatagcttggctccataattcccctaatcaatataatcaatatcatgtaccgcccatggcatgatcccacatgcac

SEQ ID NO: 16858 - DNA, 120 bp, synthetic construct
  source 1..120: mol_type = other DNA
atgggggtgcagagctctcttcgagatcctgatttcatttcctttggggatatacccagatgagggattgtgggatcacatgacagttctatttatgattttttgaggaatctctatact

SEQ ID NO: 16859 - DNA, 120 bp, synthetic construct
  source 1..120: mol_type = other DNA
tctcaaggctgtaaaaagagatgctgatagcacttgcctcaaaggggttcctaaggtctgacaaagtcatgcaggtcaaacactttgccccatgctcagtcagaactcagtaaataactg

SEQ ID NO: 16860 - DNA, 120 bp, synthetic construct
  source 1..120: mol_type = other DNA
acagtgaatagtcactcaatgtacattttaaaatgtcgtatacatcctagtttcctttagatctcacatccccagatcagcctgtgagaatgaaggctccataagggtagctgccgttct

SEQ ID NO: 16861 - DNA, 120 bp, synthetic construct
  source 1..120: mol_type = other DNA
tgctttcaaaagtatgatcccagcaatccagggtccatgtgcagaagagggtaacacacttcagtttctcttagaacactcttggactgccatcatcaaagaggtctgattagcacaact

SEQ ID NO: 16862 - DNA, 120 bp, synthetic construct
  source 1..120: mol_type = other DNA
tattactcagttctaacatttctgaaaatcaaaacatccagaaatttccttcctggctctgacatcaatatcccttcttcccagttctacaaaacctgcctcatcacacggatccgcgtc

SEQ ID NO: 16863 - DNA, 120 bp, synthetic construct
  source 1..120: mol_type = other DNA
ctgacaagacaaatgtatttaactacaaatcataatatacgtaaccacccactgagagctcatgttccacactgtgtaaagtgcttatacacattaactagttcaatcactaccaccttg

SEQ ID NO: 16864 - DNA, 120 bp, synthetic construct
  source 1..120: mol_type = other DNA
taatccgtttcattacccacaactgctcgtctagatccttccagatcaataagagaaatcatggctctctataacgtcacccagggcaaacagcagttgtctcaaagaggaacagaaaaa

SEQ ID NO: 16865 - DNA, 120 bp, synthetic construct
  source 1..120: mol_type = other DNA
gaagttttctttgatcgaggagacacttgctaatagaagcagaaatgttcccctgctcgctgatgtccgtcaatcagctaggagcagtttaggtaaatacctttaaattctcagaccttt

SEQ ID NO: 16866 - DNA, 120 bp, synthetic construct
  source 1..120: mol_type = other DNA
gctgaagagtccatcagaaagcaaggtggtctctaagcctcttcatcacccttttcttttctttttactttttgagcagagtatcaattagagattgattattagattagcaggaaacac

SEQ ID NO: 16867 - DNA, 120 bp, synthetic construct
  source 1..120: mol_type = other DNA
gcaataccctgtttgtgtacaaggcaactgaagccaaggaagatcaaatggcttgtttaagcttatattgctattggcaaagctagcagttaaactgaggactcctgacttgctcctttc

SEQ ID NO: 16868 - DNA, 120 bp, synthetic construct
  source 1..120: mol_type = other DNA
aagaccagagacatggaaaggtcaggaaggaatcattggtgcacgcagccaggtggctgagctgggctgaggcagggaagagctgtcagtcgtggtaatcttagatgtactggtaaggtc

SEQ ID NO: 16869 - DNA, 120 bp, synthetic construct
  source 1..120: mol_type = other DNA
tccttcattgaactgtgggttatggaaggaaacataaggagaagctcattggaggtaattccagtgttcctacttctgaaatagaaatgggcaggacttacctatggattatccctggcc

SEQ ID NO: 16870 - DNA, 120 bp, synthetic construct
  source 1..120: mol_type = other DNA
aggaaaatgagcctgcataagtcaatggcatttctcacaagtgaccttgtattctaaagtgtcctcgtgtccatgtctcttctgtatctgatttaaatggcaacaattcggcagcgctaa

SEQ ID NO: 16871 - DNA, 120 bp, synthetic construct
  source 1..120: mol_type = other DNA
agtggttaacacagtgactgatgcatggaaattgtgacctatatatgtgtcccatgacattcttaccattaccttctatataatgtctcacagtgatggtgagtttcttcaggtggactc

SEQ ID NO: 16872 - DNA, 120 bp, synthetic construct
  source 1..120: mol_type = other DNA
gctgctccatcagaaagatgtgttgagggttaaatgtaatcaaggctctagtgcagttcctgggacaaagctggcaactccatatataccggtttttttttttttttttttttttttttt

SEQ ID NO: 16873 - DNA, 120 bp, synthetic construct
  source 1..120: mol_type = other DNA
aaggtgactggcagcattccttccacactgctgggcacggcagggcaaattaaagacagctcagtttgcagaaagaaaggaatccatttcttttttatttgatatttttgttatctgata

SEQ ID NO: 16874 - DNA, 120 bp, synthetic construct
  source 1..120: mol_type = other DNA
ccagaaaacaagtcatttaagaaattaaatgttaattaattctcaggctgaggcactaagattttgacctggttgcctttgcctaacatgcctgcattggcatgagcctgtggatgccac

SEQ ID NO: 16875 - DNA, 120 bp, synthetic construct
  source 1..120: mol_type = other DNA
tgctgaggagattaaaaactaagagccatggtcttgagagctagaggaaatactcccatgtccacacttggcctggaacaaatggagccatccaccttcaaatggaaaatggatcatgtg

SEQ ID NO: 16876 - DNA, 120 bp, synthetic construct
  source 1..120: mol_type = other DNA
aaatgctagaaaaacagtggacaggctcttcagtctgacctgaaagtttaccagaagttaaatcttttaactatagaggttgctgaaggagggggaacaaaggaagaaggtgcaccccat

SEQ ID NO: 16877 - DNA, 120 bp, synthetic construct
  source 1..120: mol_type = other DNA
taaagagataggggtgtgagtgtcaggggaggtgaagtggggaaaaaactaaaatcaatgcccatccactgtggctgaattatattctctatagtttagcatctctgataaccattggtt

SEQ ID NO: 16878 - DNA, 120 bp, synthetic construct
  source 1..120: mol_type = other DNA
attaacttatatagcttgcagggactggagcaatgctactaaaaccaagaatataaaagccattatatctaagcccttctttttcctcaatcttcatattttctacaagtatcttttcac

SEQ ID NO: 16879 - DNA, 120 bp, synthetic construct
  source 1..120: mol_type = other DNA
tagttcgctgattggccagagatatgtaggttttctcgatggtcaaggaattcttatccagccttatattcatgtctatggcagctccatagagagatacaaacaccttttcacctagga

SEQ ID NO: 16880 - DNA, 120 bp, synthetic construct
  source 1..120: mol_type = other DNA
acatttctgctccattcactgttgtatgaaccagtcattcaggaaatcaacaaccctttatacattttaaatgttctttaggctcaataactttggatgcagaaaaaactttccccaaag

SEQ ID NO: 16881 - DNA, 120 bp, synthetic construct
  source 1..120: mol_type = other DNA
accatgctggaattgcctatgtcttgcaaataacttcaaaccttgaatttgataattattgactggttagacacttggtgaaagaaactcaattttttggggggggaaaggtacttgcat

SEQ ID NO: 16882 - DNA, 120 bp, synthetic construct
  source 1..120: mol_type = other DNA
gtgctctttgctttagatttcagccatttaaccataatatgcctaagtttggttttctttgtacttgtaccaccacaggcttgctcagtgtttataaacctctggattaaggtcatgtat

SEQ ID NO: 16883 - DNA, 120 bp, synthetic construct
  source 1..120: mol_type = other DNA
tattaatagcatggtagcagtgcatgaagagacagatcagtggaatagaatgaagtcaaaacagacccaaatgcacactggaatttagtatattataaaggcagtatctcaaatcattgg

SEQ ID NO: 16884 - DNA, 120 bp, synthetic construct
  source 1..120: mol_type = other DNA
gattatattattctctgtgtttttgtggttatctgaaatatgtcattgtttaaaaaaataatcaaagggaataagagatccaagggcttatttcacgcaacctaggggtcagagagacta

SEQ ID NO: 16885 - DNA, 120 bp, synthetic construct
  source 1..120: mol_type = other DNA
agggggtcccaaagacctgggttcaaattccagctttactgagctgtaaagtcatttaacgtctctgggcttcagtttacttatcactaaaatgaagggagttaaagaaacgtcccttta

SEQ ID NO: 16886 - DNA, 120 bp, synthetic construct
  source 1..120: mol_type = other DNA
taatttctcaagactcagttgaaaagtgcaaaacttcagcaattaaccatttgtttgtctcttcagaggcaaatgatacttccagttatttgtttggttttggatttggttttggtttgg

SEQ ID NO: 16887 - DNA, 120 bp, synthetic construct
  source 1..120: mol_type = other DNA
agcagcagttcatttcatgtaaggaaaaatgctataagacagtttacctctgcaatcttcagaatatgactttattcattcaccaaaggtaacatcagaacctcaggaggtagaaaccaa

SEQ ID NO: 16888 - DNA, 120 bp, synthetic construct
  source 1..120: mol_type = other DNA
ctcaacaaatagcgttttttgaaattataccccaacatatgtagagttgtttatttataaattatacccatatgctagattgctcatgtgtcaaatgtattaaaaatacccccaaatgtt

SEQ ID NO: 16889 - DNA, 120 bp, synthetic construct
  source 1..120: mol_type = other DNA
ttgacctaattgacatttatggaaggtgtacccttttgaagcgtacagggaacatttaccaaaatggaacatattttgggtcataatgtaagtctcaactaatttcaaggcctgaaatcg

SEQ ID NO: 16890 - DNA, 120 bp, synthetic construct
  source 1..120: mol_type = other DNA
gagaattaagaagagagaacaattcccaacttgttttatgagaccaatttgttttgttctgacaagggcattacatgaacagaaaattacaggccaatctttctcattaatttggatgcc

SEQ ID NO: 16891 - DNA, 120 bp, synthetic construct
  source 1..120: mol_type = other DNA
ctgataggacaataaggacatcaatgtgaagacaagcataccaagaaatagtctagtgccaaggctagcctttgccctaatggcttttgtgaaccttcggatttctgctttaaagattgc

SEQ ID NO: 16892 - DNA, 120 bp, synthetic construct
  source 1..120: mol_type = other DNA
gactagtatttagaatactgagtaataaaaggtacttacaaattaataacaaaagaataagcaaagaaaggtcttgaacagacacttaaaaagataaatgaatggccagtaagcacctga

SEQ ID NO: 16893 - DNA, 120 bp, synthetic construct
  source 1..120: mol_type = other DNA
ggctgtgcgcctctgttttctccctacaacgcccttctgcagataatctgggtcaatcaacatgaatgggtgaagcagaagtgagaaggaaatgagaaaaagcataaaataataaatggc

SEQ ID NO: 16894 - DNA, 120 bp, synthetic construct
  source 1..120: mol_type = other DNA
ttcttaatatgtagaacttttaacaaagaatactgcatacctgtgtcataacacacgataagtcttccactgtgatcgcccacactctgtggctcaaactccacttccagttgcatggac

SEQ ID NO: 16895 - DNA, 120 bp, synthetic construct
  source 1..120: mol_type = other DNA
gctgtagaagccagcctccggggctagagcaaactgaagaagggtggagagtgcatttgaaaaggcaaactgaggacaaattctgtgtcttgaaaatataatttgggatgcagacattgt

SEQ ID NO: 16896 - DNA, 120 bp, synthetic construct
  source 1..120: mol_type = other DNA
tactccttctgaagccacctctcacagcccagactcaaagtcacctcttaaatagaatctttcctgattctcccttttgtgaatagtatctctttcctctcagagactataacttccctt

SEQ ID NO: 16897 - DNA, 120 bp, synthetic construct
  source 1..120: mol_type = other DNA
cattttactaaaatgcagacaggctgaacgggctagaaaatatcaagtatcagaaaatgctcttacaaagaagtaaaaggtgttgttcttcaagggtataaggatggttcagtctatcaa

SEQ ID NO: 16898 - DNA, 120 bp, synthetic construct
  source 1..120: mol_type = other DNA
gaacggatccttgtcaggggatctccttagagattctaactcaatatgatgtgaccacaaattcaaccacattctttctcattgaagccatcagcgttctcagttgcaaacaacagaagc

SEQ ID NO: 16899 - DNA, 120 bp, synthetic construct
  source 1..120: mol_type = other DNA
gaaattgccattttggcatggtttttttcaaattcagccaaacagcgcaggaagatatgttcccgcacttgcatatccaccttaggtagattctttttttcatagaaaaaaaaaaatacc

SEQ ID NO: 16900 - DNA, 120 bp, synthetic construct
  source 1..120: mol_type = other DNA
cctgtggcaggcagaactttcctgcaagcagaagaaaaagtgaaagaggatagaacaaaaaaaaaatttggagagataatagctgagattttccaaaattaatgaaagattcaggaagct

SEQ ID NO: 16901 - DNA, 120 bp, synthetic construct
  source 1..120: mol_type = other DNA
ctcacaatggtcaagttaggggactggtaccagatccccgtataaacctgagaaatgtgaaggactccccaaacacactcccatcagcaaaagaaaaagtgtgtatctgagtttttaatt

SEQ ID NO: 16902 - DNA, 120 bp, synthetic construct
  source 1..120: mol_type = other DNA
acacctgctttatactgtcccatggtgtctacactgtggttagtccacaaatactcagattaaaatccagctctatcacttactagctctgtgctcttcaggaaatgatgtgacctctct

SEQ ID NO: 16903 - DNA, 120 bp, synthetic construct
  source 1..120: mol_type = other DNA
aggaagtctaccctacatcagtgaggtctcccagctttgcaactgaagactgtaacaagcaattccaccccccaatgttatggtagcaaattacttgagctgactagatttagctataat

SEQ ID NO: 16904 - DNA, 120 bp, synthetic construct
  source 1..120: mol_type = other DNA
caccgcgcccggccgatgtttctaactaatggcctctttctgcctatactctttgcaatgtgactttgcagctcctccatcaagtaatgagtctccactccacttgctttcagcaataca

SEQ ID NO: 16905 - DNA, 120 bp, synthetic construct
  source 1..120: mol_type = other DNA
tacaaccaattaggaaatgcagacatggtcacggtcctcctccagctcacatcaggatggaggagacaatgaacagatgaataaaggatatgtaatgtacagtgcaactcacatataaat

SEQ ID NO: 16906 - DNA, 120 bp, synthetic construct
  source 1..120: mol_type = other DNA
tgagtgtagtgcatgtctcccccgtatttccatgtcaagagggatttgcccatcttcttgccttctgtatacccagtacctagaacagagcctagtatctagcaactactcaacaaatac

SEQ ID NO: 16907 - DNA, 120 bp, synthetic construct
  source 1..120: mol_type = other DNA
tgggtgagatctaggaacagagtgctcctgccaaggggaactgcaaacatacaagtcctaaggcaggagtgagtcataaaaaggaataaataggattcaagaaattgattaaaactgggt

SEQ ID NO: 16908 - DNA, 120 bp, synthetic construct
  source 1..120: mol_type = other DNA
tactattttcgctttttcttaggcgatcaaatccagccagcatatgtttttttgggaattataaactgaaaagcccctggcacatgtggagactgagcattaactgaggcgttgagagct

SEQ ID NO: 16909 - DNA, 120 bp, synthetic construct
  source 1..120: mol_type = other DNA
cttccttatcttttacctgaactactatagtagcctctgccccctgtatgcatcagggatcagtcagctacgttataaaaggaaaaagagcaaaatcagagcagtttacactaggcagaa

SEQ ID NO: 16910 - DNA, 120 bp, synthetic construct
  source 1..120: mol_type = other DNA
ttaccaaatactggaagcaatcctaatgtccatcagctgatggtacatccattcaatagaatagtacgcagcaatgaaaagaaatgagctactgttacatacaacaacatggttaaatct

SEQ ID NO: 16911 - DNA, 120 bp, synthetic construct
  source 1..120: mol_type = other DNA
gctcaagacaaagcaagatagaattgtgaccgtcaacacctcaccttgtctgtctccctcgtttttgaacttcccactgattcattatgtgtgaagtgctcagaaatcatttctgtaact

SEQ ID NO: 16912 - DNA, 120 bp, synthetic construct
  source 1..120: mol_type = other DNA
ttagaactagggtgtgaccacgctgtcgggagccaaagggaagagacactcagaactgccctggtgccagatcacaattctgcccagggccaagtctttctctgggaagttggaagttag

SEQ ID NO: 16913 - DNA, 120 bp, synthetic construct
  source 1..120: mol_type = other DNA
agatacaccattttttacgcaccactgctgaataataaagaatacagctggtctttgtccctggttcctgtgaggagactctaatccttagcatttcctgaataataggagtgtctttgt

SEQ ID NO: 16914 - DNA, 120 bp, synthetic construct
  source 1..120: mol_type = other DNA
ggcaggtgtgggggcaatttcttggtcctagcacttccatatatcgactttcttttctggctgctaagtgggaggagtgtgtgtgtatgcatgtgtgtgtgtgtgtgtgtacatgcatgt

SEQ ID NO: 16915 - DNA, 120 bp, synthetic construct
  source 1..120: mol_type = other DNA
tggcactgctctaagggctttatacttatttgctcacttagtcctcacagtatccctctgaacagagtttattgttttcactttgctgataaggaaactgaggcacagacaggttgagta

SEQ ID NO: 16916 - DNA, 120 bp, synthetic construct
  source 1..120: mol_type = other DNA
cctgcctcgtattaactgcaccatctacaaaatctgagctccagccagtgctgctctagattcatctttctttagagagaatgaattattgtagcccctagccctttcaatgaatttcag

SEQ ID NO: 16917 - DNA, 120 bp, synthetic construct
  source 1..120: mol_type = other DNA
tccttctcatatactctctccttttccccttcctttttgtccccttttcctcttccttttagttcttctctttaaatgccttctcactctgcacggggtctagacttgacttctcctttg

SEQ ID NO: 16918 - DNA, 120 bp, synthetic construct
  source 1..120: mol_type = other DNA
accttcaaaggattatgcagaagtagggcgtgtgggttatgtttctggctgggggcgaaatgccaattttaaatttactgaccatctgaagtatgtcatgctgcctgtggctgaccaaga

SEQ ID NO: 16919 - DNA, 120 bp, synthetic construct
  source 1..120: mol_type = other DNA
cttactgagtccaaatcacagaatggcccataaatttgctaagtaatttaggtttcctggccatcagttcctggtctcttccatgaaggacttgagccaggcgatggctaatgtccctat

SEQ ID NO: 16920 - DNA, 120 bp, synthetic construct
  source 1..120: mol_type = other DNA
tggggacaaagtgacaactttaaacttactgaccatctgaagtatgtcatgctgcctgtggctgaccaatacgattgcataacgcattatgaaggcagcacatgccccaaatggaaggca

SEQ ID NO: 16921 - DNA, 120 bp, synthetic construct
  source 1..120: mol_type = other DNA
agatgatgatgtaaaggcaggatctctggacttgctgagtccaaatcatggcttggcccaaacatttgctaagtaatttaggcttcctggccattagttcctggtctcttccatgaagga

SEQ ID NO: 16922 - DNA, 120 bp, synthetic construct
  source 1..120: mol_type = other DNA
caaaatatattctacattgtggtcacgtcaactccacaaggctggggttaatggcagatggatggcaaattgcaccaacctcatcaattataaccatcatgcctgacaatggggaaaatg

SEQ ID NO: 16923 - DNA, 120 bp, synthetic construct
  source 1..120: mol_type = other DNA
gataccacatgacataattcgcattaaaatgtcaacaggctgacaatttatagagtcaatccacggaaggtggggaggactaagactcagtaattgtttaattcctgctgaaacccacgg

SEQ ID NO: 16924 - DNA, 120 bp, synthetic construct
  source 1..120: mol_type = other DNA
tagtttcaccagcaagggcaaaatatattgacagtcctttcccacaaggtgtaaaagttctctgctttccccaaatatacctctggatttcctatctgttgaaggaaaaaccagcttcga

SEQ ID NO: 16925 - DNA, 120 bp, synthetic construct
  source 1..120: mol_type = other DNA
cttcctcctatcctcagatggtctttgcatgcatgcagccattggcactcccattgtacgcaaggaaaccagcccagggtcacacagctggtcagcagcaacacagctggtctcaaatct

SEQ ID NO: 16926 - DNA, 120 bp, synthetic construct
  source 1..120: mol_type = other DNA
ctatgccacttagtcctgaacagagaatttttggtataaattggaggaagctttttttttttttttttttttcttttctcacccccgaaacgagtctccctctgttgcccaggctggagt

SEQ ID NO: 16927 - DNA, 120 bp, synthetic construct
  source 1..120: mol_type = other DNA
agagctagccagcagctagcatttccctatgtaacacaccctgtaatgaccctgccccgaaggagtctccttataagccctacccctcattttctccagaattaaatgacaagtcacatc

SEQ ID NO: 16928 - DNA, 120 bp, synthetic construct
  source 1..120: mol_type = other DNA
gatgaaacgccacagataacaggcatattgtaagtcaggctttgtacgttttccaaaactcactacagggatcccctttgaggtgcagaatcttgtatcacaataatcacgattccttgg

SEQ ID NO: 16929 - DNA, 120 bp, synthetic construct
  source 1..120: mol_type = other DNA
gactttgacaaaagggccctggaaagggtgccagctgccagccaacgaccaccgcagcccctcctggggtcccaggcaggagtacccaaccacggaggtcacagctgggagcacccctgg

SEQ ID NO: 16930 - DNA, 120 bp, synthetic construct
  source 1..120: mol_type = other DNA
atttgtaagtattttctctcattgtataggctgccattcaactttcttgatagtgtctgatgcacaaaagtttttaattgtgatgaagttcaagttatctggtcaggcgcagtggctcat

SEQ ID NO: 16931 - DNA, 120 bp, synthetic construct
  source 1..120: mol_type = other DNA
agcctgcgtgacagaccaagaccttgtctcaaaaagcaaaacaaaaccaacaccaaaaaccactttttgacatggagaaatactgtatgtgcaagacacactgaagaggaacagaagatg

SEQ ID NO: 16932 - DNA, 120 bp, synthetic construct
  source 1..120: mol_type = other DNA
tttctctcagcattttacatttattgtttcatttgctctagtttctactgcttgctttgttgagaagccagctgtcattttccttccctcaagagaatgtctctttttctctgcctgctt

SEQ ID NO: 16933 - DNA, 120 bp, synthetic construct
  source 1..120: mol_type = other DNA
tatataacacagtacttttgaactttctccctacttgtctaatagcagatactttaatgcctttttaaggtgcctttctcagtctcagaaatcagcctccatgctgagtcgacctagctt

SEQ ID NO: 16934 - DNA, 120 bp, synthetic construct
  source 1..120: mol_type = other DNA
ataaaataaaaatatcaaagcctttaaattagaacctgtaacagctatgatctaaaattagtgaattatattggaaagcacagagcactactgtacctttcatgaagaaatgacataatc

SEQ ID NO: 16935 - DNA, 120 bp, synthetic construct
  source 1..120: mol_type = other DNA
caccattctcattatgtcccaattaaaccacttcatcagatatagtacatctatttccacaaaactttaagtgcagacaggctcacttgtctctaatcctagaagatgaatagcatgagg

SEQ ID NO: 16936 - DNA, 120 bp, synthetic construct
  source 1..120: mol_type = other DNA
agagaatttagcacatccccatcccaatgcatcagtgactaaaacagagaaggaacttgggtaatgctgtataaatgatacagcaaacaaaggcagtaaagggaaaagcaccaagtactt

SEQ ID NO: 16937 - DNA, 120 bp, synthetic construct
  source 1..120: mol_type = other DNA
ccctcaggagaaaacaaacaaaagatgccaacagtatcagtgcttttacagccttagaaaaatttgaagtcacgcgataacctaatgcctcctttcaattggagacactctgctgcagta

SEQ ID NO: 16938 - DNA, 120 bp, synthetic construct
  source 1..120: mol_type = other DNA
cctaggcttattcatttggcatctcctaatacgtgctaggacaactacaagtctttagtaaaaatccaacattggtccaataatggtttctcatagttcaaattaagatgtcatgctaaa

SEQ ID NO: 16939 - DNA, 120 bp, synthetic construct
  source 1..120: mol_type = other DNA
ctagaatacagtttggtgctggtgttaaccatttttacctaaattatgggggaaggaaacagagtcaggcactctatcaaatgcttgttcagattccactttggcatcgaggggaagaac

SEQ ID NO: 16940 - DNA, 120 bp, synthetic construct
  source 1..120: mol_type = other DNA
atattttcctatttttcccccttccactgtctatttcaaaggggtggtggcagggaggaaatatatatttacatcctctgggacacagcaggtagcaatctgccctcttagagtcctaga

SEQ ID NO: 16941 - DNA, 120 bp, synthetic construct
  source 1..120: mol_type = other DNA
agattacatgatgcaaaaaagtcctgaaattaaatataatttctcacaccccagacccgagtacctgcacatgccacaactcttccatactgacccgtggtgagtgcattgtttacttga

SEQ ID NO: 16942 - DNA, 120 bp, synthetic construct
  source 1..120: mol_type = other DNA
aatggcttggagaagtgaaaggagatgggcagaacagatgcagatccttttagaattactgttttaaaacatctcataggtatgtcaatggttgaaaatgtattagctccctaataaaga

SEQ ID NO: 16943 - DNA, 120 bp, synthetic construct
  source 1..120: mol_type = other DNA
ctgcattgccccaatcccaaaataaatcaatctcaaaaataagaaaaaaatacaaaagaagtgttctattaaagcctcaacttcaggaataagtttgcagatatgtagattctggctaca

SEQ ID NO: 16944 - DNA, 120 bp, synthetic construct
  source 1..120: mol_type = other DNA
gaggaaacaactcacagggtaagactatggaattgttcattctaattcctgttctaccagttaatttgtgctatgttttggaagaagccaatcattaattgcatgaaaatgctttgaatg

SEQ ID NO: 16945 - DNA, 120 bp, synthetic construct
  source 1..120: mol_type = other DNA
agctatctttaaattcttcccgaaaatatctgaattcaaatgaaaaatccttggttgatcacagaacctctgtagcctctggcagaagttttcttcttaagataacagtccagacactta

SEQ ID NO: 16946 - DNA, 120 bp, synthetic construct
  source 1..120: mol_type = other DNA
gtggccaaatgttaaagctgttggagaaagagctcgaagtctcaattgatagaagaccatgatgtactggaatcctaatatatcctggtcaatatgttggcttacaaagataagcatatg

SEQ ID NO: 16947 - DNA, 120 bp, synthetic construct
  source 1..120: mol_type = other DNA
ggcagtatcagtgggatggaatctcttattcctctcgagccaccattccaaattttgtacaataacacacctccagcctatcaaataagctgatctaatgtctgaagttagagcaaccct

SEQ ID NO: 16948 - DNA, 120 bp, synthetic construct
  source 1..120: mol_type = other DNA
ccattagtccaagtagatacaacagaaggtagtctagaatagggagttaattataaacggaagaaaacggcaaatatctttctagttttccttttcctaccagtccttcacctttcctac

SEQ ID NO: 16949 - DNA, 120 bp, synthetic construct
  source 1..120: mol_type = other DNA
aaattccagtttagaagcagatttggttgtgggtgtggtcagtgacctcagtaaaactggagaggattattttgcattgaataaacttatagacagaaaaaaaaatgcaggtccttctgc

SEQ ID NO: 16950 - DNA, 120 bp, synthetic construct
  source 1..120: mol_type = other DNA
cttgcaaagcaaatgacatcattgtttgtcactttaactagttctctgttcaacagtggacctactgacagatgcccaaataaagatcacacactaacataaaaagatgtaactgcagcc

SEQ ID NO: 16951 - DNA, 120 bp, synthetic construct
  source 1..120: mol_type = other DNA
caaataacaaaatattatgaccaggtaaccagaggacttttgctggaagctaactaccaatattagaactcaaccaaaccaaacatacaaccaactgtaacaccaaaatacagcctcaaa

SEQ ID NO: 16952 - DNA, 120 bp, synthetic construct
  source 1..120: mol_type = other DNA
gttgttctgtgccatggttcagcatgatcgtaaatgtgtggctctcctcatagatgccttttggtaattgtagccctacagtgattgctctcctgtgcttgcaagtaattatttattttg

SEQ ID NO: 16953 - DNA, 120 bp, synthetic construct
  source 1..120: mol_type = other DNA
gtcaccctgcaggaaggagaggaagtatctctaggcctgaaaggggtgccagggcctaggggaccctgacctggtggagtctagggaggggtgcggagaaatggtaagcatgggcatagg

SEQ ID NO: 16954 - DNA, 120 bp, synthetic construct
  source 1..120: mol_type = other DNA
aaattcagaagattttcaataacgaacgggcagttaggagcgtgttggaatttagagccaaacggtcacggggggactccacggccaggcagcccagaccccagaggcagccccgcggcc

SEQ ID NO: 16955 - DNA, 120 bp, synthetic construct
  source 1..120: mol_type = other DNA
aactcttttccagtctctgggacctagactggctcccacatccccttctctgagaagttggccctggctctcctctccgcagagctggaatccccaggtacaactgagtccaatgaactg

SEQ ID NO: 16956 - DNA, 120 bp, synthetic construct
  source 1..120: mol_type = other DNA
tggggttatcagattttcttcccacttcccctctcgccaccagtctaacaaaggcacgtgggccagtggagctcacgtggttctgctgccctttttatagctgaggacaccaaggcctga

SEQ ID NO: 16957 - DNA, 120 bp, synthetic construct
  source 1..120: mol_type = other DNA
ggcatgttctctcacccacaacgctctgcccaggacctccgacgtggtcgtggctggggagtttgaccagggctctgacgaggagaacatccaggtcctgaagatcgccaaggtacccag

SEQ ID NO: 16958 - DNA, 120 bp, synthetic construct
  source 1..120: mol_type = other DNA
tctctgctctcatctactaaccccactccttcctgggtgtcagagtcgccttgttgcaaaattccatggccaatgtcagagccaatggctcttggagttgtgcagtgcacaatctggacc

SEQ ID NO: 16959 - DNA, 120 bp, synthetic construct
  source 1..120: mol_type = other DNA
ccagtatgctggtggagaagagcttactggtaagaagcagagctgccgagcagccagggctctctggtgggacactcaacatttcctttcatggctaggggtgaggactgttgattttga

SEQ ID NO: 16960 - DNA, 120 bp, synthetic construct
  source 1..120: mol_type = other DNA
ggctagaagcaccaatacaaagtagaatagagatggcatgagtagacatacttgtctttttcctatcttaggagaaaagcattcggtttttcatgattaagtatgacattagtggtgggt

SEQ ID NO: 16961 - DNA, 120 bp, synthetic construct
  source 1..120: mol_type = other DNA
tacttcaaaatagctttgtttccaaaactgttttagtaagcctaaaggagcactaaaaacgacaactgatctccaaagtaaactgaggcacacactgaggggtgtgtttctgggtgggca

SEQ ID NO: 16962 - DNA, 120 bp, synthetic construct
  source 1..120: mol_type = other DNA
agttaaaggcctcagctctggaaatcaaagctgtgaatgggaaatggagaagcccaggggtgcaaagtgctagtgattggcatgtttgtcacaagagagccctgaaaagagtaagagtgg

SEQ ID NO: 16963 - DNA, 120 bp, synthetic construct
  source 1..120: mol_type = other DNA
caggtatgagccactgcgcctggcctgacatttctacttttcattcccctctttaaagaacttaatgaacagtaacacagagaaacaaaggagctggacaatgagaagcgctcttacgtt

SEQ ID NO: 16964 - DNA, 120 bp, synthetic construct
  source 1..120: mol_type = other DNA
cacaacaggcattatctcctccactaaaagagaaaagcagatagatgtaagtgcattaatactggggagagacacaaagtgcatggtccctgaacttcatatctgggcctttcaaatgtt

SEQ ID NO: 16965 - DNA, 120 bp, synthetic construct
  source 1..120: mol_type = other DNA
tatatctgatacatttctaaggagtctgcatcctctactcaacattaaaggacacgagaaggaaatgtcctcactactccagttttcactggaaacggcatgtaaagggttgcagactca

SEQ ID NO: 16966 - DNA, 120 bp, synthetic construct
  source 1..120: mol_type = other DNA
cctcaatatgacactgaccagttaagaatggaaaaggcctatcactgccctcaatatggctactagatttggtaattcagccagacttcctactaatttattacaacgctgtttatttct

SEQ ID NO: 16967 - DNA, 120 bp, synthetic construct
  source 1..120: mol_type = other DNA
ctggccgggcgggggctgtattgtgaacatttttaagtacggtctgaaatactctttcagtcagtcaacaaataagtactcctatgaggtacaaagctatgatggcaaactttgttaagg

SEQ ID NO: 16968 - DNA, 120 bp, synthetic construct
  source 1..120: mol_type = other DNA
aggtcttgacaagtgtgtacacacacataaaccaccaccccagtcaagataatagaatattcacatctgtaagaaattttccacctgccccttggctcaggcaatttgtcagtcttacta

SEQ ID NO: 16969 - DNA, 120 bp, synthetic construct
  source 1..120: mol_type = other DNA
tgccaagagctctgcagttattttattcaattttcctaacagctcttaagagtacatcttattattcccctttcacagatgaggaaattgaggttcacagaagttaagtctattagtttg

SEQ ID NO: 16970 - DNA, 120 bp, synthetic construct
  source 1..120: mol_type = other DNA
ttaactagtcttatttctgagaatcaaaccggtggtcttttcagtgatcagtcaccccattaaccacacatgaatggcacaagtaggaaatgcctgcttcaataccaagaagctggtctt

SEQ ID NO: 16971 - DNA, 120 bp, synthetic construct
  source 1..120: mol_type = other DNA
aaaccagtggactgatggatgcgttacagccattgtttccaagtgtattagtttctgctggccgctgtaacacattatcaccagtgtagcacctaaacaacacaaatgtattgtctttca

SEQ ID NO: 16972 - DNA, 120 bp, synthetic construct
  source 1..120: mol_type = other DNA
gtagcttgattctatttataatgtactcacaccttaaccaatagcctcacagatggcatatgagaatactcatactcagtgctgctaaaaacagcctgctgcctgaacaccagagtgtct

SEQ ID NO: 16973 - DNA, 120 bp, synthetic construct
  source 1..120: mol_type = other DNA
tatcatacttaggaaaatgccaggttgtaatcattcactgggagaaacaaggggttgaacgttgttatcgcgcaaaggaagctgggcctagtaaaggaatgtaaatactaaaatgccagc

SEQ ID NO: 16974 - DNA, 120 bp, synthetic construct
  source 1..120: mol_type = other DNA
aggcatgagccatcgcgcccagccagacttgtatctcttaatgagtttaactacatttaaccatgtatgtgtcagtcctactatgcaccttacagctcactaaccctgtttaataatgta

SEQ ID NO: 16975 - DNA, 120 bp, synthetic construct
  source 1..120: mol_type = other DNA
aaatttggggaattagtgtgtagacttctcttgtagggagtcattattactctaccacaaccactaattctggacttcacgttccctcatccatagagcagggataacaatatcctccag

SEQ ID NO: 16976 - DNA, 120 bp, synthetic construct
  source 1..120: mol_type = other DNA
ggcctttttaaccccatatacgaagcaaacctatgtgtatgtgtttgtgtgtgcatcaattcatatggtcctctgcagccttgcaaagtcgattcctgacatttccgtagactgtttttt

SEQ ID NO: 16977 - DNA, 120 bp, synthetic construct
  source 1..120: mol_type = other DNA
gatggtgccaagctattattataaatgaactgaagccacaacagaagtctgctaccttgttcttatctgcatgtttctctctttccagcctcatcttctactaccttcttctactcccac

SEQ ID NO: 16978 - DNA, 120 bp, synthetic construct
  source 1..120: mol_type = other DNA
ttcatagtctcaactatgtctcaagactgcccagcagtatttctgtttactcgatctaatttctcttccattcctcacagtggcaatttcaagcttctcctttttccccaagccccataa

SEQ ID NO: 16979 - DNA, 120 bp, synthetic construct
  source 1..120: mol_type = other DNA
tcatagggccggccatcccctttgctctgggtgagatctgtctttgcttctggtgattctgatattcactatcgagaacgattgctttaaaacacatcagatcaaagttttctaaaatca

SEQ ID NO: 16980 - DNA, 120 bp, synthetic construct
  source 1..120: mol_type = other DNA
atgtacaagtgcacaggggatgggaggggggctccggaagatccctaacccattgtggacacaccatttatgttagtggaatctggtaagagtgattgaggagagagcattgggtgaatg

SEQ ID NO: 16981 - DNA, 120 bp, synthetic construct
  source 1..120: mol_type = other DNA
aaaatcagacccttagagagaaggaagaggtgggacagggaaagcaagggaatggaagggtgagaagggaagatactgagaaagaagaaagggaaataaagaaaaaggaaagaagtgatg

SEQ ID NO: 16982 - DNA, 120 bp, synthetic construct
  source 1..120: mol_type = other DNA
tctggtgaaaatctccttcaaacatgaagggggaataaagactttcccatacaaacaaaagctgagaaattttatcaacaccagatctctcccacaagaaatgcctaaaggaagcacttc

SEQ ID NO: 16983 - DNA, 120 bp, synthetic construct
  source 1..120: mol_type = other DNA
aaagcaaaagtataaaaaggtaaaaagatcagtggttgctagaggttccagtggaataaggggaaggtcaaataggtgaggcataggagactttttagggcagttaaaactactctgcat

SEQ ID NO: 16984 - DNA, 120 bp, synthetic construct
  source 1..120: mol_type = other DNA
aaaatgggtagaaaaactacctctcacgactgccatgaggatcacacaaggtactttggaaactccaaggcctcatctcagggaagtacttatactctaaaactttcaaccttacagctt

SEQ ID NO: 16985 - DNA, 120 bp, synthetic construct
  source 1..120: mol_type = other DNA
atacttaaagaagccagacaaaagggagcacacattgtatgatcacatttatataaaattgtgaaaatgtaaactaatctgcactggcagaaaacagatcagtatggttaatgagggtag

SEQ ID NO: 16986 - DNA, 120 bp, synthetic construct
  source 1..120: mol_type = other DNA
ctgtattcccaccagaagcaacgattcagcatttgctaatccggtgttcgagggcaactttatagaatgtaataaaggtaatgagaaccacaagtaacgagaatcaactgtggctactca

SEQ ID NO: 16987 - DNA, 120 bp, synthetic construct
  source 1..120: mol_type = other DNA
gagctcataaagcttcagtccttgtccacttttattcccatgacttaagtggaaacctgaacgtggtttaacaacttaaaaacaccatgtgctatactgatcaaaacttccaccttcctc

SEQ ID NO: 16988 - DNA, 120 bp, synthetic construct
  source 1..120: mol_type = other DNA
actcataagttcatctagttctgaagggttactcagtgtcatcttgatcagccaacctgcaaccaaaagacaaccttatattccacattaactttttaaaaagtcaaattcatccaaaac

SEQ ID NO: 16989 - DNA, 120 bp, synthetic construct
  source 1..120: mol_type = other DNA
gttcttgcaacttagctgtggctcagaaaaaaacaaaatgaaaactttagaatgttccagtgacagtgaagtaccctgtatcagataacaattataagctctgggccaggcgtggtggct

SEQ ID NO: 16990 - DNA, 120 bp, synthetic construct
  source 1..120: mol_type = other DNA
atgatgccattctaaacagtgtggtcgtttgacttcagaaccacatgagaatagtcaccaacatcgcaatattaaaatccactggttctctaacctggctgcgtgctcatttatcaagtc

SEQ ID NO: 16991 - DNA, 120 bp, synthetic construct
  source 1..120: mol_type = other DNA
ttttgttattgtttttaaatacatgggtaggactgggtcagctggatgagtcggagaggaaaaaccattgatctgtttctgaaatcagatctgcaaatggtggccttcttcgtacgtgga

SEQ ID NO: 16992 - DNA, 120 bp, synthetic construct
  source 1..120: mol_type = other DNA
tgactttctagctgtgtagctttgagatgtcccagtacctctctaagccttggtgttctcatctgtaaaatggaagtgtcagagcaggtattaaatttggtgaagcttgagaagtacttg

SEQ ID NO: 16993 - DNA, 120 bp, synthetic construct
  source 1..120: mol_type = other DNA
tatcactgtcaccatcaccatcatcaccatcaccttcatcatcaccatcatccccattaccactacgctattatcactgtcaccatcaccatcatcaccatcaccttcatcaccaccatc

SEQ ID NO: 16994 - DNA, 120 bp, synthetic construct
  source 1..120: mol_type = other DNA
gccggagctttcctctccgctcttttcggagtaatccgtggatgatggaggagcttggcaagcatttcagcaaagctcttttttcttgttgaggcttgaaagtaatcgcctccgtgtatt

SEQ ID NO: 16995 - DNA, 120 bp, synthetic construct
  source 1..120: mol_type = other DNA
taaccctccttccttctttttaactgctgtttgctgttgcactgtgggggccacagtgtaagcacttctctattgatggacatttagggggtttctggtcaccttttttattttttttga

SEQ ID NO: 16996 - DNA, 120 bp, synthetic construct
  source 1..120: mol_type = other DNA
tgtcccctcatcatagtgacacgtgccagtgcctcccctgccactaatgcctggtgcccaactcctcattgcacatgtatgcctctgtccacagcagcctgtcacaaacacacatccatt

SEQ ID NO: 16997 - DNA, 120 bp, synthetic construct
  source 1..120: mol_type = other DNA
tctcttgtccccccagcctttctggctctcttttctctttctcgtctcatttgtctcacaagtgccttttgagggtggctttctctacagccagaagcacctgctcatcagatggtcctt

SEQ ID NO: 16998 - DNA, 120 bp, synthetic construct
  source 1..120: mol_type = other DNA
ctttgtttaattttaaattttctctcggtgctccagtttcctcatctgtcacacaagaaccatagtatccctcgcccagttagtgtgatgctccagtgagtaggagacacaacacatgga

SEQ ID NO: 16999 - DNA, 120 bp, synthetic construct
  source 1..120: mol_type = other DNA
tcagaaaccagctcaagcaaaaaaagagaatttactggaacgtgtggctgagatgcatactgtgtagctcacagcatccaagatgcaatgcctttcccatgctctcttcatctttctgcc

SEQ ID NO: 17000 - DNA, 120 bp, synthetic construct
  source 1..120: mol_type = other DNA
agctctcagcctccagtgtttacattgtaaggggaggcctttggaccaggtgggctcccatgtcccaggtgcttggatgctcaagcccctggttcctgggttttctccacttgttcttga

SEQ ID NO: 17001 - DNA, 120 bp, synthetic construct
  source 1..120: mol_type = other DNA
tggcctctcccttgctcccaggatgagctccactggggcaccagcatgagaggacgtggcctctcccttgctcccaagatgagctccactggggcactagcatgagaggatgctggcctc

SEQ ID NO: 17002 - DNA, 120 bp, synthetic construct
  source 1..120: mol_type = other DNA
aagttaatagcacagttgatccatattcccaggtactggtgatttccatctgaagagaacaagatgaggctttgtcactctcaccccagactatcctccaacatcctttaatcaccttta

SEQ ID NO: 17003 - DNA, 120 bp, synthetic construct
  source 1..120: mol_type = other DNA
gttgctgtaggcctaggaataccatgttcaaagtatggaagattggagcattggtaagaatgagctcttgaattctaaggcagtgctatctctagtctctttagtgttttctgccaggtt

SEQ ID NO: 17004 - DNA, 120 bp, synthetic construct
  source 1..120: mol_type = other DNA
ctagaatttcaaaaacagtcagagaaagcaactgtgagaagatcacagcttctcatcctgttttgagtctcaccctcctctttgccctcacaaaggatttcagtgattatgttcctgaca

SEQ ID NO: 17005 - DNA, 120 bp, synthetic construct
  source 1..120: mol_type = other DNA
aacagttgtttttaagggtattggacaagggtcatgactgcttagcaaggaagcatcctctacttgtgcatggcttcaaacgcttctaaattaacaggagtatgaaccatctgaggattc

SEQ ID NO: 17006 - DNA, 120 bp, synthetic construct
  source 1..120: mol_type = other DNA
tctgaggaagcccaaggaggtcatcatggagtgagggggagataatagaagatgaacttcaaaaacgaagatgtgaaaaattgcattgatccttgtagtccatttggaagggtttagatg

SEQ ID NO: 17007 - DNA, 120 bp, synthetic construct
  source 1..120: mol_type = other DNA
gtggccatacaggtccacccctctgtatggctctgtgcattaatgagcagctcttcttagctcagcgtgctcactgtctttaggaatggtttctgctgaatccattgactgcacaataag

SEQ ID NO: 17008 - DNA, 120 bp, synthetic construct
  source 1..120: mol_type = other DNA
gggctggcacaataagtgaattccaatatgtgatttcctgctcatttgatctctgagtgtgactcctgggtcaggccattaggaaccctcctttgtcttttcatttttgtatttatcaga

SEQ ID NO: 17009 - DNA, 120 bp, synthetic construct
  source 1..120: mol_type = other DNA
ctggatttctagaagtagtagcagtgctttgctttattccacttgcaagtagcggttcaattgaataaacttttatacctaaccaaccaatattttaagccagtctcactctcccctctc

SEQ ID NO: 17010 - DNA, 120 bp, synthetic construct
  source 1..120: mol_type = other DNA
cttagacgaaaaggatctcagggtgggtggcaatgctccttcactgaaatctgcagttatctctacccaaggcttacagtaaattttttgcaaattagaaagccctttgctctctcagta

SEQ ID NO: 17011 - DNA, 120 bp, synthetic construct
  source 1..120: mol_type = other DNA
aatagtagtgccatgactgttgtctgtccaagcatcacttcattcaaaatgcacacactgattccaaccattctttggggctatgcaagttttactggcatctttgggacagataaggca

SEQ ID NO: 17012 - DNA, 120 bp, synthetic construct
  source 1..120: mol_type = other DNA
tttctcaggaaggaaagcgctagtgtgactggacaatgctgagacgcccaagaagatgattgaccttcaattacattgaagggaatgactgaactatttatctgtgagggattgtaaatc

SEQ ID NO: 17013 - DNA, 120 bp, synthetic construct
  source 1..120: mol_type = other DNA
gcagactcagggttacttgctgttgcctgattgattttatgatcaggcacttactgggttgtctagggtaacccagtaattgctgtcatccctctacctcttttaaaatctattgttttg

SEQ ID NO: 17014 - DNA, 120 bp, synthetic construct
  source 1..120: mol_type = other DNA
ggcgagctggagtataatgttttgggtagcatggcagatctttgtggggcagtgtgctgaaaccagcttaaatctctgactgccgagttaatttatttcattcataatattctgttcgaa

SEQ ID NO: 17015 - DNA, 120 bp, synthetic construct
  source 1..120: mol_type = other DNA
ggacagaaactaatcatgggtgatgggtctgatttcacattttgacagcatagttcatttctcccaccattaagaaacaggcaacctcagacagacacttggtaattaaatctagctcaa

SEQ ID NO: 17016 - DNA, 120 bp, synthetic construct
  source 1..120: mol_type = other DNA
ccactgcacccggcccaattctgttaatcattttaaaaagcagttgtatcagtggtcgtaaggcaagagaaaggttaggatataacaccatgatgggtcaagcaacactatcacatttga

SEQ ID NO: 17017 - DNA, 120 bp, synthetic construct
  source 1..120: mol_type = other DNA
acatttaataaatgtggagtctgccaaatcaggtcggcagtttacttctcctgtccccggttcaataactcacttactggggttctggaggatagcagtgagaagatggggtaaaaaatt

SEQ ID NO: 17018 - DNA, 120 bp, synthetic construct
  source 1..120: mol_type = other DNA
acaatatattatcctacagagctagaagtcagaagtccaaaataagtctcactgggccaaaaccgaggtgtcagcaggtctggattatttgtgagggctccaagggagaatccattttct

SEQ ID NO: 17019 - DNA, 120 bp, synthetic construct
  source 1..120: mol_type = other DNA
aactgtccatatgacaagcctgcttttaggctttgacattccagcaaggaagcaggtgctgctgacagaaatgtggtagtttgagagaacaggattttaaagaagaacgaacccaattat

SEQ ID NO: 17020 - DNA, 120 bp, synthetic construct
  source 1..120: mol_type = other DNA
gttatctcttgattatatgctaaacaaaaggtggattattcttgggttttccgggaaaggggtgggcagttcccagaactgagagtttctcccccttttagaccatataggtaacttcct

SEQ ID NO: 17021 - DNA, 120 bp, synthetic construct
  source 1..120: mol_type = other DNA
tcttaggtctttgagaaatgtccagactgctctccgcaatggctgaactaatctacattcccaccagcagcatatatgtgttcccttttctcctagttctaccaacatctgtaatttttt

SEQ ID NO: 17022 - DNA, 120 bp, synthetic construct
  source 1..120: mol_type = other DNA
gaaactccataatgtttagtaatccaagtcagtttgcagaagcagtcaggagaatgggttcttccatcactcagtccaggtttcctaccaaatagaatgaatgagacaggtagtactgca

SEQ ID NO: 17023 - DNA, 120 bp, synthetic construct
  source 1..120: mol_type = other DNA
tagttcctctttgacccccagagcagcactttagacataaagttcatctatgctcaggatgacagccaaccagtagctccaaagtgttccttgacaatcattttctactttactgaacag

SEQ ID NO: 17024 - DNA, 120 bp, synthetic construct
  source 1..120: mol_type = other DNA
gccagtggcatccttcagcactgccagccacatgtcctcaccagcaaggtcccatgtcctcaccagcaggtcccatatcctcaccagcaaggtcccatatcatcaccaccaggtcccata

SEQ ID NO: 17025 - DNA, 120 bp, synthetic construct
  source 1..120: mol_type = other DNA
aatgtgtagtcagggttaagaatgacagctttagtctgatacccttttctcagataagtgaactgggactcagagatcttgcagaatttaccagaaaggtacccatgagttagagcagca

SEQ ID NO: 17026 - DNA, 120 bp, synthetic construct
  source 1..120: mol_type = other DNA
gttcataatgaacttcacagtaaagaacacgtttgttctgtaaagcattgaacatctgattgtgtagtggtggtcgtctttaagattagagacctgggaaggctggaatcagccagccag

SEQ ID NO: 17027 - DNA, 120 bp, synthetic construct
  source 1..120: mol_type = other DNA
cgtctctgtgtggatcagtgcacgtctgtgcgtgtgcacgagcgtctgtggatcagtgcacgtctgtgtgcgtgtgcacgagcgtctctgtgtgtatcagtgcatgtctgtgtacgtgtg

SEQ ID NO: 17028 - DNA, 120 bp, synthetic construct
  source 1..120: mol_type = other DNA
ttaaacaatactgaaataccatttcttaccaatcagatttgtaaaaataacaagacagagcactctgtcagtgaggctttggggaaaccggcactcacgcacactgctcacgcaatacca

SEQ ID NO: 17029 - DNA, 120 bp, synthetic construct
  source 1..120: mol_type = other DNA
aaacaacttaaaagcccatatgtagacaagtagtggcttaaacgattgtacattcacaggatacggctgtgaaaaaggagaatctctacgcactgacgtggagagatttccaggacgtta

SEQ ID NO: 17030 - DNA, 120 bp, synthetic construct
  source 1..120: mol_type = other DNA
ctgtgcaggataaggcttccttacgtagtgaacggttgagaatatttgctccccacacccagagccattcaggcatatactgtgcaaaaagaaactaaaaatgaaagagaaaaaggttgt

SEQ ID NO: 17031 - DNA, 120 bp, synthetic construct
  source 1..120: mol_type = other DNA
taaatacaacaaaggaaaaagcctccaggtactactgtactgaatacctacttttgcctaagatcttaccctagattctacatggaacagaaacatgaccaccacccacctacccgactt

SEQ ID NO: 17032 - DNA, 120 bp, synthetic construct
  source 1..120: mol_type = other DNA
aagtgctgggattacaggtgtgagccaccatgcctggagattcagccaatttatgatctcaccatttaacatccgtagcttataaagttactttcttccaaggagactaatcaacataac

SEQ ID NO: 17033 - DNA, 120 bp, synthetic construct
  source 1..120: mol_type = other DNA
aagtatgtaaaacctattatgcacagttcaaagaataataaaacagccacttagccaccagcctacttaacaaaaccagtgtcgtggaagtcctgtatgctgttcctctgattacagccc

SEQ ID NO: 17034 - DNA, 120 bp, synthetic construct
  source 1..120: mol_type = other DNA
gggggtgagggaaaactttttaagcctgatacaaaaaatccaaataaacaaatattgaggctaggtggatcgtgcactttacaaaggtgtctccacagttgattcgccataggaagcctt

SEQ ID NO: 17035 - DNA, 120 bp, synthetic construct
  source 1..120: mol_type = other DNA
atatcagctctatagttcttttcaaaatattttagtaaaatctggcggtgggggcacccacggtgcgtaattgtttttctacattagtgaccccaggtcaaggtttaaaagggcttccgc

SEQ ID NO: 17036 - DNA, 120 bp, synthetic construct
  source 1..120: mol_type = other DNA
aagagaaccacaactttgcttctctgtagacagatctcccaactttcccatctgttcctcacacacattcatttaaaaacagctgagagagctgggtgtggaaccttattacaaatacct

SEQ ID NO: 17037 - DNA, 120 bp, synthetic construct
  source 1..120: mol_type = other DNA
ctccattttcctttgagttttttgtcctatataagtaacgttggggagggaggggattaaagtcccaaccctgccaaaacacaaaaattcttgccatcacttggtccctgagcatatata

SEQ ID NO: 17038 - DNA, 120 bp, synthetic construct
  source 1..120: mol_type = other DNA
gaggggcctttaggtgtctggctgtggcagctttttttttcctgggggtgggggtcaaggtggcagctgacagtggcaggaagggttgtccagagcagcacgtgatgtaaataagagggt

SEQ ID NO: 17039 - DNA, 120 bp, synthetic construct
  source 1..120: mol_type = other DNA
ctaccatgcttcctatgcatgcattctaccatgcttctaccatgctttctatgcatgcattctgcctgcttctaccacgcattctacctgcttctaccacgcattctacctgcttctacc

SEQ ID NO: 17040 - DNA, 120 bp, synthetic construct
  source 1..120: mol_type = other DNA
gatctgccctgggcctgtgtcagggaagggggcttggggagggtgagccggacactgagctgtgtacaagtccacaaccgtgtgagcggcacgaggtctccccgctgcaggctgcaggcc

SEQ ID NO: 17041 - DNA, 120 bp, synthetic construct
  source 1..120: mol_type = other DNA
catttctagttggtgtgactgtagctggtcacttcctctccttggtcctcaacttccctatctgtaatgtaaggctttgcaagatgagtgccaaggtgcctcccggctcagaaagcctac

SEQ ID NO: 17042 - DNA, 120 bp, synthetic construct
  source 1..120: mol_type = other DNA
gtttttaaggcctgggggtggggggtgggagaaggtggaaaatggcgggagggaattctctgggctgacggtcataccgcacaaacccgcatcaaggcttactgcttctgtcaaaactga

SEQ ID NO: 17043 - DNA, 120 bp, synthetic construct
  source 1..120: mol_type = other DNA
tttctgagagccccgtgagccaagagtggggaccatcctgattctctcggacaggggaagatctgagcagggctcctggctgattggaggctccgaatcgcacctcttctcctgtcctaa

SEQ ID NO: 17044 - DNA, 120 bp, synthetic construct
  source 1..120: mol_type = other DNA
ccctcctcccctccccctcccctccggtcctgtctccagcgggagcgcgagacgctggtcaggctccgcggcgcagctcgaaaaggaataatcgcccccgattgactgaaattcctccgg

SEQ ID NO: 17045 - DNA, 120 bp, synthetic construct
  source 1..120: mol_type = other DNA
aaacgcaggtccatgcacacaggaggagctgcgtgtcctttcccaggataaaggcaggtctctgtacacgtgtggagctgtctgttccctcccaggataaacgctggtccctgcacacaa

SEQ ID NO: 17046 - DNA, 120 bp, synthetic construct
  source 1..120: mol_type = other DNA
agggcagaggccaggagtctgggactgggtggtcctgtctttgagggaatttggagaaggagcaggtgcaggtgcaggagctgagagtcacctgtgaaacatgctcagcagagaagctgt

SEQ ID NO: 17047 - DNA, 120 bp, synthetic construct
  source 1..120: mol_type = other DNA
acgtatatatgtaaacacacgtatgatgttggtgagttcatgttggtggtatttttactaagcaaagatgtgggaaccaaatgggcccatccggggagtttcccatttggtccctcgtgc

SEQ ID NO: 17048 - DNA, 120 bp, synthetic construct
  source 1..120: mol_type = other DNA
ttcaggccgcgcatctttagttttggggcatcgcaaatcctcctggaatctgatgaaagctgtggaccctctgcttgtggcggggggtcatgcagaaaactttgagtacagtttcaggag

SEQ ID NO: 17049 - DNA, 120 bp, synthetic construct
  source 1..120: mol_type = other DNA
tttcttttcttgaagtgttgtgacttttcccaaaatccaacctgtctgtcttcaaagaaagtaacagacaacggccttgttgccctctgtttttctggatcacctgtgctcaagctctat

SEQ ID NO: 17050 - DNA, 120 bp, synthetic construct
  source 1..120: mol_type = other DNA
aattagattctttaaaatactgcatgtcacgggacaatgctcgaaaaacagcacgtgaaaaggcaggtccaaagcaaatcctatcccagcttctacaggtaaaaaggcaggtgcaaagca

SEQ ID NO: 17051 - DNA, 120 bp, synthetic construct
  source 1..120: mol_type = other DNA
catctatatcttcatccaaccaaacagtaccgatcatctcccaagtgctccggtgcatacaaagatgtatgcactgtccgtgaactttcacagcaacactgcaagagcagaaaagtggaa

SEQ ID NO: 17052 - DNA, 120 bp, synthetic construct
  source 1..120: mol_type = other DNA
cagcatctcatccatccacacaccagcatctcatccatccacacaccagcacgtcatccatccacacaccagcacctcatccacacaccagcatctcatccatccacacaccagcacctc

SEQ ID NO: 17053 - DNA, 120 bp, synthetic construct
  source 1..120: mol_type = other DNA
ttctacactctctcccctgccgcgtccctgtgtgcggcgtcgtggatctttaccatgttgtatgtgtaatcccctgtgtgcggcgtcatggaaccttaccatgttgtgtgtgtaatccca

SEQ ID NO: 17054 - DNA, 120 bp, synthetic construct
  source 1..120: mol_type = other DNA
gctgtgcgcatccaggacacaggacacagggcgggtgacgggggatgcaggcccgcgtggctgcgcgcatccaggacacaggacacagggcgggtgatgggggatgcaggcccgcgtggc

SEQ ID NO: 17055 - DNA, 120 bp, synthetic construct
  source 1..120: mol_type = other DNA
gtgcattcttctagggactttgggagacatcattggacgaacagaaggacccctgtacaggggaaggccacacggaaaactaaagcatagtaaggacgtggcaaaatagatgaaaaagtg

SEQ ID NO: 17056 - DNA, 120 bp, synthetic construct
  source 1..120: mol_type = other DNA
agacacgtctccatgcacgcacgtgcgcggctgtacttgcctgtccttccagacacccagacacgtctccatgcatgcacgtgcatggctgtacttacctgtccttccagacacatctcc

SEQ ID NO: 17057 - DNA, 120 bp, synthetic construct
  source 1..120: mol_type = other DNA
ccatgcacgcacgtgcgcggctgtacttgcctgtccttccagacacccagacacgtctccatgcatgcacgtgcatggctgtacttacctgtccttccagacacatctccatgcccgcac

SEQ ID NO: 17058 - DNA, 120 bp, synthetic construct
  source 1..120: mol_type = other DNA
tccacagttgtggctttgtgctcactccactggggtaatgaggctgcggtcggcgcagtgcaggtcagttctccgcgcctttgtcccgtggttctcacggtcacgggggcagcagaggac

SEQ ID NO: 17059 - DNA, 120 bp, synthetic construct
  source 1..120: mol_type = other DNA
tacgccatccacaagcctctgaccgagttgtccgtgcgtgcacttgagcgtttcttgcaggagaggccggggccaaaggaacgcttcagttgcagctgggctgtgctaaggggcctcagc

SEQ ID NO: 17060 - DNA, 120 bp, synthetic construct
  source 1..120: mol_type = other DNA
acctttaccattaccatctccatcatcatcactaacataaccaccttaacaaccactaccactaccgccttcaccactgtcatctccatcattatcaccaacacaaccaccctaacaatc

SEQ ID NO: 17061 - DNA, 120 bp, synthetic construct
  source 1..120: mol_type = other DNA
cacctccaccatcatctccatcatcatcatcatcaccaacacaaccaccctaacgactaccacccccacctccttcactatcatcaccatcaccaacacagtcaccttcaccaccaccac

SEQ ID NO: 17062 - DNA, 120 bp, synthetic construct
  source 1..120: mol_type = other DNA
tttcctgattatcctgagttgttttctaatctatctacttattggcctctcaccctcttcctgtcgagactgaaatgacagtgcttcctttgcctagctcataggaatatttatggaggg

SEQ ID NO: 17063 - DNA, 120 bp, synthetic construct
  source 1..120: mol_type = other DNA
cccagttatgctaaggatgctgagtgctgtgggtagcaccatggctggaccatgaagtcatgggagtgcagtgggagggaggatggtgaggagacagtctgggggcaccagcttggggag

SEQ ID NO: 17064 - DNA, 120 bp, synthetic construct
  source 1..120: mol_type = other DNA
ctctcactctgtgtccatggcgagtgtctcaccctctctgagcttggtttctttatctgtagggagtgtgtgaggcccccacctggtttccctttctgtcacagctgaacaggcccacac

SEQ ID NO: 17065 - DNA, 120 bp, synthetic construct
  source 1..120: mol_type = other DNA
atagatgggtgagtgatggatggatgggtgaatgggcaggtggatggggggatgaatgggtggatgaatgaatgggtgaatgggtgggtggatagatgggtggacaaatggtaaaagggt

SEQ ID NO: 17066 - DNA, 120 bp, synthetic construct
  source 1..120: mol_type = other DNA
cctacccatgtgagcctccgttttcccatctgcaaagtgagcgtaatgatagtacctgccccctgagcactgttgtaagaatggaaggaaaatacctgttatccgagacagctgctacta

SEQ ID NO: 17067 - DNA, 120 bp, synthetic construct
  source 1..120: mol_type = other DNA
gagctgtgttgggtagtctaacagggctggtatacagtaggtgcttaaatagcagctgtttggagcagacccctggtcccgcgtcaggaagaggacctgacttattcatgccgggtgaca

SEQ ID NO: 17068 - DNA, 120 bp, synthetic construct
  source 1..120: mol_type = other DNA
cccagctgatttctggatctgctccctgtgcctggctgtgtccccagaggcaaagcaagcagaaggaaaaaggaaacggagaaaaagccagggcctccagagccagcattgtcctgggca

SEQ ID NO: 17069 - DNA, 120 bp, synthetic construct
  source 1..120: mol_type = other DNA
agctcagatgccagtacctcacccggtggggtccagcctccgcgacaggcattcccttccccgtgtgcccttgccaactacatactgggctgcccagaggctgccttctgaaggagcgag

SEQ ID NO: 17070 - DNA, 120 bp, synthetic construct
  source 1..120: mol_type = other DNA
tgtaacatcaggcagagaggaggcctcccagcccctctccttctcccaagggacacccaagaggcccccaacacccgctgcacacataagtgagttcctgggcacacaaggactttgtaa

SEQ ID NO: 17071 - DNA, 120 bp, synthetic construct
  source 1..120: mol_type = other DNA
cctggccctacctgatacctggtggtcccagagccctaaaaaggatcagggaggcactcagtgggtgctggtttttgttttcaaaagttctgagctctgtctgctgcgagcggctttgct

SEQ ID NO: 17072 - DNA, 120 bp, synthetic construct
  source 1..120: mol_type = other DNA
caccgtgactgtcactagcacagaaacagcgctattagagagtgctgctgctggcctggccgctgtcaccttgctggtgctgtcgctgtcactctgggtcattctgtcaccttgctagga

SEQ ID NO: 17073 - DNA, 120 bp, synthetic construct
  source 1..120: mol_type = other DNA
aaactgagacaccactgctggtgatggaggtagcggtcatggatgcgggggccctcccgcaggtgctggtgatgatggagatagcagacatggatgcgggggccatcccgcaggtgctgg

SEQ ID NO: 17074 - DNA, 120 bp, synthetic construct
  source 1..120: mol_type = other DNA
cctctgtgcttgcccctccatgtcccccaaccccgtccctgtgccctgtgggccgcccggggccatggacagggtctttggccccaggttcccatctggatccaccctggagtcactgta

SEQ ID NO: 17075 - DNA, 120 bp, synthetic construct
  source 1..120: mol_type = other DNA
gtttgtgattgttatttatgagcaaagtgtaaaagcccgtttcagttccagaaatatcttgaaatgccctgtgagagttttctctgtgagagaaatgcagacgtacagaggtggccaagg

SEQ ID NO: 17076 - DNA, 120 bp, synthetic construct
  source 1..120: mol_type = other DNA
atttccagatgccttggtgcccacatctctcttctcctacttggctctcccctttttatttctttataaaaatgaaggtggtgaactaagcagcctcaggctttagaagtgagtccctgg

SEQ ID NO: 17077 - DNA, 120 bp, synthetic construct
  source 1..120: mol_type = other DNA
cctaatactgggagatggaacagacactgcgtgctggctgggagtcgtcgctaggccatctcatcctagcctttaggtaaaaaagtaccaattttttttttgtttcagagacagggtctc

SEQ ID NO: 17078 - DNA, 120 bp, synthetic construct
  source 1..120: mol_type = other DNA
ccctgactctttctgcctgggtttttcagagggagcagcctgtggccagagcctagaggagagatcaaagaccctggccgaagtgaagcccattctgcaagcaactgggttcccatggca

SEQ ID NO: 17079 - DNA, 120 bp, synthetic construct
  source 1..120: mol_type = other DNA
aggcccctgagacgctctgtgctttaggacccacctgatcctccacatggcccgagcccacggctactccaaggtcatgactggggacagctgcacacgcttggctatcaagctcatgac

SEQ ID NO: 17080 - DNA, 120 bp, synthetic construct
  source 1..120: mol_type = other DNA
cacacggcgtcatattccatgataggacagtgcgtgtgataggacagctctgaaaacaacggccagaagctgcacggacgcctgcagccaggaaaagttcaacctgcagcaaccacagct

SEQ ID NO: 17081 - DNA, 120 bp, synthetic construct
  source 1..120: mol_type = other DNA
atctgccacagagggaacctcgtgacccaaaaacaaagtgaccctcgatgctggggaacccaggacattctgaacccacagcccccatctgccacagagggaacctcgcgacccaaaaac

SEQ ID NO: 17082 - DNA, 120 bp, synthetic construct
  source 1..120: mol_type = other DNA
gaagaaggggagctggcctaggtgacgcttgatagcaggtatttcaacaaggaagaggtggacaggagacggggagctggcctcggtgatgctcgaaagcagatgtttcaacaaggaaga

SEQ ID NO: 17083 - DNA, 120 bp, synthetic construct
  source 1..120: mol_type = other DNA
cacggggcccggagaggacgcagtgctccttgtgtgactcacaactttcctgaaggtttgaaatatttcaagatagaatactgggcaaaaaaggaaaagagaacagcagagcctggaggg

SEQ ID NO: 17084 - DNA, 120 bp, synthetic construct
  source 1..120: mol_type = other DNA
gaggcaatgtccttgcctcacctccagcccgaatttgtagaagaagaagttgatgaagtacttgaggcagccgagcagatcctggtccagctgctggcgggtgccgctggcaaacacggc

SEQ ID NO: 17085 - DNA, 120 bp, synthetic construct
  source 1..120: mol_type = other DNA
tgagaccatgacccaccacgggcctgccctggggtgatcagcaacacgccccccagagtttgttcactcattcattcatccattcatccattcatccattcattcattcattcaatacca

SEQ ID NO: 17086 - DNA, 120 bp, synthetic construct
  source 1..120: mol_type = other DNA
cagttccactcttaaggacgaagtgctggaggctcagagaggctgagagattcacccaaccaccggcccaatggtgctcagcagcagagccaggactgggagcctcatctgactacatac

SEQ ID NO: 17087 - DNA, 120 bp, synthetic construct
  source 1..120: mol_type = other DNA
ccaagctcagaaggagggcccagaatcccagacgtatcatggcagcaagtgagccgggggttgggacaggtaagcaggctcttgtggcttagccaccagctcggaatatactttccatgt

SEQ ID NO: 17088 - DNA, 120 bp, synthetic construct
  source 1..120: mol_type = other DNA
gactcaggggtcctgagacagggacctccctgctccaccactgagtccagaggcggggacgccagctgcccaggtccctttgaaggaagggccctgaatatcttcctatgaaacttgcca

SEQ ID NO: 17089 - DNA, 120 bp, synthetic construct
  source 1..120: mol_type = other DNA
gaccaacatgtgaaaggcaagagaaaacacagaaaacaaaaacagacccagggagctgacacagattcacacactcaagaagggcaaggattttacagtaaccacaattctctttctgct

SEQ ID NO: 17090 - DNA, 120 bp, synthetic construct
  source 1..120: mol_type = other DNA
tgctttgggggaaaaaacgaccgattctgtagtagacagacaggtttttaaacactcagcctgctctaagccccttctagaagctcatggtgcccaccagcatgctaaaggcactgataa

SEQ ID NO: 17091 - DNA, 120 bp, synthetic construct
  source 1..120: mol_type = other DNA
gctgagcatggggtgcgtggaggctgagcacagggtgcgtggggaggagagcggtgaggatgagcacggggtgcatgggggaggtggccagtgaggggcgcacacaccctgggatggctg

SEQ ID NO: 17092 - DNA, 120 bp, synthetic construct
  source 1..120: mol_type = other DNA
tcaggtttgttggcgctggggatgggtcaggcattcatcagtgccgagcgggggaaaggctgaagctccatcccaggaaccacttgacagggctgtggtgggggcaggagtccatcttca

SEQ ID NO: 17093 - DNA, 120 bp, synthetic construct
  source 1..120: mol_type = other DNA
ctacaaagggtaccaactcccctgccctcagagcgagccctccatttccctgcctccactcaccccccaccacccttacacacatgcacgcacacatgcacacacacatgcatacatata

SEQ ID NO: 17094 - DNA, 120 bp, synthetic construct
  source 1..120: mol_type = other DNA
atcaggccagccctgcccatcctgacctggcccctgggaggtgacccctgctgagtgttgtggcctctgtctggacgggagggaacatgggacgtggggacctacatgccggcccccctt

SEQ ID NO: 17095 - DNA, 120 bp, synthetic construct
  source 1..120: mol_type = other DNA
ctactatataaaaaaagaaagaaagattgaatttgttcgagctgaagtcagtggcgcaggccacaggaagacaggctctagtaaagacgggtagtgagttctctgtcatgggggtaatca

SEQ ID NO: 17096 - DNA, 120 bp, synthetic construct
  source 1..120: mol_type = other DNA
gatcacatgccaaatacggcacaaacctctgctgatcctcttgccgccggctccttttacagagaggcagagaggttcagaggtgctgaggtcctgcccaacatctcagggcagtggcgc

SEQ ID NO: 17097 - DNA, 120 bp, synthetic construct
  source 1..120: mol_type = other DNA
gggaaactggtgggtggtggcctcctgctctgggtctgcctatctgagtgaattctccagtctgatctcaactcagaggagggacagctccttcaggagctccacaagcagcatggaggg

SEQ ID NO: 17098 - DNA, 120 bp, synthetic construct
  source 1..120: mol_type = other DNA
atgtgggtgtgtgtgcatgtgtattcatgcgtgtattcatgtgtgcgcatgggtgtgtgtccgtgtacatgcacttacatatacatgtgggtgtgtgtattcatgtgtgtattcatgcgt

SEQ ID NO: 17099 - DNA, 120 bp, synthetic construct
  source 1..120: mol_type = other DNA
gcttttcttgataatttatcccttgaaaccccgtggacaattaaacccagagttaccaggtgagccagggattctactcctaggaatccaaccaagagaaatgaagacattcatccacac

SEQ ID NO: 17100 - DNA, 120 bp, synthetic construct
  source 1..120: mol_type = other DNA
acgcaaaagctacccatgcccacagctgcatggtccaccataacaacaatgggggcaacaacccacgcgtccatcaacggacacacaaaacgtggtctttctgcacagtgcagtgcagct

SEQ ID NO: 17101 - DNA, 120 bp, synthetic construct
  source 1..120: mol_type = other DNA
aagcacttcgccggggcacttatcatttgtggaacattctctgaggctggctgtggggatcccctgtgagtctggacagccaggtcataggtcatgcttcctcctggcccggttttcaca

SEQ ID NO: 17102 - DNA, 120 bp, synthetic construct
  source 1..120: mol_type = other DNA
ccagtgagccaagctgcacgctgcccccgggagagctgaaaaaaaaatacctcagtcgcttaaaaatcagtgcatgtcgaaaataatgagttttggacacactgggttaagtaagattat

SEQ ID NO: 17103 - DNA, 120 bp, synthetic construct
  source 1..120: mol_type = other DNA
gccacagagggtcagagtgttggcacctgtcttccggatctgttcacccctcgcctggaccggcaccggcacagagggtcagagtgttggcacctgtcttccggatctgttcacccctcc

SEQ ID NO: 17104 - DNA, 120 bp, synthetic construct
  source 1..120: mol_type = other DNA
gtgttggcacctgtcttctgggtctccatccctccctttgtttgttgagtgactgcatgttctcatttccttatcatacaattctttgagaggtatcattagctgcgtcttattttattt

SEQ ID NO: 17105 - DNA, 120 bp, synthetic construct
  source 1..120: mol_type = other DNA
ctaacagctgacaccatgtcaggacagtggctacctagcaggaagctctttcatctagagtcctggtccttcatgcctgggtgtggtcatggcccctctacagctgccagtcagagaact

SEQ ID NO: 17106 - DNA, 120 bp, synthetic construct
  source 1..120: mol_type = other DNA
aaggctcctgaccccacccaagactcctgaccctacccaagactcctgaccccacccaaggctcctgaccccatccaaggctcctgaccccagccaagtgtcctgaccccagccaaggct

SEQ ID NO: 17107 - DNA, 120 bp, synthetic construct
  source 1..120: mol_type = other DNA
cctgaccccacccaaggatcctgaccccacccagggctcccgaccctgcccagggctgccaacccccaggcctgccgagttcctgctccctgaggctttgggaaagactcaaaggctttg

SEQ ID NO: 17108 - DNA, 120 bp, synthetic construct
  source 1..120: mol_type = other DNA
acgatttaaaaatttgtttatctgaaatttgactttaactgtaatgctattcactgatgaagtcacagaatccagagaggctgtgagacctgtctgaggtctcgctgtgggcaggtggtg

SEQ ID NO: 17109 - DNA, 120 bp, synthetic construct
  source 1..120: mol_type = other DNA
ccactccatagtaaccgacctcagcgctggacattcccactgcatagtaaccgacagtcagcgctgggcattcccactccatagtaaccgaccctcagcgctggacattcccactccata

SEQ ID NO: 17110 - DNA, 120 bp, synthetic construct
  source 1..120: mol_type = other DNA
cctttggctctgaaccatctcctcaaggcagacagaaatggcggattaaactgtgggcttgggatagttgtaagtgtcacctttccagatggcatttttaaaatagtatttttcttccta

SEQ ID NO: 17111 - DNA, 120 bp, synthetic construct
  source 1..120: mol_type = other DNA
gatgtcttcagacgtcaaaggtctgtctcaggtaactcctctgacggccacaatgatctctgcagatgctctgactccacgtgccctcgctcagagacacacgcgcacatttgccacctg

SEQ ID NO: 17112 - DNA, 120 bp, synthetic construct
  source 1..120: mol_type = other DNA
gcttccagggcccagctggggctccatgtgtccctgggcaccccagaaccctctgggtctcagccgttgggttcttacatctgggccagtggcaaagggttaaagggaccttgtgactta

SEQ ID NO: 17113 - DNA, 120 bp, synthetic construct
  source 1..120: mol_type = other DNA
ttgctgtcggacttcggtgctcccggaagaccccccttgagtcagctcctctaggaagccctcctggttacactgttacgtggtctttgtccatttctgttcctgccactaaccacggtt

SEQ ID NO: 17114 - DNA, 120 bp, synthetic construct
  source 1..120: mol_type = other DNA
acccagcgcacagtaggtgctctgtaaacgctcacccagtgcacagtaggtgctctgtaaacgctcacccagcgcacagtaggtgctctgtaaacgctcacccagcgcacagtaggtgct

SEQ ID NO: 17115 - DNA, 120 bp, synthetic construct
  source 1..120: mol_type = other DNA
ccagttcttcatggaggccatagaggccgtcagcggagtggatgtgggacgcctggaagtggaggacagggacctgccaggctccccaaactgggtggccaggttcaccatcctggaagg

SEQ ID NO: 17116 - DNA, 120 bp, synthetic construct
  source 1..120: mol_type = other DNA
cggcacacacagatgccggcacacacagatgcccacacacagatgcccacacacagatgcccacgcacaggtgcccacacacatgctggcacacagatgcccacgcacaggtgcccacac

SEQ ID NO: 17117 - DNA, 120 bp, synthetic construct
  source 1..120: mol_type = other DNA
agtgtctatgtgtatatatgtgcatgtgtgtgtgctgtgcatgcccatgtatgtgtatgtggtgtgtgcatgcatgtggcatgtaaggctgtgtgtgcgtgtgtatatgttgtgtgcatg

SEQ ID NO: 17118 - DNA, 120 bp, synthetic construct
  source 1..120: mol_type = other DNA
cctgggcgcactggtcatcgtgctggccagcgccctcctgctgctgggtgagtgagcgccccgcctccacctggaccctcggaccctcggaccctcctccccaggccgtcccctgctaac

SEQ ID NO: 17119 - DNA, 120 bp, synthetic construct
  source 1..120: mol_type = other DNA
cctgcgtcccctcattccccagtgctggtcctgctcgtggcactccgggcgcggttctggaagcagtctcggggcaaggggctgctgcacggcccccaggacgaccttcgagacaatgtc

SEQ ID NO: 17120 - DNA, 120 bp, synthetic construct
  source 1..120: mol_type = other DNA
caaaaaataataaaaaaaaggaaatgtagttcctgttcacgggtaggtttgtcatcccctgcctgagcctcttccatcgatgtctctttccctgtgtacaggacatcacctgttccaacc

SEQ ID NO: 17121 - DNA, 120 bp, synthetic construct
  source 1..120: mol_type = other DNA
tgactcccagttcctatgattccaaattttacacatagccaaactccttaaatctatctttgctttgtttttttttctgccatgtcttatatgaaaacaaataccaatgagtttgatcgt

SEQ ID NO: 17122 - DNA, 120 bp, synthetic construct
  source 1..120: mol_type = other DNA
tctaaaaccttgtgggctaacttgagacatgtctttctgggggttctgtagacgtattttgaatctttatgatgctgcactgatcattcttggagtgaggactctgttccctgtagaaat

SEQ ID NO: 17123 - DNA, 120 bp, synthetic construct
  source 1..120: mol_type = other DNA
gtaggctctggttggttagtcttaagtatccagatgggatcctgtatgagcagcgtaggctctggttggttagtcatgctcttaggcatgacccacctgtagggtcccacactggccaat

SEQ ID NO: 17124 - DNA, 120 bp, synthetic construct
  source 1..120: mol_type = other DNA
gtccctctcaggctagatcattcctaaagatggtaaacaacttgctggaaacatgcactgcatatacaaatcaactcactgcatatgcacatcaactcactgcatatgcaactcaactca

SEQ ID NO: 17125 - DNA, 120 bp, synthetic construct
  source 1..120: mol_type = other DNA
tcaactcatactgcatatgcaactcaactcacactgtatgcaactcagctcgctctgcatatgcaattcaactcgcactgcgtatgcaaatcaacttactgcatatgcaactcaactcac

SEQ ID NO: 17126 - DNA, 120 bp, synthetic construct
  source 1..120: mol_type = other DNA
gacgaggggaacagataatttgtttcaaaattaaaagctaacaacttggtaggaaaaaggttttcttttttttcagacagagtctgctgtggagtagggtggcgtgatctcagctcacag

SEQ ID NO: 17127 - DNA, 120 bp, synthetic construct
  source 1..120: mol_type = other DNA
ccagtgaggctctgggggctttgcccccgccgcggcagctggtagagaagagacgtgtttcacctccccgacgtctggaccagtctggaagggatggaggcgctgtggccaagtgcagtc

SEQ ID NO: 17128 - DNA, 120 bp, synthetic construct
  source 1..120: mol_type = other DNA
gcagcttccggcttttgcctccacagcagaagtggggctgtgtctcctcaggtggcagaaggtcgagagaggtcaagggccatgagtgggacaagacgggctggaggaagccgtgactag

SEQ ID NO: 17129 - DNA, 120 bp, synthetic construct
  source 1..120: mol_type = other DNA
actacggtggaaacatccccaccgtttatgaccccgggggcccctggaggcatctcttctggaggagcaagactttcttccacgggttccgcttcaccatctgcggcatctttagtctgc

SEQ ID NO: 17130 - DNA, 120 bp, synthetic construct
  source 1..120: mol_type = other DNA
ataaaaataacaataaaacccagcaaacaagtttactttgaaatactttccaagaaacactgatttcttctcagcaacagggaaccccactggagtgagtgtggctgtgaacaccccgag

SEQ ID NO: 17131 - DNA, 120 bp, synthetic construct
  source 1..120: mol_type = other DNA
cattctctcctccacagctccccgcttcctgcaggcttcctgtctcactttctttctgtgctccagagtctaggcaatctcttttgttagaacttccaattcaccaatactttcttatgt

SEQ ID NO: 17132 - DNA, 120 bp, synthetic construct
  source 1..120: mol_type = other DNA
gttgagaaataggaggaccagagaccaatcacgcggagttcttaatcatgtgaaaatattttattttgacgtgctttttcttgagtgcctgaatgtggtggctcttagggtaaccccaga

SEQ ID NO: 17133 - DNA, 120 bp, synthetic construct
  source 1..120: mol_type = other DNA
ctgtgccctgtgtggggtgcctgccctgtgtggggtgtgtggggtctgtaccctgtgtggggtgcgtggggtctgtgccctgtgtggggtgcctgccctgtgtgtggtgcatggggtctg

SEQ ID NO: 17134 - DNA, 120 bp, synthetic construct
  source 1..120: mol_type = other DNA
atcctagaaaagaaagggatgctttcagtcgtgatgtccaaattacattctcaagctctcaagattttgtttcatatgccaggagaagcgcatctcttatttgggcaatgaacaccctcc

SEQ ID NO: 17135 - DNA, 120 bp, synthetic construct
  source 1..120: mol_type = other DNA
cactccgcagacacgcgccacctcccactccgcagacacgcgccacttacctccccctccgcagacacacgccacctacctccccctccgcagacacgtgccacctcccactccgcagac

SEQ ID NO: 17136 - DNA, 120 bp, synthetic construct
  source 1..120: mol_type = other DNA
gtgcgacacacacactgcctttccccatcagtaagccttctttctgtaactttccctaggtaagctgccggcaaataccgtgcagtggtcagcgaagccttcagagcaccggaggcctca

SEQ ID NO: 17137 - DNA, 120 bp, synthetic construct
  source 1..120: mol_type = other DNA
ctcaacaactgcaccccaggacatttatctgagaaaatggaacctcatgtgaacacaaagacctgtttgcgaatgttcacagaactttcactgataatagacaatggggaaaacccttca

SEQ ID NO: 17138 - DNA, 120 bp, synthetic construct
  source 1..120: mol_type = other DNA
aaggtggggaagggcacaagggatgctgctatttttgcaacttcctgtgagtctataatgatttcacagaaaaaaggaaaaaaaagggagaaaaaacacaaggggtgtaaggagactccc

SEQ ID NO: 17139 - DNA, 120 bp, synthetic construct
  source 1..120: mol_type = other DNA
caaaaaggaagaggaagcaatacacttagctgtgtgtccggtcaggggcaggacacaaagcatttgtcaacaatgaccatgcagccaccaccacaccaggagcattcctgacagcacgca

SEQ ID NO: 17140 - DNA, 120 bp, synthetic construct
  source 1..120: mol_type = other DNA
agagaagatcactggggcaaacaccgagtgtggcggggagcaccgagagagaagatcactggggcaaacaccgagtgtggcggggagcaccgagagagaagatcactagggcaaacaccg

SEQ ID NO: 17141 - DNA, 120 bp, synthetic construct
  source 1..120: mol_type = other DNA
acccgtaagtcctgcagaaaaacacctgtgaaaatctttcaaaaacaatgctgctggtaatggttgtctaactctggggaggaggttcctggagctctgcgctgctccccacatgccctg

SEQ ID NO: 17142 - DNA, 120 bp, synthetic construct
  source 1..120: mol_type = other DNA
aacaaccacaaagcgcctgtcaccagtgacaatgtagcactgtctatgtgaataaaattaaattgtgtttggagaatctggtgacgctgtgaaacagctgaagattacctgtaacctcag

SEQ ID NO: 17143 - DNA, 120 bp, synthetic construct
  source 1..120: mol_type = other DNA
cctaaagctaatataaaaaataaagtctactttttttaaagtgaccatcctgtcagaaagacaaaatggtcccagagcacagggcttggattcacacagcacagaatcggctcccagagc

SEQ ID NO: 17144 - DNA, 120 bp, synthetic construct
  source 1..120: mol_type = other DNA
cacatcccccgtctgccccggggctgcctggcatggcacccaagaccaagatggaaagggaggccccgcgtgtgggtggacaaatccacaacacgctggccctcaagttgtctcagtaat

SEQ ID NO: 17145 - DNA, 120 bp, synthetic construct
  source 1..120: mol_type = other DNA
caaataaataattaagatccttattctagagtggggaaaaaaagagactagaattctcagcagaacttgaggaatccaatggccagtaacgaagatgcctcccagagtctcctggccatg

SEQ ID NO: 17146 - DNA, 120 bp, synthetic construct
  source 1..120: mol_type = other DNA
catctgggaagaaacaagcaggacaggaaaaaggtacattggtgtttttgcatccataaagttcacttcaatttaaatagaacttactgagtactcttttgctagatccaggcaaaatgt

SEQ ID NO: 17147 - DNA, 120 bp, synthetic construct
  source 1..120: mol_type = other DNA
agcttcatttagaatacatgttcacatcaaaaccaccaccacgactataaacaagctatgttgtcaaacagaaaagcaccaggctacacttcttactgtcagctcctgcctacagcaact

SEQ ID NO: 17148 - DNA, 120 bp, synthetic construct
  source 1..120: mol_type = other DNA
ggtaaccaaaaccagaatccagttaaaacaacagggagttgcttctacctatggaaatggcaacaggacaagatgataacccaggtgctaaggagtcggctacacgcattctgtgttagg

SEQ ID NO: 17149 - DNA, 120 bp, synthetic construct
  source 1..120: mol_type = other DNA
gctcagacgttctagtacacagcagggactctcaactctcgcgctcagacgttctagtacacagcagggattctcaactctcacgctcagacgttctagtacacagcagggactctcaac

SEQ ID NO: 17150 - DNA, 120 bp, synthetic construct
  source 1..120: mol_type = other DNA
aaacatcaccaaaatgaattgtttctttcttaagacaaaagggagtttgctcctcacatatgaccttacgcagtttctgtctgagaatcatcatgttcgtcagccctgcctgtgctctcc

SEQ ID NO: 17151 - DNA, 120 bp, synthetic construct
  source 1..120: mol_type = other DNA
gcaaggatccgacccacatgggcacagaagacttctactgcaggttgcaaatcttacatccttgacctagtgggtaaaaaaaccctaagaaaaggcaactttctaaaacaatcatactac

SEQ ID NO: 17152 - DNA, 120 bp, synthetic construct
  source 1..120: mol_type = other DNA
gctatctccccttaagtgctgtggcagcagtgcagagcccacatagctatataagctactcagtaagaaaaaccacacaggagctacacgcaccacatcatggacaaacctcaaaacaca

SEQ ID NO: 17153 - DNA, 120 bp, synthetic construct
  source 1..120: mol_type = other DNA
gtagtcacaattgaggaatctgagctgtggggcaaactgttcaaatgaagattctgacccacaggaacaaactgatccaaaagggaaatatgccagtcacgaaaggacaaatattgtatg

SEQ ID NO: 17154 - DNA, 120 bp, synthetic construct
  source 1..120: mol_type = other DNA
gggatggtggtgatggctttgcaccgtgtgaatctaataccagagaactgcacactcaaaaatggtacaaatggtcaattttatactgctgggctcagggaatccttcccctcagcctcc

SEQ ID NO: 17155 - DNA, 120 bp, synthetic construct
  source 1..120: mol_type = other DNA
ctaataactatggtcattcccattaaaacattaagttttgaaaactagggttctcatttaagcctgtctcacagcagctcagctctcagaatgttcagaagactctgacactgccctctc

SEQ ID NO: 17156 - DNA, 120 bp, synthetic construct
  source 1..120: mol_type = other DNA
gaagatgagctgaatatcgaggccaaggacaggatcccagtttcctacaagcgaacaggattctttggaaagtatgttggatgtatttgttgatgcttgaactaaacctaacttggcttt

SEQ ID NO: 17157 - DNA, 120 bp, synthetic construct
  source 1..120: mol_type = other DNA
aaccgagacctgaatggctgccttctgcacacacagcaagtggtcatgggagtcgagttttcagagaacacaatgtcttcagagatgtggggtgagcagttcagattctgtgatgtctga

SEQ ID NO: 17158 - DNA, 120 bp, synthetic construct
  source 1..120: mol_type = other DNA
ggcgaggcaggcgaggcgggtgagatcgggcgaggcgggcggctgcgctgctctggctgtgtggcgtggacaccaaggtcttcgtcctgtgagtctgcggccttcttctccaaccaggtg

SEQ ID NO: 17159 - DNA, 120 bp, synthetic construct
  source 1..120: mol_type = other DNA
ctgctgacacggaacatctcacccatcacacggaacatcccgtcacccgctgacacagaacatctcacccgtcacatggaacatcccgtcacccgtcacacggaacatcccatcacacgg

SEQ ID NO: 17160 - DNA, 120 bp, synthetic construct
  source 1..120: mol_type = other DNA
cctggttcgtctcttctggaattccacgtccatgaatcacagcgcgtgttctccctgctgtggaattcttttacccaacataatgtctgcgtgactcatccccctgcagcctcggtcgga

SEQ ID NO: 17161 - DNA, 120 bp, synthetic construct
  source 1..120: mol_type = other DNA
tgacagccccagctcccccttcctctgcgttccccttccttctcctttccccttccttctcctttcccttccttctcctttccccttccttctcctttcccttccttctcctttcccctt

SEQ ID NO: 17162 - DNA, 120 bp, synthetic construct
  source 1..120: mol_type = other DNA
catattccccaagaggcaatttgatctttaaactgaaaactctcagaaacagtatcacccccaggcccttgcccctcacgtctccaatcctgtccactgaggtcatttggctccttgtgt

SEQ ID NO: 17163 - DNA, 120 bp, synthetic construct
  source 1..120: mol_type = other DNA
tgtatggacgtccaggttctgcacctgctgctcgaacctgtccatcactgaggagaccttctgcaggtccatggtgctcagggccttgtccagggctttggtcacctgggccatattctt

SEQ ID NO: 17164 - DNA, 120 bp, synthetic construct
  source 1..120: mol_type = other DNA
gtcggtggagaaaaggccgccgacgtggagacccagcgcggggtcggtggagaaaaggccgccgacgtggggacccagcgcggggtcggtggagaaaaggccgccgacgtggagacccag

SEQ ID NO: 17165 - DNA, 120 bp, synthetic construct
  source 1..120: mol_type = other DNA
ctgcttatggatggcttttcaacgtcaaagaaagactgaaggaaactcatttcaggctacccccaagtcataacacagaactccaggtaaaaacacacctgaaagtgttatctcgagaga

SEQ ID NO: 17166 - DNA, 120 bp, synthetic construct
  source 1..120: mol_type = other DNA
agtattttttacgtcaattaaggctcaaagcagttccatgaggcatttattacccacactcatggaagacgtggaatttggagaaggaagagcctggcctaacgcaacagtgaagggacc

SEQ ID NO: 17167 - DNA, 120 bp, synthetic construct
  source 1..120: mol_type = other DNA
gtgtgagctggggtttgtttgtagatggcattcccgatatagtctcacctctgagcaagggttacctcacaggaaggcagtcctgcagcaagactcttctctttacggagacatctgtga

SEQ ID NO: 17168 - DNA, 120 bp, synthetic construct
  source 1..120: mol_type = other DNA
atctgtgaacctgcccgcactcgcggctggccgtcgtagaaggccccataagcatagcccgggtgaatctgtgaacctgcccgcactcgcggttggccgtcgtagaagcgtggataagca

SEQ ID NO: 17169 - DNA, 120 bp, synthetic construct
  source 1..120: mol_type = other DNA
ggtggtgtgtctcatctcagaccacaggttctttcctgaagatgtgcctcgatggatggagctgctgccttgctgccacgtttttttttttttgtttgtttttgttttttgttttttttt

SEQ ID NO: 17170 - DNA, 120 bp, synthetic construct
  source 1..120: mol_type = other DNA
ttggagaggcaggggattccctcttgcctcggtggcagaaggtgttttcgaagttaactagtgctggtctgtcattcctccctgaccctttatggtgctgtgtctctcctgtcctctaac

SEQ ID NO: 17171 - DNA, 120 bp, synthetic construct
  source 1..120: mol_type = other DNA
cttccgtcctccctctcaccccccggatcccatggcccgtcttccgtcctccctctcaccccccgcatcccatggcccctcttccgtcctccctctcaccccccggatcccatggcccgt

SEQ ID NO: 17172 - DNA, 120 bp, synthetic construct
  source 1..120: mol_type = other DNA
cagccagtaataaggtttgtctgacggtgattgacagcattttagagctgatgcatggcagtagagattgcagcaaatcatgtgtcatcaccaaaacttcactgaagaagcaaaactagg

SEQ ID NO: 17173 - DNA, 120 bp, synthetic construct
  source 1..120: mol_type = other DNA
ggcttcggagcctgtcacacgtgttgtccgtgtacacagacaggctcctgggcctatcatgtgtgctgtctttgtaaacagtcaggatcccaggactatcacgcgtgctgtccatgtaca

SEQ ID NO: 17174 - DNA, 120 bp, synthetic construct
  source 1..120: mol_type = other DNA
gagggagaggtaggggctgcttaggtgagggtggagtcacgcttgctgctttaattctcacttcttaagatttacttctcattctactgatgaaaatgtgtttctatcattagtctcatg

SEQ ID NO: 17175 - DNA, 120 bp, synthetic construct
  source 1..120: mol_type = other DNA
gtcatcagaaaaaaatatgttttcatcattgcccttcgtcctcgtctgactgtgtcctgagacaagggtgtagctttgttgccgtttagttggagccacaagtcccaaccctgtttgcct

SEQ ID NO: 17176 - DNA, 120 bp, synthetic construct
  source 1..120: mol_type = other DNA
tgactgcatctgggtagcttcgatccacgcacatgtggcgggcacagtgaggctgccacctggtcagacctcggggctgaccctgcctgacagcatgtgtgaaatccctctttaagatgg

SEQ ID NO: 17177 - DNA, 120 bp, synthetic construct
  source 1..120: mol_type = other DNA
tgtagcatcttcgttttatgtccctttctgaaggacgtgaccacgcagtctgtgatggggtttgatcctctgcctccttcggacacaatctactcctacgtcaggccagagaggtacctc

SEQ ID NO: 17178 - DNA, 120 bp, synthetic construct
  source 1..120: mol_type = other DNA
ccagttcccacctcccagcttcctcctcccaccttctagttcccacttctttcctcacagttcccacctcccagctcccatcttccagctcccagctcccacctccctccttccagtttc

SEQ ID NO: 17179 - DNA, 120 bp, synthetic construct
  source 1..120: mol_type = other DNA
cgcgccacagaaacaggagggcctcgcttcacttctgccttcccgaccgcagcacatccagctggtagatgccaactcgcatccagcccccagctgccagggattctggggtggctgttt

SEQ ID NO: 17180 - DNA, 120 bp, synthetic construct
  source 1..120: mol_type = other DNA
aaaattcacattcattaaattctgcttttgaggggacagtggctttagccgtctgttgctcacttgaaaagtaaagttttaagcagctgtgacggggaagttgcttcaagttgggcagat

SEQ ID NO: 17181 - DNA, 120 bp, synthetic construct
  source 1..120: mol_type = other DNA
aagggccctcagcccaccacacacacctcccaggacttcccaaggggcctcagcccaccaggcacacctcccagcccagccctgatgccggcctcacctgctggggactcggtgttgagg

SEQ ID NO: 17182 - DNA, 120 bp, synthetic construct
  source 1..120: mol_type = other DNA
cacccatgaagcagctttcagggtggggctgcttcagctcttaccaggacacttatggcttccagagacaccttcctgagagaagggcttatgctgatgtgttcctcctgccttccactg

SEQ ID NO: 17183 - DNA, 120 bp, synthetic construct
  source 1..120: mol_type = other DNA
gtgaagagagcagtcgtggcctgtgagggtcattgcagctgcgcccacgcgccagggtgaggatggaggatggagctaaatgtgggtcaacccctcctttcctggtcattgttacctcga

SEQ ID NO: 17184 - DNA, 120 bp, synthetic construct
  source 1..120: mol_type = other DNA
aaataaggcaactatgaatataccaattagcatagaaaagctaagaaaggtccttaaagatctcccagtggaaaaaggccccaggaccatctgggtccatagcttagtgtaagctgactt

SEQ ID NO: 17185 - DNA, 120 bp, synthetic construct
  source 1..120: mol_type = other DNA
tgggcaaaataagctttctaaattgacagagacgcggcgcgccggcgcaggcgcacagaggcgcggcgcgcgggcgccggcgcacagtggcgcgtcccctggggggcggggggaggcgcg

SEQ ID NO: 17186 - DNA, 120 bp, synthetic construct
  source 1..120: mol_type = other DNA
acagcctaagagtcctgtgcagggaattttattttggatttcttcacattcctgcctctgtctcaagtctccacctgttttctttgtctggttttcctgctactgccttagctccccaac

SEQ ID NO: 17187 - DNA, 120 bp, synthetic construct
  source 1..120: mol_type = other DNA
aaaatgcacacacatctgaacagacacctcaccaaagaagatctacagatggcaagtaaacacattgaaaccacaatgtggttacaattgaaaaccacaatgagatagcacagctggtct

SEQ ID NO: 17188 - DNA, 120 bp, synthetic construct
  source 1..120: mol_type = other DNA
ctgatggaagatgtacctcaagcctgtcccattcctcacttcctgctgagacctggccccaacatggccagctctatgttcctcagaccctctcaggccaccttctctcttctaggcact

SEQ ID NO: 17189 - DNA, 120 bp, synthetic construct
  source 1..120: mol_type = other DNA
cctaagtggacctcagacatggctcagccataggacctgccacacaagcagccgtggacacaacgcccactaccacctcccacatggaaatgtatcctcaaaccgtttaatcaataaagc

SEQ ID NO: 17190 - DNA, 120 bp, synthetic construct
  source 1..120: mol_type = other DNA
agaggatcccactcaaggaacacacgtgtgaaagtccccacagaggtacacacagggtccacacaggagcaggcacaccacaggcaagacccaaaatggaaatccaggcagacgccacgc

SEQ ID NO: 17191 - DNA, 120 bp, synthetic construct
  source 1..120: mol_type = other DNA
ggacctggtgaaagaaacatggtgagggggcctggtgaggggtggtctggtgagggaacttagggaaacctggtgaggaggacctggtgaggggacatgggggggaccttggtgagggga

SEQ ID NO: 17192 - DNA, 120 bp, synthetic construct
  source 1..120: mol_type = other DNA
catgggtggggagccttggtgaggggacctggtgaggggacatggtgaggggagcctggtgaggggaacacggtgaggggaacatggtcagggggacttataggggtgtcctgttggggg

SEQ ID NO: 17193 - DNA, 120 bp, synthetic construct
  source 1..120: mol_type = other DNA
gctgtccgtgttataataattcctctagttcaaatttattcatttttaacttcatagtaccacattctacacactgcccatgtcccctcaagcttcccctggctcctgcaaccacaaatc

SEQ ID NO: 17194 - DNA, 120 bp, synthetic construct
  source 1..120: mol_type = other DNA
caagtctcatctggagttgtactcccataattcctacaggttgtgggaaggacccagcgggagataactgaatcacaaggggaggtttctcccagactgttcttgacgtagtgaatacgt

SEQ ID NO: 17195 - DNA, 120 bp, synthetic construct
  source 1..120: mol_type = other DNA
ctcacgagatctcatggtctgacactgttcttgaggtagtgaatacgtctcacgagatctgatggtctgacactgttcttgaggtagtgaatacgtctcacgagatctcatggtctgaca

SEQ ID NO: 17196 - DNA, 120 bp, synthetic construct
  source 1..120: mol_type = other DNA
tagtgaatacatctcacgagatctgatggcctgataaggggaaacccgttttccttggctctcattctctctcttgccaccaaacatgtgagaagtgcctttcactttcagccataactg

SEQ ID NO: 17197 - DNA, 120 bp, synthetic construct
  source 1..120: mol_type = other DNA
agactctactggccatgcaggcccttaccttgcgagagaacatcaattttggcaccttcctcccacagggagcaatggggtgaggggaagggaacaggacagttgagaacatggagctga

SEQ ID NO: 17198 - DNA, 120 bp, synthetic construct
  source 1..120: mol_type = other DNA
agtggcagagccagagggcagcaccagggaccaggccaggctgcagaggggagcaccaggggccgggccaggctgcagagggcagcaccaggggccgggccaggctgcagagggcagcac

SEQ ID NO: 17199 - DNA, 120 bp, synthetic construct
  source 1..120: mol_type = other DNA
agggatggggtctggctcaccttgttcccccgcacagtgcttggtaaacaacatgcagaattgaaaacgtcaccgaccagtctccagtttgggaggagtgagtgagagaggacacggccg

SEQ ID NO: 17200 - DNA, 120 bp, synthetic construct
  source 1..120: mol_type = other DNA
tatcacagaatgggggtgggggtgggggatatatattttggttaacctaatgagagagagatgttgactgctgccttaactcactaaagggtcttcactcaaacatggtttctggtcttt

SEQ ID NO: 17201 - DNA, 120 bp, synthetic construct
  source 1..120: mol_type = other DNA
agagcccttcttctgcattaaaattggcctcactgaaatcaggacccccaaggcatttcgttcccatctcgggcagttattacagagcccttcttctgtgccaaaattggcctcgctgaa

SEQ ID NO: 17202 - DNA, 120 bp, synthetic construct
  source 1..120: mol_type = other DNA
cctcgctgaaatcaggacctccaaggcatttcattcctgtttggggcagttattatggagccctttcttcttctgtactaaaattggcctccctgaaatttctttcaagggtcccagttc

SEQ ID NO: 17203 - DNA, 120 bp, synthetic construct
  source 1..120: mol_type = other DNA
aacccctgttctagttcctctagtggaaccagaacccactggccgtgtcggaggctgattatcaccgtgatgcaggcacaacagatctgaggcctccactcactgagacaatagacccaa

SEQ ID NO: 17204 - DNA, 120 bp, synthetic construct
  source 1..120: mol_type = other DNA
cggtgagacaatagacccaagcacaacagctctgaggcctccactcactgagacaatagacccaagcacatcagctctgaggcctccactcactgagacaatagacccaagcacatcagc

SEQ ID NO: 17205 - DNA, 120 bp, synthetic construct
  source 1..120: mol_type = other DNA
cactgagacagtagacccaagcacatcagctctgaggcctccactcactgagacagtagacccaagcgcatcagctctgaggcctccactcactgagacaatagacccaagcacaacagc

SEQ ID NO: 17206 - DNA, 120 bp, synthetic construct
  source 1..120: mol_type = other DNA
atttttcttgcaacaggcacccctattggtctgtcttctttcttttcacagggatgtgaaacaagaacggtttcactttcttcttaaaaacactgcaacggtgatgctgaaagggtgtca

SEQ ID NO: 17207 - DNA, 120 bp, synthetic construct
  source 1..120: mol_type = other DNA
tgagcttccaaaatgcaaatctctcagggacagagagagaaggaaggcggcatagcagcagctggctctgggcggtcagcaatcctatctgaaaataaaacattttacaatccacaactg

SEQ ID NO: 17208 - DNA, 120 bp, synthetic construct
  source 1..120: mol_type = other DNA
tcaaagctggggtcggccgaggctctgcagtaacaagagggatacagggttcaaagctggggtcggccgaggctccgcactaacaagacagatccagggttcaaagctggggtcggccaa

SEQ ID NO: 17209 - DNA, 120 bp, synthetic construct
  source 1..120: mol_type = other DNA
ctctattgactaccttcctctattgaataccttcctctattgaataccttcctctattgaataccttcctctattgaataccatcctctattgattacccttcctctattgattaccttc

SEQ ID NO: 17210 - DNA, 120 bp, synthetic construct
  source 1..120: mol_type = other DNA
ctaccttcctctattgattacccttcctctactgattgcccctctactgattacccttcctctattgattaccttcctctgattaccttcctctactgattacacttcctctactgatta

SEQ ID NO: 17211 - DNA, 120 bp, synthetic construct
  source 1..120: mol_type = other DNA
gttttcacagcctccgagtatctcctgggactttccagcagaccccaatccagaggatccacactctactgcaagagcatggggccactgccctcctcgcccatgaaattaaaaggccat

SEQ ID NO: 17212 - DNA, 120 bp, synthetic construct
  source 1..120: mol_type = other DNA
attcaaaaccagaagaccagaatccacctgattctgagacattgcttcccaccccgcaaacttcctctgcatcacattagtactgtgggatactaacaagagtcaagccaaaaaaaaaaa

SEQ ID NO: 17213 - DNA, 120 bp, synthetic construct
  source 1..120: mol_type = other DNA
tcgctgcaggacctctcagagcctttactaagctccatcgctgtgggacttctcagagtctttactaagctctatcactgcgggacctctcagggcctttactaagctccctcgctgcgg

SEQ ID NO: 17214 - DNA, 120 bp, synthetic construct
  source 1..120: mol_type = other DNA
cagctcatggacttccgagctgctcctttgcggcaccggaccacggttttggcctccgggtatgcgcaatccttttttaaaaaaattaaaaatgtttccattgtattaaagtattcataa

SEQ ID NO: 17215 - DNA, 120 bp, synthetic construct
  source 1..120: mol_type = other DNA
agagaccccagcaagggctacgtcagggtgagaccccagcaagggctacgtcagggtgagaccccagcgagggcgacatcaggaagagaccccagcgagggcgacgtcagggagagaccc

SEQ ID NO: 17216 - DNA, 120 bp, synthetic construct
  source 1..120: mol_type = other DNA
cacataattgctgctttcgtaaatctcagatcaataaggcagtcatgggcctcttccaatgggctcggtctttgttcccaggttccaataaagaaaacgaaacaggtggtatttttgaaa

SEQ ID NO: 17217 - DNA, 120 bp, synthetic construct
  source 1..120: mol_type = other DNA
gacctcgcaccctctctccaccgtcagacctcgcaccctctctccaccgtcagacctcacaccctctctccaccgtcagacctcacaccctctctccaccgtcagacctcgcaccctctc

SEQ ID NO: 17218 - DNA, 120 bp, synthetic construct
  source 1..120: mol_type = other DNA
accctctctctccaccgtcagacctcgcaccctctctctccaccgtcagacctcgcaccctctctctccaccgtcagacctcgcaccctctctccaccgtcagacctcgcaccctctctc

SEQ ID NO: 17219 - DNA, 120 bp, synthetic construct
  source 1..120: mol_type = other DNA
ataaaataaaaataaaacccagcaaatctaataatgttcaatcaaaggggaaagcacaggacgtggggcttggtctccaggggttcctgagttcattcagcatctgtggaggacacagtg

SEQ ID NO: 17220 - DNA, 120 bp, synthetic construct
  source 1..120: mol_type = other DNA
cacacagtgtgggagggacagagatgctgcagaaatggacgggcagagggaatgcacatcagtgtgggaaggacagaagagctgcagaaatggacgggcagagggaatgcacatcagtgt

SEQ ID NO: 17221 - DNA, 120 bp, synthetic construct
  source 1..120: mol_type = other DNA
tcagtgtgggagggacagaggagctgcagaaatggacgggcagagggaatgcacttcagtgtgggagggacagaggagctgcagaaatggacgggcagagggaatacacatcagtgtggg

SEQ ID NO: 17222 - DNA, 120 bp, synthetic construct
  source 1..120: mol_type = other DNA
tgcaaatgtcattatctgttatttaccacaacagaggacgagaggctgcacaaaattaccgcgcttggcaacggccgctgagtggatttgccaacgatgcttcttcctgctgccagaggc

SEQ ID NO: 17223 - DNA, 120 bp, synthetic construct
  source 1..120: mol_type = other DNA
tctagcaggggctggcccagcctagacctgcagaatctctcacccactctagaaggggctggcccagcctagacctgcagaatctctcacccgctctagcaggggctggcccagcctaga

SEQ ID NO: 17224 - DNA, 120 bp, synthetic construct
  source 1..120: mol_type = other DNA
caagtcagacaataaacttggcagttctctataaggttcgaggtggagataaagtctgaggtttacaaagttaagaactaacaacgtaactgtatcgttaaggttggcggctcatgcctg

SEQ ID NO: 17225 - DNA, 120 bp, synthetic construct
  source 1..120: mol_type = other DNA
acgcagggaggcagaatccagcgttctaaacctctgcacagtcctgtaagttactttttaaaattccgtcgagaggaaactagtaagaccaagagaagctaactcattaaagtctgtaat

SEQ ID NO: 17226 - DNA, 120 bp, synthetic construct
  source 1..120: mol_type = other DNA
ggagtcatccgttctggaaacagccagaggtacaacctcgtgtccaggcaccggccgagttgggactcagggtcaaagccaagctgaggcaacgtcgagatggcgcgtaacagccctcag

SEQ ID NO: 17227 - DNA, 120 bp, synthetic construct
  source 1..120: mol_type = other DNA
gcaaaatataagactgcccagtcttccttcatgaagactcaggtcatcgtttcataggcaggctcccctgcacccacactgtgggacacctttggctgagaccagaaaaaaaaaacgact

SEQ ID NO: 17228 - DNA, 120 bp, synthetic construct
  source 1..120: mol_type = other DNA
caggatctgtgcctcttcatggtcccctatagctggaatatttaccacaggccaggctctgtgcctctccacaggcccctatacctggaatattcacagcagctgtggggttgagagaca

SEQ ID NO: 17229 - DNA, 120 bp, synthetic construct
  source 1..120: mol_type = other DNA
acctccattcacctgtagtccctgtgctccacctccattcacctgtagtctctgtgcccccaccttcattcacctgtagtccctgtgcccccacctccattgacctgtagtccctgtgcc

SEQ ID NO: 17230 - DNA, 120 bp, synthetic construct
  source 1..120: mol_type = other DNA
catctccagtgatgcgtagtctctgtgctccacctccattgacctgtagtccctgtgctccacctccactgacctgtagtctctgtgctccacctccattgacctgtagtctctctgcac

SEQ ID NO: 17231 - DNA, 120 bp, synthetic construct
  source 1..120: mol_type = other DNA
accaactattcagtgagcacctatgattcatcagacactgggaatactgtagcaaacaagccagagacagacatggtccctgttctcatggaacttaccttcaataaggaagaaaattca

SEQ ID NO: 17232 - DNA, 120 bp, synthetic construct
  source 1..120: mol_type = other DNA
cctgtcccccccaaaaaaaaaagaaaaggaaaagaaagatcaaagatacataggaggccagaatgaaatcaattcctgcccagtgcatttgtgtcttcctacttgtgcttttctgtgttt

SEQ ID NO: 17233 - DNA, 120 bp, synthetic construct
  source 1..120: mol_type = other DNA
tgtctctaacacgtatcagactttgaaaaacatatccggaggcaaaacaacctgcctcagagaagcccggcaaacacccacggagtctctagcccgtccactgcggggggacagggacaa

SEQ ID NO: 17234 - DNA, 120 bp, synthetic construct
  source 1..120: mol_type = other DNA
aacacctcaaaatcaagcccagggtcctcagctgggagttcatggccatccacagactccaccgtgccttgccaaatttgtctccagacaaacacacacctggtgtcatacctcatgccc

SEQ ID NO: 17235 - DNA, 120 bp, synthetic construct
  source 1..120: mol_type = other DNA
tatggtactgaaaactgtggcactggaatagaactgagagcccagaaataaacccatacatccgtggtcaactgactttcaacaaggatgccgagaccatacgacggagaaagaacagtc

SEQ ID NO: 17236 - DNA, 120 bp, synthetic construct
  source 1..120: mol_type = other DNA
gacattgccacaaacactaacctgctcatctactcagcagataaacatcagagtcagagcctgaagagccagccgctttcttcctcctttcatgacatcttaagtccttgcaaagagcgt

SEQ ID NO: 17237 - DNA, 120 bp, synthetic construct
  source 1..120: mol_type = other DNA
aacttataattcctcctcaccacaagtttatgtgttaaaaaccatcatcataaaaggaaatgagacccgtatctgaaggaaacagatgttcggtacacggacgacgccgactctcccatc

SEQ ID NO: 17238 - DNA, 120 bp, synthetic construct
  source 1..120: mol_type = other DNA
ttttgtatagagggaatccaatgtaaaattttgtcccataaatttgaaaactgctggtgaagtacaaaaggcatggatgttggaatgaaggctggagccaaatcctggctcgccccctta

SEQ ID NO: 17239 - DNA, 120 bp, synthetic construct
  source 1..120: mol_type = other DNA
acatatcaaatcctgactggctaacccctcactaaccacatatcaaatcctgactggctccacccctcaccagtcacatatcaaatcctggctcgcccctcaccagtcacatatcaaatc

SEQ ID NO: 17240 - DNA, 120 bp, synthetic construct
  source 1..120: mol_type = other DNA
taccttttccttcccaccccaccaacatgtacagatagcactgaattgcccaggccctctcatgacctaagataccacatgcaggccacacagcagctggactgtgcagccagggcccag

SEQ ID NO: 17241 - DNA, 120 bp, synthetic construct
  source 1..120: mol_type = other DNA
tttcaggtgtccatgtttctaaggcttttgcttaaattgcccattggagctctattttatttttaggaatctgacttggagtagacgagaagtgtgagacacttgctgtcaccctcaagc

SEQ ID NO: 17242 - DNA, 120 bp, synthetic construct
  source 1..120: mol_type = other DNA
tcttcctagggaaggaaccccatttccagcaggttattccgagtgctcttcctagagaaggaaccccatttccagctgtgcacatgcagcatttcccctggcattctttcaacagggaac

SEQ ID NO: 17243 - DNA, 120 bp, synthetic construct
  source 1..120: mol_type = other DNA
ttgaaaatgtgaatacttaaattcctacttcttcactggattagagagacacagagcatagactcagacagctgggctctgggaacatttcaggcaactgaagtctcataactgaggctg

SEQ ID NO: 17244 - DNA, 120 bp, synthetic construct
  source 1..120: mol_type = other DNA
gaacgtttatcaagcacctaccacgtaacaggtgctgtgcctgacattttcacatgaccttgctgcctgatgaatgaatcatgtagtgaaagaggtattattactcctctttgtgagtaa

SEQ ID NO: 17245 - DNA, 120 bp, synthetic construct
  source 1..120: mol_type = other DNA
aatttaagccatttatactttatactttaaaacactgaaggtaggcctggccttctgtgggtttaggtgggggcagatcagcaatggccaagggagaatgtcttctctgtggttattctt

SEQ ID NO: 17246 - DNA, 120 bp, synthetic construct
  source 1..120: mol_type = other DNA
gtctaacaaaagttattagagggaactcaggagaatgggcagatatggagtcaccagtaacttccctgatggagaacgccatagaatggggtaaagaaagtgcctatgtagaaatttctt

SEQ ID NO: 17247 - DNA, 120 bp, synthetic construct
  source 1..120: mol_type = other DNA
tcagaatggaatgcgtttgtagagaacttccttcagaacctaaggcgttcccaaagatcctccctcagaacctaatgcgttcccagagaacccccaacagaatctcagtgggttaccaga

SEQ ID NO: 17248 - DNA, 120 bp, synthetic construct
  source 1..120: mol_type = other DNA
agaacctcagtgcattaccagagaaccaccgtcaggacctaatgtggtcccagagaacatccctcagaatctaatgcattcccagagaacccccaacagaatctcagtgggttaccagaa

SEQ ID NO: 17249 - DNA, 120 bp, synthetic construct
  source 1..120: mol_type = other DNA
cagaacctgatgcattaccagagaacttcccttaggacctcaatgcgttcccagagaacctccctcagaacctaatgcattccaagagaacctccctcagaacctaatgcattccaagag

SEQ ID NO: 17250 - DNA, 120 bp, synthetic construct
  source 1..120: mol_type = other DNA
aaaacttggaaaatgggtacagtggcctggtggaaaattccagagacctcaatggagccatcttaagaatggcatattgtcccattgatctatatctcttgttttggtaccagtaccatg

SEQ ID NO: 17251 - DNA, 120 bp, synthetic construct
  source 1..120: mol_type = other DNA
ctctagtgtcccccctggaggaagctgggagatgggaaggggtctggatcaatttcctcgtttgatgatgcactctagtgccccgccctggaggaagctgggagatgggaaggggtctgg

SEQ ID NO: 17252 - DNA, 120 bp, synthetic construct
  source 1..120: mol_type = other DNA
ctgggagatgggaaggggtctggatcaatttcctggtttgatgatgcactctagtgccctgccctcgaggaagctgggagatgggaaggggtctggatcaatttcctgatttgatgatgc

SEQ ID NO: 17253 - DNA, 120 bp, synthetic construct
  source 1..120: mol_type = other DNA
aagtgtgaagagctcatctcttaggtataaaatacagattccaagtgagtaaagaaaatggctacataattccaacgaactcatcttgttcagtctgccacaggccctgcccttgatgac

SEQ ID NO: 17254 - DNA, 120 bp, synthetic construct
  source 1..120: mol_type = other DNA
aattaaaaaaaaaaacaaaaacaaaatgacttgcgataaaactgctctgatcgcagggatctaggtctctggcctcctcctaacttccacagtgacatctgatggggcaccaaggaatac

SEQ ID NO: 17255 - DNA, 120 bp, synthetic construct
  source 1..120: mol_type = other DNA
cttgaaagtcctgcctgctaaggagggatttcttctggggtaacagaaatgtcctggagttgcacagctgggatcgtggcatcatcttatgaatatatgaaaaccaactgaactgtatac

SEQ ID NO: 17256 - DNA, 120 bp, synthetic construct
  source 1..120: mol_type = other DNA
gactacaggcgtgcgccaccacgccccgctagtatttccttttctgacctgcattttctttaaggctattttcacctgttttgtgacccatttttttcccttgttactaaaaagaaatca

SEQ ID NO: 17257 - DNA, 120 bp, synthetic construct
  source 1..120: mol_type = other DNA
gaaaggagaaccagagcctgtgacagcacctggtatcaccagagacaaaaaagaggaaaaattaccagtctctgatttgtagacttccttgccatgctcttcattttcatttttttacat

SEQ ID NO: 17258 - DNA, 120 bp, synthetic construct
  source 1..120: mol_type = other DNA
gcaccctttcctaaaagtgttctcagcttttcgtaagggggagtcacagacagacagcaaattatgaacattgttcagatatctgtggataaagtagccctgagacttttgttaccttgt

SEQ ID NO: 17259 - DNA, 120 bp, synthetic construct
  source 1..120: mol_type = other DNA
gaaatcgaggacaacactcatacttggaaatcgaggacaacactcatacttggcaaccgaggacaacactcatacttggcaaccgaggacaactctcatacttggaaagcgaggacaaca

SEQ ID NO: 17260 - DNA, 120 bp, synthetic construct
  source 1..120: mol_type = other DNA
tttcgttcaagagtttcatggttttcaagagaatgtaaggctcttccattcttcattgggagatactgactgatgactagaaacattccctttcacggatatgcttaggccaggaggatt

SEQ ID NO: 17261 - DNA, 120 bp, synthetic construct
  source 1..120: mol_type = other DNA
ttacagatccattttgagttattaacgaatccctatgctggtttctgccaaataaaagttagttctgtcatgttcctgccatgcacaaccccttcctttataccgactggagataggctc

SEQ ID NO: 17262 - DNA, 120 bp, synthetic construct
  source 1..120: mol_type = other DNA
actggagatcggctcccacacacatctccgtgaccgcgtggccactgcctcctaagggtcttattttatccagactcctgtacctctataatccactagacttttacaaaatacaagtga

SEQ ID NO: 17263 - DNA, 120 bp, synthetic construct
  source 1..120: mol_type = other DNA
gaggtttcagctaagaatcactaaacatttgagaaatgctaaagagaaagaattgccatgctgaacaaactgaagatcttacactggaggacagaggaatggaacaggcactgaagatct

SEQ ID NO: 17264 - DNA, 120 bp, synthetic construct
  source 1..120: mol_type = other DNA
ctgaagatcttacagtggaggacagaggaatggaacaggcactgaagagcttacacttgaggacagagaaatggaacaggcactgaagatcttacactggaggacagaggaatggaacac

SEQ ID NO: 17265 - DNA, 120 bp, synthetic construct
  source 1..120: mol_type = other DNA
ggaagggagtgccctggataccaaacacaaatactgtagtcactggatagatacatcccattaaagtgagtaacttggccatgagttcatggatagatacgtcctcattaaagtgagaaa

SEQ ID NO: 17266 - DNA, 120 bp, synthetic construct
  source 1..120: mol_type = other DNA
actgaagtgagacactcggccgtgagttcgtggatagatacatcccactgaagtgagacactcggccgtgagttcgtggatagatacatcccactgaagtgagaaactcggccgtgagtt

SEQ ID NO: 17267 - DNA, 120 bp, synthetic construct
  source 1..120: mol_type = other DNA
caaaaaaacaagcaaaaagctaatggtgagcccagcatttccactgaaataaaaacctacaaggacagatgctacacaatgaaagtattacaacacagctgcagcttctgctaggagggg

SEQ ID NO: 17268 - DNA, 120 bp, synthetic construct
  source 1..120: mol_type = other DNA
gtttatggggacttttgccacacaatggcagagataaatagttacaacagagaccatatggtcagtaaaggctaaaatatttactatccagcccttaacagaaagcttgctgaccctggt

SEQ ID NO: 17269 - DNA, 120 bp, synthetic construct
  source 1..120: mol_type = other DNA
ggtttagtgtatgagtattagccctttagcagggttataagtatcctttagaatggggaccaaggatatgaacagcactcctatagagcccatagctgagccaatcatccatttggttta

SEQ ID NO: 17270 - DNA, 120 bp, synthetic construct
  source 1..120: mol_type = other DNA
aagttcaggagggaagtaagctgggaaatgtgattctgagaggtatctgcccagaggggatcaccggaaccaagacggtgaatgagatccttcaggaaaagtgtgtgaaaagaaaaagct

SEQ ID NO: 17271 - DNA, 120 bp, synthetic construct
  source 1..120: mol_type = other DNA
aatgggcacagagcaatcacacggccacaggataatgggcacagagcaatcacacggccacagggtaatgggcacagcagcaatcacacggccacagggtaatgggcacagcagcagtca

SEQ ID NO: 17272 - DNA, 120 bp, synthetic construct
  source 1..120: mol_type = other DNA
agaaacaaaagcacttcactgagtaacaagagccagtgcaaaacagactgaagtgaaaatgggaggcgagaaagagaaacagtgcacactcagatttttagaagaagaaatctggagagg

SEQ ID NO: 17273 - DNA, 120 bp, synthetic construct
  source 1..120: mol_type = other DNA
agcgcgcactcagatttttagaagaaatctggagaggatgtgagagagagaaacagggcgcactcagatttttagaagaagaaatctgaagaggacgtgagagagagaaacagcgcgcac

SEQ ID NO: 17274 - DNA, 120 bp, synthetic construct
  source 1..120: mol_type = other DNA
ggatggaggcatctccatggggagagctgaggggaacggatggaggcatctccatggcaagagctgaggggatgggatggaggcatctccatgcggagagctgaggggaacggatggagg

SEQ ID NO: 17275 - DNA, 120 bp, synthetic construct
  source 1..120: mol_type = other DNA
cgttgaagcccaatgggtcttgatgaaactatagatctgattctgtcactgctttgcttaagatccctcaatggcatgatactgtcttctgataaaatgccaaactcctcagcttcccat

SEQ ID NO: 17276 - DNA, 120 bp, synthetic construct
  source 1..120: mol_type = other DNA
gcataaaatatcttcagcactagcaggagtgactcctatagtcgctgtgctggatgctgtcagagagaggcagaaggtcccatccctcaagaaagctatcatagaagaactggtttatct

SEQ ID NO: 17277 - DNA, 120 bp, synthetic construct
  source 1..120: mol_type = other DNA
cgtgcacgttacgagtctgtgagtggcgtgcacgttacgagtctgtgagtggcgtgcacgttacgagtctgtgagtggtgtgcacgttacgagtgcatgtgagtggcgtgtacgttaaga

SEQ ID NO: 17278 - DNA, 120 bp, synthetic construct
  source 1..120: mol_type = other DNA
gctgacatccatccgtacaatgagggccagtgtccactctagatccctaagctctgcaaagcgcagggcctgttatctgttttattcaagataaaaacgttcttcttggcctgaacgttt

SEQ ID NO: 17279 - DNA, 120 bp, synthetic construct
  source 1..120: mol_type = other DNA
ggcatgacccactgcgcctggccttccataactttttgatcaaaattttatcaggaatggatggctactgattattctttgaacctgttgtggtatatttcatgagtgtccagtctaaga

SEQ ID NO: 17280 - DNA, 120 bp, synthetic construct
  source 1..120: mol_type = other DNA
agaagccaggccacagagaacaaagaaaaaaaacaaagaggagacaagattagctcaacttggcaaaaatggaaacggatgacaaagtgggttatccagttacttgaaagttcccactgc

SEQ ID NO: 17281 - DNA, 120 bp, synthetic construct
  source 1..120: mol_type = other DNA
caaatgccgaccacaatcaaaaccatcctttctgtgagcagcatttgaaaacagagccctaaatgtgctctcaccctttctaaccccaaatgaccaaacaccatgatatacactgagagc

SEQ ID NO: 17282 - DNA, 120 bp, synthetic construct
  source 1..120: mol_type = other DNA
gttactgtgtggatagatcgtaggcacgaagggcttggaaacatccctggctcacagttagcactcacacgtgaatacttctcatgtgggcccttccagatgctacttcagaaagtccat

SEQ ID NO: 17283 - DNA, 120 bp, synthetic construct
  source 1..120: mol_type = other DNA
aggtgtgggttacttctgcagtaaggaagttggaaagggtgagtcagaagctaaggaaaacgctcactcccggcagtgaaagtgagccttctctttgtatattatgttatatacttttaa

SEQ ID NO: 17284 - DNA, 120 bp, synthetic construct
  source 1..120: mol_type = other DNA
gaggaacacagatacggactggggaagtaaggaagggccctgggcagctggttctgagtgcaacatatcagtatcaactcaagattttaaaacacatttaaatttctcagctctttcttt

SEQ ID NO: 17285 - DNA, 120 bp, synthetic construct
  source 1..120: mol_type = other DNA
cagtaccatgtacctgttttaagtacgtgcatggagttctgcttttataaagaaagaaaaagtcctggcagcctctaacgttgttcaatttcagcccagaccctatcaagcaaggacttt

SEQ ID NO: 17286 - DNA, 120 bp, synthetic construct
  source 1..120: mol_type = other DNA
aacagtagtttggcctctgaagaatcccaaacttgtggttaataagagaaaaatagacagtttaacacgtggaagattgaaaagtctaaacaggccagcgtggtggctcttccctgtaat

SEQ ID NO: 17287 - DNA, 120 bp, synthetic construct
  source 1..120: mol_type = other DNA
ctgcctttaataaaaggtcataatacagccctggcatcacaaaagctaaccagagaacactgaggatatcagctcatgaagatactctgtctacaatgagactaggacaactgtcttcct

SEQ ID NO: 17288 - DNA, 120 bp, synthetic construct
  source 1..120: mol_type = other DNA
acaattagaacttagggcattttaattggactcagacctcatgttctgaatttaagacggtgacagttacaggaatgtgtgtagggattatggctggaatgctgcctctcacttacagct

SEQ ID NO: 17289 - DNA, 120 bp, synthetic construct
  source 1..120: mol_type = other DNA
gaagccagaggaagcatctcaactccctggaagccagaggaagcatctcaacccccggaagccagaggaagcatctcaactccctggaagccagaggaagcaactcaactccctggaagc

SEQ ID NO: 17290 - DNA, 120 bp, synthetic construct
  source 1..120: mol_type = other DNA
caagaagacggtccccagttttgctaaactggctgctaaaatacccccttccatctgaaaacataattgagatgtgactgcctcaactttaaatccacttggcttcaggcatttgcatgg

SEQ ID NO: 17291 - DNA, 120 bp, synthetic construct
  source 1..120: mol_type = other DNA
taaggataacttgatattgtgcacttcaaagttctccatggattgagctggtcaagcaatgcttaattttcaagtaactacccacctactgctgtgcctttcttccccacagccattcat

SEQ ID NO: 17292 - DNA, 120 bp, synthetic construct
  source 1..120: mol_type = other DNA
ggtgcagccatgaattcaccaaacaccttcctggatttacagtgaacaagattccagggcgcagccatgaattcagatcacatctccctggatttccagtgaaatagattccagggtgca

SEQ ID NO: 17293 - DNA, 120 bp, synthetic construct
  source 1..120: mol_type = other DNA
cctcctcccttccctgcaccaacatacttcatcgttttaaaataaccgtcggtttcttaaggtaaatattaatgttagcccctgcgcaggcatcatcattctctctctcgactaaaatgt

SEQ ID NO: 17294 - DNA, 120 bp, synthetic construct
  source 1..120: mol_type = other DNA
atgtttgttttggcctgggaggggcagaagtgtctacagtcctgcctccctggtgacaccccatagcccatcaacccagcttcccacgagggaagaggtgtggggactctgagctgttct

SEQ ID NO: 17295 - DNA, 120 bp, synthetic construct
  source 1..120: mol_type = other DNA
ccagtgggtttcaccttttttgactgtggcccacaatacaacccatgctgtaacacagtccacacgtctctatgtaactgaaaagcagcacctgcatcaaggcttacaatgtatcctcct

SEQ ID NO: 17296 - DNA, 120 bp, synthetic construct
  source 1..120: mol_type = other DNA
tccagcctgggcgaccaagtgactctttctcaaaaaaaaaaaaaccaaaaaaaccagctttcctgcagaaaggacagtgcagctaccccaagaagcctccagctggagcaacagaaagaa

SEQ ID NO: 17297 - DNA, 120 bp, synthetic construct
  source 1..120: mol_type = other DNA
gggttcacagggtcagagggagggttccggaaggggctgggggagggctcacagggtcagagggagggttccggaaggggctgggggagggttcacagggtcagagggagggtgccggaa

SEQ ID NO: 17298 - DNA, 120 bp, synthetic construct
  source 1..120: mol_type = other DNA
gactgagaggctctgaacacgccacaggctttgcacatgtgagtacgtccacacgccagccatgttctcaccttctccaggtgcacggtaggtgctgtgtaaattaacgacttcattcca

SEQ ID NO: 17299 - DNA, 120 bp, synthetic construct
  source 1..120: mol_type = other DNA
ccaaagacgtgatactggacatgaaacgcttagaaatacaaaaggcccatcaatgccacggacatcattggggagcgtggaagaggcaggaatttacccttcttctgtagtttctgaatt

SEQ ID NO: 17300 - DNA, 120 bp, synthetic construct
  source 1..120: mol_type = other DNA
tgttttctacgtgtcgaatatgaggaacatggaacagaagaaaatagcgctgtccctggagttcaaattccagtggggaagagaggagtctgacaatgcaattacaattcagtaccattt

SEQ ID NO: 17301 - DNA, 120 bp, synthetic construct
  source 1..120: mol_type = other DNA
cctccctagattattatgaggattaatgagacactggacttaaacttctcagcctagggcctggaaagctgcaggtcatcagggtgaccaagggctgaaaacctctccttggctgggaat

SEQ ID NO: 17302 - DNA, 120 bp, synthetic construct
  source 1..120: mol_type = other DNA
actgttctcggtgactccagcaccctctcacccaggctcagtcttccactgaactcctaagccctctctggccattcggaggcttgacactcacgtgtaggactagggtgctccgagtga

SEQ ID NO: 17303 - DNA, 120 bp, synthetic construct
  source 1..120: mol_type = other DNA
ccctgcagagtctagcacacctgccacatgcaggaccccagaatgggggaaggagacatgctgtgtttccaggaagggcagctctccagaccttatcattctcaggctcctggagctgaa

SEQ ID NO: 17304 - DNA, 120 bp, synthetic construct
  source 1..120: mol_type = other DNA
gaggaagaggtttctgactaagctcagaggtctgaacacatggcaggttgggtttcagaggggttattaacatgtctgtggtcacctccagagtccacctgagtaaggctgtggaatgag

SEQ ID NO: 17305 - DNA, 120 bp, synthetic construct
  source 1..120: mol_type = other DNA
ggaggagtcaggctttgcaacagacaggcctgacctgcccccaggcaggagcgcggcgccaccactgtcctgcacaggagcggtgggcgtcccactcacagggaccaggatccccctcct

SEQ ID NO: 17306 - DNA, 120 bp, synthetic construct
  source 1..120: mol_type = other DNA
cacctaccagcaacctcgaatcccaagccctaagccttctgaagagaccaagaaagggaagaagaggctgcagttcctcccagcgttatccctgagcctgagttcctcccagcgttatcc

SEQ ID NO: 17307 - DNA, 120 bp, synthetic construct
  source 1..120: mol_type = other DNA
acattctttgtagatgtgaataaatgaagggtctcaagatgagatcattgtcgattaaccggtgggtcctaaatccaatgctgtgtccctatggaaagagaaagggggaaaacacagaca

SEQ ID NO: 17308 - DNA, 120 bp, synthetic construct
  source 1..120: mol_type = other DNA
cgcgcacagctcccccctctttgcacaccaaatgcagtgcctgccacgcgcacagctcccccctctttgcacaccaaatgcagtgcctgccacgcgcacagctcccccctctttgcacac

SEQ ID NO: 17309 - DNA, 120 bp, synthetic construct
  source 1..120: mol_type = other DNA
agctcattcctgggggacagctgctgttgcaggagttgtttgctccggctctgcctccactgctgggaacagactcgaggccccaccatgggcgggtgttatggcctctctggttgccat

SEQ ID NO: 17310 - DNA, 120 bp, synthetic construct
  source 1..120: mol_type = other DNA
aggtctaccgaacctgtcagcctgtcacacgcatcacatggtgagaaaacctcgcccggcaaccatctcatccttctcactggtttgaagcctggtggtcaccatagcaacaggctcccg

SEQ ID NO: 17311 - DNA, 120 bp, synthetic construct
  source 1..120: mol_type = other DNA
taaactactgtcttagtcatggaactctcaggagtccaagagaagtaggaatgcagtactcatacacaagagaagaatgcggtactcacatacaggagaagtaagaatgcggtactcaca

SEQ ID NO: 17312 - DNA, 120 bp, synthetic construct
  source 1..120: mol_type = other DNA
tctgcatcaatcgcatcgtgattttttgtgtcgactctgtatcgaccctgtaaaagcaaaatctcaatgtttctgtgacaattccatagaaacttttcttcagcttggcctctaggagcc

SEQ ID NO: 17313 - DNA, 120 bp, synthetic construct
  source 1..120: mol_type = other DNA
agggggtggcacaaaagagagaagcaagtcacaagatgagcaagacgcatccaggtgggaccctggcgaagtgtcacacacagcactgaatccagacgcaggggccccagataaactgca

SEQ ID NO: 17314 - DNA, 120 bp, synthetic construct
  source 1..120: mol_type = other DNA
ctctgtgtttgtgtttgtatgggggggtgtgtttgtgtttgtgtttgtgtgtgtgtgtgtggggggggggtgtgtttgtgtatgttaacaatcagcacttcttgccaataattccaggaa

SEQ ID NO: 17315 - DNA, 120 bp, synthetic construct
  source 1..120: mol_type = other DNA
atgaccaaatccacacagccggaaacgcatggacgggccagctgacaggtttcagctaacaggggtttctgctgcggggaggagctcaaggagccaagaactcgagttttctttttccca

SEQ ID NO: 17316 - DNA, 120 bp, synthetic construct
  source 1..120: mol_type = other DNA
cacccggttgtatttgctctgccatcacctattcgcttccactgctgagctcctaagagctgcctccacgtgctgtctgagcttcatcccccaccagctccccatcccccacgggctcct

SEQ ID NO: 17317 - DNA, 120 bp, synthetic construct
  source 1..120: mol_type = other DNA
acgggctcctcaaccccctccggctcctcatcccccacgggttccccatcccccacgggctcctcaaccccctccggctcctcatcccccaccgggttcctcatcccccaccgggttcct

SEQ ID NO: 17318 - DNA, 120 bp, synthetic construct
  source 1..120: mol_type = other DNA
gaactgttctcatggctcctaaaccaccattcaaaccggagagacctaccaaagagcctgctctggcaaacacagagcaggctgtggcccttccttcctctccttaactggtcacgagga

SEQ ID NO: 17319 - DNA, 120 bp, synthetic construct
  source 1..120: mol_type = other DNA
gcctcagggatagcaagcccactctgaggcaaaagaacaaacatgcattgggctggacagaggaccaagattcctttcacttcctttttcttttgcccagctccacagttcccagccctt

SEQ ID NO: 17320 - DNA, 120 bp, synthetic construct
  source 1..120: mol_type = other DNA
tatcaactttaggctgtgcaatctgctcaaggctctttaaagcatcatcctaaaacagtcagcagcattctattgtgtaagacactaaattcagtgacgaaaaccccacagagaatggcc

SEQ ID NO: 17321 - DNA, 120 bp, synthetic construct
  source 1..120: mol_type = other DNA
gatgaaatttcttactgtgagtgcagccagtcaaagtttgaaagccactgagccctaaagggaccttgctcaggacccttggtcactcgatccacttatttattattttttttgtaagaa

SEQ ID NO: 17322 - DNA, 120 bp, synthetic construct
  source 1..120: mol_type = other DNA
tagcccagattcaaggagaggggaaaaaaatctccacttcttgacaagagaagcagcaatgtcaagctgcaaagaggcaacttatagggatgggagaaactgtggtcatgtttgcaaaca

SEQ ID NO: 17323 - DNA, 120 bp, synthetic construct
  source 1..120: mol_type = other DNA
cgtttcttaaggtggaagctgagttcattgacttgagatctttttttctaacataggcatgtagcattataaatctgcccttagctactgctttaaaagtatccagcaaatttggatatg

SEQ ID NO: 17324 - DNA, 120 bp, synthetic construct
  source 1..120: mol_type = other DNA
agataagaatgacaaacagaaagatgggtgaatgtaataatgtgtaggaagatgatgctgggagcctcctttcttcacatggctgccagccccatagaggacaacacagtaagaaccagg

SEQ ID NO: 17325 - DNA, 120 bp, synthetic construct
  source 1..120: mol_type = other DNA
ggggatgcatctagagtgtgacggtgactgggaaacctggggatgcacgtagagtgtgatggtgactgggggaacctggggatgcatgtagagtgtgacggtgactgggaaacctgggga

SEQ ID NO: 17326 - DNA, 120 bp, synthetic construct
  source 1..120: mol_type = other DNA
cgcatgtttactgagaagttacaacaggtcagggactgttttagatgttcacaatgtatcagtggataaaacagaccagagacccctataagcagggagcttacattcttgcagaatagt

SEQ ID NO: 17327 - DNA, 120 bp, synthetic construct
  source 1..120: mol_type = other DNA
gaggtgaaaagaggttatgtggaacagacagtgataacaggatgacgtcacaggtgtgcctcaaagaagtccctggtgagctgggctcataactactctgcagtgatttattcgaccctg

SEQ ID NO: 17328 - DNA, 120 bp, synthetic construct
  source 1..120: mol_type = other DNA
tgggcatgtggatgacttccagtcttttgctgttataactaaataatcacgcagttatatctgtaggacggattctcagaagaggggttactggatcagaggttatttgcagcattagtg

SEQ ID NO: 17329 - DNA, 120 bp, synthetic construct
  source 1..120: mol_type = other DNA
tctaaattgggtctcttggaatggtgaaatcagtgtgtaagggttgggggcagggaccctatatcttagaatggtggaatcggggtgtaagcgttggggaagggaccccatatcttagaa

SEQ ID NO: 17330 - DNA, 120 bp, synthetic construct
  source 1..120: mol_type = other DNA
gggtgtaaggattggggaagggaccccatatcttaaaatggtggaatcggggtgtaagggttgggggaagggaccccatatcttaaaatggtggaatcggggtgtaaggattggggaagg

SEQ ID NO: 17331 - DNA, 120 bp, synthetic construct
  source 1..120: mol_type = other DNA
ttccatgaaatctaggaaaaacctattagaactaataagtgagttcagcaaggccacagaatgaaaggtcaacacaaaatcaattgttggggccaggtgcagtggctcacacctgtaatc

SEQ ID NO: 17332 - DNA, 120 bp, synthetic construct
  source 1..120: mol_type = other DNA
actcttaggataaaataaaaaaacatcacttcagcctacatgcaaggcactacatgacctggccttgcctatcttttcaccatcagtttaagtcacatgcccttgctctttgtgtccttc

SEQ ID NO: 17333 - DNA, 120 bp, synthetic construct
  source 1..120: mol_type = other DNA
tcatgtccagctgtatataagtccagtgtgttcatctagatgacgcaaagaatctcctggtagagaagcgacatgtaaaaaactggtggaaaaaggttttggattttttttccagtgggg

SEQ ID NO: 17334 - DNA, 120 bp, synthetic construct
  source 1..120: mol_type = other DNA
tttcttgaaggctataggatcacctgctttgagtgaaatgggcattcacttcaaacagctgctcgattcaagtgttggttgaagcaagttgacttactcagtgcctactgtgcgccaagc

SEQ ID NO: 17335 - DNA, 120 bp, synthetic construct
  source 1..120: mol_type = other DNA
aagatcagcctcagggccttcctgatgccggagaagggacagaagaagcagggagtgcaggtccaagcaccaggctgaagtgaggctcgtggaggtaacaagatcagcctcagggccttc

SEQ ID NO: 17336 - DNA, 120 bp, synthetic construct
  source 1..120: mol_type = other DNA
caccctcctttcatggccgttctttttcttagatgccaaaagcagaaactccccgagatcgaacctgaaattccgctttgacaagctcagccatgccagctctggtgcggtaaggatgcg

SEQ ID NO: 17337 - DNA, 120 bp, synthetic construct
  source 1..120: mol_type = other DNA
gaatcccttcctgagctcaccagactatcgagagctccaggtccagatgtgaggtggaaggtgctggttcctgggtcccccagtcccttcctgagctctccagactatcgagagctccag

SEQ ID NO: 17338 - DNA, 120 bp, synthetic construct
  source 1..120: mol_type = other DNA
caactcaaacactacctttctcattggtttctaagtcagtagagacagatctgttttaagcagttgggggttcgagtagatctcatgggtacaggaggccagcagggaccaggccagtca

SEQ ID NO: 17339 - DNA, 120 bp, synthetic construct
  source 1..120: mol_type = other DNA
taaatgtgtctttgcagaaattgacaataaataacatattttgtgtccatcagtgttcagagttctttgcatggggccctgggcctgggggtcactgttcagttcactggaagttgcata

SEQ ID NO: 17340 - DNA, 120 bp, synthetic construct
  source 1..120: mol_type = other DNA
tgacaccgtatcaaacccttttccaggtaccatttaactcactcaattgagaaagattgcatgcctagatggctgaagacttttattcctttcacatacagttaaaattgggagtaagtg

SEQ ID NO: 17341 - DNA, 120 bp, synthetic construct
  source 1..120: mol_type = other DNA
agttaacactaaagcattatccctattcctttccctcattttgttctccttttcaaaggaattgatttccgaatttgagaacaattttcaagtatgtttgtactttaggagaacagttct

SEQ ID NO: 17342 - DNA, 120 bp, synthetic construct
  source 1..120: mol_type = other DNA
taacaaataaaaataatgttccatgaaatggctggttgagcccaaattcaatcattcaagtacttcctcacaagacaatcattgtactctgagatgcagaagtgctctctggtactagcc

SEQ ID NO: 17343 - DNA, 120 bp, synthetic construct
  source 1..120: mol_type = other DNA
aaaatatctcctttcctctatgttctctgggatcactaaattgttcatttgttccagaatcctccccttctactggccatactaccactgctatttatgaatatgcatttatgtttgaga

SEQ ID NO: 17344 - DNA, 120 bp, synthetic construct
  source 1..120: mol_type = other DNA
gttttgtatttcttagaggccgagggcatttgaaggatggttctgacaatacgtacataggatgtggtcatgaaccctaagggggtgaggaagatgaagcagccagtggcaatcaacgct

SEQ ID NO: 17345 - DNA, 120 bp, synthetic construct
  source 1..120: mol_type = other DNA
atacaggtatatgcattacaagaaaagattattgtccaattggaggaagtggagaaataaaatattggaaaggagaaagaagaattattattacttgttgatataatgatctctctggga

SEQ ID NO: 17346 - DNA, 120 bp, synthetic construct
  source 1..120: mol_type = other DNA
atagtgggggtactggtgctagaatgaacagatcagtagaactgtctagaaacttaagaaacagccaagttcatgtggaatgtgacactttaattcaccagggaaaggttgcattatgca

SEQ ID NO: 17347 - DNA, 120 bp, synthetic construct
  source 1..120: mol_type = other DNA
ctccaagtcaatattgtcattagctatttttgttgttgttgttgttcagggaccttatttttcagcctgcatgatagttgtttttttccgagatggagtctcttgctgtcacccaggccg

SEQ ID NO: 17348 - DNA, 120 bp, synthetic construct
  source 1..120: mol_type = other DNA
catctcgagaaactgctttctttgctcatccgtaagaagcaactactcatcggtccaagttttattacgagattgtagctcttcagtcacatcttcaggctccacttctaattctgttct

SEQ ID NO: 17349 - DNA, 120 bp, synthetic construct
  source 1..120: mol_type = other DNA
ataagagggttcagcatagggttgataacagtgttgaaaactccaacccctttatccttgtctgaagcctcctctgaacccagtctcatgtagttgaagatacctcttccaaagaaaaga

SEQ ID NO: 17350 - DNA, 120 bp, synthetic construct
  source 1..120: mol_type = other DNA
ggtcagaatacctggaacaacatgagaactatagttaataaagtgtattgcattcaggatttttgctgagtagattacagctgtcctcgccacaggggggaaatgggtaactatgtgaga

SEQ ID NO: 17351 - DNA, 120 bp, synthetic construct
  source 1..120: mol_type = other DNA
ctgcgcccggccggtatccaatatttcttaaataaatggatggttaaaatgtgtacgatatcatcagtatgagctagagttctcagggaagactttctggacacactggaatttgtcatg

SEQ ID NO: 17352 - DNA, 120 bp, synthetic construct
  source 1..120: mol_type = other DNA
ctgtgttcactacagcattctcctctggggcactcagaaactggctctcctaggagagagaaggatggggggagagacacggaaaaggagacacctcaggcccttcatactcatggcaac

SEQ ID NO: 17353 - DNA, 120 bp, synthetic construct
  source 1..120: mol_type = other DNA
ctcatgttataaattagatcttttatcttagcttattttcccaagtattctgaccttttcagctagcagaggatgagagggacaaggtggtggtggcattcggcatctcaaccaagagca

SEQ ID NO: 17354 - DNA, 120 bp, synthetic construct
  source 1..120: mol_type = other DNA
tcagctacatgaggctgggttcagtggaatcttcagacaaggataagggggttggggttttcatgactgtgatcaaccccatgctgaacccacttatctacagcctcagaaatactgatg

SEQ ID NO: 17355 - DNA, 120 bp, synthetic construct
  source 1..120: mol_type = other DNA
gagcatttctttacaccaacaatagatattccaaaaggaaaccaagagaatgatcccatttacaataacaccaaaaagaataaaatacttaggaataaatgaccaagatagagaaaggtc

SEQ ID NO: 17356 - DNA, 120 bp, synthetic construct
  source 1..120: mol_type = other DNA
ctactatgtcaccaggagacagaaatgtttcagctccattatatttgtaatggcaccaccatcacacaggtggtgtgattgaccaaaacatggttatgcagtgcatggctgtattttcta

SEQ ID NO: 17357 - DNA, 120 bp, synthetic construct
  source 1..120: mol_type = other DNA
aatacaggaaaactactatttctgacaaatagtaaccctggtccgagcttgaagtacttcaggaggacacacatttccttatggagtagctcaatttttcaaggtcaacattcatgctac

SEQ ID NO: 17358 - DNA, 120 bp, synthetic construct
  source 1..120: mol_type = other DNA
gtgtggcctgtgctcagatcctgactttctccttcactaaccttagacaaaacacaccattcccaaaaccttgcctccttcattttataaaattggtgtcataacaaacaacacttaccc

SEQ ID NO: 17359 - DNA, 120 bp, synthetic construct
  source 1..120: mol_type = other DNA
gcctggtttgaatcctggagtctctaagcctcagttaccttatgatcggggtgatgattcccacttgatcaagttgttgagagaagtaaaaaggtaatgcttgattaggagatataccta

SEQ ID NO: 17360 - DNA, 120 bp, synthetic construct
  source 1..120: mol_type = other DNA
taggtgtgacacactgggtgagcctgtaagcacagaacagcctgctgaaagctggggagggagggcagaaaagttttcaagaagtggccgtgctgccgcccctactgggaagtgaggagc

SEQ ID NO: 17361 - DNA, 120 bp, synthetic construct
  source 1..120: mol_type = other DNA
ttgtccctccaccccctgcagtgtcattggtctgagcttcgacttcgtggctctgaacctgacgggcttcgtggcctacagtgtattcaacatcggcctcctctgggtgccctacatcaa

SEQ ID NO: 17362 - DNA, 120 bp, synthetic construct
  source 1..120: mol_type = other DNA
catccccagcagccctggcccagatgtgagctgctcagatagccccagccccgatgcctcgtcctcggcctcctgggaactgtcttctaggcccctggacaagatacaagctgttcacct

SEQ ID NO: 17363 - DNA, 120 bp, synthetic construct
  source 1..120: mol_type = other DNA
gcgtcctccaccctgcttcctccacccggcttcctctaccctgcttcctccatcctgggtcctccaccctgcaggccaccaccctgcttcctccatcctgggtcctccaccctgcaggcc

SEQ ID NO: 17364 - DNA, 120 bp, synthetic construct
  source 1..120: mol_type = other DNA
tcagggagaagggagccgcacagggtaggcctctctggacaggcacttcacactccagccagcatgtgccaaagggggtccctctgcctcaccttcggctggtgccccaaggactcagaa

SEQ ID NO: 17365 - DNA, 120 bp, synthetic construct
  source 1..120: mol_type = other DNA
gtcagctctaaaccccttctgagtgtggacataacctcagaccaccctttcttgaggcagtttgcatttaacaaacctggagactaaggagctaagctctaatcgagggatttcaagcac

SEQ ID NO: 17366 - DNA, 120 bp, synthetic construct
  source 1..120: mol_type = other DNA
actatgtgaatcacttccaagtgccaacacagaagctgagcagaggaagaggagcaaaaccgaaatgtgagcgggcactaggggagacacaggcactgtctaatggatacgcaggatctg

SEQ ID NO: 17367 - DNA, 120 bp, synthetic construct
  source 1..120: mol_type = other DNA
acctgaagttgaagcctggggagagatttttctcttcgtacagcccatggaactcatagatgggtctgcagtgccgtacgtgccagtccaggtcacagtgccagtcgatggtgatgccaa

SEQ ID NO: 17368 - DNA, 120 bp, synthetic construct
  source 1..120: mol_type = other DNA
aaatctagggccattttccaaacccaactttcatgcaaactacctgcttcttatggtgagcgctctttgttaagggcctttcagaatacactactcaactgcgtaaatatttaccgagca

SEQ ID NO: 17369 - DNA, 120 bp, synthetic construct
  source 1..120: mol_type = other DNA
caactattctgtcagcctgagacgccctcctccacacactgtagcctggctaaggatgctgtgttctcaactattctctcagcctgagacgccctcctccacacactgcagcctggctaa

SEQ ID NO: 17370 - DNA, 120 bp, synthetic construct
  source 1..120: mol_type = other DNA
tgggcgacagagcgaaactgtctcaaaacaaacaaacaaaaagaaatgggacaaagtactactttgctttcataccatgtttttccttatccctcagagacaggaatccgactcctagtt

SEQ ID NO: 17371 - DNA, 120 bp, synthetic construct
  source 1..120: mol_type = other DNA
ctctaatctggagactcctagttgatggttaatctggagactcctagttgatggttaatctggagactcctagttgatggttaatctggagactcctagttgatggttaatctggagact

SEQ ID NO: 17372 - DNA, 120 bp, synthetic construct
  source 1..120: mol_type = other DNA
gtggactaagattacacgtataatgaaaaatgaaatatatcaatagaaaaaacaatcctgagcctgtctagacttaacaattaaaactatataatataaaattgacagaaccagcaagaa

SEQ ID NO: 17373 - DNA, 120 bp, synthetic construct
  source 1..120: mol_type = other DNA
gactacttcccacacacaacctcacaacaaacatgaaggagcctaaggcctgcctttaacactgcacatgttcattttaccatttgctgaagttgttttagaaaactgtatgatatgaaa

SEQ ID NO: 17374 - DNA, 120 bp, synthetic construct
  source 1..120: mol_type = other DNA
acctgctaaaatctcttagaatttacacgattcttattctactacaagaaagcattatttggtacaaggtgtatttgtggatgtacatgaacagtatatatattatccggatcatgttgt

SEQ ID NO: 17375 - DNA, 120 bp, synthetic construct
  source 1..120: mol_type = other DNA
aaatccctgaacaccactattctccatcactgtaattctgtcatttcaagaattttatacaaaggtgccaagaccacccataaagaaggacaatctagccaagatcccaccactgcactc

SEQ ID NO: 17376 - DNA, 120 bp, synthetic construct
  source 1..120: mol_type = other DNA
tctcgagcgacggctcctcaggctccagcccacctttgcatattcagccagtcctcgtgtcagtgcatggtattgatgcctgctgtgtgcagagtgtggcccaagcgtggtattgatgtc

SEQ ID NO: 17377 - DNA, 120 bp, synthetic construct
  source 1..120: mol_type = other DNA
ttttgcctgaggtcacacagcttacaaatagcagaaccaggattcacatccaagcctatctgcccttaatcccatgaatttcctctctgttgttccatatcgcctcctgatgaacagcca

SEQ ID NO: 17378 - DNA, 120 bp, synthetic construct
  source 1..120: mol_type = other DNA
agtccaatgcagtgcagcccataagccccttggcttccactagaccaggacacctccctctcacccagcctccccttgctctcaccccttggccagcgaaacctcaaagtcaactctctt

SEQ ID NO: 17379 - DNA, 120 bp, synthetic construct
  source 1..120: mol_type = other DNA
cttcgacacccccaaagaccccggcgctccaggttccagcacccccatcctgcgccctcttctccacacgcgcatccccccagcttctcacacagcccagaggcctcctgacaccctcag

SEQ ID NO: 17380 - DNA, 120 bp, synthetic construct
  source 1..120: mol_type = other DNA
cgaatgtgttaagcagggggagtgaattagggagaaatcattccggcttcagaagggcttggaaggtctgcagcagaggtggcgaggccgctggaggtttgaaatggcttttaaaataga

SEQ ID NO: 17381 - DNA, 120 bp, synthetic construct
  source 1..120: mol_type = other DNA
gtgcaatgaggggcgcacaggagcatgccctcaattccaaggagatcgggtagcggcaacatttattgagcgcttactgtgtgccaccgactgccctaaagccccccacccccgtggcct

SEQ ID NO: 17382 - DNA, 120 bp, synthetic construct
  source 1..120: mol_type = other DNA
aataaacagacagtaggataaagagcagtcaatcataggtggccaagaaatatatcccaaaggcagtgacaaataagcaaagaattgagaagactgggaaggaggatgagagttgggggg

SEQ ID NO: 17383 - DNA, 120 bp, synthetic construct
  source 1..120: mol_type = other DNA
tgcctaaattaataaggcctctgaggctcacagtctgaggagggagggagctaactatccttgtgtgctaccacaccacaagtaaaacataaacaaggtgtgacaggaacccaaaacaag

SEQ ID NO: 17384 - DNA, 120 bp, synthetic construct
  source 1..120: mol_type = other DNA
ggtttccctttctgttttgttagggtcttcaagaagtcgagccctaactgcaaggtgagtctccacagcacttacccttttgaccctccctgggccccaacaaagcccagccttccccta

SEQ ID NO: 17385 - DNA, 120 bp, synthetic construct
  source 1..120: mol_type = other DNA
gtattcattcattccacagacaggtattgagggcagccctgacctccaagaacttagtctagcagaggagacagataagagaatcaatcacaaaaatgtaattggtgtcacgaaagagtc

SEQ ID NO: 17386 - DNA, 120 bp, synthetic construct
  source 1..120: mol_type = other DNA
tggtgggaagagtgtggttggtggggggaatgtggttggtaggtagagtggttggtgggggagtgtggttggtgggaagagtgtggttggtgggggagtgtggttggtgggaagagtgtg

SEQ ID NO: 17387 - DNA, 120 bp, synthetic construct
  source 1..120: mol_type = other DNA
ctgctgctctcacgtgttgcccttggccatccacattctccctagatatcttgtttgtatctccaactcttacactcacgaatgtctgtaaattgtatttacagatccttgtttctaact

SEQ ID NO: 17388 - DNA, 120 bp, synthetic construct
  source 1..120: mol_type = other DNA
gggacgttagtgcagaaaaagatcatgattctgaaacttagaatatggaaccagggaggaagggatgacatactcctctagagatttagatgtcagtgttaatggggaaagtaaacccag

SEQ ID NO: 17389 - DNA, 120 bp, synthetic construct
  source 1..120: mol_type = other DNA
ctttaatagtcttatatgaaaactattacttcatttcctgtgttttgtgttaaagatgagctttaaagcaactctgaaaaagaagagggttcctataggtaatttatagactatttaaac

SEQ ID NO: 17390 - DNA, 120 bp, synthetic construct
  source 1..120: mol_type = other DNA
tgtgaactggttaggaaagtcacccggttccaaattaggaaactcactagctcacagaaaagagccacattctgcaatcccagttttattcttttttgtttgcttgtgtgtgtgtgtgtg

SEQ ID NO: 17391 - DNA, 120 bp, synthetic construct
  source 1..120: mol_type = other DNA
tttgtgagcagatttgttctaggggtgtgggggactaagaaaggggtggaatataaacagtgcagtgtaaacagtgcagtataaacagtgcagtataaacagtataaacagtgcaaacag

SEQ ID NO: 17392 - DNA, 120 bp, synthetic construct
  source 1..120: mol_type = other DNA
ggcgggcccaaaggccccccgcccactttagttttcccgcgactgcccaatcaacgccaagcaaccgcaatccgtagagacctaaggaacgcacatccgccaatcacgagttgcgtcgcc

SEQ ID NO: 17393 - DNA, 120 bp, synthetic construct
  source 1..120: mol_type = other DNA
tggtctagaaaaggagggtcataaaatgactgcatataaagaacagttggtgtccattttagagctgttctagtggccaagaacctgagagcaagttacatggacatctcttaagcacga

SEQ ID NO: 17394 - DNA, 120 bp, synthetic construct
  source 1..120: mol_type = other DNA
tcactttaaattgggttttgtgatgaaattaaacaaacagaaccaccagaaacggaactcttactacgattccatgattccagaatgtgtccaaaacctcatttcagttctcagtgtcct

SEQ ID NO: 17395 - DNA, 120 bp, synthetic construct
  source 1..120: mol_type = other DNA
tcatccggcaacagtcttccctaaaaccattcctaaaacgaaacaaagctacttcagaccaacagcgttgaacaagggaaaagaacagataaaacacagtgccatgtgcatgtagcaata

SEQ ID NO: 17396 - DNA, 120 bp, synthetic construct
  source 1..120: mol_type = other DNA
aagacatgtagtctctgccaacttcaccctccatgaggcttactgcctgcggttcctggtcctgtgtccggagtgtgaggagcctgtccccaaggaaaccatggaggagcactgcaagct

SEQ ID NO: 17397 - DNA, 120 bp, synthetic construct
  source 1..120: mol_type = other DNA
gaagtcatttagcccctccacacaaagcccatggaaaggaaatgttaatcctgcctttttcatgctaatctgagtctacctccagttttcctatttccaatcctttccctacaggcttat

SEQ ID NO: 17398 - DNA, 120 bp, synthetic construct
  source 1..120: mol_type = other DNA
ctttcatgaatcttctgaaaagcttcaggttaatgtgagctgctttggtatcttaacaccaaaggtgtcattggggtcattgccagtgtccagcatcaacaattcagacaagcaccaaaa

SEQ ID NO: 17399 - DNA, 120 bp, synthetic construct
  source 1..120: mol_type = other DNA
acctcagcctcccaaagtgctgtatacccatgtcttaatatctgaaaatcccacatttgccccactttatggaagatgtgttggttctccagccctgtttccccctctaagacctgtgat

SEQ ID NO: 17400 - DNA, 120 bp, synthetic construct
  source 1..120: mol_type = other DNA
aggcactattattgttcaatattgccgatgaggaaactaagcctcagagaggtgaagtaatttgagtacataacccaactactcagtgacaaagccagcagccatcctgactatgggtcc

SEQ ID NO: 17401 - DNA, 120 bp, synthetic construct
  source 1..120: mol_type = other DNA
ctgtgaccctcactttggaatccaaccacacagatgatgaccagcagcaggaggccgaggcccagggacagcaggagatggcagggcccagagcagagacgctgcaggagggactggaga

SEQ ID NO: 17402 - DNA, 120 bp, synthetic construct
  source 1..120: mol_type = other DNA
agcgaatattcccaaagctaaagtcccacaccctgtagattacaagagtggatttggcaggagtgtgccccaaaatacagtggaaaggtgcctgaagatatttaaaccacgtcttggaaa

SEQ ID NO: 17403 - DNA, 120 bp, synthetic construct
  source 1..120: mol_type = other DNA
agagcaaaactccgtctcaaaaaaaaaaaaaaatcacagtaatgtcatagcgtgggaagtgggtactttagattgggtgatctaggaaggcctctcatagctgagacgtgaatgatgagc

SEQ ID NO: 17404 - DNA, 120 bp, synthetic construct
  source 1..120: mol_type = other DNA
acagtttcaaatgcagcagacagccaaagcaatgagtggggggctgtggaacttcattcccaaaggcagcgccagtggctcctgagcaatgagaatgtcctgtcctgtccaccatattca

SEQ ID NO: 17405 - DNA, 120 bp, synthetic construct
  source 1..120: mol_type = other DNA
tggagattccaaggattttagaagttgaatgccaggagcctggtcaggagaccaaatatgtatctctcagtatcacagagcctgtcagtcctactggttttactcgtaaaatttatccta

SEQ ID NO: 17406 - DNA, 120 bp, synthetic construct
  source 1..120: mol_type = other DNA
tgtttttagacatttgaagctaaaccaaatagcttaggactttggagtttggaaggaaagcaggaaccctcatgctgtcttcttttttaggtatgtgactgtcagtatcacttcgcccgc

SEQ ID NO: 17407 - DNA, 120 bp, synthetic construct
  source 1..120: mol_type = other DNA
tcagtgaggtcagtcgtgggttaagatctgcagaggtggtgtgtgaggctggtagaacatgcgccattttaggaatttcttttcttccttcctttcttttttttctctctctctttcttt

SEQ ID NO: 17408 - DNA, 120 bp, synthetic construct
  source 1..120: mol_type = other DNA
tggaaatcagattttagtgagttgaaggactgtggctgagaaaatggagacacttataggttgactgcttaaggaggaagaggcactgccatttattgaatgtctactggctttcaggta

SEQ ID NO: 17409 - DNA, 120 bp, synthetic construct
  source 1..120: mol_type = other DNA
ctttccatatctgctagttggggatattaatagtatctacttcaaaggctggtcaataaataactgatgggagtagggtgtggccaagcaagtgctagctcatcagagctacacggaaag

SEQ ID NO: 17410 - DNA, 120 bp, synthetic construct
  source 1..120: mol_type = other DNA
gtggcgcagcagactattgtaacaggtacccgcactgactactgtaccgtaggagacatgaattaaagagaacttactcttttgacaaatgcattcttgagagccaaagaatatttctca

SEQ ID NO: 17411 - DNA, 120 bp, synthetic construct
  source 1..120: mol_type = other DNA
tttcccttgcaggtcattctctgattaatttttgggttcaaaggtttcacagatgtctgtggttagcaaaagcctggatgccagatgagaaaacttttactgtatatgtgtctactttga

SEQ ID NO: 17412 - DNA, 120 bp, synthetic construct
  source 1..120: mol_type = other DNA
ttattcatagcatttatcagtatggaaatttttcctgtcaggcttagttttcttggctagtcattagaatgcgaactcggcaaatactgggatggggcgtgtctccttcactgcagcatg

SEQ ID NO: 17413 - DNA, 120 bp, synthetic construct
  source 1..120: mol_type = other DNA
agggatctgtctcaccaaggccctgcctctctctctggctccacgttctggggatctccacctcctcagtgaccccatcactccagggcccatctccgctgtgatcacacattcccaggg

SEQ ID NO: 17414 - DNA, 120 bp, synthetic construct
  source 1..120: mol_type = other DNA
taccggacaaccccgcctccccatggccctgcctcctaggtaaccccgccctctcatggccctgcctcctgggtaaccctaccttcccgtggccccacctcccgtatccctgcctcccca

SEQ ID NO: 17415 - DNA, 120 bp, synthetic construct
  source 1..120: mol_type = other DNA
tgtaaatgtaaaaactcaagaaaggccaattacacatatattggcagctttctggtttttctggatgtggaaaaagattgcagttgtgacattgcacccttcccttcccttcccctcccc

SEQ ID NO: 17416 - DNA, 120 bp, synthetic construct
  source 1..120: mol_type = other DNA
cgtgctgttttgagctaaaaggttctcgaatgggacagtctgtattgcaggctgcaggaaaccactccagggacccatccttgccattccctggagttccaagacagagtggggggaaag

SEQ ID NO: 17417 - DNA, 120 bp, synthetic construct
  source 1..120: mol_type = other DNA
ccattgtttttccccctagtcatatctacctcagatctaaagaaacaagcttcaatccttgagaaactactgccaagcttccagtgtttccactaccccaacactatgtatatccacaga

SEQ ID NO: 17418 - DNA, 120 bp, synthetic construct
  source 1..120: mol_type = other DNA
taaataaataaatatagtttttcatcaaagactacagttaaccaatgtttgtatctaatctgccaaaaaggcaagagtctcagcatatttttattttcacctttcctccaccatgtcctg

SEQ ID NO: 17419 - DNA, 120 bp, synthetic construct
  source 1..120: mol_type = other DNA
gaaggttccagtgtgtgggcacaggcagcaggagtcggggaggtgtttctagcagggcctggcctccttcccaaagtctttttttttttattgtaattttatttattttttttaattaat

SEQ ID NO: 17420 - DNA, 120 bp, synthetic construct
  source 1..120: mol_type = other DNA
ggaatcaagcctgcaatggacttgactaaacatcatgaacagaataactcttacatttcacctgttttaccccacctctaatacaacttctagtgactccgccagaaaattgactgccct

SEQ ID NO: 17421 - DNA, 120 bp, synthetic construct
  source 1..120: mol_type = other DNA
ccctagggcagcagcttctggcagaaaaaggccaaacccaggattctagggcagttaaatttagaaacaaaagccaagattcattctatcactcaataatcattttcttcaatggctgac

SEQ ID NO: 17422 - DNA, 120 bp, synthetic construct
  source 1..120: mol_type = other DNA
tacctgttctttattccagataacattccttgctctgaagtctgctctgcataaaattaatatagctactctcatgttcttttcattcgtattaacatggcttatctgtctccattcctc

SEQ ID NO: 17423 - DNA, 120 bp, synthetic construct
  source 1..120: mol_type = other DNA
cagtctgaggagatccactcaaaaagtacctatgcatagtcaacgacagcatcacacatggtcctctatgcacgcagggctttaccatttatgaagcactttcaacatctattatttcat

SEQ ID NO: 17424 - DNA, 120 bp, synthetic construct
  source 1..120: mol_type = other DNA
ttgcatatacatacatttaagtaatgtatgtgtatccatgggtctagacattcttaactgggaaattctatgttctgtgccctcagattgtgcctgtgtgagaaggccctggcagagtac

SEQ ID NO: 17425 - DNA, 120 bp, synthetic construct
  source 1..120: mol_type = other DNA
ctctggcccatcagaggctaatctctaacaaagaactgagaaactttgaggatggcaaaggtggaaggagttgaggcttggcagagaatgccttcaatctgattctgaagaaagatccag

SEQ ID NO: 17426 - DNA, 120 bp, synthetic construct
  source 1..120: mol_type = other DNA
cttctcgagaaactgataagctgttttctaaagtggctgcaccattttacatttacaccaacaacatgtgaggattcccatttctccacatccttgacaatatttactattgtccgtttt

SEQ ID NO: 17427 - DNA, 120 bp, synthetic construct
  source 1..120: mol_type = other DNA
ccagaacactgaatgttttatgcttttgtctggtgagaagtctcgtggacagtcaatgtcttgttcctttgtgtatgcacagtttcccctctttccttgaagtcttctaatcttttcctt

SEQ ID NO: 17428 - DNA, 120 bp, synthetic construct
  source 1..120: mol_type = other DNA
gctgtctcctagcaatccttaaagctgtgaaacctgagagatagaaaaagaaccattttcgtctctgatctccccactccagagccagacttcataggagcagtcaggggacgttccatt

SEQ ID NO: 17429 - DNA, 120 bp, synthetic construct
  source 1..120: mol_type = other DNA
catacaaatattttctgttctttaagaacctgaaaaatcagctgacttctaaatatcagcacttttgctatagttttagattttcattgggccttgagcaacgcctcccccccccccccc

SEQ ID NO: 17430 - DNA, 120 bp, synthetic construct
  source 1..120: mol_type = other DNA
agtataatttaaaaaacaaacaaacaaaaaaacaaagctgtctctccaggagtccttgtctccatggaaacatgagttgtgattgtccacacccacaatccctcctcccctgaccttgcc

SEQ ID NO: 17431 - DNA, 120 bp, synthetic construct
  source 1..120: mol_type = other DNA
cagcagggttgtttgagaggtcagtgaggtaaagcacgtacatgccttgtgcaatgttaacttaagtaaatattaaagaagtgtaacctgatgctgttagcagtggcccgctattagact

SEQ ID NO: 17432 - DNA, 120 bp, synthetic construct
  source 1..120: mol_type = other DNA
gtttagacgagtgaaattttccttttctgttgatccacgtgtttggtgttggttatacattaagatggggcgggagtgagaacaatctcttaacattcattgaaaaaaatactgaaacat

SEQ ID NO: 17433 - DNA, 120 bp, synthetic construct
  source 1..120: mol_type = other DNA
gctagacatctgatggtgacgtcgcacaacgagccccgcacctcagattcctcgtgtattaaacggagaataataatattacccattgcatacagttttgtgatgattaaatgagttaat

SEQ ID NO: 17434 - DNA, 120 bp, synthetic construct
  source 1..120: mol_type = other DNA
tgccttatttaatgtaacaaatcagaagagaaagaacttaacataggaaggactgtaaatccctgaagagcttctctgagagcattttcacagatgtctcagagaaagagagagaaagaa

SEQ ID NO: 17435 - DNA, 120 bp, synthetic construct
  source 1..120: mol_type = other DNA
actgtgtttccattatgattaagttggtaggcaaaaaatactcagtggaaagtagagtggtgggttattgaacctttccctcatactatcatcatcggaacacttttgtggagtgttgtc

SEQ ID NO: 17436 - DNA, 120 bp, synthetic construct
  source 1..120: mol_type = other DNA
ttattacagcacatcccagctgacttctctgccttcttcctaaccctccttccatctgtcttccactcaactggcagataggtcttccgtaagtgatcactgtttcaccaaacatattta

SEQ ID NO: 17437 - DNA, 120 bp, synthetic construct
  source 1..120: mol_type = other DNA
attgtggtggtggttacactatgtttacctttttttttttttaactcagaactaactgtacacttgcaatgggtaaatttgtgtattgaaaattatgttctgttttagactagattttca

SEQ ID NO: 17438 - DNA, 120 bp, synthetic construct
  source 1..120: mol_type = other DNA
aaatgttcccgtctctattgcctatgtgtatcttcacctttgttacagtgctatagctctgtctacctgtaattcattataagggagaggagcagaggtgacattagaacgtaatcccag

SEQ ID NO: 17439 - DNA, 120 bp, synthetic construct
  source 1..120: mol_type = other DNA
agtctgggagcagacacaaaaggaaaaaaaagaaaataccaactccatgtgtctgaggtatcacttatagtttaaaaaaaatgattgtcttatcatgtttgggaaaatactggtcttcct

SEQ ID NO: 17440 - DNA, 120 bp, synthetic construct
  source 1..120: mol_type = other DNA
catatctgcttgcaacactcgtcctaataggataaaaggattaagtagttttagggtggccaagaggaggggacagcaggagacaagtggttaaaagtgaacgttcccaatatttcttct

SEQ ID NO: 17441 - DNA, 120 bp, synthetic construct
  source 1..120: mol_type = other DNA
cttatcaaacctgaggtccttcagacttatatttttaaggtatcttatatatattttttagtgatatcctttttgctggtctatcctaatttaatatttcttaaagatgtcaaggcctac

SEQ ID NO: 17442 - DNA, 120 bp, synthetic construct
  source 1..120: mol_type = other DNA
aggcacactagtctagcagacgggtacccagccaggctaaagctctgcagagtttctaagggttgttatgattagtctcttggtgtgtatatattgctaatgtaataagaacataaacat

SEQ ID NO: 17443 - DNA, 120 bp, synthetic construct
  source 1..120: mol_type = other DNA
cttgggaacagacatggagaccaaccatgtggaggggctcaggaaggtgagaacggagagagaaaatgtccttggaggagttttttgatgtctaagctgagtcttagaggatgagtaaga

SEQ ID NO: 17444 - DNA, 120 bp, synthetic construct
  source 1..120: mol_type = other DNA
ttgtacaaattacccttaatttaagatgaattggtgtagcataattcaggggtcaccacgtactcccctctgaataagaaggctgaatctcagtggtcagcaatgagggagattcatttt

SEQ ID NO: 17445 - DNA, 120 bp, synthetic construct
  source 1..120: mol_type = other DNA
aagttctgaatttacatcagtcgtctgccactctataatatctataacttgagatatgttcagaaatagaaaactcctaaataagattctggggagacattttcaaaacagttttctgta

SEQ ID NO: 17446 - DNA, 120 bp, synthetic construct
  source 1..120: mol_type = other DNA
aaatcatcattcaaccctcagcatgaaccatgaaccgatttgcatgcgtgagtgaatgaatataaaagaatttttttgttcaagaaaattagtctttttctgaccacccccatcaaatag

SEQ ID NO: 17447 - DNA, 120 bp, synthetic construct
  source 1..120: mol_type = other DNA
tacaccctttcagttgaggaaaccaaggaccagagaggttaaataagttacccacttttaaataactagttaacttcagagtcagaactagaatgcagaccacctgatcctactcagcat

SEQ ID NO: 17448 - DNA, 120 bp, synthetic construct
  source 1..120: mol_type = other DNA
gtatgtgtgtgtgcctgtgtgcgtctccaggcttgggatgctttcaaaaatccatctaggaatgggaagagccgatggtttttgtttttttaatcaaaggctgaatggtatgattaagag

SEQ ID NO: 17449 - DNA, 120 bp, synthetic construct
  source 1..120: mol_type = other DNA
tcattttcttccactttttaaaatctggaagacttcactgagtctgcatttgcccagaggtctctgtatgtggccttcctaatttctgtgctctcttgacacctcccaccctcattctac

SEQ ID NO: 17450 - DNA, 120 bp, synthetic construct
  source 1..120: mol_type = other DNA
caacatttgcatatcatctgacttagcagtttcacatctaggaatttatcttcggaatttcttctaaccagagctgtgaacaaaagtctacccataagatatttatcccaacatgctttt

SEQ ID NO: 17451 - DNA, 120 bp, synthetic construct
  source 1..120: mol_type = other DNA
tatgtgcactgctttttagccatctaaagtttcctttctgggtatataggagatgtaacaacacagaggtatctttgtaatctttcatctggaaaatcatattgtgtgccatgttgggaa

SEQ ID NO: 17452 - DNA, 120 bp, synthetic construct
  source 1..120: mol_type = other DNA
ggcatgaaaaagattcattttttcctcacaaattgatgtggatggtttgcagctgtggactttaatcttcaacatcatctgttcttaaacaagttatccatttgtaaactgctgatttgg

SEQ ID NO: 17453 - DNA, 120 bp, synthetic construct
  source 1..120: mol_type = other DNA
gtgtggtccactccatcaggatgcttggctttgaagagtgttgaagcaagaggggtattaccttgggggaaatatgaagaaagtaatttatttgatgcaggaagttaatagacagtagag

SEQ ID NO: 17454 - DNA, 120 bp, synthetic construct
  source 1..120: mol_type = other DNA
tctaactcgtcataattctacaagttagtctttttcctagaagggccctctcatagatacaggccctctctcctgccataggaacactgcaaccctgtgcatagaagggtatcatctcac

SEQ ID NO: 17455 - DNA, 120 bp, synthetic construct
  source 1..120: mol_type = other DNA
gagaggagtaagtgaaacctagctgccctatagccaggaagggacagaacctatatgaatccagaacactctaatcctgactctcttaaccactttactcttagctagcaaaatcaagaa

SEQ ID NO: 17456 - DNA, 120 bp, synthetic construct
  source 1..120: mol_type = other DNA
attagtttctaatttatttttatatgatttgcttaaatcgttcatactgtctatagtaaaactattgaaagattcctacatttttttggtggtatgtcacaactaaatttgtggggtgaa

SEQ ID NO: 17457 - DNA, 120 bp, synthetic construct
  source 1..120: mol_type = other DNA
tggtgaggtttgcagtggatgagggaagggagggtttaaagcctgggcttggcatccctgggctagatgacatctgcgtgttcatcctggtttatagttgaccttcacagagcacacctg

SEQ ID NO: 17458 - DNA, 120 bp, synthetic construct
  source 1..120: mol_type = other DNA
catgttcctgctactttcctgacccctatactcagcctggaattattgtaggagatagcaagagcattcagaagagtcagttggttaccagtgccttggtgtttactcttttatgtctta

SEQ ID NO: 17459 - DNA, 120 bp, synthetic construct
  source 1..120: mol_type = other DNA
tcctgaatctcctggacaaggacagtgtgcagctgcagccccaatgggatctctggtgtggcctggcctgctagggcctgccccaggctgtcctgtggtacctggatgcgccttattaca

SEQ ID NO: 17460 - DNA, 120 bp, synthetic construct
  source 1..120: mol_type = other DNA
tgggtctaatgtctacctggagccttgggtctaatgtccacccggagcctacgtatctacctaaggcatgatgtctacctgcggcctgatgtcctcatgagtctggtgttcaacatgggc

SEQ ID NO: 17461 - DNA, 120 bp, synthetic construct
  source 1..120: mol_type = other DNA
catgtatacaggatccacactcctgcccacaaacaccaggtaatgcatgaggggaagggaggctgccttgagactaagcactgcctcactacctaaaagcactctgtcatcatgagggtg

SEQ ID NO: 17462 - DNA, 120 bp, synthetic construct
  source 1..120: mol_type = other DNA
aagttttaaaacacacagaaaagttgaaattgttaacatccagatacatacccgctagatatgtaccgactagattctgcaattgccagtgtttttctcatcacatttctctccatatgc

SEQ ID NO: 17463 - DNA, 120 bp, synthetic construct
  source 1..120: mol_type = other DNA
ttttaggaaaggcacttatcagaggccaaaggcttttgtattttggcttcagatgcttggggcaatctgaaagctgggaaaataagggaaaggttatacccacaagaggatcttagagaa

SEQ ID NO: 17464 - DNA, 120 bp, synthetic construct
  source 1..120: mol_type = other DNA
ttcttctcccctacctgttatatttaaaacaaagaaaagcacaacttgagatttttgttgttacgggtattcagccttcagtcaccgtctgagttctccagttgctgcctccttgtcttg

SEQ ID NO: 17465 - DNA, 120 bp, synthetic construct
  source 1..120: mol_type = other DNA
atgagggttacatgagattacacatgtcaaatgccttgtaaatagtagaattttatacaaatataaagttttgcaccttcaaagctatcactccaataagacacttattcaattaaacaa

SEQ ID NO: 17466 - DNA, 120 bp, synthetic construct
  source 1..120: mol_type = other DNA
tacaaaagaacagtcaagaggtagatcaagttcaataaactgagagcaggtaggggtgaatctctgctctacgtgacaactggcttctggtagaggggatgcaatgccctaaggcataaa

SEQ ID NO: 17467 - DNA, 120 bp, synthetic construct
  source 1..120: mol_type = other DNA
ccaatcacgggtcctgctaaggcatcgatttactcaatggcaacaaatgttaaaatctgtaagttaaacttctggtttaagatggtgcagtgaagtcagacatgaagatctccctgccct

SEQ ID NO: 17468 - DNA, 120 bp, synthetic construct
  source 1..120: mol_type = other DNA
atgactatcactctcgtaattttaggaactgatctatattaactcaagaattttgcattttcagggcaggatggatggtttaccacaactcatgacagtaaagagtggtctctgataggc

SEQ ID NO: 17469 - DNA, 120 bp, synthetic construct
  source 1..120: mol_type = other DNA
acctttctagattcaaacacccaatggctctttccatcttcatcaatgtgattccaccaacgtaggccaaccattagtctacctgtgacattctggtgaagattaatataaacaggcaca

SEQ ID NO: 17470 - DNA, 120 bp, synthetic construct
  source 1..120: mol_type = other DNA
catcataatgcttttctattttctaatatttccaatttttttactatacatagtttgatataattttactctgtgaatgatcttcactgtgattcataaaatcacctttttttgttcctc

SEQ ID NO: 17471 - DNA, 120 bp, synthetic construct
  source 1..120: mol_type = other DNA
cacaccttgatgtttaaccccttgagcctcattctggacttctgaccaccagaactttacaacagtacatatgacttcactgccgcagtagcaacaggaaatttatacagtacctaagct

SEQ ID NO: 17472 - DNA, 120 bp, synthetic construct
  source 1..120: mol_type = other DNA
cggggcaagaaacctgtctgtactggtcacaaccctatccctgggcctacaaccgtgtctgagtcatagtaatccctcaacaaattttgtgtgaaccgaaagaaaaaaacacttaagaca

SEQ ID NO: 17473 - DNA, 120 bp, synthetic construct
  source 1..120: mol_type = other DNA
ccccgaatgcaggggggcggggttttattgtataatataattttctttaaatattttacaaagacttactcctgtacagtattacttttgtactttaaattgtagaagcaactttttaaa

SEQ ID NO: 17474 - DNA, 120 bp, synthetic construct
  source 1..120: mol_type = other DNA
ggtcaaggcttgaactttctaatgggccatagctcttgtagtgggctgcactcttctaaattacctggtccctgcaccatagtccaaaggtttaagcagaaacctcaatgcacttgatgt

SEQ ID NO: 17475 - DNA, 120 bp, synthetic construct
  source 1..120: mol_type = other DNA
cactctaaaaggatcaagggctgtatagatgcgaggccgttctttcttaagagacagggtggctgtgcccacttgtggagctagcatgcggtttggtttaatgacctgcatactggtcag

SEQ ID NO: 17476 - DNA, 120 bp, synthetic construct
  source 1..120: mol_type = other DNA
agatatcaactagtatgtttctccgaataactcatgaagaatttcttctttgtgattttctagaattgccagttttctgaattggatgtatattacttttgttataaatgttttaggaaa

SEQ ID NO: 17477 - DNA, 120 bp, synthetic construct
  source 1..120: mol_type = other DNA
tttctcaacctaatctccatcaaggtcaagacactttggtaagcagtgataccagccatttagtctatctgtaaagaactcacagagtcctgggaatttaaccatgtcaaagcattcttt

SEQ ID NO: 17478 - DNA, 120 bp, synthetic construct
  source 1..120: mol_type = other DNA
tgtggatggtttgcagctgtggactttaatcttcaacatcatctgttcttaaacaagttatccatttgtaaactgctgatttgggggggcattgtccccataaacttcttgtaaagcatc

SEQ ID NO: 17479 - DNA, 120 bp, synthetic construct
  source 1..120: mol_type = other DNA
cctgagtgagtattgtggaagtaactgaccacagggttcagaagagatggcccaggaacaggtgggtggaaatgccacctcaaggcagaatgtgcactcagaagtctctcagctgtaatt

SEQ ID NO: 17480 - DNA, 120 bp, synthetic construct
  source 1..120: mol_type = other DNA
gtctacttttagaagttggctcttttgagaaacaggcttataataatcattatcattgtagagttttagatgatgggtttcatttgcataaataacactgtgcgacctccccttgaaaat

SEQ ID NO: 17481 - DNA, 120 bp, synthetic construct
  source 1..120: mol_type = other DNA
ctcttcaacattttcctgtatacctgctgctacacaccactgaaaaggatcagcattgccaacacatgggtcggagctgtggttggggccatcccgcctgtcatgggctggacagcggcc

SEQ ID NO: 17482 - DNA, 120 bp, synthetic construct
  source 1..120: mol_type = other DNA
acgtgggaggcagtgtcagcaaagcggtggtgagcaaggaagccggcggcgctgcctggatggggagcccgaccccaccgctcatgagctgtgcatccttcgcggctgaattcagcctct

SEQ ID NO: 17483 - DNA, 120 bp, synthetic construct
  source 1..120: mol_type = other DNA
tattcaacttcctcaaacctggcaccaagcaacaagaaccttctctttctgggaagacccagacagggccagagtcagggccaagtattacagccttagggacaggtagtacaggagact

SEQ ID NO: 17484 - DNA, 120 bp, synthetic construct
  source 1..120: mol_type = other DNA
ctaaaaggaaggcaatatggtttagggacattaagagatgtctcaagtgagcttgaagtagaatttacaggttagttctatttggttattttcatataatagcaccctgagtctacgcat

SEQ ID NO: 17485 - DNA, 120 bp, synthetic construct
  source 1..120: mol_type = other DNA
ctcctgacagcaaatccagggctggtatcccaggggaggaaaaaaatcaaaaaatccaacagaatcactcacagttctgacctccacacctaccacccacctgttgccctgaataaagaa

SEQ ID NO: 17486 - DNA, 120 bp, synthetic construct
  source 1..120: mol_type = other DNA
tgttttcttcttaggaaaaaatgcttcgttcatcccctcaccccatgccagaatgcaatactcttttttttttttttgagacgcatgatctcagctcactgcaacgtctgcctccctgat

SEQ ID NO: 17487 - DNA, 120 bp, synthetic construct
  source 1..120: mol_type = other DNA
caatgtaggtatcattgatcctggtggccaagatggggtctttgtgtctaaacgtcttcaggcacttccctgtgtctacatcccatactgaaaaggagggagacagaggaagacatggga

SEQ ID NO: 17488 - DNA, 120 bp, synthetic construct
  source 1..120: mol_type = other DNA
ataacactggaatagtgactaacatgtacaaaatgcttgatcagtgtcaggtggtttttagatagaagcgtcctgaatgaccaccagccttagaatccatggcactgattccacggtaca

SEQ ID NO: 17489 - DNA, 120 bp, synthetic construct
  source 1..120: mol_type = other DNA
atgttaaagctttttcttctaatattcccaagggttttgcagccttaccaatgccttaccagtttctcagagcctacaatgcagccacagtgcattgaatgatggcacagtgctctgaaa

SEQ ID NO: 17490 - DNA, 120 bp, synthetic construct
  source 1..120: mol_type = other DNA
tttccctcccagtcacattttaaaacattctccaaatgcatacctaaaaacaaaacaaacagttttcaaggagggggattttgattaaaaacagaaagacagtggactagatcagagagc

SEQ ID NO: 17491 - DNA, 120 bp, synthetic construct
  source 1..120: mol_type = other DNA
tctgtaagaacaaatgtaaattatttcttcctctaagaatgctaataaagaaaatttttctgatttgcagtcatcaattagaaaatatatctgataactgttataaatccatctcattca

SEQ ID NO: 17492 - DNA, 120 bp, synthetic construct
  source 1..120: mol_type = other DNA
ggttcaaagtcctgtgctagtagatatcacaggaaatataaataattatcagataaggaccttacttacaatgagcttattgtcccataaaactaggtgagttgaattaatctttcaatc

SEQ ID NO: 17493 - DNA, 120 bp, synthetic construct
  source 1..120: mol_type = other DNA
atgggaagatatctatagtactttgctgggctgggttacagaaatatgtgtaatataacaccacttctactaaaatatgtgctaagtatgcaaagaaaagaattctagaagggtagacat

SEQ ID NO: 17494 - DNA, 120 bp, synthetic construct
  source 1..120: mol_type = other DNA
ggctgaattccaaatgtcaccaataacacaactttttcaaaaatcagctcacaaagggtatcctcacaacataaagtcacaggtgccctttgaccgaccatttcacagaagtcggaacgt

SEQ ID NO: 17495 - DNA, 120 bp, synthetic construct
  source 1..120: mol_type = other DNA
tcctttgcttcctctatcacacaccttctggcattccagacatgctaaattctggcatagatgactgaactagactctcagttccatttatattccctgccatattctatcctcaaatag

SEQ ID NO: 17496 - DNA, 120 bp, synthetic construct
  source 1..120: mol_type = other DNA
aatctgaaggatgggtaagccctggctgcagcaggcaggcccacttctggccagttcctctggcagtgtgtgcagatcgaatggaggagaaaaataaacaccaaatgccacagggggacc

SEQ ID NO: 17497 - DNA, 120 bp, synthetic construct
  source 1..120: mol_type = other DNA
tacaccccagcatacttagaatgtacttggagaggtggatgggcaggtaacggatgaagtctcggtatttgctgaacccagaagacaggtctctgatgtcatccaggtcaaccaatagat

SEQ ID NO: 17498 - DNA, 120 bp, synthetic construct
  source 1..120: mol_type = other DNA
caaattccccattagttttgttccctcctcaagactgaatccaatactgcaaaaatagccattggtgggtttaattctagagctggccaccatgccagagcccagggactagatgatgga

SEQ ID NO: 17499 - DNA, 120 bp, synthetic construct
  source 1..120: mol_type = other DNA
ccttcttttaaagatgtacagaatggaccagagcagttatgtctgtttttatttggggcctccaaacttctatgcaaaaatctcagaaagcttcctgttagcttttcagcacgcccccat

SEQ ID NO: 17500 - DNA, 120 bp, synthetic construct
  source 1..120: mol_type = other DNA
aaaaaaagaagaaggttgccacaacctgtaataggacttaacacaactccagtgtaaatagcccattcctatggtgaatgggatgaagttttggaagagcactgcggagcattgcatctg

SEQ ID NO: 17501 - DNA, 120 bp, synthetic construct
  source 1..120: mol_type = other DNA
ccctcaccagaaagagatgctggtgccatgcttctggtacagtcttcagaactgtgagccaaataaaactcttttccttagaaatttccttataaattacttagcctcaggtattccttt

SEQ ID NO: 17502 - DNA, 120 bp, synthetic construct
  source 1..120: mol_type = other DNA
gataagcaaggagcatggtagagtgaatgaaaaaaaaaaaaagccctaagttttgacttcttggtctggtttctgtgcagggcagctgaagagaaaaacaaaagcttcccctttacaacc

SEQ ID NO: 17503 - DNA, 120 bp, synthetic construct
  source 1..120: mol_type = other DNA
ggaaatgaataaataccccagttgtgccttttctattacaaacgtctcccagagcaaaagtaaatggctgccatggatggaaagcctatctctctcagtaactgccagcagaagtctggc

SEQ ID NO: 17504 - DNA, 120 bp, synthetic construct
  source 1..120: mol_type = other DNA
tgaaagatcaggcacaaccagagaaaggtaatggagtccatcgctggggttttgttggcaatggcagtcacatactagggtcagaatggggaataggaatcaggttaagaatgagatcag

SEQ ID NO: 17505 - DNA, 120 bp, synthetic construct
  source 1..120: mol_type = other DNA
cagagtgaccttgaacaaattagctaactgccccggaccgcagtttctccatctgcaaaataaggatgatataagcatctacccaatgggtgttctgtgaggactgagttaatgtgcagg

SEQ ID NO: 17506 - DNA, 120 bp, synthetic construct
  source 1..120: mol_type = other DNA
atatgagaaaacatccatttctctgttctctatttacccaggctgctgtttccctaggaaatgaggtgagtgaagaccagaaaacagagagcacaaatcatctactcccttcccttatga

SEQ ID NO: 17507 - DNA, 120 bp, synthetic construct
  source 1..120: mol_type = other DNA
ggccccacgtccctggtcctttcctgtgtctctgactctctcccttgattactacatttccaccgtgctgacctcagacctactcaacactcaatcctctttgagcctttggtacagcct

SEQ ID NO: 17508 - DNA, 120 bp, synthetic construct
  source 1..120: mol_type = other DNA
tcaatgagttatgcaattctggccaagtcatacatagaaatgaatcacttggtaactagccaggactcttcaaagtgctatggtcatgaaacacaaggattgaaagactgatccagactg

SEQ ID NO: 17509 - DNA, 120 bp, synthetic construct
  source 1..120: mol_type = other DNA
gaggagctctcaggcaggagtgctgcctcttccttgtcagtttcatccaatgcataaatttctgtaattcttgtaccttgctttagtatttggaaagtgttttcacactgataatcacat

SEQ ID NO: 17510 - DNA, 120 bp, synthetic construct
  source 1..120: mol_type = other DNA
ttttttcaaaaatgcaagcaagaaaaaattgtatttcagaatatcagagcttggatggagccttctgaattatttactccagtgggcttgttgataaatgagaaatttgagactcaggga

SEQ ID NO: 17511 - DNA, 120 bp, synthetic construct
  source 1..120: mol_type = other DNA
tgtactccaggtgggccttgataccgttggcctggctcagcgcagcttgctccttctcctctaagaagagcatcacattggcctgggccttcctcacagcagcaaggagttccccaaact

SEQ ID NO: 17512 - DNA, 120 bp, synthetic construct
  source 1..120: mol_type = other DNA
gaatgagacccagatcaaaaaggggagcacagtaaggaaaggactcagaaaggatgggattctgggcccaggcttagtgggaacctagaggtttggagggagatgggaagaaaaaatgat

SEQ ID NO: 17513 - DNA, 120 bp, synthetic construct
  source 1..120: mol_type = other DNA
agagaaggaggcaggcagagaatgggctctggactgtggatgggaggctcagagcactgtctgaaatgaagacctgagaaccaggaaagctacctgggccccacccaggccccccaagtg

SEQ ID NO: 17514 - DNA, 120 bp, synthetic construct
  source 1..120: mol_type = other DNA
gtttgatccaggctctgcattagctaacgtgtcctagttccccggcttactcacccttcatgcccactcaggctccaggtagccaggctctaggagtcacagaggccacagagtgctccc

SEQ ID NO: 17515 - DNA, 120 bp, synthetic construct
  source 1..120: mol_type = other DNA
ggtaagaaagaggtgtttcatccttcagtagctagttggttgtaaacacccaggaggtgaaaattaagttgaaatgaatacatgcattaggggtagatgaatggatggatggatgatgga

SEQ ID NO: 17516 - DNA, 120 bp, synthetic construct
  source 1..120: mol_type = other DNA
gaatgttgttattacaggattagtcttggttctaatttatattattaaaaagcaaatcacttgccaggtttaaaacttaaactaatttcataacaaatcctgacatcaaggtgaggctac

SEQ ID NO: 17517 - DNA, 120 bp, synthetic construct
  source 1..120: mol_type = other DNA
atgtaggcatgattgattacatcactggccattggtgatcctctcaaccttcagcctcacttccctccctggaggagatcagggagatggggctgaaagtcaaaccctttcatcataggg

SEQ ID NO: 17518 - DNA, 120 bp, synthetic construct
  source 1..120: mol_type = other DNA
gtattcgaaggcagagccagccctcccagcccaggcaagtgcctgcccaaaaacctcaggtttgcctgctttggccccagcttcaatcttgcctcctgggatgcactaaacaccttctgc

SEQ ID NO: 17519 - DNA, 120 bp, synthetic construct
  source 1..120: mol_type = other DNA
caaaggcacactatttggagtccgaaatattttgggacctgccacttgctggccatataggctttgtcaagtcattcaagccatttagcttctcatctggtgcaagactacctaaatatg

SEQ ID NO: 17520 - DNA, 120 bp, synthetic construct
  source 1..120: mol_type = other DNA
tgaactttctgggactgatgctgaggttcagcatcgtggcctggcattaatgttctccaaagatctaggacaaggctcagctcaggtcttcctgccttaggaacctgcactgacctcgct

SEQ ID NO: 17521 - DNA, 120 bp, synthetic construct
  source 1..120: mol_type = other DNA
acttttcagtccaattttcttattcctcttcctctgcctgaaaaggtgagaggctctttgaagctcaactcaagatcacttcttcccaacttagtctctcttcctagatgagctcatcca

SEQ ID NO: 17522 - DNA, 120 bp, synthetic construct
  source 1..120: mol_type = other DNA
actcaataaaacatctatgagattcatccatgtcatggtgcgtatcagtagcctgttgttttcactgctgagtagcattccatgctatgtctgtaaccaagcgtgttcatccattaccct

SEQ ID NO: 17523 - DNA, 120 bp, synthetic construct
  source 1..120: mol_type = other DNA
ccagcaaaaatgtacacgtgcaattgtgtaagatgcaagcagaagtagctttttttttcccccagagagaatatttatcaattaacttcctgatacacatctatgatactttcttcttcc

SEQ ID NO: 17524 - DNA, 120 bp, synthetic construct
  source 1..120: mol_type = other DNA
tttgcacatgaaaacacacttttgcacatgaaaacacaccaccaaacattcttcccatccttcttcaccaaccagctacaagccacaataaataaaacactgtgaaactagcacagcatt

SEQ ID NO: 17525 - DNA, 120 bp, synthetic construct
  source 1..120: mol_type = other DNA
tcacttttgtaatgtaaaaaatgtttaagtgtactttttgaaaaagagaatagattcgctattacaatcaactgctcacggtgaactactgtagtttaacattgcagcaggaggctgtac

SEQ ID NO: 17526 - DNA, 120 bp, synthetic construct
  source 1..120: mol_type = other DNA
tgccctcaccccaaatagcacgggcatatcatttaacctttccagatctccatctcctcacttgcaaaataaaaggcccatattatatattcaaagttccctttggttctaaaatctatg

SEQ ID NO: 17527 - DNA, 120 bp, synthetic construct
  source 1..120: mol_type = other DNA
tttttcctgagatgtttatctcaagccactgtattttgcatagatgactcttggcaaaacatacccagcagtcatcaaatatacgatatatatctaacaggtcaaagttcctagaagaat

SEQ ID NO: 17528 - DNA, 120 bp, synthetic construct
  source 1..120: mol_type = other DNA
gtggcggctcatgccagtaatgccagcacttcaggaagctaaggtgggcagactgcttgagctcaagagttcaagaccagtctgggctatatggcaaaacaccatctacaaaaaatacaa

SEQ ID NO: 17529 - DNA, 120 bp, synthetic construct
  source 1..120: mol_type = other DNA
aaagcaggtgaggagagagagttcagaatagcccttttagtgagaaaaatagaaagcagggaaatctcaggttctggctagtacactgggaatgatatgggaaagtcaagggactccaat

SEQ ID NO: 17530 - DNA, 120 bp, synthetic construct
  source 1..120: mol_type = other DNA
gctattttgagataagtgaaaaaagatttctgaaaaggtagatgtaacagagtttggccccatttttgatgtctggccattgacagcatttaagtttccaccattttctattctcccctc

SEQ ID NO: 17531 - DNA, 120 bp, synthetic construct
  source 1..120: mol_type = other DNA
attctccactgtgaagtctctggtgtctaatgagggctgaactacacgaaagctctgccacatttatgtgacagaactcataccggagaaaaaccctacaagtgtaaagaatgtggtgaa

SEQ ID NO: 17532 - DNA, 120 bp, synthetic construct
  source 1..120: mol_type = other DNA
gcagatacttgaatgtttgtgttcgttagagttctaggctctcttgtaactctttttgtgctctttgggtgatattatccactcccatggcttcaatttcatccattctcaggcaactcc

SEQ ID NO: 17533 - DNA, 120 bp, synthetic construct
  source 1..120: mol_type = other DNA
aattttatatccttaaaattattcaaattctttccttctcttcatatttcttatatagcagaaaactaggtaggataaggacagagtaaatgaagaagtgattccagctactaaagagga

SEQ ID NO: 17534 - DNA, 120 bp, synthetic construct
  source 1..120: mol_type = other DNA
gaatagagtgcagaaatctgaggcctcacgtggttggaaaagcaaactgtttctagatctcatacagtgggaagtaagtctaacaagagctttgagcaataaaggcccattacacctgtt

SEQ ID NO: 17535 - DNA, 120 bp, synthetic construct
  source 1..120: mol_type = other DNA
aagataccccttttgggaaagggcagggtcctcagagggcagaactggaaggaaattgacataaaggaacctggtttatctttatgtatctcaaacctatgaatttagaaacagccactt

SEQ ID NO: 17536 - DNA, 120 bp, synthetic construct
  source 1..120: mol_type = other DNA
gtaatcctttgtcattggaactctggctctggagtctgcctgcctactgcctttacatcctggcactgtgtaaccatagccaagtttcttctgggcttcatttcctaattttacaaaaga

SEQ ID NO: 17537 - DNA, 120 bp, synthetic construct
  source 1..120: mol_type = other DNA
ggaccaagggccttcggttcttgcaggctattggctggaggccatcctcagttccttgtcatatgggcctccccaacatcaccaccacttcatcaaagccagcaagagaggagtctccta

SEQ ID NO: 17538 - DNA, 120 bp, synthetic construct
  source 1..120: mol_type = other DNA
caaaaggatgagttctgggcgcacaaaatatggataaaagctatgtattttaacgtatcttacaccggagtaatttgggttgaactcagcagccctaagcactgtgccgcaggaacttgt

SEQ ID NO: 17539 - DNA, 120 bp, synthetic construct
  source 1..120: mol_type = other DNA
agatctgaattggggtgaagagcagaatctccagaacaaggaggaggtggtgatcatggagacagatttggctgaaatgcctgagaaaggaggtgagaattgcggacgtgttgaacttgt

SEQ ID NO: 17540 - DNA, 120 bp, synthetic construct
  source 1..120: mol_type = other DNA
tttcttagagtacagatgcactcccttctttgtgatgtggagtttctttatccactaaagcccatctgcagagctgagttctaaatctaagagactagtcaggagactaatggactcaga

SEQ ID NO: 17541 - DNA, 120 bp, synthetic construct
  source 1..120: mol_type = other DNA
aacacagacatacagaaatgtaaaggtaatgctacttccccctcaaattcagtccctgcctctctctactatgtatattttttcacattttttgttgtacttgcactactgtattcagac

SEQ ID NO: 17542 - DNA, 120 bp, synthetic construct
  source 1..120: mol_type = other DNA
ggcggcccgcctcctcgttgagtgcagactcggggttagggtggatcagcaggcacctgatggtcagcagtacgtgtcggatgcccagctcagccgtccagtccctcttgagcacgttga

SEQ ID NO: 17543 - DNA, 120 bp, synthetic construct
  source 1..120: mol_type = other DNA
gtatttggatagtttccagtttttagctgtctgaataatgccactatgtacactttttaaatgccttttggtgaacaaatatatgcatttcttctggatatatacatacaagtagacttg

SEQ ID NO: 17544 - DNA, 120 bp, synthetic construct
  source 1..120: mol_type = other DNA
attccttatgttcatcttgagagctggtttagggagataactggaagaagaattagtaggtcttaaatcatcacatgtttagctttactaggaactgccaacagttgagttatcagactt

SEQ ID NO: 17545 - DNA, 120 bp, synthetic construct
  source 1..120: mol_type = other DNA
tcatcactctgcttggaacatttgaatggcttctcgctgccttcacggtaacagacaaaatcctggaggtctacaaaatcttgtgaaatctggcttttactcattatcccaacctcattt

SEQ ID NO: 17546 - DNA, 120 bp, synthetic construct
  source 1..120: mol_type = other DNA
attataacttttagtatcacaactgaccttatcagaaaagcctttaagttttaggaagccatcaagctctcggtggtaaatagaagttttccaaaacttgtaatttctgcctgaaagctc

SEQ ID NO: 17547 - DNA, 120 bp, synthetic construct
  source 1..120: mol_type = other DNA
tactgttattgccctctcttacacataaggaaaccgaagtaaagaggttaaataacttatccagtatcacacagctagtaagtggcaaaactgcaattcagattttgctcgtgaatgtta

SEQ ID NO: 17548 - DNA, 120 bp, synthetic construct
  source 1..120: mol_type = other DNA
gagcaaggattcaacttcagtgcaagatttttccaaagcagaatcatgcaaagttgcaataatagacagactgacacggaatagtgtctatgactctaacttggaagcagcccttgaatg

SEQ ID NO: 17549 - DNA, 120 bp, synthetic construct
  source 1..120: mol_type = other DNA
attcaacatcagagaactcataccggagagaaaccctttagatgtaatgagtgtgggaaaagctttaagtgcagttcatctctcatcagacatcaaagagttcacactgaagagcaaccc

SEQ ID NO: 17550 - DNA, 120 bp, synthetic construct
  source 1..120: mol_type = other DNA
atcaagtcagataaagggtttaaaccagtcagagaaactaggtggaatggaaaagtactgagagataattggggacagaaaaataaaagagatgggaaatgctgcatcaaaatactccta

SEQ ID NO: 17551 - DNA, 120 bp, synthetic construct
  source 1..120: mol_type = other DNA
tattttaagatgtaatgaaggaccaaccaaaaaatatctccatatcattcaggataccaatcccatttctagctggtcatctggcttcacaacttctggagagatgggatgggagatacc

SEQ ID NO: 17552 - DNA, 120 bp, synthetic construct
  source 1..120: mol_type = other DNA
ctgctagggaggggacctgccctttgccttttgcccccaaccctcaaccttctgccccctatcttccatctgcaatcccaggaatgccctggatggggaggtctgagtttagggagcacc

SEQ ID NO: 17553 - DNA, 120 bp, synthetic construct
  source 1..120: mol_type = other DNA
gggtcccttgtctgggagtagggagccctccgcctgtgggcagttgtggtagaggaccttgaacactgctgctctggggcctgggcagggaggacttggacagtggggacctggtcagga

SEQ ID NO: 17554 - DNA, 120 bp, synthetic construct
  source 1..120: mol_type = other DNA
ttgatgtcagaaaatacaccaataacctcgggattgtgcagtaagtcctctgtccccccgaccccagccaccaatctcacctcagggatgggttttgtttttagaaaggcctctctgaag

SEQ ID NO: 17555 - DNA, 120 bp, synthetic construct
  source 1..120: mol_type = other DNA
tcggtaaggcagagggggtggcctgtgggcctgtgtggtggtgagtgggccacggctgtcactgggaggggtggcctttcctgctggactctgttcccatgaggacttgaccaaaaccca

SEQ ID NO: 17556 - DNA, 120 bp, synthetic construct
  source 1..120: mol_type = other DNA
aaacaaggtaaaaaggagctttctgcagaaggaaaccttccttccttccttccagaagtgctgactgtgggatgactgccgtttggggcagggagtcttttgtctgttctgaggctgctt

SEQ ID NO: 17557 - DNA, 120 bp, synthetic construct
  source 1..120: mol_type = other DNA
gcctcttggacaatgctatacccaacttgccagccaggtcccaagatgtttaagaagttaacagtgtaaaagaaagggaaagaatggagtggacatcattattttcttctttcgcaagac

SEQ ID NO: 17558 - DNA, 120 bp, synthetic construct
  source 1..120: mol_type = other DNA
attgaatgaattgggctatgaagttttgcctcatctgccacattcacctgacctctctctctaccacttattcaagcatctcgacaactttatgcagggaaaattcttccacaagcagca

SEQ ID NO: 17559 - DNA, 120 bp, synthetic construct
  source 1..120: mol_type = other DNA
gtgttttgacactgattcagtttaggtcaggttatctatattttcaccatcatcaatcctcctctggagttgccaatgaccatgattctttttacccttcctttaagcagcgagcccttc

SEQ ID NO: 17560 - DNA, 120 bp, synthetic construct
  source 1..120: mol_type = other DNA
aagctgtaataacagaaatcaaaaatcagaaattacaacacatctgtctgattctaatttatggcagccaagtcccttgtggccctaggtcccatccctcatctctctttcaccagggat

SEQ ID NO: 17561 - DNA, 120 bp, synthetic construct
  source 1..120: mol_type = other DNA
ttcacatctccaaggatggctatatttttttaaaaaaggaaaataacagatgttggcaaggaggtaggaaaaaatggaacctccatatactgctggtaagaatataaaatggtacagaga

SEQ ID NO: 17562 - DNA, 120 bp, synthetic construct
  source 1..120: mol_type = other DNA
ggaacaagagtaaaacatcaaaccctggaaaacagtctctatgtggtcaaccacagcactagctacacaccactgatctgctcagaagtcacttcagatagatgctgcatttgaaaagtt

SEQ ID NO: 17563 - DNA, 120 bp, synthetic construct
  source 1..120: mol_type = other DNA
atgagacctcatgacatggcttccgaatgaagaatggactgagcatgggtgtgtgtggggaaccaggagaggcccttaggttccagcagagctcaaactaccagctttccattgctaaag

SEQ ID NO: 17564 - DNA, 120 bp, synthetic construct
  source 1..120: mol_type = other DNA
gtatcagagactgctctaagggcttataatgtactgaatgaatcatcacaataaggaaggtgctatttacaaataaggaaagtgaggcacagagatgttagatgtcttgcccaaagtcaa

SEQ ID NO: 17565 - DNA, 120 bp, synthetic construct
  source 1..120: mol_type = other DNA
atttttcactacaaaaatatgcagtaaggtgatcaatggagctgagtaacacgtgggatgttgtgtgcaaatatattgtcagtatgtatctcagaaatgagagaatgtcaacttgcatgt

SEQ ID NO: 17566 - DNA, 120 bp, synthetic construct
  source 1..120: mol_type = other DNA
acatttttatccatagcattcagcaactagttcctgaatataaggaaaaacagacacctgaaagtcttcctcaaaataacaatccaggtaagacttctgatagtgaattatttttggtgg

SEQ ID NO: 17567 - DNA, 120 bp, synthetic construct
  source 1..120: mol_type = other DNA
tatgctgtattcttacaataaaggaagctagggaaataaactgttaagaaaatcataaggcagaaaaaatacgcttactgttcattaaatgcaagtggatcattatataactcttcatca

SEQ ID NO: 17568 - DNA, 120 bp, synthetic construct
  source 1..120: mol_type = other DNA
ctattattgactttcccccaatttgaaatcgaatgaggtatatttacttcattagaacaagatgtgtttttctacctgctggttaattgctatgttaacagtaattttgttagaacaaga

SEQ ID NO: 17569 - DNA, 120 bp, synthetic construct
  source 1..120: mol_type = other DNA
gtgtgtttggcagaaggagcagcgagtgcaaaagtaagatgcttgagtgaactttgcagggtttatgagcagttcagttttgccagtgcaaaacatatgagatgtgaatggttgggaatg

SEQ ID NO: 17570 - DNA, 120 bp, synthetic construct
  source 1..120: mol_type = other DNA
tctgttttcatggctgactaattagcaacagctccaaacatcatggtctcaccgacaatatctgaaggctgaaagggtggcttttctttacatatttcttttagttagggagaagactca

SEQ ID NO: 17571 - DNA, 120 bp, synthetic construct
  source 1..120: mol_type = other DNA
aggagagcagcaggtcagcagtcacgactaacagttttctctgcattgctgagtttactgaaatgtccatgtgggatattttcagtaggtaattggaaaaatttttatggctggagatgg

SEQ ID NO: 17572 - DNA, 120 bp, synthetic construct
  source 1..120: mol_type = other DNA
ttaccctcttgtgatatttctgcttttactgcttccttttgaattccattcctaaagaaaatactattagaacacatttcaaatgcacttctttatatctgcaccacaatgacacaatga

SEQ ID NO: 17573 - DNA, 120 bp, synthetic construct
  source 1..120: mol_type = other DNA
aagattttctatttttaattgggttaaaataggattgttgctttttaaaattactttctgacatcagtttcatgcatttttaatgcctttagtccagtggatatagcagtacaggaatct

SEQ ID NO: 17574 - DNA, 120 bp, synthetic construct
  source 1..120: mol_type = other DNA
taacaggtattggtacataagttactatggcaatattaagtaattataatctgtccttcttatctgattaacctttcagtaaaattgtgggataaagtaggcataataagttctgattta

SEQ ID NO: 17575 - DNA, 120 bp, synthetic construct
  source 1..120: mol_type = other DNA
tctgatggcatatgatttgacgtgctgagaaagcgtgatctctgtagacgtttgccacgtaacggggagggtggggaaaaatggcatcatgcagtattccacagcactaactggaccatt

SEQ ID NO: 17576 - DNA, 120 bp, synthetic construct
  source 1..120: mol_type = other DNA
ggatatgttccaagacccccagtgaatgcctggaagtgtggatagtactgaaccctagatatgcagtgtcaggatagaaggaagaggataagagtaaaagggggaataaagaatgtggaa

SEQ ID NO: 17577 - DNA, 120 bp, synthetic construct
  source 1..120: mol_type = other DNA
tgcattgaggaaagaccatctcattataattaaaatagttttaaaagtatatttattatgagtttttgtaaatcctgtgtctctacaatacatacatacaatgctgtcatgtatatttaa

SEQ ID NO: 17578 - DNA, 120 bp, synthetic construct
  source 1..120: mol_type = other DNA
ttagtagagacctaaagattgctgactcaaacacaatgtggtttctttgctttatttttacagctctgaattcacagctgttagttataactatatgcactacaatttaaaagacacctt

SEQ ID NO: 17579 - DNA, 120 bp, synthetic construct
  source 1..120: mol_type = other DNA
actctttaaatcctagtgcctagcacatagcaagactcaatacataattgctgagtaaaatagataatgactctttgtacaaagatgattttcaagattgttccctacagtcaaggagca

SEQ ID NO: 17580 - DNA, 120 bp, synthetic construct
  source 1..120: mol_type = other DNA
gtgtggaaacatttaaactaaaatctaaatttctggtttaatactcttttctttgctttaataatataagctagcccaaatgaaattacctctcagactagcctttgagaaccaatagat

SEQ ID NO: 17581 - DNA, 120 bp, synthetic construct
  source 1..120: mol_type = other DNA
tacgtgtactgtaggggctcactttccaagtgaggacgcctttgtaacactagaaatcgtctgctaattcatttttggtagatttaatacataatgaattaagtttattccaaacaaaca

SEQ ID NO: 17582 - DNA, 120 bp, synthetic construct
  source 1..120: mol_type = other DNA
ctgagttctttaccaccagattctgacagaacatcagaagtatatctacatgaagaattacagcaagacatgcaaaagtttaagaatgaggtcaacacattagaagaagagttcctggct

SEQ ID NO: 17583 - DNA, 120 bp, synthetic construct
  source 1..120: mol_type = other DNA
actaaaaaaaaaaaaaaaaagaaaagaaaaaagaagtatccagccctgagagctgcagcaaatattcctggccaatgaatctgtttattgtgcttttcaggtttttctgtttaactcaaa

SEQ ID NO: 17584 - DNA, 120 bp, synthetic construct
  source 1..120: mol_type = other DNA
aagggccctgcttgaaattttggaaaattctgtctcattcattgaaacagaaatgaagctgactttacaaaaatgttgatgataaaattataataattataattatatgatgatagttcc

SEQ ID NO: 17585 - DNA, 120 bp, synthetic construct
  source 1..120: mol_type = other DNA
accatgttttctaatcatattgatattttatttaaaaaatcggaagtattggcaaatgtgaagaaaaaggcgttttcatacacttgttaaatgaaattgatgaatcctttttgtagggta

SEQ ID NO: 17586 - DNA, 120 bp, synthetic construct
  source 1..120: mol_type = other DNA
taagtgtggctgcatttcaaggaaatttccttatgaaaacaggcagtgggctggatttgctccacaagcaccaatttgttgatccttgtgctaaaaccaaggtgctgttatgcagtgaat

SEQ ID NO: 17587 - DNA, 120 bp, synthetic construct
  source 1..120: mol_type = other DNA
gtgtcttcacttggctttcaggatctcactcactcacctggcttttcttcctgcctttccagtccatctgtcatagtctgttttgctttcttctcatatcccaccttttacacattgata

SEQ ID NO: 17588 - DNA, 120 bp, synthetic construct
  source 1..120: mol_type = other DNA
gtttatttcactcccatgagtaggatgtttgtgtgcctagaaaagggcctagcttgcaataagtagctactcaataaatatttattaaatgagcaactgaagtttacccttcggtgtatt

SEQ ID NO: 17589 - DNA, 120 bp, synthetic construct
  source 1..120: mol_type = other DNA
ctttttttgatgcttagtcttaaccagaagaattcgctacatagttaaaaaacaagcaaacaaacaaacaaaaaacaattattaattttgtttcagtttttagtattttcagagacttct

SEQ ID NO: 17590 - DNA, 120 bp, synthetic construct
  source 1..120: mol_type = other DNA
ctctgagaaggaatattcccagtggttactttttctggaaatagaaaatagtgtagtctgccaaagctagagaatactcaactatatcaatgctgaaagactgattatgatgagggctgg

SEQ ID NO: 17591 - DNA, 120 bp, synthetic construct
  source 1..120: mol_type = other DNA
gaaaattactgcattttacattacctgtaaaaaaattacctatacacttgatgaatagaagtaacacaaatgcagacattttatatgataaaacagtagtgttagatattctttgtattt

SEQ ID NO: 17592 - DNA, 120 bp, synthetic construct
  source 1..120: mol_type = other DNA
aaaccatggtctagtctgcaatcataatgataaatttttaaaaattcggatctgatcatgttactcctttgcttataactcagctactgcttcttattgctataaggttagagatctgaa

SEQ ID NO: 17593 - DNA, 120 bp, synthetic construct
  source 1..120: mol_type = other DNA
gcattcagtttttcatcatgacacatgttagttgtaggtttatcagagatgctctttatcatgctgatggtgttcccttgtattctttggttactgagagggattttttttttaaatcag

SEQ ID NO: 17594 - DNA, 120 bp, synthetic construct
  source 1..120: mol_type = other DNA
ccatgttcatgagggagttttctctttttgtaatatcattgtcagactttggttcagggtaatgctagagtgacagaatgagttgtatttctcctctattttttttttgagggcggggga

SEQ ID NO: 17595 - DNA, 120 bp, synthetic construct
  source 1..120: mol_type = other DNA
tttttttagtttcttaagataaaagtcaagaccattgacttgagagtcttctaatatagacattaagtgctaaaaaattttaagtactgttgtagctgtgttccacaaatcctgatatgt

SEQ ID NO: 17596 - DNA, 120 bp, synthetic construct
  source 1..120: mol_type = other DNA
aactccgtgaaggcagggagctggagtgttggatgaatttcctttgtttcctgtcttacggggatcattgtcttcattacctgaagtccactgcctggtaaatcattgtataatatattt

SEQ ID NO: 17597 - DNA, 120 bp, synthetic construct
  source 1..120: mol_type = other DNA
atttgtagacacagggtctctgtgcctgggactggagttcactggtgtgatcatacctccctgcagccttgaactccatcctcctgcctcagcatcctaagtagttgggactccaggtgc

SEQ ID NO: 17598 - DNA, 120 bp, synthetic construct
  source 1..120: mol_type = other DNA
tcattggttgatggacccttaggttgattccgtatcttcgcaattgtgaaatgtgctgcaatagacatacgtttgcaggtgttttttttgatataatgatttcttttcctttgggtagat

SEQ ID NO: 17599 - DNA, 120 bp, synthetic construct
  source 1..120: mol_type = other DNA
atgctgttttggttactttagccttgtcatatggttttagatctggtaatgtgatgtctctggcttcgttctttttgcttgggattgctttggctattcaggctcgtttttgattccctg

SEQ ID NO: 17600 - DNA, 120 bp, synthetic construct
  source 1..120: mol_type = other DNA
atgactacacatatactatttcatgaagatgaaaatgcatttctagtgaatttctaaacttgtttgtaaacagtaacttcttttaaattagctaactctaaatgatctgttctaattaat

SEQ ID NO: 17601 - DNA, 120 bp, synthetic construct
  source 1..120: mol_type = other DNA
aaaactgttatttcctcttaagaatgaactatgacatttatagataaaattatttactgtaaaccttgtcatctaatagatgctcagtctgtgtttttagagtggaggataagttgagtt

SEQ ID NO: 17602 - DNA, 120 bp, synthetic construct
  source 1..120: mol_type = other DNA
aaacatttgttatttttcatagaattaatgatctttccacaatctcaaaatccttgctactaacaacagacgttctagttttcagacattatttcatcttcctaatatattaatggagag

SEQ ID NO: 17603 - DNA, 120 bp, synthetic construct
  source 1..120: mol_type = other DNA
gctgagaacaaaatactcaattctgaactggagaatgggaaacagaaccaagaaagactagaaatagaaatggaatcataccgttgtagactagctgctgctgtacgtgactgtgatcaa

SEQ ID NO: 17604 - DNA, 120 bp, synthetic construct
  source 1..120: mol_type = other DNA
gaagcagataaacagaaatgctcatacctgacatgagtattttgaaattaagattcagtggggagggttgctttgaccgttaattccagatttcccaggtgaactgaagtatactgctgt

SEQ ID NO: 17605 - DNA, 120 bp, synthetic construct
  source 1..120: mol_type = other DNA
tgagacttcagtaggttgttaagcactgcagatgtttcagggaagagtgagtagtgggctgaatctattgcctaagttaacagaaaaccgatttggcaggaagataacaccttctttgtc

SEQ ID NO: 17606 - DNA, 120 bp, synthetic construct
  source 1..120: mol_type = other DNA
tccaaagatccttaggaaaattgggaattattcagtattcctcacagaagttgagaggctttttttttcctgtgaagtagtatttttttagtgatttctctattgccatggtgaggcaag

SEQ ID NO: 17607 - DNA, 120 bp, synthetic construct
  source 1..120: mol_type = other DNA
actatgctcaaccttttgaggagctgccagtctgctttccaaagtggttgcaccattttacgttcccatcagcattgtatgagggttctaatttctccacatccttgccaacatttttca

SEQ ID NO: 17608 - DNA, 120 bp, synthetic construct
  source 1..120: mol_type = other DNA
atctattcatttctcatttaattttttttacacccttgttgaaaatcagttgaccataaaaatgtgtgtttgtttttggattctcagttataatatattgagctatgtctatccttatgc

SEQ ID NO: 17609 - DNA, 120 bp, synthetic construct
  source 1..120: mol_type = other DNA
ttctccatacaaatgagcttgaagtaaggtaaaggggaaattgcatttaatagcttaacactcaaaggacactacatttttacttctgagattgttaaaactgattccataatattttgt

SEQ ID NO: 17610 - DNA, 120 bp, synthetic construct
  source 1..120: mol_type = other DNA
actaagtttcacccatagtctgtatataggatgaatgattttgcttttatttttattgatgtatttttttttagacatggtgtcttattatgttacccaggccggccttgacctccatgg

SEQ ID NO: 17611 - DNA, 120 bp, synthetic construct
  source 1..120: mol_type = other DNA
atgctgattttctttcttttggataaatagtagtgggattgttggatcatatgacacttctatttttagctttttaagaaacttccatggttatactagtttacattccctccacgagtg

SEQ ID NO: 17612 - DNA, 120 bp, synthetic construct
  source 1..120: mol_type = other DNA
aagtggatgtcgttctcacagcactgaaagtgcttcaggactcacactgatccaatactaactttcttccctattttacacatatttttctactgtccagtggaaatcattttctgtttt

SEQ ID NO: 17613 - DNA, 120 bp, synthetic construct
  source 1..120: mol_type = other DNA
tctttcttttggtttctctgtggttggttcctctcccttttctggtttcttaagaagcttaatccttacttctttctctgcaattttcttctgtttatctgtctctctctctcttttttt

SEQ ID NO: 17614 - DNA, 120 bp, synthetic construct
  source 1..120: mol_type = other DNA
gtgtatttcttaggttttcttgtaggatttttatagttagaggtcttattttaagaatgtaattcagctttcattaatttttgtatgtggtgatagctaggggtcaagtttcattcttct

SEQ ID NO: 17615 - DNA, 120 bp, synthetic construct
  source 1..120: mol_type = other DNA
ctgtgggattggttgtaatgtcgtctttgttgtttctgattgtgcttatttagatgttctctgttatttatttatttatttatttatttatctagctagtagcctgtcagtatttttatc

SEQ ID NO: 17616 - DNA, 120 bp, synthetic construct
  source 1..120: mol_type = other DNA
gtgaatcctttatcattgtgtaatgcccttcttcatccttttttggctgttgttggtttaaagtctgttttatctaagaataacaaccccttgctttttgcattttatttgcatgacaga

SEQ ID NO: 17617 - DNA, 120 bp, synthetic construct
  source 1..120: mol_type = other DNA
ttacaaaatcccacattcctcagatgttttgttcatttttaaaatggttttttctttatttttgtctgactgggctgactcaaaagactggtctttgagctctgtaatccttccctccgc

SEQ ID NO: 17618 - DNA, 120 bp, synthetic construct
  source 1..120: mol_type = other DNA
agagtatgtctgcggatctgcgggtcgtctgttgatataatgtgggtcaaggggggaggatccccgggcagggctgtggttctgtgggtgtgcacctggtgtggtgcctgcagcccaggg

SEQ ID NO: 17619 - DNA, 120 bp, synthetic construct
  source 1..120: mol_type = other DNA
tggtggacaagaaggtacacagaccagatatgctgcagtcccatggtaaatgcagccctactgtcttctggcctggcagtaagcaggagctagagtcactcagagcaagatggagagcct

SEQ ID NO: 17620 - DNA, 120 bp, synthetic construct
  source 1..120: mol_type = other DNA
atgaaaaattggtgttagtttttccttaaaagtttagtagaattcagagtaacttacccagttttagacctttctttgttggtaaactttattactgattcaattacattaccgttactg

SEQ ID NO: 17621 - DNA, 120 bp, synthetic construct
  source 1..120: mol_type = other DNA
atcccttcaatgctgaaagtcagactatggagtccccatctattattgtactggaggctatctgtctctttagtttcagtgatgtttgccttatatatctgtgtgctcaggtattgagta

SEQ ID NO: 17622 - DNA, 120 bp, synthetic construct
  source 1..120: mol_type = other DNA
aggattacagggatgaaccactgcacctggcccctctttttcagttttaaaggatagctttgctaggtataatattcttgacaggcagtctttttcttcccgcatattaaatatatcatg

SEQ ID NO: 17623 - DNA, 120 bp, synthetic construct
  source 1..120: mol_type = other DNA
tgggtgcattggtgtggcctccatatacttatgctttcttctgctgtaatcaacatcagcgtctgtaagttcctcagtggcttacggtgtggttgttagtagcaggggatgctgtggtga

SEQ ID NO: 17624 - DNA, 120 bp, synthetic construct
  source 1..120: mol_type = other DNA
tcagtcaggtggctcctaggctctagacagcacacacttaggatccctttgacctagagtagcttccctggtgggctattagatgaccacctatttccacaggtatatggtgctgtgggg

SEQ ID NO: 17625 - DNA, 120 bp, synthetic construct
  source 1..120: mol_type = other DNA
cttagagtctcttgtgaattttacttgagttcttgtcattggaaaaaccacttgtcccaatctctttgagataagcacttcaccttgtgcttcctgtgaaggaagcacactgttctgtgt

SEQ ID NO: 17626 - DNA, 120 bp, synthetic construct
  source 1..120: mol_type = other DNA
acttaaagctggggactagaatcatctaaaggcttgtttatttacctgtgcggcattcgaagctggcttttggctgggacgttaggtagggaagtcagctcgaacacctacctacatgag

SEQ ID NO: 17627 - DNA, 120 bp, synthetic construct
  source 1..120: mol_type = other DNA
ttataccatactcttgaactgcttttaagttacgttgttccacttttaaaattttaacttggttctgtcattctttggagaattgttcaacaattcagattcagttattaattcagttgg

SEQ ID NO: 17628 - DNA, 120 bp, synthetic construct
  source 1..120: mol_type = other DNA
agggtcaagtacgactactctggacacattctggcactcagtaaattcactttgcttgattgtgatcattagagggtgccttgagaagaagtgtcctgtatagtttttccaatccacata

SEQ ID NO: 17629 - DNA, 120 bp, synthetic construct
  source 1..120: mol_type = other DNA
ccagtcctagagtcaccttgcgttggaaatcttaatgatagtgaaggtctcaacagaaaacatattccaagaaaaaagaggtctgctcttaaggacatggagagctacttgttgaaggtt

SEQ ID NO: 17630 - DNA, 120 bp, synthetic construct
  source 1..120: mol_type = other DNA
gaatcagttctattcttaataccccaaattccatgtaaagctgcacatggacatctcccctggacatgtaacaggaaccttttagttcaaccgtgtggtttcactcagagtaagagtcta

SEQ ID NO: 17631 - DNA, 120 bp, synthetic construct
  source 1..120: mol_type = other DNA
ccattatatgaagtctagagtctgactgttcccagaccaaactgagagtcgggctgctatttatcatggtccagtaatgagatgcagatgaattgggaagagaggttttattttctgcaa

SEQ ID NO: 17632 - DNA, 120 bp, synthetic construct
  source 1..120: mol_type = other DNA
attgctgaagagtgaactttgtatttattggactttgcctttggtactgatttcactatatttctttaaaaaaattttctaactactcccctctttaaagtggaggtagttgtgaagaat

SEQ ID NO: 17633 - DNA, 120 bp, synthetic construct
  source 1..120: mol_type = other DNA
agtgtcttgactggtactagccagaagttatgatattaattgttctttaaatttgattcataacttacaatttggagagctactattttttgtctcatgcttaaacattatagagcatca

SEQ ID NO: 17634 - DNA, 120 bp, synthetic construct
  source 1..120: mol_type = other DNA
ctgtatttcttttctgaatatgaaggaaggtgctggcatagaataactccaggctcagtgaaagatctgaagcccactcctaccttgtaactaattggttttgtgacctcaggcaagctg

SEQ ID NO: 17635 - DNA, 120 bp, synthetic construct
  source 1..120: mol_type = other DNA
ttgccagtggaactttcacatggcatcacaacaatactgctttcttcaagtatgtattaaagattctgtgctgaattaatagcaaagaacatactttgaaattattattttctaaaagtg

SEQ ID NO: 17636 - DNA, 120 bp, synthetic construct
  source 1..120: mol_type = other DNA
cattcatttggttcttgtcaagttactcaggcttatctctcaccacttactttactctgcccctttgctctaggatccagccaaactggactgcacagaattccacagtgctcgtccttc

SEQ ID NO: 17637 - DNA, 120 bp, synthetic construct
  source 1..120: mol_type = other DNA
taataatataattcttgctttttttttcagctgctactaaatatgaacctggatcctatatagcttctcctctaggatttacacacaaggaaaatctgaatcaagatccagttttggaag

SEQ ID NO: 17638 - DNA, 120 bp, synthetic construct
  source 1..120: mol_type = other DNA
gcagaaggatcccattcaggtccatgaatttcatttagttgtcatgactctttcagtctggaacagttcctcagtttttctttgacctttatgaccttaaatcttttgaagagtaaagtc

SEQ ID NO: 17639 - DNA, 120 bp, synthetic construct
  source 1..120: mol_type = other DNA
atgaattcacacctgaattctatcagacattcaaagaattggtactcatcctattaacactatttcacaggatagagaaagagaaatcttccctaaatcatttgatgaaaccaaaatcac

SEQ ID NO: 17640 - DNA, 120 bp, synthetic construct
  source 1..120: mol_type = other DNA
ctttcattggagaacacattgagatttaaggttagtagtattatatgtggatttgatctcatcatcatgatgctagctggttattttgctaacttgtttgtgtggttgcttcacagtgtc

SEQ ID NO: 17641 - DNA, 120 bp, synthetic construct
  source 1..120: mol_type = other DNA
tctgccgcagcttgtgattccagcagttctcacaaacgttctgtcacatgatgaaaagaagcagcttgtataattccaactggtgtttcatttctgttctaatgctaagtggtaacgctt

SEQ ID NO: 17642 - DNA, 120 bp, synthetic construct
  source 1..120: mol_type = other DNA
ggggtccaggcataggaaagagaccccgaggccctgttccaggctcttggccagaactctgtttccgtctgcctcttctgcactcataagcttgtgcaaaattggataaattaatcctca

SEQ ID NO: 17643 - DNA, 120 bp, synthetic construct
  source 1..120: mol_type = other DNA
tgggaaggacttgccccactgttccctagaacacttgtgtttctgctgttgcaccaggttttattttaggttttgacgatttaggtgacaaaataaatgagactgaactttgctttcctc

SEQ ID NO: 17644 - DNA, 120 bp, synthetic construct
  source 1..120: mol_type = other DNA
ctggtaggctcttcatgagtgcttcctgaatgaatgctgcagaatggaaattcttttatgaagagaaaaatcagaactgatttgagctcctctgtcagccttacttccctcatctgtttc

SEQ ID NO: 17645 - DNA, 120 bp, synthetic construct
  source 1..120: mol_type = other DNA
cacagtccctcagggagacaagttgtagaggcaacaagtggtgccaaatgcacagggtgagaagcagttaacccagaggccaggagcctccatgcaggagggagagaagagtgtgatggc

SEQ ID NO: 17646 - DNA, 120 bp, synthetic construct
  source 1..120: mol_type = other DNA
gtgaaataaatcacatcaacacacagtgggggaaaaaaccaaatgtctcctgggcgggtgggaatggctacctgcctcagaaacatcagcacagctaaaaacggtccttggaggagcaca

SEQ ID NO: 17647 - DNA, 120 bp, synthetic construct
  source 1..120: mol_type = other DNA
tcactaagagaagaaagagaccaaagaatggtctgcacagagggcacctgtgcaaacacccagggaaccagggagttgagccgtcttcatttcctaacagatacattcccttctgtgcct

SEQ ID NO: 17648 - DNA, 120 bp, synthetic construct
  source 1..120: mol_type = other DNA
tgtctctggatctggcctccatgggaaggaccctgggagacccagcagagtggggtacctgggttgacaaacagcttcctgttcctctggctatgtggctcaggaataggcccagacagt

SEQ ID NO: 17649 - DNA, 120 bp, synthetic construct
  source 1..120: mol_type = other DNA
tcttttatttaccagagccacagccctgctgcctcaggaccttttcattctgccggtgctggggctgtctatctgcaagctggaggtgttgagagcaggaaaaggaggctgtgaggaagg

SEQ ID NO: 17650 - DNA, 120 bp, synthetic construct
  source 1..120: mol_type = other DNA
gtgcccgtgttctcctgggtgggcgccccacgctccaggaagcagaaactgcaggacaaagctgacacaagtgacatgcccacgtggctgccagcttccctcttgggatctgctgaggcc

SEQ ID NO: 17651 - DNA, 120 bp, synthetic construct
  source 1..120: mol_type = other DNA
gacctgtggtattaagaacattcatgctgttatacaattatcactaccatccatccgcaaaactcttttcatcttgtaaaaccagaactctatgcctattaaattataagtcttcattcc

SEQ ID NO: 17652 - DNA, 120 bp, synthetic construct
  source 1..120: mol_type = other DNA
ctctgtagtgtgaaaaccacaattcatttctcccttcttctgttggtgactatttgcattgttaccagcctggggctatgacgagtaaagcttttaaaaacagacaaatatgttttcctt

SEQ ID NO: 17653 - DNA, 120 bp, synthetic construct
  source 1..120: mol_type = other DNA
agccaattatttcccctaactaggtgctgaagccaattaaaggcagttcatgccatatgttccttcccactcccatgtcacttgaaatgttctattatgtccaatacttctctccccatc

SEQ ID NO: 17654 - DNA, 120 bp, synthetic construct
  source 1..120: mol_type = other DNA
agataggggtgggggcatcccaaagagaacacaagcagggcagaaatgtcagtgggggtcgtcctggcacagctgtgccatgctgagctcactcatgcctggagagatgctcctcccatg

SEQ ID NO: 17655 - DNA, 120 bp, synthetic construct
  source 1..120: mol_type = other DNA
atggacacacatggatccaaatgccacagcagccttagctggccaacttaaaacaacacatttgtgcttacagtgttggaggtcagaaggctaaaatcaaagtgtcatgaaaggtggcca

SEQ ID NO: 17656 - DNA, 120 bp, synthetic construct
  source 1..120: mol_type = other DNA
gagaatctgtttcttttgcttttccagcttctagaggctgcctgcctgccttggcttatgacccctcctgccatctttaaaaccagcagctttgtctgggtgcagtggctcatgcctgta

SEQ ID NO: 17657 - DNA, 120 bp, synthetic construct
  source 1..120: mol_type = other DNA
gacaagaaagagaagtcagagacacagagaagctgtgatttgcttgaggtcaccaaagtatttaatggcagagttcagacctgacctgaggggcaagaaaagacaaccccctcaaatcca

SEQ ID NO: 17658 - DNA, 120 bp, synthetic construct
  source 1..120: mol_type = other DNA
agcctctctcttctaggtgtgcttaacaacttccatctttgttaccaactggtaatcactttccaggacctatgcttcttgtttgctaatgccagcactttcccttagccattttctact

SEQ ID NO: 17659 - DNA, 120 bp, synthetic construct
  source 1..120: mol_type = other DNA
gtgcagctgtcctacatcagcttccaggtcagactgtccacctggcaccggtcccaggggctgggatgcagggcccagcgtagctgtgcttaggcccagctggggggacccaagccaatc

SEQ ID NO: 17660 - DNA, 120 bp, synthetic construct
  source 1..120: mol_type = other DNA
tggtggggtctgggaacacggcaggaagttccaggaaggctaacatgaaaacggaggtttacgggagagtccaagggccaaaggctcatgaggtcagcctcacagtggagccccctctag

SEQ ID NO: 17661 - DNA, 120 bp, synthetic construct
  source 1..120: mol_type = other DNA
tgtgctctgggagccacatcgccttccacatgaacccccgttttgatgagaatgctgtggtccgtaacacccagatcaacaactcttgggggtctgaggagcgaagtctgccccgaaaaa

SEQ ID NO: 17662 - DNA, 120 bp, synthetic construct
  source 1..120: mol_type = other DNA
ttgatttgtggacagctgtgtgacctcgggcaagtgacttagctactctgtgcttcagtttcctcatctacaaaatggagctaataatcatatgaatctcctagagctgtaagaatggaa

SEQ ID NO: 17663 - DNA, 120 bp, synthetic construct
  source 1..120: mol_type = other DNA
ttcctggtggtcacttgaagtggtgcactcagcagcgggttccatctttcacccacttgccaggcctggcattgaagatttcgtctccaagggaccagggtggccccagcttgagagagg

SEQ ID NO: 17664 - DNA, 120 bp, synthetic construct
  source 1..120: mol_type = other DNA
taaaattacactccccagtgtcccctgggctatttcctgctgtttttctccgaagcactacacctcttccttgtttgggtttgtcagccccagtggaatgtaaataatttttgcctgatt

SEQ ID NO: 17665 - DNA, 120 bp, synthetic construct
  source 1..120: mol_type = other DNA
tgcaaacatagaggtggcccggctccttgtggagcacacggagcacctcgctggccagctgctgctgcaggatgtcctgaacacagacctaaaaccagaggaaacggtgggtccagttcc

SEQ ID NO: 17666 - DNA, 120 bp, synthetic construct
  source 1..120: mol_type = other DNA
gccactgactcctggccgcccgctactactcgcgcgcggtgggcagggccagtccgggggagcggaccccgagaggcgccgcgggatggcaggcggtgtcttccaaacccaagcctccga

SEQ ID NO: 17667 - DNA, 120 bp, synthetic construct
  source 1..120: mol_type = other DNA
ccaagggctgcctgccgaacataaggggtggctgggtcctccatgtgggcagctcatgcagtcagctcagcagctctccctgcctggaatggtctggaaagtgggggccaagcaggaaga

SEQ ID NO: 17668 - DNA, 120 bp, synthetic construct
  source 1..120: mol_type = other DNA
tttgtctctatggtttgccctttcccagaatggccaatgaattggaatcccatggtggtagcctgttgggtctggcgtcattccctcagcaatactcatctaagatccacccatgttcct

SEQ ID NO: 17669 - DNA, 120 bp, synthetic construct
  source 1..120: mol_type = other DNA
agcactcctgctccagcctcagctggctctcagggtcattggccttcagccctcagcctcctcccagccactgcaaaaaccaggacatgggatgcttggctgtcctcccctactgtcctg

SEQ ID NO: 17670 - DNA, 120 bp, synthetic construct
  source 1..120: mol_type = other DNA
cgtcgcaggtcgaggacggtggacaccacaattcccagctgtcaatacaggaggggactttgttttcctgggtcaccaagaaagaacaagagaacgctggggccttagtcctagagaaca

SEQ ID NO: 17671 - DNA, 120 bp, synthetic construct
  source 1..120: mol_type = other DNA
acctgtgtgcgtcttatgtgcaagtgctgcacaacacagaggtgagtgggtgggcaggtgggcggtcactcagcaccagtgacattttgaggtcatggcacccatcataatgggccattg

SEQ ID NO: 17672 - DNA, 120 bp, synthetic construct
  source 1..120: mol_type = other DNA
ccttctggcagagtcaatgaggagaggaagatggtcacagaatccatggaaagaaagaaaacaaaatgacaatggaacatcatctatttcctgtccatctgaaaggaaagcctaaggaag

SEQ ID NO: 17673 - DNA, 120 bp, synthetic construct
  source 1..120: mol_type = other DNA
gatggatgtggataattagcttaacttcaagtaaaagattagagagcaaattgtaaacataactgtgcttttttacactcaaatgacattaatcagacagttttggatctctagaaatat

SEQ ID NO: 17674 - DNA, 120 bp, synthetic construct
  source 1..120: mol_type = other DNA
agtacagccctacaaataaaatagcttggtcatggtaactgcatatgttcaaatgcaacgcatgtcactaaaaatgtcagctaggaggaaaagctcaagagctctattgtacaacatgtt

SEQ ID NO: 17675 - DNA, 120 bp, synthetic construct
  source 1..120: mol_type = other DNA
atgcaatcatttgagttgtgagctgaaccagccacttgtttcacagaccaccattttacctgaaaggatgactgaatggcaaactatgttatctaacttgggtatctggcagacagtttc

SEQ ID NO: 17676 - DNA, 120 bp, synthetic construct
  source 1..120: mol_type = other DNA
caaactggttttgatccttaagaaaggcggcagagttaattcatggcaacatatggttagacaaaatcctcagtaagaatgccatatgatagtgttcgcattgaaagaaggatgaggtgc

SEQ ID NO: 17677 - DNA, 120 bp, synthetic construct
  source 1..120: mol_type = other DNA
gtggcctcggatagttctcatcataaatcaaacattacagctgccaggccccttgaggctaagcattctgctgatatgctccagatcagaaaattattgttagggacccgtgacactcac

SEQ ID NO: 17678 - DNA, 120 bp, synthetic construct
  source 1..120: mol_type = other DNA
agaggcaaccctccttcactgctactggaaagttcttgcatacagcacattactaaagaatccaggaagtggctagcattattataaaggaatatagtaagcaagtctggctcactgaca

SEQ ID NO: 17679 - DNA, 120 bp, synthetic construct
  source 1..120: mol_type = other DNA
atatgctattgcctctcactcatacacttctagcagatcagattatatagcaaggctgaaaataatcaaggatgtgtatttaggaaaacagtgaagttggaactgcctcagcattgactt

SEQ ID NO: 17680 - DNA, 120 bp, synthetic construct
  source 1..120: mol_type = other DNA
gccattgttcagtttttagaaaaggataattttctaccaaacaaaagaagaaagaaaatccccctttagtttatgtaatttgttagtttatggagttccatgcgctcaaaagcttgtgat

SEQ ID NO: 17681 - DNA, 120 bp, synthetic construct
  source 1..120: mol_type = other DNA
agagagtccgagagggtttgcatagactggctgacaggagactgctgctggtgtttggctgacccaaggctgctggactcactcaagcccatgttgctgacagaattcgacaaggcacgg

SEQ ID NO: 17682 - DNA, 120 bp, synthetic construct
  source 1..120: mol_type = other DNA
tggacccgcatgaatcgactatgcagtgacaggttgtgccggatggagttcttctagccggcagagctgttgctgttgcccttatccttgaagtagggcacgcaactcaccatccactcg

SEQ ID NO: 17683 - DNA, 120 bp, synthetic construct
  source 1..120: mol_type = other DNA
gccgccacctcccagtcttgccgcgcccgcctcccaggaacaggagaccatacttcttaataacactttttgtttaaagaaaataatgttttttaataaaaaaatatactgtgctaacac

SEQ ID NO: 17684 - DNA, 120 bp, synthetic construct
  source 1..120: mol_type = other DNA
agagctctaggatggaaataccaatttgggactcatcttgatagaaggtaactggttgtgggaatgatgagactaatgaagtagtaagtagaggctgcaaacagttgatcagttggccaa

SEQ ID NO: 17685 - DNA, 120 bp, synthetic construct
  source 1..120: mol_type = other DNA
aaaaatgtttaattctatatgcctaacacaccagaaaataaaataagccaaagattagaagaaccaatttcttctcactgacttgcaatgctacttctgtcatagattagtacctaaaat

SEQ ID NO: 17686 - DNA, 120 bp, synthetic construct
  source 1..120: mol_type = other DNA
cgagatgtgcgtcaacgtgctcaagagggactggacggctgagctgggcatccgacacgtactgctgaccatcaagtgcctgctgatccaccctaaccccgagtctgcactcaacgagga

SEQ ID NO: 17687 - DNA, 120 bp, synthetic construct
  source 1..120: mol_type = other DNA
cagtagtgcaagtacaacaaaaaatgtgaaaaaatatacatagtagagagaggcagggactgaatttgagggggaagtagcattacctttacatttctgtatgtctgtgttgttcacttt

SEQ ID NO: 17688 - DNA, 120 bp, synthetic construct
  source 1..120: mol_type = other DNA
ccttcataggctttccttttccagtgtttctttgaactatgtgagtatttattatttttacaatcacttcagcatttaagtgctttcttagattgccacttaaagtcacatacatgctgt

SEQ ID NO: 17689 - DNA, 120 bp, synthetic construct
  source 1..120: mol_type = other DNA
cactctgaaagcttatttataatgtagattgctggaccccacctcaaagtaataagcattagttgagcctggggtacaatccagaaatctaacaaccaccccagggggaattctggtgta

SEQ ID NO: 17690 - DNA, 120 bp, synthetic construct
  source 1..120: mol_type = other DNA
gcacaaccgcgtcccccgaggagaggatcaggccagagtgagaagggacagggctcatggtctgccctcgaggcccctttaacaaacgcgcactctagccccgactcggcacagaacgac

SEQ ID NO: 17691 - DNA, 120 bp, synthetic construct
  source 1..120: mol_type = other DNA
ttcccagtagcattaccttagttggggccaccaccatttcactaggattgccgttgcagcctggtaactggattccctaactaaggttttctctaccaccaatctgttctcgacactttc

SEQ ID NO: 17692 - DNA, 120 bp, synthetic construct
  source 1..120: mol_type = other DNA
aaacccacaggaagacaaatggctacagttggtcctaggaggtgtgtggcctgtacacgtacttttaaaaagctatcctaagaatgataaaggaggatacaggaaatatcaagcaagaac

SEQ ID NO: 17693 - DNA, 120 bp, synthetic construct
  source 1..120: mol_type = other DNA
caactgatctcatatatttaatgcaatcctagaaggtagttatcatttttattacccacctttatcttctccatcctcataactaggatggagacactgaggctcagagaggacaggttg

SEQ ID NO: 17694 - DNA, 120 bp, synthetic construct
  source 1..120: mol_type = other DNA
cttagcctggaagatcttctctaccaaagagtggttctgcaggatcaatgacatatcacagaggaggtttctagttggcattctgaagcagttaaatagcttatatttgttacactattt

SEQ ID NO: 17695 - DNA, 120 bp, synthetic construct
  source 1..120: mol_type = other DNA
ttgcttatccatgaaatgaaaccttaaagtagagtttctccaaggctggagatagcttaagggccaaataagtctagggtggtagttctccagctgtggcttgtatcaggatctccagca

SEQ ID NO: 17696 - DNA, 120 bp, synthetic construct
  source 1..120: mol_type = other DNA
caatgggggcgtgctgaaaagctaacaggaagctttctgagatttttgcatagaagtttggaggccccaaataaaaacagacataactgctctggtccattctgtacatctttaaaagaa

SEQ ID NO: 17697 - DNA, 120 bp, synthetic construct
  source 1..120: mol_type = other DNA
ttgtctagtccctgggctctggcatggtggccagctctagaattaaacccaccaatggctatttttgcagtattggattcagtcttgaggagggaacaaaattaatggggaatttggttc

SEQ ID NO: 17698 - DNA, 120 bp, synthetic construct
  source 1..120: mol_type = other DNA
attggttgacctggatgacatcagagacctgtcttctgggttcagcaaataccgagacttcatccgttacctgcccatccacctctccaagtacattctaagtatgctggggtgtatgag

SEQ ID NO: 17699 - DNA, 120 bp, synthetic construct
  source 1..120: mol_type = other DNA
tttttccaggggtcctacacaagaggaattgatcctaattatgccaataaggtttctatcccagttcctaaaatggtagatgacgggaagagcatgcgtgtgaaacatccgaagtggaag

SEQ ID NO: 17700 - DNA, 120 bp, synthetic construct
  source 1..120: mol_type = other DNA
taaaataatgagaacattttgtggggcaagggatctactttgtaaggcagctacaaggacaaatgaaagttgcagatgtatgaaaactttgaaatgcaaatgcaggctgggcgtggtggc

SEQ ID NO: 17701 - DNA, 120 bp, synthetic construct
  source 1..120: mol_type = other DNA
taggggctctgggactgtgggtatttgaagttaccactgagctttaacttcaaatattcccttgttagaatgagtacaacctgtggactgcataccagaacgaggaaacgcagcaggtcc

SEQ ID NO: 17702 - DNA, 120 bp, synthetic construct
  source 1..120: mol_type = other DNA
gggaagacagaacagataagacaggggaaaggcaaagttgagtttttatgcttagtgtggtgataactgctctttagaagagatggtgactagttgaattctaggtatgaccaacggaat

SEQ ID NO: 17703 - DNA, 120 bp, synthetic construct
  source 1..120: mol_type = other DNA
ttgttgaaaggccctggattttcctttacaccactgctgtaggcaaaagtcatggggctaagtcagtcccaggagggacactgactcttctttcatggataatccttttcccctggcact

SEQ ID NO: 17704 - DNA, 120 bp, synthetic construct
  source 1..120: mol_type = other DNA
aattattattctcagtttacagatgaagaaactgaggtaagtggtagttcagtaatttgcccagaatcacacagctagtaagtgatggccctgggaatggacttcaggcagccttctcca

SEQ ID NO: 17705 - DNA, 120 bp, synthetic construct
  source 1..120: mol_type = other DNA
aaattaacttcctcaaagttacaccaaataggtgctgcagctgggattcaaatccaggcccctgactctaagctgaaccatgagaatctgctgcctcccaactaactacttatctacatg

SEQ ID NO: 17706 - DNA, 120 bp, synthetic construct
  source 1..120: mol_type = other DNA
ctctctccctcctgttcagtatgggatgtagacacagggaagtgcctgaagacgtttagacacaaagaccccatcttggccaccaggatcaatgatacctacattgtgagcagctgtgag

SEQ ID NO: 17707 - DNA, 120 bp, synthetic construct
  source 1..120: mol_type = other DNA
aacccctagccttagcgggtggtgttgatatatgatttgcagcaggaacacaggatcacagtgaaaagtggctggcttggcctgtggaatttccccaccaatcttgtcactatggccaat

SEQ ID NO: 17708 - DNA, 120 bp, synthetic construct
  source 1..120: mol_type = other DNA
ggagcatggtggggaagtacgagcgctgcctgatggccttcaagcatcccaagtaggtgcctgtgaagcccggagcgatgaacctggtgtccttcccttccccgtcatagcctagactgc

SEQ ID NO: 17709 - DNA, 120 bp, synthetic construct
  source 1..120: mol_type = other DNA
aggtgtggaggtcagaactgtgagtgattctgttggattttttgatttttttcctcccctgggataccagccctggatttgctgtcaggaggagagagtgtgcaatgcctctctacaatt

SEQ ID NO: 17710 - DNA, 120 bp, synthetic construct
  source 1..120: mol_type = other DNA
attctacttcaagctcacttgagacatctcttaatgtccctaaaccatattgccttccttttagtgaaactttattagtattatttaccatcttaaagagggcagcctggtaataaggct

SEQ ID NO: 17711 - DNA, 120 bp, synthetic construct
  source 1..120: mol_type = other DNA
aggaaggtcttgaatttcaaaggaaaatcaatccaacgtgcagttgatcggttgagattgagcaatcctcctatagatgtgaaacgaaccagtattccccttgaaatccagaaactgcag

SEQ ID NO: 17712 - DNA, 120 bp, synthetic construct
  source 1..120: mol_type = other DNA
cattgagcttttccttctcagggctaactcctaaggaagagaattagcatatttatcctctgtacaaagagggccagtaacatcaagtgcattgaggtttctgcttaaacctttggacta

SEQ ID NO: 17713 - DNA, 120 bp, synthetic construct
  source 1..120: mol_type = other DNA
tacctcccataataataccgtccattagttactctagagtcctcctgccttgtttttcttaacgttttacttctctgcaagaacatattttaaaaagttgcttctacaatttaaagtaca

SEQ ID NO: 17714 - DNA, 120 bp, synthetic construct
  source 1..120: mol_type = other DNA
acttagattgtcttaagtgtttttttctttcggttcacacaaaatttgttgagggattactatgactcagacacggttgtaggcccagggatagggttgtgaccagtacagacaggtttc

SEQ ID NO: 17715 - DNA, 120 bp, synthetic construct
  source 1..120: mol_type = other DNA
gtctgtcttagccatctttatctttttagttgttcaggacaaaaactttggaatcttccttgattccttttatttacccttcctccacctccccagtcagtccatcagcaaatcctgtca

SEQ ID NO: 17716 - DNA, 120 bp, synthetic construct
  source 1..120: mol_type = other DNA
gtttagccttggataagaagaggaggagttgtgagaaggggtcatggaactaaggatgcagtcagatgattttgtgaaggagccagaaaccttgagattatccccagtagcctcggcttg

SEQ ID NO: 17717 - DNA, 120 bp, synthetic construct
  source 1..120: mol_type = other DNA
tctctacatttgctagtacctgtagtaaaatgtaattgcatttctttcattgtgttttggttttcagacatccagtagcatcgtttttccacttattctttcgagtcagtgcaatcatcg

SEQ ID NO: 17718 - DNA, 120 bp, synthetic construct
  source 1..120: mol_type = other DNA
taaatatggactctagatgatagatatttgggtattcactgtaaaatttaactgtgtgtgttcgaaaatatagtaaaatagtggagaaaaaaatcaaaggctgattttggagtttcagag

SEQ ID NO: 17719 - DNA, 120 bp, synthetic construct
  source 1..120: mol_type = other DNA
caagtcccataaatccatagattgtactttcttcattagggcatcagtgcctgctgctctatctggaatgctcttcttcctcccacatcaccttcatacagggattcctaatctttttat

SEQ ID NO: 17720 - DNA, 120 bp, synthetic construct
  source 1..120: mol_type = other DNA
tgttttttattaaacatgttgaactttttattgataaatttcacaacatgataattgaatttatgttcttttataggagtcctctcaagagaataaaactgtgtcagaggctgaatcaag

SEQ ID NO: 17721 - DNA, 120 bp, synthetic construct
  source 1..120: mol_type = other DNA
gataaggaataagaaggtgctagaagactttgtggaagaggagatattgttgctgctgtctttggaaaatatagtttgtcacttgacccaatttgtgagtcttactcttttttatatctc

SEQ ID NO: 17722 - DNA, 120 bp, synthetic construct
  source 1..120: mol_type = other DNA
tgctattccatcattttctttcactgaatatcttggagaagtctgaggccaggcttacttaacctttgtaatctctcctcataaggtgtttttttttttagttcatgtaacccagatgta

SEQ ID NO: 17723 - DNA, 120 bp, synthetic construct
  source 1..120: mol_type = other DNA
ttgcgttctcttccttagtggggctcttgtctgctggttggctgtgcactctcttctggttcttcccttctgctttggattgtttgtaagaccttagagctttagcatccatccaagaga

SEQ ID NO: 17724 - DNA, 120 bp, synthetic construct
  source 1..120: mol_type = other DNA
acttcgtggggaaatttcttagacgtatgcaagcaagtgaaaacaattagggccagtggtattaactactttataaaattttatttttgtttgtaagaagtcatctatttaaggcccagt

SEQ ID NO: 17725 - DNA, 120 bp, synthetic construct
  source 1..120: mol_type = other DNA
gggttgagagtctaacaaaggatacattggtgtagttctttaggtaactgtgttatttgaactgcatcctaaaccaagtaacaatgaattttagaatatgcatgtggtaggagctaccct

SEQ ID NO: 17726 - DNA, 120 bp, synthetic construct
  source 1..120: mol_type = other DNA
caagaagtaggatcaggaagaagagttatgatggagaacagcagggaaaaggattttcagaggccatgccctccctgtggctcagattgtgaaactgaggcccaaggccaaatggtaaca

SEQ ID NO: 17727 - DNA, 120 bp, synthetic construct
  source 1..120: mol_type = other DNA
caataaatggctgtgccttccgggcaggggggcctatgtcaggcttatcctaggacagacgggcaagagtttgtagaggtaaaggaggtgcttaaaattgcaggagttcttgtagacaga

SEQ ID NO: 17728 - DNA, 120 bp, synthetic construct
  source 1..120: mol_type = other DNA
tcctactgaacagagggaacactgaggggatgaactggcctctgatcacatggaaaggtggtggggaggtgctaggaacaagatttggctggagcttctcttcagcggttatcagcctct

SEQ ID NO: 17729 - DNA, 120 bp, synthetic construct
  source 1..120: mol_type = other DNA
atttcccgtctgtgcccagccttccagccagcccactatcgccaaatcgccccaagtaccttctagcccagcggaggagagagcctgctctttcttttttcttttctttttttttttttt

SEQ ID NO: 17730 - DNA, 120 bp, synthetic construct
  source 1..120: mol_type = other DNA
cacacacacacacacacccctacctctcctgggttgtaaattgaaatctggttaaacaatttggtcgcaatacatttgcaagcttgggttcacccacagcctgagttccttcaggtctat

SEQ ID NO: 17731 - DNA, 120 bp, synthetic construct
  source 1..120: mol_type = other DNA
cttcttgtaacttgctactcaaaatgacttgcatatgagacactaaaaaggcagggaggcaggagtgggccctgaaggtccagtctagctgggactcagcaaacagagcatcactttcca

SEQ ID NO: 17732 - DNA, 120 bp, synthetic construct
  source 1..120: mol_type = other DNA
cgatctccatcaggcatggcccctctctggcctcagtttgcccatctgtgaaaaggaggggtggaacaacctgttcggcagcagacaggaaccagagtcaagctgagcttgggaggggca

SEQ ID NO: 17733 - DNA, 120 bp, synthetic construct
  source 1..120: mol_type = other DNA
agctttacagggcttggtgtgagtatgccagagatgccatgcatagtgccatcagagttcccaagtaccaaccagcaagggtggaagagctcttacacacaaatctgccaggctgtcatt

SEQ ID NO: 17734 - DNA, 120 bp, synthetic construct
  source 1..120: mol_type = other DNA
cgccaaaatcctactcatgctttagagcccaactcagatgtcacttcctccctggtgccttcactatgtggaatgtatccactgtcattgaatttcatttattcatttgctcatcataga

SEQ ID NO: 17735 - DNA, 120 bp, synthetic construct
  source 1..120: mol_type = other DNA
atctctcactgaaacgtgactcccagtgttagaagtggggcctggtggggggtgtttgggtcatgggacagaccctcatcagtggctctttgcagtaatgactgaggtctggttgttgaa

SEQ ID NO: 17736 - DNA, 120 bp, synthetic construct
  source 1..120: mol_type = other DNA
tcctttaggagatcatgagaggccactctgccctcctctggggccaccccttccttcatcccttcctcccggctggactctttaccaccccagtgctagctccgctggtggcagtaagag

SEQ ID NO: 17737 - DNA, 120 bp, synthetic construct
  source 1..120: mol_type = other DNA
cctccatgccagggactattctaattgctttaaatataccaacttgtttcttccgtgcaatagcctattttacatgtgaagaaacaggcacagagaaggtaagtgacttgcccaagctca

SEQ ID NO: 17738 - DNA, 120 bp, synthetic construct
  source 1..120: mol_type = other DNA
ctcttcaggaatttgccactgctataggctgactttctgtcccccaaaattcaaatattgaaacctaatcccccatgtgacagcagtaaaaggtggggtcattgggaggtgattagcagt

SEQ ID NO: 17739 - DNA, 120 bp, synthetic construct
  source 1..120: mol_type = other DNA
cctcttctccactgttatataaattccttgttatcaggctcgtgtctcagggacggcttccggagaaacccgaactcctagacatgagattctagaccactgctgcccccaaacgaatgg

SEQ ID NO: 17740 - DNA, 120 bp, synthetic construct
  source 1..120: mol_type = other DNA
tttgctgctccccccacacatccccctgccaggcttgtctctgccttccctggcagacatctacttgaacttccaggcccagcgggccacacccttcctctaggaagccatccctgactc

SEQ ID NO: 17741 - DNA, 120 bp, synthetic construct
  source 1..120: mol_type = other DNA
agctttggaactaacttaaagagagataaagaggaaatacctctcatgccccaccctggccctgcacctccttcccttcccaccgcacagccacacacacatctcagctcccaaactgtc

SEQ ID NO: 17742 - DNA, 120 bp, synthetic construct
  source 1..120: mol_type = other DNA
cctccaccctgaacagattggagcatctgccctccttgagttatagataggaaaactgaggaacagagggcagggacctgcctgaggccacacagcagccagtggcgcagccagctgaaa

SEQ ID NO: 17743 - DNA, 120 bp, synthetic construct
  source 1..120: mol_type = other DNA
accagtggtcacctagggtccctcgcatttagacagctcaggggtgacaattcagtggggggacgtcaggctctggggagcagataagggggcctttggtctgagacagactggttctca

SEQ ID NO: 17744 - DNA, 120 bp, synthetic construct
  source 1..120: mol_type = other DNA
gaagctcacattctagtaggcagagacagaccataaacaagggaagaaacaaataagcaaggtagtttaatggagcagtaagcgctgtgaaaaatggacatcaggtgacagatggagaat

SEQ ID NO: 17745 - DNA, 120 bp, synthetic construct
  source 1..120: mol_type = other DNA
ttcctatttcatcactgccccactccctcccaacaccacacttgggtctagagacctcgaagtgctctcagatgagaaaccaagacttggatccccgcagagggtcatgccttgggctca

SEQ ID NO: 17746 - DNA, 120 bp, synthetic construct
  source 1..120: mol_type = other DNA
attttcttttcaaactttttcctggaaaactgggggttgaactaactcctgccagacactgtggtaatatctcatcgaatcctcacaacagccccaaaggagggtcattagttatctccc

SEQ ID NO: 17747 - DNA, 120 bp, synthetic construct
  source 1..120: mol_type = other DNA
tctcctctttctgctcccaggagactcctattcatccatcaaagaccagctcagaaggtacctcttctggtttagacactgggcaccttaggtgggacttaaatcctaaggtcaacaaga

SEQ ID NO: 17748 - DNA, 120 bp, synthetic construct
  source 1..120: mol_type = other DNA
ttggatggaaactgcaatttcaatgcagtttgagttctgtaattagtagactgggctagactactggaccctggaacactccaaacaggctgattggggaactttttatcatcagagatt

SEQ ID NO: 17749 - DNA, 120 bp, synthetic construct
  source 1..120: mol_type = other DNA
cgaagaacaggacatccatttcctattctacccccagccacctgttgctgagactaagtcctggatgagtgtagccaagagttgggggcccccttcttgcacccagccccactcaaggaa

SEQ ID NO: 17750 - DNA, 120 bp, synthetic construct
  source 1..120: mol_type = other DNA
actaattacagaactcaaactgcattgaaattgcagtttccatccaatctcacgacccttaacataatcgcaccggcaaagtccctcttgtcatataagggaacgttccaagttcttgag

SEQ ID NO: 17751 - DNA, 120 bp, synthetic construct
  source 1..120: mol_type = other DNA
tcagggtgtgttcatagaatgatgggtccatgtcaaaaggataaggagacagcttgaaggagaccccactggcctaatcaggggcattttaagcatcaaaataaatgtaatagtaatgga

SEQ ID NO: 17752 - DNA, 120 bp, synthetic construct
  source 1..120: mol_type = other DNA
attctcaaatgctttgaggctccacctgggccttgaaggatggctaaggtcaagactagacagagaaaagggaaaaggcattatttctggtgagggccatgagcaagagcccagccaggc

SEQ ID NO: 17753 - DNA, 120 bp, synthetic construct
  source 1..120: mol_type = other DNA
tttagaagtggtttggaccccttgactggaatggagtagggggaatcctgttttgccctatgcctcatacagatcagagggtgggaaccttgaacacatcttttttttttttttagagac

SEQ ID NO: 17754 - DNA, 120 bp, synthetic construct
  source 1..120: mol_type = other DNA
cctttctacaagagactcttagtgtgttctgagaaagccgtagctcctcacctgcctcagaagggcacggtgcttgcttcttcagaaaatttacagacaagtttcacacacttaaaactt

SEQ ID NO: 17755 - DNA, 120 bp, synthetic construct
  source 1..120: mol_type = other DNA
gttcttgcgcaaatttaactgcagggtaagtttctagaagggaaattccatagtctagactaaaggttactggtaggccaggtatctcaacctatatttggttctcagatccaaaggtag

SEQ ID NO: 17756 - DNA, 120 bp, synthetic construct
  source 1..120: mol_type = other DNA
aaaaacttgcctgttaattctcatttctgagatcctgcagctaccttgggtggtggcctgtccaagcctggcctttgttttgttttgtttatttgttttgagacagtcttgttctgttac

SEQ ID NO: 17757 - DNA, 120 bp, synthetic construct
  source 1..120: mol_type = other DNA
aaaaacaaaaaggaaaaggaaaaagaaagagagagagagagagagagataatccaggactttttttgaagggagagggaaacaggactgtctgacacgcgggaaaattgcttgaattctc

SEQ ID NO: 17758 - DNA, 120 bp, synthetic construct
  source 1..120: mol_type = other DNA
catatgctgttattaatttttgcaaatgtccttaactgagaggcactgagcagaaagaagaacacaattgcatctccattatcttcatctgggccaccagataccagccacccactctct

SEQ ID NO: 17759 - DNA, 120 bp, synthetic construct
  source 1..120: mol_type = other DNA
ccgatgatgatatgacaccccagacatgtgcagggatgtcctctaagcctcagcttcctcactgcaatttggggctctgtctctttctggcagggagttattgggaagaccaaatgagat

SEQ ID NO: 17760 - DNA, 120 bp, synthetic construct
  source 1..120: mol_type = other DNA
gccggagaggacccgagactcctgtgccagcctgggcatcccctccactgccagggaaggactgcatccaagtcgcatccgtacccaggccgaggtgtccgaggcccaggctgaaatccg

SEQ ID NO: 17761 - DNA, 120 bp, synthetic construct
  source 1..120: mol_type = other DNA
tttacagatgggtaagtcaagacacagagagaggatgtggcttgccacagaccacatggctggtgagcataggagccaagattccaacccgtttcccatcctggccaagaataacactcc

SEQ ID NO: 17762 - DNA, 120 bp, synthetic construct
  source 1..120: mol_type = other DNA
attgagtcctgtaccgtgcctcagtttccccacttataaaaagaggttactaaaaaggatgcttcactcaagggtgtgaagacccagtgaatgaagtgttaataagagctccacgtatag

SEQ ID NO: 17763 - DNA, 120 bp, synthetic construct
  source 1..120: mol_type = other DNA
ggtcctcaggtgctcaagcttagctggaagccttcaggttgctgtgcaatggaatagtgagtacccagaggatatgtgcgtgtgttacagtgagtgagtgaatgaacgaatgaatggaga

SEQ ID NO: 17764 - DNA, 120 bp, synthetic construct
  source 1..120: mol_type = other DNA
gctcatgttacagtagcacacgttcgaatcccagttctactacttgtgactgtgggaaagtaatttcaccccagtcctctctggtctcattgatcaaatggaactaacattctattgtcc

SEQ ID NO: 17765 - DNA, 120 bp, synthetic construct
  source 1..120: mol_type = other DNA
gctcaagccccatttcacggaggaagaaaccaagactcagagagggccaccggggtcacagtctctcctgcacagttctgcggctgcgccagcgccggcccgctccctccacgtccccgg

SEQ ID NO: 17766 - DNA, 120 bp, synthetic construct
  source 1..120: mol_type = other DNA
aatatttttaaaacgcgtcgatcagtataaagcgctgtgcctggcacatcctgtgctcaatctgctattgtgacaaaatcgtgctcaggcccctgccacctgcaaacaaagtctctctct

SEQ ID NO: 17767 - DNA, 120 bp, synthetic construct
  source 1..120: mol_type = other DNA
atacgttagaagagaacaagtgctaaattgtaagaataaaagtggaatagggtgagtgaggtccatggggtcaaggggagtatgtagaatttaaatagggtagtcagggagggccccatt

SEQ ID NO: 17768 - DNA, 120 bp, synthetic construct
  source 1..120: mol_type = other DNA
ggtcatggttatgaaggtactgatgatggtggtggtggtagtgattcctccttgaccaaataagtctgggaaatgctggcatgtacaaaactaatcaggtgggttaatttgagaataaga

SEQ ID NO: 17769 - DNA, 120 bp, synthetic construct
  source 1..120: mol_type = other DNA
atttgaaatatgtctcagacagaatcaactggatttagtgacagattggttgtaggggaggaggagaggaaggagtcaaagatgacgccctggtgtctagtttgaaagggccattttctg

SEQ ID NO: 17770 - DNA, 120 bp, synthetic construct
  source 1..120: mol_type = other DNA
cgtgtctataaagagcacactagattgtacccagcacttttggatatgacatgctaattagatgtatttaactattcataggaaagtgtatgataaatgactgtaatatttctaataaat

SEQ ID NO: 17771 - DNA, 120 bp, synthetic construct
  source 1..120: mol_type = other DNA
ttgcttccttaccccttcctagttcatgttttcttaaacatagttacatttcttctttgctatactaaaaatccctaattttagttggtcagagagagggatttgagactgagctcccat

SEQ ID NO: 17772 - DNA, 120 bp, synthetic construct
  source 1..120: mol_type = other DNA
ctgcaatccttgtctccagtggccgggaactggacccaccgtttcctctggttttaggtctgtgttcaggacatcctgcagcagcagctggccagcgaggtgctccgtgtgctccacaag

SEQ ID NO: 17773 - DNA, 120 bp, synthetic construct
  source 1..120: mol_type = other DNA
tatttattgagcacctactgtgtgctagggatagagcagtaaatgaatcaggcaaaaattatttacattccactggggctgacaaacccaaacaaggaagaggtgtagtgcttcggagaa

SEQ ID NO: 17774 - DNA, 120 bp, synthetic construct
  source 1..120: mol_type = other DNA
caaccccaggggctcattccagcctggacttgacacattggtctctgtttttacctaaaagagccagaagcacttccatgacgatatctttggtgctgtatttccctacgaggcaaagaa

SEQ ID NO: 17775 - DNA, 120 bp, synthetic construct
  source 1..120: mol_type = other DNA
gtgggattctcatatgaggccagagcttcagggaaggtcttgagcttcttcttggacactgtcttagaaaggttttgctctggggccacctgtctcacgtgagtttggccagtacagatg

SEQ ID NO: 17776 - DNA, 120 bp, synthetic construct
  source 1..120: mol_type = other DNA
cattaccacctttcctgtgtccgagactcctgcccaaaagactagagccccagcctgctttctccaacaccctcatgggacggtggctctcttctcatagctcccctagacactggccca

SEQ ID NO: 17777 - DNA, 120 bp, synthetic construct
  source 1..120: mol_type = other DNA
tcccctgaagagaacactctggtcagttggtggaggccagtgggaagccatcagacctgctttccaggaggggtgaagggttggtgcagggtgcaaggtgagagtgaggttaaaggtcag

SEQ ID NO: 17778 - DNA, 120 bp, synthetic construct
  source 1..120: mol_type = other DNA
acccagtagactgttcttgccctggctggtatcccattctccctggctgcgaaaaccacattccacattcatccattcttcgagtccctagtgagtgccaggcactgtgcaaatgaacga

SEQ ID NO: 17779 - DNA, 120 bp, synthetic construct
  source 1..120: mol_type = other DNA
ggattctgttaaaacaaaaggcaccggccggtgaggagaagcattaatagagccaaggagaagccgaaaggcagatgcaggggcaggaggcagagaacaggcaggcagggggatgcagca

SEQ ID NO: 17780 - DNA, 120 bp, synthetic construct
  source 1..120: mol_type = other DNA
agagagagccatgagtccagaggctcttctgtgggccccgcagacttcagcaggcagccacccgtggtccctcactaaaccaggagagagctgcacacctctgtgccacccagtcaggat

SEQ ID NO: 17781 - DNA, 120 bp, synthetic construct
  source 1..120: mol_type = other DNA
tgaccaggacagaaggagtctcagccccacgggtcttagggtcctgtgtggaggcagacacaaatccaattagttactcagacagtctaagcttgtgataaggagaatcctggccctgag

SEQ ID NO: 17782 - DNA, 120 bp, synthetic construct
  source 1..120: mol_type = other DNA
aattaaatgcctaaagaagccaggcaggtgatgtgtatgagtcagatggccaggtagggagtggtggggactgtggcaaagtagacgtcacacgcctcatctaaaaagtcaacatcttct

SEQ ID NO: 17783 - DNA, 120 bp, synthetic construct
  source 1..120: mol_type = other DNA
cctctcctgtgctcaaccccagcctgaagcatatttggttcatagaggtctacaatgcttgaccacactgacatgacagtgagttgccagatgacactgcccagaagtatgtggctgggt

SEQ ID NO: 17784 - DNA, 120 bp, synthetic construct
  source 1..120: mol_type = other DNA
ccagacatacaattcagccctaaaaaggaaggaaattctggcatatgccacaacatggatggtccttgagaacattaagtgaaataaaacagccataaaagaacaagcactgtaggccgg

SEQ ID NO: 17785 - DNA, 120 bp, synthetic construct
  source 1..120: mol_type = other DNA
tgttattgccttccaatctgttaatcgtttctttttccttctttttaccctttttgcttggaaatatcttccctagcccaagatcaaataaacgataacttttctcatttaaaaaaataa

SEQ ID NO: 17786 - DNA, 120 bp, synthetic construct
  source 1..120: mol_type = other DNA
ccactgcgcccggcctagattcctcattactcttttgcattatgtttaatctcccatgtggccctttttgaagttcttccctagtcactcatctctctcttttattatatttatatattt

SEQ ID NO: 17787 - DNA, 120 bp, synthetic construct
  source 1..120: mol_type = other DNA
tcatatagggttgctttcatatctatcaagaccttaggtctgtgattttgtgctttcttatatgcacagaaactgatttgtaattgcagtgaacttgtaacatactaatcctcctgcctt

SEQ ID NO: 17788 - DNA, 120 bp, synthetic construct
  source 1..120: mol_type = other DNA
taagtgagttttcatgaggtctgatggattcataagtggcagtttcccctgctctcccctctctcctgctgccttgtgaagaaattgcctgcttcccctttgccttccatcatgattgta

SEQ ID NO: 17789 - DNA, 120 bp, synthetic construct
  source 1..120: mol_type = other DNA
agagctgggattacaggtgtgagccactgtacccaggcaaaagataactttggaacaccacctgagaatgttacttacaatgaatcctgtcctcattctcatttacttatttggatggag

SEQ ID NO: 17790 - DNA, 120 bp, synthetic construct
  source 1..120: mol_type = other DNA
tgcttcaggaatggagggagtgagagccttttccgacaatgccgaagaaggctcatccctcaccccagacgcctgtggccctttgtaagaaggcgcacccaggtaccacaggacagcccg

SEQ ID NO: 17791 - DNA, 120 bp, synthetic construct
  source 1..120: mol_type = other DNA
gtggctccaaagggtacagcaaggaaagcttttaaagacagctgttgtgctccaggctctccatgccaccacctgccctagcatttattaatagtgttagaattacaagtttatgaaatg

SEQ ID NO: 17792 - DNA, 120 bp, synthetic construct
  source 1..120: mol_type = other DNA
gacattgtagggacccttggctgggcagtaggacttgagtagctacatacggcaaatacaacttcttgctcagtttggagtagaaaaggtgacagtttgtcaacaaaagaaaaagtaaag

SEQ ID NO: 17793 - DNA, 120 bp, synthetic construct
  source 1..120: mol_type = other DNA
catgtactcagtcatgcacatacacacactttctaacacaaaggtgatcagtgtagatgaatattgtgagctcagtggcttcccagaccttcatcttttccctgctcttgtttcaaaggt

SEQ ID NO: 17794 - DNA, 120 bp, synthetic construct
  source 1..120: mol_type = other DNA
atcagctttttcttgcctttgtagatcgtttgtggttgttgatgaacagggcaaattgcaggtagccatcctaaggcagcaggagggtctcccgagccttgcttagaaactcaatgaact

SEQ ID NO: 17795 - DNA, 120 bp, synthetic construct
  source 1..120: mol_type = other DNA
agaagcatcccagatggccaaaccttgtttggggtctcttcctatcccttccttacccaggtcagagggttgaaggtttctgcaggtgctctcagcccctcacaaggatggagcagtaga

SEQ ID NO: 17796 - DNA, 120 bp, synthetic construct
  source 1..120: mol_type = other DNA
aattttctaaaacgggtaaccttatacacgtaagcctaatttataggcagggtctggatcacgagacagcagagctgagaacaaatacttggcagaggtatgcatggaaacgctctctcg

SEQ ID NO: 17797 - DNA, 120 bp, synthetic construct
  source 1..120: mol_type = other DNA
gcacagggatttcttggggcagtgcaactgttctgtacagtactgtagttgtggatgcctctgtcaaaatccactgagctttaaagcacaaagagcaaaccttaatatatgcgattttaa

SEQ ID NO: 17798 - DNA, 120 bp, synthetic construct
  source 1..120: mol_type = other DNA
tgtcagttggcagctgaggcacacgttggaggcctgcccaggacggctctgggtatggggatggagacagctcccatccccttgtcattctgctcttgcctggcttagccttctggtcaa

SEQ ID NO: 17799 - DNA, 120 bp, synthetic construct
  source 1..120: mol_type = other DNA
tttgattctataaaccctgggcctcagtttccccatctgcagcatggagatcacattagtacctgcctcaaggggttgctgagaggatcaaatgagatgtaatgaaagaaatttgcatag

SEQ ID NO: 17800 - DNA, 120 bp, synthetic construct
  source 1..120: mol_type = other DNA
tctggcccttccctacgtccttccctccaaagcacaagtggttccatgttgcaggcgggccatggttgtctctgctgggctgttggcattgggcgggaggaccctctggcagccatggtt

SEQ ID NO: 17801 - DNA, 120 bp, synthetic construct
  source 1..120: mol_type = other DNA
tttatgagtggaggcggagcaggggctgcaaggaggggttgtcatcttgcccctgtgggtgacccttagagggtcacacagcttggtctccccaggcccagggtagagggagcagccgaa

SEQ ID NO: 17802 - DNA, 120 bp, synthetic construct
  source 1..120: mol_type = other DNA
gagatagggcagagctgccacggccagtgagagttgtgttctagtctgggggtgcctctctttacctgtggtgtagcctcaggtcagtggctgaattctggtcagtttcagtttccttgc

SEQ ID NO: 17803 - DNA, 120 bp, synthetic construct
  source 1..120: mol_type = other DNA
gctcatgggagtgcaggggacattgatgtcaagggataggccagacgcctcaccttctctccattctaggaaaatccaagaggaagaaggatctacggatatcctgcatgtccaagccac

SEQ ID NO: 17804 - DNA, 120 bp, synthetic construct
  source 1..120: mol_type = other DNA
ccaggtatctccactgggcatggggtgaggactggcttccagcttgctggccactgactctcttttccatccttcaagaactttgaggtggaggctgatgacttggtgaccatctcagaa

SEQ ID NO: 17805 - DNA, 120 bp, synthetic construct
  source 1..120: mol_type = other DNA
cccatggcatacagggcgtgggaatggcatatggggcgtggggtgcccaagcaggcaacggccatggagatatgagatctggattctgggttctaggtttgtggacaggatggggtgtgt

SEQ ID NO: 17806 - DNA, 120 bp, synthetic construct
  source 1..120: mol_type = other DNA
tagtttaggttctggaaagaagtattggcttcaaaatctgagaagaaaatgtgccatcagaaattaccatctatttaagggaacctcctagggtcagggtcactcatcgtgaagtcctgg

SEQ ID NO: 17807 - DNA, 120 bp, synthetic construct
  source 1..120: mol_type = other DNA
ctctcgtaaggtttgataatttcctagaatggctcacaaaactcagggaaacactttatttgtgtttactggtttatcagaaaggatataactcagggccaaccagatggaagagactca

SEQ ID NO: 17808 - DNA, 120 bp, synthetic construct
  source 1..120: mol_type = other DNA
cattagcataaactcaggctccttgtggataacaaagccactcctgtcactcaggaaattccaagggttttaggagctccatgccaggaacaaagaccaaataaattcctttttatgcca

SEQ ID NO: 17809 - DNA, 120 bp, synthetic construct
  source 1..120: mol_type = other DNA
tgtgacctgagctttagtttcccagccatggtaggggagaagtggtcggggttggctgcatccccaggccctcacacctggctgttgtgtgtgaaatgcccaggccaggcattgtgagtc

SEQ ID NO: 17810 - DNA, 120 bp, synthetic construct
  source 1..120: mol_type = other DNA
ccatccatctgctgtccctgcctccctttcccccacctccctggcacactcacttcagccccgctgccctcccctggcctcagcctcaaggcctttgtggctacagttcccacttgaagg

SEQ ID NO: 17811 - DNA, 120 bp, synthetic construct
  source 1..120: mol_type = other DNA
gcccaaacaccctatccatccatctacccactcatcacccaccctcacacccatccacccatccatctatccatctacccacccatccacccacccatccattcacccatctatccatcc

SEQ ID NO: 17812 - DNA, 120 bp, synthetic construct
  source 1..120: mol_type = other DNA
ggaagcagtgcccctcccaggggcagcttgctggggcccagccacctgctcccatcagtcactgactgaaagctgtcctggcagcatcagctcctcagcctgccctctgaatggcagagc

SEQ ID NO: 17813 - DNA, 120 bp, synthetic construct
  source 1..120: mol_type = other DNA
aggaaagattctgagctgctctggatgcagtggatgaagctctgtggctgaggaatggtgcttgcctgggcgaggctggagcaggcaccttgggcggggaggcgtgcgccagccttccct

SEQ ID NO: 17814 - DNA, 120 bp, synthetic construct
  source 1..120: mol_type = other DNA
actgcctgctctctccctcctgggtttgcttcactgccccttggtgttgaaaccgccttgtctagctcaggtagtgtaccccagcgcccctctcccattcccctcccggcgaccctggga

SEQ ID NO: 17815 - DNA, 120 bp, synthetic construct
  source 1..120: mol_type = other DNA
ggagcaggggctggagcagccatgacccgctggaagtccctcaaggcccctgggccacacaaatccagcccctgtcagctggtggcctcacgccggcgtctgagtgccccggccctggct

SEQ ID NO: 17816 - DNA, 120 bp, synthetic construct
  source 1..120: mol_type = other DNA
catccccccaggatgttctcttggggcctcagtgtcttcgtaactgagtaatgtggctgcaggtgtgctaagggagaaggctttgtctagctctgaggttatggtgtgactggactggga

SEQ ID NO: 17817 - DNA, 120 bp, synthetic construct
  source 1..120: mol_type = other DNA
aggaggacgggctgcacctggtcaccatgtcgggcgccaacggcttcggcaacggcaaggtgcacacgcggcgcaggtgccgcaaccgcttcgtcaagaagaatggccagtgcaacattg

SEQ ID NO: 17818 - DNA, 120 bp, synthetic construct
  source 1..120: mol_type = other DNA
ttgagcccgtgctcttcgaggagaagaaccagtacaagattgactactcgcacttccacaagacctatgaggtgccctctacgccccgctgcagtgcgaaggatctggtagagaacaagt

SEQ ID NO: 17819 - DNA, 120 bp, synthetic construct
  source 1..120: mol_type = other DNA
ggctgaaggctccagagggttccccgaggtgggactggcctctccccgtgtgtgtgggcaccacagtccctgggcaagcagggtgctctgggaccgcacttcatcgagctcacgagccag

SEQ ID NO: 17820 - DNA, 120 bp, synthetic construct
  source 1..120: mol_type = other DNA
atgattggttttgacatcatacatatttttatgttggcaaatttcccagcctttcctttggtggtctttctggtcccaggatgcttcttgtgtccttaccttgggtccttgctctcctgt

SEQ ID NO: 17821 - DNA, 120 bp, synthetic construct
  source 1..120: mol_type = other DNA
catgaaggcaggcgcccaatgcttcctcttcaagtcctcggtgcccagtgaggacttgaagagggagacccagagagggacagagccctgctccaggtcacacagcaagttggggcagag

SEQ ID NO: 17822 - DNA, 120 bp, synthetic construct
  source 1..120: mol_type = other DNA
cccggcctgttggccctcagtcgtggtcatggggaagcactgcccctgcagcccacctccccatccaggattgtgaccataaccccgggaagcatttgtgggacttggcggggtgagctc

SEQ ID NO: 17823 - DNA, 120 bp, synthetic construct
  source 1..120: mol_type = other DNA
cactagagaccaggcaggccatcccatttcagaacaagctgagagaggggaagtgactcactcaaggtcacacagcttatgaggggcagagctgggatttgaatctaggtctgtgtgcct

SEQ ID NO: 17824 - DNA, 120 bp, synthetic construct
  source 1..120: mol_type = other DNA
agaactcaagaggtaagagtgaagtcattgacatgctcttgtgcatctaggcattccttccaccagactctcatctgtacatccttcacccctccacccaccatgccatcctttcatcac

SEQ ID NO: 17825 - DNA, 120 bp, synthetic construct
  source 1..120: mol_type = other DNA
gattaggaaagattctgagctgctctggatgcagtggatgaagctctgtggctgaggaatggtgcttgcctgggcgaggctggagcaggcaccttgggcggggaggcgtgtgccagcctt

SEQ ID NO: 17826 - DNA, 120 bp, synthetic construct
  source 1..120: mol_type = other DNA
atcgcttgaacctaggaggcggagatggcagtgagctgaaattgcgccattgcattccagcctaggtgatgagaggaagattctgtctaaaaaagaaaaaaaaaagaaaaaagaaaagaa

SEQ ID NO: 17827 - DNA, 120 bp, synthetic construct
  source 1..120: mol_type = other DNA
gggaagatgaaactgtttaaagggttctgatggagacagtctggagtgtaaagaagaaataagatatgcgggccttcctctctcaaattatagctggggaagtatctgaaggatttggaa

SEQ ID NO: 17828 - DNA, 120 bp, synthetic construct
  source 1..120: mol_type = other DNA
ctgagagttgcattcgtgggtcagcgcctgcaggtacattgattgcttaagggcaatagttcacacatcacttttcttacattccagcacatatttgtacttttctactaaaatcagcag

SEQ ID NO: 17829 - DNA, 120 bp, synthetic construct
  source 1..120: mol_type = other DNA
tattcctagttagaacttttttcaaagcaagttcagatacctgttggcttaaaacagagacttaccagtttaggcaatacaaatccaaggaagtctggatgcaggggctcaggtgatgcc

SEQ ID NO: 17830 - DNA, 120 bp, synthetic construct
  source 1..120: mol_type = other DNA
ctgcaaaagaatgtggaacaaacatgtattagtcacctgctatgtaccacacactcccacctttgtgatgctactgatcagcgcagtaacgctctgacataggtgttgatgttttatttt

SEQ ID NO: 17831 - DNA, 120 bp, synthetic construct
  source 1..120: mol_type = other DNA
ccagacccttgatgggtccctttggtcccttgggcttcctgagtctccagccagggcctgggacctttgctgggagcttagcatggggtccagcagcccccattgctacctaattcctta

SEQ ID NO: 17832 - DNA, 120 bp, synthetic construct
  source 1..120: mol_type = other DNA
aaactactaagtcaattcaacatactaacattgtatcagggctgtttcccaccccctcctccctcccaaggtgggctgtctgggaacagagaagagctcacatggcttctcagtggctgg

SEQ ID NO: 17833 - DNA, 120 bp, synthetic construct
  source 1..120: mol_type = other DNA
aataccacttctcaccttatgggtgaaatatggcactggaagtaatgctcttcgctgtgggagctacagaaagcaatgaggtctctatcaaacccagtctcctctctctcgagaggaacc

SEQ ID NO: 17834 - DNA, 120 bp, synthetic construct
  source 1..120: mol_type = other DNA
gggaagaaagcggtttagcaaggaggatggggacactaggggctgagtgcttggctcaggtgacatgtggctaaagctgtccttgggacagcagagattctggaagaagcagggtttatc

SEQ ID NO: 17835 - DNA, 120 bp, synthetic construct
  source 1..120: mol_type = other DNA
ggtccttctgtaaaagggccaagctcactggactcttgagacccacctgtcatcgctgtccctgctacaggcagccacaccagtgtgaccccagtgccttctttatgggccaaggggctc

SEQ ID NO: 17836 - DNA, 120 bp, synthetic construct
  source 1..120: mol_type = other DNA
acatttatctaacttgtgttacctccactgtcggcaactcatgggcaggggtcaaatctttattgtaatttatttggggcaaggctttggaaccaatcagacctgggttcaaatcttggc

SEQ ID NO: 17837 - DNA, 120 bp, synthetic construct
  source 1..120: mol_type = other DNA
aggcagacaccctctattctccagctgcaggggaaaggaggctctaaagacctggctctaagagcaaaaggcaggaagaaggtggcgcatggagaaaggactgccagggaaggctgatca

SEQ ID NO: 17838 - DNA, 120 bp, synthetic construct
  source 1..120: mol_type = other DNA
atagctccaaagggtacacatctccagaggatacacatctccacagaatccatacctccacagggtacacacctctacagggtacacactgccacaggatccacacctccacaaggtaca

SEQ ID NO: 17839 - DNA, 120 bp, synthetic construct
  source 1..120: mol_type = other DNA
tacatacctccacaggatccacacctccacagggtacacacttccacagggtacacacctccacaggatccatacctcaaaagggtacacatctccacagggtacacacctccacaggat

SEQ ID NO: 17840 - DNA, 120 bp, synthetic construct
  source 1..120: mol_type = other DNA
acagacctccacagggtacacacctccacaggatccatacctccacagggtacacacctccacagggtacagacctccatagggtacacacctccacagggtacatgcctgcactgggta

SEQ ID NO: 17841 - DNA, 120 bp, synthetic construct
  source 1..120: mol_type = other DNA
cctatcagactagggatcactgaaagccaggttggactcccctgtcagtctgggagtctcctcatcagactgaagtctcctgagggcaaagctgttattgtttatttatttatttttttt

SEQ ID NO: 17842 - DNA, 120 bp, synthetic construct
  source 1..120: mol_type = other DNA
acctggtgccttcacagaacttgccagcactggtgctgaagatcatgagtggcacctttgcacctatctctgaccggtacagccctgagcttcgccagctggtcctgagtctactcagcc

SEQ ID NO: 17843 - DNA, 120 bp, synthetic construct
  source 1..120: mol_type = other DNA
cacctggagcccatattctctcacctctgcccaagggcatctgactaccagctccctctagctggctgggtgtagggaaggagctttttaacctgctaggcccaaacctctctctttctc

SEQ ID NO: 17844 - DNA, 120 bp, synthetic construct
  source 1..120: mol_type = other DNA
gaccaatcaagggagaatgacttaaagaccatccactcatcaatttcagctaaatggctctgagctaaaaagaggagccctgggttcttcagtgactccttgaggcctactctgctgttt

SEQ ID NO: 17845 - DNA, 120 bp, synthetic construct
  source 1..120: mol_type = other DNA
aacatgtgtctaatcacggcaattagggaaagctaacaagaaacaaggttttaccttcagcagcttctgtaaggcaaaggaccagcatgcagcatgcaaagaaaaacagtgtgttagcaa

SEQ ID NO: 17846 - DNA, 120 bp, synthetic construct
  source 1..120: mol_type = other DNA
accgtggggagagggagggggagggggagaggggattctaggtttttcttaagaaaaatatggttattcaggcatcttccaaatagcttatgatagctttatcttcataccgatattggt

SEQ ID NO: 17847 - DNA, 120 bp, synthetic construct
  source 1..120: mol_type = other DNA
tcttcatgatctagcctcttgagtctcatctcccatcatgccccttctctgacatagactctccactccaaccacataaaatcacatgtatttctacaaatggctatgctgtcatgtttt

SEQ ID NO: 17848 - DNA, 120 bp, synthetic construct
  source 1..120: mol_type = other DNA
tataaactagtatattcattgctgctgagggatgcatagcagaagaaaagtgagacttcagcagggtgggttaagtgtaggaaactcgtctggtggtcgtgagttttaattttcttccac

SEQ ID NO: 17849 - DNA, 120 bp, synthetic construct
  source 1..120: mol_type = other DNA
acttcagtggacttccattagaaaaacaagctgcattgtcttgtgttcaggccaagagtatgcaggtgttgttaggcagatcctttctgaaattcccatcatttaatctgacagaggatc

SEQ ID NO: 17850 - DNA, 120 bp, synthetic construct
  source 1..120: mol_type = other DNA
gacctcaaaagcacaggcaacaaaagcaaaattagacaagcgggattctatcaaacttttaaaaagcttctgcagtgcaaaggaaacaatcaatggggtgaagagacaacttgcagaagg

SEQ ID NO: 17851 - DNA, 120 bp, synthetic construct
  source 1..120: mol_type = other DNA
ggtagttctgtgtttaattttttgaaaaatctccatactattttccataatggctgtactaagttacattcccacctacagtgtatgagagctccttttactctgcatccttgccagcat

SEQ ID NO: 17852 - DNA, 120 bp, synthetic construct
  source 1..120: mol_type = other DNA
gtcggtccaatcaccttcctccacactagctgactttcactcacgccactttcaagctttgcttggggaccccagatactcactggtagcagttgttgttgaacttgttgtagctagcaa

SEQ ID NO: 17853 - DNA, 120 bp, synthetic construct
  source 1..120: mol_type = other DNA
taaggttgagggagtatctagcaggaaacaatagcactggccagtgtataaaaagcactgaacatggtccatgatgggtttccagtaagtcattgccacgattattaattgtggtactac

SEQ ID NO: 17854 - DNA, 120 bp, synthetic construct
  source 1..120: mol_type = other DNA
tcctcatggaataacaaatggagctagttggtataatgtgccaggtaaagattcttttatatcaaggccttacaacttgatggcctttctgctttcctagatggtgcttcttgttattat

SEQ ID NO: 17855 - DNA, 120 bp, synthetic construct
  source 1..120: mol_type = other DNA
gcaggtaaaccaatcaaaaacagagttttctgtgtttccatgatagtgttgaagcctaatgacaagccaggtcttacagctgggctcttcagaaaaccaggtttctacatccaaagactg

SEQ ID NO: 17856 - DNA, 120 bp, synthetic construct
  source 1..120: mol_type = other DNA
tgttttaatatctacttgcctgaatgttaatgtctgcccacagaaataagtcggagctctggagtagagaacacccgatgattcagaatcgttccgaagtgctatatttcttcgactgct

SEQ ID NO: 17857 - DNA, 120 bp, synthetic construct
  source 1..120: mol_type = other DNA
tgcttagaatagctggttgtcagtgtgctgcccttagcacagaatacaggtattctaatatatagttaggcttcaggagagaaaaggttagcagcataccatgaggcaccaatgtggaat

SEQ ID NO: 17858 - DNA, 120 bp, synthetic construct
  source 1..120: mol_type = other DNA
ttctgtccctctagagaaccctaatagagattttggtacaaggagtgtggttctagaggaacggagtattaaggatggagtttcttagtttgtttgggggtttctggagtttgctgctta

SEQ ID NO: 17859 - DNA, 120 bp, synthetic construct
  source 1..120: mol_type = other DNA
taatctgcttaacacattattaacaccttaacatgacatttgtttctacttctcttctaacttcccttgagcaattttctatattgaattgttcatgggtatcagaattaacctttctct

SEQ ID NO: 17860 - DNA, 120 bp, synthetic construct
  source 1..120: mol_type = other DNA
tcatttaaggaaataatgccctcactcaaacactgctgctcctcctccaaataattagaaataaccttggagccagtgttgcagccctagaaaacatcctggtacttaatgtcatttcct

SEQ ID NO: 17861 - DNA, 120 bp, synthetic construct
  source 1..120: mol_type = other DNA
ttatcctctaatcaaccctatttattgggctcttagagcatatacttcctatgtcatcagcttttcttttaattaaaaatgtttttgtattccgcctgcgactcggtcccggcgctgggc

SEQ ID NO: 17862 - DNA, 120 bp, synthetic construct
  source 1..120: mol_type = other DNA
aattttccggaacggagacgaacaaaatctggccctacgtttacacacttttctcaaacaagatcacacctattcagtccaaagaagcatattgaccctgcccaatggaagaaccaggaa

SEQ ID NO: 17863 - DNA, 120 bp, synthetic construct
  source 1..120: mol_type = other DNA
gaaaaaaaaaacccctgaaagtcttgggaaccccctaaagtcttttgggaatcctcaaaaagcatgggaagttaagtatttagctacataaatgttgtaagatcatatcttatgtataga

SEQ ID NO: 17864 - DNA, 120 bp, synthetic construct
  source 1..120: mol_type = other DNA
gagcactttagaatttagagttgcaattgaatgccagctgtggagatggggtgcatatcagatatataaataaagctcaggtttgctagggaaccaggtatagagaaaaataagtctgat

SEQ ID NO: 17865 - DNA, 120 bp, synthetic construct
  source 1..120: mol_type = other DNA
attattctcattcacatatgcatgttttaccttcccaaatggctattcttggaaagtaggagttatatttcctttccttgcagagttgttagtcagggaagaagacctcagcagatgctt

SEQ ID NO: 17866 - DNA, 120 bp, synthetic construct
  source 1..120: mol_type = other DNA
aaattttcaaccttcagaaaagagcagaacaatgaatccacatatatcctttgcttggatgacagctgttaacatgctgctaaactgagtttctctgcccctgtgtttgttggtggggtg

SEQ ID NO: 17867 - DNA, 120 bp, synthetic construct
  source 1..120: mol_type = other DNA
ttttttttcctccctccttccctcctctcctcctcccttcccttcccctctcctcccctctctcctccttcccccctcggtccgccggagcctgctggggcgagcggttggtattgcagg

SEQ ID NO: 17868 - DNA, 120 bp, synthetic construct
  source 1..120: mol_type = other DNA
tgctgcaggttcctatggcacctttggatgcttaaaacccttcaaatctatccacccattttgtggatatgtaaactgagccagagagtggtcaagcatcttctctggagacgaccccgg

SEQ ID NO: 17869 - DNA, 120 bp, synthetic construct
  source 1..120: mol_type = other DNA
aaaagtaagtgtcaaaataaatataaaccaagtaccatgggtaaggagaaatcactggtttgggaataattgggtaaaaggtttaatgaaaacaagttagcgttttagatggggcttgaa

SEQ ID NO: 17870 - DNA, 120 bp, synthetic construct
  source 1..120: mol_type = other DNA
ttattttttgatatttttgatagaaaattgaatattctaaggagaaacagcagcttgggtggtgtttgttcattcattaactcctttagagagtgcagaactaaaaatattagattcttg

SEQ ID NO: 17871 - DNA, 120 bp, synthetic construct
  source 1..120: mol_type = other DNA
gaagttgcagtgaaccaagatcgccctactgcactccaacctggttgacagaacgagtctctgtctcgaaaaggaattaggaaatatatatatgtgtatatatatgtatgtatgtgtata

SEQ ID NO: 17872 - DNA, 120 bp, synthetic construct
  source 1..120: mol_type = other DNA
tgtgttgatggcctaattataaaactgataacctcttttgccaactcgcatatctgtgtagtttttctagtcttttaataagtgtctgtacaaaactttctcataggagtctggaaatgg

SEQ ID NO: 17873 - DNA, 120 bp, synthetic construct
  source 1..120: mol_type = other DNA
tggagccaggctgcctgggtttgaacccaggtctgtttattagcttggtgatccagagcaagttattctgctctgtgactcaatttcctccttttaaactggggattatgctagttacca

SEQ ID NO: 17874 - DNA, 120 bp, synthetic construct
  source 1..120: mol_type = other DNA
ctttctttgcagaaatttccaaggaaactatatttcataccttgatggaaatgtatggaaagcatacagttggaccgagaaactgtgagtatattctctccaaatatgacaaaaaactaa

SEQ ID NO: 17875 - DNA, 120 bp, synthetic construct
  source 1..120: mol_type = other DNA
gatttgttgtgtggtttttaaaatcttttttcttttcataaagggtaacatcttgcaacttgattctttcacttcatggtatcacttatatgatattctttcacttcataatttctttcc

SEQ ID NO: 17876 - DNA, 120 bp, synthetic construct
  source 1..120: mol_type = other DNA
tgcctgtgtgtgtgcttgtgtgtgtgtgtgtgcctgcaaatgtgtgtgtgcgcttgcctgtgtgtgtgtggtggtggtggtggagagggatgaacacaaaaaggaaaatggaagaaaagg

SEQ ID NO: 17877 - DNA, 120 bp, synthetic construct
  source 1..120: mol_type = other DNA
atctccccagccctgttaccaagaaagggatacctgcatagtatttctgtctgtttagagacaagaagatactatgttcaattgctatgaaagcttgattcttatcctctgtccgcagag

SEQ ID NO: 17878 - DNA, 120 bp, synthetic construct
  source 1..120: mol_type = other DNA
atgacttcagtttggacccaggaagctgttactagaacaatcccatttgaataggactttgaagggccattgtgtagcatcggacagacatcttggggacaatattctaaacttgcaaaa

SEQ ID NO: 17879 - DNA, 120 bp, synthetic construct
  source 1..120: mol_type = other DNA
ggtacaggcagggttaggagctctggaaagttcaaatacaggtccaaatgtttagagtcgagatgaaaaatgtgtattcaatattattctaaactcttgctattattcataccagtcaac

SEQ ID NO: 17880 - DNA, 120 bp, synthetic construct
  source 1..120: mol_type = other DNA
gcagccaagagacttacacagtttatatatgacctgctctgcttgtcctagttctgacctatggcatgggcaagaaaaggcatcaaacaagtgaccctcaaattagccttgttgctgggc

SEQ ID NO: 17881 - DNA, 120 bp, synthetic construct
  source 1..120: mol_type = other DNA
gatttctctgtataacatacccagcaaatcagagtgggtatattcaatggcctgaaggggactttagactcaaggtgaagattctcctctacatctgactttagaaaatactttccacct

SEQ ID NO: 17882 - DNA, 120 bp, synthetic construct
  source 1..120: mol_type = other DNA
ctcactgtttccctggcctgctgtcagcttgcaaccaggagacagaggccagctgggatctgccccaccttcccccccatactgctcccctcaaccaggacagagaacatggcctcctct

SEQ ID NO: 17883 - DNA, 120 bp, synthetic construct
  source 1..120: mol_type = other DNA
atacacacatggaaaggaaatgtggcaaagtattagctactgttgattccagatgaaagttatacaggtgttcattataccatttgaaaatgcttcctagccatcctaagccttaaagga

SEQ ID NO: 17884 - DNA, 120 bp, synthetic construct
  source 1..120: mol_type = other DNA
gaatctgtattcttaatgaccatgctatactgcttaagattaaccttgagaatttattccagttacagagattgtttttatttctctgaaactgcccccaagaagccataacaataaatt

SEQ ID NO: 17885 - DNA, 120 bp, synthetic construct
  source 1..120: mol_type = other DNA
agctatcattatttcattaaagaacaactccccctcttttaaaatatcattcttcatggattttttatatattatgttgtagcttattgttgttattcttttgaatgctcaaattgtcca

SEQ ID NO: 17886 - DNA, 120 bp, synthetic construct
  source 1..120: mol_type = other DNA
aacttctgaatgactcccttgctgggagtcaggttctcagttattattacaaaatttaataatggaacagttccatatgcataaaggaccaagagaaagaaatgggaaggctagggaata

SEQ ID NO: 17887 - DNA, 120 bp, synthetic construct
  source 1..120: mol_type = other DNA
aaaagtcactttttcccttctgcatttaggacctcaagtaatgtttatccagaaactgctaccataccatagattcattgtatatttaacaacataggcatacaatctggcaaattaaaa

SEQ ID NO: 17888 - DNA, 120 bp, synthetic construct
  source 1..120: mol_type = other DNA
taggtgcagaatcaatattgttaccgttcactgaacagctattttcaaatgtacaagatggagataggctcctgagtattttgaaaaacaatagaaagagcccctcacagtccagccttc

SEQ ID NO: 17889 - DNA, 120 bp, synthetic construct
  source 1..120: mol_type = other DNA
ttagaaccaactgttaaacaaactgagacaaaatgggaatacaacaatgtgggcattgacttgtcccctgagcccaaaagcttcaattacccattgctctcgtccccaggtgatcagctt

SEQ ID NO: 17890 - DNA, 120 bp, synthetic construct
  source 1..120: mol_type = other DNA
gtgagatcctgtctcaaaaaaaataaaaagaacaaaagaacctgtaagctactcaactggcatactggggttttgaaaagttagcttccattctctctctctttttttttaattgttctt

SEQ ID NO: 17891 - DNA, 120 bp, synthetic construct
  source 1..120: mol_type = other DNA
ggaatgtctcatactccagccctcctgagcctaggccctctgtgagatgtgtcaccatttcttggacaccatatgagacattccccctcggattagagatgctcaacctgcatcaacaaa

SEQ ID NO: 17892 - DNA, 120 bp, synthetic construct
  source 1..120: mol_type = other DNA
aaaaaaagaaagaaagaaacttccctgaatattccagccctcctgagcctagtccctttttgagatttgtccccatttcttggacaccatatgagagacttcagaggctgaagtgggagg

SEQ ID NO: 17893 - DNA, 120 bp, synthetic construct
  source 1..120: mol_type = other DNA
gttgtagagacaagatcttgctatgttgcccaggctggttttcctgccactttagagcaggtttcctttttttcatacttttaagagttttttattaggaattgtccgctgaatgttagc

SEQ ID NO: 17894 - DNA, 120 bp, synthetic construct
  source 1..120: mol_type = other DNA
atgtggatggcctggagctatgtttttaaaattgttattaaatattggttttttacttaaatcaatgaaaactttctttactttgtggttgtgttcctcaaaatgagaatttttaacaat

SEQ ID NO: 17895 - DNA, 120 bp, synthetic construct
  source 1..120: mol_type = other DNA
gaggatagaagagggagtgaacgcattttctcatccagtcctccaaacccacctagaaagggtattattattagcttaatttataggtagaaactccaggctcagagagttaggttccta

SEQ ID NO: 17896 - DNA, 120 bp, synthetic construct
  source 1..120: mol_type = other DNA
agacctgatcttgagtagccactgaaggaggggagtgatatgattggaaagtcaactgagtccaaccacagttgggaaaacattttttgactcgtgtcattggaaccaaatagaatcaat

SEQ ID NO: 17897 - DNA, 120 bp, synthetic construct
  source 1..120: mol_type = other DNA
ctaagctgttcagttctagccttatgtgaggttttgtgaaagtaagggtccatggacaagttggtttcagaaatactgcaaaccacagcctccactagggatattcatatcccatgaata

SEQ ID NO: 17898 - DNA, 120 bp, synthetic construct
  source 1..120: mol_type = other DNA
ttatttatgtatttcctggcttgaattctccctctttgaacttttcctagggttaaatccttcatatctataggtcccagcttaatagcacctcctcagagaggtcttccctgaccatcc

SEQ ID NO: 17899 - DNA, 120 bp, synthetic construct
  source 1..120: mol_type = other DNA
attcggccatcttggctcctcccccatctttttaaaagccaaaaatgtatttcccttgtcctctgaatgcttgcctcgctcagcattttctttccttcatgactgttacacaatttgtaa

SEQ ID NO: 17900 - DNA, 120 bp, synthetic construct
  source 1..120: mol_type = other DNA
taggttcaaatcccagctctggtgtttaccgtgtgtgacctctgccaaggtccttaaccactcagtggctttagctcccttatctattaaatggaaataataatggacactcattcacaa

SEQ ID NO: 17901 - DNA, 120 bp, synthetic construct
  source 1..120: mol_type = other DNA
aattgttagaaataaacatgtagtaagacatgtaaaactggaacacaaaatcccttaaaaattaagtgttttccatgaaaaaatgctcatcatcactggccatcagagaaatgcaaatca

SEQ ID NO: 17902 - DNA, 120 bp, synthetic construct
  source 1..120: mol_type = other DNA
tttctgattaaaaacacacaaacaggtgactatatgcttacatatgtgtgcgtcaacaaggagtatgctgtggaaatgttcgcatcaggctggtaacactggttacatcaagaggagggg

SEQ ID NO: 17903 - DNA, 120 bp, synthetic construct
  source 1..120: mol_type = other DNA
acgatcttcttccctgccatatccacagcaccaagagcaatgcctgactcagggaaggcattcaataaatatctgcctgatgaaagaatgaaaatgaagttccattttggcacaaactat

SEQ ID NO: 17904 - DNA, 120 bp, synthetic construct
  source 1..120: mol_type = other DNA
tgttcctccgagcacagtacattaccacagatcattttaccactcaattctcaagaaagacggtgacttagcagaaaaaattaaacccagattaaataatacttagagacgtaagatcca

SEQ ID NO: 17905 - DNA, 120 bp, synthetic construct
  source 1..120: mol_type = other DNA
tctagtcctctgtgctctgagatcaggtccctccagagtgactctggagtatatcgcaaatatcctggtgggactgtatgtgaaaagaatgataaattagaggaagagaaataaccctat

SEQ ID NO: 17906 - DNA, 120 bp, synthetic construct
  source 1..120: mol_type = other DNA
ctgtgacccaagtgactggtctgaaagtagtccagaaagatccagagaactcctggacaatccttttctctctgagtgatggtttttgccttcctataccagtccccatcttcagtacgg

SEQ ID NO: 17907 - DNA, 120 bp, synthetic construct
  source 1..120: mol_type = other DNA
gtgtattaactcctttagtccttcatgctgtaaagacagctccttccagagggactctggagtacattccaaatgtcctggtggaactagacaggaagaaaatagaaagatgttttcact

SEQ ID NO: 17908 - DNA, 120 bp, synthetic construct
  source 1..120: mol_type = other DNA
ttttatttcaaagaacttgtatttgggagtggttgtgcaaatcaataaaacttaactgtgctatggtgagaagggggctcctaagactctcagaattgtgccacaacctgcacaatcact

SEQ ID NO: 17909 - DNA, 120 bp, synthetic construct
  source 1..120: mol_type = other DNA
tgtaggcagagtccttttttctagtcatggctggcaaacagtgggatctggggatgggacaaaaggcagctaggaagattgccatgtagtctgctgctaaatgtagagtctagtagatat

SEQ ID NO: 17910 - DNA, 120 bp, synthetic construct
  source 1..120: mol_type = other DNA
ggtcccatgagatatggaccgattccttaaaccgtgctagaaagacatgtggaaaagtcactgccaggctggcagggaatggggagatctattcatattgattgcaatgccccttggttc

SEQ ID NO: 17911 - DNA, 120 bp, synthetic construct
  source 1..120: mol_type = other DNA
gtgagctggcatctacactagcatggtttcccaaagctgcagggatgccagtctcgccgctgatgaaggaaatgaagggcatttgcttctcctgcaggctctcgggatttaacacagatt

SEQ ID NO: 17912 - DNA, 120 bp, synthetic construct
  source 1..120: mol_type = other DNA
gcaagacagccgccctaacagactcttgcatgcagtgagagggaggccgccaggccagctgtctctgttcagaaagacctgggggtctccttgaccatgcgctcagggctcagaccccaa

SEQ ID NO: 17913 - DNA, 120 bp, synthetic construct
  source 1..120: mol_type = other DNA
aactcctggggacctctcgagcacccctgcccatcctttaaacataaattcataaatacaaacaagtaggccattcacagaaatatataaaatatgtcataggacgggtggcactctcat

SEQ ID NO: 17914 - DNA, 120 bp, synthetic construct
  source 1..120: mol_type = other DNA
aagcatttcaacaggaaacatttatttcaaaacgtgaaggtagttatccttccatgagtttaaagtacaaaggcaggctcacggtgtcgtcagaattcagaacgatggtcgtggggcttg

SEQ ID NO: 17915 - DNA, 120 bp, synthetic construct
  source 1..120: mol_type = other DNA
cccacctgcctgcatctcggagtcctcggggtctctgtgtggcccccgtggcctgacaccgaggacacgcctgtagtctgctgatcccagagggaggggtgcatgctgcctggcgtgggg

SEQ ID NO: 17916 - DNA, 120 bp, synthetic construct
  source 1..120: mol_type = other DNA
aggagtccgggccctgactcctttgtgtctcagcttgaccccttgagaccacccccttccttggaggtttatgccagcggtgagctgacatcctacctcctatatcctggtgggtcacaa

SEQ ID NO: 17917 - DNA, 120 bp, synthetic construct
  source 1..120: mol_type = other DNA
aggctcttaccttcgcctcccgcgcagtcagaggaggcagctccgtctcactgtaaggcaacccaggcagagctgaggaactgcacggggcctggagcggccccagcctgggtgccgacc

SEQ ID NO: 17918 - DNA, 120 bp, synthetic construct
  source 1..120: mol_type = other DNA
gggacacaccggccccagcaggttgaatggtttccacctgccaagggtgaagggcccatgatgggctattccagggatgtggaggcagactggggtcagcgaccagaggtctctgtgcaa

SEQ ID NO: 17919 - DNA, 120 bp, synthetic construct
  source 1..120: mol_type = other DNA
gggacatttgggaacagcacccactctacgaagccaccatggagacgaaagagccaatcgtctacacgggcagtgtagaacgggcgcctggtgagtgctcagggatgaccctcctcggta

SEQ ID NO: 17920 - DNA, 120 bp, synthetic construct
  source 1..120: mol_type = other DNA
acctggttcatctgtccttccacgcagggcctaggggatgccaaattccagggtccagaaagagcttgggataaaatgaaacttcaaggggacggctttgacctgggctgagtctgtctg

SEQ ID NO: 17921 - DNA, 120 bp, synthetic construct
  source 1..120: mol_type = other DNA
gggctggggctggggctggggctgggactggggctggccccgtttatcacttgggcctcatgaggggaaaagaaaggacagggggcagaggaggagcatgggggcagcgggttgcctaag

SEQ ID NO: 17922 - DNA, 120 bp, synthetic construct
  source 1..120: mol_type = other DNA
ggtccggggcctcatccctgttatttattctatcttggtaaagccaggttaagacatctgggcaaggagatagtagagtggcccccaggaagggtgggtggagggcctggcctttgggct

SEQ ID NO: 17923 - DNA, 120 bp, synthetic construct
  source 1..120: mol_type = other DNA
ataaagtcttctgcctgctgcttacagcccgagaacccttttccgagagaataaaatctttgaccgttgccctttctcgccggagtttgctcgtgtcttctgatgaactgtgatgtctca

SEQ ID NO: 17924 - DNA, 120 bp, synthetic construct
  source 1..120: mol_type = other DNA
ttcaagttcctattttcttaagaattagcaaccagcagaggaaaacgatgggctggaagtcagactgttgaattggctctgcctttaattatttgttcaagcaagcccctgtccctctct

SEQ ID NO: 17925 - DNA, 120 bp, synthetic construct
  source 1..120: mol_type = other DNA
tgagcctgaagtggtgcacgtccctggtcacattggaggtggagagcttggggatctgaatgtgctgtttgccttggatctttatttgtgattcagaaacagtggaataaaaggaaagga

SEQ ID NO: 17926 - DNA, 120 bp, synthetic construct
  source 1..120: mol_type = other DNA
gcattaacaatggagttgacgcctgctttgcggcacgctgggaggggagagggaggtgtatgctggagagctccccaggggcaaggcctggctctgcgtcacccactgtcagatcctgag

SEQ ID NO: 17927 - DNA, 120 bp, synthetic construct
  source 1..120: mol_type = other DNA
ccacctgcctgcatctcggagtcctcggggtctctgtgtggcccccgtggcctgacaccgaggacacgcctgtagtctgctgatcccagagggaggggtgcatgctgcctggcgtgggga

SEQ ID NO: 17928 - DNA, 120 bp, synthetic construct
  source 1..120: mol_type = other DNA
gagtcccggccctgactcctttgtgtctcagcttgaccccttgagaccacccccttccttggaggtttatgccagcggtgagctgacatcctacctcctatatcctggtgggtcacaaat

SEQ ID NO: 17929 - DNA, 120 bp, synthetic construct
  source 1..120: mol_type = other DNA
ttcatcttcatttcctcagtgttcaggaggactgaccacatcgggccccggatgttcatgggcattcccttgtacgctcgatctatgagctgtaggcagaaaacaatctggtgtcacagg

SEQ ID NO: 17930 - DNA, 120 bp, synthetic construct
  source 1..120: mol_type = other DNA
ttaccttcgcctcccgcgcagtcagaggaggcagctccgtctcactgtaaggcaacccaggcagagctgaggaactgcacggggcctggagcggccccagcctgggtgccgacccccaga

SEQ ID NO: 17931 - DNA, 120 bp, synthetic construct
  source 1..120: mol_type = other DNA
tgcaatcggcctcctgggatgctcagggcctcagcgatgcccagtttcctacagggaacaagatctctcccgactgctcggttctactccgctcatcactttggctaccgtggctcttca

SEQ ID NO: 17932 - DNA, 120 bp, synthetic construct
  source 1..120: mol_type = other DNA
aactgctgtagaccactgaggcagaccagagagcagataggtgctaagcaccagtgacattctgaggtcatggcacgaatcacagtggggccttgcccgggtcagcagcgcccagagtca

SEQ ID NO: 17933 - DNA, 120 bp, synthetic construct
  source 1..120: mol_type = other DNA
ttgtattacacatcatgaataatccagagatggtctaatgtctacgggaggatgtgcatagctgatatgtaaatactaggccatgttatgtcagagacttgaggatccatggattttggc

SEQ ID NO: 17934 - DNA, 120 bp, synthetic construct
  source 1..120: mol_type = other DNA
aaataactgagccttcggatggcttttgttgttaactgagattagttctctagattttagtgattttgttttgaacaccatacaagtatgtggttcttggtttatttggtcacttgtaat

SEQ ID NO: 17935 - DNA, 120 bp, synthetic construct
  source 1..120: mol_type = other DNA
atcagtgcacttttatatgccaaccttgtttcacttgtgttttaaactgggaaactgaagattttaatgctgaaatttctttgaattattacctgtttttttgatagtggaacacacagc

SEQ ID NO: 17936 - DNA, 120 bp, synthetic construct
  source 1..120: mol_type = other DNA
tcaaggaaaattctggacatattttattgtcagggtctgttttgtgaatactttaattctcttgacttagcctatccctacttcagtttatatatataaattttgtatctaaagaactag

SEQ ID NO: 17937 - DNA, 120 bp, synthetic construct
  source 1..120: mol_type = other DNA
atacaaatatactataaattctgagatctgacttccctggattttaaaaattgtgttttctcaggactttaagaaaggaatgaacatgtatttaaccaagttccaacaaaagaatgctgc

SEQ ID NO: 17938 - DNA, 120 bp, synthetic construct
  source 1..120: mol_type = other DNA
tcctcttctgcccccctggtatttcctttcccctcatgaggcccaagtgatccacatggccagccacagccccatcctactgcaggcctgtgtggctgctagagaggccaggctcctttc

SEQ ID NO: 17939 - DNA, 120 bp, synthetic construct
  source 1..120: mol_type = other DNA
agttggtgggcacaagagcgagaggacatcattatgaaatacgaaaaggtacaagtcggtctgcttcttggagggaggcctcttccagtgtgccctggtcaaagggtcctgggctcccta

SEQ ID NO: 17940 - DNA, 120 bp, synthetic construct
  source 1..120: mol_type = other DNA
tgcaagggccttggggctgtcaagtggggtgggcccctggtgcagccagagtacaccgggcaggtctcagggcaggctcccttgaccctggcggggggatgtggtcactccctgagggac

SEQ ID NO: 17941 - DNA, 120 bp, synthetic construct
  source 1..120: mol_type = other DNA
actcatggaaggataaccaccttcatgttttgaaataaatgtttcctgttgaaatgattttagattttagacagaaatattgaaaaggcactatagtatcctcctataccttccatccag

SEQ ID NO: 17942 - DNA, 120 bp, synthetic construct
  source 1..120: mol_type = other DNA
taatttctcccactctcgcagtgcaccctaccctcgtctccctggcaacctttctgctctatcctctcgccacctggatcacaagaacacttgtgagaccccttaacaagctacatccca

SEQ ID NO: 17943 - DNA, 120 bp, synthetic construct
  source 1..120: mol_type = other DNA
agtaaaatgactagaggtgcatttcaaagattattctatgggaaatataaagaacgaattggaggagtaggaggcaaatagtccaagggacagatacagatctttctttctctttttttt

SEQ ID NO: 17944 - DNA, 120 bp, synthetic construct
  source 1..120: mol_type = other DNA
ttggcccacggtaagggcctaaaaagggatagccccagtggtggggatgctgctgctgctgaccattaaccccagtctgctccaccttcttccaggcagtctgtgagatgtttcatgtcc

SEQ ID NO: 17945 - DNA, 120 bp, synthetic construct
  source 1..120: mol_type = other DNA
atactaggccacgttatatcagagacttgagcatccatggattttggcattcccggggaccctagaactaatcctccatggataccaagggatgactgtatatactcactcaggaaggct

SEQ ID NO: 17946 - DNA, 120 bp, synthetic construct
  source 1..120: mol_type = other DNA
aactacgcgtgcaataaagtcttctgcctgctgcttacagcccgagaacccttttccgagagaataaaatctttgaccgttgccctttctcgccggagtttgctcgtgtcttctgatgaa

SEQ ID NO: 17947 - DNA, 120 bp, synthetic construct
  source 1..120: mol_type = other DNA
ttgcccagggcttgaggcttccctgagccctcacaagtcgggtcctggcccactctgcccatgaggctgggcctgagccccagccatggccctgggatgaccccccttgggcagagggtt

SEQ ID NO: 17948 - DNA, 120 bp, synthetic construct
  source 1..120: mol_type = other DNA
tcatttcctcaatgttcaggaggactgaccacatcgggccccggatgttcatgggcattcccttgtacgctcgatctatgagctgtgggcagaaaacaatctggtgtcacaggccacagg

SEQ ID NO: 17949 - DNA, 120 bp, synthetic construct
  source 1..120: mol_type = other DNA
cgtgagccaccgcgcccagcccatatcttcattttaagaaacattgttatctactattggtccagcaaaacgtgtgtgcatgaaacaaagatatggcagtagaagggtaaatactatagt

SEQ ID NO: 17950 - DNA, 120 bp, synthetic construct
  source 1..120: mol_type = other DNA
aatggcagtgttcttattaacagggattgagaaggcacataggaatagaacagcattacccttggacagtgaatttaaggtgttgcctattggacatctgccatgtcttgtcacttttcg

SEQ ID NO: 17951 - DNA, 120 bp, synthetic construct
  source 1..120: mol_type = other DNA
aagacttgcgttcaaaccctgactctgtctggtgatatgattttggttgttctttattctctgggcctcacttttctcatttactaagtggaggtaataatccctgctttggggatttgg

SEQ ID NO: 17952 - DNA, 120 bp, synthetic construct
  source 1..120: mol_type = other DNA
attgtggtttttgtcatttaatggcaaaaccacaattacttttgcaccagcctaacactggcctccacgcacaagccctaaagctagcaaaaacctgaagcaactcatgatacatacatg

SEQ ID NO: 17953 - DNA, 120 bp, synthetic construct
  source 1..120: mol_type = other DNA
ggggaaaagcagggagaaagaaagtttttaaaaatctctgcctcagcaaaagttttcattaaaattttagacaaatcatccctgtgtccttctcccttgctgcctggggctccatgctat

SEQ ID NO: 17954 - DNA, 120 bp, synthetic construct
  source 1..120: mol_type = other DNA
aaaactgaacccctaatccccactgtccctaccatttcacccctgagaacataaagcaggactaaaaccaaaataccagtcatgatggcagctagtctttttttttttcagccagagtct

SEQ ID NO: 17955 - DNA, 120 bp, synthetic construct
  source 1..120: mol_type = other DNA
atggtagaaataatagactcagagaccgttaaagccaaaaaacaagttaccagggttgtttctggatcacgactctggtgtgcagatgaccttcacctctgtatctctgacttctatctt

SEQ ID NO: 17956 - DNA, 120 bp, synthetic construct
  source 1..120: mol_type = other DNA
gagccaccgcgcctggctggcagtactgtattttttcttagtggtacataaaataacagtgtttctaacaatcaatggcaccttggattagacaaaatatgatagtggaaacagcacagg

SEQ ID NO: 17957 - DNA, 120 bp, synthetic construct
  source 1..120: mol_type = other DNA
tttttcaaaaaccattttaaaatgttaaacatacgtgtcataggacccagcccttcactcctgggtattgaactgagagaggaaggcatatgtacgcacaaagacctgtacgtggatgct

SEQ ID NO: 17958 - DNA, 120 bp, synthetic construct
  source 1..120: mol_type = other DNA
ctttttacctccaggtggaacagtattttcagaggacttgtcagctgcaattcctttaaacacagcatatttgtccattgaaggcaatgctttagttccaggaagtggcatcaacaaaga

SEQ ID NO: 17959 - DNA, 120 bp, synthetic construct
  source 1..120: mol_type = other DNA
ttttgcctgtggacatatttcgtgctggatggaaaaatagcgtaatgagtagcatctgtgcaggtaattcttagaaggcttaaacacatactataaaagcattactttttcttcttcttc

SEQ ID NO: 17960 - DNA, 120 bp, synthetic construct
  source 1..120: mol_type = other DNA
tacatggagataatgccacacaaaattgctaatatcccatatatctcaggtctggctaccatcttaaaactttctacccccaaattttaatttcatctacaaacagttttgctcagagaa

SEQ ID NO: 17961 - DNA, 120 bp, synthetic construct
  source 1..120: mol_type = other DNA
gaaataaagcacacaataaatgtaatgggctcgaatcatctctgcaccatcccttccccttctcccaggtccgtggaagagttgtcttcaagaaaactgctctctggtgccaaaacgttt

SEQ ID NO: 17962 - DNA, 120 bp, synthetic construct
  source 1..120: mol_type = other DNA
atatgctttctggatcctggaggaaactgaccccctattctcatactggtgcaacatcttccaagacctcaaagctgtaccatttgagccagtcttttttcttatctccacttgctaggg

SEQ ID NO: 17963 - DNA, 120 bp, synthetic construct
  source 1..120: mol_type = other DNA
tgcacatcggtttggaaccgtggaggaactgtacacccacagactgaactggcgtgtgtgcaaactgaaaaaaaaaaaaaaaatcattcagagtgaaaaggatcaggcaagtcactgtac

SEQ ID NO: 17964 - DNA, 120 bp, synthetic construct
  source 1..120: mol_type = other DNA
acatcctatggagggcatttgggagtcagtgctcaggccactccgggtcacgcaggtcatttgccggcctctgtcataattattgccatatgagagtgccacctttcctgtgacataatt

SEQ ID NO: 17965 - DNA, 120 bp, synthetic construct
  source 1..120: mol_type = other DNA
gggttgcaggtccccctgctttcttgttagtttcttcatagaggccctaagatgcttgagcacagtgtcctcatccctggcccaggtatcaacgaaccggttgcaaaaacgtgcccacgg

SEQ ID NO: 17966 - DNA, 120 bp, synthetic construct
  source 1..120: mol_type = other DNA
ggccacgacagggtggccggaactgggtgggcgctgggcttcccggtcatctcctggtagtggggtcgggccagggaacaggggatggggagatgctgccacctgggcttggtcggcccg

SEQ ID NO: 17967 - DNA, 120 bp, synthetic construct
  source 1..120: mol_type = other DNA
ctattgaacatgtgcagagtttgttcttgtcattattccctaaagaatccagtatcacgaccatttatgtagcatctgcattgtattacacatcatgaataatccagagatggtctaatg

SEQ ID NO: 17968 - DNA, 120 bp, synthetic construct
  source 1..120: mol_type = other DNA
tgcctctttggtacagcccttacttagtatttggctcagttgaagtgcagtctatataggaggccaagaagacttaatcctgggtttgaaacaaagcaaggatacactaacattctatcc

SEQ ID NO: 17969 - DNA, 120 bp, synthetic construct
  source 1..120: mol_type = other DNA
tcaaatggttgcagtagtaatgtgctgtgtgatttggcatgtataatgttgtacaggtatcttgacattggtggattaactgcttggctactgtgaaattcactgtagatgttgatggat

SEQ ID NO: 17970 - DNA, 120 bp, synthetic construct
  source 1..120: mol_type = other DNA
atctccagtgtgacaattccaaatgccagtctgaagcctgagtcaatttgcctaataaaactgatttcaccattaaaatagcaataattgttgccttggtggaacagttctataatagct

SEQ ID NO: 17971 - DNA, 120 bp, synthetic construct
  source 1..120: mol_type = other DNA
ggaagaaattgcacaacaggcagcaacaaggcacaataagcagcaagaagaatctgagagtaaggaaaacaaaacaattttaaagaacagacacaggctagccaggtgcggtggctcagg

SEQ ID NO: 17972 - DNA, 120 bp, synthetic construct
  source 1..120: mol_type = other DNA
tggtcgtgatactggattctttagggaataatgacaagaacaaactctgcacatgttcaatagaaacataaccgtccaatttattttctgaatattttccatctgctgttgctgaatcta

SEQ ID NO: 17973 - DNA, 120 bp, synthetic construct
  source 1..120: mol_type = other DNA
gggatgtgggcaagaccctccaacaagccccctcccactttccacggtgtctccctctccccctcgcagggccctccaagttactagacgagcccagacccatttgtgggagaccccgcc

SEQ ID NO: 17974 - DNA, 120 bp, synthetic construct
  source 1..120: mol_type = other DNA
caggacaatatctgacatcaatgttacgtcttttattttataaatgaagacaatgagactcagaaaggtttaagtgagtcacctaagaacacacagacagcaagaggtagaacccgaaac

SEQ ID NO: 17975 - DNA, 120 bp, synthetic construct
  source 1..120: mol_type = other DNA
ctcaaaatagcctttgataggttaaggtactcctctgccactctaagtctgtgtggaacagacagggttttgcttcacagagaagatgcataaaatttggtcttaaaaatgagttcacca

SEQ ID NO: 17976 - DNA, 120 bp, synthetic construct
  source 1..120: mol_type = other DNA
tgacagaataaaactagcagtaataatctggtaaattgtgctttctacagagtaaattttgtttgtctcatgacatttatgcaaatattcaaatgtttcaggaatataaacatttaaaat

SEQ ID NO: 17977 - DNA, 120 bp, synthetic construct
  source 1..120: mol_type = other DNA
aacctggcatgctggtttcatgtggatgtcagtttgcaaatcagtgggttcaatatctgtgacactttggggatgtgtggttcaagtccatcgagctttgtgagccactgcccaacgggc

SEQ ID NO: 17978 - DNA, 120 bp, synthetic construct
  source 1..120: mol_type = other DNA
gttcatctgtccttccacacagggcctaggggatgccaaattccaggggccagaaagagcttgggataaaaagaaacttcaaggggacggctttgacctgggctgagtctgcctgtgcca

SEQ ID NO: 17979 - DNA, 120 bp, synthetic construct
  source 1..120: mol_type = other DNA
atgcagaaagcatatcgggcagcctcggggtgcggaaaggagcctggcctctctagcagccacacaggcctgcagtaggatggggctgtggctggccatgtggatcacttgggcctcatg

SEQ ID NO: 17980 - DNA, 120 bp, synthetic construct
  source 1..120: mol_type = other DNA
gactgcttcctcctcttggccctgccctacagatcatgaaggagaagggcaagaagtcatctgagcacatccagcgcatcgaccgggacgtaagcgggacattaaggaagcatatattct

SEQ ID NO: 17981 - DNA, 120 bp, synthetic construct
  source 1..120: mol_type = other DNA
acaccgagcccatcccccacatgacccagatgaaagtcgagagtgtggtgagcacttccctgtccggatcgccccccagccacagtctcctgtgtgtatctggacacctggggtggccac

SEQ ID NO: 17982 - DNA, 120 bp, synthetic construct
  source 1..120: mol_type = other DNA
ccactctcgcagtgcaccctaccctcgtctccctggcaacctttctgctctatcctctcgccacctggatcacaagaacacttgtgagaccccttaacaagctacatcccaaattatcat

SEQ ID NO: 17983 - DNA, 120 bp, synthetic construct
  source 1..120: mol_type = other DNA
aaaatgactagaggtgcatttcaaagattattctatgggaaatataaagaacgaattggaggagtaggaggcaaatagtccaagggacagatacagatctttctttttcttttttttttt

SEQ ID NO: 17984 - DNA, 120 bp, synthetic construct
  source 1..120: mol_type = other DNA
agctctaggggaatgggggagaacaggggcaggtgggccctcagagacctgctgcacaacagccctgaggctgggccaggagtcccctcaccctgtggccataacccttgcatctcaccg

SEQ ID NO: 17985 - DNA, 120 bp, synthetic construct
  source 1..120: mol_type = other DNA
aacaaatttactcaaatactcaagtatcagatacactgaaacacatatatccttctgatgcctactgccttttatttaataatgcgtactctatgccttctattcttgctcttaagtttt

SEQ ID NO: 17986 - DNA, 120 bp, synthetic construct
  source 1..120: mol_type = other DNA
tgtctggcgaggagatattaaaggagagacaagtaatgggttggaaggtggactccctaatcttcgattcttataagtgaactacgttgaagagtagccgaaaatgagggcgtcccatat

SEQ ID NO: 17987 - DNA, 120 bp, synthetic construct
  source 1..120: mol_type = other DNA
ctatttatcaacctaaatttaaaacagaaaaggagtttatgcaacatgcccggaaagcaggattggttattcctccagaaaaatcggaccgttccatacatctggcctgtacaggtgagg

SEQ ID NO: 17988 - DNA, 120 bp, synthetic construct
  source 1..120: mol_type = other DNA
ccactgtgcccggccttgttttgtttttttctagtgtaacatagttctctctacatggaagtctgtttcattagtctacttcatatccacaatccttcccaattttacattacttcaatt

SEQ ID NO: 17989 - DNA, 120 bp, synthetic construct
  source 1..120: mol_type = other DNA
tcaggctgattgcctccctcttacgttgtattccctgttgcttggatcctatgtctttatgttttcatagtctatttcattactttggtggagcacattttctagcagctgcctgagaaa

SEQ ID NO: 17990 - DNA, 120 bp, synthetic construct
  source 1..120: mol_type = other DNA
ccaccacactgggccatgtgtgtgtcttttatcctgctctgggttcatattgcttcttaaatctttaggtgctttttttgtcagtgttggaaaattctcagtcagaactcatctcttcag

SEQ ID NO: 17991 - DNA, 120 bp, synthetic construct
  source 1..120: mol_type = other DNA
tatcatgttccattttttaaaggtccccatggacttgttctgaagggagttggggtaatccttggtggaggctgtctgaagcccctcctcctctccaggtgcccttctcttctgacctgc

SEQ ID NO: 17992 - DNA, 120 bp, synthetic construct
  source 1..120: mol_type = other DNA
aaacaccacagggtgtagcagtgagggctggttcaggtgagaacagcggcatgaagttgcccaacttggggttggaaatcacagtttgggagcggctccaatccaaaccatgacaccata

SEQ ID NO: 17993 - DNA, 120 bp, synthetic construct
  source 1..120: mol_type = other DNA
aagaacaacacaaatttgtcaccgaggtgagcagcagaatcgttgagcaaattggggcattagttccagacattaattaagtggcaggtttgtgagcggagaatttattcttcatggagt

SEQ ID NO: 17994 - DNA, 120 bp, synthetic construct
  source 1..120: mol_type = other DNA
gtggataagctaaaagacactaccttaactaagtgaccaaaattaatatcaccagtaacaagcattaattgacatcatgtacctcttgttgatacatggacaaggatacaccaccatttc

SEQ ID NO: 17995 - DNA, 120 bp, synthetic construct
  source 1..120: mol_type = other DNA
ctgtggatactgtatgactcactggctccctgaaagggcttctgagaattcatgatattgctgcacttaattttctgatctaggcctgaagaaagaaaatctttcaagagtcaccaacct

SEQ ID NO: 17996 - DNA, 120 bp, synthetic construct
  source 1..120: mol_type = other DNA
tgactaatttgcttgggcttgatgctacagtattagcacaagctataagctccctaccaccatataagccttgctcttcggccttccatcattttgaaccctaaacctcatagatttaga

SEQ ID NO: 17997 - DNA, 120 bp, synthetic construct
  source 1..120: mol_type = other DNA
cgaaggacaaagttggaagtaatatcctcaggtctgccggagatattgtgagaagggacaaaacaagatagaggctgttagggaaggcacaaaagggtgatgttatttaagtgttttaca

SEQ ID NO: 17998 - DNA, 120 bp, synthetic construct
  source 1..120: mol_type = other DNA
tctcgctcatagagatgcccattcagggaacctctgtgctccctatctgtcctcatatacagttctggagcctgctcccatcctgtgttctgatggaaaccaccttccccagggagtttc

SEQ ID NO: 17999 - DNA, 120 bp, synthetic construct
  source 1..120: mol_type = other DNA
ctgcgtatggtccacacatttctgtggtctggctgtggcctcagtaggctcatctcttcctcttcccattttttttttccttccctgtgggttggtccctcttcttgaggcctgaattac

SEQ ID NO: 18000 - DNA, 120 bp, synthetic construct
  source 1..120: mol_type = other DNA
cacagatagtctcacctggtttctgagatcttcaattattgaatagtatttgctataatctcttcccgatccaccgtctccagacccaggcccatatttgtcataccactccttgatttt

SEQ ID NO: 18001 - DNA, 120 bp, synthetic construct
  source 1..120: mol_type = other DNA
aaaaaaaaagaaatgggggagcccttcaatatgtcttttacccaggggacggggactgaattcctgaatttcccatttccagagttgaggcaaatcagccaatttagtccaatcctattt

SEQ ID NO: 18002 - DNA, 120 bp, synthetic construct
  source 1..120: mol_type = other DNA
tacctgggcatagttcatggtctccatggtgctgtcataggcagagcggagagaggcaaagttgatgagcacatctacctccggatgcttcctcatggcatcagccatgttcttgaagac

SEQ ID NO: 18003 - DNA, 120 bp, synthetic construct
  source 1..120: mol_type = other DNA
agaaagcaagagaaagagagagagagaaagagagaaggaaagaaagggagggagggaaagaaagaaaaaaaggaaaagaaagagagagagaaagagagaaggaaagaagggaaggaggga

SEQ ID NO: 18004 - DNA, 120 bp, synthetic construct
  source 1..120: mol_type = other DNA
tccccagtgaccaggatgacccttgagcttttaactctgacctctgctacccagatctcttgagccccagcctgtgctgcgatttgcaaccttaaatttcaccctctgactttcagcttc

SEQ ID NO: 18005 - DNA, 120 bp, synthetic construct
  source 1..120: mol_type = other DNA
cacatatatgcatgtagacgtagaacaggtctacacacgtgtgctcgccctctgcatgcccattcatgaaaaatcccacagatgcgcatgtgtgcacaccacctctttctgcttcttgat

SEQ ID NO: 18006 - DNA, 120 bp, synthetic construct
  source 1..120: mol_type = other DNA
cacctgctttttgaagtagccgatggcgtactcgtcggcgtaggtgaggaagtagagaatgttgtgcttgatgtgatactccttcaggtggttcatcaggtgggtcccataaccctgcgg

SEQ ID NO: 18007 - DNA, 120 bp, synthetic construct
  source 1..120: mol_type = other DNA
gagctagaggaggggagaggaaaccatgaccatcacctcccagtgtccaacaggaggcccagagaagcccactcacccgttctggagcgagaccctcctgggctcagatactgcattaag

SEQ ID NO: 18008 - DNA, 120 bp, synthetic construct
  source 1..120: mol_type = other DNA
gcgggacagggagtaagttaggcctcattaccttttaaaaattattatgaaataggtaagacacagggaacgtggaacacaggagcacctgtgtatcaataacccaggctaagaaagtaa

SEQ ID NO: 18009 - DNA, 120 bp, synthetic construct
  source 1..120: mol_type = other DNA
ggccagtctaggatggattcagataaaaaaggaagacaggctagaatcatcctgtcaacctttactcaataactgttatgtttcaggcattgtgctggcctcagggtacagagataaaag

SEQ ID NO: 18010 - DNA, 120 bp, synthetic construct
  source 1..120: mol_type = other DNA
ccaggcaacatagagatgatagtattctgggaagacaatccgccattaatctttatgtcacagccaaatcactgcatattacaataggaagaacagagaatggaggaggggaaaagggta

SEQ ID NO: 18011 - DNA, 120 bp, synthetic construct
  source 1..120: mol_type = other DNA
cacacacacacacacacacacacacacacacacagggaactccacgacccagaagaaatcttttttcagcgcctgttcttttttccaggcacaattgtatatgattgtttgtaatttcat

SEQ ID NO: 18012 - DNA, 120 bp, synthetic construct
  source 1..120: mol_type = other DNA
caatactgacaggataattctaagagaatttcccctcatctgaatctatcccagactggccctagaagaagggcagctccttctgagaatggaaacggaagattttgggcggttattcct

SEQ ID NO: 18013 - DNA, 120 bp, synthetic construct
  source 1..120: mol_type = other DNA
acttgctcttgatgcagtgtctgagcctgggagggtctcgctccagaacaggtgagtgggcttctctaggcctcctgttggacactaggaggtgatggtcatggtttcctcttctctcct

SEQ ID NO: 18014 - DNA, 120 bp, synthetic construct
  source 1..120: mol_type = other DNA
gtgatgcttgggctgtttgggcctagtcagggtcgcccctcctgtgtacgtctctaattctgggaggcagggagctctgctcttcccatgggtgggaagtgtggcgaaagcacagagcct

SEQ ID NO: 18015 - DNA, 120 bp, synthetic construct
  source 1..120: mol_type = other DNA
cactcacgatgctctggttggaaaccaaaacaaagtcagaaaacatttcctcagactgtctctaaccacattctttagtcaactccagagcaggaacttcttagaaaccaagcaagttct

SEQ ID NO: 18016 - DNA, 120 bp, synthetic construct
  source 1..120: mol_type = other DNA
tactcctgtccttaatgaccaggctcctttgaggacccgtacctcccttgcgccccgcccgccttaagatctaaacagagttaagacaaatgagtctttcaactcaacaacacaaactca

SEQ ID NO: 18017 - DNA, 120 bp, synthetic construct
  source 1..120: mol_type = other DNA
aaaaaaaaaaaagaagtcccaccctccaggagccgattgactgaggagacaacacatctggaaagataattgtatcataaagcaacataggcattatgccctctctctctccctctccct

SEQ ID NO: 18018 - DNA, 120 bp, synthetic construct
  source 1..120: mol_type = other DNA
aaaataaaaataaaaataaaaaaaaataaagcaacataggagtcaaccaataagacagacaagctgcagccaggcgcagtggctcacacaacctgtaatcccagcactctgcggggccag

SEQ ID NO: 18019 - DNA, 120 bp, synthetic construct
  source 1..120: mol_type = other DNA
aaatacttttttaaatgaaaatgcaccctgcctaagatgctcagggaggtaggacagaaagaaggcaggctggttgttcaagaataatccccaaacaagaatgtagaatttggccaggcg

SEQ ID NO: 18020 - DNA, 120 bp, synthetic construct
  source 1..120: mol_type = other DNA
tacaggtgtgagccaccatgcctggcctcttttgctccctttttaaagtaagattcttcaaggtgggaactgcgtcttttacattttttataactcaccatagggctcataaaattcact

SEQ ID NO: 18021 - DNA, 120 bp, synthetic construct
  source 1..120: mol_type = other DNA
tccattccctttcttttgcccttgagcaactaggcagtctttaccagtctcccttatttttacaggatgctgagaaaaaagctacactgtcctttttattccttctggtgtcttacccat

SEQ ID NO: 18022 - DNA, 120 bp, synthetic construct
  source 1..120: mol_type = other DNA
aggtttagtcacttatccaaggtatagaaaggtggtggagctagagtttgaacctagacagcctggctccggggtctgcgctaattacataatgtttgtcaagagccagtagcactaaat

SEQ ID NO: 18023 - DNA, 120 bp, synthetic construct
  source 1..120: mol_type = other DNA
tctaaagagaaaggtcaaatcagacagacataccttggatcctctcccctggggcctctgaaggacgcacaaacctgagacatgagtgatggttaaaaaaatttgggttttattgttttt

SEQ ID NO: 18024 - DNA, 120 bp, synthetic construct
  source 1..120: mol_type = other DNA
ttgggccaaatgtgagactggtacacacacagttaaagactaaaaagccatcaggaaccctcaaagccaaattctatctgcacactggctctacaaagttcgcagcaagaatctcttgca

SEQ ID NO: 18025 - DNA, 120 bp, synthetic construct
  source 1..120: mol_type = other DNA
ttggccttcccaaccacaaggtaggccagggcctcctgcttcagccacatttttttgcagtttccactaagattggctagaagaaggtgaatctacaaactaaactataaaatataataa

SEQ ID NO: 18026 - DNA, 120 bp, synthetic construct
  source 1..120: mol_type = other DNA
tcgcccgtcaaacttgtccttgagctggcgttcggccttggtgagggtggacttggtgataccctcctcactgatgttcagctctgggtgcttctggatatagtctctcatgatctcctg

SEQ ID NO: 18027 - DNA, 120 bp, synthetic construct
  source 1..120: mol_type = other DNA
aggaagaggaagaagaagaagaagaagaagaaacaaaccactatcactatatacccttttgctcacttaagaagcttcctggacactccactctcttgcctaagtatcctactaacccag

SEQ ID NO: 18028 - DNA, 120 bp, synthetic construct
  source 1..120: mol_type = other DNA
ctattgcttttatgcatctctgaaaatctgagcttgtgagggagctcccagtgcagctgtagctggaagagttgagtatcttttccaagtgggaattattcatgactgttaaaagacact

SEQ ID NO: 18029 - DNA, 120 bp, synthetic construct
  source 1..120: mol_type = other DNA
tgtgctttagtgacctgtgactatctaggatttggcagtattacctctactagtcagcctggttagcctttctgatgctgaattaagtcctgagacatgcatatctagtggtcctaaata

SEQ ID NO: 18030 - DNA, 120 bp, synthetic construct
  source 1..120: mol_type = other DNA
ctttgagttctgggccctgcacctgaagcccagctgcccagagcccctcaagggtgtcagtgagctgtgctcctgccagcctcttgctaccggtctcttagccaggaaagccaggttctc

SEQ ID NO: 18031 - DNA, 120 bp, synthetic construct
  source 1..120: mol_type = other DNA
cacctgaccccagagatttcaccacctggttaggtgggcaggaggatagtctctctggagccctgggtcatggactctcagaggtagggagtaagtcagcgcttgccaagaggtggagac

SEQ ID NO: 18032 - DNA, 120 bp, synthetic construct
  source 1..120: mol_type = other DNA
gcgtgtgtacgtgcactcacacgcatacacgtagaggttgctcacctcttgctgagctccttcagggcgccactccggcacaggcccaggtaatcccccaggagcttcagctgctcccgt

SEQ ID NO: 18033 - DNA, 120 bp, synthetic construct
  source 1..120: mol_type = other DNA
aaccccgacacagacactgttgttaaccctccttttacagatgaggaaactgaagctaatttgctcatggtaacacaggtaggaaagtggctaagttcagctggagaaaaggaaaattct

SEQ ID NO: 18034 - DNA, 120 bp, synthetic construct
  source 1..120: mol_type = other DNA
cacccatctacctacctatccacccattcaccaatctacccaaccacctacccatccatccatccaccaacccatccacctagccacctgctcattcacctacctacctacccatccacc

SEQ ID NO: 18035 - DNA, 120 bp, synthetic construct
  source 1..120: mol_type = other DNA
gaaccagtgaccctggcttcccttgtttagaggagccaaactcctctaaacagatgaacagcagcagcaaagaggagtgaacacccctctgtccctcagcagctgggctgctgggcttga

SEQ ID NO: 18036 - DNA, 120 bp, synthetic construct
  source 1..120: mol_type = other DNA
accttcacctgatttcttcaaggttccatttcagtgactgtaaaattcagctactaccagctattttgtggggttattacaaagcttaaatgagacaaggttctgcaagtaccctgcaaa

SEQ ID NO: 18037 - DNA, 120 bp, synthetic construct
  source 1..120: mol_type = other DNA
ctccagtctgtgccaacaggacagctcccaaaccaaggctcagcttcttgctctggccttctgcagcaggacaaccccctcacaggtcacctaagggtcccatggtgatgggatgccatc

SEQ ID NO: 18038 - DNA, 120 bp, synthetic construct
  source 1..120: mol_type = other DNA
gggacgggtgagcagggcccactgcctatgagcagggcactggccccagccggggctggggaggagcagaagctgtagggcaagcctgatctgtggcctcatccctaggggaaggatggg

SEQ ID NO: 18039 - DNA, 120 bp, synthetic construct
  source 1..120: mol_type = other DNA
gccagtcctcagcttcgtcctgggaggaggcgcgcagggccagcttcttgccagagaagaccagctcaaagcgcccatcactatgggctggccccacagactcacagcgaagcagcgagc

SEQ ID NO: 18040 - DNA, 120 bp, synthetic construct
  source 1..120: mol_type = other DNA
tttaaagggaagtcagagcatgtccctctgccccaaaactccacagtggcggccatctcccttagctgaagccaaagtgcttccagtggcccacaggcctcgtcagattgacctcatcgc

SEQ ID NO: 18041 - DNA, 120 bp, synthetic construct
  source 1..120: mol_type = other DNA
ttttgtgtagacatgtttcattgtcttgggtatatacttaggagtagacttgctgggtcatgtgtaactctatgtttcccttcttgaggaactaccaagctgttttccaaagtggccgca

SEQ ID NO: 18042 - DNA, 120 bp, synthetic construct
  source 1..120: mol_type = other DNA
gccttcagaattggcaggtgcttcccccctgccagtgacagatgatgtgtcagtcagggcagccactggggaccatccacaacactagattctgagcaaagcctgcctaggtcatcaaga

SEQ ID NO: 18043 - DNA, 120 bp, synthetic construct
  source 1..120: mol_type = other DNA
actaggaaatgttcagacacagtccattgagcacagctgccaggaaatgaaactagggaacatcttttactctcttaagcaacagggaaaaaacagtggaaatgcaggttcctcggagct

SEQ ID NO: 18044 - DNA, 120 bp, synthetic construct
  source 1..120: mol_type = other DNA
ctactttctcccaggtacagtgcttggtgctgacaatacagaagtgaacaggcctggtgctctgtatcatagagctaatattctagtaaggaagacagaaaataaacaaggagacaaaga

SEQ ID NO: 18045 - DNA, 120 bp, synthetic construct
  source 1..120: mol_type = other DNA
actcaacatgcttagtgccactctggagtcctgtggggcgcacagcctgcatccccagcagacgtcactctgcctccagcttgaggaaggggctgcagagctttcctcttcagccttcag

SEQ ID NO: 18046 - DNA, 120 bp, synthetic construct
  source 1..120: mol_type = other DNA
atacccacagaaataagcaccgaggttctccaaaagcatgtatgagaatgttcactacagctttcttcataatagtcaaaacctggaaacaacccaaatgtccattaacaggagaatggg

SEQ ID NO: 18047 - DNA, 120 bp, synthetic construct
  source 1..120: mol_type = other DNA
tcacatgccaagaaacagccgggcttatatctacagctcacatgccaagaaacatgagccccatcatcatgatgctattaacactatcactatgcagggagaggaaggctaacagggaaa

SEQ ID NO: 18048 - DNA, 120 bp, synthetic construct
  source 1..120: mol_type = other DNA
ggactggatgtggagacagagaagcttcacatccccagaaactgctgctggagctcaatgtataccaggtgtgtgagggtggatatgagtacacacgagatgtgcccctgctcactctct

SEQ ID NO: 18049 - DNA, 120 bp, synthetic construct
  source 1..120: mol_type = other DNA
tttcaacatagacaccaacacattttaatggggagggaatagtcttttcaacaattgtgctgagataagtggataatcacatgcaaaagaaaaaagctggactgctatctcacattgtat

SEQ ID NO: 18050 - DNA, 120 bp, synthetic construct
  source 1..120: mol_type = other DNA
ctgcaatttggtttctgccaaacagaaccgctttatattaataaatttcattttgaatgttgtgtcttttatgcttttctttatgtttgatttgtggatgttttgattttatatgtgtaa

SEQ ID NO: 18051 - DNA, 120 bp, synthetic construct
  source 1..120: mol_type = other DNA
tctatccttttgctcggcaattttgcttctgggagtttatggaacagagatagctacgcagaactaaaagaccacatacacaaggttatttatgaaaacacaggccccagcacccattaa

SEQ ID NO: 18052 - DNA, 120 bp, synthetic construct
  source 1..120: mol_type = other DNA
caggaaattattatggttttaggggtgggaggaaagaacagggtagagggagaacaggaatgggaaaggctttcactgtatatgttttagattttttttaaccataaaaagattatctat

SEQ ID NO: 18053 - DNA, 120 bp, synthetic construct
  source 1..120: mol_type = other DNA
cctgtattgcctgctacagttcccagctactccagtccctggagaagtcgatgactcccttggctttctttaattactaatagagttcagtaacagacaatcacatgctatgggaagaaa

SEQ ID NO: 18054 - DNA, 120 bp, synthetic construct
  source 1..120: mol_type = other DNA
gctccaactctgagatgatgtgtctgggaagggagaacagacgtgtttcaagaaactaccccaaatcacagagatgtgcttttatccactggttagcaggaaccaggaataactactgca

SEQ ID NO: 18055 - DNA, 120 bp, synthetic construct
  source 1..120: mol_type = other DNA
ttattcatccattcatcagttaatagacatttgggttgtttctactcttttgctattatcaataatgctgctatgaacatccatgtacaagtttttgagtggacttatatttctagttct

SEQ ID NO: 18056 - DNA, 120 bp, synthetic construct
  source 1..120: mol_type = other DNA
ggggaaaggcacgtctctgagagctacagtttctttcaagcagagttctctgagctgggaagcagcagtggggaggaaaggaaatcctggcttctccccgaaagccatctcaggatgctg

SEQ ID NO: 18057 - DNA, 120 bp, synthetic construct
  source 1..120: mol_type = other DNA
actttcccccagccagagtccattcccagcaagcagcaggaggtcagcctctcttactcaaactgcaaccaaaaaggcctttgcagaacacaaaagtaaaaactgataatagatttgaag

SEQ ID NO: 18058 - DNA, 120 bp, synthetic construct
  source 1..120: mol_type = other DNA
ggggcgggtggggtggggactttagcctgagcctgagggggctgctgactggcttggccccaccacagcaacttggacagacctgggccaggcaggcacattcacacgtaaacaaatctc

SEQ ID NO: 18059 - DNA, 120 bp, synthetic construct
  source 1..120: mol_type = other DNA
tcgctgggggccgggaacagggggtgcaggggaacattaaggccagtgtggcaggaaaggtttcctggacagccctggagcagcatgaggtttggaaagcagacaggcaggctggcccta

SEQ ID NO: 18060 - DNA, 120 bp, synthetic construct
  source 1..120: mol_type = other DNA
aattaataataataaactgaagctaagagagacagggccagacaagagaagggtcacttggcctaaaacagagtcagaaatgccacaaaatgactgacaagagctcagagaaatccagca

SEQ ID NO: 18061 - DNA, 120 bp, synthetic construct
  source 1..120: mol_type = other DNA
aggtactcggaagctccatttcatcacagaaggtctgaaaccaacaagaaacagttctgccaatcaggtttatagccccaaccagctgagaccaggtcctaccaatgctcctaaagtctc

SEQ ID NO: 18062 - DNA, 120 bp, synthetic construct
  source 1..120: mol_type = other DNA
ccacctaggcctcagcctccccaggacctactcacctatactcttcacaacaggtaacgttgcctctggcacccatcatatcccctgaattcagcatcaggactgatctgccatcagctc

SEQ ID NO: 18063 - DNA, 120 bp, synthetic construct
  source 1..120: mol_type = other DNA
ggaataaggctgagatcggagttatccagaagaaagcggtgagctcaacagggcacctactttgggggtgggtcttagatgagagggcggaggtagaatgtttgggatgagcagatcttg

SEQ ID NO: 18064 - DNA, 120 bp, synthetic construct
  source 1..120: mol_type = other DNA
gagagaggctgctttttctgaaatcatgttcttggggcccagaacctaggtgtgtgcttctgactttgttttcttcctgatccaaattctgatatgtccatttaaattgatctagaccca

SEQ ID NO: 18065 - DNA, 120 bp, synthetic construct
  source 1..120: mol_type = other DNA
ggaatataggcaaccactgcattggggaccactgacctcaaacatagagaccagagcaaatggggctcatcacgtgaaactcatctggaactctagcaggttcttttatatatatatata

SEQ ID NO: 18066 - DNA, 120 bp, synthetic construct
  source 1..120: mol_type = other DNA
agtgtcattttgtccaggatgatgctccctctcttaagcgattaatgcgcccttgctaaccttttgctatcgctgcctcttcaaaccagaggagttgagagttccgggccggcagaggaa

SEQ ID NO: 18067 - DNA, 120 bp, synthetic construct
  source 1..120: mol_type = other DNA
ctatttctggcacttgcaagtcccatgatttcttcggtaattctgagggtggggggagggacatgaaatcatcttagcttagctttctgtctgtgaatgtctatatagtgtattgtgtgt

SEQ ID NO: 18068 - DNA, 120 bp, synthetic construct
  source 1..120: mol_type = other DNA
cctcatttagcctcaactgttacacaggatgacaggccctgaatttaggtgaaactaatactgacaatagacacaaaggggggggggggatttcagagatttatttagatcatgtcaaaa

SEQ ID NO: 18069 - DNA, 120 bp, synthetic construct
  source 1..120: mol_type = other DNA
ctccaggagtaagggatgctgggctgctcgaacacaggccttgttagaactcccttcaaacaggatcccagagatgtggggagaaggtaactggccttaagaatgattgcgctacagctt

SEQ ID NO: 18070 - DNA, 120 bp, synthetic construct
  source 1..120: mol_type = other DNA
aattattttaattcaatttaaataaaacccaccaaggagacttcaagctttaagaagtctagcttcctgtgaaatgtgagaggaagtcagcactcatttcagaaatctgattataacgat

SEQ ID NO: 18071 - DNA, 120 bp, synthetic construct
  source 1..120: mol_type = other DNA
taatgtgcatcctggcgcccattttgcaggtcagttgctctccctggaaggaagagtgttctcggatttcaccttaaaggaggaaggctgccagaactgaactagcacttctgaatatcc

SEQ ID NO: 18072 - DNA, 120 bp, synthetic construct
  source 1..120: mol_type = other DNA
taatgatgtagaacctcccgccatccagcacgggggcccacctctgcttccagagtcatcagaagaagctggacctttagcagttcaacaggagacttcatttcaatctccggaacctat

SEQ ID NO: 18073 - DNA, 120 bp, synthetic construct
  source 1..120: mol_type = other DNA
cacctactgaactagaacctgctcaggattcactggtgcagtctgaaagttacacccaaaataaggctttaactgcaccagaggaacacaaggcctccacaagcaccaacatatgtgagc

SEQ ID NO: 18074 - DNA, 120 bp, synthetic construct
  source 1..120: mol_type = other DNA
cctaggatgtttcaacagagggcactgggccaaagctttggtgttacctggcatagggtttctttcttctcatttgttgataatgataagcttttgcccatatttctgtggaattattta

SEQ ID NO: 18075 - DNA, 120 bp, synthetic construct
  source 1..120: mol_type = other DNA
atataaaaatgcaataacagatataacaaaaactctccttgtgccctactccctcatccctgaagtaatgctactctgcatttagtatacatgcttccagacttttcctcatttacctac

SEQ ID NO: 18076 - DNA, 120 bp, synthetic construct
  source 1..120: mol_type = other DNA
tcttcaaggggtgtgcttgagtgtgtgtgtgtgtgtgtttgtggtggtggtggagagagatggacacaaaaaggaaaatataagaaaaggtttgaatgaaagcagagcagatcccaccat

SEQ ID NO: 18077 - DNA, 120 bp, synthetic construct
  source 1..120: mol_type = other DNA
gtttacactaagaagcacatcagaaatgcccctaactcttcactaattacaaaataacgatcgccccagccctgttaccagaaagggatccctgtatttctgtctgtttagagacaagaa

SEQ ID NO: 18078 - DNA, 120 bp, synthetic construct
  source 1..120: mol_type = other DNA
gagatatcagccagacaacgttacaccatccaggtaaagagggagggacaaactccatcactgtataactgaagaaatttttttttatgaaatattaaagcaatacaaaaccaaaaatga

SEQ ID NO: 18079 - DNA, 120 bp, synthetic construct
  source 1..120: mol_type = other DNA
ttagagttgagatgaaaaataggtattcagtattattctaaactcttgctgttattcataccaattgacatttaataactaatcaaggcaatattttcgttttcctagagatttatcctg

SEQ ID NO: 18080 - DNA, 120 bp, synthetic construct
  source 1..120: mol_type = other DNA
aaagaggccaagagacttatgtagcttatatatgacctcctctgcttgtcctagttctgacctatagcatgggcaagaaaaggcatcaaagaagtgaccctcaaattagccttgttgctg

SEQ ID NO: 18081 - DNA, 120 bp, synthetic construct
  source 1..120: mol_type = other DNA
atttcaagttagagggaggcattcaggatgtgtctggactagagcagcagtttctgcacatgctcccctctgtcctcattaatttgctgatgcataacttaggaaaagtacactaaaggt

SEQ ID NO: 18082 - DNA, 120 bp, synthetic construct
  source 1..120: mol_type = other DNA
tgatgaaaaaatcagagctagctgatattggaaactagcactcatttcatataaacagaatagagctgtacccttcaaactaagtcacagttactttcaaagattggcacaagggtctca

SEQ ID NO: 18083 - DNA, 120 bp, synthetic construct
  source 1..120: mol_type = other DNA
ccctgactttaaagtgcttctccttcattcctatacacaggtccagactgatggcttattttttaaaattctcttagtcacttcattggttctaacaataattttagaaactggatgact

SEQ ID NO: 18084 - DNA, 120 bp, synthetic construct
  source 1..120: mol_type = other DNA
aggttcacatggctaataagtggcagaaccacttacaagctttgcaaataattttcaatgcagctcttagttcccctgtaataggagctgaatgatgacaatttggctttgtgcgcattg

SEQ ID NO: 18085 - DNA, 120 bp, synthetic construct
  source 1..120: mol_type = other DNA
gggtgagggtctaggtcatctgcttatttctttgactaccttcttccatggaaccagttttccctgacagccttgggattctagcatagatcattttggagtttgtcatttaaatttatt

SEQ ID NO: 18086 - DNA, 120 bp, synthetic construct
  source 1..120: mol_type = other DNA
gctgctatggacatgcatgtactactttttgcgtggacatgtttttaattctagggtgcatccctagcagaattgctagatcgtatggcaactcttatgtttaactttttgaggacctgt

SEQ ID NO: 18087 - DNA, 120 bp, synthetic construct
  source 1..120: mol_type = other DNA
ccagggtttggtgttactcctgcttgtgttagtagttgctatttatttagtgacttttctgaacttcttctgtaaagtctcgcattatatgtcatgtgttcccactaaagtccctcctcg

SEQ ID NO: 18088 - DNA, 120 bp, synthetic construct
  source 1..120: mol_type = other DNA
cctctactttctttgatcttccatgacattggcattttttaagagtcaaagatagctgtcttgtaaattgtcccacaatccggatttgtctgtttcctcatgatgaaattcaagttaagc

SEQ ID NO: 18089 - DNA, 120 bp, synthetic construct
  source 1..120: mol_type = other DNA
gaattgggaagagatacttctgaaactactaatcactgtcacccaattctaatcccaaccatctttattctaggcataccatactcactgccatgcttacccttcagttgggcacttttg

SEQ ID NO: 18090 - DNA, 120 bp, synthetic construct
  source 1..120: mol_type = other DNA
tgaacttgctccgaatctcaaacctttctgttcacagaacaaacgctcaagggctttcaagagtgtttctgtagattaggcttattagcatcaacttcatgacttctaaaatgtgactgc

SEQ ID NO: 18091 - DNA, 120 bp, synthetic construct
  source 1..120: mol_type = other DNA
ggtagcacgaacacaggtgcaccgaggacgaggagagcaggagccttgtgctctctctgcatctgaggcaggacagcacagggtacggagcagtctgcagagaggccagctcatcaggga

SEQ ID NO: 18092 - DNA, 120 bp, synthetic construct
  source 1..120: mol_type = other DNA
cctataccctctgtgagatgtgtcaccatttcttggacaccatgtgagacattccccctcagattagagatgctcagcttgcatcaacttacctaaagcctacatctggctactctggga

SEQ ID NO: 18093 - DNA, 120 bp, synthetic construct
  source 1..120: mol_type = other DNA
agaggaaggaaaggccgcctagaaggacactaaaaaggcaagagaagccctaagcagagtgagcaccagactccacaggttaagggctcagtcacacagaaccatccgcatgtcagaccc

SEQ ID NO: 18094 - DNA, 120 bp, synthetic construct
  source 1..120: mol_type = other DNA
ctaggagaaaagaaaaatgataaattaacaaaggacaatgctcttagcaccgccatcattcaggaatttccaagggttttaggagctttgtgttaggaactggggtcagagaccaaatat

SEQ ID NO: 18095 - DNA, 120 bp, synthetic construct
  source 1..120: mol_type = other DNA
cagggaggaagcagaggtgccctggcatcttcagctggaggtgagcagggcgctgagggtgggagaggcccggcgcctggggatgggaggcaggactgcaccttcacagggacgcttcca

SEQ ID NO: 18096 - DNA, 120 bp, synthetic construct
  source 1..120: mol_type = other DNA
taacgcaacagtaaaaaaaaaaaatacaaataatacagtctaactatatagcatttacatgctagtagacataagaagtaatctagtagtgatttaaagtagacaggggggctgggcaca

SEQ ID NO: 18097 - DNA, 120 bp, synthetic construct
  source 1..120: mol_type = other DNA
ctccctccctctatgagccagatccaccctacccagactgtctggaactttttactattcctattctctcccatatctgaatatctccaatctgttcaccttggcatgcttaagcctttt

SEQ ID NO: 18098 - DNA, 120 bp, synthetic construct
  source 1..120: mol_type = other DNA
ccctgttttgcccattatctttttcttttttgccaagcaaatggggttaaatttgcttagcctccatgtgttcacatgtctcccttgtgaacctaagaatgtgcaagccactagaaaagg

SEQ ID NO: 18099 - DNA, 120 bp, synthetic construct
  source 1..120: mol_type = other DNA
tgaaattcaacagtggccagcagtagcttaatatcatggattacgcccaagtacacaacattcctttctaggatgagagaaagcgagcacagaatttatcctgttcacaaatgtggcgta

SEQ ID NO: 18100 - DNA, 120 bp, synthetic construct
  source 1..120: mol_type = other DNA
atttcagctcagttcagctaaaccacgacaggcgtgggggcaggaacagcaaccaaccaatcacccaccgcctcctggagcttttgcaccaatgagctcgaagttttgtgagtgacgaca

SEQ ID NO: 18101 - DNA, 120 bp, synthetic construct
  source 1..120: mol_type = other DNA
ctacccctccctagtatgcaaaggtatcccttgcacacactcacttcttagaccaaaagccttatagttctagtttgccttgaaggaaattgtattgtctatagagtatgtgggccattt

SEQ ID NO: 18102 - DNA, 120 bp, synthetic construct
  source 1..120: mol_type = other DNA
gaagagattgtagatgtcagatgggaagaagaactacacggtttaatataagtatgtggagataaaaactcaaaggtaacagggccgggcacagtggctcacacctgtaatgccagtgct

SEQ ID NO: 18103 - DNA, 120 bp, synthetic construct
  source 1..120: mol_type = other DNA
gactccctgtttcgcccaagaagctgaagaaagatccagctcagcgttggagccttgctgagattattggaattacacgccaattatccacacctcagagtcagaaacagactttgcaga

SEQ ID NO: 18104 - DNA, 120 bp, synthetic construct
  source 1..120: mol_type = other DNA
cttataatcgtgtgagatgtagggggtccaccttcattattttgcacatagatgttcaggtgacgccattacactcaagcctgggcaacagagtgagactccaatggagacggggtttca

SEQ ID NO: 18105 - DNA, 120 bp, synthetic construct
  source 1..120: mol_type = other DNA
ctgagactgaggttgaggctgaggccaggagttcaagaccaccctgggtaacttcgcaagaccccacctataaaaaataaaaaaatctttgtctagtaagtctaacatctggtccttctc

SEQ ID NO: 18106 - DNA, 120 bp, synthetic construct
  source 1..120: mol_type = other DNA
caggaattctgggctgtagcatgctatgctgattgggtgtccgcactaagttcagcatcagtatggtgacctcccgggaaaaggagaccaccaggttgcctaaaaaggggtgtaccagcc

SEQ ID NO: 18107 - DNA, 120 bp, synthetic construct
  source 1..120: mol_type = other DNA
gttaagtacagaattttttattggggctcatatcatgaatgtttcggctttcttcttcagagacatgggaacaacgctagtcccacttacaacacttaagaacattctcatgatgactgt

SEQ ID NO: 18108 - DNA, 120 bp, synthetic construct
  source 1..120: mol_type = other DNA
aaagcagtagaaaatttaaaatacagtataattatgtacataccatttacactgtattaggtacttagagtatacctgaggctgtatacaaacattatgtcatttcataaaaaagaactc

SEQ ID NO: 18109 - DNA, 120 bp, synthetic construct
  source 1..120: mol_type = other DNA
agccatgttatgattgggacaattgtgaaaatgtgtatacggaccgcatagtagacaatgataatatgaagttccattgagtgatgatagtcctctggttatgtcagagaatgccttggt

SEQ ID NO: 18110 - DNA, 120 bp, synthetic construct
  source 1..120: mol_type = other DNA
ctgcattgaggtataattttgccactgtatttcagcctgggtgacaaaataaaaataaaaataaaaaataataattttccccttggtaattaataaataatctgtgggttgttactttga

SEQ ID NO: 18111 - DNA, 120 bp, synthetic construct
  source 1..120: mol_type = other DNA
aagtcaggttctcagttactattacaaaatttaataatagaactgttccatatgcagaaaggaccaagacaaaggaatgggaaggctagggaataacattaacatccacacactgtatac

SEQ ID NO: 18112 - DNA, 120 bp, synthetic construct
  source 1..120: mol_type = other DNA
cacccaaagtacttttaattccagaaaagaaacccagctgcacactggcacacctgaccttcatgcagtcagaagctttggatgattccccatccaaaatattagagatgaaatgaaagc

SEQ ID NO: 18113 - DNA, 120 bp, synthetic construct
  source 1..120: mol_type = other DNA
tggcatcaacttgtcaggctttgggagtgagcagctagacaccaatgacgagagtgattttatcagtacactaagttacatcttgccttatttctcagcggtaaacctagatgtgaaatc

SEQ ID NO: 18114 - DNA, 120 bp, synthetic construct
  source 1..120: mol_type = other DNA
aaggctgaggtgtatgctttgttcttttactgcagtgtatatttcaggatttttaaaggatcctcgctttcagatctctgtgaattgaaaccatgtgaatcccactagactattttaaga

SEQ ID NO: 18115 - DNA, 120 bp, synthetic construct
  source 1..120: mol_type = other DNA
ttacttaccccatggtcacacaatgcactctgccttttcctattttattcaaattcaaaaataacatgttgtgctttaagctgatttcgtagctcactcactcatcagcgacagccagcc

SEQ ID NO: 18116 - DNA, 120 bp, synthetic construct
  source 1..120: mol_type = other DNA
aggagagtgaagccctgccataggaggagaacacagcccacctcaggcctcctgcaaaaatacatagaataaacaacaacagttactaaatgaatgaaaattgtgattccgatgaagcct

SEQ ID NO: 18117 - DNA, 120 bp, synthetic construct
  source 1..120: mol_type = other DNA
cataggtctttttggtgaccagtccccaaataaggagcccaccaagagtcacctcatgagaacaaaggacgcttctatcacccagaaaattccaagggatttaggagctctgtgtcagga

SEQ ID NO: 18118 - DNA, 120 bp, synthetic construct
  source 1..120: mol_type = other DNA
ccgccggagcccccacactagccctggacttctccactggcttacgacatgagagctcaatatgctccttatttaacgcactgttgtatcaggtccctgtgggagccactggctctatag

SEQ ID NO: 18119 - DNA, 120 bp, synthetic construct
  source 1..120: mol_type = other DNA
agtgccagtccaagataaatggacactctgagtatcaaaaaaatacataatctgcagatcaaaacacgaagatacaaacatctaagagtcaccatggaagttgcggggcatccagtggtt

SEQ ID NO: 18120 - DNA, 120 bp, synthetic construct
  source 1..120: mol_type = other DNA
gagcagagcaccagaaggtatcacttcaagcatccgtctttagagacatttcacagaaacagtatcgaggctacaaaccgaataatctttaccttttgtgttctggaaaaaatgctgcca

SEQ ID NO: 18121 - DNA, 120 bp, synthetic construct
  source 1..120: mol_type = other DNA
ttagctctgctccaccattgggtagctggttttcagtaaggtcagcagtgatcaccaggtcaataaatctaacacaggccttctcagttcttccataatttgatcttctatctgacgcta

SEQ ID NO: 18122 - DNA, 120 bp, synthetic construct
  source 1..120: mol_type = other DNA
aaagttgatcatttgagtcctgtgcctaattcaatattcagaacagaacagtagtaatgttcacatgccacctgtggggtgtatcctcagtcagaagtttggatctagaggcagttcaca

SEQ ID NO: 18123 - DNA, 120 bp, synthetic construct
  source 1..120: mol_type = other DNA
taaggtaagatggctccgactacagggcctttttggcacgctcagtctcccagccccaagcgccaaaagtgcattagggagaaacgtcggcacgacgtcaagggcgcgaacaagcgtggt

SEQ ID NO: 18124 - DNA, 120 bp, synthetic construct
  source 1..120: mol_type = other DNA
agacctttgaaacagccctgcagtgactaaaaactctgtccccagtgccacttgtttaaccctacagtttccacagactaaaggtagttttcctttggttaatatgaaaacaccaaatag

SEQ ID NO: 18125 - DNA, 120 bp, synthetic construct
  source 1..120: mol_type = other DNA
aatctcatccaaaaacaccctcacagaaacatccagaataatatttgatcaagtatctgggcaacatggccaagccaagttgacacagaattaaccgtcacactggatcacaagggctgt

SEQ ID NO: 18126 - DNA, 120 bp, synthetic construct
  source 1..120: mol_type = other DNA
atgctaaggaccttaaggacaagagctatctttgcttgcaatttatttggcaggccctgcagggctgtgcaaatgattctatttaatttttactacttgtgagaaggcacagagggcttt

SEQ ID NO: 18127 - DNA, 120 bp, synthetic construct
  source 1..120: mol_type = other DNA
aaccctttggactccccaagccattctaatatttgtttttgtaagttagtagcttctgcacgttagtatgtcagaactcaactagtttcctatctttcctgataacctctccgacccacc

SEQ ID NO: 18128 - DNA, 120 bp, synthetic construct
  source 1..120: mol_type = other DNA
ccaacgatgacaattccagcaactaggaaaacaagtacgcctacaaagaaaagtgagaaaattcatggagaatttgaactcagaaccaactcctcggagctgatcttttttgggggaagc

SEQ ID NO: 18129 - DNA, 120 bp, synthetic construct
  source 1..120: mol_type = other DNA
caggcaggaattggctttagcttggagtgaggatggatttggggtgtcacgttttgtttttatggatgacactcgcttcgaatgcagcaggatatgctgtagtttcagggttttaaattt

SEQ ID NO: 18130 - DNA, 120 bp, synthetic construct
  source 1..120: mol_type = other DNA
tttcaggttaatatgtccaactgcttatttaaaatcaaggtcccgaaacgcagctttttcaactccgaacccaggatcttagcccacctaacttgtgtagatactcctcgacttaacgat

SEQ ID NO: 18131 - DNA, 120 bp, synthetic construct
  source 1..120: mol_type = other DNA
gaatcagtctctgaacactctggtgatagatggtatattaccctaaagcttgcctgtaatgtcatacagctatgttaggtctttgttatctggagttccatgtaacttttatacgtagtt

SEQ ID NO: 18132 - DNA, 120 bp, synthetic construct
  source 1..120: mol_type = other DNA
caagaagcagggtcaagatttgaactcagatcagcctggtactgttacctagttcaccagcttagttgcaagagtgtagtaaagactaggtttacctcacctagaactttttggacataa

SEQ ID NO: 18133 - DNA, 120 bp, synthetic construct
  source 1..120: mol_type = other DNA
gtgagagataggggtctagtttcacacttctgcatgaagttatgcaattttcccagcatcatttattgaagacagtgtcctttccttagtgtgagttcttgtcagtgttgttgaagatca

SEQ ID NO: 18134 - DNA, 120 bp, synthetic construct
  source 1..120: mol_type = other DNA
acctagtcatttataacattttgtgggtgaatgacatcattaccaaacaaactttcagatgaaactttggaactcaagctgtaaattgtggatagctcatgtgcagtactacaaatcaaa

SEQ ID NO: 18135 - DNA, 120 bp, synthetic construct
  source 1..120: mol_type = other DNA
tctactttcttattagaggacaatttaggcagttccaattttatttttcccggaatgtacattattttagtcgagtgccattgccacattagcgatattttggttagtgagggactgcag

SEQ ID NO: 18136 - DNA, 120 bp, synthetic construct
  source 1..120: mol_type = other DNA
cgttttttggggggtagggtatgctttggattctaatcctttgttgtaaatagcttctctcagacagtgatggtcttttcatgatgtttatagagtgttggatttaaattttatagttat

SEQ ID NO: 18137 - DNA, 120 bp, synthetic construct
  source 1..120: mol_type = other DNA
agatctagctttaaacagctgctgcactccagtcctttttcttcacctgcagatattgagtctgataactgttttgtatacatagcctttcagtaaatctacttatcagtcatcaaatta

SEQ ID NO: 18138 - DNA, 120 bp, synthetic construct
  source 1..120: mol_type = other DNA
ctgccttgaggacattatttgcaaatgacattacttggaaaacctagttaacttgtgcttgtgcctcaagaagctcagagaacggaagataaaagtagttttctggtagaacgtcccacc

SEQ ID NO: 18139 - DNA, 120 bp, synthetic construct
  source 1..120: mol_type = other DNA
attaaaaattcattttctcggttgcaatagccatttttcaagggcttactagtgacatgtgacaatggctgctgtattggacagcacagaaagtacttttgcactgcattaatttagaag

SEQ ID NO: 18140 - DNA, 120 bp, synthetic construct
  source 1..120: mol_type = other DNA
gctggtaatgtcctcttgacctaactgttggttaccctgggtgtgttcacttgtagaaattcattgagccaaacacgtacaatgtatgcatttttgtgtatatatgttcttcttcaataa

SEQ ID NO: 18141 - DNA, 120 bp, synthetic construct
  source 1..120: mol_type = other DNA
actgttttcttcagttgtttctgaacaactggaatctcagctgtctttttccattaaatcccgtgttcgttcctccataccatgctgcctcttgcccatttttgcatttctcctttctgc

SEQ ID NO: 18142 - DNA, 120 bp, synthetic construct
  source 1..120: mol_type = other DNA
acgtcctgtgttcatggcttggaagacttaatattgttaagatgacagtgctacccagatttatctacaggtttaatgcaatcactatcacagttcaactgcctttttcccggaaatgga

SEQ ID NO: 18143 - DNA, 120 bp, synthetic construct
  source 1..120: mol_type = other DNA
ttggagccctcattgctgatgggaatgtaaaatgatgcagctactgcacaaaagttttgcagttccttaaaaaactaaacatagaataactcagcaattctactcctgggtatagaccca

SEQ ID NO: 18144 - DNA, 120 bp, synthetic construct
  source 1..120: mol_type = other DNA
tactgaggagaaggaggtaccactgaatttggcatttagtcattggtgattttgaagacagcagttacagtaaagtggctgctggaaaggatttcaaagaatggttgaagaagatagcca

SEQ ID NO: 18145 - DNA, 120 bp, synthetic construct
  source 1..120: mol_type = other DNA
tggtgtgtttccatttagttggtttgccatacttttttaaaaataatgctttaaggctgagcgtggtggctcacacttgtagtctgaagcaggcagatcacttgaggtcaggagttcgag

SEQ ID NO: 18146 - DNA, 120 bp, synthetic construct
  source 1..120: mol_type = other DNA
gtgcagtgttgtccagaagagtcctgattaaatcaccccagtttctttgatgaagataagcaaataattttattttttgctgtaatcccagctactcggaaggctgaggcaggagaatcg

SEQ ID NO: 18147 - DNA, 120 bp, synthetic construct
  source 1..120: mol_type = other DNA
taccataaaaacacagatgtttctggattccagtagggaggccttttgttcacagcatctgttttggttggccagccagatgacttctgtggattttttcactccttttgaaggacactt

SEQ ID NO: 18148 - DNA, 120 bp, synthetic construct
  source 1..120: mol_type = other DNA
tgactggcagtctcactaaaccacatggaatgggaaaggaacagtttcccaaaggaagggtttgctcttaatgcagaggaagggatgctgggagtcaaaaataatagatgttcattatag

SEQ ID NO: 18149 - DNA, 120 bp, synthetic construct
  source 1..120: mol_type = other DNA
ttgctatatcctagctcttttatctttggctctcttctccttattaggatgtgaagtaattctcaggagaggaaatgcatctagtttttacttgatatcaaggactctaaatcactggct

SEQ ID NO: 18150 - DNA, 120 bp, synthetic construct
  source 1..120: mol_type = other DNA
tgagaccctgtttaaaaaagaaaaaaacaaaaacaaaaactattagatgggccaggtacctcacgcttgtaatcctagtgctttgggaggtggaggaggatcgcttgagaccaagaattc

SEQ ID NO: 18151 - DNA, 120 bp, synthetic construct
  source 1..120: mol_type = other DNA
gttcagatgtaaactgtagcacatgctttactttcctagggtaagtaacaaagaaccattactgggtagcttaaaacaacagagatttattctgtcaccgttgtggaggccggaagtctg

SEQ ID NO: 18152 - DNA, 120 bp, synthetic construct
  source 1..120: mol_type = other DNA
gcgtggcggggtggaaagactaagctgctaatagataataagccaaagaactaataagcaaaaagtggcattgtctcaggcaatgtggcaaagttaggaaatggagtatgagtcgtcttt

SEQ ID NO: 18153 - DNA, 120 bp, synthetic construct
  source 1..120: mol_type = other DNA
aaagcattcttctgctaacagaaatgcttatctggattgtaaagtcagatctttaaagaagtggctcaaacagacttaataagcaaaattgtaaaacccagtgataggtgggactaaagt

SEQ ID NO: 18154 - DNA, 120 bp, synthetic construct
  source 1..120: mol_type = other DNA
tgtttaagtactataaataatgctgcaatgaacctccctgtagatgtgttgttagacaaatgttctagcatctttctgggacagacatctagaaatggaattgctgaatcatcatattca

SEQ ID NO: 18155 - DNA, 120 bp, synthetic construct
  source 1..120: mol_type = other DNA
tttcataattaactgtaacaagtgtaactagcacagacagataccagaatgaacttggttgacccatgatgtgtagcaactcctgtctacaagctctgagcgttaggcaaaccataggct

SEQ ID NO: 18156 - DNA, 120 bp, synthetic construct
  source 1..120: mol_type = other DNA
agcacctgaaagaaactgttagatgctgttaataggaagaggagttaaaaacctcgtccttgcccttatctacatgtgtacatgtagaacttactgtagttccctagatgtagcaggtgc

SEQ ID NO: 18157 - DNA, 120 bp, synthetic construct
  source 1..120: mol_type = other DNA
catttgacaaagccaaacagtgtattggcacaatgaccatcgagattgatttcctgcagaaaaaaagcattgactccaacccttatgacaccgacaagatggcagcagaatttattcagc

SEQ ID NO: 18158 - DNA, 120 bp, synthetic construct
  source 1..120: mol_type = other DNA
tgtggtatctcgtagtagcagaatggacagacagcccaacctgtaatatttaccattataccccagcacatagaagaagaccaaacttttagaagggactcagcaaagatttggtgaatg

SEQ ID NO: 18159 - DNA, 120 bp, synthetic construct
  source 1..120: mol_type = other DNA
aataaggcatgtaagaattgtagaagaaagttatgagaaaagtaaaagtagctcagatgatagtctggaaggtttgctttgcccagagagacctcatttccccctcacttttggccttgc

SEQ ID NO: 18160 - DNA, 120 bp, synthetic construct
  source 1..120: mol_type = other DNA
atgcccctcacttggttttgtgttaaatgagatagcatcatcatttcttttagtgattaagtgatgaatgtgcaggtcaagtcttcccagcagattcatggttcagtcctactcttgtac

SEQ ID NO: 18161 - DNA, 120 bp, synthetic construct
  source 1..120: mol_type = other DNA
ggttttataaaaaccatattattactttattttttgtttataatagagcatactaaggtacttaatttattctttgtttgaaatagtaaatgtggttctcttgagttactttaggtggca

SEQ ID NO: 18162 - DNA, 120 bp, synthetic construct
  source 1..120: mol_type = other DNA
gactggaactttgaaaaaatgggaataggaggtctagacaaggaattttcagatattttccgacgagcatttgcttcccgagtatttcctccagagattgtggagcagatgggtaagttt

SEQ ID NO: 18163 - DNA, 120 bp, synthetic construct
  source 1..120: mol_type = other DNA
aagtatatttattatagtggggataagaactgctttctaggcactaagtgcttggattgtattagccttctattgttggtagcctttctgcctggtcgctcactctgataaattacaggc

SEQ ID NO: 18164 - DNA, 120 bp, synthetic construct
  source 1..120: mol_type = other DNA
ttgccatcaggaagcatttgttaccaatttcattgaaaagacaaactagtataaagctgtcctggcttttgagctgaattgaaaaacttattttctttattctggatgaagtttctgggt

SEQ ID NO: 18165 - DNA, 120 bp, synthetic construct
  source 1..120: mol_type = other DNA
aatatacttgaaaataactgtcatggagtttccaatctgttagtttctctcttgaaggtctttcaaataggtagtgtataccttaggccgggtgcggtggctcactcctgtaatcccagc

SEQ ID NO: 18166 - DNA, 120 bp, synthetic construct
  source 1..120: mol_type = other DNA
agccacatttgagtcccagggtagaaatgtgaacatcaaagctggtatctggaagtatgggtgaataaattcaacagctgattgctgtctttcagcatattcaggtgttaactgaataga

SEQ ID NO: 18167 - DNA, 120 bp, synthetic construct
  source 1..120: mol_type = other DNA
gaatgccaacctgacatctgttcaagtctgcctgtaatttattagcagaggaaaagacagcagttgctcactagttagagatgcaaaatttctgccttcctgttctccactaagtactta

SEQ ID NO: 18168 - DNA, 120 bp, synthetic construct
  source 1..120: mol_type = other DNA
ttttaaaagccaacagacaaaagataatatcacagtatgtttcttggggtgactctaccatcagcatggaaagtcagcaggaaacaggtacatccttccgccttcatgaagttttctgtg

SEQ ID NO: 18169 - DNA, 120 bp, synthetic construct
  source 1..120: mol_type = other DNA
ctgtaatacctaatgccacttttttcatgtgttttttgtcacgtgttgtagcagaatacaggaaggaaggaactggaatgggtgtgtcagagaagctgtcttaaactgtcaacctggaga

SEQ ID NO: 18170 - DNA, 120 bp, synthetic construct
  source 1..120: mol_type = other DNA
gctggaccttagcatacatagtttgagaagcactggcctatgtaaatatttgcaaaatgaatgaaattttttgaacagatgccttagagaaaaggtgaggcgaatagtcttagagaccag

SEQ ID NO: 18171 - DNA, 120 bp, synthetic construct
  source 1..120: mol_type = other DNA
ttcaggacaccattatctcttgcctgaattgctccataagccctcagccttgcccttctctaatccattctccacactgtaactggagtgatttttataaaaaggcaagtctgatcctgt

SEQ ID NO: 18172 - DNA, 120 bp, synthetic construct
  source 1..120: mol_type = other DNA
atttgcacatcccaaagcagtactgtgtaaaacataaggtgcattgtgaaccagattagcaaagtaggccacatggagaagcagcagatgcatttaaagagcaagactgagccatatctt

SEQ ID NO: 18173 - DNA, 120 bp, synthetic construct
  source 1..120: mol_type = other DNA
attttttaaaaagttaaatagtattagcagatctgcatccacacaagtcccgtcatggtaagttagcgtctcttcctcagcagtaagaaggctcctaggcacacaccagaacaaggttgg

SEQ ID NO: 18174 - DNA, 120 bp, synthetic construct
  source 1..120: mol_type = other DNA
agacttgccttggaattccatatgatttgttacttagagcagtctacctttaatatgtttaatatggtcatactttaaaaaaaaaaacctgcaagaaacttgggtttcacgtttttgctt

SEQ ID NO: 18175 - DNA, 120 bp, synthetic construct
  source 1..120: mol_type = other DNA
gtcttataagtcgtaatggctccaggtgggatactgtgtcagaccaaggataggcagatgatagtttattgccacagtcaaaagatcgaacccttttttttcatgttatctagaaatgaa

SEQ ID NO: 18176 - DNA, 120 bp, synthetic construct
  source 1..120: mol_type = other DNA
atttcaaaaatgtagatgaataagaagaataaaacaatcactcagtgtaaaaaacaaaaaaccctgaaaaagtaccattaatattctggagtatatcatccagctagttttagctgtata

SEQ ID NO: 18177 - DNA, 120 bp, synthetic construct
  source 1..120: mol_type = other DNA
tagcatagttcttgggtatataatagagactcagtaagtatctgtggaagttgagagtgataccttgttccccagtgtataacagcaaagcctagcctcctcctgttgagcattgtctgt

SEQ ID NO: 18178 - DNA, 120 bp, synthetic construct
  source 1..120: mol_type = other DNA
tgatgtatctttccagtccttgtatgtgtatacatatatacataactgagtatacctttttacatggttacacttatatagtatgtgccatgctttcttgcatatcatgagtacttgagt

SEQ ID NO: 18179 - DNA, 120 bp, synthetic construct
  source 1..120: mol_type = other DNA
tgtttgtcctttgcatactcaacaatgctaagtaaatgcacttgcagaacgacgagtagataatctgcatttatctcaaaacacactggcacagaactcttccaccgtcacttcctgtct

SEQ ID NO: 18180 - DNA, 120 bp, synthetic construct
  source 1..120: mol_type = other DNA
aactttgttacattctttctcgttccacaagtagttatcccttcccagttacctttcttttttaggtctgtggagtcatgatacatctatccccttttcctttgtttttcatgcatttgt

SEQ ID NO: 18181 - DNA, 120 bp, synthetic construct
  source 1..120: mol_type = other DNA
ctcacaaaactgtatctcccccagctgtactcaagtacagaaaacatctattcttgataacttttatcttgttagaatagctcttttctcttctatagctacaacttgtcagtgtgtcct

SEQ ID NO: 18182 - DNA, 120 bp, synthetic construct
  source 1..120: mol_type = other DNA
attaaatctaagttgactgatttggatatagaccagtcggatggtagacagcttgcacagctgcttggtgctcaggaaataggctgttttcactagcatagcaaaactcagagtgctctt

SEQ ID NO: 18183 - DNA, 120 bp, synthetic construct
  source 1..120: mol_type = other DNA
gattatattttctacaagggcatgcactatttaaaattgagcactcaaatctggtttgcacaactgcacagagaagcttgcaagactgccgaatatgtcctgacttgctactagtctttt

SEQ ID NO: 18184 - DNA, 120 bp, synthetic construct
  source 1..120: mol_type = other DNA
gaaagaatatacaggtaatactaatccacctcaaactaagaagcaaaggatggtggatgggctatgttgatctagcgttgcaaaaacacttttggatgaagtgcccagaaatagccccag

SEQ ID NO: 18185 - DNA, 120 bp, synthetic construct
  source 1..120: mol_type = other DNA
gcagatggtcacaactgtcagtctcagaagtaatttggtaagtaaaatagtcatttatttggaagttttttggtaacctaattgtgatctaattgtcaccagttgggagtctaattccat

SEQ ID NO: 18186 - DNA, 120 bp, synthetic construct
  source 1..120: mol_type = other DNA
agctacctgcctactctgtgccagtattctcgctgttaagcatggcttaagaaaaacacaaaaccacagtgtctgatctcactttaaatttatgaaccaaatctcaagtgagccctcagt

SEQ ID NO: 18187 - DNA, 120 bp, synthetic construct
  source 1..120: mol_type = other DNA
aaatttgtatttatagaactgaataagaatctacaccttacctaatactgtgaattgcttatgtaaatacaacaaaggatggtccctcgatgacctgaatctcatatgctgagttcactt

SEQ ID NO: 18188 - DNA, 120 bp, synthetic construct
  source 1..120: mol_type = other DNA
gtgcattttcctggggaggtccattagactgttctgtgggaaagagaggaatagaatgagagacaatgacaatttaaatcaggtccactgatttctcgttctatacctggcctttgttat

SEQ ID NO: 18189 - DNA, 120 bp, synthetic construct
  source 1..120: mol_type = other DNA
ttcctactaagccagaaatgccctacagctagggactgtctttttcatgtttgtatccctaacagctacctttgcatctagtctaaacatgagcttagtacacttttgttgaatggaatt

SEQ ID NO: 18190 - DNA, 120 bp, synthetic construct
  source 1..120: mol_type = other DNA
ataaggagaattagagatgagctaacaaagacaagtaaagagtggcatgagaaagcagtgagcatagaactgaaactggatagcatgaaattctggaggtatcagtcagtagcacagtgg

SEQ ID NO: 18191 - DNA, 120 bp, synthetic construct
  source 1..120: mol_type = other DNA
cctctccatgttcaaccaaaggcacagttcttattactttcaaggatttaaaaaggagtcttttctcagcataaaggaggaagtgaagaccaattttgacagcccaaagggtcttcctcc

SEQ ID NO: 18192 - DNA, 120 bp, synthetic construct
  source 1..120: mol_type = other DNA
tttttatttttatagagacagggtcacaaagtattgcccaggctggtttcatgctcctgggctcaagtgagccaccacacccagccaaaaataagtaatatttcccagttagacattttc

SEQ ID NO: 18193 - DNA, 120 bp, synthetic construct
  source 1..120: mol_type = other DNA
gtattatgtaaggttcatatgcaaaaagctatcttacttaacactgagtcttgctcagttatagagtgacaggattgagttgtcagagctcaaaggaaagcttgatttgcgtctcagaaa

SEQ ID NO: 18194 - DNA, 120 bp, synthetic construct
  source 1..120: mol_type = other DNA
gttttagtacccactagggaacagaacatgagtccttgaatccatttacagtgtggactaggaactggtaccttcaaaggggttgtgtctatgaaaagagtggactagaaaatatctgct

SEQ ID NO: 18195 - DNA, 120 bp, synthetic construct
  source 1..120: mol_type = other DNA
agaataaacctaaagaaatcacccagaatgtagcacagagagataaagggatggagaagatgaaagttgagatgagagagttaaaacaagaagtccagatagaatagtgtagaggcatta

SEQ ID NO: 18196 - DNA, 120 bp, synthetic construct
  source 1..120: mol_type = other DNA
atcagctttgaatcatgtcagtccctaaaattagattgagggttcctaaattgctagtgcccctaggcatctggcagaattgtaaatccttcctggaagaaagtggtatcatgtaaggtc

SEQ ID NO: 18197 - DNA, 120 bp, synthetic construct
  source 1..120: mol_type = other DNA
tactgtgtgattccatttatagagagcttacctaaagtatagtgtttaacaacacatgcttgggtggtaaaactataaaggaaaatgaattattaccataaaaatcagattgtggttacc

SEQ ID NO: 18198 - DNA, 120 bp, synthetic construct
  source 1..120: mol_type = other DNA
agcagctaataaatggtaagatataacatgttcatgtatgggagaactgacaatgtcataaaaatgagttctgcccatcttggtctgtaagttgagtgtatttccagtgaagcctaatag

SEQ ID NO: 18199 - DNA, 120 bp, synthetic construct
  source 1..120: mol_type = other DNA
tggtgcaagtccattcactatttcaactcttcagaaagtcccggaaccagtcagttttgcagttcattcctaatactaagattgtttctgcttcacttatctttttaacttacctcagtg

SEQ ID NO: 18200 - DNA, 120 bp, synthetic construct
  source 1..120: mol_type = other DNA
gtgctgaaatgacaggtgtgagctaccatgcccagctgatgttgtgttttgattaaaagattatcatacagtaaccccctgtgtgtggtgcacctttcagattttggaacattttggatt

SEQ ID NO: 18201 - DNA, 120 bp, synthetic construct
  source 1..120: mol_type = other DNA
gtagaatgaggtcacaaaagatgttagctccagacttcttttatgccttcttgaaagataacacatatcttgcacaacacagtaagaaaactgaagagtgatgtcatagtgatacttgtt

SEQ ID NO: 18202 - DNA, 120 bp, synthetic construct
  source 1..120: mol_type = other DNA
atgtaaaatttgatgttattgtactgactaggtggggtaagggacctgatgacaggtaacaagattagtaaggttctgaaaaggtcagaattgtactgaattatgtttagaacagattgc

SEQ ID NO: 18203 - DNA, 120 bp, synthetic construct
  source 1..120: mol_type = other DNA
aaccactgtaaaaatcaggatgtagaacatttgcatcacccccaaaaactccttcatgcagtcccttactggtcaccctttctttttagtaaccctggtaactaccaatgtgttctccat

SEQ ID NO: 18204 - DNA, 120 bp, synthetic construct
  source 1..120: mol_type = other DNA
ttcagtaggaaggcctaattctagatttcagtctgtcatgatagtactataacttctgcttctcacattaggtaaattttattatcccttttataggaccttgactgcctctgggccttc

SEQ ID NO: 18205 - DNA, 120 bp, synthetic construct
  source 1..120: mol_type = other DNA
ggctggtaataacctagcatacatcaaagtccaaaccttggtatgatggcagctcagtcaacgaagaaaggagggataatttagggaacaatgctgggtcggttatttgaagaagaatta

SEQ ID NO: 18206 - DNA, 120 bp, synthetic construct
  source 1..120: mol_type = other DNA
tcattacttgtgggaatataccaagataggcactatcaggtactgtgctgggattatagattgataaaacctttctggaaaagtgtttctactttttcaagtgttcctatttcaagggcc

SEQ ID NO: 18207 - DNA, 120 bp, synthetic construct
  source 1..120: mol_type = other DNA
agggatgggaaagggtttaaaataatacctgtactgaaaaacaggatgcaaggtattacatagctccattttggctgagtttgagatgattgtgatttctttattttttgctattttccc

SEQ ID NO: 18208 - DNA, 120 bp, synthetic construct
  source 1..120: mol_type = other DNA
atttaatggatactaaccatatttaatcctcagtctcattatgctcatttaatttttattatccgtatgttgtcatatttaggttatgttcattttttaccagttttgttaatccctagt

SEQ ID NO: 18209 - DNA, 120 bp, synthetic construct
  source 1..120: mol_type = other DNA
aaatgggagggtgttgccactgactgacttaatgaaagtatctgacaaatgtaaggtctttcaaatagtgagataagaaatgtatataaattatttgatcgactacttactttctatcta

SEQ ID NO: 18210 - DNA, 120 bp, synthetic construct
  source 1..120: mol_type = other DNA
aaaaaaaaaaaaacaccctgctgttttatgaagtctgaaaaccactggcctgtaaaaaagagaaggaactttggagtcagagagatcgtgtcacattgcccctctgtcactttgacagat

SEQ ID NO: 18211 - DNA, 120 bp, synthetic construct
  source 1..120: mol_type = other DNA
tgctttcgagactaggaaaatgcctattttatttttaatttcatcaggcttgccagatgagaaaggccgactacagattcttcacatccacacagcaagaatgagagggcatcagttact

SEQ ID NO: 18212 - DNA, 120 bp, synthetic construct
  source 1..120: mol_type = other DNA
ggaagtgggagtttccacgtactagaattttgggggctgctttattcagcaaatatattgaatagttgatgtgttcaagctattgggctggagacataaagataattgtgaactcttccc

SEQ ID NO: 18213 - DNA, 120 bp, synthetic construct
  source 1..120: mol_type = other DNA
atacccgtttccttcttgaaatagtaatgtatcatttatggtactgtcagttgactttggttcacagtagatttattcggcatctactgcatgctagaccctgtgctaggagttaatacc

SEQ ID NO: 18214 - DNA, 120 bp, synthetic construct
  source 1..120: mol_type = other DNA
atcctatcccaaaatttcactttaagccgttgtctcagtaagaaacatgctttcttcaagcatatattgggtttatctacatatgaggcaatgagggatggtgggaagatcgcagatatc

SEQ ID NO: 18215 - DNA, 120 bp, synthetic construct
  source 1..120: mol_type = other DNA
gattgaggcctaaagaaagatttagtcaggtggactaaacaggtctttcctgttaaactgttttttcaggttttctgagacaagtggaaaatctggtcagaaacacctgttgttcatgtc

SEQ ID NO: 18216 - DNA, 120 bp, synthetic construct
  source 1..120: mol_type = other DNA
gtaagagaatcagaatgcaaaatattatggtaaaaacctaggcctgtgtaggaaagaggtgtttaaagtgaggctggtagctttgttgagattttaatgtttcggtcagagctcttgtct

SEQ ID NO: 18217 - DNA, 120 bp, synthetic construct
  source 1..120: mol_type = other DNA
gttctctccttctgagactcctgttagatcacagttaaaacttatggatatttctttcatgctttgtagcctttctgtctcactttctgtcattttgtgggatttggggcggaagggaag

SEQ ID NO: 18218 - DNA, 120 bp, synthetic construct
  source 1..120: mol_type = other DNA
ctcatgcctcatgagttaaaatggctatacagtgtcccttggtacagatgtgttctaatttacataactgatcccctcttggtagacattattaatatgcttcccatcttttttcataac

SEQ ID NO: 18219 - DNA, 120 bp, synthetic construct
  source 1..120: mol_type = other DNA
ttccacattttagctattgtgggtaatgctgtcatgaacaaggctgtacagatatctcttcaagaccctgttttcagttctttgggggtatatacccagaagtggaattgctggatcata

SEQ ID NO: 18220 - DNA, 120 bp, synthetic construct
  source 1..120: mol_type = other DNA
gagaaacatctgtacaataatcctagtggctggtgatattatttactgaaatattttcatgataggaagcttaccatcttgtaaggcaggccattcaattttgagactttccagttattg

SEQ ID NO: 18221 - DNA, 120 bp, synthetic construct
  source 1..120: mol_type = other DNA
cactcttcatttcttactttactcctctgactttccgatgaacccggactcagcctcccttttgctggaagggtgccagtcctgtgacattaccacactgtggctaccttttaagggcta

SEQ ID NO: 18222 - DNA, 120 bp, synthetic construct
  source 1..120: mol_type = other DNA
tatactcaagggtcccaagaaactgagatgtttctgttagaacagtgtggaacatcctgtacctatgaggcccacaggaatgtgtttctttctctttttttttggagacagagtcttgct

SEQ ID NO: 18223 - DNA, 120 bp, synthetic construct
  source 1..120: mol_type = other DNA
tcactcttgaagtactttcttcacttggcattcaggaacccagacctacctgatttccctcctcacagtaaccagagtgatcctttcagaaagaacttcagattatgtaatccttctcct

SEQ ID NO: 18224 - DNA, 120 bp, synthetic construct
  source 1..120: mol_type = other DNA
aaaggctgattgatattctgtcatatgtatataacgtactttacccccccccccatttatctgacatttaggttgtttccacagatatttagattgttttccataggttggctattgtga

SEQ ID NO: 18225 - DNA, 120 bp, synthetic construct
  source 1..120: mol_type = other DNA
attcctagggcaagttgtggaagcctttgcctatgtgcccttgtgtgacttgtctgacagtttctgaaagttctttaggaaacaggttgaaagatttgaatattaaaagattgaagaggg

SEQ ID NO: 18226 - DNA, 120 bp, synthetic construct
  source 1..120: mol_type = other DNA
ttattatctgattgtggttttaatttgcatttcctgaatgattaaataatgttgaatatcttttcatgtgcttgtttgccatttgtatattttttgcccattgaaaaattgtgttcttat

SEQ ID NO: 18227 - DNA, 120 bp, synthetic construct
  source 1..120: mol_type = other DNA
tctgacattcaaaagtagatgtcttggggacccccagatttggttcgctagtcagggccatgctgaatatttccttctgactaggttcttttcaattcattttatgtgctaaggattgtt

SEQ ID NO: 18228 - DNA, 120 bp, synthetic construct
  source 1..120: mol_type = other DNA
aggcaacatgtaccacagaaagtaatagatagcatttatttgaaccagaccaacaaagtattattttatgagatatgaaaataacgtccctctccctctccccctccccctccccctccc

SEQ ID NO: 18229 - DNA, 120 bp, synthetic construct
  source 1..120: mol_type = other DNA
aaataaataaaataactagaaaagtattttttatgataataaaaactcatatattgtgtttattattctttctttggaggggacaaggtcttgctttgtcacccaggctggagtgcagtg

SEQ ID NO: 18230 - DNA, 120 bp, synthetic construct
  source 1..120: mol_type = other DNA
ctccgtttgtggataattaattaaaatgaattataagtttatgtgtgtgactactatttatgattatgagtgtgtagtggttggtacaataattgggtattctttttttttttttttttt

SEQ ID NO: 18231 - DNA, 120 bp, synthetic construct
  source 1..120: mol_type = other DNA
ttatctgcttcttcttgtctttagctattatagaactgttccaccaaggcaacaattattgctattttaatggtgaaatcagttttattaggcaaattgactcaggcttcagactggcat

SEQ ID NO: 18232 - DNA, 120 bp, synthetic construct
  source 1..120: mol_type = other DNA
gtgccatataatacaatacatagtttttaaacttcatatcattctgatcagaagctttataaactgttaggtgaatgctgttagatgatatgagagcacaatttaacctgtgtgtgtgta

SEQ ID NO: 18233 - DNA, 120 bp, synthetic construct
  source 1..120: mol_type = other DNA
actctgatgttcttacctagttttgtggtatgttcagttgtctaagagcattgttgatctgcacacagattttgtttggtctatacagtgtttctgaaaacttgaattagttaccattaa

SEQ ID NO: 18234 - DNA, 120 bp, synthetic construct
  source 1..120: mol_type = other DNA
ttaagggatcctcctccctcagcctctccagtagttaggactgtaggtggataccatcacacccacctaattaaaaaaattttttttgtctcactgtgttgcccaagctggtcttgaatt

SEQ ID NO: 18235 - DNA, 120 bp, synthetic construct
  source 1..120: mol_type = other DNA
gtgtgtgtgtgtgagagagagagagagagagacattttcaggttaagacttcaatgtttgttactttagaaatgggtaaattcagctgggtgaagtggctcacgcctgtaatcgcagcac

SEQ ID NO: 18236 - DNA, 120 bp, synthetic construct
  source 1..120: mol_type = other DNA
cttgagtgagtgccagcttttaaaaaattgtctggtaaatgaaagagtgattatttaatttctttaactgtggagaaaaatagaagtactttagccaggtatatcaaagcaacaaggctt

SEQ ID NO: 18237 - DNA, 120 bp, synthetic construct
  source 1..120: mol_type = other DNA
gtttgcagtgtatttgcattctttcacttttacatttgttggttttgagtaatattgaggggctgtctgataaagaacctgtgtaggtttccatatggctatatacaaagtatatgagtg

SEQ ID NO: 18238 - DNA, 120 bp, synthetic construct
  source 1..120: mol_type = other DNA
atctgataactgagatggctactaggtgcctaatgggctgggtggcatatatatacagcatggataggtcggagaaagggatgatttatgttctgggcagaatggaatgggagggtacaa

SEQ ID NO: 18239 - DNA, 120 bp, synthetic construct
  source 1..120: mol_type = other DNA
tccttactttttttcaaggcattagtagaaactgatgttttcctggtacataaggaagaggaggctcacaactggagggtatcagagatctttcattgctctaggcctaccaggctggtc

SEQ ID NO: 18240 - DNA, 120 bp, synthetic construct
  source 1..120: mol_type = other DNA
actgcttttagctgcagcccacactttttttggtttgtttgttttgggggaaattctccaggcagtagttatggctgttgttgcttgctgctgcttctttcctatttttgttgatagctt

SEQ ID NO: 18241 - DNA, 120 bp, synthetic construct
  source 1..120: mol_type = other DNA
acaatgtgtttgatctagtactgagctacactggtatatgtgggctatatagaattatgtggtttagattacttgtttaagtatagcagtggcttggaggaaaatacattctgagtttca

SEQ ID NO: 18242 - DNA, 120 bp, synthetic construct
  source 1..120: mol_type = other DNA
gttggtggggagaaatccccacacatttggtcacagaagtctactgtgttgatgattgtggtgtaagagcagaggaaaagcaatttgatttttctccacaaggggaagaaaatgtttcat

SEQ ID NO: 18243 - DNA, 120 bp, synthetic construct
  source 1..120: mol_type = other DNA
tttacttctatttaatagatgactaacacacttacacatagatgcttatacccaaatatgtatgtttatagattttaaaatgcttattatatttaaaaggcctaataagtagtttcagca

SEQ ID NO: 18244 - DNA, 120 bp, synthetic construct
  source 1..120: mol_type = other DNA
aaatatactaattatatattagtattaatgtaaacattaatttagaaatacttttttctccagtgaagcctcctcagacttctcatatgcatcttcagtatttatgggtttctacccttt

SEQ ID NO: 18245 - DNA, 120 bp, synthetic construct
  source 1..120: mol_type = other DNA
attaatatttaaagcatacaattcagcggtttttagtctatttacagagttgtacagccatcatcacaatcaattttagaacactttctgaactccagaaagaaagtaccctgcctattt

SEQ ID NO: 18246 - DNA, 120 bp, synthetic construct
  source 1..120: mol_type = other DNA
aaagtcaccttgtctttccctagtactctgcaaacaggtaagagacatagcttttgtaaaatctcgtgatgaatatagtgacatctgacttcctccagagaaatttattgtatgccattt

SEQ ID NO: 18247 - DNA, 120 bp, synthetic construct
  source 1..120: mol_type = other DNA
aaagtgaggtttgtgaattcttcaccctgtaaagtgcttattataatgtaaacttgaaaagcagaatataaaattacatatttaaggtggtgaatcatgtctctaaatggcacaagtaaa

SEQ ID NO: 18248 - DNA, 120 bp, synthetic construct
  source 1..120: mol_type = other DNA
gttcagcattaggaaatatggtaaccatttttcattaaatttaaaaagttaaacattctatatttatcaaaaggaatcagtttatttgctagaattcaccagggaagagtagacagaaac

SEQ ID NO: 18249 - DNA, 120 bp, synthetic construct
  source 1..120: mol_type = other DNA
atttattattagtatataagagatgtatcattcttgataaggtctgtttacagcagacatgctaaatggtgaagctatttcaaataataacaaacaagttagagaaggttatgaccattc

SEQ ID NO: 18250 - DNA, 120 bp, synthetic construct
  source 1..120: mol_type = other DNA
tagcctgggtgacagactgagactccattttccaaagaaaaaaagaagtggtgacacaaaggcaacaacctttattccctttttgtataaattattctctttatttttatagcatttagt

SEQ ID NO: 18251 - DNA, 120 bp, synthetic construct
  source 1..120: mol_type = other DNA
gaaacagactgggcaattccacttatggaattgtaacataaaattccatcatatagtttccattaaaggtagtaggtttttataatctgttagacgttctttgcaaactttattaatgtg

SEQ ID NO: 18252 - DNA, 120 bp, synthetic construct
  source 1..120: mol_type = other DNA
agggcctttaaaatggtcaactaaaaagtcaccattcctctacgttttttcgtgacttgatttgtaaaacacagaatgggattactgttttgccatgcatctgtatttagcagatgatta

SEQ ID NO: 18253 - DNA, 120 bp, synthetic construct
  source 1..120: mol_type = other DNA
gatttgaacattgtaaatagctaactgaatatagtgtcttgaggacatatttttggtaactgtgtttaacatctccataaaagtgttttttatttatcttcaatcacaggtacgggaacc

SEQ ID NO: 18254 - DNA, 120 bp, synthetic construct
  source 1..120: mol_type = other DNA
aaaagtctttcatttgcctttatacatgaccagatttactgggtatatagatttgttgatgaaaaaaggtaaaaagagcaacttttgacatccagaggttgtctggcactcacagctagc

SEQ ID NO: 18255 - DNA, 120 bp, synthetic construct
  source 1..120: mol_type = other DNA
ccattcccttctcagttaatacccagtttagctctagtatctgtctctcaaattatgtttaattgcttttatcactttgtcctttagatattttcaaacttaaatcttgttatctatgtc

SEQ ID NO: 18256 - DNA, 120 bp, synthetic construct
  source 1..120: mol_type = other DNA
aaataaaagccagagaggcaacttaccatgttttcccaactttgaattcttatagcatactctttactgttctgtgctgtgttgtgttaacattattgatttgaaggcatttgcattaaa

SEQ ID NO: 18257 - DNA, 120 bp, synthetic construct
  source 1..120: mol_type = other DNA
tgtctcttatgtttttaaaaagttaaaaaaattcaaaagatgtagctgcgtaatgaagtatatttaggtctctggctgtttgtattcttggaatgtattctcttcaccagtgttattgat

SEQ ID NO: 18258 - DNA, 120 bp, synthetic construct
  source 1..120: mol_type = other DNA
tatatatatatatatatatcaataaatgtttatatttattttgtgaaggtgccatggagaactggggccttgttacttataggtatgttaatgatgtgttaccctgccttatcttttcaa

SEQ ID NO: 18259 - DNA, 120 bp, synthetic construct
  source 1..120: mol_type = other DNA
aaaaggtccactttgaaaaggcttatcagaatctctgcattgaacaagggcatatggacagtctttattcaacagacacttcctaaactgttctaaaatttgtctgcaagtgggaaaagt

SEQ ID NO: 18260 - DNA, 120 bp, synthetic construct
  source 1..120: mol_type = other DNA
acccgtgcccaggagcttgacgccttagataacagccatcctattgaagtgagccatactttctaaccattagcctatgactgctctcatttacaatgaaatacgtaatttgttacatag

SEQ ID NO: 18261 - DNA, 120 bp, synthetic construct
  source 1..120: mol_type = other DNA
aaaaatgtaagttagaagggttttcctagaaagcgttttatgtaattcagtattacaggctatctgcttcctgtcataaccctgaatcacactgtctgccaggtcagtgtgggccatcca

SEQ ID NO: 18262 - DNA, 120 bp, synthetic construct
  source 1..120: mol_type = other DNA
aaaaacaaggctgggaacaagaattgttcaccaaagacaaagtgcccatttttcagcacagatagttttatgaagagattttccagaaggagaaaggaaatggtcagttgggtggccggt

SEQ ID NO: 18263 - DNA, 120 bp, synthetic construct
  source 1..120: mol_type = other DNA
agcaccatttcggagctgatagaattgtgataccatgtgagacgggcgtattaatatgtattccataaactgcgcagctctgcaccgctctgttttgctctgaccgcagtaccagcctca

SEQ ID NO: 18264 - DNA, 120 bp, synthetic construct
  source 1..120: mol_type = other DNA
tctgctaagaatggctacagtaatatactactaaatggagccattatgcctgggagttgtccaggatattcagccttaaaatgggatctgatctttggcattaccagagaagagacaggt

SEQ ID NO: 18265 - DNA, 120 bp, synthetic construct
  source 1..120: mol_type = other DNA
atggacactttccaagcctatatatagatccacagaatactcttttagtggctgtgaagtattccatgagacaaatgtcccataattcattcaaccatcaccctgagtctcccaacttat

SEQ ID NO: 18266 - DNA, 120 bp, synthetic construct
  source 1..120: mol_type = other DNA
tcatgcgccggttctgaaaccagactttgacctgcctttcggtgaggtccagcaaggccgcgatctcgacgcggcgtggccggcacaggtacttattaaagtggaattccttctccagtt

SEQ ID NO: 18267 - DNA, 120 bp, synthetic construct
  source 1..120: mol_type = other DNA
ggaaagagaggagggaaaaaaagaaaagaaagaaaaggcgaagaagatctcgaagccgacacactttttgtggtttccaggaatagaaaaggacagagaagcctccaaaagtctaagctt

SEQ ID NO: 18268 - DNA, 120 bp, synthetic construct
  source 1..120: mol_type = other DNA
tttaaactatatgcctgaccctatagacatctgaatttataccagttctgctctagtatctctggcctccaagcagtttcaagtgaaaacaaaagctacttccaccagggctgagcagaa

SEQ ID NO: 18269 - DNA, 120 bp, synthetic construct
  source 1..120: mol_type = other DNA
gtacagttcagtagagttaagtgcatcacagtgctatgcaacagatctccagaacttttccatcttgcaacattaaaacttcatacctactaaaacattaattctccctcactttctact

SEQ ID NO: 18270 - DNA, 120 bp, synthetic construct
  source 1..120: mol_type = other DNA
gctgcttagccactgggaccccacgctcagctccgactgggacggcgagcgcaccgcgccgcagtgtctactccggatcaagcggtgagccggggtttttcctcccccagccccgagctc

SEQ ID NO: 18271 - DNA, 120 bp, synthetic construct
  source 1..120: mol_type = other DNA
cctaacacagacgaactcagcttcctttgccatgcctctgactcgagccaacctttctttttatcctccgtttttctcagattccctccacacagtcttttcccaggtctagatcgcttc

SEQ ID NO: 18272 - DNA, 120 bp, synthetic construct
  source 1..120: mol_type = other DNA
taatgataagtaatcaaaataattcacaatatccaccttcttacggagattttcttacaccctcttctccatggatctgctcacactcctgtcccttcttcccctcctgaggttcctgtc

SEQ ID NO: 18273 - DNA, 120 bp, synthetic construct
  source 1..120: mol_type = other DNA
cacaggatgggctcagctcggtgggtagggacaggcggggcataggatgggctctgggtgggtagagacaggcaggtagggataggcaggggagagcatcacctcgcctggaagagtgag

SEQ ID NO: 18274 - DNA, 120 bp, synthetic construct
  source 1..120: mol_type = other DNA
catcttacttgctagatcccagggtgtgccttttttatttttgatagatattgccaaatttccctcaagagggcttgtgtgaactcacactttcatgaagagtgggtaagtgttgcacct

SEQ ID NO: 18275 - DNA, 120 bp, synthetic construct
  source 1..120: mol_type = other DNA
taaaaattttgcctttttcatattaccgtaagtattcactatgatgatctaatcttttttttcaaggtaattaaatgatctcctgcttaaactgggtcccgaaggctaacatttcaacca

SEQ ID NO: 18276 - DNA, 120 bp, synthetic construct
  source 1..120: mol_type = other DNA
tactcccatatacactttcttgtgatttagtttatttattatttcagcggtaggagaagttccacctcccttcaggaattggtctacttcttcctttggatattaaggaccatgtgatga

SEQ ID NO: 18277 - DNA, 120 bp, synthetic construct
  source 1..120: mol_type = other DNA
ctcccatctttcctcatttccgatgtggaaatcgattggggtccttataagcgacttgaggtctctgacatctcaaagattcctgacatgtagagaaatctgtcatctccatgattctac

SEQ ID NO: 18278 - DNA, 120 bp, synthetic construct
  source 1..120: mol_type = other DNA
ttgacttgggtttttcaccagaatccacatacaaacacgtgtaagtatgctttatggcacaaatcccaaactggctaataccaagaaaacctgactgacttctgacattaactggcatgg

SEQ ID NO: 18279 - DNA, 120 bp, synthetic construct
  source 1..120: mol_type = other DNA
gcatttgcaccacggtaaaagccgttaaacttagtccagcgggctgagatgaaatcagttccaggaggtggcataaagggaagcgcacgtgaagtggtggagaatggaactccagcgcag

SEQ ID NO: 18280 - DNA, 120 bp, synthetic construct
  source 1..120: mol_type = other DNA
caacccccgaggccgctgcttatctgctgtacggggcggggaccggccccctcatcctagagctgtcattggactgcggaaacccagaccttccaccccagccaatccacagcttagcct

SEQ ID NO: 18281 - DNA, 120 bp, synthetic construct
  source 1..120: mol_type = other DNA
gtttcattttagaatctctttagattttcagaaaagttgcaaggatagtgcagactttctttctttccctgtcccccttcttccccccttccttctctccttcctttcttgtttcttctg

SEQ ID NO: 18282 - DNA, 120 bp, synthetic construct
  source 1..120: mol_type = other DNA
tgaagggacttttgaggaggagaagccctgtctctcctcttggagggtcaggatagtaggaagtcgcaatttggcgaccggactggagggagttcagcctaactgtcaggttttcagggt

SEQ ID NO: 18283 - DNA, 120 bp, synthetic construct
  source 1..120: mol_type = other DNA
cgccggccgcgttaatcggccaagggtgggacggggcctcattaactggcagggtgggggcggggcctcatggcaaggcgagcccagggacagggctttagcgggaacaggtgggatggt

SEQ ID NO: 18284 - DNA, 120 bp, synthetic construct
  source 1..120: mol_type = other DNA
ccagtcaaacatcagtccctgcccactgcaccattaataggggcctaaaacaaggaatggaaaggttgtgggagaggttctccctcgaatcccgaaacccagacgattaaaatgtctagc

SEQ ID NO: 18285 - DNA, 120 bp, synthetic construct
  source 1..120: mol_type = other DNA
aactgaagctagttaggcttttcttggtacattctgcttcttggcctctcctttttaagggaccaggtttcctagagaggagatctagacccaggtaggaagtgtgtgtgtgtgtgtgtg

SEQ ID NO: 18286 - DNA, 120 bp, synthetic construct
  source 1..120: mol_type = other DNA
cgtacctcagctgtgtcttcacatcgagttggtctttattcctagaactctgttgatttgaatataattttagaagacacgttgtgtatccagtccaccgtgtatctggattcacaagcc

SEQ ID NO: 18287 - DNA, 120 bp, synthetic construct
  source 1..120: mol_type = other DNA
aggcccagcttgtgtggcaaggctgcttcatggataaatagtttggcaagtatgcaagtgcttagcaaagccgcttatttatcaaccaaaatttattggacaatcactatatacaggcac

SEQ ID NO: 18288 - DNA, 120 bp, synthetic construct
  source 1..120: mol_type = other DNA
aggagtgtgagatggaccaggtgagtgggatccagaagccacagtgtgaggcagaccaggtgaatggggtccagaagccgcaatgtgagatggaccaggtgagtggtatctagaagtggg

SEQ ID NO: 18289 - DNA, 120 bp, synthetic construct
  source 1..120: mol_type = other DNA
aatgtagagtgatatatttgggtgcaggatcatgctggaaaatgcaagaccttgagcctagtcagatacctcttctgtccaagtaatgtggggctacttatcccctctgattatttcttt

SEQ ID NO: 18290 - DNA, 120 bp, synthetic construct
  source 1..120: mol_type = other DNA
accaataggattcacggaggagttggaggtgacagaatcttcttactgtttcggctctctaaagaccagaattgaaacaaaacctaagtagatgatgctgataaattcctggggttgctt

SEQ ID NO: 18291 - DNA, 120 bp, synthetic construct
  source 1..120: mol_type = other DNA
aactgccatctgggggcagggaagggcaccacctggaggccaggaatgggagggcgattccttgcaggacctcaggctgatgggttttctccacaattaagtgtggttagtaggggcttg

SEQ ID NO: 18292 - DNA, 120 bp, synthetic construct
  source 1..120: mol_type = other DNA
tttctcacttaatcattataagaacctgatgaggctgttactgccattgttcctgtaatgtagatgaggcacagagaggttaaatgacttgtcccaagttccacagcttgcaagttgcca

SEQ ID NO: 18293 - DNA, 120 bp, synthetic construct
  source 1..120: mol_type = other DNA
ttcttgtcatgtgacaagaagtatggggcaggaataggtgatttcagggttgctgtggtggctcaaagtatcagtaaggattcagcctctatcttcccatgttttgtgagtttacttttt

SEQ ID NO: 18294 - DNA, 120 bp, synthetic construct
  source 1..120: mol_type = other DNA
caaattgaagaacactcttaactttatagtcaagtaataagaggtaaggggtccattgtttgccacaagtacccactcagataaagtaggtcatctggagtcagatgttagagccccagg

SEQ ID NO: 18295 - DNA, 120 bp, synthetic construct
  source 1..120: mol_type = other DNA
tcctaacccttgtaaagcatcagtatagccatcagggttatatgagaatttacctaggtctattaagtctgagagagaaaaaggtacatgcactctggctggaccaaattctcctcctcc

SEQ ID NO: 18296 - DNA, 120 bp, synthetic construct
  source 1..120: mol_type = other DNA
tgggatggctcaataatcattattacaagtacccattaatatatggcatattagtagattagtgtgttagattttggttgtttttctgtctcttccctaatgtcaccctacctgctagtt

SEQ ID NO: 18297 - DNA, 120 bp, synthetic construct
  source 1..120: mol_type = other DNA
aacagtccagtcatatcatggaaagaacaaccaaattcatgcatgcacaggcaaagacaaccatatcactatgaccacctggctgacagtaactgcaggacatcaattattgtaagacac

SEQ ID NO: 18298 - DNA, 120 bp, synthetic construct
  source 1..120: mol_type = other DNA
gaataatgacatgatccgctatctggatgttctattactcactttctccaattgttcctacatccaagcaaacaggcccccagtcacaatctgcagcgacagcagtttaattaatattcc

SEQ ID NO: 18299 - DNA, 120 bp, synthetic construct
  source 1..120: mol_type = other DNA
cccgcccttgcaaggcatcatttatcacacaactcttcttaccctatttaaattacctagatggcacttatagctatctctagcactgctgcctacctgaatttaagatctctgagagca

SEQ ID NO: 18300 - DNA, 120 bp, synthetic construct
  source 1..120: mol_type = other DNA
gatggtagtttcttttgctgtgcagaagctctttagtttaattatgtggaatgcagctttctctcaacttgggaaccaatagacatttctacctgttctgtttttatagaagactggact

SEQ ID NO: 18301 - DNA, 120 bp, synthetic construct
  source 1..120: mol_type = other DNA
tgctatatttttctggtatttttcctttttctgaattgtcctttctttccctctctagttttcatgtattacttcgataacccgggtggccaaattccgtcctggctcattaactgggcc

SEQ ID NO: 18302 - DNA, 120 bp, synthetic construct
  source 1..120: mol_type = other DNA
atgttgcacattcacaggtttcagatattaggacttggacatctttgagggggctatgattcagcctaccccagctggaataaacaaaacttcagtctgaacttgtaattctgctctatc

SEQ ID NO: 18303 - DNA, 120 bp, synthetic construct
  source 1..120: mol_type = other DNA
atagctctttatcaatagattatcttgcatctcatgagtttttttttttttttttttgcatattgtctttaaggatgatgcatttgtctctttctaatttttttttctttttctggtctc

SEQ ID NO: 18304 - DNA, 120 bp, synthetic construct
  source 1..120: mol_type = other DNA
tatgtacaaaaacactctcacacatatttactcctgcatgttccttacgatactcccttgggacagacaggcatgattaagtccattttaggaatgaaataactagaggctgggcgcagt

SEQ ID NO: 18305 - DNA, 120 bp, synthetic construct
  source 1..120: mol_type = other DNA
aagacttacttgaatactgaatagccaccaaaattcaaaatccaggtagctcagatgcagcccttggcctggatggtggaattgggacaccaacccatgtatgctcctgagtccagcacg

SEQ ID NO: 18306 - DNA, 120 bp, synthetic construct
  source 1..120: mol_type = other DNA
tgcttgctgaaaaagaacaagaaaataacattaggataatgataatgattgtgatggtagtggtggtggtggtgatgatggtgtggcagtgatggtgatgatggtgattgtggtggtggt

SEQ ID NO: 18307 - DNA, 120 bp, synthetic construct
  source 1..120: mol_type = other DNA
ctcccaattccaagttaacacatttctccagccaccgcttccttgtctttatgtaagtgggagctgcctggagtgaggcctctgaggaaccctgtgtttgcaggagctaggcacccaagc

SEQ ID NO: 18308 - DNA, 120 bp, synthetic construct
  source 1..120: mol_type = other DNA
tcacagactgctcacacacagaccctcacacacacctattacacacattcacacactcctcacacatacaccctcacacccctctacacacatacaccctcacacacacccctctacaca

SEQ ID NO: 18309 - DNA, 120 bp, synthetic construct
  source 1..120: mol_type = other DNA
tctggctggccatgtagagatgattgtacctgggatatggtgcattcttgaaaagcattggatggatggaaaaaaggaagaagtgtgaatggatgaataaagggaagagaaaagaggaag

SEQ ID NO: 18310 - DNA, 120 bp, synthetic construct
  source 1..120: mol_type = other DNA
tacgtaacctcttagagccttagttcccgcatctgtaaaatggaggaaagagtctctacttaagggtattgtgagaattcaacgagacaatgcacacagagtccttagaaacaagcagtg

SEQ ID NO: 18311 - DNA, 120 bp, synthetic construct
  source 1..120: mol_type = other DNA
agtcctatccaggagtaattaaaaaatacagctgacgcttgttctcttgcttgtttttaaatgagtagctaagtatctgtcaagatgatgagcacctaggccgctgacggccttaccatc

SEQ ID NO: 18312 - DNA, 120 bp, synthetic construct
  source 1..120: mol_type = other DNA
taggtccagattcccactgcaggactcactttccagagcaaccactaatcaattgctgtgtgaccctggacaagttactaaatctctctgaacctcagttttctcatctattaaatggtg

SEQ ID NO: 18313 - DNA, 120 bp, synthetic construct
  source 1..120: mol_type = other DNA
gcttaattggggcggagaggcagtgatagccttcctttcaatttgtcaagctttctttcaaaagatctgccaaagaagaaagggtaattaataggcttgaagtcatttccgatgtgtcag

SEQ ID NO: 18314 - DNA, 120 bp, synthetic construct
  source 1..120: mol_type = other DNA
cgacagaattgttaatgagtatatattaagcatctaattgtgcatgctgccatctaagacttggccagttatgtgggcttggtgcctagcctgcaggggtttatgctttgcgaaaacaag

SEQ ID NO: 18315 - DNA, 120 bp, synthetic construct
  source 1..120: mol_type = other DNA
tgccgccaacgtagcttaatattaatttagggaatgcagtcttgtgcagttccatggaactagattggaaatctgatagtgccatttctgttatctgattcctcacacacctgagatcac

SEQ ID NO: 18316 - DNA, 120 bp, synthetic construct
  source 1..120: mol_type = other DNA
aaaagaacctagggctaataaggtaacaaccctccgatgccttgtgaagtacattctagaacacagatcttccgatttgagtcctctacgttttcacgcaacctctttgctatcaagaaa

SEQ ID NO: 18317 - DNA, 120 bp, synthetic construct
  source 1..120: mol_type = other DNA
taatacctgagtttacaacaaggagagagagctcatccagctaggaggtcaaggaaggctacagagagagggtaggatttgagatgggtatagaagaatgtgtttatgactttaatggaa

SEQ ID NO: 18318 - DNA, 120 bp, synthetic construct
  source 1..120: mol_type = other DNA
ggaggaagagagaaagaggcgggggggagagagagaaagaaaaaagggaagaaaaaagagaaaggaaagaaagaaaagaatagggagctagaacagtacaaactacactcccatagaatt

SEQ ID NO: 18319 - DNA, 120 bp, synthetic construct
  source 1..120: mol_type = other DNA
tactttgagactgaatggcaaccagagaatgtaaacaaccaaggtgcatctggttatgttttaaaataaagattaataaaagttttggtttttctctttctaaccttctttttaaactag

SEQ ID NO: 18320 - DNA, 120 bp, synthetic construct
  source 1..120: mol_type = other DNA
tctgactggtgagcattcagtatcaagttaaaaaacttaagtatttgtaagtaaggaatgtggcacccagatagagtgctacctctgttgggaattctgtgcccttctcaagtgttgccc

SEQ ID NO: 18321 - DNA, 120 bp, synthetic construct
  source 1..120: mol_type = other DNA
tttctgttcagttgctgaagttatttttttcttcccattttaggccagtttgaaatagaaaaaagttgtgagttactttttcagatggcagagtctgttgattatgattatgatgttcaa

SEQ ID NO: 18322 - DNA, 120 bp, synthetic construct
  source 1..120: mol_type = other DNA
agccaccatgcctggctgtggatcattttccttttaaagtagccatgccttagtctgcttttcaagaatgatcctgttctttggtgaattccaagagcaaatgcaaactcttgatttgac

SEQ ID NO: 18323 - DNA, 120 bp, synthetic construct
  source 1..120: mol_type = other DNA
cgaatatattttatttctttagctaagtctgattgtctgtctccggaaggctgaacctgaatctcaaagatcctgtgtgtttcttctgggtaaaatgatcacccaggtctgagaggaagt

SEQ ID NO: 18324 - DNA, 120 bp, synthetic construct
  source 1..120: mol_type = other DNA
tggtgtacacttagaaatggaattgctggatcatatggtaattttgtgtttaacttcttgaggacctccgaacaattttccacctcggctgaaccattttacattcccaccaacaacata

SEQ ID NO: 18325 - DNA, 120 bp, synthetic construct
  source 1..120: mol_type = other DNA
tgtatggccagcatcatactatataccatgaaagacagagtaatactctgtagttttttgctttcactaagcttaagttatattaggaaaacaaggttcagacacgtgaaataaaggaag

SEQ ID NO: 18326 - DNA, 120 bp, synthetic construct
  source 1..120: mol_type = other DNA
aatgtcttgatttttttcatttggggaaaaagggccatttttggaaatagctgctcagtaagtttgacattgactcttagtatattcacaaaggatagcagagcagcctctaaccaagaa

SEQ ID NO: 18327 - DNA, 120 bp, synthetic construct
  source 1..120: mol_type = other DNA
tgcgtgtgccaccatgcccggccaaatatgtcattataagccatttccttttcagtttgaggacaggaccgtccacataatgggtgctccacaagaatttattgaaatttaacctaatgt

SEQ ID NO: 18328 - DNA, 120 bp, synthetic construct
  source 1..120: mol_type = other DNA
gtttgacatactagtgtttttagagaatggtacttaggtatggtagatctcttagaaaccaagtaacttataaggagtggttgacagaattggtaattggaggaatcaaggggggaaatt

SEQ ID NO: 18329 - DNA, 120 bp, synthetic construct
  source 1..120: mol_type = other DNA
atacacatgtacacatatgtgacacaaatatggctaaattaattgaatatatttccccatttatatgaaagcattttgtccggccgggtgcggtggcttacgcccgtaatcccagcactt

SEQ ID NO: 18330 - DNA, 120 bp, synthetic construct
  source 1..120: mol_type = other DNA
aggattaggataagtagactggtgagagtatttcagctaaggggagtcaaaaagaatcacttcttgaagtagaggagtgtgattcagaaaaaaattatttcctcttttgccaaatgctga

SEQ ID NO: 18331 - DNA, 120 bp, synthetic construct
  source 1..120: mol_type = other DNA
aagcattatgctggatacataaaaatgataagagagccagagtccttgttttcatgtttgtgtgatggggtggttaggtttgatattaataattattattctcttggatgtgcgtggtgg

SEQ ID NO: 18332 - DNA, 120 bp, synthetic construct
  source 1..120: mol_type = other DNA
agacttacaaactttttctttgtattaaggagtggccatgtcaccagattgggtttgtctatggtggagtttcctttgcctccacatctgacatgtgcagtaataaaagctgcttccctg

SEQ ID NO: 18333 - DNA, 120 bp, synthetic construct
  source 1..120: mol_type = other DNA
agttgttgcggtaccatttgttcaaaacactgtcctttttctgttgaaatgccttcgcttctttgttaaatatcagctgactattcttatatgggtctgtttctgggctctgtatcttgt

SEQ ID NO: 18334 - DNA, 120 bp, synthetic construct
  source 1..120: mol_type = other DNA
aaatgctgtataaaaataagtaatgttaactggttttcatgaggcagtatcagagctaaaaataccagtgggcacagtggtatcccagctccttgggagactgaggtgggatgattgctt

SEQ ID NO: 18335 - DNA, 120 bp, synthetic construct
  source 1..120: mol_type = other DNA
ttttctttttctgaatcatttaagaataaattggaagcattgtgctcccttaccacaaaatatttacatctgtattaggcaagaacaagggcaatctctcatttaaccatagtacattaa

SEQ ID NO: 18336 - DNA, 120 bp, synthetic construct
  source 1..120: mol_type = other DNA
gtcagtgattggtcggaggttgtacctagctaagccttttaatttaagccagtgatgttttcaccttttactgttgaatctgtgtttctggttaggagactactttcatggttgagggag

SEQ ID NO: 18337 - DNA, 120 bp, synthetic construct
  source 1..120: mol_type = other DNA
ccacacacacagctgttgagagtggggcattcttcctactgtccttaccgaattccatagattaggcttgtcttaagcattttaatcaatctccagagactttgaatgattgtctttggt

SEQ ID NO: 18338 - DNA, 120 bp, synthetic construct
  source 1..120: mol_type = other DNA
ttacttttcaaggaacaacatgttttacgacttgagattatctgtctagtgaccttgaagctgcacagctcgagagtcttcacaatgcctgggaaggggtgagataaggctcactagcca

SEQ ID NO: 18339 - DNA, 120 bp, synthetic construct
  source 1..120: mol_type = other DNA
atcgtattctatagtaaatgctgctccctggattcaggcaacattgtgcctctgctagatctagctgtgataggtatagggaataggaattgtgatgtgacgtgttagattgaaggaaag

SEQ ID NO: 18340 - DNA, 120 bp, synthetic construct
  source 1..120: mol_type = other DNA
gaagcagaacagagacatcgagaattggcagctaaagctggaggatttaatgactttgcaactttagctgtcatctttgaacaatgcaaatcaaggtatgtaaggtagtcctttgtcctg

SEQ ID NO: 18341 - DNA, 120 bp, synthetic construct
  source 1..120: mol_type = other DNA
ttgccttttgtttgatgaaggcatgaaagctcttctccctgtctttccctaaggaatgactcatatattaactctgctgagcatcaccacatcaaaagaagaaaccaaggtcttcaggac

SEQ ID NO: 18342 - DNA, 120 bp, synthetic construct
  source 1..120: mol_type = other DNA
tgatggtgattattttttggtcatggagcataatgtccccactttaaaaaacaacaaacaattgtaaggaagttaactgtcatatacctactgcccagcttaaaaaatgattaggtcatc

SEQ ID NO: 18343 - DNA, 120 bp, synthetic construct
  source 1..120: mol_type = other DNA
aaccatatatttagtgtgtgggatcacattctcctaaagagcatcaggaaatgtaggtagaagtcaatgttgtagcctaggttagaaggccctgcttgctgggagttaactctggttatt

SEQ ID NO: 18344 - DNA, 120 bp, synthetic construct
  source 1..120: mol_type = other DNA
agctgggccaggacaaactggctgaactgcagctctgcttgcagcttgctagaaatacaacttggtaacaacaggagattgtggacacactatttttcgttagtttattacaaaactaca

SEQ ID NO: 18345 - DNA, 120 bp, synthetic construct
  source 1..120: mol_type = other DNA
agcgtcaggaatgtatttaccagtattatcttccaagggctgtttcattgttttgctttcaaatttagctctatagaacacctggaattgtggtgaaaggtaggtgccaagtttcatatg

SEQ ID NO: 18346 - DNA, 120 bp, synthetic construct
  source 1..120: mol_type = other DNA
ggtgggccctaaattcaataagtatccttatcagagaaagacagagagaaggagaaggctatatgaagaggcagggattgcagttatgcagtcacaagccaaagaatgcctggagccacc

SEQ ID NO: 18347 - DNA, 120 bp, synthetic construct
  source 1..120: mol_type = other DNA
aacatttcatttgtagatggcgaagaggagaaatctacaaattcaaagataagtacagtatcataagcttgtggtattttcatctttgctcttttctcaagtatcctgaggaccagagac

SEQ ID NO: 18348 - DNA, 120 bp, synthetic construct
  source 1..120: mol_type = other DNA
agtgagtgaccacattaaattacatataatattggatttctttctagctatatctattgtttatattttctggtagtatgttcctctcatactagctgttgccatgttatattagataca

SEQ ID NO: 18349 - DNA, 120 bp, synthetic construct
  source 1..120: mol_type = other DNA
tcataaatacataaaatactttaacctaggaagaattctagtaacagcggtaatacagaagagttgtcaagggtaatagcagcagtctttggtaacagcagcagtctttggtggaaacct

SEQ ID NO: 18350 - DNA, 120 bp, synthetic construct
  source 1..120: mol_type = other DNA
aagtgcatataactgtccattggtagtggcaaagacaaaaaattgaaagggtcaaatcggacacttatatgcccacatgtcttgcattttacttgagatcttagctgcccatggaacaaa

SEQ ID NO: 18351 - DNA, 120 bp, synthetic construct
  source 1..120: mol_type = other DNA
cacagatgttatttaagacagaaacattaaaacagcgtttgctcacattgaaagacatcctgttctataacgttttacatttttatatgcatataaaatatgtatattttataggtacat

SEQ ID NO: 18352 - DNA, 120 bp, synthetic construct
  source 1..120: mol_type = other DNA
cctacccactacatatacagtagtaattttgcatatatttaaacaagcaaaagaatttgaccttttgtttataccaagtgaaggatccaaaaacatttattaagttaaaaggctaaacac

SEQ ID NO: 18353 - DNA, 120 bp, synthetic construct
  source 1..120: mol_type = other DNA
gctagagaaggcttttcatggagtgtctggcaacagtgatgatccatgctcatttgtaacccagaagcagcaattattctttttaattgctatgatttttcaaaataattcaaacaattc

SEQ ID NO: 18354 - DNA, 120 bp, synthetic construct
  source 1..120: mol_type = other DNA
ttgaagtaaaattatactcaaccatctacagaagtaattaaagttcagaaacaatggaatttcttatacttaaaacattagaaattacaattctttcttaaattgtaacaactgtcagag

SEQ ID NO: 18355 - DNA, 120 bp, synthetic construct
  source 1..120: mol_type = other DNA
accttcaattaccaggtgttgttcatcctggattttcaaatattccaatttatgatcctcatcatccagaagagtaaggtagttctgtgtaaggaggaggaaatgtttttgttatttggt

SEQ ID NO: 18356 - DNA, 120 bp, synthetic construct
  source 1..120: mol_type = other DNA
aatgcgcagcctttgagatagatattcgtgaatttccttgatggtctgcattcgactaaaacagcctgtataggctaatacccgctttaaaggtgcattcggagaaggtacatttcctat

SEQ ID NO: 18357 - DNA, 120 bp, synthetic construct
  source 1..120: mol_type = other DNA
gctgtagtgcggtgcggcaatcatggctcactgcagcctcaacctccctcattcaagtgatcctcgcactttagcttcccaagtagagacagggtctctctatgttgcccaggctggttt

SEQ ID NO: 18358 - DNA, 120 bp, synthetic construct
  source 1..120: mol_type = other DNA
ctgtaagaaggtttgaatacttgtcacttcaaaaggaataaaagagcctagtaaacagctgtaataaattgagtatttgagaaagatgaacatcatgttatggcagaacaaaacccaacc

SEQ ID NO: 18359 - DNA, 120 bp, synthetic construct
  source 1..120: mol_type = other DNA
acaggcatgagtcactgcacctggcctcatgttatctttcaaagagaattgaaaaagttgtaatgggtgccatggaagcaaggctaatccttctaatggaaaattaaatcaagaatgttt

SEQ ID NO: 18360 - DNA, 120 bp, synthetic construct
  source 1..120: mol_type = other DNA
atatattaaatgaatataacctttaatgaagatacaaaactaactttgttcaatttcaaaggagagcaagtacttcttttggtcagggtttagaggtagttcttgcatactaagttattt

SEQ ID NO: 18361 - DNA, 120 bp, synthetic construct
  source 1..120: mol_type = other DNA
caaagaaataaagcatgtaaaatctatttctatttattttctttgtaagtagaaaaggaaacatcccatctcagtttgctgttggaatgtttgcttcaacccctcatctagtcttgtgca

SEQ ID NO: 18362 - DNA, 120 bp, synthetic construct
  source 1..120: mol_type = other DNA
ttttgtactagtagtgaggatgcaactgttcccatataaaaatttactacgttctacttgcgtaaccagtctgttcacatatgttttgtctatgacttaaacaaaaaatttggatgtaaa

SEQ ID NO: 18363 - DNA, 120 bp, synthetic construct
  source 1..120: mol_type = other DNA
agaggcaatcaacataatgtactagggaatatttcacagattctagttacagggaaagatttcaaaccagtatcctgctggttgttctgtcagctatgatgtcaagatcaagatataccg

SEQ ID NO: 18364 - DNA, 120 bp, synthetic construct
  source 1..120: mol_type = other DNA
atcagttatcagttggataaaagttttcttctatatatgaagttataaaatgccactgcccagagacaaaaatcttctgaagaggtattagatgaatggctgacaacatcgaataaaaac

SEQ ID NO: 18365 - DNA, 120 bp, synthetic construct
  source 1..120: mol_type = other DNA
atacagacacaccaatgactgtaaccatatggttctctcaatcatcaagcatatgctaaatttgtgcttaaaacagtccaatgtggttttaaaaaaaggttactcttcagcagctttcaa

SEQ ID NO: 18366 - DNA, 120 bp, synthetic construct
  source 1..120: mol_type = other DNA
ttgcatggaattttgacatgactttccaatgtaccctattcatacccactactcatttgctatttgagagaaatgtctcagaaccagtcaaaccaaggctcaccttcaaaaccaggtggg

SEQ ID NO: 18367 - DNA, 120 bp, synthetic construct
  source 1..120: mol_type = other DNA
aagcctttgatccatttttgtatgtggtatgagataggggtccacgttcattccagtccaaatgcttttgcatttggatatccagtagtcccagcaccgtttgttgaaaagacttctttc

SEQ ID NO: 18368 - DNA, 120 bp, synthetic construct
  source 1..120: mol_type = other DNA
ttcttccttcctactgttccacagttacttcttcatttgttttccctttgttaagagatcttcctttagtcattcttttagagtaagtccactggcaacaaattcttagtcttccttcat

SEQ ID NO: 18369 - DNA, 120 bp, synthetic construct
  source 1..120: mol_type = other DNA
accaccatcataatatagaacattttcatcacccccaaaagttccctcttatccctttatagtaaatttctttcttccactgctggccctggcaaccactgatctgctttctgttttgcc

SEQ ID NO: 18370 - DNA, 120 bp, synthetic construct
  source 1..120: mol_type = other DNA
acattagtacattagtattaaataatctatgtattttattcagatttctgttttgtcccaaaagattatcttttaaaatataccgtatttacccacagatttaccatttctggcactctt

SEQ ID NO: 18371 - DNA, 120 bp, synthetic construct
  source 1..120: mol_type = other DNA
aattggattcttcatgctcaaacaccagaagcttccccacccctctcatttttatcaagccatcagcccacaaggaaagagggttatgctctaagtcagtgtttctcaaaaaatgattag

SEQ ID NO: 18372 - DNA, 120 bp, synthetic construct
  source 1..120: mol_type = other DNA
aaaaaccaagaacaacaacaaaaaaaaaaacccagcaggtcctacccaacgtatgaataatcccttctctttttttttcctcatgctgttgcccaggctggaacacagtgccgcgattag

SEQ ID NO: 18373 - DNA, 120 bp, synthetic construct
  source 1..120: mol_type = other DNA
ctctgtggcaggttttcagattttgaggacttgtaattgagttgtttagaaacaactgctttctgggctctgaggtggagacctgggaaaatggatcaaattctaaccaaacattcagag

SEQ ID NO: 18374 - DNA, 120 bp, synthetic construct
  source 1..120: mol_type = other DNA
aaagaagtactagagcccaaatggcataagaacaggactgcagcctattctgagtgaccactctctgtcacatagatgtcatttgaaagcaaatgtagatgtaactgaatcctcagacac

SEQ ID NO: 18375 - DNA, 120 bp, synthetic construct
  source 1..120: mol_type = other DNA
agaatgtaactcagaaaattagtgacctggaaatttgtgctgatgagtttcctggatcctcagccacctaccgaatactggaggtaaccttttattgtcttggtagtgggatatgtgaag

SEQ ID NO: 18376 - DNA, 120 bp, synthetic construct
  source 1..120: mol_type = other DNA
aggacttgtaagggggttgttactggagattgtagagttgttggattgcagaggagaatgttcgattcatcttttcagtaactttaaaatcacaccaaccattccaactacttaataatg

SEQ ID NO: 18377 - DNA, 120 bp, synthetic construct
  source 1..120: mol_type = other DNA
ttgctgttaaaatcaaatcagaactagggaagaaaaagtggctgtcatagaagaggacttctgagctgctttaaaacttttcaatatattactgtttgatgcagcacatagtagtctacc

SEQ ID NO: 18378 - DNA, 120 bp, synthetic construct
  source 1..120: mol_type = other DNA
agaaaggccatgagagggaaaacaaataaggtatattatcagtggtttcttatttcatacctgggtctagggataatttgacttagttctattcttcctctctaccttgtctgggtctta

SEQ ID NO: 18379 - DNA, 120 bp, synthetic construct
  source 1..120: mol_type = other DNA
gtttatatgagcctccttcgtggtgctaaagggctggtagtcaacatttgcatcttaacctcagtgttcatggatttataatttatccacagaattttctctaggcttgtaactaaagta

SEQ ID NO: 18380 - DNA, 120 bp, synthetic construct
  source 1..120: mol_type = other DNA
tctaaggaatagaaagcccagtcttgttgcatccttcttatcttttaaaatctacagataattcattttgtctttgggagcaaaattctcccaaagtgacaagaaaaattacagaatctt

SEQ ID NO: 18381 - DNA, 120 bp, synthetic construct
  source 1..120: mol_type = other DNA
atttaaatttattatgtgtcttgtctgtgatgatataagaattcacaaatgaggtgatttttctcttggccagacgaggttttgtgtcttacaaagattgaggtggaatgacttggactc

SEQ ID NO: 18382 - DNA, 120 bp, synthetic construct
  source 1..120: mol_type = other DNA
gttttgcccctcaggaacatttgtgaataactggagtcattattggttgtcactgctcggaggtatggggatgacactataggcatctactgggcagaagtcagggatgctggtaaacat

SEQ ID NO: 18383 - DNA, 120 bp, synthetic construct
  source 1..120: mol_type = other DNA
tcgatgttgtctatcactcttttcttcctgaaatgcctttttcatttggtttttaatggtgtgaccacccatctctcatgtgtcagtttaggttgaatcttacctgaagacaaaagagat

SEQ ID NO: 18384 - DNA, 120 bp, synthetic construct
  source 1..120: mol_type = other DNA
attagaatatgaccacttttctatttttccagttcactgcattagctttcaaagtagtctccttgtttttgcccttgtttcacctagtcttaatgtaatagcccgagtaattgttaaaat

SEQ ID NO: 18385 - DNA, 120 bp, synthetic construct
  source 1..120: mol_type = other DNA
aagtcatgggacaatgtcttaattttcatttacctacaggatagaaataatatttcctgtgtagggttgagggcattatgaagttgatttgtagaattctacaaagtaacatgtaaattc

SEQ ID NO: 18386 - DNA, 120 bp, synthetic construct
  source 1..120: mol_type = other DNA
tctccgagttccagccatcatctatgtaagttaatactcaagtcagtacagttttagtatgtaggcaggcattctcacagcaagttactggtcatttaccccgtgtagtatttgggctat

SEQ ID NO: 18387 - DNA, 120 bp, synthetic construct
  source 1..120: mol_type = other DNA
ttgctgcatcctagagtagagaacatatttagttatttggaattatatagacttggtgctcccccccaagacccccaccgcaagacggagtcttgctctgtcacccaggctagagtgcag

SEQ ID NO: 18388 - DNA, 120 bp, synthetic construct
  source 1..120: mol_type = other DNA
cctacagtattccacagaagaaaagtacctacgctttgaaggcctctaagttcagattctggcctgggcctcagtttttcttagtacaaatcatctgtgaaaatatggttgattctcatg

SEQ ID NO: 18389 - DNA, 120 bp, synthetic construct
  source 1..120: mol_type = other DNA
gttttctcacatatgtctctaccagacagaatcagagagcacgtgaaggggatggtcctatttgtctaagttctttccattcaagttccaggctggcattggtgcctttctactctgttt

SEQ ID NO: 18390 - DNA, 120 bp, synthetic construct
  source 1..120: mol_type = other DNA
aaaagaaaaataaaaaaagaaaaaagaaaagaaagaaagtttctgcctgttgtggaagaaactgttgcacggagcaggagcaactgacatcccctcaatcctacctggaccctctcaccc

SEQ ID NO: 18391 - DNA, 120 bp, synthetic construct
  source 1..120: mol_type = other DNA
tctgccactttctaacatagtgaccttgggcgagctgactaatgccattgattcttgctttcctcatctgtaagaggaagttgcagattgttgatatgttaacatcaacaaggcatacag

SEQ ID NO: 18392 - DNA, 120 bp, synthetic construct
  source 1..120: mol_type = other DNA
ccatcaaccaccaccatcacacctccatcaaccaccaccacctccattaccaccacgacctccatcaccaccaccatcacctccatcactaccaccacaaccatcaccaccatcaccacc

SEQ ID NO: 18393 - DNA, 120 bp, synthetic construct
  source 1..120: mol_type = other DNA
ccttgaatgaaatccaaactcccttcttaaaatatcataaaaattgtaatgaaaggacctctgcttttcccaggaccggttattttagactacataattctttgtgtggggtggggggcg

SEQ ID NO: 18394 - DNA, 120 bp, synthetic construct
  source 1..120: mol_type = other DNA
tgggtttggattccatctccccaggctctgaaccagcttctgtctctgtcttttctagaatcttagatttgtccaaccagaagagaccgcaggggtgacaagacccctgcaaactgcctc

SEQ ID NO: 18395 - DNA, 120 bp, synthetic construct
  source 1..120: mol_type = other DNA
atatgcggtgagggtgcaaggaaagataccccaaattctagtgagctcaagggcccagtgcccggctttgttttctgtttcatgaggccctggccttccctgggtgggctttacaggtga

SEQ ID NO: 18396 - DNA, 120 bp, synthetic construct
  source 1..120: mol_type = other DNA
actgataaggaaattgagtcacacagcccctgaaagcgccagactagaacctgagcctctgattcctctcacttccctcacctaccctgccacttcctactggatagaagtagacagctc

SEQ ID NO: 18397 - DNA, 120 bp, synthetic construct
  source 1..120: mol_type = other DNA
atacagtcacttttatgtggtttcgccaattttattccagctctgaaattctctgagctccccttacaagcagaggtgagctaagggctggagctcaaggcattcaaacccctaccagat

SEQ ID NO: 18398 - DNA, 120 bp, synthetic construct
  source 1..120: mol_type = other DNA
tgcatctggtgccacattcactgcagatctatgtcgggcaagtcaccatggatgggggaagaagttaataatcttgtccaggagaccacggcacccatcacaacattgtgtgatcttaga

SEQ ID NO: 18399 - DNA, 120 bp, synthetic construct
  source 1..120: mol_type = other DNA
tgaggcagtgggggtgcgcacggacactcattaattaattccagagtcaacaaaggaaaagattggcagattctatagtacatacaaataaaacatttctctgtgaaagatatgccatgg

SEQ ID NO: 18400 - DNA, 120 bp, synthetic construct
  source 1..120: mol_type = other DNA
gcacttggcctccagaacatttttatcactccaaagagaaacctgtacctattagcagttattcccctttctctcctcttctcagctcttggtaagcacttatctttctgtctctttgga

SEQ ID NO: 18401 - DNA, 120 bp, synthetic construct
  source 1..120: mol_type = other DNA
gtgtgagtttgtgtcaaacttgctgtaggtctgcttgaggatctgcccagtccggcggctgccgtcttccagcctctgcaaagtgaaggaagagaaggagaggccaagcgcttgggcact

SEQ ID NO: 18402 - DNA, 120 bp, synthetic construct
  source 1..120: mol_type = other DNA
cttgccacccctgacccgcacccattccccaagaacttacaaactcctggtaggtgtcaatggccagctggtgcgcgcgatgggcttggagcatagcgtggtcaaaaagcctggataacg

SEQ ID NO: 18403 - DNA, 120 bp, synthetic construct
  source 1..120: mol_type = other DNA
agcacagccaatagattgtgggggttctgagcaccattgagtcctgaattccacttttgctgatgactcctgggcccacctgagtcagctggatgcagtgctaacactgaccactagaga

SEQ ID NO: 18404 - DNA, 120 bp, synthetic construct
  source 1..120: mol_type = other DNA
attcaccaggcgaaatgaagaataaggtgagttctcttgggtcagcgccttactgctaaaaagagggcagcagtatttctctcccccagccctcgaagccagtggggttccaggattggt

SEQ ID NO: 18405 - DNA, 120 bp, synthetic construct
  source 1..120: mol_type = other DNA
tccctccagagaccaggaacattcagagattggccaaatatctggccttagatggcgatactcacattcataagccccaaacctgagggttagtgcccccgtcccatctacagggcgctg

SEQ ID NO: 18406 - DNA, 120 bp, synthetic construct
  source 1..120: mol_type = other DNA
ttgctctcccctttccctgaaccttggggcggaggcggtggggctcccccaggtccctggggatgaataacccagactcaaggtattgccccagctccttggacctgaagcagagataca

SEQ ID NO: 18407 - DNA, 120 bp, synthetic construct
  source 1..120: mol_type = other DNA
aaaagagactgaaactccatttcaaaaaaaaaaaaaaagcaacaaaagaaaagttttgcagcttgtaatgcagcaaataatgattcatgcattcactcatgtatttgttcactcactcat

SEQ ID NO: 18408 - DNA, 120 bp, synthetic construct
  source 1..120: mol_type = other DNA
gtgaagcttccaaagtgtggaaattgctgttgtcatccaccagaagagaaaagtcactgcccttggtgacataattgagactgcgtgtaacaatgtatgatatgatcaggtcatttcctg

SEQ ID NO: 18409 - DNA, 120 bp, synthetic construct
  source 1..120: mol_type = other DNA
ctctagggagtccttgaaaagcaactattagtcaaatgcagtggtaaggtcaagtcagaaaagtctgtttcatcagttagagcactagtatcctccctaagagcagcttcataagagtag

SEQ ID NO: 18410 - DNA, 120 bp, synthetic construct
  source 1..120: mol_type = other DNA
attggatgtaagaaatatttacacaataattaatatgcattgagcatttactacttctcagacatggtgcttatgcacgttatatggattagctcattaaacaccagacaggatcagcaa

SEQ ID NO: 18411 - DNA, 120 bp, synthetic construct
  source 1..120: mol_type = other DNA
tttattgactgttttagataacattcaacagataattcctaataaaaactcttaaaagtaggagaaaaaggaaacctgagtccttcctctgaagtggcaggaaaactagcctgggcaaca

SEQ ID NO: 18412 - DNA, 120 bp, synthetic construct
  source 1..120: mol_type = other DNA
cacaggcagggtgaaataagggcattttagatggacaaacacacagacaaaagcagaaatgcgggtggtgtgactggggtttggtgaggggctgctgtggctggaatggagggctggctg

SEQ ID NO: 18413 - DNA, 120 bp, synthetic construct
  source 1..120: mol_type = other DNA
ctggagacgagcttggcacaggtcacttgcacatgggccccagagcagtccatcttcaaggtccggataacatgagcaatgagccttctcacattgttgttggggataacggactgcagc

SEQ ID NO: 18414 - DNA, 120 bp, synthetic construct
  source 1..120: mol_type = other DNA
aaagtactttgggtggtggtgagggtcagaggaagaagtaaagattgtgagaaaggggaagaaacatgggcttggggagaacccagaattggggccagaagacctgacactaggctacag

SEQ ID NO: 18415 - DNA, 120 bp, synthetic construct
  source 1..120: mol_type = other DNA
gaaggaggacaaaagtgcccaactgaagggtaagcatggcagtgagtatggtatgcctagaataaagatggttgggattagaattgggtgacagtgattagtagtttcagaagtatctct

SEQ ID NO: 18416 - DNA, 120 bp, synthetic construct
  source 1..120: mol_type = other DNA
tgtacccagcaaaataattacaatggagagatctggaagatcaccttagtcaagtgatcaaacttagtattacaggccatctgcggttacgaggcaggaagaatacatcacctatgcagt

SEQ ID NO: 18417 - DNA, 120 bp, synthetic construct
  source 1..120: mol_type = other DNA
gctttccgtgtgtgtatgtctatacattttctggacaaaaccatttgagagtcagttgcagacataatgacccttcaccattgaagacttcagtgtgcagcccctaagaaccaaggcatt

SEQ ID NO: 18418 - DNA, 120 bp, synthetic construct
  source 1..120: mol_type = other DNA
tccatccatggttcgttgaatctatggatgaggaacctgcagatatggagggccagctgtagtgataggtgcaacaacatggatggtagcataatctcaaaaaaaattctgctgagtgag

SEQ ID NO: 18419 - DNA, 120 bp, synthetic construct
  source 1..120: mol_type = other DNA
taccattatcttctcattttcatattgcactcaccatcttatttactcttttctttatttttagaataatgaacaccttttcccctttgctttcttggttaaataatattcctccatgtg

SEQ ID NO: 18420 - DNA, 120 bp, synthetic construct
  source 1..120: mol_type = other DNA
actcatgtgtttaatctgtatgaagaaaaagggtttattttaaccttaggttttttaaaaattttcattttcgttcttcattctttttctttctctctctttttccttccttccttccct

SEQ ID NO: 18421 - DNA, 120 bp, synthetic construct
  source 1..120: mol_type = other DNA
caactgtattcggcaatgaataacagtttgggggaaaaaagcctaatcaaaaagcttaataggaaaagctgaggaataagatgtccacaggaatttgaaacacactgatatatgcttggg

SEQ ID NO: 18422 - DNA, 120 bp, synthetic construct
  source 1..120: mol_type = other DNA
aaaaaggagtcaaatagaaattctagagttgaaaagtatggtaactgaaatggaaaaattattagaggttctcaatggcacattacagcaggctgaagacagaatggggaacttgaaggt

SEQ ID NO: 18423 - DNA, 120 bp, synthetic construct
  source 1..120: mol_type = other DNA
agagacataaaaaggattataatatgaataaaaaggattatacatatatacaatatatgctaataattggataagctggatgaaagacacattaccagaaaaatatgaactactgaatct

SEQ ID NO: 18424 - DNA, 120 bp, synthetic construct
  source 1..120: mol_type = other DNA
aagtagtagatgcatgtccatagcagcattattcataaaagccaaaataaagtagaaacaaccacatgtccactaagtgatgaatggatgaactgatatagtgatggctccatacaatgg

SEQ ID NO: 18425 - DNA, 120 bp, synthetic construct
  source 1..120: mol_type = other DNA
actctccaaccttccctctttcttgatagctcatccatagccttgagctcagcattacctctgaactaggaagctcttctccagctgacattaggatctttgcatttgtccctaatgaaa

SEQ ID NO: 18426 - DNA, 120 bp, synthetic construct
  source 1..120: mol_type = other DNA
tctacacaggtccagatagatgggctatgtttcctttctattaactgaggagacagagatgaaaggactggagcatgtcatcactgtcttaaatgtactgaaattctaacagctctagct

SEQ ID NO: 18427 - DNA, 120 bp, synthetic construct
  source 1..120: mol_type = other DNA
caaagcaatttgaggaataaatgaaagagcacgtctagtgcctagcaatgcgctggacacagtgccggtgctcagccatcatgtcacaccagcactgaccggtgagcataaaccctgggg

SEQ ID NO: 18428 - DNA, 120 bp, synthetic construct
  source 1..120: mol_type = other DNA
aatattctaatagtgggataaataattcaatagggataaagcctggattttcctcttattcttagtgcttacattcttggcatgatatcgatgtgccatagacaagccaatatgtgagtg

SEQ ID NO: 18429 - DNA, 120 bp, synthetic construct
  source 1..120: mol_type = other DNA
aaaattactggcaccttcccttggcatcttgcctttggaaggaaatgcagtgggcctatatgtcacatatgccaaatatgactgcagtgtagctttgtttaccaggaagatttgactcca

SEQ ID NO: 18430 - DNA, 120 bp, synthetic construct
  source 1..120: mol_type = other DNA
aaaagaaaaacagacctttagtgtacttttcctaagttatgcatcagcaaattaatgaggacagaggggagcatgtgcagaaactgctgctctagtccagacacatcctgaatgcctccc

SEQ ID NO: 18431 - DNA, 120 bp, synthetic construct
  source 1..120: mol_type = other DNA
gagaaccactgctctctgatgattcactaagatctgtgtaataattctcacaataatccttgctagagacaaaaaggatttgctgtataattttagtagctttctactggtaaaatttta

SEQ ID NO: 18432 - DNA, 120 bp, synthetic construct
  source 1..120: mol_type = other DNA
tttcttctgagcataaactccctgaaagcatggactaggtcttgctcatctgcattgcccaccatgtttaaaactgacacatggaaataaagcaaactcaaatatttgtaaaataaatga

SEQ ID NO: 18433 - DNA, 120 bp, synthetic construct
  source 1..120: mol_type = other DNA
ttttggtgaaggtcagacagtaaatattttaggttttatgggccacatatgatctctcgcatatttctttgtttcttttctttttctttcacagtccctttaaaaatgcaaaacccattc

SEQ ID NO: 18434 - DNA, 120 bp, synthetic construct
  source 1..120: mol_type = other DNA
aatgtcagttactttgaatgtaagcattttttccaaaatcacttatgtgtctaaaccaattccttctataaatcagtaagaaaatgataaaacaattcaacaggaaaatgaacaaaggcc

SEQ ID NO: 18435 - DNA, 120 bp, synthetic construct
  source 1..120: mol_type = other DNA
tagattttgctagacctttctattttgtctccctgaattaagcttttccttttggacactttacatatggattctaaaacaatcctctgcatgtctacacttgcacataatgcaaaaaac

SEQ ID NO: 18436 - DNA, 120 bp, synthetic construct
  source 1..120: mol_type = other DNA
ttctacatatagaaagctagggacaaaaatgagttctggacaaaactaaaggactgaataatcatgtgaacagccaactctcctacatatgctaagcactgatgaagtgtttcatatatt

SEQ ID NO: 18437 - DNA, 120 bp, synthetic construct
  source 1..120: mol_type = other DNA
tcagtcaggcttcgatgcagagtctgaacccggtctggacgaggagctgtagtcttctccagggctgtagaatgtccagtctctgtagtgggttctggaatgatggcaagtcccaggtct

SEQ ID NO: 18438 - DNA, 120 bp, synthetic construct
  source 1..120: mol_type = other DNA
taggttccggagattgaaatgaagtctcctgttgaactgctaaaggtccagcttcttctgatgactctggaagcagaggtgggcccccgtgctggatggcgggaggttctacatcattac

SEQ ID NO: 18439 - DNA, 120 bp, synthetic construct
  source 1..120: mol_type = other DNA
agctctccagctgaatcccaggtgtccaggaatggaaccaaattttcagtcgattcctggggtggggctggcatctctgaggaagcagagggccccaggtgatcaaagtcccacgggtct

SEQ ID NO: 18440 - DNA, 120 bp, synthetic construct
  source 1..120: mol_type = other DNA
ggggctgccagggaataagcgaggactccaaattttctgtaggaggggtgttgggagttggcaattcggtctgggagagaaggttttaatccgagtgaagagccctttgcactagcctgg

SEQ ID NO: 18441 - DNA, 120 bp, synthetic construct
  source 1..120: mol_type = other DNA
acgtgaggagcttgagaaatgggtcactaggttatttcaccattgtgctaatatcatagcgtatacttacacaaacctaggtggtgtagccaccatacctagggtacacggtatggctta

SEQ ID NO: 18442 - DNA, 120 bp, synthetic construct
  source 1..120: mol_type = other DNA
attcttaaggccagttaccttctccccacatctctgggatcctgtttgaagggagttctaacaaggcctgtgttcgagcagcccagcatcccttactcctggagcggggggagactaacc

SEQ ID NO: 18443 - DNA, 120 bp, synthetic construct
  source 1..120: mol_type = other DNA
aaagcactggcattacaggtgtgagccactgtgcccggccctgttacctttgagtttttatctccacatacttatattaaaccgtgtagttcttcttcccatctgacatctacaatctct

SEQ ID NO: 18444 - DNA, 120 bp, synthetic construct
  source 1..120: mol_type = other DNA
caatttccttcaaggcaaactagaactataaggcttttggtctaagaagtgagtgtgtgcaagggatacctttgcatactagggaggggtagacaacccacacatttagcttggttatta

SEQ ID NO: 18445 - DNA, 120 bp, synthetic construct
  source 1..120: mol_type = other DNA
cagagttaggactcaaatccatgtgtccagggcttataatcactattctgtacgataggcatgcaattaaagaagacctgcctcaaacattttctgtgtgacctgaggcaagtcctttta

SEQ ID NO: 18446 - DNA, 120 bp, synthetic construct
  source 1..120: mol_type = other DNA
cttcggaagtggcaccatggtctcttcattttccctttcttcaaggtcagaaaactgaagctgttaggagttttagtgttaagttccttccgaggatgttaattaggcttcaaactgttt

SEQ ID NO: 18447 - DNA, 120 bp, synthetic construct
  source 1..120: mol_type = other DNA
atagtcaaatttattgtattagaaattaataagaatagtaaagttaattctttgttgatttgtttatgcaccttcctctgtcactggtttataagctccataagtgccagaggaaaacat

SEQ ID NO: 18448 - DNA, 120 bp, synthetic construct
  source 1..120: mol_type = other DNA
acgacttggtcacacccacacatcttaaattcacataaaggtaaatatatggtcaggcgtggtggcccacacctgtagtctcagcacctttggggaggcgaaggcgggggtggatcattt

SEQ ID NO: 18449 - DNA, 120 bp, synthetic construct
  source 1..120: mol_type = other DNA
ccacaaaaatcatctggtaaattgtttaaagtaatcccaaatgcaactcaaatctacagaatcccaggtgaagctcagtaatctgtatttttatccttctccccaaataattctgatgtg

SEQ ID NO: 18450 - DNA, 120 bp, synthetic construct
  source 1..120: mol_type = other DNA
caaaactacctgccgagggcagagatgcaggggtaaagtcatgccaagattgaaccccagaaaccactgtagatttttcagagttgactcctacgttttcagacttctagacttcaaaaa

SEQ ID NO: 18451 - DNA, 120 bp, synthetic construct
  source 1..120: mol_type = other DNA
ctggtataattttcctttggcctaaagaccttcttttacttttattttagagcagaacttccgccaacacattctcttagattttcttcatccaaaatgtctttcttctttttctttttg

SEQ ID NO: 18452 - DNA, 120 bp, synthetic construct
  source 1..120: mol_type = other DNA
tgtagatatacatctacatacatacacaatgtatgcatgtagatataatatacactgaaagtatagatacatatctacatacattgaaagtgtatatatatacacacatacacacacaca

SEQ ID NO: 18453 - DNA, 120 bp, synthetic construct
  source 1..120: mol_type = other DNA
atattgcatgtacccttataaatatgtacactctaccttaaggaaacagtgaaaaaaggtgtggaacaacgaccacaacaaaatcaaagaggaaaatctttgtgaacttgggtttgtcag

SEQ ID NO: 18454 - DNA, 120 bp, synthetic construct
  source 1..120: mol_type = other DNA
tctcaaaaaaaaaaaaaaaaaaaaaaaaacctgaaaatatcaagtgctagggaggatacagagcaaccggaactcttcatacatttgcaggtaagaatgcaaaatggtacagctactttg

SEQ ID NO: 18455 - DNA, 120 bp, synthetic construct
  source 1..120: mol_type = other DNA
gggatagcatactaagatgcctatcattataactaacatttgacattgttttggaggaggtggtagggaatgcaatttttttcttttttctttattacccaggttcccatcaatggtaaa

SEQ ID NO: 18456 - DNA, 120 bp, synthetic construct
  source 1..120: mol_type = other DNA
tctgagtgagcaggcaaaccttcttaggtgggatggaaaatacatttctattcttagcattattaattctaattcaggagggcacaaagaaaatgccactttccttgtgccctacggacg

SEQ ID NO: 18457 - DNA, 120 bp, synthetic construct
  source 1..120: mol_type = other DNA
ctttcagaatggacacataatccagacagaaaatcagcaaagaaatattcaaggtaaactgtcctctagaccaaatagacctaacaagacatttgctctccctctccctctccccatccc

SEQ ID NO: 18458 - DNA, 120 bp, synthetic construct
  source 1..120: mol_type = other DNA
catcatgaaaggaactgagacaagatcataaaaaagggggccaagttatagcgcgccatgggatttttaatctggctacctgtggtttctgtagttaaggctttattcatcccaaaacgg

SEQ ID NO: 18459 - DNA, 120 bp, synthetic construct
  source 1..120: mol_type = other DNA
cagaaaaatcacttgccaaaattcaacatcatttcataataaaaactcttaacaaattaagtatagaaaaaaagtctctccgtctacctctccccctccccctccccctctccccacggt

SEQ ID NO: 18460 - DNA, 120 bp, synthetic construct
  source 1..120: mol_type = other DNA
ttgcatgcacgaatattacatgtgtgccgcatgcactgcacacatattgcaagcatatatgacatgtataacactgcatattgcatgcatgtgtattgtatgcatattacacgcatacag

SEQ ID NO: 18461 - DNA, 120 bp, synthetic construct
  source 1..120: mol_type = other DNA
ataacacatgaatattacatgaaagttacctacatcttacatgcaaattgcgtgcattttatatattacctgtatattgcaggcatatggaatggaagcatattacatgcatgcacgcat

SEQ ID NO: 18462 - DNA, 120 bp, synthetic construct
  source 1..120: mol_type = other DNA
gtatattacatgcatattacatgcatgcataaatatattgcaggtatattgctctaacaacactaatcaaaagaaagctggagtcgtgatattaataccagacaaagcctattccagggc

SEQ ID NO: 18463 - DNA, 120 bp, synthetic construct
  source 1..120: mol_type = other DNA
agaataggatgtgggggaaaataggaaacacacggagagccaaacatgtaaaaaagaacacactcatggcacttccttgaaaggaaaagaacattccagtttcaacactccctgtcaagt

SEQ ID NO: 18464 - DNA, 120 bp, synthetic construct
  source 1..120: mol_type = other DNA
ccctcagtgggcttattcagtcctcggagcattctgggcatttagtaggcaatacaagaaacagcaacatctaaaaacaatttatctctcaagttttattgaaatttctcttttacaaaa

SEQ ID NO: 18465 - DNA, 120 bp, synthetic construct
  source 1..120: mol_type = other DNA
tctatttcttccgggccatccagagaatatccatcatggcagccaaatgtggctttatccttgtaataaagtgttggttttgcaggatagttcacaaatccattgtctggtcttgatggg

SEQ ID NO: 18466 - DNA, 120 bp, synthetic construct
  source 1..120: mol_type = other DNA
aaaagtaaaacataacaaaagaatagaggtatctgtaggagctctctgccctaattcagatgagtaccaccctataaatgctggtgaagtctacaggatttttgccagcatggcaaccac

SEQ ID NO: 18467 - DNA, 120 bp, synthetic construct
  source 1..120: mol_type = other DNA
gtcattcatctcccagggctggcttgataaacgttattatacttcttgatgggtaccttctggcgtatttaccgctttgtaactttgctgtttattgtggttccttggagcccaataaaa

SEQ ID NO: 18468 - DNA, 120 bp, synthetic construct
  source 1..120: mol_type = other DNA
tctccagatcagcggctttgcctctaggatgggaggctgtggatgatctctcctttatgtgtctttcattatatttcctaaatactgaaatggtcttgtagacattgaaagacataaagc

SEQ ID NO: 18469 - DNA, 120 bp, synthetic construct
  source 1..120: mol_type = other DNA
gccattgcccatcaagctcatggtgatgagtaaggttagatcattgatagtaggaagaatctcttccacattaggaatgcagtaccttcttgaatctactgcttttcctttctccaagga

SEQ ID NO: 18470 - DNA, 120 bp, synthetic construct
  source 1..120: mol_type = other DNA
gagagtaaatctgaatttgtagaaaatgaccttaccaggaggtagatgtggtgcagtcttgggcaaacttctgctcacatagggttggctgatggggagtttcccatcttcccctgtgtt

SEQ ID NO: 18471 - DNA, 120 bp, synthetic construct
  source 1..120: mol_type = other DNA
ttggaaaaaggcagaattttttaaatgtatggattaaatggaagagaaagatggtctctatctcttcataggtacaggtgttggggagacgtgaatagggtctgtgcttgggggctacac

SEQ ID NO: 18472 - DNA, 120 bp, synthetic construct
  source 1..120: mol_type = other DNA
cagcatgaaggcattagaagtgaggatgcacaacggatacataaattgcgtaacacaccttttcccttcttttctcttcccttcccttcttttcccttctccctttttctcctcctctcc

SEQ ID NO: 18473 - DNA, 120 bp, synthetic construct
  source 1..120: mol_type = other DNA
cacacgacccaaaacagcaaagagaaagggccaggtgttggcctttttctaactcatcccttttaacacagtaagttcagcagtcctctaagagtcccacttcaaagtacccctcttgcc

SEQ ID NO: 18474 - DNA, 120 bp, synthetic construct
  source 1..120: mol_type = other DNA
ttttagctgtcaattacttctctctaccccccacattccccactcctgttcctaacaagcactgatctgcttttgcactaaagtcttgcctttcttaaagtttcctatagatgcagtcat

SEQ ID NO: 18475 - DNA, 120 bp, synthetic construct
  source 1..120: mol_type = other DNA
ataccacagtctgtttattcatttaccagttgatggacatttgggttacttccagttttggatgattttgagtaaagttgcaatgaacattcacatacaagtccttgtgtggacctacgt

SEQ ID NO: 18476 - DNA, 120 bp, synthetic construct
  source 1..120: mol_type = other DNA
tccagggttggaaagtggggttcccgtctccccattgacattgagaatgactaggttagatggtatattcctagtggaagcaaaagtcttagttacagaaagcattatttgagcaaacct

SEQ ID NO: 18477 - DNA, 120 bp, synthetic construct
  source 1..120: mol_type = other DNA
tttaaaaaacacacacttttctaactcttggcctatatccctgctttttgactcaaatttagccagaccctttccaacctctttactcctcctgttcaggtgaactgccaaaaatcagca

SEQ ID NO: 18478 - DNA, 120 bp, synthetic construct
  source 1..120: mol_type = other DNA
gtacagtggttccagtttccctgcattcttgctcacacgtggctattttccataatttggattctggccattctagtgggtgtgaagtagtacttcatttcggttttgatttgcatttcc

SEQ ID NO: 18479 - DNA, 120 bp, synthetic construct
  source 1..120: mol_type = other DNA
caatgacctgggttggatgttgttttattcaggagagtagtttattcagacaagaccataggaagaaagaaaagaaaaaaagaaaatcatttatcccacgtgaaagcttttaaaaccact

SEQ ID NO: 18480 - DNA, 120 bp, synthetic construct
  source 1..120: mol_type = other DNA
cagagttccagttaatgtcaccagcactgccttgttaaggtatgagaccaaaactaccttgagatgttggggcccagagcaagaaaagtcatggaggcatgggtggctagatggaggcat

SEQ ID NO: 18481 - DNA, 120 bp, synthetic construct
  source 1..120: mol_type = other DNA
gaggaggaggtgtcatgttcaaagggacattttcagaagattaatcagcaagatgatataggatggactggtattggttgaaagagactggaaagtcagaccaaatgtaagagtaacggc

SEQ ID NO: 18482 - DNA, 120 bp, synthetic construct
  source 1..120: mol_type = other DNA
aacttgggcaaaggcgccaccagctccagaggttttgactggaaaagcgacaccctaaggattctgtgacaacctttcagtgcttagcttttgtgtgcatttatgtgataattcgtgaat

SEQ ID NO: 18483 - DNA, 120 bp, synthetic construct
  source 1..120: mol_type = other DNA
ctgcagcaaacaaaacagtgatttaatgacttacaggtgggtaggggtgaatgggatggacagtttattcccttaaacaactaccttctcatcacagtgattcctctctctcttttctct

SEQ ID NO: 18484 - DNA, 120 bp, synthetic construct
  source 1..120: mol_type = other DNA
tttccccctaaatgagaacttcacttttagcaaattaagtactgcaggaggaatttgaggtgggagggaatgcttttgaaagcagaagcatgttgatttggggtggagagttctgtagat

SEQ ID NO: 18485 - DNA, 120 bp, synthetic construct
  source 1..120: mol_type = other DNA
ataatttattgtatacttgaaacttgctaagtgggtaaatctaaaatattctcagcacaaataaatgttaagtatgtgatgtgaaaaaaaaaagaaaaaagaaagcagaaacatgagcag

SEQ ID NO: 18486 - DNA, 120 bp, synthetic construct
  source 1..120: mol_type = other DNA
tattgggaagtcatgcagcacctttttatcttggacatgtataacatatgtaggtctactgagatcttctatttgctctgataaagtgcttattatttctgaacaggctttctttcttgg

SEQ ID NO: 18487 - DNA, 120 bp, synthetic construct
  source 1..120: mol_type = other DNA
caaatggtaggagaaggtatcagtaaagatgactctcactgcgtctattgaatagttcaaatccaattcatccatgcttttttcatcaggccaccccatgattgttcttcctgccatgtg

SEQ ID NO: 18488 - DNA, 120 bp, synthetic construct
  source 1..120: mol_type = other DNA
ccaagcatgccctcctacctcttgttccacttcctttagatgaatcccttttattttagcaaacaggctgaggttttccttcacggtgagtatgtcaaattgaacattgaattgaggaca

SEQ ID NO: 18489 - DNA, 120 bp, synthetic construct
  source 1..120: mol_type = other DNA
tcctggatgaagcctaggtgcctgaatgattgtgtggagaagatttcttcacccacccaacctactttacttccactctcaactttcattagaccatgaggagttaaaaataagcatttg

SEQ ID NO: 18490 - DNA, 120 bp, synthetic construct
  source 1..120: mol_type = other DNA
tcctgatcatacacgagacttctctcttatcaccatgtttgagagtcctctcctggctttacattacttctcaattaaaatttagcctcaggctcagttttcagccaaattctgcccttc

SEQ ID NO: 18491 - DNA, 120 bp, synthetic construct
  source 1..120: mol_type = other DNA
atgtagtgagctggtaagcacagctgattgtgggcaagacaggtggttttgaacttcttcccagctggactatgagaaactcactgacccccacaaaaaaaacttttcatggtctctttt

SEQ ID NO: 18492 - DNA, 120 bp, synthetic construct
  source 1..120: mol_type = other DNA
ggctgtaaatattctttttcagttggtgcattcttcacactggtttatctccccacctgctctcccagattattttatcttagccagatgcatgtttgagttacctcttgggtgatgtct

SEQ ID NO: 18493 - DNA, 120 bp, synthetic construct
  source 1..120: mol_type = other DNA
taaaatctatgcaggatgtgctacatgggccacgtgtagcccagggcaggagaagattccactggagaccaagaaaacttcatagaaagataactaaaatatttattatgggccaaggct

SEQ ID NO: 18494 - DNA, 120 bp, synthetic construct
  source 1..120: mol_type = other DNA
aaagttgggcacagtttatgagtctgtcatttcctccagttcctctcctggggattgtcaatcaaatcaaaggatggtaggtgcaggcaggtgggggcacaggtggggacaacctaagtt

SEQ ID NO: 18495 - DNA, 120 bp, synthetic construct
  source 1..120: mol_type = other DNA
caatcagttcacgatgcttgattgaaacctaccaattacttttccccccatttgctcatgagaggtaatcaaggtggaagaaaaatctgaagctaggagagacagagaaattgcaggcaa

SEQ ID NO: 18496 - DNA, 120 bp, synthetic construct
  source 1..120: mol_type = other DNA
actccagacctgtctcaaaaaaaggaaaagaaaagaaaagaacttggtattgcagagaggagacaagtaaatgcaagggaaaaattgggagaggggactgcctctcacctcttaaaacag

SEQ ID NO: 18497 - DNA, 120 bp, synthetic construct
  source 1..120: mol_type = other DNA
gtaagtttcttttctgtaggatttccagagcctctaaatgttaagtgggtattattactctaccaaaagagaatatgatatatgtcatttcccaaacttattcttccacaaagccttttt

SEQ ID NO: 18498 - DNA, 120 bp, synthetic construct
  source 1..120: mol_type = other DNA
gccaggaccctgatcctggaagtctatggttaggtccttggacttggctctgacacaatctgatttgcacttttacagtcactgactgctgggtggagaccttactgcaagagggaaaga

SEQ ID NO: 18499 - DNA, 120 bp, synthetic construct
  source 1..120: mol_type = other DNA
agttaggtattactgttattcctatttctcatatggggaaacagaggctggagaggttaaataattgaacaaggtcacagaattagtaagcagcagagccaagattcaggcccagccagt

SEQ ID NO: 18500 - DNA, 120 bp, synthetic construct
  source 1..120: mol_type = other DNA
tgattaaatttccatgacagtaacttgtttatatccacaaagaccccatttccgagccctaaaaagacctgtgaaggtcacattcacaggttctgtgcagacaggaatttgcagggtgag

SEQ ID NO: 18501 - DNA, 120 bp, synthetic construct
  source 1..120: mol_type = other DNA
gcccatctcagtgtggtccaacacccctcacattccaattccataaaatatctccaagaaaacatatcaggcttccctacctctcaggcagtaagatggaaaaaaaaaaaaaggtagcag

SEQ ID NO: 18502 - DNA, 120 bp, synthetic construct
  source 1..120: mol_type = other DNA
ctgtccttgcagaaggctccggggtcccgaacctcggcctcactgttggtcttacttgtttttgagcctctgcctcctacacctccatatatatatatatattttttttttttttttttt

SEQ ID NO: 18503 - DNA, 120 bp, synthetic construct
  source 1..120: mol_type = other DNA
acactgtgacaaccaaaatgtctccagacatgtccaatgtcccctgtggccaaagaagtccccagttgagaagcactgtactaatggtttttcctgagtacattttcttcttccttccct

SEQ ID NO: 18504 - DNA, 120 bp, synthetic construct
  source 1..120: mol_type = other DNA
ctggccttatttaatcatcacgatgaggagcagatggaaatcattgtcctatgctattacagaaaaggaaactgaggttcaggaaggttaaggagcttgcacatggacctactaagagct

SEQ ID NO: 18505 - DNA, 120 bp, synthetic construct
  source 1..120: mol_type = other DNA
gggattggttccaggaccgcccgcagataccaaaagccacagctgctcaagtacctgatataaaaaggtgtagtatttgcatgtaacctacacacctcctcttatatatctttttttttt

SEQ ID NO: 18506 - DNA, 120 bp, synthetic construct
  source 1..120: mol_type = other DNA
cctgggctctgaggtctgtgttccaggatgggaggactgagaagtcctgacctttagctcagttggaaggagagcaaatgtactactactactattattactgctatttttttttttttt

SEQ ID NO: 18507 - DNA, 120 bp, synthetic construct
  source 1..120: mol_type = other DNA
atcgccttgctcatcttttcttttttcttctattcgattttaagtgtgagaataattatgccagaaggtgttaccaaggtgggacaaaatcatctggttgatgacgttgccagggcacag

SEQ ID NO: 18508 - DNA, 120 bp, synthetic construct
  source 1..120: mol_type = other DNA
tgtctatcctccctccattctcctccatcctccatccatcctccctccatctcctccatcctccatccatcctccctctgtcctcctccatctccatcccctgtcctgtcatttctccag

SEQ ID NO: 18509 - DNA, 120 bp, synthetic construct
  source 1..120: mol_type = other DNA
aagaggtactggagaggaaaatgaggtcaaagcaggctccttggaaaaccagagcacaagcatggtctcggtgttcagtcactgagaatgacaaagaaatatcaaagttcaggtcgggca

SEQ ID NO: 18510 - DNA, 120 bp, synthetic construct
  source 1..120: mol_type = other DNA
ggcatttgggggttggaaaattgctcaggagccagctaatttataatgtcatatgggctagactggaagacccaagagagtaggctgtctcttttggctttttatctctcctttttttaa

SEQ ID NO: 18511 - DNA, 120 bp, synthetic construct
  source 1..120: mol_type = other DNA
gaggggaggggaagggagaggagggaagaaggaaggaagcaagaagtggaatcaaaaaacctagattttacctccagaagtctttccagaacagtacaaatagaacacaaacagtaatta

SEQ ID NO: 18512 - DNA, 120 bp, synthetic construct
  source 1..120: mol_type = other DNA
ggagggaatgctacatggagaggccaagaagaatctaacagacgggccttctgagttcccttgttcagtccattggtatgaaatcaaaccttttttgtctaatcgtatttctgtacagtt

SEQ ID NO: 18513 - DNA, 120 bp, synthetic construct
  source 1..120: mol_type = other DNA
cacttcaagtcacacaggtagataaaaacaggtccttttaggggccaaaggagaggttatcacagcagcagtttggttctcagcagaaatgcccagggcccctgttccacatcaaagcta

SEQ ID NO: 18514 - DNA, 120 bp, synthetic construct
  source 1..120: mol_type = other DNA
tttaaattatgtagaaagatactgtacattttaagtctcagtctacttcttatagcatcctagttcctgttttggggcctcccagagtaagcctggcccttctcactgcttgtagccatt

SEQ ID NO: 18515 - DNA, 120 bp, synthetic construct
  source 1..120: mol_type = other DNA
cgaagaacagatttgaggaaaagtaatgtattttgatcgttttgatttggacacaatcgcaacaacagtgctctccatttttggagaggcagcttgcccagaggtgagtggtgccgactg

SEQ ID NO: 18516 - DNA, 120 bp, synthetic construct
  source 1..120: mol_type = other DNA
caacaccttttggctcaactcctttatacccacaccaagcccgatgcctcaaagagagcaaggacatcgccccgggggtcctgagagggagacgtcttgtttctttggcttcagtacttc

SEQ ID NO: 18517 - DNA, 120 bp, synthetic construct
  source 1..120: mol_type = other DNA
gctgataatggtaaaaagtatcatttatacacaaggccattttgtttactttgggacccaaaacttagggaaccctgaattctgtttctcctgtagcctaggcaggtcagccttagacga

SEQ ID NO: 18518 - DNA, 120 bp, synthetic construct
  source 1..120: mol_type = other DNA
gcaaaatcgcacatggagtcccccaaccacacactcactcacgcacgccacaccagatatcattttaattgttactgttctctaccatataatggtttctcatagccttagtcattcatt

SEQ ID NO: 18519 - DNA, 120 bp, synthetic construct
  source 1..120: mol_type = other DNA
gatctcaggcaagtctactggcccatgggagctccggatctttttctctaaaatgtgaataatgtctgtcttgtgacataaactgggtaaaaaagtgtttcacaaactgcaaagcacgat

SEQ ID NO: 18520 - DNA, 120 bp, synthetic construct
  source 1..120: mol_type = other DNA
ctccgtacctttctgtcaggtagctgatgaagtccggatgtagcagcttgaatttactggcagaggcttctggtccaaaataggcgtgcggcctaggacccatgatagaagtggacagag

SEQ ID NO: 18521 - DNA, 120 bp, synthetic construct
  source 1..120: mol_type = other DNA
tgtcacaaagcccagctcagaccagcagtggaagcaattgttgggtaatcaccaagcgggggtggggtgggcctggctttagaacccttaacccataaggaccacctgtaaagctgctct

SEQ ID NO: 18522 - DNA, 120 bp, synthetic construct
  source 1..120: mol_type = other DNA
acccccatacctccagcagttaagatttggtttcatgttcaagatgtagtgaaacagatcaatcttggagaagttatgagggggaaggactttactacttcttaccatcattgtccttcc

SEQ ID NO: 18523 - DNA, 120 bp, synthetic construct
  source 1..120: mol_type = other DNA
tcacaccctaaacctaaaaggtttaggataaataaagatgtgaattaaaaaaaaaaaaaaaagacatagaacagtcaccacaagggtccctcatgttgtccttttatagccacagccact

SEQ ID NO: 18524 - DNA, 120 bp, synthetic construct
  source 1..120: mol_type = other DNA
gagtgaacacagatcatgtcatgtggttttgacagccatggtgactgcatattttttaacagggtggatgtatggctttgtactctgctgcagagtaagaggcatcaaaatgaaagaaag

SEQ ID NO: 18525 - DNA, 120 bp, synthetic construct
  source 1..120: mol_type = other DNA
aaaggggtcggctgaccaccctgacggagctggtgagcacaggtgagctctacctcatttgtctctcattcctcaaagtcttctgtggtttggcttcagtgagggcaaaagaggggagac

SEQ ID NO: 18526 - DNA, 120 bp, synthetic construct
  source 1..120: mol_type = other DNA
tgctgtgatcacctgcctttggaccacatttgtgtttgctcttagagatcgagctcctcagtggtacctgaagcctttgcttccggaaagcgcggtagggttcgtaggtagggctagtag

SEQ ID NO: 18527 - DNA, 120 bp, synthetic construct
  source 1..120: mol_type = other DNA
gttctttttaagttgattcgggagtggcattcttttatacccaaagactgtagtgcatcttgaagagctcaaagcacatgaccgcacaaatgcttacagggtttcctcccgagtaatcca

SEQ ID NO: 18528 - DNA, 120 bp, synthetic construct
  source 1..120: mol_type = other DNA
ccagagaagctcaggcttagtagagatgggtaccctgtcaatactagttccgcgaaggatacactgtgctcattctgctgccagttgctgagtctggtgtcctgtagttatggaacatgt

SEQ ID NO: 18529 - DNA, 120 bp, synthetic construct
  source 1..120: mol_type = other DNA
taccttactctattgaattacctgacacctttgctaaaaatcattgactgtatatgtggccctatattagtatatgtacgtatatacatgtaggccctgtgttgactgtatgtgtggtcc

SEQ ID NO: 18530 - DNA, 120 bp, synthetic construct
  source 1..120: mol_type = other DNA
atgttgactgtatatgtggtcctatattagtatatgtactgtatacatgtaggtcctatgttgactgtatatgtggtcctatattagtatatgtactgtatacatgtaggccctgtgttg

SEQ ID NO: 18531 - DNA, 120 bp, synthetic construct
  source 1..120: mol_type = other DNA
actttttctttttattttgattcatcccagaaacccagccaaaaaccaagttcctgtgctctcccttgacaaagccactgaggaaaaatggtcaaacactgcctttctttccaaagccct

SEQ ID NO: 18532 - DNA, 120 bp, synthetic construct
  source 1..120: mol_type = other DNA
ccaacaggttgtggttgttcgagaatttgcagcagtggtgatggtggttgtggtgatgaggatgatgggggtggtaatgacggtgatgatgatggggtgatggtgctagtggagatgatg

SEQ ID NO: 18533 - DNA, 120 bp, synthetic construct
  source 1..120: mol_type = other DNA
gattgtgatgggggtgatgatggtaatgtgggtgatggtgattgtggtggtggtggtgatggtgatgattgtgatggtggtgaagggggtgatggtggtgattgtgatggtggtgattgt

SEQ ID NO: 18534 - DNA, 120 bp, synthetic construct
  source 1..120: mol_type = other DNA
aaaaaaaagattaagcaaaaccactgggaacgttcacacttggactgtgttgccttggccccccagataattgctgactttttgcaaattccttgagttttcccgtcatgctttttggct

SEQ ID NO: 18535 - DNA, 120 bp, synthetic construct
  source 1..120: mol_type = other DNA
gcattcttagaggcagtccatccaatatgctggcttacaggctttggaccttctctataccaatgactttatttcactttagaacccagtccttgtgactctaaatctcaagcatactct

SEQ ID NO: 18536 - DNA, 120 bp, synthetic construct
  source 1..120: mol_type = other DNA
tcatagctgaacaggaaaggaattcgtttacagataatctcctagtgtgaattaagaggctggttcttggttaagaaccagttaatggtaaaggcaagacttgagggagtccaggtctct

SEQ ID NO: 18537 - DNA, 120 bp, synthetic construct
  source 1..120: mol_type = other DNA
aagtgccttgtctccaacttggtgggtgcccagtgggcaaggaggtcctcctgggcagagaggagcgaagggagtgggcacaggggcgaagggagtgggcacaggggcgaagggagtggg

SEQ ID NO: 18538 - DNA, 120 bp, synthetic construct
  source 1..120: mol_type = other DNA
gattggaaaccacccctccctggcacaggattgcaggacaatgaaacaaaaaaacccaacagcccaccttggtttacaattctgatgatttgttcatcatgaattttttagcgctaattt

SEQ ID NO: 18539 - DNA, 120 bp, synthetic construct
  source 1..120: mol_type = other DNA
aacttatgtgttgttggagaaggagaaaatgggaatgtaaggggccaaacccaatctctgactcagagtaagcagtcagtaaatgagaggaaatattattaccatcaccaccaccatcgc

SEQ ID NO: 18540 - DNA, 120 bp, synthetic construct
  source 1..120: mol_type = other DNA
tttactagattacgaactttaaaagggaaggctaaacaaaccacttctgcatgttcatctgcctaggacatctgctaccacaattgcaaaaggtgcccatgtggaacggaaaatacatgg

SEQ ID NO: 18541 - DNA, 120 bp, synthetic construct
  source 1..120: mol_type = other DNA
aaacggattatgtcaccttcccagtgttagagagacccagtggtgacaaacgtcctctgtacctagggtcaccgtaaggctcgggtctcatcgggtttctgtacatgctctagacgtgca

SEQ ID NO: 18542 - DNA, 120 bp, synthetic construct
  source 1..120: mol_type = other DNA
ctagtgacaagagaactctgtgtaccttccagaaaattcctttaacttcagcaccagaacaccttcccttgggcttcatctctccttcaggaccccaaggaattattttattttgcaaaa

SEQ ID NO: 18543 - DNA, 120 bp, synthetic construct
  source 1..120: mol_type = other DNA
agggagaggggagttagggagagggaggttagggaggggagttagggagaggagagttagggagaggggagctagggagaggacagttagggagaggagttagggaggggggagttaggg

SEQ ID NO: 18544 - DNA, 120 bp, synthetic construct
  source 1..120: mol_type = other DNA
aagggagttagggagaggggagttagggagaagggagttagggaggggggagttagggaggtgagagttaaagagcgaggagttagggagcggggagttagggaaactgtgcttttctct

SEQ ID NO: 18545 - DNA, 120 bp, synthetic construct
  source 1..120: mol_type = other DNA
tcacagtcatgtccaggtaatacgtacagcccacactgcatccacacgcatatacactgtgcatgctcactcctgagcacacacaaccaaaacacacattacacctgtatggtgatgcaa

SEQ ID NO: 18546 - DNA, 120 bp, synthetic construct
  source 1..120: mol_type = other DNA
gaggaagagcttgctatggatgcctgcatgccaggtgactatgtctccaggtccacctgtcatccagatgacctgcccagccgcatcttggccctgctggctgcacttcctgctgtgact

SEQ ID NO: 18547 - DNA, 120 bp, synthetic construct
  source 1..120: mol_type = other DNA
ggtgtcagcgacctcttagtcacccttgactccagggtcactggatcttctgtttccttttgcttcccctgaatttgttggtctagttccttgtgaagtcccatccgcttattagctaca

SEQ ID NO: 18548 - DNA, 120 bp, synthetic construct
  source 1..120: mol_type = other DNA
catccacaatgtactctcacactcagacacgcacacatgcactcacacacactgacacaatgcatatcacatacgccacatgcacacaatgcagtcacacacgcatactgacacatgtcc

SEQ ID NO: 18549 - DNA, 120 bp, synthetic construct
  source 1..120: mol_type = other DNA
tcccaaaatatgctacctgcatgcgagcacttctctcggggcctggattttgggggctcccaagctaaggcagtttgttcctaagatgcctagaaagtggcccctcgggataggattctg

SEQ ID NO: 18550 - DNA, 120 bp, synthetic construct
  source 1..120: mol_type = other DNA
tgtggatgagcctgagaactttgcacccctaaattccctgaacgctctgggctggtggaagtggccccttccatctttgctaagagaaagcagacttttctcacctggagaaccagcaaa

SEQ ID NO: 18551 - DNA, 120 bp, synthetic construct
  source 1..120: mol_type = other DNA
cagctccagccatcctgtttctttgtgctttgttggatccatcgcctagaactctatgactgcttcaaaaccaactaatttccctttgtttgagacatcgtatcatttgcctgtttcagt

SEQ ID NO: 18552 - DNA, 120 bp, synthetic construct
  source 1..120: mol_type = other DNA
gcctttaagcagaaagagcgccacttgtaagctgcccaaaaacgaaacaaaacaaacactagccaggagcaaaagtaaagcttcattccaatgtttaaaaaactctgaaagaggctggga

SEQ ID NO: 18553 - DNA, 120 bp, synthetic construct
  source 1..120: mol_type = other DNA
atggtgagaagcgtgtctctgctgtgtcacgacactgagatggggagctggctgtccccgcagaaagcattgttcaattcataccaaaaccaggatcagaggatcgaggctcctaagcag

SEQ ID NO: 18554 - DNA, 120 bp, synthetic construct
  source 1..120: mol_type = other DNA
ttagtgaggcaggtgaaatcaagggtctcactgaatcaaaacagatggccgtagagaaaggcagaccaacaggtcaggagcccgggccccgccttgaccttggaaatcctcctcaggtcc

SEQ ID NO: 18555 - DNA, 120 bp, synthetic construct
  source 1..120: mol_type = other DNA
gaagttagggatcctgctcagtgtcctacagcccaaaacatcactagtgctgaggttgagaagtcctgatataaagtaaaattggtttctggagagaaagaagcaagacgtaaagatgaa

SEQ ID NO: 18556 - DNA, 120 bp, synthetic construct
  source 1..120: mol_type = other DNA
tgccattgccactgccactgccatcaccactgccacctccaccgccactgccacctccaccgccatcaccactgccacctctaccgccatcaccactgccactgccacctccaccaccat

SEQ ID NO: 18557 - DNA, 120 bp, synthetic construct
  source 1..120: mol_type = other DNA
cagatatccgcttagacgaaactctgtgtgtgtgcagtgtcgtggggtgtcatgcagtatgacatgttacctatgcatttaggttttaaactacccccttttcagtgcctaatatgtgtc

SEQ ID NO: 18558 - DNA, 120 bp, synthetic construct
  source 1..120: mol_type = other DNA
cagggaacacccacccggatacgtgttaccatcggatacagccccatggccaggggacacccacccggatacatgttaccatcgggtacagccccatagccaggggacgcacacctggat

SEQ ID NO: 18559 - DNA, 120 bp, synthetic construct
  source 1..120: mol_type = other DNA
acaccaggatgcatgtcatcatcaaacatggccccgtggccaagtggtacacatctgaatacattcaccattgggcatggctgtgccatggccaggtggcacatacctggaagcattcac

SEQ ID NO: 18560 - DNA, 120 bp, synthetic construct
  source 1..120: mol_type = other DNA
tccccagcaggctgggctcctaggaggtggggaccacgtcctgctcagttctggatgtctagcacctaacacagggtctcacacatggaaggttttcaatatacatttgtgggaaaaatt

SEQ ID NO: 18561 - DNA, 120 bp, synthetic construct
  source 1..120: mol_type = other DNA
atgatagtcatgatggtggtgatggtggtgatagtggtggcaatggtgatgatggcagtgatggtgattatgatagtagtggtggtggtgatggcgatggtaatggtgataatggcagtg

SEQ ID NO: 18562 - DNA, 120 bp, synthetic construct
  source 1..120: mol_type = other DNA
agtgaggccaaaaatgctgcaatgaagttaatctattaggtaattattgtaatgccagttccacgtccccggccctggcctagctgtcatttaactcgttgaaaaggatgtttctcatta

SEQ ID NO: 18563 - DNA, 120 bp, synthetic construct
  source 1..120: mol_type = other DNA
ttttccttggatactcaggaagattctgtcttgcagaccatctccacaaaacgtggccctgggacctgctcggggcagggcagaggggtcggcaatgctgaggcaaggctgtggagagga

SEQ ID NO: 18564 - DNA, 120 bp, synthetic construct
  source 1..120: mol_type = other DNA
accccattagaccaagacaaaaacccaatcccattcttattgcttccatcactctgggcatagacgactgttcagcggtgctcagtgaattaaaccattgccagaggctgagagacgact

SEQ ID NO: 18565 - DNA, 120 bp, synthetic construct
  source 1..120: mol_type = other DNA
tttcaatgtaaaggcaaaaagaggaagaaagaaacctcccgaataacagtctggggttgagaattgcatataacctacttacttctgcgaccatcccttccatttcacgaggtattccat

SEQ ID NO: 18566 - DNA, 120 bp, synthetic construct
  source 1..120: mol_type = other DNA
catgctgacagcggacggatagcatcaaaagcctttctcgctcaggggtcactgaacagttaaaggcctcacctggcagcaaccttcccattccacagagctcactctcagctcatcagc

SEQ ID NO: 18567 - DNA, 120 bp, synthetic construct
  source 1..120: mol_type = other DNA
gcattgagccatgattgcaccactgcaccccaccctgggtgacagattatcctatatttattagacatttgtgttcacttgtgaattatctgttggtgtgctttgacaatttttctgctg

SEQ ID NO: 18568 - DNA, 120 bp, synthetic construct
  source 1..120: mol_type = other DNA
acaccatagacacacataccacacaccacacaccataccacacacaacacacaccacagacacacacaccatacaccatagacacacataccacacacaccatagacacacacactacac

SEQ ID NO: 18569 - DNA, 120 bp, synthetic construct
  source 1..120: mol_type = other DNA
acaccatagacacacacataccatgacacacacgcaccccatgacacacaccacacacagccaccctctgctctaccagctttgcctctgttctccgacagcgccagtgttgacacgcca

SEQ ID NO: 18570 - DNA, 120 bp, synthetic construct
  source 1..120: mol_type = other DNA
attgaggcctataagaaatccatcatgaaggaggaagaaaagaacgagaagctggcgagcatcctgaaccggacagagacggaagccacactgctgcagaagctcaccacccagtgcctg

SEQ ID NO: 18571 - DNA, 120 bp, synthetic construct
  source 1..120: mol_type = other DNA
tttccagagcacatcctagcagtggggcctgcccaacagtccccattttagtctcagaggagggtgacagattcccgatgccaagctctgccggttttgccctcctgaggggtgggaaag

SEQ ID NO: 18572 - DNA, 120 bp, synthetic construct
  source 1..120: mol_type = other DNA
cccacccacttagcaggtggggctctgggtcacttggcctgagctggctctgctgcagcagcctgaggaccagcctgactctgccctcccagaaatcctgcagtttaacctgctgggggt

SEQ ID NO: 18573 - DNA, 120 bp, synthetic construct
  source 1..120: mol_type = other DNA
cgccactgtactccagcctgtgtgactccatctcaaaaaaaaaaaaccaagctgtgaaagactccacaggaaaagataagtgaatgtgtatctctggggaaaggtttcatttagagaaaa

SEQ ID NO: 18574 - DNA, 120 bp, synthetic construct
  source 1..120: mol_type = other DNA
ttaggagaaggatgttgacctgggaggggtcaaataaggagaacccacatcttagatgctcaggattttatgatcttaggctcttctagaattgctgtacagttagattcagagtttgga

SEQ ID NO: 18575 - DNA, 120 bp, synthetic construct
  source 1..120: mol_type = other DNA
atatttgtagggccgcctacgtcccactgcccagctgcggcagtgacatgggatagtcggcctctgtcatcctcctttgtccttctcagctggtcctggactcaggcgggatagttggtc

SEQ ID NO: 18576 - DNA, 120 bp, synthetic construct
  source 1..120: mol_type = other DNA
ttttaaactataaattggtgaggatacttaacagatgtgaggaggagaaatggatgggagatttatagtaaagctgtcaacgtacacgggtggaaacattcccacggagtaacagaggcg

SEQ ID NO: 18577 - DNA, 120 bp, synthetic construct
  source 1..120: mol_type = other DNA
gagagatgaaactggaaataattcagtccaaacagtcttccaagggacccttgctgctacgaaaaggtggctccgagaagtttttacaaagaacatgctcacatcttcaggtgcctcatt

SEQ ID NO: 18578 - DNA, 120 bp, synthetic construct
  source 1..120: mol_type = other DNA
gatggtggtggtggaggtgatggtggaggtactggaggtgatggtggtggtgaaggtgttggtggaggtactggaggtgatggtggtcgtgtaggtgatggtggaggtgatggtggtggt

SEQ ID NO: 18579 - DNA, 120 bp, synthetic construct
  source 1..120: mol_type = other DNA
ggtaatggaggtgatggtggtggtggtggtggaggtaatggaggtgatggtggtggtggtgatggtggaggtactagaggtgatggcggtcgtggaggtgatggtggaggtaatggaggt

SEQ ID NO: 18580 - DNA, 120 bp, synthetic construct
  source 1..120: mol_type = other DNA
ggttatggagataatggtggtggtggaggtgatagatatttgaacatgcctgacctaagaaaagttcattttcatttttggctgggcactatggctgatgcctgtaaccccaactcttta

SEQ ID NO: 18581 - DNA, 120 bp, synthetic construct
  source 1..120: mol_type = other DNA
cctgctgtttgaagaatggtaacagcaaaaccaggacccagcagtatattcactgccatggttatttttctgtcacccatgagactaaccttgattatcttggatgtggccgtgtattga

SEQ ID NO: 18582 - DNA, 120 bp, synthetic construct
  source 1..120: mol_type = other DNA
ggggacttacagacaccttcctcgtgaccagagattttctgattctactttttctctagttatccttcgtttctctccttgtcacgccttctgaagggattttaggagatcagaaatatt

SEQ ID NO: 18583 - DNA, 120 bp, synthetic construct
  source 1..120: mol_type = other DNA
caggcaagtcttctctgccttgctttcctttgggtttaaagactccgttatttagaaattcaggaagtatgggaaactagttcttcgaatagactactactgggcttttctacatcccct

SEQ ID NO: 18584 - DNA, 120 bp, synthetic construct
  source 1..120: mol_type = other DNA
ggcatgcaggtatgcgcacatgcgtgcacacagtgtctttaatggttggggctgccttgcatttcaggtataatctgtctacactttttatgcatttctgggtttggtttaatatttttg

SEQ ID NO: 18585 - DNA, 120 bp, synthetic construct
  source 1..120: mol_type = other DNA
ccgcagatgggcagaacttctcatcccacacatcccagccttctttaaacttccctggcagattattttatggttttgctgctgttggtgaagatggttcagtctttttttttttttttt

SEQ ID NO: 18586 - DNA, 120 bp, synthetic construct
  source 1..120: mol_type = other DNA
cataggtaaccaaagtatagaacttatttggtgaatcttcatcctcattacattttctggataaccacgcacggatgcggtaggggacattccttattcctttggcccagacagctttgt

SEQ ID NO: 18587 - DNA, 120 bp, synthetic construct
  source 1..120: mol_type = other DNA
attcctttcctcgtgactttcaatttcttcattttgaactcatggcctccattttcattcagtggatttagaatccagtgttatcctttggtgccgagcttgtctccctctggttgttgg

SEQ ID NO: 18588 - DNA, 120 bp, synthetic construct
  source 1..120: mol_type = other DNA
gtgcgtactgtgtgtgtgcatactgtgtgtgtgcatactgtgtgtgtgtgcgtactgtgtgtgtgcgtactgtgtgtgtactgtgtgcgtgtgcgtactgtgtgtgtgcatactgtatgt

SEQ ID NO: 18589 - DNA, 120 bp, synthetic construct
  source 1..120: mol_type = other DNA
ccctttctccctcctttcttccctctttttaatctgtcaattaaaatatttgaaaggatatcactgagatctttgggcaaggactttacctgtttttgctgttgtcaaccgagggtgcgg

SEQ ID NO: 18590 - DNA, 120 bp, synthetic construct
  source 1..120: mol_type = other DNA
atttttctttagaaatgatataaagtatgaagaactcttggaagatcttcgtcggaaagatgaaggaagtcttgtttgtctcgtaaccctggaggccactgagtatctctccctcccatc

SEQ ID NO: 18591 - DNA, 120 bp, synthetic construct
  source 1..120: mol_type = other DNA
atttttttattcagatcgataactcctaggaaaagagcatcttttagagtcacctgaaactaaataaagagcagagtgcctgagttgtggaaacactggtgctgtctgggcctcatggca

SEQ ID NO: 18592 - DNA, 120 bp, synthetic construct
  source 1..120: mol_type = other DNA
cccaagtatctagaactacagacctgcgccaccacacccagctaattgttaaatttttttgtaaagtcaggggtctccctatgtaactcaggctggtcttgaactcctggactcaagcca

SEQ ID NO: 18593 - DNA, 120 bp, synthetic construct
  source 1..120: mol_type = other DNA
gtctgctaaggaaagtgggtgttggagcaaaagccttgcttcactgctgtactccaacccatcaaaatggaattgtttaaaatgccctcaaaataaaaatagagaccccaagctcttgat

SEQ ID NO: 18594 - DNA, 120 bp, synthetic construct
  source 1..120: mol_type = other DNA
taatgaggcaaaaggcttaaaagatcctttcttgtggctgaagtgtagactctcagagattatgtctagtgatcaggctggagatcttgcagggactcgtaggtctttctaaagagtttt

SEQ ID NO: 18595 - DNA, 120 bp, synthetic construct
  source 1..120: mol_type = other DNA
caatgattgatgacataaaaatggaaagggtgaaagacaagaaggtgtcaagggtgattcttgggtttctgttgtccagctgggtgattctcaggtttctgttgtccaaatggttagtga

SEQ ID NO: 18596 - DNA, 120 bp, synthetic construct
  source 1..120: mol_type = other DNA
attgccaggtctgaaagaggtcatcagttcttgggaaaggtgcctgcgtgggctagaaatcatggaacaaatcataaagccaagtagtaatttaaacccagatgctactttaattaactc

SEQ ID NO: 18597 - DNA, 120 bp, synthetic construct
  source 1..120: mol_type = other DNA
ggctactagcactctcctggttacgagcacagccctggctactagcacagccctggctactagcactgtcctggctactagcactgtcctggctactagcactgtcctggctactagcac

SEQ ID NO: 18598 - DNA, 120 bp, synthetic construct
  source 1..120: mol_type = other DNA
ttctgtcaatgatcacactgaatggggaaatgaagtttctagtaggcatatttgggataaagctctttctacatctacctgtccgactgctccctcggcaaccacagaatgcttccagtg

SEQ ID NO: 18599 - DNA, 120 bp, synthetic construct
  source 1..120: mol_type = other DNA
atgggggggctgcggtgtgtgtttggaagccttggcgggagggcctgttggatggagggactgcggtgtgtgtttagaggccatggcgggaggacctgttgggtggatggaggggctgcg

SEQ ID NO: 18600 - DNA, 120 bp, synthetic construct
  source 1..120: mol_type = other DNA
ggacctgttgggtggatggaggggctgcggtgtgtgtttggaggctgtggcgggagagcctgctgctcagttctcaggactggttagaaagtaaatttaacgtaggagcaacttaacaaa

SEQ ID NO: 18601 - DNA, 120 bp, synthetic construct
  source 1..120: mol_type = other DNA
caaagaaagctttactaatccggaagaatcagcatcgtgtgaactccgtggcagaccacacgcaatgaagctagaactcagtaacgaaaggacagctttaacaaaagtctgaaaactaaa

SEQ ID NO: 18602 - DNA, 120 bp, synthetic construct
  source 1..120: mol_type = other DNA
gtgcctggaccacacaggccagagtcgaaatctgttcacctgccttaatctgccactgtttggctgcttttaaaaaataaatgtacatctttgtcttggattgtcttccttaatatcaca

SEQ ID NO: 18603 - DNA, 120 bp, synthetic construct
  source 1..120: mol_type = other DNA
atctatgctaaacaactagaatcaatattctgcatttgggaatgatttcaccatgttggggtgtcaggacaagccggggataactgacgtggaccacacactaggttccttttgttttta

SEQ ID NO: 18604 - DNA, 120 bp, synthetic construct
  source 1..120: mol_type = other DNA
ctcacactcaccgcacggcagctcattcaccgcacggcagctcgctctctctgcaccgcagctcacactcaccgcacggcagctcacaccgcacggcagctcacactcaccacacggcag

SEQ ID NO: 18605 - DNA, 120 bp, synthetic construct
  source 1..120: mol_type = other DNA
taccgcacggcagctcactctcaccgcacggcagctcacactcaccgcacggcagctcacactcaccgcacggcagctcactctcaccgcaccgcagctcactctcaccccaccgcagct

SEQ ID NO: 18606 - DNA, 120 bp, synthetic construct
  source 1..120: mol_type = other DNA
cttcacctcccttttccccatttaaaaaaatataagttcctgaaacctgagacacagaagaatcaaaattggcttcagtgtgtggtgagggaagggggcttgctcaggaaaaaaaatgtc

SEQ ID NO: 18607 - DNA, 120 bp, synthetic construct
  source 1..120: mol_type = other DNA
ccgaacccgtgccacgcagggtgtgtgtgtcgcctgccgggtcttccaccgagcccgtgccacgcagggtgtgtgtgtcgcctgccgggtcttcacaccgagcccgtgccacgcagggtg

SEQ ID NO: 18608 - DNA, 120 bp, synthetic construct
  source 1..120: mol_type = other DNA
ggtttgagttagtgaaaatgtgtgtattaaacagatatgtaaatgacccctgccgagcgctgaaaatgaaggtatgaaaaggcatcatcatccgtggttcccacctggcataatgaccgt

SEQ ID NO: 18609 - DNA, 120 bp, synthetic construct
  source 1..120: mol_type = other DNA
tacagataaggtcattacaccagagccttgtggagaaatactgcctggagtgctgtggagctcctgagggctgtgcctgtgcctgcatcggagcgggaagggtgtcagcagaggcttttg

SEQ ID NO: 18610 - DNA, 120 bp, synthetic construct
  source 1..120: mol_type = other DNA
agcttacttgacaaaatttaaaagtcagcaaattcagcttagcccccaaattattttgaacttcaacctgtctttgaagtacaaaacctgcagtcagcagccacccgtcccttgtcaaga

SEQ ID NO: 18611 - DNA, 120 bp, synthetic construct
  source 1..120: mol_type = other DNA
tgggaacttttagtgctttttccaagcctgcccatggctgcccatgaatcagtcagcacatacttcctcccctttgaagcccataaaaaccctggactcagccagactcaaggaaacgat

SEQ ID NO: 18612 - DNA, 120 bp, synthetic construct
  source 1..120: mol_type = other DNA
tattctgttgctcagtaaagctcctcttcagcttgcttaacctccacttgtccgtgtacctcattcttcctggatgcaggacaagaacttgggacccaccaaatgtcagggctacaagag

SEQ ID NO: 18613 - DNA, 120 bp, synthetic construct
  source 1..120: mol_type = other DNA
acaaaaatgactttttctgttttgttttgtttttctcctctgagaatgacactctgtgtgacattctttatataaacctgcagcaggcagagcctgagaagtcccctcgtgccaccctca

SEQ ID NO: 18614 - DNA, 120 bp, synthetic construct
  source 1..120: mol_type = other DNA
ctggaaagttcagaaggaaagcaaatggataggtcgattcccctccaggaagaccagaatagaataagtcgttggttttggatggaagctgcgtgaagaacacacttggtgggtggaagt

SEQ ID NO: 18615 - DNA, 120 bp, synthetic construct
  source 1..120: mol_type = other DNA
tccggatgttgggcatcttagatgttcctggaaggcactgctctggacagtggacaccttagacagatgttcctggaaggctctgctccgatgttcctggaaggctctgctccgaacagt

SEQ ID NO: 18616 - DNA, 120 bp, synthetic construct
  source 1..120: mol_type = other DNA
cctcaaagaagagggcagtgatgccgggaccctttctctccccacagtggctccgtcaatcagttcaccgccatctacaacagcagcggagagctcatcaacaacatcaagtactacgac

SEQ ID NO: 18617 - DNA, 120 bp, synthetic construct
  source 1..120: mol_type = other DNA
tggttgcagcctccccacgtggcttcaggccgttgtttttagattaggattctgcccacctgccgccttgtgttgtgaggctccaggcatgtagctctgctgacacgtgtgacattggat

SEQ ID NO: 18618 - DNA, 120 bp, synthetic construct
  source 1..120: mol_type = other DNA
aacctttgaggtcctggcagctgctccctgacctgagcctagagtgcttgtaccgctggcaggcagcctcgagggtggacccacagcaatgccacggtggtcttccccatccctgtgatg

SEQ ID NO: 18619 - DNA, 120 bp, synthetic construct
  source 1..120: mol_type = other DNA
acctctgccagtaatgctgtttcttctctgctttcttccagaccatcatggagcagttcaaccctagcctccggaacttcatcgccatggggaagaattacgagaaggcactggcaggtg

SEQ ID NO: 18620 - DNA, 120 bp, synthetic construct
  source 1..120: mol_type = other DNA
aactgcagcagcttcgggtttgagaaatgagcgaacgccctgcagctccttctcacaaagagccgggacagagggtgtgggggactggtggctgcagggacattccattcttcccactgt

SEQ ID NO: 18621 - DNA, 120 bp, synthetic construct
  source 1..120: mol_type = other DNA
gatcagctctctgcaatttgacttgaatagctcaggacctgaactggtacgttgtgttcttacgagtcaagggagctctcatgattggggtgaaacaagaatatcaacaagagatgggtt

SEQ ID NO: 18622 - DNA, 120 bp, synthetic construct
  source 1..120: mol_type = other DNA
aaaaaagtaaaaatggtgaattttatgttatgtgaatttttctcaattttaaaaaaagagcctaatgctgggaggacggatgcttgggcttcccgcccgtcctgaggctggtggtgctga

SEQ ID NO: 18623 - DNA, 120 bp, synthetic construct
  source 1..120: mol_type = other DNA
caggtgccatctccgagctgggtgctgtgggtgcgggtgctgtctcgggtgggagctgggcgtgtttgcggctgttggtgtcatctcgggtgggagctgggcgtctgccttcctgtactg

SEQ ID NO: 18624 - DNA, 120 bp, synthetic construct
  source 1..120: mol_type = other DNA
tggtggatgttaaatcagaacagcctgtggacctgccttctctccagccaagtaattccatgtctggaaatttacactaagaaaataacctagagggcacacgcatccagaataaaaata

SEQ ID NO: 18625 - DNA, 120 bp, synthetic construct
  source 1..120: mol_type = other DNA
ggtgacccagaactcagccttcattaggtccacggccccacaggagcaccctgctcgctcggggacaatgcctggtgggaggtggtgtcaggacctcgcccaccactctgggctagagga

SEQ ID NO: 18626 - DNA, 120 bp, synthetic construct
  source 1..120: mol_type = other DNA
cacccagagcgactctgtggggtcacgatgaggactaaggagacgcaaccaagaccaggtgctgcaagacctggtagtgagtgcagccaactgcccagcggttccaggtccgtggaaagg

SEQ ID NO: 18627 - DNA, 120 bp, synthetic construct
  source 1..120: mol_type = other DNA
accacggaatgtcaatggtacaaggacgagatcccatgtgctggtgacacctccccatactccagggcagggttccgaaagagcaggcaccatggcctcacttgctcctcaaaggactag

SEQ ID NO: 18628 - DNA, 120 bp, synthetic construct
  source 1..120: mol_type = other DNA
cctgacacgtgtccccatgcagggctgtccctggggcaggtgtgccaccgaggggctgcgctcaggtctgtggcccgccagacaggctcttgacttcagcacactcctttgggttcgtac

SEQ ID NO: 18629 - DNA, 120 bp, synthetic construct
  source 1..120: mol_type = other DNA
ggagagacgggaggcaccggtgccctgtgggtgggagcactgctggctccatcctccactgcattcaaattgatcagggagggtggggttgggggggaacagggtccttgaggtcgtcag

SEQ ID NO: 18630 - DNA, 120 bp, synthetic construct
  source 1..120: mol_type = other DNA
tgtccatgaggatgggtgtatgcgcgtgtgtgtgtgtccatgaggatgggtgtatgcgcatgtgtgcgtgtgtgtccatgaggatgggtgtatgtgcgtgtgtgcgtgtgtgtccatgag

SEQ ID NO: 18631 - DNA, 120 bp, synthetic construct
  source 1..120: mol_type = other DNA
atgatgattggtgattgatgatgatatggttgttgtggttggtgatggtggtggtggtgtggttgttgttgaatgtggttggtaatggtggtggatgatgtggttggtggtaatggtagt

SEQ ID NO: 18632 - DNA, 120 bp, synthetic construct
  source 1..120: mol_type = other DNA
gtggtgggtgatgtggttggtggtgatagtggtgggtgatgtggttggtggtgtggttggtggtgatagtggtgggtgatgtggttggtgggtgatgtggttggtggtgatgtggttggg

SEQ ID NO: 18633 - DNA, 120 bp, synthetic construct
  source 1..120: mol_type = other DNA
tgatagtggtgggtgatgtggttgggggtgatgtgggtgatgtggttgggggtgatagtggtgggtgatatggctcgtggtggtggtggtggtgatgtgcttgtgacaaagatgtcgttc

SEQ ID NO: 18634 - DNA, 120 bp, synthetic construct
  source 1..120: mol_type = other DNA
agatggaggccaaccagaaggccaagaagaagaaggagaggcaggggttgctaggtaaccaggagggaggacaggggttgctaggtaaccaggagggagggcagggattgctagataacc

SEQ ID NO: 18635 - DNA, 120 bp, synthetic construct
  source 1..120: mol_type = other DNA
gcaatccttaggtggttaaagggggtaagtgggacagtggcagtgagaatgcttcctccatggaagccaaagacactagacctttaggcatttgtatatggacagcttggaaagcagact

SEQ ID NO: 18636 - DNA, 120 bp, synthetic construct
  source 1..120: mol_type = other DNA
atgatggtgatggtgatagtgatgataatggtgatgatgatggtgatggtgatagtgatgataatggtgatgatgatggtgatggtggtggtgatggtagtggtggtgatgatagtgatg

SEQ ID NO: 18637 - DNA, 120 bp, synthetic construct
  source 1..120: mol_type = other DNA
ggggactgtatggaccatttttcagtctcttgatcctcaaccaccctgcatctgaccctatcatccctttgaggggagaatcccctactcaagaccagctcccatctcccactttagaag

SEQ ID NO: 18638 - DNA, 120 bp, synthetic construct
  source 1..120: mol_type = other DNA
ttccccatctcctccctccaggggtcaacgtctcagccaatcaggatgatgaactagaccacgagaccttcctgatgcaaattgaccaggagacaaagaagtgcaccttctattccagca

SEQ ID NO: 18639 - DNA, 120 bp, synthetic construct
  source 1..120: mol_type = other DNA
tgtcccactccttggaacctgaggaggatggggaagtgagaccctgcacccccatctcctgctgtcctgaggagaccttttgctgctccctccagttctgccaacaccatgtttgagatg

SEQ ID NO: 18640 - DNA, 120 bp, synthetic construct
  source 1..120: mol_type = other DNA
ctgttgggggacactaaggtctgcagcctgagatgagatctgtgtccaggaggcagcagcagtgcatgggctcctgggcgctgactcaggccccccagattcatgcggaagccctagtgc

SEQ ID NO: 18641 - DNA, 120 bp, synthetic construct
  source 1..120: mol_type = other DNA
ctcctgtccctgcccactcaccttcaaggccttgtttcctttattgggggtcgtcataacccgggggcacagcgagcaggcgctctctgcaagacacggagcaggtcagtaccctggaga

SEQ ID NO: 18642 - DNA, 120 bp, synthetic construct
  source 1..120: mol_type = other DNA
aggtggcactggggcagcgggtgtctgggcccctcagtgccggctcctcctccagacagtctgcctagcttccgttgctcagcatccccagcagctcactgggctccagtccctgcggct

SEQ ID NO: 18643 - DNA, 120 bp, synthetic construct
  source 1..120: mol_type = other DNA
gtggatgagtgagagtggctaattggatacatgggtggatagatgaacagatggatgggtgggtgaatggatggatagataagtgggataagtggttggatggatagatggataggtgta

SEQ ID NO: 18644 - DNA, 120 bp, synthetic construct
  source 1..120: mol_type = other DNA
agatggatgggtggttggatagatggatggataggtaggtgggtggatgcatggaggaacagatggatgactcactgaaacactcagtcataaagccagtgccccttgcctttcttagga

SEQ ID NO: 18645 - DNA, 120 bp, synthetic construct
  source 1..120: mol_type = other DNA
cccagaacctgacccgcacctagaaccaggcacacactcagaaccaggcgcacacctagaacctggcacacacccagaacctgacccgcacccagaaccaggcgcacactcagaacctgg

SEQ ID NO: 18646 - DNA, 120 bp, synthetic construct
  source 1..120: mol_type = other DNA
gaatctgacccacatccagaacctggtgcacccccagaatctgacccacatccagaacctggcgcacacccagaaccaggtgcacacccagaacctgacccacactcaggccatggcctc

SEQ ID NO: 18647 - DNA, 120 bp, synthetic construct
  source 1..120: mol_type = other DNA
acaattttttaaagtaaaagccaaaacgatgttaggaatatgtagcagtcaaaccgaggtagtgaccccagccccatgggaaacagggtgggctcgctgctggatgcagatactggtccc

SEQ ID NO: 18648 - DNA, 120 bp, synthetic construct
  source 1..120: mol_type = other DNA
tactgggccagcttggacagatcctcctgcttgaccagcttggacagaccctccggcttgaccagcttgggcagaccctcctgcagagaagagtggcttctgtcagctcatacctgagaa

SEQ ID NO: 18649 - DNA, 120 bp, synthetic construct
  source 1..120: mol_type = other DNA
tgagttacggcagccctagccaatcatacgccaatgcacacaggaagagatgttcaatcccacgaatctcatgaatttgcaaattaaaccaaaataggatgtgctacgtgtccactagag

SEQ ID NO: 18650 - DNA, 120 bp, synthetic construct
  source 1..120: mol_type = other DNA
tttaaacttatgctttagagttcgtatttctgcttcaagggccagaacataatctgccaaaaaaacctccagtgaatataacacatacacagcatcctttcgcacctccctcctgtgagc

SEQ ID NO: 18651 - DNA, 120 bp, synthetic construct
  source 1..120: mol_type = other DNA
tgttctctgcacagactacacaccaggattagcagagaaactgcacggaggtgcttaggaatcacgtgtgttcctgagagactgaggaacccactgaatggaaacgtgctatgctggtac

SEQ ID NO: 18652 - DNA, 120 bp, synthetic construct
  source 1..120: mol_type = other DNA
gccagtgagctgagccgccggagcctcgagaagccagtgagctgagccgccggagcctcgagaagccagtgagctgagccgccggagcctccagaagccagtgagctgagccgccggagc

SEQ ID NO: 18653 - DNA, 120 bp, synthetic construct
  source 1..120: mol_type = other DNA
aaatttccatttcctctgtgaattaatggccataataatggcaagaacagcacaagcgagtggctgattctatcagacagcaagtgtgtgccaactgtcaggaaacagtccttaccattt

SEQ ID NO: 18654 - DNA, 120 bp, synthetic construct
  source 1..120: mol_type = other DNA
gatgtgactgatggtgtactgagtgatgtgactgatggtataccgagtgatgtgactgatggtgtactgagtgatgcgactgatagtgtattgactgatggtgtactgagtgatgtgact

SEQ ID NO: 18655 - DNA, 120 bp, synthetic construct
  source 1..120: mol_type = other DNA
gaagtgtcagccatctccctccctggctcctgctggctgaggaataaatgcagaagtcagaaaaggaagcacagaagcctttatttctggtacggctgggtgggggactggtctcctccc

SEQ ID NO: 18656 - DNA, 120 bp, synthetic construct
  source 1..120: mol_type = other DNA
tcctcaggttccctcagtttccctcaaatttccctcagtttccctcaggttccctaaggttctccaagttccctcaaatttccctcagtttccctcaggttccctcagtttccctcaagt

SEQ ID NO: 18657 - DNA, 120 bp, synthetic construct
  source 1..120: mol_type = other DNA
cccagtttccctcaggttcccccagtttccctcaagttcccctcaggttcccccagtttccctcaagtttccctcgggttcccccagtttccctcaggttcccccagtttccctcagttt

SEQ ID NO: 18658 - DNA, 120 bp, synthetic construct
  source 1..120: mol_type = other DNA
ttccctcaggtttcctcaagttgcctcagtttccttcaggttccctcaatttccatcaggtcccctcaggctctgccagtttccctcaggttcccccagtttccctcaggttccctcagt

SEQ ID NO: 18659 - DNA, 120 bp, synthetic construct
  source 1..120: mol_type = other DNA
gccagtgccacagaactgtgcacctgaatgtgtgagttctgtcgtgttttactttaaaaacaaaaggatcccactccccgaccttgtccctctgttaaaattgaaagagactgatgtcag

SEQ ID NO: 18660 - DNA, 120 bp, synthetic construct
  source 1..120: mol_type = other DNA
agattgtaatccgggatttgtaatctgtagattgtaatcttggagatgtcttagatgtaaaatcccatcttcgggttgggggttttttgctttctccaaataaatctgatctttaaaatt

SEQ ID NO: 18661 - DNA, 120 bp, synthetic construct
  source 1..120: mol_type = other DNA
ttactccaaggtgacaggatcaggtttccatgcagcattttccacctgccccgaccatgaccacagccacggaccctctggaaagtcaagactgggagaagctcaagggcggcccaggct

SEQ ID NO: 18662 - DNA, 120 bp, synthetic construct
  source 1..120: mol_type = other DNA
cctcgaggtgactgtgggcagaaactgggcttggcctgccctccctgccagccaccccacccaggcctctccacaactggtctattcggggctcctctgaccaccactttatttttatat

SEQ ID NO: 18663 - DNA, 120 bp, synthetic construct
  source 1..120: mol_type = other DNA
gattgtggcagggtgggaagtacacctcatcccacagctggatcttagatcctcaagagcatctctccgggaatatttgatgacccaaaaacacagaagacttaagaagtgaaatgtggc

SEQ ID NO: 18664 - DNA, 120 bp, synthetic construct
  source 1..120: mol_type = other DNA
ggaggagacatgggaacccacgatcacccatcacgtggttcaaaacaagtacaaaggaaaatatggtgacctcagaaaagctcatagagtatattaaatacgctgggtgttagtgattaa

SEQ ID NO: 18665 - DNA, 120 bp, synthetic construct
  source 1..120: mol_type = other DNA
ccacccaccccccttgtttgcagactctagaagtaatgtctgttgaaagggagctaagctcagtcggatctcagatacatggcaggtgatcagttttattatttattatgtatttattta

SEQ ID NO: 18666 - DNA, 120 bp, synthetic construct
  source 1..120: mol_type = other DNA
caaatgttaagactaggagtggcttttcacgtggaacttttatgtagaggacgtctctttctgttgattgctacagccgagacaagctgtgatcacaggagattctgaaatctcaagctg

SEQ ID NO: 18667 - DNA, 120 bp, synthetic construct
  source 1..120: mol_type = other DNA
acagaagatgattgacacaacgaagtcaccactaagccactgcttaagtctagtcctcggccttctttttctgctctgtagtccaaaaccgtgaacgtagcagcatgtcgaatatgtcac

SEQ ID NO: 18668 - DNA, 120 bp, synthetic construct
  source 1..120: mol_type = other DNA
tatagcagtatctgtggttattagaatatttgaaatctcatctgatgcccttacctataaacagtttcacaaatcccacacatggcctagcccacctcttcatgtcgcccatgaagtagc

SEQ ID NO: 18669 - DNA, 120 bp, synthetic construct
  source 1..120: mol_type = other DNA
atgtcgccggtgaagtagctccatccacagggcccagatccctcccacacatggcccagcccacctctccatgtcaccatgaagtagctcccatccacagggcccagatccttcccacac

SEQ ID NO: 18670 - DNA, 120 bp, synthetic construct
  source 1..120: mol_type = other DNA
tgcatctccagattgatgaagaacatacttacattcctacttcctgacatttcagttttaggcatccactgactttccactacagaagatgaaaatgtagctctcggtcactgacacacc

SEQ ID NO: 18671 - DNA, 120 bp, synthetic construct
  source 1..120: mol_type = other DNA
cacacactcacatgctccctgtacccactgacacagctcaccctgtaactctaacacacacactcacccactgacacagctcacccctgtaactctaacacacacacacgctccctgtac

SEQ ID NO: 18672 - DNA, 120 bp, synthetic construct
  source 1..120: mol_type = other DNA
gctccctttctgaacagtcaggagcagctcgcgcccaccagcaaccaccttctccggtagcctgaaggacaccacaagccttattattattattattattattttattttattttatttt

SEQ ID NO: 18673 - DNA, 120 bp, synthetic construct
  source 1..120: mol_type = other DNA
agtgatgactttataaatcgtgttttatatctcgaggtggttgccaagggaaaccagaagagtagctgtattaatcagcaaatccacctctgtctgaagaatcagagggagcatggagtg

SEQ ID NO: 18674 - DNA, 120 bp, synthetic construct
  source 1..120: mol_type = other DNA
caacattaaacattggaaacagaggggagggccaggccctgcacctgcaccccggtgtgtccacgcaccgtgtagtcttgagggagtggctcagcctctctgggcctcacaatataacct

SEQ ID NO: 18675 - DNA, 120 bp, synthetic construct
  source 1..120: mol_type = other DNA
tgcagaacagaagacacttccctgggtaaccagcagagcagtggggcccgcacggtccgtgggctgaggtgacaggcagagcagtggggcccgcacggtccgtgggctgaggtgacaggc

SEQ ID NO: 18676 - DNA, 120 bp, synthetic construct
  source 1..120: mol_type = other DNA
gtgtatttttagcctaaatcctccctccgtgtcaagggaaagcctttattacaaagcattggaccattgttttggttcgtcctcagttcggcatgtagcaaccaaaagtcacgcagcaga

SEQ ID NO: 18677 - DNA, 120 bp, synthetic construct
  source 1..120: mol_type = other DNA
tggaaatggaagtgcttctcacactttaatgtgcagatgaatttcctgggaattttgctgtgctatagattttgagcaagtaggtctaggcgggggtctcatagtctgcttttcttacaa

SEQ ID NO: 18678 - DNA, 120 bp, synthetic construct
  source 1..120: mol_type = other DNA
gctcatagtctgcttttcttacaagcttgcgggtgtctgctcatagtctgcttttcttacaagcttgcgggtgtctgtgctcatagtctgcttttcttacaagcttgcgggtgtctgtgt

SEQ ID NO: 18679 - DNA, 120 bp, synthetic construct
  source 1..120: mol_type = other DNA
tctcccttgattaactgagcttgccaacatccacagcgctgtaggtggtgcttggtgttacagtgttgctagaacatgcagattgagtgctgccttagaaacccacaggaaggggaacat

SEQ ID NO: 18680 - DNA, 120 bp, synthetic construct
  source 1..120: mol_type = other DNA
gatcctcagggaatgtgcgttttatgttttaggcaattctggtaaaggtggtggatttagttgcaattggattcttcattttttgccttgggtctcactgaggaaacatgaagaaggggt

SEQ ID NO: 18681 - DNA, 120 bp, synthetic construct
  source 1..120: mol_type = other DNA
gcgggaggggggtccatgctgtgtgactgggaccactggacccgacccatcgcagcgggaggggggtccatgctgtgtgactgggaccactggacccgacccatcgcagtgggagggggt

SEQ ID NO: 18682 - DNA, 120 bp, synthetic construct
  source 1..120: mol_type = other DNA
tgtggctggtgctgtggcttttgtgtccagtggtgatggcagagaagatgtgttagtaacaagtgttttctgctttcattcatttctttaatcctagaagtgtttctgattttgagagga

SEQ ID NO: 18683 - DNA, 120 bp, synthetic construct
  source 1..120: mol_type = other DNA
ggttggttctcaaggagacagacttttctagtgttcttagggtgctgtgtgttagcgaccttcagtttgtttcaagtgctataatacgtgtggtttgggaaggaattacttggttaaggt

SEQ ID NO: 18684 - DNA, 120 bp, synthetic construct
  source 1..120: mol_type = other DNA
cctatcgttccccacagatgggggtcacggctcctacaatgacggtgctcagggaagagccctcttttgtggggtgagcaggtgccagtccctcattcacccctcactagcacctgtcat

SEQ ID NO: 18685 - DNA, 120 bp, synthetic construct
  source 1..120: mol_type = other DNA
tggcaggtgctgggggatgaggcaggtagaggggccagcaggtgctgggggacggggaggctggtttttgccattgctctcccatgcgtctgtgctgggtccgtccataccatgatctct

SEQ ID NO: 18686 - DNA, 120 bp, synthetic construct
  source 1..120: mol_type = other DNA
agtgcatacacacgtgtacatgtgcacactgacacatgcacgttgacacgtgtacacccaatcgaatgtgcacaactacccccacagatagcacacacccacacaatcgaatgtgcatac

SEQ ID NO: 18687 - DNA, 120 bp, synthetic construct
  source 1..120: mol_type = other DNA
cagatatgtacacatgcacacccacagaatcgagtgtgcacacacccatacataatgcgcatgcactcacatgattgaatgtgcacacacccagagatgcacacacacacatctaatcag

SEQ ID NO: 18688 - DNA, 120 bp, synthetic construct
  source 1..120: mol_type = other DNA
ctctcttaacattttagtgtgaaaattttcaaaatacagacaagttgtaaggatgctccagtgaactctcatatgcccaacggtggggttctccagttaacacagctgtctgtgttccct

SEQ ID NO: 18689 - DNA, 120 bp, synthetic construct
  source 1..120: mol_type = other DNA
gagggaaacttgaaaccctgagctatgtatggcttgttttgtctttgattgggaaacccaattcaggtttgtgaacttgggccaagtttaagaattcccacagttttcttcagctcctct

SEQ ID NO: 18690 - DNA, 120 bp, synthetic construct
  source 1..120: mol_type = other DNA
gcttggtcttcagggccactgtttctcctcagctaagtcctgagagtcacatttccatccattgcagtgaaatcttttccttcaggtatttccagaccttggttttggccccttttcata

SEQ ID NO: 18691 - DNA, 120 bp, synthetic construct
  source 1..120: mol_type = other DNA
gttggctgtgttgttgttggctgtgctgctgttggctgtgctgttgttggctgtgctcttctgctgttggctgtgctgttgttggctgtgctgttgttggctgtcctgttgttggctgtc

SEQ ID NO: 18692 - DNA, 120 bp, synthetic construct
  source 1..120: mol_type = other DNA
agccctcgtgcagccaccgtggagatggaaaatggcatgttaagaatatcttttgccaggaaatttggtagcttaggcaaaatagacgttccgagagaaatgtaatttatcaaagttgac

SEQ ID NO: 18693 - DNA, 120 bp, synthetic construct
  source 1..120: mol_type = other DNA
tttctgttggagtgagcattgagcccccgtgggttttggtgtgagcacacgtcacggctctgttctccccgatggttttctgtttttcatgagcattgagcccctgtgggttttggtgtg

SEQ ID NO: 18694 - DNA, 120 bp, synthetic construct
  source 1..120: mol_type = other DNA
agtgagcctctgctaagtggccggttgaggactcgtgtgttgtctccctcactttctttttatgaattgaataaagctagaatcataaaatgaaggcacttacgacattctctcctcact

SEQ ID NO: 18695 - DNA, 120 bp, synthetic construct
  source 1..120: mol_type = other DNA
tctaggtggcttccatctgccacacgacactccctggtctctggttggcatgcacctgccacacgacactccttggtctctaggtggcttgcacctgccacatgacactccttggtctct

SEQ ID NO: 18696 - DNA, 120 bp, synthetic construct
  source 1..120: mol_type = other DNA
agcacttggggaggcttaggctcggggagcttggtttccccacgcaggtgtggcagagccgcctccctctgcgtccgtgagggttctgaggagtctgtgctttctgagcaaactcagagt

SEQ ID NO: 18697 - DNA, 120 bp, synthetic construct
  source 1..120: mol_type = other DNA
atcccctcaccatgtaatcacagtgctctccagttcgagactctctcatcccttctcatttttgtttatctgcaccagtgtcacagtcgataggccccaggttgtattgatggagtgtgt

SEQ ID NO: 18698 - DNA, 120 bp, synthetic construct
  source 1..120: mol_type = other DNA
catgccatctaaaactcgcatgtgggggtttatccagttgaaacacagataaatgtgaaacaggatcacttggagatatgacagatgaggttgtcgggacccagcagcttcctttgtcaa

SEQ ID NO: 18699 - DNA, 120 bp, synthetic construct
  source 1..120: mol_type = other DNA
ttatcccagtcagtgacttggggacactgaagcatgtgtgtgtgtgtgtatactgtgtgggggtgtatggtgtgtgtgtgtgtacactgggggtgtatggtgtgtgtgtgtgtgtacact

SEQ ID NO: 18700 - DNA, 120 bp, synthetic construct
  source 1..120: mol_type = other DNA
tggacgcctgcaggtgcacccccatgggggggacggggacacagacgcctgcaggtgcacccccggggggaggatgggctccccttctccctctgttgtcccagagacagctctgccaaa

SEQ ID NO: 18701 - DNA, 120 bp, synthetic construct
  source 1..120: mol_type = other DNA
aattatatccaggccggtctgtgctcacgggacgtttctatcggacagaattacgcatctgtctgcaaaacagctcaatccattctttagtgacaacgatccagaaacaagagcataagg

SEQ ID NO: 18702 - DNA, 120 bp, synthetic construct
  source 1..120: mol_type = other DNA
gccagaaggacctggtgccgaccacaccacaccacaggggatagaaggacctggtactgaccacaccacaccacgggccagaaggacctggtgccgacacaccacaccatgggccagaag

SEQ ID NO: 18703 - DNA, 120 bp, synthetic construct
  source 1..120: mol_type = other DNA
ttggggccaccgcccactcacaagcccaggcctggggctcacacaggacagaaaatggaagcacagacactgtaccgagaccaaaggaaccgaaaggagaaaagggcaaacccacaatga

SEQ ID NO: 18704 - DNA, 120 bp, synthetic construct
  source 1..120: mol_type = other DNA
ggcaggaggctgccagctgcctgttcccatcctgatcatatttgcggagtgagctcaggctgtaaatgaccctctgactgcttgtgtgtggggatccacccagggtctaatcagcacatt

SEQ ID NO: 18705 - DNA, 120 bp, synthetic construct
  source 1..120: mol_type = other DNA
cccgggacagagccggactccatcctcccaggggccagaggccacttatggggaaacagggccccaggacagagcccgactccatcctcccaggggccggaggccacttatggggaacaa

SEQ ID NO: 18706 - DNA, 120 bp, synthetic construct
  source 1..120: mol_type = other DNA
ctcagattaacgggttgaagccctaactcccaatgtgactgtatttggagatgggcttttaaggaggtagctaaggttacgtgagtcccaaaggtggggccctggactgttgtccttata

SEQ ID NO: 18707 - DNA, 120 bp, synthetic construct
  source 1..120: mol_type = other DNA
aactttaagaacacaaatgtctgttgtttaagctgccctgtctgtagtgttcctttatgggggcctgagctgggacggcggggaagcagggatccccccaggagacgtgcagggcagcag

SEQ ID NO: 18708 - DNA, 120 bp, synthetic construct
  source 1..120: mol_type = other DNA
agctcagaagggccccttcccagaaagacacgtttctggcacagactcaagaagtcagcttctgaattacactgaaggaaagaaaagaaaccagttgcatttttgacactaacatcagct

SEQ ID NO: 18709 - DNA, 120 bp, synthetic construct
  source 1..120: mol_type = other DNA
tgatttctaaaaaatccagccacgcaataacagcctttctaaagctgactttgttttagtgaaacaaaactgtgatgacatccctaagcttcctccagaagagcttcgacgtggagaaac

SEQ ID NO: 18710 - DNA, 120 bp, synthetic construct
  source 1..120: mol_type = other DNA
ccactaaaatgtcaacactcctaacaaaattccttagacgtctgtatgattgattctaaatagctggcaactgtcatttctagctgtgtaaaaatcgctgtggcacctcacatacggacg

SEQ ID NO: 18711 - DNA, 120 bp, synthetic construct
  source 1..120: mol_type = other DNA
cgaacatggtgtggctgtatcaggtaccacacatgctccacaaacacggcgtgcctgtatcaggtaccacacgtgctccacaaacacggtgtgcctgtatcagataccacacgtgctcca

SEQ ID NO: 18712 - DNA, 120 bp, synthetic construct
  source 1..120: mol_type = other DNA
ttttttggatccactgattttcaacaaaggtgccaagataattccacagagaaagaacaggaatgctggaaaaaccggacatcatccaggaaaaagaatcctcagcccccatatacacca

SEQ ID NO: 18713 - DNA, 120 bp, synthetic construct
  source 1..120: mol_type = other DNA
cgttagcttagcactgtccccgccccacctgcaccagcgtgaactcacatgagcttagcactgtccccgccccacctgcaccagcgtgaactcacatgagcttagcactgtccccggccc

SEQ ID NO: 18714 - DNA, 120 bp, synthetic construct
  source 1..120: mol_type = other DNA
aggtccctcgctggccaaatcacagacagtgtgaacatcacagtaagtgacagtaactaatgataactcaaataaaacagaaaccatggagtccacacacacatagaaactgtgaagtcc

SEQ ID NO: 18715 - DNA, 120 bp, synthetic construct
  source 1..120: mol_type = other DNA
tttctgtgagttctgatggtttcaaaggggaaagagaaatgagcaaaaagatgtaaacacttttcacagaaaagaaaacccacatggccaagaacagaagacgacgctcaccataacccg

SEQ ID NO: 18716 - DNA, 120 bp, synthetic construct
  source 1..120: mol_type = other DNA
accaaacaaaccgcagaggacagatacacagagcggggcagggagcctgcagacaaacccaccctcaacagacacacagagcggagtggggagcccacagacaaacccacccttcacaga

SEQ ID NO: 18717 - DNA, 120 bp, synthetic construct
  source 1..120: mol_type = other DNA
ttctagtaacccgaactggaaactacagcatcgaaacaatctcggtgcagtcacagaaggatgagcaaacagtaaggagccaccaatacacagccaccaatacacaagctgtaacgcatg

SEQ ID NO: 18718 - DNA, 120 bp, synthetic construct
  source 1..120: mol_type = other DNA
atgagcaaaaggtgaagatctgtttaaaccgtcctcagttgccaacgctagaggtcaggaaccgaatctgttcgactgtaacgccctctgcacatactggatccagagtgagtttcaggt

SEQ ID NO: 18719 - DNA, 120 bp, synthetic construct
  source 1..120: mol_type = other DNA
aacattggatggaccatctgagcatgaaaacatgagcccaaggaagggtcaggagagagggctgaaggttctgtgtaagaaaacgggagaaatctgaggtgttttggtctaagaagaaaa

SEQ ID NO: 18720 - DNA, 120 bp, synthetic construct
  source 1..120: mol_type = other DNA
agataatgaaaacaagatataacttgggaaaaaacatcttccaaatacacaagacgatgatgatgacagcaatgatgatgacagacagctgccaacacctcctgagtgcccgctgcccac

SEQ ID NO: 18721 - DNA, 120 bp, synthetic construct
  source 1..120: mol_type = other DNA
ttttgtgagtctcacagatctgaacaggacccaacagaggacttaactccccaggctctcacatggggacattccagagggaccgtaaaccctcagccgcttgcccttgaaatacgtcat

SEQ ID NO: 18722 - DNA, 120 bp, synthetic construct
  source 1..120: mol_type = other DNA
aaagtccccacctaatgtcatcctaatactatcaccctgggggttccaaatatgaatctcggggtgggcacagacattcagatcatagtaataaatccctaccaaagaataagaaactta

SEQ ID NO: 18723 - DNA, 120 bp, synthetic construct
  source 1..120: mol_type = other DNA
ttatgagcctggctcctgttaataattgtctcccgattgtctcccggcgtccaccggcgtccaccctgcattctccgtgaaggtgacttctgctttgtaaagctcagaatcagaacaggg

SEQ ID NO: 18724 - DNA, 120 bp, synthetic construct
  source 1..120: mol_type = other DNA
agtctcacctgtggaggataaaagtgctgcctgaaatttgagatcccccagtgctccctccttgttgcttccggacgtgagtggtggtctgtgctgctggcctctgtccagcacgtgcct

SEQ ID NO: 18725 - DNA, 120 bp, synthetic construct
  source 1..120: mol_type = other DNA
caacaacaaaacaatcaaatttaaacatgagcaaaggttttaaaatacacatttctctaaagaagatatgcaaatgaccagtaagcacaggataaggtgctcagcatcactaatcatgag

SEQ ID NO: 18726 - DNA, 120 bp, synthetic construct
  source 1..120: mol_type = other DNA
tgtcatgtatgttgcagatctgtttccccagtctgttgacttttgactttgatgcatttttcttgcctataaagttttaatttttatggagtcaaatgcatcagtcttctattcaaagac

SEQ ID NO: 18727 - DNA, 120 bp, synthetic construct
  source 1..120: mol_type = other DNA
caggtggccggcatgtctgtgaagggcagaaactggggcagccaaacagctggcagaggccagctaggaagtacctgatgcccactccatagaggactccacacttaaaagacaagatca

SEQ ID NO: 18728 - DNA, 120 bp, synthetic construct
  source 1..120: mol_type = other DNA
ccctcctcctcctcctcttccctccacagctctcctggcttctatccaaagctgtgttccaggtggggaacacctatggatgcaccagggtgcaactactcagagtccagtgtgcagaag

SEQ ID NO: 18729 - DNA, 120 bp, synthetic construct
  source 1..120: mol_type = other DNA
ttcttatcttgaatgttgaacatttgttcatccacctccctcatgggcatgcgacccctgaaaatggcagccaccgttaggtagcagccgtgacgggggtcacaggcagccatcatgttc

SEQ ID NO: 18730 - DNA, 120 bp, synthetic construct
  source 1..120: mol_type = other DNA
gttacaggacagcagcttcccctgttagaaattaagacaggagtcaaacctgagacgggttcacagacctcgctgcaggtggctcctgcccattctcaggaaaggcagtagccacggccc

SEQ ID NO: 18731 - DNA, 120 bp, synthetic construct
  source 1..120: mol_type = other DNA
ggttcccgcactgcccggtctgcgtgagcacgatttccctcatggccaaggcaggattagggcggcagcagaagcgcgagaaggaggagcagacgcgcagcgacccagcccgccctccgc

SEQ ID NO: 18732 - DNA, 120 bp, synthetic construct
  source 1..120: mol_type = other DNA
cactcctttaaccccttcacccacctctagccctagccaaccgttcatctactttctgtcatagatttgctcattctgggcatttcatgtaaattgaatcgtataatatgtggccttttt

SEQ ID NO: 18733 - DNA, 120 bp, synthetic construct
  source 1..120: mol_type = other DNA
ggagcatacttacttatattcattttccaccatattttcagggtctgcctgttcaatggcttcttcaaagaattcctccaaagtgggcatgtgttccctgagcggtacaaaaataaccag

SEQ ID NO: 18734 - DNA, 120 bp, synthetic construct
  source 1..120: mol_type = other DNA
ataaagtggtggcaggacaagattctaatggccccatacttttagttacagttttgattacgtgggaactccagacttttaaggaagtaaaaccgtcaaaactaaattcaaaaaggacaa

SEQ ID NO: 18735 - DNA, 120 bp, synthetic construct
  source 1..120: mol_type = other DNA
taagtagcagcactgcctgggaagacccttgggagggagaaggaatctgttggatggaaatcttacctttgagcatcagttatatttaatgcctagtttcagcccttttcatattagact

SEQ ID NO: 18736 - DNA, 120 bp, synthetic construct
  source 1..120: mol_type = other DNA
gttcagtgactttatattggtagcatgaaattggtcatgctggaagtattcacaccattgaaatcagcaaaaagctccaaatcagggcttttgccttctggagagccggctgttaaacat

SEQ ID NO: 18737 - DNA, 120 bp, synthetic construct
  source 1..120: mol_type = other DNA
tatgaagagcaaccccgatctggaagatattctgtttacctctcaaaatcatgcagggattaaaacccgacctacaaggcagaaaaaaatacaagagttcagaggaaagcaacacttcat

SEQ ID NO: 18738 - DNA, 120 bp, synthetic construct
  source 1..120: mol_type = other DNA
tttcagaaatgtctagttcataacacacaattacatgagctaggagcttccaaggtgagaagcaattctctgagcagaataaaattggagactggtatgaaggaggcagtggagagatgg

SEQ ID NO: 18739 - DNA, 120 bp, synthetic construct
  source 1..120: mol_type = other DNA
ccctactctactccacagattgaacggtttttcaggaagatatatcaatttctatttcctttccatgaagataatgaaaaagatctccccatcagtgaaaagctcattgaggaagatgca

SEQ ID NO: 18740 - DNA, 120 bp, synthetic construct
  source 1..120: mol_type = other DNA
caagagctttattatcagctagtcttggaggtaatagtattatcatgatttttcagaaaaagatcctgaggctcagtgtccaaggtccaatgaactactcaggtcggaggtggtagagca

SEQ ID NO: 18741 - DNA, 120 bp, synthetic construct
  source 1..120: mol_type = other DNA
ggggatgagtcaatgtcacaggagctgatgtatagctttgaccttgtgaggggtggtgccaggttaagccacaattaagcctcatgaaggccgtttcacactcttttttttttttttttt

SEQ ID NO: 18742 - DNA, 120 bp, synthetic construct
  source 1..120: mol_type = other DNA
catactgtgtcatcggcagatagctgcatggttggtgttcgtgctggggaatgggaagttcatcggtgggacaagggacaaaatgcccccattgctttgttgtggctttaatctcccttt

SEQ ID NO: 18743 - DNA, 120 bp, synthetic construct
  source 1..120: mol_type = other DNA
tggtgatggtgatggagatggagatggtgatggagatggtgatggtgatggagatggagatggtgatggtgatggagatggtgatggtgatggagatggagatggagatggtgatggtga

SEQ ID NO: 18744 - DNA, 120 bp, synthetic construct
  source 1..120: mol_type = other DNA
aatgcacagaaagtttccctggacacactacccagtttcccccagtgataatatcttgggtaacatcctgtatacattcacattggtgcattcctcagagttgtcagattttgctagttt

SEQ ID NO: 18745 - DNA, 120 bp, synthetic construct
  source 1..120: mol_type = other DNA
tttgcatttactcccatgaaatgagacctctaataaatgtttggtgtacagggtactgaggaaacatatagtacacctagcccaaatttagtgtacatggtgtggggagatggctgagag

SEQ ID NO: 18746 - DNA, 120 bp, synthetic construct
  source 1..120: mol_type = other DNA
tctctgtatctagaatggaattagctctgtatcatcctcagggaaaactgagagagtaatcactcaaattgttttctcttgggcttctctcatggaacattggtcaggaaaggctgttgg

SEQ ID NO: 18747 - DNA, 120 bp, synthetic construct
  source 1..120: mol_type = other DNA
tcagaatccaacacagaaaattactgggattcaggatgagtgaggtgttgactgcagagttctgtagtcctatcagaaactgggggcctgaatttgtgactggtactaagaaatgtaaac

SEQ ID NO: 18748 - DNA, 120 bp, synthetic construct
  source 1..120: mol_type = other DNA
tcataaccagggcaggcagtacaagacgactggggtgaagtgcacacactgaggcttcaagacagtgtcacactcactggcaaacatgctagtcattcattattttttcatttaataaat

SEQ ID NO: 18749 - DNA, 120 bp, synthetic construct
  source 1..120: mol_type = other DNA
ggacaatgaacacagtaaactctgttctcataagaaacggcaagtctgtcttctctagtaatcacggcatctttgaaactgggaaatgagggctgcctcgaatctataaaccattcagtt

SEQ ID NO: 18750 - DNA, 120 bp, synthetic construct
  source 1..120: mol_type = other DNA
acctgttccaggaaggactttgcaacagcaattactctaacaagttacaattcgcagagtccggcctttaaggggctttgaagagagagaaacccatgaatcaataataagataaggcta

SEQ ID NO: 18751 - DNA, 120 bp, synthetic construct
  source 1..120: mol_type = other DNA
cctccactatcagtaccgagtccaccacaatcatcacccccattcacctccactatcagtaccgagtccaccacaatcatcacccccattcattagcataggcagagcactgccaagtac

SEQ ID NO: 18752 - DNA, 120 bp, synthetic construct
  source 1..120: mol_type = other DNA
ttatcatccaagcacaatctgtttttagggctcttttactgctgtgagtaataaatgacagaagcaatttagtttttctagaccaactccttggtgtactcaactttctaggagcctttg

SEQ ID NO: 18753 - DNA, 120 bp, synthetic construct
  source 1..120: mol_type = other DNA
aatccactgatgtattctgcatgtatgacccctaggtttgtagaccattttataattctcaatgactgtgtgacctttaggccatgcagaataaatatgtgctccaaaaagttttaaatg

SEQ ID NO: 18754 - DNA, 120 bp, synthetic construct
  source 1..120: mol_type = other DNA
tgatcagcctaccatttcataattttttctgaataccttgttttcatctataccagcaccacaccatagcatcactatcaccactgtcactgctaccaccatcacaatcacgaccaccac

SEQ ID NO: 18755 - DNA, 120 bp, synthetic construct
  source 1..120: mol_type = other DNA
accaacatcaccactatggtcaccatcaccatcagtaacattaattctcaccttgatgatcacagtgtcttccaaactagcctctctgcttctagcttctcattctctccaatctttcct

SEQ ID NO: 18756 - DNA, 120 bp, synthetic construct
  source 1..120: mol_type = other DNA
atattattatatcctcaatttctgagccccaccccagaacaattaatttaggctctaagggtgtttttaaaaacaggctattcaaaatgtggttcttggaccagtggcattggcaccccc

SEQ ID NO: 18757 - DNA, 120 bp, synthetic construct
  source 1..120: mol_type = other DNA
ctgaggctgtatccacacagccattgtatgataactcgtcagggatgacaaatgaatccaaacaggatgtgtagcttgaacagatgagctttattcagcattaaccatccatccaagact

SEQ ID NO: 18758 - DNA, 120 bp, synthetic construct
  source 1..120: mol_type = other DNA
gtaatagctctgccatgaacatgaacacaccttattcttgagcacctgagtgatttgtggagggtatatttagcagtagaattggtggattgttgggtgtatccacactaaatgtcagca

SEQ ID NO: 18759 - DNA, 120 bp, synthetic construct
  source 1..120: mol_type = other DNA
aaagaaaaaaaaagagcgggtaccctgctaacaaaggcagaggagactgcctcagtatacatgtcaccttggggtactgagaagagagtgaacattttacaggcttgtgttaagaattaa

SEQ ID NO: 18760 - DNA, 120 bp, synthetic construct
  source 1..120: mol_type = other DNA
aagagattagtgggtaccaggggataggaataaaggatgtgtggctttaaaggaatagaataagggtgccacatagttacggaaggttctggatcttgattatgctggtggttacacaga

SEQ ID NO: 18761 - DNA, 120 bp, synthetic construct
  source 1..120: mol_type = other DNA
tgacaactccctattttatacctctagtccagtctcttccctgaatcttagacttgtatctaacagccactgcaaatctctacatagattaccagtaggcaccttaaaatttacatgacc

SEQ ID NO: 18762 - DNA, 120 bp, synthetic construct
  source 1..120: mol_type = other DNA
caaatggaactgaatctgtgccaaggacacttccatatctgcctaaagacccagagtttagtcagttccccggacaggaatatgatattgatttcaagaatgcagaaaacaacttccctc

SEQ ID NO: 18763 - DNA, 120 bp, synthetic construct
  source 1..120: mol_type = other DNA
agtagaatctggattgtgaaggcagtaacacttcccatctggaacacagaagcaactactagtatcatgaatctgttgactatcttccaacaggtaactccttaattagcacctcaaatg

SEQ ID NO: 18764 - DNA, 120 bp, synthetic construct
  source 1..120: mol_type = other DNA
acaattattttaaaagaaatccttcctcctggtaaaacagtcaactagatagaaggacagaaagggaaagaaaacccctgaggctccttgtcctagtctctaggagcagccactgttaac

SEQ ID NO: 18765 - DNA, 120 bp, synthetic construct
  source 1..120: mol_type = other DNA
atcctcccagagtctgacgccaaagaaaatacaaaccaacaaaaacatcaagaagtaacttttcctcatgcaccacatggtccttcagcaaatcctgtggctctaccttcagaatatctc

SEQ ID NO: 18766 - DNA, 120 bp, synthetic construct
  source 1..120: mol_type = other DNA
ttcacatggctttgaatcactctctagtgtcttttcatttcaatgtgcaggacttctttgagcatttcttgcagggcacgtctggtggttatgaactccctcagttttgtttataaggga

SEQ ID NO: 18767 - DNA, 120 bp, synthetic construct
  source 1..120: mol_type = other DNA
tactgaatattggcccattatctctggccaccaaggtttctgacgagaaatttgaggataagcttaaggatcccttgtatgtgatgcctctttcttgctgctttcaacattctctgtctt

SEQ ID NO: 18768 - DNA, 120 bp, synthetic construct
  source 1..120: mol_type = other DNA
cccaggctgggagtgtctctgcttctaacgggaaactctaatgccatttacatctcagacccctattgagtttcaaaatttaatccactggtagtagagtgaaaatatgttgcacttacc

SEQ ID NO: 18769 - DNA, 120 bp, synthetic construct
  source 1..120: mol_type = other DNA
tggaactcttagtaactcccacttaataacttacataagaatgaaaatctagagaatgtcacattatttcctgagagaagatttaattgagcacatgctacggggcaggcagtttctgaa

SEQ ID NO: 18770 - DNA, 120 bp, synthetic construct
  source 1..120: mol_type = other DNA
agaggtcaaagcgtgaaaggaacacctggagaagtttgcaaatgaactgggaggcagatgacataagctcttgacggggaaaaagagaaaggaagtcttcgttgactgttgctgttaagc

SEQ ID NO: 18771 - DNA, 120 bp, synthetic construct
  source 1..120: mol_type = other DNA
aggactgaatataaggaacacagaagagttctgacagccccactgcattaaactggtggttctacagagcggcgccttcaggagcacggggaaagggggagttgtgcaaattcaactagg

SEQ ID NO: 18772 - DNA, 120 bp, synthetic construct
  source 1..120: mol_type = other DNA
gtttattcatccagtgcaaagtgtggtcatccctgcaaacttgttagaaacgcaaatgtggggaccacacctcagatttaatgaatcagaaactgtgattgggaccagcaatccactaaa

SEQ ID NO: 18773 - DNA, 120 bp, synthetic construct
  source 1..120: mol_type = other DNA
acatgcaccatgtccatgcttctgaaagacgctgacttcatccactttcacaagaaaacattagctttcccagacactccaccaagtagaattacattcatatcttactggatggaacca

SEQ ID NO: 18774 - DNA, 120 bp, synthetic construct
  source 1..120: mol_type = other DNA
tgaggtctgaaaatactaaatgggaagttctggaaataaataatacataagttttaaattgggcatcactctgagtagcgtgatgagatctcatgccatcccactcggtcctgcccagaa

SEQ ID NO: 18775 - DNA, 120 bp, synthetic construct
  source 1..120: mol_type = other DNA
taagtcaaaggttgatctggatatttccaggttcttgatgcagcccacaaagcttttggtggtgacacctctcctgtagggaagggcatgagaacaatcacaaaatttgggtttttaaat

SEQ ID NO: 18776 - DNA, 120 bp, synthetic construct
  source 1..120: mol_type = other DNA
tttttatggtcatttgatttttggcaaaggtgcgaaggcaattttcaacaaatgttgctgggaccactggatatctatatgcaaaaaatgaacttacacctctccctctccctctcccct

SEQ ID NO: 18777 - DNA, 120 bp, synthetic construct
  source 1..120: mol_type = other DNA
gaacttacaccctgactccttaccatacacaaaagctaactcaaatggatcataagagctaaatttaagagctaaattataaactttccagaagaaaacctaagatcttggattaggcaa

SEQ ID NO: 18778 - DNA, 120 bp, synthetic construct
  source 1..120: mol_type = other DNA
ctagaattacaggtgttagccaccgcgcctgaccaagatgagaggaagcccatgtgaccaggcttcacaatacatttttagatacaacaaaagcttgactgatgaaagaaaacattgcta

SEQ ID NO: 18779 - DNA, 120 bp, synthetic construct
  source 1..120: mol_type = other DNA
tttctcttatctcaagtgacactcacagagcctggtacataatagagctaccgatgtttgtgggaggagtggagtatgaaaactgactttggcatgttgaaaaccaaattcggtatttcg

SEQ ID NO: 18780 - DNA, 120 bp, synthetic construct
  source 1..120: mol_type = other DNA
agcaacatgccatacctcgtgtccaccacaatgtatggattacctgatgattggagagaaatgcagtgactctggaaatggcattattgtgatgtatatatgcatgagagatttgggtga

SEQ ID NO: 18781 - DNA, 120 bp, synthetic construct
  source 1..120: mol_type = other DNA
tcactttcagcacaggttcttttccccacaaatctggaaaaaatacgtgctatctcatgaccacaggttacttcatttggcttctttgctttcgtatgagtacacacccacctagaattg

SEQ ID NO: 18782 - DNA, 120 bp, synthetic construct
  source 1..120: mol_type = other DNA
ctatgagaatcacttgatagatctgcctccaaaaactgacagtgtaactttcctgatctggatttcttagcattctggcagggtctgtgctataaaagccattggcagtgtgtctgttat

SEQ ID NO: 18783 - DNA, 120 bp, synthetic construct
  source 1..120: mol_type = other DNA
ctttagctcagctataatgctcctaatttgagtaatgaattcatgataaataacattttacttgttaatgtttatatcttgttaatggcctttgaaaatcactgaagtcatagatgtgat

SEQ ID NO: 18784 - DNA, 120 bp, synthetic construct
  source 1..120: mol_type = other DNA
ctatcttttctgcagtaagggaatggataagtaaactgtattttatttatttaatgtaattctagacaccagttaaactaacatagcttcaactctgctatattgaatgaaatctcatgt

SEQ ID NO: 18785 - DNA, 120 bp, synthetic construct
  source 1..120: mol_type = other DNA
gagtagtctagggcaatgtctgataaaggaggggtttgaattttggtatggaaggctttcttttttttttttttttttttaatctgttttcttttttctttttttttttacttttttttt

SEQ ID NO: 18786 - DNA, 120 bp, synthetic construct
  source 1..120: mol_type = other DNA
tcatgaaatctggagaattctcactccgaatagtgttcgatagtgaaattttctctgaattgtatttcctttcatcacctgtattctttctaaaacttctgctagtcccatgtggggcct

SEQ ID NO: 18787 - DNA, 120 bp, synthetic construct
  source 1..120: mol_type = other DNA
cagtagcattaagtacattcacattgtcatgcaaccatcaccactgttcttcatcagaatgttttcgtcatcccaagctgaaacttcataccaattgaacactgactctgcattccctct

SEQ ID NO: 18788 - DNA, 120 bp, synthetic construct
  source 1..120: mol_type = other DNA
atgtgttattggtacccaggcaaggcctcctcattcaggcattgtagggagggaaggtgtctccagcctaatgactagatgcgaaagaaaaatagaataagtgtagcttaaaagaaagaa

SEQ ID NO: 18789 - DNA, 120 bp, synthetic construct
  source 1..120: mol_type = other DNA
gctgggattaaaggcatgagccaccgtgccaggccccttttcatttttttaagtgttagaataaagtctacccttctgacgcttccaagagttaacagtaattaaccgtttcttacatgt

SEQ ID NO: 18790 - DNA, 120 bp, synthetic construct
  source 1..120: mol_type = other DNA
tgagcaatagaaaaaaattcctttcctttgaatgatagctgtgattcaccccaccccattttcttgtttctggtccatccgatgagacggatgctctgatgctctgaggcttctgggagg

SEQ ID NO: 18791 - DNA, 120 bp, synthetic construct
  source 1..120: mol_type = other DNA
gcctggcttggccccaggcattgcaattgacagacatttgcatttcatacggtaaatgaggactcagcacagccaaccataatcagcatgtctgggatagactggtctagaataaaaatg

SEQ ID NO: 18792 - DNA, 120 bp, synthetic construct
  source 1..120: mol_type = other DNA
ctgcactccaacctgggcgacgtactgagacactgtctcaaaaaaaaagttgggcccaccataaaattgtacatagtcatagcaaaaccgtgtgaaaagaacagaagatttttaaggtaa

SEQ ID NO: 18793 - DNA, 120 bp, synthetic construct
  source 1..120: mol_type = other DNA
aaaacattgtaatggccatcgctggaaacaagtgcgacctctcagatattaggtaagatgcattgaaatctcttttgtgtagatactgtcctccatccctgagtgtcatccgtgtagata

SEQ ID NO: 18794 - DNA, 120 bp, synthetic construct
  source 1..120: mol_type = other DNA
tccctgagtgtcatccctgagtgtacaaaggtatcatgcctttgttatgtctgccctcagtgtagtaacttaattaatggcctttcacttttggtagtcaatgtggcattgattcaacca

SEQ ID NO: 18795 - DNA, 120 bp, synthetic construct
  source 1..120: mol_type = other DNA
aaaaccagaaaagtgatttttccaaaataaaattcttaccataccacgacattgcagaaaatcttttggtggcccccccttcacctttccagtgaagtccccactctgcgttaacagatg

SEQ ID NO: 18796 - DNA, 120 bp, synthetic construct
  source 1..120: mol_type = other DNA
ggatgaggctagaacatttataatttggtgttgatgctgtcatctgatagaggatgttgtcatactgttgctctgaggaagtacatcttgagaattttcaaataatgacgtgaagtttga

SEQ ID NO: 18797 - DNA, 120 bp, synthetic construct
  source 1..120: mol_type = other DNA
gaaattacttaaaagacaagagtaactaaaatggagacatgccaacccttgcttacctttcaaagccgatctgccggaatgtcttttcccatgttgagcctgtaatggaagggagagaca

SEQ ID NO: 18798 - DNA, 120 bp, synthetic construct
  source 1..120: mol_type = other DNA
aatgctattccaactgatatcaagaacagtatatccaaatccataagagatggacagctgggtataaaaaagatgttatacaatttttctatgtaatatttcttccctatgtcacaggca

SEQ ID NO: 18799 - DNA, 120 bp, synthetic construct
  source 1..120: mol_type = other DNA
gtactgctttttacatttgtattgtttttattgttgtatttttttcaaataagctttttcaaataatttcgatctgaggtcagttgaatttgttggtgcagaacccatggatacggaggg

SEQ ID NO: 18800 - DNA, 120 bp, synthetic construct
  source 1..120: mol_type = other DNA
aagagcactcaagatagacaatgaaaataagaacaattccttgaacatccaaattttaggtagtaaggaaagcaagtttaacaatttctagccatctttagtcctattttaaatcaagag

SEQ ID NO: 18801 - DNA, 120 bp, synthetic construct
  source 1..120: mol_type = other DNA
atggggctgaagaaaccgagaagaatgaaaaggtaaagggatggtttgctgggtcatgaatgtagacactgtccaccccgtcctctgggaaacctgcagcatctgctgagcgttacagct

SEQ ID NO: 18802 - DNA, 120 bp, synthetic construct
  source 1..120: mol_type = other DNA
tcctcagtgtggggaagatgtcaccctgggcgggacagcgatccggggcccccctcattcctcagcggggaacatgtcaccctgggtgagacagcgatccatgaccccctcattcctcag

SEQ ID NO: 18803 - DNA, 120 bp, synthetic construct
  source 1..120: mol_type = other DNA
ttggatgtgcctatagtgcggttcaggtggtgcccactggcaatgctgccactgttcgcaaacattcttccaccgtctgctccgccatcctcaccctctgccttgagagccaggttctca

SEQ ID NO: 18804 - DNA, 120 bp, synthetic construct
  source 1..120: mol_type = other DNA
tagtgactagaaaaggagattaaaacagttagtataaatatgcaccacatgttcaaaatagtaaagcatccacaaaattagaaatataagagatataaaaatgactcaactcaaatttct

SEQ ID NO: 18805 - DNA, 120 bp, synthetic construct
  source 1..120: mol_type = other DNA
ttttatgactggcttctttcatgtaacataaagttttcaagttcatccatgttgcagcctgcatcagtgcttcatttcttttcatggccaaataatattccactgcatgcatacactaca

SEQ ID NO: 18806 - DNA, 120 bp, synthetic construct
  source 1..120: mol_type = other DNA
tttgttttaagaacacagatgaaaggagatttataaggccttttagcttgaccgcaaagcttttattccaatcacagtgttgtgggtgggtgtggcctgctgccttttgagaaagaactt

SEQ ID NO: 18807 - DNA, 120 bp, synthetic construct
  source 1..120: mol_type = other DNA
taagtggaatcatccagtattcgtccttctgtgacaggctcatgtcacttagcacaaagtcctcaagctttatcaatgttgtagcatgtgtcagaactgccttcctttgtaaggatgaat

SEQ ID NO: 18808 - DNA, 120 bp, synthetic construct
  source 1..120: mol_type = other DNA
ggtgaagtacaggtgcagtttggatggaacacggagatactgtgtagtggtgaagtacaggtgcagtttggatggaacacggagatactgtgtagtggtgaagtacaggtgcagtttgag

SEQ ID NO: 18809 - DNA, 120 bp, synthetic construct
  source 1..120: mol_type = other DNA
tgcaatttggatggaacatggaggtattctgtactggtaaagtacaggtgcagcttgggtggaacatggagatattgtgtagtggtgaagtctgagtttttagtatatccatcacccaaa

SEQ ID NO: 18810 - DNA, 120 bp, synthetic construct
  source 1..120: mol_type = other DNA
ccatggttcctgaaacacagtttagctctcccgggtttctcagtgggaacatttacaatcagattcgagggcatatcccatttcatgggataaagtgaattagggaaaataagcttttac

SEQ ID NO: 18811 - DNA, 120 bp, synthetic construct
  source 1..120: mol_type = other DNA
gaagaggaagagaggaatacgcttatttccatacccttgtctaagatcattcactctgttccataaatctttgagatttctaccaccactgacttaagaactatgattcatccgggttta

SEQ ID NO: 18812 - DNA, 120 bp, synthetic construct
  source 1..120: mol_type = other DNA
actataaaatcggtacatttataagtgaaaaagagcagttaccgcatgatgtaatttatagaccagcacactcgactgctctttgcatgcagtctgtgaggctgccgtagatggggcaaa

SEQ ID NO: 18813 - DNA, 120 bp, synthetic construct
  source 1..120: mol_type = other DNA
caaagccagagacatcacactttctgatcttacaatatattataaagttacaataacaaaaacagcatggtactggcaaacaacagtggaacagaacaaagagtccagaaatgaacccac

SEQ ID NO: 18814 - DNA, 120 bp, synthetic construct
  source 1..120: mol_type = other DNA
cacagtgaagtatgaagaatcttgcatactttgaaacaccattactttaggatggtaaaataaccacttacttatagcccttaatatgcctgccactggctggggagagaagatccctgg

SEQ ID NO: 18815 - DNA, 120 bp, synthetic construct
  source 1..120: mol_type = other DNA
ttttcttctactcaggaaagtgagagcttatattctttaaagttagcctgtggaaatgtatctcttcctcagttatcagctgctatgtcttaaattttacatgctaaactgattgaggat

SEQ ID NO: 18816 - DNA, 120 bp, synthetic construct
  source 1..120: mol_type = other DNA
ctggttgtacaattgaggtaatcctcaattcaggttgctgtctggacatttcatgactggatttaaaaatatttttaaggccaggtggggtggctcacgtaattccagcactttgaaagg

SEQ ID NO: 18817 - DNA, 120 bp, synthetic construct
  source 1..120: mol_type = other DNA
acagtcactgatcctgttcatgatattgcattcgctccaaatttgggaagatctttccatattctagcaatagcgaccaaagatgtgagaatttttacattaaagcctgtgaggtgagtt

SEQ ID NO: 18818 - DNA, 120 bp, synthetic construct
  source 1..120: mol_type = other DNA
gatcccattgtccacttataaactcttctctggcatcccctggttcttgaagagaatattgagcccagaaaatataagcagccgggtcatacggaaacacgtttttttcttcatttcttc

SEQ ID NO: 18819 - DNA, 120 bp, synthetic construct
  source 1..120: mol_type = other DNA
ggttgtcattagaaagtgcagtctttctatcctacttttgaatttcagggaggagcttcaggatttgtaaagacttcatctatattgaagactgcccaagagttatggcttacccggctg

SEQ ID NO: 18820 - DNA, 120 bp, synthetic construct
  source 1..120: mol_type = other DNA
gtgcgtgggggctgagtcccgtgcggccctgtgcgtgggggctgagtcccgtgcggctctgtttgtgggggttgagtcccgtgcggctccgtgcgtgggggctgagtcccgtgcggctct

SEQ ID NO: 18821 - DNA, 120 bp, synthetic construct
  source 1..120: mol_type = other DNA
ttctatttcaacaatctaaaaataatctgtaaaggtgttagcgcaatatagtgactatgaaagaaaagccatgcagaagtcactctgcaaggtgagtcatggggccacagtagcagcccc

SEQ ID NO: 18822 - DNA, 120 bp, synthetic construct
  source 1..120: mol_type = other DNA
gccaccactgctctcttttcattactatttgcatggaatattacaaatagtattttccatactttcactttcaacctgtatgtgtccttagatccaaagttagtctcttttagacaaaat

SEQ ID NO: 18823 - DNA, 120 bp, synthetic construct
  source 1..120: mol_type = other DNA
gttcatttaataaatatttaatagttgtcatgccatacttctgtcccaggagtgtacagtctgagtgtcatcacgatctgcacagttagctgccatagctctgatgacatcacatgcagg

SEQ ID NO: 18824 - DNA, 120 bp, synthetic construct
  source 1..120: mol_type = other DNA
tatacctgctatatctttcagcctcaaaactcttagatcaggtcttcctttttctttacacaagtggatagcagatgtgacaataccactgtctgccacagggaataatttgaggggcca

SEQ ID NO: 18825 - DNA, 120 bp, synthetic construct
  source 1..120: mol_type = other DNA
caacaacaaaaggacaaataaccaaacacaaaaatgggcaaagggcttaaatagacatttatccaaagaagatatgcaatgaccaataaacaaatgaaaacataccaagtattcttagtt

SEQ ID NO: 18826 - DNA, 120 bp, synthetic construct
  source 1..120: mol_type = other DNA
ttttcagaagtagttcactaagactttgtaagaaggtgcaagtggctttcatgccataataccaggtcaaaacacatatgggggagccttaattttcttttatgtgaggaaagccctccc

SEQ ID NO: 18827 - DNA, 120 bp, synthetic construct
  source 1..120: mol_type = other DNA
cactgtggacactggagaatccttctccccacacacgtcctgctgtggacactggagaatccttcttgccacacgtgtcccactgtggacactggagaatccttttccccacacacgtcc

SEQ ID NO: 18828 - DNA, 120 bp, synthetic construct
  source 1..120: mol_type = other DNA
gagaatccttctactcacacacgtcccgctgtggatactggagaatccttctcgccgcacacgtcctgccatggacaccggagaatccatctccacacatgtcccgccgtggacactgga

SEQ ID NO: 18829 - DNA, 120 bp, synthetic construct
  source 1..120: mol_type = other DNA
ccaccccagctgtttcttttataactccgtttacggtaggcttgaatttcacttccagcaggactttttatttctttgctgcacttttaactttgttggtggttttcctcttttgatgac

SEQ ID NO: 18830 - DNA, 120 bp, synthetic construct
  source 1..120: mol_type = other DNA
gcttcatttgggaagtcatagtcacagagctgtcctcaatcctaagccaagagggagtttcttagcagcagcagtgaaggatagggtcgggatgcagtgttcataactgtgggatcacag

SEQ ID NO: 18831 - DNA, 120 bp, synthetic construct
  source 1..120: mol_type = other DNA
aacttcatgcaagctcattaggcctgatgctgtcgggcacgtggttcccccatccgccatccccactttctcagcttagagaaagcggtgatctctgaggattctgtcgctgacatcagt

SEQ ID NO: 18832 - DNA, 120 bp, synthetic construct
  source 1..120: mol_type = other DNA
tgtgagcagaaataaggccacttttctattggaacccaattgcaaagggcccaagcccctgctcgaagactcagagcaatttcagtcttttccaggaagcccccaacatgaaaattgttg

SEQ ID NO: 18833 - DNA, 120 bp, synthetic construct
  source 1..120: mol_type = other DNA
acttgaagtaacttggataaacatttggccagcatacccttaaaaacacagcatgtttttctgacccttttccagagtcttaggtaaatatgggaaatgtctgtattttggaggctggat

SEQ ID NO: 18834 - DNA, 120 bp, synthetic construct
  source 1..120: mol_type = other DNA
gaactcctcaaaaatacaaatattcctatgtatccaaaaccaatggaaaagcagacagatcatgcagccctttataagtgataaaggggacattgggtctcactgtaaacttgaagggag

SEQ ID NO: 18835 - DNA, 120 bp, synthetic construct
  source 1..120: mol_type = other DNA
gcttattgaccagtttgagtctccagatctcctcatttttcaccaaagaaccagaaaactgaagcaactcccatctgggtacaaatcaaggaaattatttctgtgaggggaggaacaaac

SEQ ID NO: 18836 - DNA, 120 bp, synthetic construct
  source 1..120: mol_type = other DNA
gagttgaagttttcaggtttaattaatgcacatgtgtgatcctaattgggtttatgggccccatgatctctgaatcagtgtcagatgtgaagatgccaggagcactaatggaggtggact

SEQ ID NO: 18837 - DNA, 120 bp, synthetic construct
  source 1..120: mol_type = other DNA
gaagaaaaaagcagaaaagagaaagatgctatcaagaactatgggtggggatgcagggcagaattggttaaggaactggtttgtgctacagatacaggctcaggcagcgctatgttctga

SEQ ID NO: 18838 - DNA, 120 bp, synthetic construct
  source 1..120: mol_type = other DNA
agaaaaagtggtggtgaaagctggggcaggtaggtaattctgctaaatagctgtgacaaaaaattcctcatgctttttgttctccgaaatcagcttaacgaaaagagacacccttcccat

SEQ ID NO: 18839 - DNA, 120 bp, synthetic construct
  source 1..120: mol_type = other DNA
actggggttgggggaaaaaaaaaaaaaatcttaaaaatcccaagggattctttttttacaggaagggtaagcctggatatttctctcacccccagggcattcagctgctcctttgagaag

SEQ ID NO: 18840 - DNA, 120 bp, synthetic construct
  source 1..120: mol_type = other DNA
gaacagggtaaggtagggacgggggaccccacggaccacagctccttccacgcaggaaccctgcacaccgagtcggcgtctttccgatgactttcgcctcatcacctcacaacctgggga

SEQ ID NO: 18841 - DNA, 120 bp, synthetic construct
  source 1..120: mol_type = other DNA
tgctccactactttccttgtctcctgggggctccaccccagagaggtgtaagttagcagttacttaatgtaatcaccccaggatggagggtctgtgttgtgggcccaagccacggttcct

SEQ ID NO: 18842 - DNA, 120 bp, synthetic construct
  source 1..120: mol_type = other DNA
cagtgattagaaatgtggttggggactggcttaaacaagaatctggccacgttttcgcagggtggctgttctgtgctgaggtaccacttccacccctggtcagcttgggctctccaaagc

SEQ ID NO: 18843 - DNA, 120 bp, synthetic construct
  source 1..120: mol_type = other DNA
attcaattgcatagcccttagaagtttatcagtcttttctttcacactttcaatttcctccaaaattttattttcccttagctggttctgatgttttgtttcatctagttccagtctcca

SEQ ID NO: 18844 - DNA, 120 bp, synthetic construct
  source 1..120: mol_type = other DNA
tacacacacacacacacacacacgtatatatgcaacgtgcaggatttttgccaggtcttctgatgctactgctagtgatcctccacaaaatcacagttgcttctgtagtgtaaatatata

SEQ ID NO: 18845 - DNA, 120 bp, synthetic construct
  source 1..120: mol_type = other DNA
accatcagatgtcattcacacaatgcatatctgcacattaatccaagacaagacaaaggggtctcacatctgttaaccctgctctcccagtcatgttggcaccagggactagttttgtgg

SEQ ID NO: 18846 - DNA, 120 bp, synthetic construct
  source 1..120: mol_type = other DNA
accaagctgagagtcatatcaagaatccaatcctttttacaatggctgcaaaacagcaaaatacctaggaatatacttaatgaaggaggtgagtcatctatcaaaggataactggaaaac

SEQ ID NO: 18847 - DNA, 120 bp, synthetic construct
  source 1..120: mol_type = other DNA
atgaggtaaagttgtataagaatatcaccgttattgtactgagaagaaagtgaacaagaaaaggaatttaaaaagagagtagagtatcactaccatatacatacatgaactgacaaagag

SEQ ID NO: 18848 - DNA, 120 bp, synthetic construct
  source 1..120: mol_type = other DNA
caatctcaaaataaaataaaataccagtaaactttgcaattcctctgactcagtttgccataattacaattatgattactagtaaaagaataaatagtgaataaccacaatattgggctt

SEQ ID NO: 18849 - DNA, 120 bp, synthetic construct
  source 1..120: mol_type = other DNA
ttatgtggctgatgaaataatctgtagtccatacctccatgatacagtttacctatataataaacctgcacatgaacttctgaagctaaaataaaagttcattaaaaagaaaagaaaatg

SEQ ID NO: 18850 - DNA, 120 bp, synthetic construct
  source 1..120: mol_type = other DNA
aaccctaactagtgagcccttgtagtgcactgaagtgcttttttaaaagattcctaattggattgtaggcacgctttaaattattaggagctgaaatcaacaccaaacagaaagaaatgc

SEQ ID NO: 18851 - DNA, 120 bp, synthetic construct
  source 1..120: mol_type = other DNA
tgttagctttaagtcttgttctgttgagaaatccatatattcagttaagatgaaccacttagaacagttaaaaactattgcctttataaaaacagattgaagacagcattttattttatt

SEQ ID NO: 18852 - DNA, 120 bp, synthetic construct
  source 1..120: mol_type = other DNA
acgtagcaagtaagaaagttaggaattaaatccagtcttgtgtgaatccaaagcctagctcttttctctctcttttttttttttccatgcccagctagttttttttttgtttttgttttg

SEQ ID NO: 18853 - DNA, 120 bp, synthetic construct
  source 1..120: mol_type = other DNA
aaaaaagttggcagggaaaaattgaaaaaaaaaagtattaccttttacaaattcagtgttttttttaaaaaagcattaaccacaagtgcactgaaaaaactgtaccctctaatgcttctt

SEQ ID NO: 18854 - DNA, 120 bp, synthetic construct
  source 1..120: mol_type = other DNA
agtgcccatgttgctcttgccgctccccttgcagcaggggaagcggtggtgaaaccacttgcccatcttgctcctgagatcgaatggcttcttcacagcagaggcagcgggcattgaaca

SEQ ID NO: 18855 - DNA, 120 bp, synthetic construct
  source 1..120: mol_type = other DNA
ttctgctgctaatgttgttaagaattggtgtatccatgttcaagagaattaccgggctatagtttacttttttgtactattttgatatcagagtaatgttagcttcataaaatgaattgg

SEQ ID NO: 18856 - DNA, 120 bp, synthetic construct
  source 1..120: mol_type = other DNA
gatccactcgccttggcctcccaaaatgctgggattacacccaccgcacccagccagtggtggagcactttataaatgccagtaagatcctgttgcttgatggtgttgttgagttttttt

SEQ ID NO: 18857 - DNA, 120 bp, synthetic construct
  source 1..120: mol_type = other DNA
gcccaagagtatatgaaaaatatagaacatttaccaattaactttgtattaggcacttcacacatttctcatattcttatttaatccttgtaattgcacaaatgatcttctgtggtaggc

SEQ ID NO: 18858 - DNA, 120 bp, synthetic construct
  source 1..120: mol_type = other DNA
aggtctaacatgtaagtctttaatccatcctgaattaatttttacaccttatacactttttaaaaaatgcaatatttgctgggcatggtagttgttgcctgttatcccagcagtttggga

SEQ ID NO: 18859 - DNA, 120 bp, synthetic construct
  source 1..120: mol_type = other DNA
aaggaatgctctcatgaatgtatctgtgattaacatttttagatcagatgttcccatcagaatccaaacgagaggaagatgaagaatattcttgggattctggggtattgtgtattattg

SEQ ID NO: 18860 - DNA, 120 bp, synthetic construct
  source 1..120: mol_type = other DNA
gtgggacaatttgtttgagtagtgttttaaaaagtagaaattatttttataaatagaactctttgggtccgtttgtggtagccatgcttatagcaacataagtatcaaataataatgatg

SEQ ID NO: 18861 - DNA, 120 bp, synthetic construct
  source 1..120: mol_type = other DNA
gccattgggtagaaggtcaggacagaaaagggtcaggagaaagcattatggtgctcctatttttgagtatgtttttagttaggggagaagaagaaaggggcaatggaatagaaattgtag

SEQ ID NO: 18862 - DNA, 120 bp, synthetic construct
  source 1..120: mol_type = other DNA
attttctcagtgtcatgatttgctcctctgattcaagatcacttatctcctcatcactcagcgtatacatattggcattaacattttttgcaaaaatcatatataaatgggtgtacaatg

SEQ ID NO: 18863 - DNA, 120 bp, synthetic construct
  source 1..120: mol_type = other DNA
catctctgcgtgttttgcttttttatcttgtcttagaaaggtcaaagccagctattttcttcataaaggaaaatattttggttacatactcatttcctatctcatgacactctgctttct

SEQ ID NO: 18864 - DNA, 120 bp, synthetic construct
  source 1..120: mol_type = other DNA
acctggactgtattagtttgtggatgggtgtgctttgacttttctgtataagtggatcaggaaattttgagaggactaaaccagagaaccccataaatgtaaaaatactcctatttcaca

SEQ ID NO: 18865 - DNA, 120 bp, synthetic construct
  source 1..120: mol_type = other DNA
agtaaccaatattctaaactactttttaaaagtattcttatgcatgtttaaacattttccaacatgtgtacgtggtcatatttaatacataaaatttttttcaacttctaatgcataggt

SEQ ID NO: 18866 - DNA, 120 bp, synthetic construct
  source 1..120: mol_type = other DNA
tttaagcttatcttcctaaaacatatagacacccaaaacacacccaatatactgtcatggcatattgaaatgtaaaagtgttggacatatagtttactaacatcagaaagttaatatccc

SEQ ID NO: 18867 - DNA, 120 bp, synthetic construct
  source 1..120: mol_type = other DNA
ctgggacttgaatgtattgacatttctgtattgttcagtatagatctgagggaacatttcaggagaaagaggagcatgaggactaggaaaccttgtgggactacagtaacaagagtattg

SEQ ID NO: 18868 - DNA, 120 bp, synthetic construct
  source 1..120: mol_type = other DNA
tgtttttctgattaggtgactgagtgtgtgtgtgtgtgtgacatataatttttaaaaatcactacttgatgactctttgctagacacactgttttagaagtgtgactctaaagcttttgg

SEQ ID NO: 18869 - DNA, 120 bp, synthetic construct
  source 1..120: mol_type = other DNA
attacttttaacagagtttccttgaggctctcttacagaatgatgggtgtttacccaaggctacacatcaaaaagaattcgataccttaagtggaaaattagaaggtaagaaccatattt

SEQ ID NO: 18870 - DNA, 120 bp, synthetic construct
  source 1..120: mol_type = other DNA
gtggaagaagagtaattggatagagggtcaaaaggagaggcctttcatgggagaaatgtggaagaagagtaattggataaagggtcaagacagaaaaggttaggagaaagcgttatgttg

SEQ ID NO: 18871 - DNA, 120 bp, synthetic construct
  source 1..120: mol_type = other DNA
cctgcaatatggtcatgtatttagccttaaaatgcttggacataaattttttgtgttttagagagtttatatccctgaagtgtcttcattattgatcaatcatctctgaagggaaacagc

SEQ ID NO: 18872 - DNA, 120 bp, synthetic construct
  source 1..120: mol_type = other DNA
actcgagagatccgccctcttcaggcttccaaggttctggagttacaggcatgagccatggcacctggactgtattagtttgttgatgggtatgctttgacttttctgtataagtggatc

SEQ ID NO: 18873 - DNA, 120 bp, synthetic construct
  source 1..120: mol_type = other DNA
aaagccttagaattgaaggacagagaaacattcaaagcaggtaaattttgtaattttaattttactgtggaattaagaacattaaaatatttgaagtgccaagagcctttttattcccaa

SEQ ID NO: 18874 - DNA, 120 bp, synthetic construct
  source 1..120: mol_type = other DNA
taaggggttctgctgcctgagtctgcattcttggcctcgataagcctgcaaagttcacatttatttagtacagattaaatgacaaaactgttgagtaaacatcactagagggtaattaag

SEQ ID NO: 18875 - DNA, 120 bp, synthetic construct
  source 1..120: mol_type = other DNA
cccaagatcctacctaactttttgcaactaaagcagcatatatacacagggtctaggaaattgtctagactggggagtacacatgccagcatttttccagaattgtcaaaacctaagggt

SEQ ID NO: 18876 - DNA, 120 bp, synthetic construct
  source 1..120: mol_type = other DNA
cctccacacatttggtcgcagatgtcttctgttttaatgattttggtatgagagcagagggaaatcatgttgtgtgtgtttctttctacacatacagcagataagagactactgtatact

SEQ ID NO: 18877 - DNA, 120 bp, synthetic construct
  source 1..120: mol_type = other DNA
ataaatttggaaatatataactgagaaacttaatcccatgtttttctctctcctttgatttcattttcaaaatttcagcagtctgcatagatttgtgttgcttaattctacccatttagt

SEQ ID NO: 18878 - DNA, 120 bp, synthetic construct
  source 1..120: mol_type = other DNA
ttgttgttgtttgtctttctgacaaattgattgagtgagtgaataaatacaatttttttctgaagttttttttttgtgtttgctttctgtgttttgtttgtaataggagggagcaacaaa

SEQ ID NO: 18879 - DNA, 120 bp, synthetic construct
  source 1..120: mol_type = other DNA
aaataggacacctgtaaaactataataacaacaatttggttgagtagtattttaataagtggacatttttttttcacaaatagaactctttgagtccatttatggctgccatgtttgcag

SEQ ID NO: 18880 - DNA, 120 bp, synthetic construct
  source 1..120: mol_type = other DNA
agatgtggacattattttggctaaggaagagggattgtgaggcatgaaatgcagcaagaaagaagatagccagccaactttggagtttctgaaaggaaatttgagtgaattcacttcaga

SEQ ID NO: 18881 - DNA, 120 bp, synthetic construct
  source 1..120: mol_type = other DNA
atttgtggctggttttgtcatatttacttatgactgataataaatctcttttgctttttagagtctcctgaaaagccttctcactttgaggtattgagttttataattttatcttgcatt

SEQ ID NO: 18882 - DNA, 120 bp, synthetic construct
  source 1..120: mol_type = other DNA
gtagaatttgttttcaactgctaatatgtaaataattgtacattgtgtaattttctgtaacattctttgtttgatcagcattatattgttagatccatccataatgtgtagaattaactt

SEQ ID NO: 18883 - DNA, 120 bp, synthetic construct
  source 1..120: mol_type = other DNA
acaaagacattcaaaccaatacgaatatttatcctttcctctgcttccattggatttactttcttatttttttttttttttagcttcttcaggtaaaagtcgaagttatttacttgagag

SEQ ID NO: 18884 - DNA, 120 bp, synthetic construct
  source 1..120: mol_type = other DNA
caatctgcctttgagcagaggtttttagaccagtttaatttataatgtaattattgatgtgataaaagttgtctgtcaccatgctgtttgatttctgttagtcccagatcttctttgctc

SEQ ID NO: 18885 - DNA, 120 bp, synthetic construct
  source 1..120: mol_type = other DNA
ttataaacagcttgatccttttcatttttgctttttatgagctgactccccacacctgaggcaaggcctttcagactattcattttcctgtgaagtctgagtcttcccaggcaaatctat

SEQ ID NO: 18886 - DNA, 120 bp, synthetic construct
  source 1..120: mol_type = other DNA
tgagttagtgattgttaaaatatgcagccctttatatcccaaaagtactaatatattttatttctatctcctccttgagacagattcaactaccctatcaaaaatcttggatgcacttcc

SEQ ID NO: 18887 - DNA, 120 bp, synthetic construct
  source 1..120: mol_type = other DNA
ttaaatttttattttgttttatttaggtttctcacactcatgaaagtgaaaatgatctctttcatgaaaattgcatgttgaaaaaggaaattgccatgctaaaactggaagtagccacac

SEQ ID NO: 18888 - DNA, 120 bp, synthetic construct
  source 1..120: mol_type = other DNA
aaatataaatacttttcaaacttcctgaaagaaagtggccttggctaaatgctgaatctagttgaatatatatatatataaatagatgataaatgtacttactatatcagcttagaaaca

SEQ ID NO: 18889 - DNA, 120 bp, synthetic construct
  source 1..120: mol_type = other DNA
ggttcatgtatagtacaaaagaagtgagtagaggagagaaacataggagctgaggtcaggagggatgtggagaccaggttaccaagggcctgtaaagtttgaaataaaattacttttatt

SEQ ID NO: 18890 - DNA, 120 bp, synthetic construct
  source 1..120: mol_type = other DNA
tcctacctcacaaaaatctgagttacatatactttggagataatccattagaaaacacagctaactgttaataacagttatgaaggaattggtggggtggggtggggtttaggaagtgca

SEQ ID NO: 18891 - DNA, 120 bp, synthetic construct
  source 1..120: mol_type = other DNA
ttccagattgattatagaactgtgaaagttaactatgaattacaaactcaagtaactatgagtttgtcatttaagttcttttacttattttttttactttaaatgaagggtgaatgggtt

SEQ ID NO: 18892 - DNA, 120 bp, synthetic construct
  source 1..120: mol_type = other DNA
cacacagtgggtttgcatcataggtgggagacgttatctttattatactggacagtaaaagaacccgacatcctcacaagggagaactctatcttccaaggctgtttactacataaatat

SEQ ID NO: 18893 - DNA, 120 bp, synthetic construct
  source 1..120: mol_type = other DNA
tttctatacttactcatggcagtaaaataattatctcaaattaaggcactaaaaggacaatgcaacccccattgaaagtgttctaagaataatttacatttcaaacagtgcatacatttc

SEQ ID NO: 18894 - DNA, 120 bp, synthetic construct
  source 1..120: mol_type = other DNA
gtgtgttgtgccaaagcaaggacagaaaaacagcaatcttaaccctgaagcctgtgatatttgtgtcaaagaaacagcctgtctgctctgcatggttaaagaagcctggtttatcaggta

SEQ ID NO: 18895 - DNA, 120 bp, synthetic construct
  source 1..120: mol_type = other DNA
tagtcactgataataccaaataattttgtatgttgggatagtatgggaagttaacaaaaaagggaaaaacaattttggtttttgtagaaaaactatgccaacacagttaaaaaacagaaa

SEQ ID NO: 18896 - DNA, 120 bp, synthetic construct
  source 1..120: mol_type = other DNA
tatggtctgtattctttccctcaagctacctctgtaaaactagaagatattctgtgatacagcatgcatgctgatccaggcagtgaatgccagacaaaaagaagaggaaaaactcaaggg

SEQ ID NO: 18897 - DNA, 120 bp, synthetic construct
  source 1..120: mol_type = other DNA
ctacattcaccttcatttgcatatagtatctacattcaggaatggtgaaaggaaaagattttaaaaatcttaagcattggtatattttacatttacttcacaaaaacgcttaggacttag

SEQ ID NO: 18898 - DNA, 120 bp, synthetic construct
  source 1..120: mol_type = other DNA
tctatacacgtgagaaaggcatacagattggaaagaaaggagtaaaactctttatttggcgatgacatgattgtatgcagttgtctcgtggtatctgtggcagattggtcccaggaccca

SEQ ID NO: 18899 - DNA, 120 bp, synthetic construct
  source 1..120: mol_type = other DNA
acatccactagaaaagctaaaatcaaaggttgatatcaccaaatgttggtgaggatgtggagcaactgaaactcatactgttggtgaatataaaatagtgtgacataataatttttgaga

SEQ ID NO: 18900 - DNA, 120 bp, synthetic construct
  source 1..120: mol_type = other DNA
cacatcctcctgtatgctttaaaatcatctctgtattactcataagacataatacagtataaatgcgatgtaaacagttgttatactgtattttttaaagaaatttctattattaatagt

SEQ ID NO: 18901 - DNA, 120 bp, synthetic construct
  source 1..120: mol_type = other DNA
agttgtcttccaaatacatgaaataagtatatacatttttccttctcacattttgctgaagatttaatataatgtcaacatttatgcttaagaaaaacagaaaagtaggtaacagtgctg

SEQ ID NO: 18902 - DNA, 120 bp, synthetic construct
  source 1..120: mol_type = other DNA
gtggcaattgttttcttttttgcttagaagaggtttatggtccaatgtctgtcaagtcagcccctgtcttaagcttgcagttgtatttctctctggagttcctggaggtgatgttatctt

SEQ ID NO: 18903 - DNA, 120 bp, synthetic construct
  source 1..120: mol_type = other DNA
tgtctgtcagaaggggcatatcccaagactgtttctctccttttggaagttacaatgtgcttaaatagcctggcatttccaagagaggccaaagatcttttcctcttttataacacgttg

SEQ ID NO: 18904 - DNA, 120 bp, synthetic construct
  source 1..120: mol_type = other DNA
tcaccctttttttgagctatcattgagatccttccatcactctgacacatacatgcgaacacaccataattttgtccaaaagcagcactggtcttcctgtccattctggcagcagctgct

SEQ ID NO: 18905 - DNA, 120 bp, synthetic construct
  source 1..120: mol_type = other DNA
gacagacacagacaagagaaaataatatgaaaatgatggcagagattggagtaatgtggtcataggcccaggaatgccagggcaaccaacagaagctagatgaggcaaggaacaaattta

SEQ ID NO: 18906 - DNA, 120 bp, synthetic construct
  source 1..120: mol_type = other DNA
tccagtcacaaagctggtgagtggcagatagtagggatgaatgccagttgattgcttttcctcagtatcattctctttttcttttatagtatagtggttcagaaacatgaccacctgtaa

SEQ ID NO: 18907 - DNA, 120 bp, synthetic construct
  source 1..120: mol_type = other DNA
aacttcatcacaagaaagttctaaaaacaggaatctcgtagttcgtctgctgggtacttgagcctccttcccatggaaagcatctgtcggggtggcctgaactttctgggtttgttttct

SEQ ID NO: 18908 - DNA, 120 bp, synthetic construct
  source 1..120: mol_type = other DNA
cccaccatggcctccacattttgttcttggctttaacttgaacactgattgtggattctgacattagttgatcaaagcagacagaccaaccttaggagggctttctataatactacctat

SEQ ID NO: 18909 - DNA, 120 bp, synthetic construct
  source 1..120: mol_type = other DNA
acattactaattgttcctgatgtgcagagcacctactgcatgcaggaaatggctggaagcagttacttaacagtgatagttgctgtgttcttcgaaaaagtcttgaacaagctggtgtca

SEQ ID NO: 18910 - DNA, 120 bp, synthetic construct
  source 1..120: mol_type = other DNA
ccattttcacatatcagtcgctgtgtttggaggatttagtccataattctcccgtagccaagaaaccacttcggcctgccattagggtttatctgtaatcagaaagaaggaagaatgaat

SEQ ID NO: 18911 - DNA, 120 bp, synthetic construct
  source 1..120: mol_type = other DNA
ttgagtgccagcatgacgttcaaagaagtgctcattggagcttcctggattttggatttttggattagaaatgcttaactggtaagtataatataaatattccaatacccgccccccgcc

SEQ ID NO: 18912 - DNA, 120 bp, synthetic construct
  source 1..120: mol_type = other DNA
ggattccaggcgtattggattagggcctgccataatgacttcattttaccttaattatctctttaaaggccctatctcaaaatacagtcctattctgaggtcatgggggttaggacttca

SEQ ID NO: 18913 - DNA, 120 bp, synthetic construct
  source 1..120: mol_type = other DNA
agcacacctttatccgatgataaaatgaagtagttagatgattgcacccttgtataatgaagaaatttggatttaggagaaggtgagaaggcgctgcagaggaggagagaaaagagcagg

SEQ ID NO: 18914 - DNA, 120 bp, synthetic construct
  source 1..120: mol_type = other DNA
gttatagaattgatgatttagcaagaaatacatagttttcactgtctgtatttctactctggaacgtaaactccgtgggaagggcctcattccactgcctgcaatggagttggcatacac

SEQ ID NO: 18915 - DNA, 120 bp, synthetic construct
  source 1..120: mol_type = other DNA
attgtatgtgccgagcttcagactagacatttgggatacttttcttgtttactgattatatccacataaggcagtataattacatcacattttcacatgaggaaatgcaagttgagagtt

SEQ ID NO: 18916 - DNA, 120 bp, synthetic construct
  source 1..120: mol_type = other DNA
tctataattaaccctctagcacactgctcaggattccctctttctttacacagattgttcatcaaaaagtcttcaggcaatggtctagctggtatagggccaaacatgtcagtaacgact

SEQ ID NO: 18917 - DNA, 120 bp, synthetic construct
  source 1..120: mol_type = other DNA
taacatgtgttatagatggaattgggtcccccaaaatgcatacattgaacccctaacccccaaaaatagggcctgtagggagataattaaagttaaatgaggtcgtaaggataggaccct

SEQ ID NO: 18918 - DNA, 120 bp, synthetic construct
  source 1..120: mol_type = other DNA
gctttatcttcaatgaacttctttccaaatgccccaaatctggcaataagttattatttttaagagaagggatctcactaaggtggccaggctggtctggaactcttgggctcaagtcgt

SEQ ID NO: 18919 - DNA, 120 bp, synthetic construct
  source 1..120: mol_type = other DNA
gtgctggggactcagttggggtcttggagaagcacttagttatagcaagaatgtctcataaatggtatctgatagagacaagagtagtggggaataaaaactagttgcttagaaataatt

SEQ ID NO: 18920 - DNA, 120 bp, synthetic construct
  source 1..120: mol_type = other DNA
cttggtcaagaatttttgtgtctatatccataagggatattgacctgtggttttcttgtgatgtccttgtctgtttttggtatcgttaatactgaccttatagattgagttgggacgtgt

SEQ ID NO: 18921 - DNA, 120 bp, synthetic construct
  source 1..120: mol_type = other DNA
tttgtgccctgcatgctttccccctggcttctctattctgttttagttgggtatgacatgagtgacccaattcatatcatcaatattcacacatcatacagttcatgttgtgtctggctt

SEQ ID NO: 18922 - DNA, 120 bp, synthetic construct
  source 1..120: mol_type = other DNA
actttcatcctccctccactttcataccccctccactttcataccccctccactttcataccccctccactttcatactccctccactttcatactccttggctctacttgggcttttgc

SEQ ID NO: 18923 - DNA, 120 bp, synthetic construct
  source 1..120: mol_type = other DNA
caggacttaaaaaaatcatataccaacagccttgttattatttctaataatttctagatgattttagattatttatatagacaatgtcaagattgagattagaattataggtcgactgtt

SEQ ID NO: 18924 - DNA, 120 bp, synthetic construct
  source 1..120: mol_type = other DNA
aaaatttctcaagtatttggagagacacatccaggttcaggaagctggaagaaccccaagtagattcatcccaaacaagtcctctcctaggcacagtatagtcaaattgtgaagtcaaag

SEQ ID NO: 18925 - DNA, 120 bp, synthetic construct
  source 1..120: mol_type = other DNA
tgtctcacaatcaaaaattaagggaattcatcaccattagacaaggcctacaagagatactcaagggagttttacatttgaaagtgaaaaaatgacaaccaccatcatgaaaggatgtga

SEQ ID NO: 18926 - DNA, 120 bp, synthetic construct
  source 1..120: mol_type = other DNA
gtgggggtggagctgccatcctgtgccaagaggtaaacccttcccccataaagtaccttggtattactaaacattttctatttgtcaggcactttatagtcatttttattggttcttttt

SEQ ID NO: 18927 - DNA, 120 bp, synthetic construct
  source 1..120: mol_type = other DNA
agcaataattatagtcccctacaaaactgctcatccttggtgtctgctcaggcacccaaatataaaacctaggaaccaccgtcttctttcttttgctccttcttcccatctaatctgtcc

SEQ ID NO: 18928 - DNA, 120 bp, synthetic construct
  source 1..120: mol_type = other DNA
ggaactcattagttatgaagagtctcaggttacatttcaggatctaccaaatcagaatctggacttcagcaagacttcagtagtttgtttgcccgctgaaatttgagaagcgttgggcta

SEQ ID NO: 18929 - DNA, 120 bp, synthetic construct
  source 1..120: mol_type = other DNA
ttttctgtctctttgggttcacatttattatttcatcttttcttattttttgtaatcttagttgcaccctacaactctatgaggaggtgcaggcatcattcatctttgataagtagcaac

SEQ ID NO: 18930 - DNA, 120 bp, synthetic construct
  source 1..120: mol_type = other DNA
ctttttttaatgcctgtgtgctgggaaacttcccttagggatagacaaggactatctactcaagctgctagtaaatttaatgccatcttcgagatagatgcacagatttagggacatgct

SEQ ID NO: 18931 - DNA, 120 bp, synthetic construct
  source 1..120: mol_type = other DNA
gttacctgctgatgtcttgtttgttgcacaatctttaaagtcagattgttttcttatcccggccttactatttgctagctggatgtacttgagcaaggcactttacttcactgagactta

SEQ ID NO: 18932 - DNA, 120 bp, synthetic construct
  source 1..120: mol_type = other DNA
ttgtcaagtaccattctggaaggagattatcttgtcttgcatgggttttttaactctttcttgccttcatgatgtgctctagaccagcttaggttcaatgaataccacactgaggccaca

SEQ ID NO: 18933 - DNA, 120 bp, synthetic construct
  source 1..120: mol_type = other DNA
tacctacagatttaattggcaggtaaaaggctaatactatcattagataatggcccaggcagctgtgcaattaaacagtcagaaaaagttccagaagtgcccgtggcattccaggagaga

SEQ ID NO: 18934 - DNA, 120 bp, synthetic construct
  source 1..120: mol_type = other DNA
aattttagataggcatttaattcatagaccttcttagtgcccagaaggagggctgcagaaggaatacaacaattcccatgaatgccttgtttgttctgcacaaccagttcaggctcatcc

SEQ ID NO: 18935 - DNA, 120 bp, synthetic construct
  source 1..120: mol_type = other DNA
tttatcaataaattctaaattcaggagtggaatacagtagtctatcattaccacttcaccataccaccaccaccatcatcatcaccacttaccatcatcatcaccaccaccaccaccacc

SEQ ID NO: 18936 - DNA, 120 bp, synthetic construct
  source 1..120: mol_type = other DNA
caggcttgaagactgagacttactgatacgtgtatcctagaagtacctgacacagtaacacactgccttaccttgggtaagtcttcaataaatagctctttgcattcaattctactcatc

SEQ ID NO: 18937 - DNA, 120 bp, synthetic construct
  source 1..120: mol_type = other DNA
agtttacatagtggtatcactggtattacggcatttaatgatcagaacactactgaggttgggaacacagctactagcagcccataaacaaagaagaaagcgaactctaggaggttgtga

SEQ ID NO: 18938 - DNA, 120 bp, synthetic construct
  source 1..120: mol_type = other DNA
agacccagagtcaaattttcctgttgctgtgctgaaaaagtcatgttgcaataaaccttcacagaatcatcatattcactccatctgaaggaaagaaacaaaatcctgagtgaacccaac

SEQ ID NO: 18939 - DNA, 120 bp, synthetic construct
  source 1..120: mol_type = other DNA
ggcaaaactgtgacacaggcaacatcttcctgccctaagcaacaaacagattttctctctactcccattaggccaatgaaaactgtgatccttttcccatattagacttgcattctttca

SEQ ID NO: 18940 - DNA, 120 bp, synthetic construct
  source 1..120: mol_type = other DNA
ttgactcctgactcatttcaattcatcatcagctttttaactcctaggctttaccaatgcaattctaatcaaaattattattgtgggaacttgcaaagcctggacgaaaatggcacaagt

SEQ ID NO: 18941 - DNA, 120 bp, synthetic construct
  source 1..120: mol_type = other DNA
ggggtacgaggtgtcattaaattacagtttacacaaatgaatacatggtggtggctccttatagctttcaaggaaagtgatgtatttttggtctgtttggggtagattctgccgttcctg

SEQ ID NO: 18942 - DNA, 120 bp, synthetic construct
  source 1..120: mol_type = other DNA
gcagaacacacatacccgaattagtggtgccttgaattctattacatcatgtgggcagggggctgtgcaatgactactcatacactattgttactctagatatttctaaggttcctcttt

SEQ ID NO: 18943 - DNA, 120 bp, synthetic construct
  source 1..120: mol_type = other DNA
tcggcggcgtccacgggcagaaaggccagaaaaatatttcaactacatatttgacagtttgggggagtcactcacattaagtagatttccaaaaataccgcttagccttaaaaacaaaac

SEQ ID NO: 18944 - DNA, 120 bp, synthetic construct
  source 1..120: mol_type = other DNA
tatgtaatagcgatgtaggattctgtgagtatgaagaagatatgaagaacatgcactggactgttagagtggattacatttggattatgtaggtgggctggtttggaggaatggggtctg

SEQ ID NO: 18945 - DNA, 120 bp, synthetic construct
  source 1..120: mol_type = other DNA
gatgagagaaggtaggaaaaggtaaggactcacaatctgccaatatacacaattttggaggaggaaatgaaacgctgtgaatacaaacacacacaccagttcaggtctgcagatgctatt

SEQ ID NO: 18946 - DNA, 120 bp, synthetic construct
  source 1..120: mol_type = other DNA
gtggctttgtattagtcttgcattgctgcataacaaatcactacaaagtaagcagcttaaaacaacatccagggatcatctcacagttctgtaggtcagaaattctggcatggcccagct

SEQ ID NO: 18947 - DNA, 120 bp, synthetic construct
  source 1..120: mol_type = other DNA
caatctcttgggcaagtcaatgcttacccttaacttcaattaactcctgaatactagtgacttcacattcaccaactctaatttctgaacacacaccacactcgctttttcccccatcca

SEQ ID NO: 18948 - DNA, 120 bp, synthetic construct
  source 1..120: mol_type = other DNA
tcattgaggttcattttccttctaatgggctttcttgggtagcaaagcctaggaaaataaaaagaacagaaaggaaggtagggatactaagaggaaaggaagggaaggggaagggaagaa

SEQ ID NO: 18949 - DNA, 120 bp, synthetic construct
  source 1..120: mol_type = other DNA
taatacacagaagttacctctaaatgcggactgtgaagtacaagaaatctgctggacaatatggaacgataatatatataaaattaaagggatgcaaggctggttcaatatacgcaaatc

SEQ ID NO: 18950 - DNA, 120 bp, synthetic construct
  source 1..120: mol_type = other DNA
ccaaagtcattcattttattaatggccatagagtccctttgtttgtcctctgcatgctcactgaatgctctctttaaacttgtgtgctgatagaccctgtaagactgttactgcttccgt

SEQ ID NO: 18951 - DNA, 120 bp, synthetic construct
  source 1..120: mol_type = other DNA
tgaggaagactactctaggagcaaaggcagatttatcataaagtcaataaaagtgaggcataggatgcctcaattggatgagcctcttaagtgctggagttcctggatgttgtaagcatt

SEQ ID NO: 18952 - DNA, 120 bp, synthetic construct
  source 1..120: mol_type = other DNA
gttattattttttaaccttgaattgagagagaaggaaggaagaaactagctaggaaaatagggcaaagagtcctcggcagaatttctgctctaacaaagagcagcctggaagatcaggct

SEQ ID NO: 18953 - DNA, 120 bp, synthetic construct
  source 1..120: mol_type = other DNA
taatttggagaataagatagattagaaagctcttgcctctttgtgtagtaaaaggccaatgctcttagaaggaaagtggaaattactaatgggtagtatgattctcagaaattaaccctc

SEQ ID NO: 18954 - DNA, 120 bp, synthetic construct
  source 1..120: mol_type = other DNA
cttacagagaaacagacaaagtgttaaataggagtagagttgtcacaacaccgcaaaacaagtagtacaagcagcaaggcctgcaagttcagatgccaggctttacctctgatattttct

SEQ ID NO: 18955 - DNA, 120 bp, synthetic construct
  source 1..120: mol_type = other DNA
gctgccatacatagagttcatgtagtggcctggcctgtataactgttgatagtatgatgtgggtaatggttcagtagaaattctctgagaaaatggggaaagggatcagctttaggtttc

SEQ ID NO: 18956 - DNA, 120 bp, synthetic construct
  source 1..120: mol_type = other DNA
ttgggattacaggagtgagtcaccgtgcccagcctataatacaaatcttgatttttcaagtgcaatgtcctgattttggcagttaaatcagtttttaaatcttttctttgggcggggggc

SEQ ID NO: 18957 - DNA, 120 bp, synthetic construct
  source 1..120: mol_type = other DNA
ggcagcttgtatgaactgacctggtagtaggtgtcaggagtcagggtgcaaactcaagcaatctgggctaccttgcctatatgcggtttaaaacattatcatgaattagttaatactttt

SEQ ID NO: 18958 - DNA, 120 bp, synthetic construct
  source 1..120: mol_type = other DNA
agtcctgagaagaataaacttcatcctggaccattagaccaccataaaatacactgtcaactggaacagttatggaagaatatacaccatacccatttattcacattacacttctagaat

SEQ ID NO: 18959 - DNA, 120 bp, synthetic construct
  source 1..120: mol_type = other DNA
ctgggattacaggcatgagccaccatacctggcccaagtgccaatttatttgcagaaaatataaatgttctcagtgctttcttcgtgtttttaagcttaggagacactagaagttggaga

SEQ ID NO: 18960 - DNA, 120 bp, synthetic construct
  source 1..120: mol_type = other DNA
gccccagtgttacaccaactgaggcacagatgacagggtggaaaaatcatatcttttactacagccttgatccccagacaccctaagtatttgcatatgttattattacatcaaagaatt

SEQ ID NO: 18961 - DNA, 120 bp, synthetic construct
  source 1..120: mol_type = other DNA
gttcacttgataaggaagcttcttgggggagaggtatgatggcagctttttttcttctacagttctaaggtagttcttgtaacccatgaaaggctgaattgctttaaagcagcctttcca

SEQ ID NO: 18962 - DNA, 120 bp, synthetic construct
  source 1..120: mol_type = other DNA
aagatttcagacttgtatcagtggcttgtgctcttgcacagatcacagcttcataaacaggtgtaaatatttatgtgaaattcttacctagccctgtgaaccacttgatcttggaatcac

SEQ ID NO: 18963 - DNA, 120 bp, synthetic construct
  source 1..120: mol_type = other DNA
tactattacatagctattacaatgaccaaaattaaaaaggcttcccctatcaagcaaggatctggaggaactggaactcttatgcactgctgagaggaaggtaaaattgtacaactaccc

SEQ ID NO: 18964 - DNA, 120 bp, synthetic construct
  source 1..120: mol_type = other DNA
ttgactgtggtgatggttcctggatagatacatatggcaaaacttacccacttgtacactttacttatgtgcaggtgattgcatgtcagtcatatctcagtaatgctgtttttttttgtt

SEQ ID NO: 18965 - DNA, 120 bp, synthetic construct
  source 1..120: mol_type = other DNA
tttacaacttactgttaccttgggcagattagttaacactgctaagtctcaatttcctcatctgcaaatggggaaaatgtgatgaatatacctaatacattatcagttagaattgaatga

SEQ ID NO: 18966 - DNA, 120 bp, synthetic construct
  source 1..120: mol_type = other DNA
ctgacctctctcctccatgaatgagatgtccatgttcattcattcatgcagcaaggtccaattcctaaatcgccgggcatgtagtagatgctcaataaatacatgttgccatgaataaat

SEQ ID NO: 18967 - DNA, 120 bp, synthetic construct
  source 1..120: mol_type = other DNA
gattcttggtttagttcttctagaaaagttgtgaagcagaaacaagtttatctccagttctccctgaaatgcctgtctgtgtttaacctgacccccgccccatgtttgcaacaaacatct

SEQ ID NO: 18968 - DNA, 120 bp, synthetic construct
  source 1..120: mol_type = other DNA
ggcagaaatctctggggagtaatcagtaaatacttactgactggctgactgagtgaatgggtggatgattaaagcagcagccagaacaagagccaagcatgggtggcacctgaaggtgga

SEQ ID NO: 18969 - DNA, 120 bp, synthetic construct
  source 1..120: mol_type = other DNA
cccccaaagtgaggcccaggcagatggctggccagagctaaattgattcctaatgatttgtgtctctcccctgcccggcaacgggtaacttttcattagagacacagatgtcttcataag

SEQ ID NO: 18970 - DNA, 120 bp, synthetic construct
  source 1..120: mol_type = other DNA
tttttttttttccctgtcctggtacctttaacttctcttatgttgccgaatggaacacttatctccttcttcaggccccactttggggtttaggtggatatcttaaatgtcagagaagac

SEQ ID NO: 18971 - DNA, 120 bp, synthetic construct
  source 1..120: mol_type = other DNA
ctatctttcatgtgaactctttgctccagtcacatagagctcctcatttccacccacagaccctacataataaatctcaatgctatgacttcgtgtcacatcagaaaaacccatcacctt

SEQ ID NO: 18972 - DNA, 120 bp, synthetic construct
  source 1..120: mol_type = other DNA
taaatcacagaggcctgtagcccttggctttctcaaagtgaagcactatatataaaatgagttattgcaaataagacaagggccagtgccataaacctgtcaacctcatctccaggattt

SEQ ID NO: 18973 - DNA, 120 bp, synthetic construct
  source 1..120: mol_type = other DNA
ctgttttcagtgtctgtttgtgatggaagcattgttgggtaatagcaatttctgatcggtagagcatgctggttctaaaaaaataagttaactgccgaaatactgtcttccagcccccct

SEQ ID NO: 18974 - DNA, 120 bp, synthetic construct
  source 1..120: mol_type = other DNA
ataatctcacggttgacatctaacgctaaaagggcaatttgtgtgtctctttatccctgcagaaactctcctccaaaagggcagtttattctggaattctacagcagatacctttccctt

SEQ ID NO: 18975 - DNA, 120 bp, synthetic construct
  source 1..120: mol_type = other DNA
tgatttcttttcttaagaattcataagcatcttactgacacttattgaaagctgactggaaagggccttgcatgaagaagagctctgggtatgcacaaaggtcctgaatccagcctctgt

SEQ ID NO: 18976 - DNA, 120 bp, synthetic construct
  source 1..120: mol_type = other DNA
aggagagctccatttctttctagaaactgtaggagataatccatttccttgttttctagcttctagatgccatctgcattccgtgatcatgacttccttcctcagtcttcaggacagcaa

SEQ ID NO: 18977 - DNA, 120 bp, synthetic construct
  source 1..120: mol_type = other DNA
ttattcctatttcgctattgaggtctcagaaagattaaatggccatagcaaggtgatcagaactgagattcggttcttggactgtggaaatccaaaccaacatcctttccaatgtaggac

SEQ ID NO: 18978 - DNA, 120 bp, synthetic construct
  source 1..120: mol_type = other DNA
gttttttcagttccagaaccctgtagacacagtctctgtgcctcttagttcaactattcaagagagggattctgttggcagcgggcactttcacctgcctataggaagcagtgtttgagt

SEQ ID NO: 18979 - DNA, 120 bp, synthetic construct
  source 1..120: mol_type = other DNA
gaagggaactaacacatatggagcatttgctgtgtgtgaggcactgtgttcagtgctctacatacgtggtttcattcaatcctcaatcctatgtggaaggtactatgttcgccattttgc

SEQ ID NO: 18980 - DNA, 120 bp, synthetic construct
  source 1..120: mol_type = other DNA
gtgctaacccaacattagactaaaatttgaactgttggacagcatggtcaggatggggatgaggcagacaaggtttggggaaaactattccagttccttccattcttcacttaaatttct

SEQ ID NO: 18981 - DNA, 120 bp, synthetic construct
  source 1..120: mol_type = other DNA
actctgagcactgggagttattgcatctctcaccctcatcatatttggtgaagtaggcaaaggagggtatcactttctttttaaacattggacctaacattgagaaagaaaggttctaag

SEQ ID NO: 18982 - DNA, 120 bp, synthetic construct
  source 1..120: mol_type = other DNA
cagggcagtgtctcttctgagactcagactttctgctcagaccaaatccaatggaaatgtgattgggttttattactgataacacaaaggaatgcagaaacacaactatctctgccatag

SEQ ID NO: 18983 - DNA, 120 bp, synthetic construct
  source 1..120: mol_type = other DNA
ggcacatcacgctttaccatgattcctgggtcacatccgtctatctggccctgctctcatgcttagtgagagaaggatgaccatgtacgtcttggtcaccaccttcataaaacattagct

SEQ ID NO: 18984 - DNA, 120 bp, synthetic construct
  source 1..120: mol_type = other DNA
tttgtggattgaaggagtgaatattgttaaaatatcaatttccccaaattgatctatagatccaaaacaatcccatcaaaatcctgaaagtcttttctgtagaaatttgcaagtcagacc

SEQ ID NO: 18985 - DNA, 120 bp, synthetic construct
  source 1..120: mol_type = other DNA
ttaaacataactttaaaaaaagatgccaacaattgcattcatacctgatagtgcccaacaaggcttggtgctggctgacgacatgagacaagaaagcattctcaaactttgtaatcttgc

SEQ ID NO: 18986 - DNA, 120 bp, synthetic construct
  source 1..120: mol_type = other DNA
agattccttccagatcaggaaatacaagaccagtgtatgtggtttctcagtaggtgacagagcagagattatatcagtcactaggaacagggaagggtgcctgtgtgtgtgtgtggtcat

SEQ ID NO: 18987 - DNA, 120 bp, synthetic construct
  source 1..120: mol_type = other DNA
agtgtgtgtcaagtgccccgagccttcatcagggctgtggagggtctggcagaagaaacctagccccttacccccaaggtgcctgctggtgggcacaggaagctgacacaggtgagacaa

SEQ ID NO: 18988 - DNA, 120 bp, synthetic construct
  source 1..120: mol_type = other DNA
catcatagaactcttgaaagttactgttcattctttcccttgacaaaaatgcattgagtgcctataggggagggcacaagactgaatcagaagtggctacactcattccattctactcca

SEQ ID NO: 18989 - DNA, 120 bp, synthetic construct
  source 1..120: mol_type = other DNA
attttcttattttctatattcctgatgctctggcacctggtgccttgctaattcctagttagcaaacaactgtcctgcaagtgtgcctttcatgtgcaaaccaaccaatcagagcccaca

SEQ ID NO: 18990 - DNA, 120 bp, synthetic construct
  source 1..120: mol_type = other DNA
gaatataaagtgaaaacaggcaatgtttgcctgtttttatagcttttagccttaccacttttcagtttggggatggaatgcctttggctcagtagattctactggctttggggagctcag

SEQ ID NO: 18991 - DNA, 120 bp, synthetic construct
  source 1..120: mol_type = other DNA
gccccatagggtaaaaataaaccagaggtaggtcagcacttccacaaattgcagtctggttttatactaatcaggaaatctgaaacccagaatgttgaataaactggtcctagactggca

SEQ ID NO: 18992 - DNA, 120 bp, synthetic construct
  source 1..120: mol_type = other DNA
aaaaaaaaaagactttagttcaagttgagaccaaagactgtgctattatggggtggagaaaagtatcacaattttggtaatactaggcaagatgtaacctcaagtctccaggcagcccca

SEQ ID NO: 18993 - DNA, 120 bp, synthetic construct
  source 1..120: mol_type = other DNA
tacagtgagggcattaagcaacaggaaccgatcaactacagacttgttttctccccaaaggcaaatttgattttggaaatttgcttttggaaacatcgaaggcatgggatcctggaaatg

SEQ ID NO: 18994 - DNA, 120 bp, synthetic construct
  source 1..120: mol_type = other DNA
atttaccaggagacaggtacaagaatgtagcattggttttaatagtccccacctaggaattatctaaatgcccacctacaataagatgcagacattgtggtatagtcacacaataaaatg

SEQ ID NO: 18995 - DNA, 120 bp, synthetic construct
  source 1..120: mol_type = other DNA
ttcagctccagggacagtatttggttgtgtacatatagaagatactggccaggatgacctcagaaattcgcttcagcactgtctattagtgagaactggaagtggttttcactaaatatg

SEQ ID NO: 18996 - DNA, 120 bp, synthetic construct
  source 1..120: mol_type = other DNA
aggatctgagaagtgacagttgacactcagggagaaaatatctcatgatgtttgtacacttgtgttcctctcgtccttcccagtaacaactagaaagaaatgaaggatggatggatggat

SEQ ID NO: 18997 - DNA, 120 bp, synthetic construct
  source 1..120: mol_type = other DNA
tgtgggcacgaaaacaaactcaggtgttgcagaggccgctgtgcaatgggcatcaggcccacacttgtttcataagcatgcactttcccacggcagggtgaggaaggtgaggggtggcac

SEQ ID NO: 18998 - DNA, 120 bp, synthetic construct
  source 1..120: mol_type = other DNA
agctggtgtcatgcctgattttacactggcttttctcaccctctatgactttgtgtggcagggttgccttcccttttcaaaagtggtgtcacagcctgggcagacctcaggacgggaatg

SEQ ID NO: 18999 - DNA, 120 bp, synthetic construct
  source 1..120: mol_type = other DNA
tctgttcatgccttgggcctatcaatgagagacaatagagcatacagttaagacctcatctatttgattatgatgtgccttggtgtggtggttttcttcatgtttctcccacttgggatt

SEQ ID NO: 19000 - DNA, 120 bp, synthetic construct
  source 1..120: mol_type = other DNA
tcctatgggagtcttgagcctgtacatagataagcgggcttcctagagactttcttagacaaaaatcagggctggcctcccctccctacctggaggcaagaaggaaagagggtgacaaag

SEQ ID NO: 19001 - DNA, 120 bp, synthetic construct
  source 1..120: mol_type = other DNA
agtaatagtagccggctttgtccacagctgtgctgcccagcgcagtcaccacgagctgcctgtggtgatttacacccattacaattaaataaagccacaagttcagttctgcagtcatat

SEQ ID NO: 19002 - DNA, 120 bp, synthetic construct
  source 1..120: mol_type = other DNA
agggaaaaggcatgaggatgagaaagaagaagctgagaaagagaaggggtgctcatggagcagtgtgtggcccctttgggtgctcaggaaatggtcattcctctttgatctggggctcag

SEQ ID NO: 19003 - DNA, 120 bp, synthetic construct
  source 1..120: mol_type = other DNA
ggtctcagaggaccccgtcaccaatcccacagctccaaaatggtcttcagtttttacatccaagccaattcctttttacctgaaatgtggcccttttattagtagtgtccttgtaagtaa

SEQ ID NO: 19004 - DNA, 120 bp, synthetic construct
  source 1..120: mol_type = other DNA
tccccatgcagcctggtcagttgaacacagtgagaatgcacaggtgataacagaatattgactcacatgctcattcatccaaaaagatcatctcgacttagaaaaagagttgccccatta

SEQ ID NO: 19005 - DNA, 120 bp, synthetic construct
  source 1..120: mol_type = other DNA
gcccagtatctgcctgcttacagcattacctgtatatttcctacaaagtgcctggctggacatgggtttggatagtttccattcactactggacataaatgatttgaaggtaggctctct

SEQ ID NO: 19006 - DNA, 120 bp, synthetic construct
  source 1..120: mol_type = other DNA
aagatcttaccagaagcagcatatactaaacagctaataaatggtgtagataatgagcactatggaagttcagtagaggaaggagtggggtgatgtgagtgttatggaggttcagtaggg

SEQ ID NO: 19007 - DNA, 120 bp, synthetic construct
  source 1..120: mol_type = other DNA
agtcacaaatgtgcatgaaagtagaactcaaaaagacagttctaaaaatatttatggtactagaatactgagcccccgagatctagcctgaggacatggtccctccaaggcataaacaga

SEQ ID NO: 19008 - DNA, 120 bp, synthetic construct
  source 1..120: mol_type = other DNA
tctttgttggttctaacatctggttcgtcttggggtagaaaacttgattgctgtgtgcagaaaatgtgttccattttcttgattctgtggatgtcgggacattttgggttgtatcctgaa

SEQ ID NO: 19009 - DNA, 120 bp, synthetic construct
  source 1..120: mol_type = other DNA
caggctgtttaaagtttgttctgcagatgtgtggttcaaggtttagtcaaagatgtggactggcagagtttaaggattcctttctctgactctttctcttctgggattcctccactattt

SEQ ID NO: 19010 - DNA, 120 bp, synthetic construct
  source 1..120: mol_type = other DNA
tctgtcttcaccatgaaccccatttgctgtttggcacaggactaatcacacggtaatcactgaataagcatttgttaattagtcaggacaggaactctctattgtatggcagagactgtt

SEQ ID NO: 19011 - DNA, 120 bp, synthetic construct
  source 1..120: mol_type = other DNA
actctgggtcttgaaaattctatggggcagagctgccacattagctctacttttacttgagaagtaaacttccatttgcttctttaagccactattatttgggcaggggagtctctcttt

SEQ ID NO: 19012 - DNA, 120 bp, synthetic construct
  source 1..120: mol_type = other DNA
ttacgatggtcactgtgtgccactgagggctttacaatcttattatcagtgagatccacaccaagagtataaataagagagccaacacaataaagttttagctgttttagaaagttctct

SEQ ID NO: 19013 - DNA, 120 bp, synthetic construct
  source 1..120: mol_type = other DNA
ggcaacagtgagaagtgggcctggaaatgaaggtttgccaaaagtctttaactaaaacaatcaactcatataatggtactgccctagtccttagccatctagatttctctctctctctct

SEQ ID NO: 19014 - DNA, 120 bp, synthetic construct
  source 1..120: mol_type = other DNA
tccagttatttattacattctgattgaatgccaaccaagcactcactgagtactgcagtgccaataataaacagaaggaagagaggtggatcctgcctcatggggcttttagtgtaagat

SEQ ID NO: 19015 - DNA, 120 bp, synthetic construct
  source 1..120: mol_type = other DNA
tgtgtgtgtgtgaatttaccctcaagacagaaataggccctctacctctgaggtaaagggaaacgggaagtatagacttctttgtcatgattacaccaaccccttcctgaaaattggtaa

SEQ ID NO: 19016 - DNA, 120 bp, synthetic construct
  source 1..120: mol_type = other DNA
gggagagggagagggagagggagagggagagggagagggctcaccggatacactctattttaatttttggtaacattttaaagaagcaaaaccatttcacttaagttttttccattcact

SEQ ID NO: 19017 - DNA, 120 bp, synthetic construct
  source 1..120: mol_type = other DNA
agtccaagtagctccaagaaaggccctggaaagatgtgctgagttgacaatacaggaaaagcaccactaggaaagaaacaggagcactacctttctatcacattgttaggtaaatattca

SEQ ID NO: 19018 - DNA, 120 bp, synthetic construct
  source 1..120: mol_type = other DNA
aatcactcttgcttgccttaaccctggctcagcttattttcgaggggacagtggttgctaaactcacatccagggagatctcattttggctaagacggtggaggtgaaatgcttccattc

SEQ ID NO: 19019 - DNA, 120 bp, synthetic construct
  source 1..120: mol_type = other DNA
ctggtcttcaacccacttgctttacctgtcttattggaccagcacagttcaaattctggaaaagagataacttgctattgacactcaactgtctaatctagtgctggacttctgatgatg

SEQ ID NO: 19020 - DNA, 120 bp, synthetic construct
  source 1..120: mol_type = other DNA
agtgttatagaagaagcctagcctcttctatatcatggagtttatggtctagcatggaaggtgaatgctaatgaaaataacccacaattaaaaacataatgacaagaagatgaatatcct

SEQ ID NO: 19021 - DNA, 120 bp, synthetic construct
  source 1..120: mol_type = other DNA
tctaaggtcacactgacaccaacatgctgcctgacagtcaccaggcagaggaagagaagggcacagcaaactcctgtgggttcgtctctccttccacctgaagtgatcaacatcagttct

SEQ ID NO: 19022 - DNA, 120 bp, synthetic construct
  source 1..120: mol_type = other DNA
aacactgggcacagatgaggcatttgctcaatgacaattttcgccaccaaaacacccttctcctaatcacacaaattcattttaaaagccactaagtggtaggatatctgccctaagtag

SEQ ID NO: 19023 - DNA, 120 bp, synthetic construct
  source 1..120: mol_type = other DNA
tcagctgcacaatggagaaaatgcggtacatccctacaacggactatgttctcatacagcctactatgcaggtgaacctcaaaaatatgctaagtcaaagaagtcaggcacaaaaagtca

SEQ ID NO: 19024 - DNA, 120 bp, synthetic construct
  source 1..120: mol_type = other DNA
actttgtgccagacactattctaggccctgaggatacagctgtcagcaaaacagacattgtgcccattctagtgatgaaatcaaatttaagatcccattatggctttccatggctttaac

SEQ ID NO: 19025 - DNA, 120 bp, synthetic construct
  source 1..120: mol_type = other DNA
ggcagattgaatccaggggtgacccatgatcattgctggcaactaaaatgactccgcaatacacagggactgacatgagcaaccatcaggataaattagaataaatagaagtctaagata

SEQ ID NO: 19026 - DNA, 120 bp, synthetic construct
  source 1..120: mol_type = other DNA
gaaaccagcctcctggctatctcctgtcccttgttaatctgcaagacaaatgggtgttgtcattaggccttgtcactgtgaagggaagggagagtatcaccattccagcttggcattttt

SEQ ID NO: 19027 - DNA, 120 bp, synthetic construct
  source 1..120: mol_type = other DNA
gaatgaacgtagtatacagattccaagatttcttaggatgttctaactccttctccaagccctctcacccgtaagacaggcattctttcctaggagaattacattttctggtgggtttct

SEQ ID NO: 19028 - DNA, 120 bp, synthetic construct
  source 1..120: mol_type = other DNA
acatctcgatttgtcctttgtcattcatcttaaaagttaaaaaaaaactttttgttgcttttattgctgtataaatgtgctcttggaagttcgccaactgccctcagtttgaagaacctc

SEQ ID NO: 19029 - DNA, 120 bp, synthetic construct
  source 1..120: mol_type = other DNA
acagtcattcttcttagatggcgagcatctgacactcaacttgaaagataacataagagtaaaatgatgtacgctgactgtgtgccttcctcctgctgcatagtgaacacttctgtaacg

SEQ ID NO: 19030 - DNA, 120 bp, synthetic construct
  source 1..120: mol_type = other DNA
gaagaagcagcaggaccatagcgcagctctgtccgcatcatctgtcattaattcttcgctttcaaattttataggaccccggaaaattgattgaggaagatctaaaagaaaacaatggtc

SEQ ID NO: 19031 - DNA, 120 bp, synthetic construct
  source 1..120: mol_type = other DNA
ctcttctttcattgatctttgggcccagggtatgggatatcttttattataatattgggggggggggtgttaaaatgcctctttcagcacttgatgacagttggagagtcacttaagtaa

SEQ ID NO: 19032 - DNA, 120 bp, synthetic construct
  source 1..120: mol_type = other DNA
ccatagaaaaatatacagcagaacaatcgttgaaattgacatggacccctctacacagggaattggcagcctttctcctaaaggatcagaagtaaatattttcggctttgtgagtcatgc

SEQ ID NO: 19033 - DNA, 120 bp, synthetic construct
  source 1..120: mol_type = other DNA
aaaggccactaagttagaagggtgagaacggctttaattctaaataataccagccattattccggaggccgtaggattcacaacttccccaattactcttgcagataagatcactgttgt

SEQ ID NO: 19034 - DNA, 120 bp, synthetic construct
  source 1..120: mol_type = other DNA
tacactggtcataggtaaagcattacttgcatgaggtcaaattttatttcaaattaatgcacattattttgacatgtaatggttcgttgatatctgagataaacatatgcaaatactgat

SEQ ID NO: 19035 - DNA, 120 bp, synthetic construct
  source 1..120: mol_type = other DNA
cctccctgcacaaatacattgatgcatttgtatggcttaagtcatcgagttagtttcaaaaatgtttgtaaaatttgtttgacttttgacttcaaactatactacaaggctacagtaacc

SEQ ID NO: 19036 - DNA, 120 bp, synthetic construct
  source 1..120: mol_type = other DNA
atgatacttctaaagcagaaagcaagactgtgaagcaaagacctgcaaatggatgcaatttagtgaacaaaagagggatgcgactgcctgaacatgcacaggagtctgaagtggtcaggt

SEQ ID NO: 19037 - DNA, 120 bp, synthetic construct
  source 1..120: mol_type = other DNA
ccatggagctgtacctcaaacccagtcacactgcctttagaagacctgtccttaacaatatattatttttgtgctagatattctgatcgtaatgatcatatgaccaaaacagttggccca

SEQ ID NO: 19038 - DNA, 120 bp, synthetic construct
  source 1..120: mol_type = other DNA
ctttcctgcttgttagttgcagcagctcagaaaaatgtccactctgatatccctgcttccctcataaacaaggatttttacaattttaggttatcagtctgcctttcaacaatacaaaga

SEQ ID NO: 19039 - DNA, 120 bp, synthetic construct
  source 1..120: mol_type = other DNA
tatagcagtgtggtatgtggcaaatgggagcattgttccatatttcttagccttacctactttagattactattgaatctcatccagacccctactctcctagaagtcggaattcagcct

SEQ ID NO: 19040 - DNA, 120 bp, synthetic construct
  source 1..120: mol_type = other DNA
aaccagatttgtattaactcacctggtcgtggaaggcatttgcagttttattccttagactaaggggtgattgccctcctagtcaatggcgtttgccaaactgcttttttcattctaaga

SEQ ID NO: 19041 - DNA, 120 bp, synthetic construct
  source 1..120: mol_type = other DNA
acaccatggaatactacacaatcataaaaaagaatgagatcatattcttggccgcaacatggatggagctggaagccaaaatcctgagtgaactaacgcaggaacagaaaaccaaatact

SEQ ID NO: 19042 - DNA, 120 bp, synthetic construct
  source 1..120: mol_type = other DNA
atcttgactgacagaattacattcattcaacatgagtactacttgctcagagagaagtgagcggggataagaaaaggtcactccatgagatcattactcagagtatatcaggaagaatgg

SEQ ID NO: 19043 - DNA, 120 bp, synthetic construct
  source 1..120: mol_type = other DNA
ggtgatcacacagctaaggagaagatgggataagaccatggaattcccaactgatattgctaccaagctttcatgatatagaggagagcttgttttccaaagagaaaaaacaagtcctcc

SEQ ID NO: 19044 - DNA, 120 bp, synthetic construct
  source 1..120: mol_type = other DNA
tctccccttagagtgacagaattatagaggtttcctagctccctctacacttgctggattcattcttcaaagcattgtaatagaataatggcttactgtcaggatactcaagccagttgc

SEQ ID NO: 19045 - DNA, 120 bp, synthetic construct
  source 1..120: mol_type = other DNA
tcagggcacttgaagtacaaaaaaactgaatattctgttactttggccttgattactatggaaatcaactgtcatccacatacagtcaccttatgtgatccccagactagtttgatggga

SEQ ID NO: 19046 - DNA, 120 bp, synthetic construct
  source 1..120: mol_type = other DNA
acaagtattgactgtcaaccatggattgttgaatatttcttttcaagctctcaaatgatgtcttaggcagatttcctaacttccttgtcactccagttattgaaggacagtctagttcca

SEQ ID NO: 19047 - DNA, 120 bp, synthetic construct
  source 1..120: mol_type = other DNA
ataataataataataataataataataaaggatatagggtcttcaatgtcaatgcccaatgtcaagcccaagcaggtttaaaaacttgagtagtaaccattagtaccttaaccctctcgt

SEQ ID NO: 19048 - DNA, 120 bp, synthetic construct
  source 1..120: mol_type = other DNA
ttccagaaaataaaagaggaggaaacatttcccaaattttagcttgatatcaaaaccagataaagatatcataagaaaatgctctccgtctccctctccctctccctctccctctccctc

SEQ ID NO: 19049 - DNA, 120 bp, synthetic construct
  source 1..120: mol_type = other DNA
aagatcaggaataagacaaggatgtccactcttgtcactgctattaaacattgtattggaggtactagcccaggcagttaggttagaaaaagaaataaaagtcatccagattgaaaagga

SEQ ID NO: 19050 - DNA, 120 bp, synthetic construct
  source 1..120: mol_type = other DNA
cttaaaacagctggctaaaaaaatgacttcccttagtaggtagcaaggaagtcttaacatgacattgagcacttggaatctaccttcttaactactgacaataggctgggtcagctaggg

SEQ ID NO: 19051 - DNA, 120 bp, synthetic construct
  source 1..120: mol_type = other DNA
taaaagaaagctacaggacatattctcaacatttgattgcactgctgggatagaaatgtcatgagatttatggatgctatcttcagacttccctctccccatcatccaacctcacctaga

SEQ ID NO: 19052 - DNA, 120 bp, synthetic construct
  source 1..120: mol_type = other DNA
gccctttccctcactgctgtaagggagcacttcctctatgtctgaaaatgaagacagctaagatatgaagtgtaaaaactgcttatgatacaaccaaagccaaaaactgaacttgggatc

SEQ ID NO: 19053 - DNA, 120 bp, synthetic construct
  source 1..120: mol_type = other DNA
aaactcacacatcagtcacctaaccttatgtcattccttctgctttactcaagttgagccacatttcagctgatctgtccccgataaattgttcagctactcaaaactgttgggccaaat

SEQ ID NO: 19054 - DNA, 120 bp, synthetic construct
  source 1..120: mol_type = other DNA
caatcagaattagactagatagatgaaaagctgactagctagatgcaaacaacatcccatctccattcccaacatattaaaacccaaggggacaaactgaagctatgctaccagtctcca

SEQ ID NO: 19055 - DNA, 120 bp, synthetic construct
  source 1..120: mol_type = other DNA
actgcattcctataatcgctgccaaaaacactgcatacatcctcaaacattgagacaaaggatggcagacaggtttcaactctaattgttaagtggctgcctccaacagaatattgagac

SEQ ID NO: 19056 - DNA, 120 bp, synthetic construct
  source 1..120: mol_type = other DNA
tgttttgtgctttgcaggtaagtctggattttatccttgggttcaacagaatgttgaagtctcttaagctagaaagaaacgtggtcagatgggaggaaattaagacagaagggagaccag

SEQ ID NO: 19057 - DNA, 120 bp, synthetic construct
  source 1..120: mol_type = other DNA
caggaaacaccgtcacacacataaccagaggtaatactttaccggctctctaggtatcccttaatccaatcaagttgacacttaatcataggtgggaattgaacaatgagatcacatgga

SEQ ID NO: 19058 - DNA, 120 bp, synthetic construct
  source 1..120: mol_type = other DNA
aggtcatagggaaaggatgatcttgagcaatgcattttagtgaacatgggggtctttatcgttccacatgttatgtcccttacaggatttcacatatccctattctcagacaggaatagg

SEQ ID NO: 19059 - DNA, 120 bp, synthetic construct
  source 1..120: mol_type = other DNA
cagataactttgtttagctagatttgttctgcattcacatgaaatggcgtcctacgaatcaatacccagtgctcacagttcccctgaatgtgaagaaatggcacccttagtagttcttgt

SEQ ID NO: 19060 - DNA, 120 bp, synthetic construct
  source 1..120: mol_type = other DNA
ataaatgctgccttaatttttttaaaaaaattgttccaaagaactgctttttgttgcattgttaattagcctttgaacatttttgaattcattataaccttcaaggtctgccaaggtctt

SEQ ID NO: 19061 - DNA, 120 bp, synthetic construct
  source 1..120: mol_type = other DNA
gttaagtgacaagtacaaatatatctttaaaaatctttaaaggtacctaggctatgtcaagacaactgcaatttccagggctctggggagcaaagggctcaaggagaatccccactaact

SEQ ID NO: 19062 - DNA, 120 bp, synthetic construct
  source 1..120: mol_type = other DNA
acatacctaccacatgttctcacttaacattgggtactcatggacataaagactgcaaaaatagatagtggggacttcaagagaaaggagggagggagggcaacaagtgttgaaaaactt

SEQ ID NO: 19063 - DNA, 120 bp, synthetic construct
  source 1..120: mol_type = other DNA
ctgagcctgtggaaagggcagaatagtggaaaggactggctaatggtttgagtgccagctcagccacagtagaatagataggacaccaagcagatttctaaggttttggactccagtcca

SEQ ID NO: 19064 - DNA, 120 bp, synthetic construct
  source 1..120: mol_type = other DNA
aatgatttctgtgaatgtgatgctaaggttgttcggctagaattttagggaacaccatggaggaaatattttcagcctgatatcaaatctggggtccagagagaaaagtctcagcttgct

SEQ ID NO: 19065 - DNA, 120 bp, synthetic construct
  source 1..120: mol_type = other DNA
catcaagttcatcttctgtttcatcatcactgtagggaaccacttcgtcattaggctgagaatcctcgtcaaatgtcgtttctgagtctctttctgtactcattctgctggcaaattgga

SEQ ID NO: 19066 - DNA, 120 bp, synthetic construct
  source 1..120: mol_type = other DNA
gagtgtgtgttggcatgtgactggattcactcctgcatgttgctagaagggaatttggggctgtataggaaatagcaagaggtgatgaagacaccttttattatctatttattgccatgt

SEQ ID NO: 19067 - DNA, 120 bp, synthetic construct
  source 1..120: mol_type = other DNA
ataaaaagagaggaaacacacagtgaattcttatggtctgtcatttcagttggccatcttctgcccctctgttctggaagcttctccactaaaatagagcacccaacttggttttctact

SEQ ID NO: 19068 - DNA, 120 bp, synthetic construct
  source 1..120: mol_type = other DNA
gttgtgatctagtggaactgtggcagtgttgggctctgttggggtttggttgtgagtggaactgtggtgtcgggctctgttggggtttggttgactgtgatctagcggaactgtggctgt

SEQ ID NO: 19069 - DNA, 120 bp, synthetic construct
  source 1..120: mol_type = other DNA
tagtggaactgtggcggtgttgggctctgtgggtttggttgtgatctagcagaacagtggcggttttgggctctgttgggatttgcctctgatctagcagaactgtggtggtgttgggct

SEQ ID NO: 19070 - DNA, 120 bp, synthetic construct
  source 1..120: mol_type = other DNA
agtgcctcaaatcaagggtttcacattttctttttttttttggaattgcctgctcatgtatttccatctccttaaaggcaagggctggccgccttatttggctgatactagcctccatgg

SEQ ID NO: 19071 - DNA, 120 bp, synthetic construct
  source 1..120: mol_type = other DNA
tatttatttatttttattttccacgacctattatagcacatagcacctaacaggtcctcaggaagtatttaccaacagattgcatgaagtgagcccgttcttcctccctctctccttccc

SEQ ID NO: 19072 - DNA, 120 bp, synthetic construct
  source 1..120: mol_type = other DNA
tgctgcccgcctcatcaccccagcccaagaggacagaacactgctgcccgcctcatcaccccagcccaagaggacagaacactgctgcccgcctcatcaccccagcccaaggggacagaa

SEQ ID NO: 19073 - DNA, 120 bp, synthetic construct
  source 1..120: mol_type = other DNA
catgagtgagctcactgtcgtgacatgggagtgaacctttgctgattcgagatcctggggtgccttcactttggaacactgattctagatatttaatagcagttttaaaattaggctaaa

SEQ ID NO: 19074 - DNA, 120 bp, synthetic construct
  source 1..120: mol_type = other DNA
tcgttgtgtttatggtaaccagtagcattttctaatttggttaaaatgctgtcattagctggtaaatgcagtcctgtcacctcagaggaggaccaagaaggagctctttctagaaaggga

SEQ ID NO: 19075 - DNA, 120 bp, synthetic construct
  source 1..120: mol_type = other DNA
cggtgtggatagtgacatctagtggatctctagtagatcagttccgtggactgtcaggtaccaagtgaagaaacacattcagcggtgccacattctaaaattcaaaatatattctctgta

SEQ ID NO: 19076 - DNA, 120 bp, synthetic construct
  source 1..120: mol_type = other DNA
gtgaccagagggatgacatggaggtacgtggagggcgtcaggcctctctccttgccttgagatcatattcatgttttgctttcaaactttataattgaaggaaataaaagtttagaaagc

SEQ ID NO: 19077 - DNA, 120 bp, synthetic construct
  source 1..120: mol_type = other DNA
gcgttacctggtccggatcagagttagcattgagtgggtagcttttgagaaattcagtgctttcagtttttcctctgtctgtagttaaccagtcatgaatgtttaccagattatcagctt

SEQ ID NO: 19078 - DNA, 120 bp, synthetic construct
  source 1..120: mol_type = other DNA
acaggatacaggtcataaagaccttgctgataaaacagcctgaaataaagaagccaactaaatcctaccaaaaccaagatggcgacaagaatgacttctggccttcctcactgttacact

SEQ ID NO: 19079 - DNA, 120 bp, synthetic construct
  source 1..120: mol_type = other DNA
ccctgtacttctccacccaggctgtgccttctcccaggaggtaagctgaaggctttacgtggttattaacttgagccaaaggtgcttggaaaaacattattttttattaaaacaaatata

SEQ ID NO: 19080 - DNA, 120 bp, synthetic construct
  source 1..120: mol_type = other DNA
cacaaacgaatggagtgatccttcagacacctggctgtctttgggaatctgctcagctagtcaaactgaaaggaaaattgaacaaacaaaacaagctgtaataagtcccagtagctgaaa

SEQ ID NO: 19081 - DNA, 120 bp, synthetic construct
  source 1..120: mol_type = other DNA
gtccacaccctcacacctgtttgctttcagattgtgcagagataagattctctgatctaagaagaaaggaacatagaaaactctctcaacaaagccagactgtaaggttattgtcctgct

SEQ ID NO: 19082 - DNA, 120 bp, synthetic construct
  source 1..120: mol_type = other DNA
tctgttgcatacaattctcttcaccttatcaccatctcacccccgagatggaggtaaccctagtttcctgggcttctttagaaggtcccagaaacaaaaatggaaaaaaaaaaacccaca

SEQ ID NO: 19083 - DNA, 120 bp, synthetic construct
  source 1..120: mol_type = other DNA
taatgtgattatgtttaagtctgacatcttgatgttcgttttcagttagtctcatctgttctcttttgatcctcctttcctgacctcttttggactgggattacaggtgtgagccaccgc

SEQ ID NO: 19084 - DNA, 120 bp, synthetic construct
  source 1..120: mol_type = other DNA
cattttgagtggtttgcacacacagttttctgggtcatacggtgatacctcgattaacagatcctctgggaacctagctcgtttgtagagtccatctgtttgaatcctcttaatgtaata

SEQ ID NO: 19085 - DNA, 120 bp, synthetic construct
  source 1..120: mol_type = other DNA
cttttctctccatcttatgaccttcctgtgccttttatattttcactaagaagattccaccaaggaaaacatgtcactgatacacagtgtctttgttaatagaggtattactgtattata

SEQ ID NO: 19086 - DNA, 120 bp, synthetic construct
  source 1..120: mol_type = other DNA
tcatttcttaagtaagtattgcagtatcctaagtgctggaggcctgctctaaagtgaagggattgccctagatgattaactagctgtcagcctgcagttctggaggaaaacactactata

SEQ ID NO: 19087 - DNA, 120 bp, synthetic construct
  source 1..120: mol_type = other DNA
aggttggaaaactttgcctcagaattttgaaggcattgttccattgtcttccagcttttcaatgctgctgcagggaagtcctgtgagattcaaactcttgagcttttgtatgaatcacat

SEQ ID NO: 19088 - DNA, 120 bp, synthetic construct
  source 1..120: mol_type = other DNA
atataccactgctgggccaaatggtagtttccctctaatatctgatgatcctgagacggctgctctagtttattcacggtgtatttaaaacagattaatagaatctgtttgcatatagtt

SEQ ID NO: 19089 - DNA, 120 bp, synthetic construct
  source 1..120: mol_type = other DNA
ggaggtagagggcaaaactgtgcccaagtgagaagcatagcaagatgagaatgtgttgccctttggttttagcttttcattatcaaatggccaatgccctttttctaaagggtgatataa

SEQ ID NO: 19090 - DNA, 120 bp, synthetic construct
  source 1..120: mol_type = other DNA
tactctgacacttataagctgtgtgaccttaggcagggtgtattcacctcttgtgtcagtttatgcatctgtaaaaggtggacagcaatatgacttgattcatatggctactgtgaggat

SEQ ID NO: 19091 - DNA, 120 bp, synthetic construct
  source 1..120: mol_type = other DNA
cactctgaagtactgggggttgggacttcaacatatgaattttttggaagacacaatctaacccataacaggacccttgtgattacattgggcctgcttggataatccaggataatctta

SEQ ID NO: 19092 - DNA, 120 bp, synthetic construct
  source 1..120: mol_type = other DNA
ctgccctaacccaggcacagaagtttaagtcatgattgtttcatcttttccagttccaacttttcttcatatccagttagtctgcaagtgttagagactctgcctccttgatgtttcaga

SEQ ID NO: 19093 - DNA, 120 bp, synthetic construct
  source 1..120: mol_type = other DNA
gtgtctataaagtactctcgtaggcacagttagacaaatttgtttcaccaatgttagattcactccatgccgctgtttccatgccattctccctacacaataaatcttgtttcaatgcca

SEQ ID NO: 19094 - DNA, 120 bp, synthetic construct
  source 1..120: mol_type = other DNA
taggtctggcttgcatgggcagtaacaactactgcttagaaagatccctttgcctccctttgacactagggcacttataaggtgttatcaattggagaagcaacgctatttctaaaatat

SEQ ID NO: 19095 - DNA, 120 bp, synthetic construct
  source 1..120: mol_type = other DNA
ggaaaatcatgagattcctctgaatggttttaaatggacagatgaaaatctccactttcaggagctggagtgggtgttctttaccttattcctcctgctaagtacagctgtctgttggta

SEQ ID NO: 19096 - DNA, 120 bp, synthetic construct
  source 1..120: mol_type = other DNA
cagatttctcatcagaaaatatggaaaccagcagaaaatggtgcaccatttttcaagtgttgaaagaaaaataactgtcaacccagaatccaataaaaatatcccacggaaataagggga

SEQ ID NO: 19097 - DNA, 120 bp, synthetic construct
  source 1..120: mol_type = other DNA
gctgttttgtgctgtttattccatgagggctgtgtaaaggaatgttaaggataaggctggaggtaccacacaaatatcaagaggaacatcatgatagacgttaaatgcaagcttgcacta

SEQ ID NO: 19098 - DNA, 120 bp, synthetic construct
  source 1..120: mol_type = other DNA
ttaggcatttatatcttagttcaaagacaacttactcctcagaaactgattttttcctaacccattccttctccaagttttcccaccgtaaagtatgcactgacagttgcagtatgcccc

SEQ ID NO: 19099 - DNA, 120 bp, synthetic construct
  source 1..120: mol_type = other DNA
catctcattaagttgttacgaccccgcattttctgctgcgtagagtgacctccgagtcccagctgtggcttgttctggccttgaccttttatctgatgatgttgctcccaggctgtcact

SEQ ID NO: 19100 - DNA, 120 bp, synthetic construct
  source 1..120: mol_type = other DNA
gttacaatgttaatagttgaggtataacacgtacacaggttgccggtagaatatatactttttaggctacattggaaatacaggaaagctcaacaaggatgtttttacttttaagagtaa

SEQ ID NO: 19101 - DNA, 120 bp, synthetic construct
  source 1..120: mol_type = other DNA
tgtacagaaaaggagaattggagataataatgtaagatgaataggatttagataggtggagaggaaaactgtttcagtcagcaagttcaacgtgtgggaactggggaatgtcagcctggc

SEQ ID NO: 19102 - DNA, 120 bp, synthetic construct
  source 1..120: mol_type = other DNA
ccatccccccatccccctcttttttttaagaacacggtctcgctctgtggcccaggctggtataatatacagtgtgtgtgtgtatatatgtaaacacacatatacatacacacagtataa

SEQ ID NO: 19103 - DNA, 120 bp, synthetic construct
  source 1..120: mol_type = other DNA
agccaccatgcccgacctttttccactgtcttaatggtgtctttcgatggcatacacttttagttttaatgtattctgtgtctgtcttttaataatgattggtttttgtgggtgtctact

SEQ ID NO: 19104 - DNA, 120 bp, synthetic construct
  source 1..120: mol_type = other DNA
gacagcataggctacagggggaggataaatgtgtgcatagggaatgctaatggcttggcccgactttgtgggtttcaaaacaaaatctcatggaaaagataatttaaatgaaaatcggag

SEQ ID NO: 19105 - DNA, 120 bp, synthetic construct
  source 1..120: mol_type = other DNA
ggtgacacttatttcctaatcgattccatggagggcttcttttgggcggtcagaaacaacaggcccttgttttctaagttaaatgcagacagaatagtttttccccttcgtgtttttctt

SEQ ID NO: 19106 - DNA, 120 bp, synthetic construct
  source 1..120: mol_type = other DNA
tgaatgtttttctgcgttaggctcagcactagggggcttttcatacattatctattttaggttctacgtatttttgaggaagccccccagattgccgaattatacctgggaaaacgagaa

SEQ ID NO: 19107 - DNA, 120 bp, synthetic construct
  source 1..120: mol_type = other DNA
agacatacacagacacacacagacacacactgacatacagacacagacatacaaaagacacacacactacacaacacatgcacacatagagacacacaaatgcacacacacaacacacac

SEQ ID NO: 19108 - DNA, 120 bp, synthetic construct
  source 1..120: mol_type = other DNA
tccgtcttccttcttgccttcacaacttctactcccataattctcagtatggccttttcatcaacccaattctctttctttcttcaaatgtggctcaagctcatgtcttttctgtctgac

SEQ ID NO: 19109 - DNA, 120 bp, synthetic construct
  source 1..120: mol_type = other DNA
tatctctcctgaacacctaagcctcttcttaactggtctccctgcaaccaggttctcattctaaagcatgagttggttgatatcactgcactcatccaacactttatgtgactccatttt

SEQ ID NO: 19110 - DNA, 120 bp, synthetic construct
  source 1..120: mol_type = other DNA
ctagcactcaagcattattttaattaacggccagagagtggcaaaattaaatatgagatgacctacctcaatgctccactgtgtctcctacccctggaatttcaaggggcctttgttaaa

SEQ ID NO: 19111 - DNA, 120 bp, synthetic construct
  source 1..120: mol_type = other DNA
ctggcagcagagtttgggaaggggaagggccacaatggcaaggggaaagcaaaagaaagagaagaaagggcccttgttcttgtgcaattattattaaacttggagaaaataacacaataa

SEQ ID NO: 19112 - DNA, 120 bp, synthetic construct
  source 1..120: mol_type = other DNA
caagtcgaagaagcaagtcagtaataatgaacctagaagccttacctcatttcgtgcaaccagagttataaaagctccttgtttatagcactcgatagcaatgcacttcccgatgccact

SEQ ID NO: 19113 - DNA, 120 bp, synthetic construct
  source 1..120: mol_type = other DNA
gatttgctgactttccaggggaccatccagtctccagcttgctcctttggttgccattatgttttagccaccactttattaactgaattataattcctgtccttcttcttctttggtgca

SEQ ID NO: 19114 - DNA, 120 bp, synthetic construct
  source 1..120: mol_type = other DNA
tgcttatccccaaatattagactctggataccatcaacagcaataacctcatgtgatctgtgattcctgagtatggatctcagatgtccttggctatcagctagtttcctaaagagtagg

SEQ ID NO: 19115 - DNA, 120 bp, synthetic construct
  source 1..120: mol_type = other DNA
tcttgcttctgtacaaaacacgcatcttttagcggtgtttagctcttctgatagacacagtgaaggtcacattttgtttcttctttccttaggctgggtccttaaacaatgagagcggac

SEQ ID NO: 19116 - DNA, 120 bp, synthetic construct
  source 1..120: mol_type = other DNA
atgaaaatttatgacaaaggacaggattacagttctaccattgtacctcctttttaatctatagggaaaaaataagaatgcaagtcagcagtcaccggctcatgtgaaatacatgtaggt

SEQ ID NO: 19117 - DNA, 120 bp, synthetic construct
  source 1..120: mol_type = other DNA
cgggccattttaaatggcagctttctaattttacatttaaaaatgaagccgaaaaataaattgcttgacctgtcaggatcacaacatttctcaatggtccttctgtttagcacctggctt

SEQ ID NO: 19118 - DNA, 120 bp, synthetic construct
  source 1..120: mol_type = other DNA
gaaaatttatgacaaaggacaggattacagttctaccattgtacctcctttttaatctatagggaaaaaataagaatgcaagtcagcagtcaccggctcatgtgaaatacatgtaggtgc

SEQ ID NO: 19119 - DNA, 120 bp, synthetic construct
  source 1..120: mol_type = other DNA
ggccattttgaatgtcagctttctaatttttcatttaaaaattaagcagaaaaagaagttgcttgacctgtcaggatcacaacgtttcttggtggtccttccatttagcacctggcttca

SEQ ID NO: 19120 - DNA, 120 bp, synthetic construct
  source 1..120: mol_type = other DNA
ggctctttttagtatgattatggatgaacatatgaaccatagtatctcttggataccaaataccagagagtcctacagaaagtctttccaacagctacaaatacgaaatgccaaaactca

SEQ ID NO: 19121 - DNA, 120 bp, synthetic construct
  source 1..120: mol_type = other DNA
aaccaggaaaaactgcacagaggaaactggtttctttttattcccaggatatccaccatccttcaattctcctcttctgcaatcagcacttaaaggactctgagagtgagcaccttttaa

SEQ ID NO: 19122 - DNA, 120 bp, synthetic construct
  source 1..120: mol_type = other DNA
cacaacagaaaatgtagatttagaaatctttcatacagaattggaagctggagccataagaatagaaaacattcttttttttttttttttttcagtcattatttgtacagctgtgtgaat

SEQ ID NO: 19123 - DNA, 120 bp, synthetic construct
  source 1..120: mol_type = other DNA
tcaaccacatttggcaggcagtaaaacatgattgggaaaagcagcattaatttaaataaggaatcaggttaacattcaaattttatgttttaaatagcatgaaataatctgaccatacat

SEQ ID NO: 19124 - DNA, 120 bp, synthetic construct
  source 1..120: mol_type = other DNA
ttaatgtctcattgtatggttttagaattcttagaatagctacagacaaaaaaggctgtaatggagagagtgaggatcgtgaagggctttgggagttggaagtgcagatgacccagatcc

SEQ ID NO: 19125 - DNA, 120 bp, synthetic construct
  source 1..120: mol_type = other DNA
caatgagattaagtattcacagggggtgcatgtggggcccacagcctggcatgaaaattgatttctagtacacaaataattcattctttatgacacctcagaaagtggtgtgaatctcgt

SEQ ID NO: 19126 - DNA, 120 bp, synthetic construct
  source 1..120: mol_type = other DNA
atacatgctccaagtaaagggaagtcaggggctatagtcacaagtaaatatgtctgaagttttgtcaagctaagaggaacattatggtttttttgacgactaccgtgcttattttatcac

SEQ ID NO: 19127 - DNA, 120 bp, synthetic construct
  source 1..120: mol_type = other DNA
atgcctactctcaaatgcatgcacacacacacacacacagaattgaattttaccaatctaattctaaaataggagatttattcttttccctgttatatgattctctgctgaagcaaactt

SEQ ID NO: 19128 - DNA, 120 bp, synthetic construct
  source 1..120: mol_type = other DNA
tagtggtatttagtagattcacaatgttatgggaccgccctgtctagccctgtctatttaattccaaagcactttcatcaccctataaggaaacaaagcaagcgtgatgcagtaactcct

SEQ ID NO: 19129 - DNA, 120 bp, synthetic construct
  source 1..120: mol_type = other DNA
tgcagtgacacacaggattgcaaaataacactgaaaggcattcttgcaaggtcaaaagccacttgacctactttattttttaagtctgaagaaagcttttcatacacggagagtctgtaa

SEQ ID NO: 19130 - DNA, 120 bp, synthetic construct
  source 1..120: mol_type = other DNA
tggactgataatatcagttggattatgtttgggcagatgcttgggttgaccctgacgatcacaataatggtgtttctagtggatttcagttgttttttcctgttcatcatcgccccatcc

SEQ ID NO: 19131 - DNA, 120 bp, synthetic construct
  source 1..120: mol_type = other DNA
actggggaaaccagaataagatcagtggactatcaatgtcaacaccctagttgtcatattatactgctcttttgcaaaatgttaccactgggggaaactggacaaaatgtacacaggatg

SEQ ID NO: 19132 - DNA, 120 bp, synthetic construct
  source 1..120: mol_type = other DNA
atttcattctgtttgtatttaggaattaatcccctgagaaactgaacattgctcacgtttgccagctgaatccggttaattacacaggctgagataaagtcaagggcactcgggacatga

SEQ ID NO: 19133 - DNA, 120 bp, synthetic construct
  source 1..120: mol_type = other DNA
tcttcctgaaggccacttttcacgcttttcaaactagtttctgtacgtctgaaacaaaccctctgcatggaggcctgcaatgtgcatagattgttcataactcagaacgttgactttaat

SEQ ID NO: 19134 - DNA, 120 bp, synthetic construct
  source 1..120: mol_type = other DNA
aggaagaaataaaaagagaaattcagaacctcagcacccttccacgaacacgtacgtttttcacaaaactacatttagaagcctagttatccactgagtgcggtggctcatccctgtaat

SEQ ID NO: 19135 - DNA, 120 bp, synthetic construct
  source 1..120: mol_type = other DNA
aattattactttaccaaaacagttaacaaccgcctgaccatcagctgattgttgcccaacactgctggtgtgtgttgggagtggggcttctctctcttgctctgctcatacatgactagc

SEQ ID NO: 19136 - DNA, 120 bp, synthetic construct
  source 1..120: mol_type = other DNA
gttacagggcaacgtctgctcactggtattagttagatggcagtgtctactcactggtattagaccaaccacaatgctagtgtattttaggagctcaataaatattcgttgtgtgaaaga

SEQ ID NO: 19137 - DNA, 120 bp, synthetic construct
  source 1..120: mol_type = other DNA
ttcagctgatgaaggaaaggtgatgttgggcgtttcagaacaattttacctgtgggccaaagcagtttctcagaaaatgcctaagtatttcagaggagccctattgaacaggaatttatg

SEQ ID NO: 19138 - DNA, 120 bp, synthetic construct
  source 1..120: mol_type = other DNA
ttacttaaattactgggaacacaaatcctggatcccataagaatcccagccacctgcccagtttcgtaaagtgcttgtacacttagagctggaggccctgcagtttggaagggacacttt

SEQ ID NO: 19139 - DNA, 120 bp, synthetic construct
  source 1..120: mol_type = other DNA
ttatattcttttgacccttctgacagtttctagagatgttgtagaggtctttgtaagtcacatgtacaaaaccagcccactccctccacccctgtacccgcattctgattgttgtttttt

SEQ ID NO: 19140 - DNA, 120 bp, synthetic construct
  source 1..120: mol_type = other DNA
gctttttatcagttggcctaaaatgtcctcaatagcattttcctcctgccagcacagggtccagtctgagaacaggcactgcaattcatgtatctttagccttctttaatcaggaatatt

SEQ ID NO: 19141 - DNA, 120 bp, synthetic construct
  source 1..120: mol_type = other DNA
tggttatattttatgttgatggcaaatgtatcttatgatatctctttgtggtgtcattcctttccttggtattgtgttttggttgtctggctgttcttcctcccctcccctcccctttct

SEQ ID NO: 19142 - DNA, 120 bp, synthetic construct
  source 1..120: mol_type = other DNA
ttcttagtgaatccccagggaaactgctcagtcattgcatgtttcactttctccttcattcagagatgtgcaccagtgtctctttcttcctagttcattacagatggaaaaactgtgaca

SEQ ID NO: 19143 - DNA, 120 bp, synthetic construct
  source 1..120: mol_type = other DNA
gtgctggtatggtgaggttgtatgcagcattggttcgaatcgggagtgtgtgtgtgtatgtgtgtgtgtacatgtgtgtgctggtatggtgaagttgtgtgaagcattggttcgaatcgg

SEQ ID NO: 19144 - DNA, 120 bp, synthetic construct
  source 1..120: mol_type = other DNA
gtgtatgtgtgtgtgtgcatgtgtgtgctggtatggtgagattgtatgcagcattggttcgaatcgggagtgtgtgtgtgtgtgtgtgtgtgcatgtgtgtgctggtatggtgaggttgt

SEQ ID NO: 19145 - DNA, 120 bp, synthetic construct
  source 1..120: mol_type = other DNA
gcaagtaccgtgttcatttaggtaaaagtgcctctttttggcacttttaggattattgtgaagtgaaatgagatgacaaatgtagaggactgggtggagggataggagaaggtcctgagt

SEQ ID NO: 19146 - DNA, 120 bp, synthetic construct
  source 1..120: mol_type = other DNA
aagatactgcctctatctccatatcacatatgaagaaacaaagtcattgagatttgagatcagttgtccaagatcacggtgacctagcagatcatggtgacctagcagatcatgtagggc

SEQ ID NO: 19147 - DNA, 120 bp, synthetic construct
  source 1..120: mol_type = other DNA
agtcatccaaggagggctgggatttgaacacaggccttcagctgcacagttaagaatcctttttttcatgggatgatgtttcttgtcaataagatttaattccctgaggcagagagagtt

SEQ ID NO: 19148 - DNA, 120 bp, synthetic construct
  source 1..120: mol_type = other DNA
tatttgtcaagtgactgcttgatggatggagctgcatttaccccttggcagttcgatgagttgtagatgcacagcttaccagagaggatttacgggcagtacagaaataattattcagta

SEQ ID NO: 19149 - DNA, 120 bp, synthetic construct
  source 1..120: mol_type = other DNA
tgaatctccgttaaaataaagtcctggatccaaacaaactgcggtgaaatcagacactgagagaggcatgtcggatgaacggaccctccgtgctgtcttggaggaggtgtcttcagggat

SEQ ID NO: 19150 - DNA, 120 bp, synthetic construct
  source 1..120: mol_type = other DNA
gtgcactgccctcagctgtccactttgactctccacagaccatttgatgttgttatgcttttgttgtgttcaaaagttgaaatctcttgacatattaaccttatagcccaccaaccttct

SEQ ID NO: 19151 - DNA, 120 bp, synthetic construct
  source 1..120: mol_type = other DNA
agaatgaattgaatttgtaccctttagtacaaacaacaatagacagagtggtaacctagtggaaaacaaatagacactccgtcccttgtggggattcagagaggttcagaaagatggagg

SEQ ID NO: 19152 - DNA, 120 bp, synthetic construct
  source 1..120: mol_type = other DNA
tgacatagggaaaaagactctaggttcctaaatagatgtaagaccacagggagtgtcactaataacaggttatagttttacaatcttctggtcagccacaggctctagggttggcaaacg

SEQ ID NO: 19153 - DNA, 120 bp, synthetic construct
  source 1..120: mol_type = other DNA
caggtgaccaggtgggggaaaggtggatgggaaggcaggtggccaggtgggggaaaggcaggtagtcaggtgggaagccgggaaggcaggtggtcaggtggggggaaggcaggtggtcag

SEQ ID NO: 19154 - DNA, 120 bp, synthetic construct
  source 1..120: mol_type = other DNA
gagcaaagtcacagacaaagcctgcatgcctgcatgccatgtttttaggttgtaagggaacaaatgttaaacacaagaaagggaattttggccctaacccagcagagtgggtttcccaca

SEQ ID NO: 19155 - DNA, 120 bp, synthetic construct
  source 1..120: mol_type = other DNA
ctgcaactgtttcgcaggagctcgttgaccaagctggagccctggatctatgaattcaaaattttgaaagctaagtaagctgttttccatcaagtactacatcaaaaagctggtcacaag

SEQ ID NO: 19156 - DNA, 120 bp, synthetic construct
  source 1..120: mol_type = other DNA
acgcattctttacaagggaagggatgcatatatgttcccaaaaggaaaacagccacaagttttacaagctaggaaaggaaaagctgcacagatcaaatgctagggttcatgaagttcctg

SEQ ID NO: 19157 - DNA, 120 bp, synthetic construct
  source 1..120: mol_type = other DNA
cccccgaaacacacgcaggtgaaaagtttcccccatgaaacacacgcaggtgaaaaggttaccccatgaaacacatgcaggtgaaaaggctcccccgaaacacacactcaggtgaaaagg

SEQ ID NO: 19158 - DNA, 120 bp, synthetic construct
  source 1..120: mol_type = other DNA
gaagggccttatctcggagccacaccaggttccagaaccttctacatcaattatacacccatctctcaaaaaaaagaaaaaaaaaaagtgagagatcgctttgcaagtggaggcatggga

SEQ ID NO: 19159 - DNA, 120 bp, synthetic construct
  source 1..120: mol_type = other DNA
gagaaagagagagacggagagaaggcaaatgtaccagaatgttaacaactcatgaaactaaaggggggggggtgtttatttctaactctttccatttttccaaatttggcaaacttttcc

SEQ ID NO: 19160 - DNA, 120 bp, synthetic construct
  source 1..120: mol_type = other DNA
cgcacagctgatgcaacaggagacaggatgacacagaagtccctccaccagggtatcaccaggacctggagtctatggtggtgatgccacgggcggtgaacgtggggagcaaacatggga

SEQ ID NO: 19161 - DNA, 120 bp, synthetic construct
  source 1..120: mol_type = other DNA
tgtaatatccattttcagaggtccctatctggaggggaaaagagtgacattttacaaggggagcagttagttttgaacagatgagatacttctcttttgaccctggaagaagtggaagag

SEQ ID NO: 19162 - DNA, 120 bp, synthetic construct
  source 1..120: mol_type = other DNA
ttatttgaaagaccaacccgggtgtgttgggtactgcacagcgtctgtatccttgcatttcctatttacaatcattcgtacattgattttggagttttctcttccacgtggttcttcact

SEQ ID NO: 19163 - DNA, 120 bp, synthetic construct
  source 1..120: mol_type = other DNA
gtgggcaatatgagtatccatttcacagagttctggggtgattagacagtgtgtgtgtatggtataaagtgtatctgtttcacagagttgctctgcggtgattagactgtatgtggatat

SEQ ID NO: 19164 - DNA, 120 bp, synthetic construct
  source 1..120: mol_type = other DNA
aataacattacgttgcaggtatgacaccttccatggtctcctgtgctgtaattctcttggcatcacagagaagcatgaagttttcattacaagtacctgtgctgcttttcagattgatcc

SEQ ID NO: 19165 - DNA, 120 bp, synthetic construct
  source 1..120: mol_type = other DNA
gctggatgggagagcacttttccttatttaccattcaaggaacacacttcaaatccaggtacaggagtctgtacactaactcagagtcatttgtctttcccacgtttttatttgctgcta

SEQ ID NO: 19166 - DNA, 120 bp, synthetic construct
  source 1..120: mol_type = other DNA
ttggagtgtgggattgagtttgatgagaaaaacccagaaaggcatttatttcagtgattatgagagcgtattttctgtatgttaagttttatcactttgagaattatccactacaattaa

SEQ ID NO: 19167 - DNA, 120 bp, synthetic construct
  source 1..120: mol_type = other DNA
ctttgtttcctacacagaatctagcagtggcatccatctctgaggaaggaatgataatagatggcctagactaggtttcagagggtggcagtagctatgcaaggaactagaaatgttaaa

SEQ ID NO: 19168 - DNA, 120 bp, synthetic construct
  source 1..120: mol_type = other DNA
gggaacccgagggcagaacactatattgtggggagtttttgaggaaggaaaaaggggtaattttttctctttaacgtctacactgtagtgcttcctgctttcctttttattatggaaatc

SEQ ID NO: 19169 - DNA, 120 bp, synthetic construct
  source 1..120: mol_type = other DNA
tctatccactcatgcatgcatgcatccatcaattcatccattcgtcatccatccatccacatatcagtccatttacccatccatccatctatccatccatccatacacacacccacctac

SEQ ID NO: 19170 - DNA, 120 bp, synthetic construct
  source 1..120: mol_type = other DNA
ttggtagcgcatctagttaggtttaaagcccagagtacaattttggttagttttgagtgttctatgttcccataaaatgaccacacacacacacacaaacacacacacacacacgcagtc

SEQ ID NO: 19171 - DNA, 120 bp, synthetic construct
  source 1..120: mol_type = other DNA
ccttaaaatcattctgctgactgagaacttactaggacaggctcctaggaaatgcagaggcgtttttctcatagagtaaatagaaccgtcagttcttgggtcaaattggaggaaaagtga

SEQ ID NO: 19172 - DNA, 120 bp, synthetic construct
  source 1..120: mol_type = other DNA
gctggtcacattttggaggactgagctgagcaagtgctggtcacattttggagactgagctgagcaagtgctggtcacattttggagacagagctgagcaagtgctgctcacgttttgga

SEQ ID NO: 19173 - DNA, 120 bp, synthetic construct
  source 1..120: mol_type = other DNA
tgtccagggaaggtggcagaaatgaatccagagtggagagttccaacttccaagctgaccagttttgtgactgagcaggtaattaaaacttagtatttaccagccttcgccttttctctt

SEQ ID NO: 19174 - DNA, 120 bp, synthetic construct
  source 1..120: mol_type = other DNA
atcatcgatttgtcaccagtgaaaagaggcgcactttctagtcatcacaagaaacaagtcccacctggagctctccaacacagaaatcaaggaaaaccatgaattcacaataaactggaa

SEQ ID NO: 19175 - DNA, 120 bp, synthetic construct
  source 1..120: mol_type = other DNA
ctacatcaaaatcaagattatccaggaaggcttttcacaaggggtaaagaacagggtttgaaagatgcaaacacgttggcagaacacattcatagttccgtggcttgcctgatagattgt

SEQ ID NO: 19176 - DNA, 120 bp, synthetic construct
  source 1..120: mol_type = other DNA
gcacaggacaggcctgttcaggttttagcacagtcggccatgatccgtgagctgctgacctggatttttcccactggaggccaaatccaagaggaaatgcaggaaatctcccgtgtgagt

SEQ ID NO: 19177 - DNA, 120 bp, synthetic construct
  source 1..120: mol_type = other DNA
ttgtgtctattttgaataataatattgctggatattatctgaacggcctgcaccaaaaggttaaatatgaagaaatacagtaccactttgggaggccgaggtgggtggatcacctgaggt

SEQ ID NO: 19178 - DNA, 120 bp, synthetic construct
  source 1..120: mol_type = other DNA
cttaacagctactgaacagatgtcagatctttgttgatgtatttaattgcctccttgtttgcacagaataaataaatgtggtggtggtggtggtgatgatggtggtggtattggtggtgg

SEQ ID NO: 19179 - DNA, 120 bp, synthetic construct
  source 1..120: mol_type = other DNA
ggtgttggtgttggtggtggtcatggtggttatggtggtgatgatggtcatggtggtgatgatggtgatcatggtggtgatggtggtgatggtggcgattgtgatggtgatggtggtggt

SEQ ID NO: 19180 - DNA, 120 bp, synthetic construct
  source 1..120: mol_type = other DNA
gaatgaacatcagttattatacagaatgtttcacattctgttttgtttgtgtttcctcgaagttaaactcagcttaagcaccctctgtggaatactgtgtaagtgatgctatggccttct

SEQ ID NO: 19181 - DNA, 120 bp, synthetic construct
  source 1..120: mol_type = other DNA
ttaaattagtaagattgaaagagacattggagctgagcatgggtaaaactgtaacactgtggcgctcatcccattaatatagatgccgtgagctcccccattagtgtgcatagtgtgcat

SEQ ID NO: 19182 - DNA, 120 bp, synthetic construct
  source 1..120: mol_type = other DNA
gaatagaagtaaaagcattacaaaagaagaagtttagatcagtgtacgaagaagctataagaaaaacatcaaaggtccaacgtggagattgtcagggctgctggcggtgtggagagtgac

SEQ ID NO: 19183 - DNA, 120 bp, synthetic construct
  source 1..120: mol_type = other DNA
cggtgtggagagtgactgaaggtgcaggctgcatgtcgggggagctggcggtgtggagagtgaccgaaggtgcaggctgcatgtcgggggagctggcggtgtggagagtgactgaaggtg

SEQ ID NO: 19184 - DNA, 120 bp, synthetic construct
  source 1..120: mol_type = other DNA
aagggctcaggtcacacacaagaaggaagaaattggaaacccaggaacacatatcagaggaaaccaactgaaaacaaataataaaatgcagacgtacgttctaatggtctaaatacgaga

SEQ ID NO: 19185 - DNA, 120 bp, synthetic construct
  source 1..120: mol_type = other DNA
cactagcccagtgggctcagccatccctctgcttccagcagccctcaccctgggtaaccttgaatttgtcttcatttctataaatttgtcatttctggagtgttatataaatgaaataaa

SEQ ID NO: 19186 - DNA, 120 bp, synthetic construct
  source 1..120: mol_type = other DNA
tttatttctccagatcgatgtccaggagtgaggttgctgatttttatggtcattctatgcttattttaagactgacaaactcttttccagagttacagttttgttttacattcccaccag

SEQ ID NO: 19187 - DNA, 120 bp, synthetic construct
  source 1..120: mol_type = other DNA
actatagtgttgaagaacactattcatgaagttgaccccattgatagatacagggacttaaggcagcaggatgggtagcttacccagtgcacacagaacatttattaaggtatgccagaa

SEQ ID NO: 19188 - DNA, 120 bp, synthetic construct
  source 1..120: mol_type = other DNA
ctataatgagatattaactccaaaagattaagtaaactgcagtaatcaacattcatgcagcactccctatccctctaggcttcctctaccatgtcttcatcatggggacgtcctttcgaa

SEQ ID NO: 19189 - DNA, 120 bp, synthetic construct
  source 1..120: mol_type = other DNA
acgtcttggtttgggaatttcctatgaaagtcgtagctcattttcccattggattgttagtctttctggctgttgtataggagctctttgtatatccgggttattttctcccactctgct

SEQ ID NO: 19190 - DNA, 120 bp, synthetic construct
  source 1..120: mol_type = other DNA
tgttctctgtagaggttggtataccttttgttggatttatttctaagtatttgacttttttttttttgggggggggtgggggaagacaaggtcttactgtgtcacctgggctggatttca

SEQ ID NO: 19191 - DNA, 120 bp, synthetic construct
  source 1..120: mol_type = other DNA
tcttggagttcctgcagagcttgctggcttgtttgtaaaatacaatgagagctttataacccccctaaagtcctgggtattgtgtgtttagatagtaagggttagagaataggttcatgc

SEQ ID NO: 19192 - DNA, 120 bp, synthetic construct
  source 1..120: mol_type = other DNA
ccctactgactgtgcggagggtaccgccctactgactgtgtggaggacaccgccctgctgactgaggagggcaccgccctactgactgaggagggcaccaccctactgactgaggagggt

SEQ ID NO: 19193 - DNA, 120 bp, synthetic construct
  source 1..120: mol_type = other DNA
aatgtcttttgcttgccacttgtctctggtctttctttgattcagctcatcttcaaagctggtactcagcttactcttccgaaaacaccactttattgcaaatctccaatcatcccacac

SEQ ID NO: 19194 - DNA, 120 bp, synthetic construct
  source 1..120: mol_type = other DNA
gagagacatgagaacaaagacccgtatgttaatgttcacagcagtgttagagccgggaagtggaggcagtccaaatgtctatcagctatcaaacaagaaataaaatgtagtctgttcgca

SEQ ID NO: 19195 - DNA, 120 bp, synthetic construct
  source 1..120: mol_type = other DNA
gggctgaggagtgatccccagcaggtagaaggtcaggggctgaggagtgatccccagcaggtagaaggtcagaggctgaggagtgatccccagcaggtagaaggtcaggggcggaggagt

SEQ ID NO: 19196 - DNA, 120 bp, synthetic construct
  source 1..120: mol_type = other DNA
gtgtgtttattatcctaaaacagttggcctgtttgtctatttaattccttaactagagcctaaaaaatgtttgggaagtcacctgaggtcacatgacagggaaggagcgggggcttttgc

SEQ ID NO: 19197 - DNA, 120 bp, synthetic construct
  source 1..120: mol_type = other DNA
gtgttaagtgtcatctctgtaccctccctccctgagctcacatggtgttcggtttcatctctgcacactccgtccccacacagtgccctgctgtgtcaagttcaaagcatgaaaaagaaa

SEQ ID NO: 19198 - DNA, 120 bp, synthetic construct
  source 1..120: mol_type = other DNA
cctccgtggttagcgtgccctccctggttagtgtgccctccctggttagcatgctctccgtgtttagcgtgctctccgtggttagcgtgctctccgtggttagtgtgctctctccatggt

SEQ ID NO: 19199 - DNA, 120 bp, synthetic construct
  source 1..120: mol_type = other DNA
gacatgttttatttgacataaacaacttttggtttgactatgggccatttacccattgaacctccgtttccaactaaaaaactagcaaactgcagtgaaggtcttcatgagcctcccagc

SEQ ID NO: 19200 - DNA, 120 bp, synthetic construct
  source 1..120: mol_type = other DNA
ttcccctaaaccctggcacccaccatctagttctttctctgtggattggatggctctagggacctcatggaaatgggatcatacagtatttgtccttttgtgactggcttctttcactca

SEQ ID NO: 19201 - DNA, 120 bp, synthetic construct
  source 1..120: mol_type = other DNA
acatgctcagcacacacttggcacactcgtttagcacactacacatgctcagcacacggtcagtgcacgtcagcacatgctcagcacacttggtacacttgtttagcactactatgcttg

SEQ ID NO: 19202 - DNA, 120 bp, synthetic construct
  source 1..120: mol_type = other DNA
tcaaaaactaggaccaacccagatgtaacttcagtggttaagcacactgtggttcatttgcctgccacaaaatagtagtcagcaatagaaagaaataagctactgacacagcagcaacct

SEQ ID NO: 19203 - DNA, 120 bp, synthetic construct
  source 1..120: mol_type = other DNA
tgtgagggaccctgtgtgagggatgctctgggtctggaggtgtccgtgtgagggaccctgtgtgagggatgctctgggtctggaggtgtctgtgtgaggggtgccctgggtctggaggtg

SEQ ID NO: 19204 - DNA, 120 bp, synthetic construct
  source 1..120: mol_type = other DNA
gagatgtctgtgtgaggggtgtcctgggtctggaggtgtccgtgtgagggaccctgtgtgagggatgctctgggtctggaggtgtctgtgtgagggaccctgtgtgagggatgctctggg

SEQ ID NO: 19205 - DNA, 120 bp, synthetic construct
  source 1..120: mol_type = other DNA
gaagggctggattgaagcccagatcagtttgggcttgtggtttctgtgagataaataaatagatgaagaaataaacacggacatgtgtgagcatgacttagtaaacacacacagtcctag

SEQ ID NO: 19206 - DNA, 120 bp, synthetic construct
  source 1..120: mol_type = other DNA
accagagagcacacagatatcttcacctccaccatgtgtacgcagagaaagcgcctcctcaaccagaggattccagttataaatggtgaaggaaccagggcagttggaggccccgctggg

SEQ ID NO: 19207 - DNA, 120 bp, synthetic construct
  source 1..120: mol_type = other DNA
attttgaagtattttcttattgttgcttctgaatacattgtgttaagttgtggatcatggtaaaacccatatcagaaagtgcctgctcttactgtccctgcaccacggatgaaggcgctg

SEQ ID NO: 19208 - DNA, 120 bp, synthetic construct
  source 1..120: mol_type = other DNA
cttaggactagctgtgtaccagaatcttctgttttgttctaaaagatggattcgtaggatatgagccagtatcagaatctccatgagggggatttcacagtctgtgttttcatccaatcc

SEQ ID NO: 19209 - DNA, 120 bp, synthetic construct
  source 1..120: mol_type = other DNA
atcatccatccattattcctccattcctcgtccatccatccatccatcaccatccatttatctatccatccattcatccaccatttacctatcatgcctccatccccaatgcatcattca

SEQ ID NO: 19210 - DNA, 120 bp, synthetic construct
  source 1..120: mol_type = other DNA
tgtcgagttgccccatggtttgtaaaacactggcatgggctggaacggctcaggactgactgccactgcgtctccctgtaagcccctccctttctggggagggaagccccccaacaaccc

SEQ ID NO: 19211 - DNA, 120 bp, synthetic construct
  source 1..120: mol_type = other DNA
ggtgggagatgggagatcggctgtggtgggagatgggagatgggctgggcaggagatgggctgtggtgggagatgggagatgggctgtggtgggagatgggagatgggctataccaggag

SEQ ID NO: 19212 - DNA, 120 bp, synthetic construct
  source 1..120: mol_type = other DNA
gagcaaaatgttttctacattatgatgggattttcttttttataagtgcttctagaacatctctggaagctgggttagacgcacagggcttagtcggctttggggagagacagtagttgt

SEQ ID NO: 19213 - DNA, 120 bp, synthetic construct
  source 1..120: mol_type = other DNA
ttgtccttcacgtaaagttttcaagacccacgtcccattgtctgtgaaatcacaaggttttactttatggactgtgtggaatggacccagggaagggggaccagtatatgcccaatttgc

SEQ ID NO: 19214 - DNA, 120 bp, synthetic construct
  source 1..120: mol_type = other DNA
aggctggaaggtcagccaggccctgtggtgtctttagtgagaaacaggaaataaatcaaggggatgttgtagaagttttaccgctgctggtttagaagtgtttgtttttattatttgtat

SEQ ID NO: 19215 - DNA, 120 bp, synthetic construct
  source 1..120: mol_type = other DNA
gttgcatactcagatagtcacggttattttgcttcttgcgaatgtataacagccaaggggaaaacatggctcttctgctccaaaaaactgagggggtcctggtgtgcatttgcaccctaa

SEQ ID NO: 19216 - DNA, 120 bp, synthetic construct
  source 1..120: mol_type = other DNA
ttttattaaatttcagtttttgtcggttgcctcgctcttcagacggcaagtgagagaagcgtgttctcacgcttactgtcaacgttgcgagggaagcgtgttctcatgctcactgtcaac

SEQ ID NO: 19217 - DNA, 120 bp, synthetic construct
  source 1..120: mol_type = other DNA
gcgtgttctcacgctcaccgtcgacgtaaacctgagggaagcgtgttctctcactgtcaactttgcaagggaagcgtgttctcgcgctcactgtcgacgttgtaaacctgagggaagcgt

SEQ ID NO: 19218 - DNA, 120 bp, synthetic construct
  source 1..120: mol_type = other DNA
acgttgcgagggaagcgtgttctcatgctcactgtcgacgttgtgagggaagcgtgttctcacgctcactgtcaacgttgtaaacctgagggaaaggaattctctctcacatgctgtggg

SEQ ID NO: 19219 - DNA, 120 bp, synthetic construct
  source 1..120: mol_type = other DNA
aaaaaagtgttgcagcccagggcccagatattcaattttctaatgtaaaacgaggcgggtagggtttcccaatcaacatgagggcgccgtgtcctctgcagccccctgacttgcacaggc

SEQ ID NO: 19220 - DNA, 120 bp, synthetic construct
  source 1..120: mol_type = other DNA
tggggtgtcattccagcgtgacctggtcctggggtgtcattccagtgtgacgtggtcctggggtgtcactccagcatgacctggttcctggggtgtcattccagcgtgacctggtcctgg

SEQ ID NO: 19221 - DNA, 120 bp, synthetic construct
  source 1..120: mol_type = other DNA
cactccagcgtgacctggtcctggggcgtcactccagcgtgacctggtcctggggtgtcattccggcgtgacctggttcctggggtgtcattccggcatgacctggttcctggggtgtca

SEQ ID NO: 19222 - DNA, 120 bp, synthetic construct
  source 1..120: mol_type = other DNA
ctggcacgaccctcagcagagtgtggctttatgggccctggtcagtgagctgcaggctgcgtcctgggaaggccttggaatcacaatggccccgtgattttcttcctgcctcctggacgt

SEQ ID NO: 19223 - DNA, 120 bp, synthetic construct
  source 1..120: mol_type = other DNA
gacgtcgactcacgcgtttcagttcctctcgagaaaactcgctgccacctggtctcagccagcgaccgcgagggacagtgagaaaggcgagagcgggcacacgccccccatcaacctggt

SEQ ID NO: 19224 - DNA, 120 bp, synthetic construct
  source 1..120: mol_type = other DNA
tggcaagtctgccccttgaggaaatgggggcaaggatggcactgagacgggtgctgaacaaggctctctaaaaataggggctgcatgggctgtgcacatcccgtgtgggtgctgttgcag

SEQ ID NO: 19225 - DNA, 120 bp, synthetic construct
  source 1..120: mol_type = other DNA
tcactgctgctactcagccttgtactggaggttctagccagtgtagccaggtaagaaacagaaataaaaggcaaccggaatggacaggaaaaagtaaaattgtctttattggaagaaaac

SEQ ID NO: 19226 - DNA, 120 bp, synthetic construct
  source 1..120: mol_type = other DNA
gcaccccaaaacaatgacaacagtaaccccaaagatcacagatctccgcagcagatatgatagcaatgagaaagcttggaacatcatgagcattattgaaacgtgacacagagatatgaa

SEQ ID NO: 19227 - DNA, 120 bp, synthetic construct
  source 1..120: mol_type = other DNA
gaggaggtggtggacgagacccttgggtgatggaagaggcaggagactgctgtgtgggaggaggtggtgctggaggcccttgggtgagggaagaggcaggagactgctgtgtgggaggag

SEQ ID NO: 19228 - DNA, 120 bp, synthetic construct
  source 1..120: mol_type = other DNA
cccacataaaaaaagtttaaggcacatttaagctagtaccggagaaatgactgaaaaataagtatagccaagcagcagaagactctgtgtgtgggggggggagggtgcatccaccactaa

SEQ ID NO: 19229 - DNA, 120 bp, synthetic construct
  source 1..120: mol_type = other DNA
ctgatgtgtatgtgtgtgtgtggggggcatccactgatgtgtgtgtctgtgtgtgtgtggggagcatccactgatgtgtatgtgtgtgtgggggggcatccactgatgtgtgtgtctgtg

SEQ ID NO: 19230 - DNA, 120 bp, synthetic construct
  source 1..120: mol_type = other DNA
cgtctactgatgtctgtgtgtggagggtatctgctgatgtgttttgtgtggggggggtgcgtccactgatgtgtgtgtctgtggggggtgtctgctgatgtgtgtgttttgcttgtgtta

SEQ ID NO: 19231 - DNA, 120 bp, synthetic construct
  source 1..120: mol_type = other DNA
tgtcccacgaacacgatggagacctcagacgccgtccccaccctgtcactgtcaccatcacccatcctgtcccctcacgcctccccacatcccatcattactacccctcaggcctcccca

SEQ ID NO: 19232 - DNA, 120 bp, synthetic construct
  source 1..120: mol_type = other DNA
ttttgatctttaataagattgtatgtttttgtcgggcttcatcctatctggcagaagtaagaacctcctcactccattggaaagaaactgaggttccaagaagtttggacctgccctgcc

SEQ ID NO: 19233 - DNA, 120 bp, synthetic construct
  source 1..120: mol_type = other DNA
aaagacagtaatttccctacggtgctttaaatggtgaagaatgctggtgtcgtacgattttgatgcattttttgtgctgactatagactggcgggaatgatgcagttagcgagttgatac

SEQ ID NO: 19234 - DNA, 120 bp, synthetic construct
  source 1..120: mol_type = other DNA
caccgcagcagttgacttctccagttcactggtgggcatgcaccggagcagttggttggttgtcctgagcataccaccagggggttaaagtgttttcaggctggaagcatttgacaccat

SEQ ID NO: 19235 - DNA, 120 bp, synthetic construct
  source 1..120: mol_type = other DNA
catttccagccctcacctgcttcctactcgtctgtcaagacccagctgttacagctgctgtgacactgttctagaagcttccttcctcgtgtagaactaggcatctgctgtagtcatctg

SEQ ID NO: 19236 - DNA, 120 bp, synthetic construct
  source 1..120: mol_type = other DNA
ggtggggaacagtggagaaaacctttgcagaacacactctgcaggcgtttgtcagccgttgatccatttgtgtgaagccccactggctggaaggtgccccccgcccgccatggagttttc

SEQ ID NO: 19237 - DNA, 120 bp, synthetic construct
  source 1..120: mol_type = other DNA
gatgaatctgaggtcctccattctgatgacagggaagaggatccccagccacagagatgatgtcatccctgatggataggaaggtgtcctcgtgatgatgtcacctcccgttgttaggaa

SEQ ID NO: 19238 - DNA, 120 bp, synthetic construct
  source 1..120: mol_type = other DNA
gtcctagtgatgatgtcaccacccgtcattagcgcattctggtgatgatgtcacctcccatcgtgtcctggtgatgtcacttcccatcgtgttctggtgacgatgtcatctcctgttaag

SEQ ID NO: 19239 - DNA, 120 bp, synthetic construct
  source 1..120: mol_type = other DNA
gattgtccttttctccatagtttgagatcttcctggttcttgctgtggcaagtgatactggattgaaacctggacctgtcacatcatgttaggagactctggatcttatttaaaccttct

SEQ ID NO: 19240 - DNA, 120 bp, synthetic construct
  source 1..120: mol_type = other DNA
aaaatcacgtgagatgtaagaactcacattaggagtgctccccaaatcaggtgagacatgagaactcactaacatgaggaatgctcccaaaatcccatgagatgtaagaactcactaaca

SEQ ID NO: 19241 - DNA, 120 bp, synthetic construct
  source 1..120: mol_type = other DNA
ctggaagcgactctaaagcatgcacccccacacagtccctgagtctcctcgtggtgggcgtggccaaagcactgtgcctggtgactgtgtgtgaatagcactcagtcctcgtgctgtggc

SEQ ID NO: 19242 - DNA, 120 bp, synthetic construct
  source 1..120: mol_type = other DNA
aaggaccagatcagtactgtaattgccgtttcactctatgtcttacagactcggtgggcttgggtgatttcagaatttgagatcaggagaataaagtgtcctgggagtctgttcaggttc

SEQ ID NO: 19243 - DNA, 120 bp, synthetic construct
  source 1..120: mol_type = other DNA
ccacgacatgtaagttcatgtgagtttcaggcttttccaaagcagttgtaatgactgtggcatggataatttttgtggggaagatgagtggtcagcacacatacgtgtttgactggattg

SEQ ID NO: 19244 - DNA, 120 bp, synthetic construct
  source 1..120: mol_type = other DNA
tccctcccgtgcgcgttctgtccctgcgtccctcccgtgcgcgttctgtgcccgcgtccctcccgtgcgcgttctgtgcccgcgtccctcccgtgcgcgttctgtccccgcgtccctccc

SEQ ID NO: 19245 - DNA, 120 bp, synthetic construct
  source 1..120: mol_type = other DNA
gtgagcctcgagtgcatgtgtgttatatgcctgctgtgtgtgtgtgtggctgtatcacacataatgtgtcacataggtgtgtatgttagctacattgtatctacgttagctaagaaaata

SEQ ID NO: 19246 - DNA, 120 bp, synthetic construct
  source 1..120: mol_type = other DNA
ctaaggaaagcctagtggcaccggctggttatgcagaggctcgtaaggaaagcctagtggtactggctggttatgcagaggctcgtaaggaaagcctagtggcaccggctggttatgcag

SEQ ID NO: 19247 - DNA, 120 bp, synthetic construct
  source 1..120: mol_type = other DNA
ccaccgggatttttagaacgcctctgcgctcgtgcattcactccattttacagatgagaaactggtgtgactcccatgtacgtggcccaggctcactaattctctcttcttaatgctctc

SEQ ID NO: 19248 - DNA, 120 bp, synthetic construct
  source 1..120: mol_type = other DNA
cacactgaccacactccacgttatgggcccagagtcctcgccctgaggagctgccggggcctcgctgaccacactccacgttatgggcccagagtccgcgctctgagaagctgccgggga

SEQ ID NO: 19249 - DNA, 120 bp, synthetic construct
  source 1..120: mol_type = other DNA
agagtcctcgccctgaggagctgccggggcctcactgaccacaccacgttccgggtgcccagcgcacctgccgcttatgcagctttcggttctaaacctcgctccccagaaggcaatctt

SEQ ID NO: 19250 - DNA, 120 bp, synthetic construct
  source 1..120: mol_type = other DNA
acccaacataatattcttaaaactcttagacatacagacatgtaggaatacttaaagacatgacatgcgtgcgtgtgcatgtgcatatgtgtgcacactgcgtcattgcatgtctgcctg

SEQ ID NO: 19251 - DNA, 120 bp, synthetic construct
  source 1..120: mol_type = other DNA
tatgtgtgcatgtgtgtgtaacgtgtctgtgtgtaatgtgtctgcgtgtgtgtctgtgtgtgcatgtgtctgtgtgtgtgtctgcatgtatctgtgtgtgtgtctgtgtgtacatgtgtc

SEQ ID NO: 19252 - DNA, 120 bp, synthetic construct
  source 1..120: mol_type = other DNA
atctgctaagggttcatggtccatcccaggtcaacacacctcccctgaaagcagaacgtgacgtgttgtttcaggggtttgagaagtgctggcagggttcttacaggatggcaccatttg

SEQ ID NO: 19253 - DNA, 120 bp, synthetic construct
  source 1..120: mol_type = other DNA
ttccctgcatacagagccttcgtcaggagggttccctgcggacagagccttcgtcaggagggttccctgcggacagagccttcgtcaggagggttccctgcggacagagccttcgtcagg

SEQ ID NO: 19254 - DNA, 120 bp, synthetic construct
  source 1..120: mol_type = other DNA
agcctactccgaggtacatctatccgctgctcatagcttgcccgtcctcacccatgagacctcagctgcccatcctcacctgccctttctcacccctccttcctcacctgcccttcctca

SEQ ID NO: 19255 - DNA, 120 bp, synthetic construct
  source 1..120: mol_type = other DNA
tgtgtgctgagaagtctgggtgctgaggtttgggtgctgaggtctgtgtgctgagaggactgtgtgcagaggtctgggtgctgagaggtctgtgtgctgagaagtttgggtgctgagttc

SEQ ID NO: 19256 - DNA, 120 bp, synthetic construct
  source 1..120: mol_type = other DNA
tgaggtctgggtgctgagaggtctgtgtgctgagaagtctgggtgctgagaggtctgtgtgctgagaggtctgggtgctgagaggtctgtatgctgagaggactgtgtgctgagaggtct

SEQ ID NO: 19257 - DNA, 120 bp, synthetic construct
  source 1..120: mol_type = other DNA
tgagaagtctgtgtgctgagaggtctgggtactgtggtctgggtgctgaggtctgtgttctgagaggtctgtatgctgagaggtctaggtgctgaggtctgtgtgtctgtgtgctgagag

SEQ ID NO: 19258 - DNA, 120 bp, synthetic construct
  source 1..120: mol_type = other DNA
tgtaaatgcctgggaggaaaagctgaaccctcactagtcccattacacacagagcgccacaggaagcgttctgagactgcctttctggtcttttcctattgacacacattttctagttga

SEQ ID NO: 19259 - DNA, 120 bp, synthetic construct
  source 1..120: mol_type = other DNA
agctgggtgagccaggctgaacgtagactttttttctgacctgatttttggccaagtagaccaggtgcatcaaatctgatcaatcagggtctgttttctgggctgaaagttccggaaacg

SEQ ID NO: 19260 - DNA, 120 bp, synthetic construct
  source 1..120: mol_type = other DNA
acagggagatggggatgggaacatagggacgtggggacggggacatggggacacgggacagggagatggggatgggaacatagggacgtggggacggggacatggggacacgggacaggg

SEQ ID NO: 19261 - DNA, 120 bp, synthetic construct
  source 1..120: mol_type = other DNA
gatggggacagggacacggggatatagggtcacagggacagggacacagggaggggacatgagggagatgcctgtgaggacatggggacaggacacagggacggaaatgctgagacagca

SEQ ID NO: 19262 - DNA, 120 bp, synthetic construct
  source 1..120: mol_type = other DNA
ccattcacagctaatgttacgattggtatagttgggtctgtgtctgcttttgatggggttgttcacaccattgataacgatttgatatagttgggtctgtgtctgcttttgattgggttg

SEQ ID NO: 19263 - DNA, 120 bp, synthetic construct
  source 1..120: mol_type = other DNA
tgcgttcttcactccatgcacatctaatggttcgattgatatagctgggtctgcgtctcctttgattgggttgttcactgcattcacatgtaattgatatagctggatatgtgtctgctt

SEQ ID NO: 19264 - DNA, 120 bp, synthetic construct
  source 1..120: mol_type = other DNA
cagtgttgcttttcctgctaccaagcacttcatgtggttagattcagggtgtgaggtctgacttgtttttggtggactgcagttcaatttaattccatttcaaaacctcccttttgatct

SEQ ID NO: 19265 - DNA, 120 bp, synthetic construct
  source 1..120: mol_type = other DNA
ctcaccatagagtccccaaccttccccacatcctcaccatagagtccccaaccttccccacatcctcaccatagtcaccaaccttccccaccatctcacaccagagtccccaaccttccc

SEQ ID NO: 19266 - DNA, 120 bp, synthetic construct
  source 1..120: mol_type = other DNA
aaaccacactcataagcactctcagaaattagcaaattaaaggaggcaggtggacatgtgcagtccaggggacatagcggcagggaaaaggtgaacggagacaaacctgccaagaagcct

SEQ ID NO: 19267 - DNA, 120 bp, synthetic construct
  source 1..120: mol_type = other DNA
ctaaggtccatctctgggagacctattttagtttccccaggaaggagtcaattggcaaatgactaacagaaaatcctcactaaacagtttctgagaaaagaatgaacctggatgcttacc

SEQ ID NO: 19268 - DNA, 120 bp, synthetic construct
  source 1..120: mol_type = other DNA
gcaccaacctgccaaatcctgaatgttggcattccacagagtgtgatctgctgaatgctggttttgcaaaatggtagtaaggactgtaagaaacaaaaacatgagtgacctatgtttcag

SEQ ID NO: 19269 - DNA, 120 bp, synthetic construct
  source 1..120: mol_type = other DNA
ttaacttttgttgcttttcttatctagttaaatttggagccaacattacctgaatgtcacacgacctagatgaaattattctaggcacatgaccagcagccctggaacacaagggacacg

SEQ ID NO: 19270 - DNA, 120 bp, synthetic construct
  source 1..120: mol_type = other DNA
ccaaaggatgcacacacacatccctgtgcacacgtgcactcatagctgctgctctcgatgggataactgagggctacatataatcacacgtgatacgcaagcaagtgctaatcagcattt

SEQ ID NO: 19271 - DNA, 120 bp, synthetic construct
  source 1..120: mol_type = other DNA
gtcctgtaatgacagaaaaaattgaaaactgtattttaaaaatgatttctcaacaagaccagccggccactcaaccacttcagtacctcgtttctggatgaagaccctgagcaggggatt

SEQ ID NO: 19272 - DNA, 120 bp, synthetic construct
  source 1..120: mol_type = other DNA
attatttttgtcacacaacctgttgagagttcaaagaactgagctgtgcttaggggccttcactctcatctacctgagtgtgcaaatgaagcttcacagtgttgacacccaacaataaaa

SEQ ID NO: 19273 - DNA, 120 bp, synthetic construct
  source 1..120: mol_type = other DNA
aaaatttaccatattagctctttttaagtgtacagttcaggagtgtacattcacactgttatgcacccactctctagattgcttttcatcttgcaagctagaaccctatactagtaaaca

SEQ ID NO: 19274 - DNA, 120 bp, synthetic construct
  source 1..120: mol_type = other DNA
tctgtaagataaaggatcttttctgattttgattaatccacaaatagctaataagttgtggttcaaggcctccaggacctacaactgcctcaccccaaatccagacaggggtcacagtct

SEQ ID NO: 19275 - DNA, 120 bp, synthetic construct
  source 1..120: mol_type = other DNA
ttatttaatgattaccagaattcgttcagtatggccagctctggtcaaagtgaggcaggcaagatgctttgtcaactgcctggatggaatgtctcaaaaggtttccatttcatggtagca

SEQ ID NO: 19276 - DNA, 120 bp, synthetic construct
  source 1..120: mol_type = other DNA
acaggtgtgaacaaccatgcccggcctgtaaaactttttcctaatgtaacagaaacataatagtattacattttatcatatttctttgatttctaagacacacatacacacacacacaca

SEQ ID NO: 19277 - DNA, 120 bp, synthetic construct
  source 1..120: mol_type = other DNA
gtcttcccttctatctgattcagtggaccaagtaaatgactctctggtaacagaatttgtattacttggacttgcacaatccttggaaatgcagtttttcctttttctcttcttctcttt

SEQ ID NO: 19278 - DNA, 120 bp, synthetic construct
  source 1..120: mol_type = other DNA
catcaagactcctgtgatcaccatgatcactatggaacgcgcacatttttagtattgcctgaaaaaactgaaaaatctgcaaaaaggatgcattaaatctaagaattgtatttcagataa

SEQ ID NO: 19279 - DNA, 120 bp, synthetic construct
  source 1..120: mol_type = other DNA
catcacttggatgtatttctatgactattttaagaaacataaattgtggtgactcactcagctcacttttaactactgcatggtaattaaagatgcaaaataaaataagttacaagaagt

SEQ ID NO: 19280 - DNA, 120 bp, synthetic construct
  source 1..120: mol_type = other DNA
ctttccccaggtccggtgttttcttacccacctccttccctcctttttataataccagtgaaacttggtttggagcatttctttcacataaaggtacaaatcatactgctagagttgtga

SEQ ID NO: 19281 - DNA, 120 bp, synthetic construct
  source 1..120: mol_type = other DNA
caagcactatgaattactgttctttaaaaaacagcaaaaatcaaataacagtattcctccaaaaaagatggcaagtgtaaactctataccttcatgtctcccgtggaatgttagtgatca

SEQ ID NO: 19282 - DNA, 120 bp, synthetic construct
  source 1..120: mol_type = other DNA
gaaagcattccaaaatctcttaccagttttatctcctatgaaagtccttcacactttctctcatttaaactttattgcattttcctcactttttctcacttcacttttgaattccctatt

SEQ ID NO: 19283 - DNA, 120 bp, synthetic construct
  source 1..120: mol_type = other DNA
gtcccaatgaggtcgatagtttttattgtgaccttcctagggtaatcaaacttgcctgtacagatacctacaggctagatattatggtcattgctaacagtggtgtgctcactgtgtgtt

SEQ ID NO: 19284 - DNA, 120 bp, synthetic construct
  source 1..120: mol_type = other DNA
aaccacaggctttaaagtaaaaaacaaagagctggattcaactctactgactcttattaatcatgattttgggcacattacgtagctttcatgagctttagtttctacatttataaacag

SEQ ID NO: 19285 - DNA, 120 bp, synthetic construct
  source 1..120: mol_type = other DNA
tacttctaacacatagggaacttctaaaacaaaacccaaaatattaataggaaaatgggcaaaacagttaaacttacagttcatacataaggagaatcagtcttttttttttttttacag

SEQ ID NO: 19286 - DNA, 120 bp, synthetic construct
  source 1..120: mol_type = other DNA
ctctggacaacacaggggatagagttagggttagaagctcacagtgagggcagccaccagtgccccctgcaggaggccaacaaggacatcgctccagtggtgtttgtaatcagacacgcg

SEQ ID NO: 19287 - DNA, 120 bp, synthetic construct
  source 1..120: mol_type = other DNA
acatgggttctgtgaacccgacaaaattcccaacgtagcacataaagggccaaacacacatgcacacaggcttcagggagacgagaagggacacacacacacacacacacaaggcttcag

SEQ ID NO: 19288 - DNA, 120 bp, synthetic construct
  source 1..120: mol_type = other DNA
tgctggctacacacggcccctcgcggctgggccaggacctgcccggagctccagaaacacggccgggagttacaaaaacgcggccctgagctatagaaacacggcccggagctgcagaaa

SEQ ID NO: 19289 - DNA, 120 bp, synthetic construct
  source 1..120: mol_type = other DNA
acattgaagttgcatttcaccaactcgtacagcgcctggggagaggacatgttggctcttccatgggctcagcgcaggagccgacagcaagaactgtctataccatccagcgagtggcat

SEQ ID NO: 19290 - DNA, 120 bp, synthetic construct
  source 1..120: mol_type = other DNA
cctacacctctatccagggagtgacatcaggggtgtctacatccccttgcaggatacccggaggcgtctacacctcctccctgatacgtggttttaattggccccccttctgacctgagt

SEQ ID NO: 19291 - DNA, 120 bp, synthetic construct
  source 1..120: mol_type = other DNA
cacacagacgactcgaaggacataggcgtcatcacaatgcaataaagacacacacaaccacacagacgactcgaatgacacagacgtcatcaccatgcaacacacaggacacacacaacc

SEQ ID NO: 19292 - DNA, 120 bp, synthetic construct
  source 1..120: mol_type = other DNA
cgacttctcttcacggagggtccctgtctccctggactcagtacttctgctgcacctgtcccttcccaccacgcatctcagccactgaatcaccttggagaaggctcctgagctaggagc

SEQ ID NO: 19293 - DNA, 120 bp, synthetic construct
  source 1..120: mol_type = other DNA
tgaaagacctggtctccactgaatttcagctactaggacagcatctggcactttgcaaaaagatgtacaatttagcacttaccaatgtggaatctgagctgcacaaaactcatgaggctt

SEQ ID NO: 19294 - DNA, 120 bp, synthetic construct
  source 1..120: mol_type = other DNA
tcttttcctaacctatttgagcctcaatctccacgtctgtggaatggggacaatgataatccctccatcattaggtcactctaaagatccataagttgtgcaacaggtgtcagctgcttt

SEQ ID NO: 19295 - DNA, 120 bp, synthetic construct
  source 1..120: mol_type = other DNA
gacagtcccgtgggccctcaggaggagcgtcggctggtttgactgtggctgtcgttcctactccgacggtcccgtggcccctcagcaagagcatcggctggtttgactgtggctgtcgtt

SEQ ID NO: 19296 - DNA, 120 bp, synthetic construct
  source 1..120: mol_type = other DNA
ttccgactccgacggtcccgtgggccctcaggaatggacgaataagtctggactgaagagattcagaaggcgctcgagatggtcaatgaaagtgactcggaaaataaacagctggacaag

SEQ ID NO: 19297 - DNA, 120 bp, synthetic construct
  source 1..120: mol_type = other DNA
tgggctcacatgtgtagcaacctggactccccaggttgggttttctaggcacgtactaagcatgtacaaagggtaacagcagctctttctttcagaggttaactcctatttctttttcct

SEQ ID NO: 19298 - DNA, 120 bp, synthetic construct
  source 1..120: mol_type = other DNA
gctccctggtctcccgcccctccagctcctggtcctggggggtcctccagccctgaccctgggggctgagccagctccaactcctagcctggccagtcagcatgttcacctccccctccc

SEQ ID NO: 19299 - DNA, 120 bp, synthetic construct
  source 1..120: mol_type = other DNA
gaggacgacagtgcgagacgcaggcgggtggaggaatccctggaccctggacccgcgctatgggcacatttgtaggagttcttggccagagaatcgggaagggcatgagtgcaagtgaga

SEQ ID NO: 19300 - DNA, 120 bp, synthetic construct
  source 1..120: mol_type = other DNA
ggaagagaaattgcaccccgcacagggaagggaggatctcttgagcccagggctttgagatcagcctgggaaacagtgagacctcacctccacacaatttaaaaatgtgctgggtgcagt

SEQ ID NO: 19301 - DNA, 120 bp, synthetic construct
  source 1..120: mol_type = other DNA
tggaagatggatgggtagcacaccctatctgcaaaaacaagggctatgacgcacgtttgaactggcttgaatatccgttgaaaagctaggaaaataactcaggagccactgacagctaac

SEQ ID NO: 19302 - DNA, 120 bp, synthetic construct
  source 1..120: mol_type = other DNA
tgtggatgacgcagtacctatatccaacgtgcagagaaacctaataccgtgtggatgacacagtatctacacccaacgtgcacagaaacctaataccatgtggatgacgcagtacctata

SEQ ID NO: 19303 - DNA, 120 bp, synthetic construct
  source 1..120: mol_type = other DNA
acctatacccaacatgcacggaaacctaataccgtgtggataatgtagtacttatacccaacatgcaaggaatctagtgtgtgcaggaaaaacagacactgatgatgaaaatctcagcag

SEQ ID NO: 19304 - DNA, 120 bp, synthetic construct
  source 1..120: mol_type = other DNA
tcagcacatcctgccaccttgcaatggctgttccccctgcctggataaccttccccgctctgctctcccaggcagctcctattcaccagtcagggctctacccaaatgccgcttcctcag

SEQ ID NO: 19305 - DNA, 120 bp, synthetic construct
  source 1..120: mol_type = other DNA
cgcttcatcgtgagtgagatagtgagtgagagatagaggaggccgggcagatacacggcgccccattgtgagcctgtgattgagtgagtgagtgagatcctgagtgagatcatgagtgag

SEQ ID NO: 19306 - DNA, 120 bp, synthetic construct
  source 1..120: mol_type = other DNA
ttctagagccagtgaccaggcccactacttcctcatctataaaatggaatgttgcacacatttccgagctgtagcacaaaaggcaggtcgttggcaaacccagtctccactcctttctgc

SEQ ID NO: 19307 - DNA, 120 bp, synthetic construct
  source 1..120: mol_type = other DNA
ccttttcttggccgcgtcgtatttcagcgtgtggatggccacactgtgttgatccactcatgcctgggtcacagcctcgtttctttccttggccgcatcatattgtcatatttcagcatg

SEQ ID NO: 19308 - DNA, 120 bp, synthetic construct
  source 1..120: mol_type = other DNA
tactgacttggagttcctgcgtaggtgggtgttacaggtacacttgggtttcatttcaggagtgaaggatcacagaatgcttgctataaatagtggtagttgatcggcaggacggccaca

SEQ ID NO: 19309 - DNA, 120 bp, synthetic construct
  source 1..120: mol_type = other DNA
agaactctgtctgtaaactccacagtcaggcctttgcacctgcagctgctgtgccccgcctagaactctgtctgtaaacccaccgcgtggggcctttgcacctgctgtgccccgcctaga

SEQ ID NO: 19310 - DNA, 120 bp, synthetic construct
  source 1..120: mol_type = other DNA
aagcgggtcttggggaggcggaagtgggtcccggggaggcagaagcgggtcttggggaggcggaagtgggttccggggagacggaagcgggttccggggaggcagacgcatgttccgggg

SEQ ID NO: 19311 - DNA, 120 bp, synthetic construct
  source 1..120: mol_type = other DNA
ctctgtgcatctgagtctaaagttccttctccttacagagacccctgatccaggtaggcctcatcttgactaggttacatctgcaaggaccctgttcccaatataaggtaataaggtcag

SEQ ID NO: 19312 - DNA, 120 bp, synthetic construct
  source 1..120: mol_type = other DNA
gacaaaatgtgatgcctgcattgtgagtcagacatgaatcacagaggaaaagctggggacagcagcccccctcaccctggggcacagacagggagactggggcctgagcctcccagagat

SEQ ID NO: 19313 - DNA, 120 bp, synthetic construct
  source 1..120: mol_type = other DNA
gggccaggcagagaaacacggtcacagatggggagactgaggcccaggcagagatacacggtcacagatcgggaaactgaggcccaggcagagatacacagtcacagatggggagactga

SEQ ID NO: 19314 - DNA, 120 bp, synthetic construct
  source 1..120: mol_type = other DNA
cttccgttggacagacacatactcggggctcacggcaaccccgtgtccacacccatcctgccggaaggaaaactgaggtctggggaagggcaaggacttgcctgaaactcctgcctcctg

SEQ ID NO: 19315 - DNA, 120 bp, synthetic construct
  source 1..120: mol_type = other DNA
gctttccttttctgagcctgggtttgctccggggaaaagacattcttagaggtgcccaaaataagaggctcattgggacttggtggggtttggtacagatgaggccttggctgttgtcaa

SEQ ID NO: 19316 - DNA, 120 bp, synthetic construct
  source 1..120: mol_type = other DNA
gggtgctgctctcgtgccttggagtgctgagtgccaccaggacccctgacccagacaacctctgtgtctggcactggggcccagcaggaaaacagtgaggcttccttgtttacctgctgt

SEQ ID NO: 19317 - DNA, 120 bp, synthetic construct
  source 1..120: mol_type = other DNA
acggtgccctccaggaagtttgagctaacttgtcctcccttcctgccagaggctgggatggccaggccccccaggtttagaatccggaggccggggtggccaggcccccaggtttagaat

SEQ ID NO: 19318 - DNA, 120 bp, synthetic construct
  source 1..120: mol_type = other DNA
tgcttcctttgctcctgcgctgaggaaggcttttgccccccagtggggcagcatgggccctccctgttgccggcatcgttattttctcccagctcctgatgggtcccttgggttgtgctt

SEQ ID NO: 19319 - DNA, 120 bp, synthetic construct
  source 1..120: mol_type = other DNA
agtcgtcagaacacatcaacgagggggagacggccatgctggtctgcaagtcagagtccgtgccacctgtcactgactgggcctggtacaagatcactgactctgaggacaaggtgagaa

SEQ ID NO: 19320 - DNA, 120 bp, synthetic construct
  source 1..120: mol_type = other DNA
gtccttgttttcatttctttgggtataatctcggggcagggagaggctggtaattttatgtctttttaaggagccacccgtgtttgctccgagtcgttttgattttcattttctcgatag

SEQ ID NO: 19321 - DNA, 120 bp, synthetic construct
  source 1..120: mol_type = other DNA
cctcgccctgctgcttcccagtgcccctctgcaccccggctcctctctgctcctctgctgtcctgtcctgtctatttttttaacgccaaccttgtgccaggcacattgtccctctctggt

SEQ ID NO: 19322 - DNA, 120 bp, synthetic construct
  source 1..120: mol_type = other DNA
ccggggctggtcccgcaggtgccccggggaggcaccggcctgaggtgtgggcaccctcgcccccaggttctactgggacttcaccatgctgctgttcatggtgggaaacctcatcatcat

SEQ ID NO: 19323 - DNA, 120 bp, synthetic construct
  source 1..120: mol_type = other DNA
aggcatcaggggcggggctatgagggttgtgctgagcggggtcagacatccgagtggagatatgagggttgtgctgggcggggtcaggcagcaagggcgggactatgagggttgtgctgg

SEQ ID NO: 19324 - DNA, 120 bp, synthetic construct
  source 1..120: mol_type = other DNA
ccagcgcggtgatgaggatctgcaatctcatcagcatgatgctgctgctctgccactgggacggctgcctgcagttcctggtgcctatgctgcaggacttcccgcgcaactgctgggtgt

SEQ ID NO: 19325 - DNA, 120 bp, synthetic construct
  source 1..120: mol_type = other DNA
cctgggatcatccgtggagagaagctgagtgtggttatgatgagtcctgtcacccagacatctgcttagcgcgttttccaatggatttcccttttaattaacccacattaattattatta

SEQ ID NO: 19326 - DNA, 120 bp, synthetic construct
  source 1..120: mol_type = other DNA
gcctcaactggcccctctgcaacgtgggctgctgagcgggcttggtaggacagctggcatacagtcggcgctcaagcatgtctgtggtgtcccataaaccaccggtgtcccactctaggc

SEQ ID NO: 19327 - DNA, 120 bp, synthetic construct
  source 1..120: mol_type = other DNA
tccctggggtgctgctggtcgctggctcattgacagttatcagtggtctgggtgggccctgccccttctgactcccacatcccaggaaccctttcccaaccttcctcgtggtgttgctgc

SEQ ID NO: 19328 - DNA, 120 bp, synthetic construct
  source 1..120: mol_type = other DNA
gtagaattaaaaattaatcattaaaaaaatccagacaggcctctcagggattttgtgaaaatcactgggctgaggatgaggaatgaactgtgaggctgcctgtgggattttctaggggtt

SEQ ID NO: 19329 - DNA, 120 bp, synthetic construct
  source 1..120: mol_type = other DNA
gagtccggatgcacttctgtgaaggggcgttgggctgtctggggggtccatgtgacctctcctctgaccctcatctctctctccgcttccacctcccgtgcagacaagcgagtctccaac

SEQ ID NO: 19330 - DNA, 120 bp, synthetic construct
  source 1..120: mol_type = other DNA
gtgtcctgagggctttgggaagccttgggtgcgttgggtcctgacggtgctgaggtctaatttggttttaagggctcctcctagaggtcaagaggcaaacaggctgtgggagatgccagg

SEQ ID NO: 19331 - DNA, 120 bp, synthetic construct
  source 1..120: mol_type = other DNA
gcctcggtctgcacctctgtgaaacgggaaaatacccgccatgggccgttgaggggttaaatgagatcctgcagggaggccccgatctgctgtcaatcaacaaacttactgagaagggag

SEQ ID NO: 19332 - DNA, 120 bp, synthetic construct
  source 1..120: mol_type = other DNA
ctttacctgaggagtctaccccgtgaaaggcggtcctctcaacagctcctagttacgaagctcctaatacgtgctgtgagccaccccactgacctcgctcaacaagacgaacccatcaca

SEQ ID NO: 19333 - DNA, 120 bp, synthetic construct
  source 1..120: mol_type = other DNA
agccccagccccagccccagccccacgtgccccagcagctcacctttccctggttgtcaatgtccaccagccccagccccggccccggccccggccccacgtgccccagcagctcacctt

SEQ ID NO: 19334 - DNA, 120 bp, synthetic construct
  source 1..120: mol_type = other DNA
cctcccagctgggcccatgtcctggctgacacgcccctcaaggagcgcaggggaggggggcactacaggtgggggaccaagggttggggctcctggcgtcccaaagagaggcatcttagg

SEQ ID NO: 19335 - DNA, 120 bp, synthetic construct
  source 1..120: mol_type = other DNA
agggaggtgtggtgggacgtctatgttggctgagcacccagggcatgtggagtgccaggccagaagtgggaaaacaatggaggcccgtggtagagggaacagccgatgcaaaggcccgga

SEQ ID NO: 19336 - DNA, 120 bp, synthetic construct
  source 1..120: mol_type = other DNA
aggctttctaagcgcctggcatccagacgggctgtttcgcttcgcaaaggcaaaagcccagggagcctggaatcacccgcaaccaggttctcctcaaaccctaaccccggctccctactt

SEQ ID NO: 19337 - DNA, 120 bp, synthetic construct
  source 1..120: mol_type = other DNA
cggatggatgaggccgtccccagagggaacggatggatgaggccgtccccagagggaatggatggatgaggccgtccccagagtgaatggatgagcacccagcctgagcccgggaaggtg

SEQ ID NO: 19338 - DNA, 120 bp, synthetic construct
  source 1..120: mol_type = other DNA
cgctccagaaccacctcatcttaacttatgatatgtgcagagacactgcgtctaaatgaggccattcacaggtcccaggtcgggacttttaacatgcttttggggggaaacacgattcaa

SEQ ID NO: 19339 - DNA, 120 bp, synthetic construct
  source 1..120: mol_type = other DNA
tctgtctgtccaggaaccaggtgacttgcctgtcagtgtccactgacggcagcgtgctgctctcaggctcccacgacgagaccgtgcgcctctgggacgtgcagagcaagcagtgcatcc

SEQ ID NO: 19340 - DNA, 120 bp, synthetic construct
  source 1..120: mol_type = other DNA
ccccgcctttgcctcctctgggctacgagctgtttccaggcaggtgccaggtcaggggaccctaacccaaataatcccaggcaggtccaggtcaggggaccctatcccaaataatcccag

SEQ ID NO: 19341 - DNA, 120 bp, synthetic construct
  source 1..120: mol_type = other DNA
aaataatcataacaaaagtaataaataagctctgaactgggagaaatgccttgaaggagaagaatcagacgaatgttgagtgtctagtgatcttcaaacccagaccgggagcgtgggtgg

SEQ ID NO: 19342 - DNA, 120 bp, synthetic construct
  source 1..120: mol_type = other DNA
gacacattgtctggtgtagaccgggagcgtgggtgggacggtgtctggtgtagaccgggagcgtgggtgggacacggtgtctggtgtagacggtaagcgtgggtgggacacggtgtctgg

SEQ ID NO: 19343 - DNA, 120 bp, synthetic construct
  source 1..120: mol_type = other DNA
tgtgacatggtgtctcacgtagaaggaacagcaaggtcttgacattggaattggctgggctgttagaggaagcgggagctggttttctcctggggtaactgctccaaatggtgttttcag

SEQ ID NO: 19344 - DNA, 120 bp, synthetic construct
  source 1..120: mol_type = other DNA
gtccaatagggatgtggctagcccgcctctttgccccgcaacaccaagttccaccattctcattggtccacccacccttccttccgctgcacgttgcccctctctccttgactctgcctt

SEQ ID NO: 19345 - DNA, 120 bp, synthetic construct
  source 1..120: mol_type = other DNA
ccaccacactatgtcccattctcacatttgccctgccccatgcccattatgcccctgctccacactcaatgctggccccgccacactgtggccctgccccatactcatcaatatgagtcc

SEQ ID NO: 19346 - DNA, 120 bp, synthetic construct
  source 1..120: mol_type = other DNA
tccgggatgtctacaaggcctggggctgcccataggctctggggttccatggacctttaggggacagacagagtcagaagtgtgttcacttaaagcacctgcgttgtaggagcctgaggg

SEQ ID NO: 19347 - DNA, 120 bp, synthetic construct
  source 1..120: mol_type = other DNA
catctgacccctgctgaaacgcatctgcagaacagtcaatgctgcctgcctccctgcctgaaagcagccagagtttgcaaagcgcttttctgagccgtgagctcatcctgagcttcccag

SEQ ID NO: 19348 - DNA, 120 bp, synthetic construct
  source 1..120: mol_type = other DNA
gggaggctcaggctggggggaggctcgggctggggtgcggtggggggaggctcgggctggggtgtggtggggaggagaccagaagaggcaccaggggctgccctgggggacactcacccc

SEQ ID NO: 19349 - DNA, 120 bp, synthetic construct
  source 1..120: mol_type = other DNA
acaactcacgacggccacgggtggaagcagcacaagcgtccatcacggacacacagacagacacagtggggccctccacgcctccatcacagacagacacagtggggccctccacgcctc

SEQ ID NO: 19350 - DNA, 120 bp, synthetic construct
  source 1..120: mol_type = other DNA
ccctcatgatcaaccctccctcaatgacctccctccccacgatcaatcctcactcaatgacctccctccccatgatcaaccctcactcaatgacctccctcatgatcaaccctccctcaa

SEQ ID NO: 19351 - DNA, 120 bp, synthetic construct
  source 1..120: mol_type = other DNA
ctgcatagaaaggtttgcaaacaccagcaggaaagaagcatccactccactcccgggccacaaacagctgctccacaatctcctggagtctcccaaggctctggctatacctgctcccaa

SEQ ID NO: 19352 - DNA, 120 bp, synthetic construct
  source 1..120: mol_type = other DNA
cgtggggtggagccttccaggaccacgtgcacaccaccctccaaacccctcaacaagactttgggccctcgcgccctgcacccagaactccgtttgtaactgtgacttcagaatgagcaa

SEQ ID NO: 19353 - DNA, 120 bp, synthetic construct
  source 1..120: mol_type = other DNA
tccagatgggctcaagacagggcaatcaccctctacctggcgggcgcacaactcgcatcctaggaccgggtgcagggggcgggggctggcgatttcacaaggctcagctaatatggggca

SEQ ID NO: 19354 - DNA, 120 bp, synthetic construct
  source 1..120: mol_type = other DNA
cccagcaagccgctcacggtccccaggccctcatgggcagccccccacccactgggtacatccaacttcatgcaccaagagcccatgaagaaaccactcccacacccctgcccaggcctc

SEQ ID NO: 19355 - DNA, 120 bp, synthetic construct
  source 1..120: mol_type = other DNA
ttctaaaagttctcaagtctgctgccaaggttatcagaactgcgtagggagctgtgtgggtcacctgtgaggcccggagcctccctgacgcaggtggtgggtgtcatggctctgctgtct

SEQ ID NO: 19356 - DNA, 120 bp, synthetic construct
  source 1..120: mol_type = other DNA
aaccccatctccagagctccccagagctggtctagcccctcatctgacacacagagaaacggagaccaggaacctgacgctggtttccctagcccatgtgaggaccctgtagaccagcta

SEQ ID NO: 19357 - DNA, 120 bp, synthetic construct
  source 1..120: mol_type = other DNA
tgccatgggagggaaagttcccaagctcggagatggccaggagcaggaacagcttgagcgggtggccgaactgacagcttctcttgccaaacctcctgtcctgctccagcacaaagcctc

SEQ ID NO: 19358 - DNA, 120 bp, synthetic construct
  source 1..120: mol_type = other DNA
tcagctgaccccacagccccaccaggcatggtcagcacggtgccgaatgcaggcctggaaagggaataaaggaggccctggggaggggccttggtgcttcatcccaagccaaccccgaaa

SEQ ID NO: 19359 - DNA, 120 bp, synthetic construct
  source 1..120: mol_type = other DNA
gatctcagatcccagaccctagatcccaaaccccagatctcagaccccagatcccagacttcagatccccagaccccagatcccagacttcagatccccagaccccagatcccagacttc

SEQ ID NO: 19360 - DNA, 120 bp, synthetic construct
  source 1..120: mol_type = other DNA
cgtttgggttccttccggggccatgcagtctcaagcaggggactaagactctctcgtgttctgaaaaccccctcgttacctaacgtttgttaagtggcactcgagttgggatcagagcta

SEQ ID NO: 19361 - DNA, 120 bp, synthetic construct
  source 1..120: mol_type = other DNA
tgtgtccaggccgtgttcccagctccagaattgtttcacaagtgtctctcatagctggtttttttcagactggaatccaaggttcatattccatctggttattaatgtctctctagcttt

SEQ ID NO: 19362 - DNA, 120 bp, synthetic construct
  source 1..120: mol_type = other DNA
tcatgaaaccatcccgaccgtcacggcggcgagcactcaccctcaaaggtttatagtcttttattcaaagcagttggaacaacttaaaatgtgatagccttggatagggaaaaaaaaaaa

SEQ ID NO: 19363 - DNA, 120 bp, synthetic construct
  source 1..120: mol_type = other DNA
tcctcccagagagtgtgtccccttcccttggcctttctgcatcttctgagacgggtctgtgtccccctccccgccacctcctccctcttcctctccactgactgaaggtcatggccatgt

SEQ ID NO: 19364 - DNA, 120 bp, synthetic construct
  source 1..120: mol_type = other DNA
ggcgcgaggcttttggagcggctgtgggtgtcgtctggactgaggtttttaaatatttctttctctaacccatcagcacaataaaaaaaagtcactggttcaacaacagggtttaaaaaa

SEQ ID NO: 19365 - DNA, 120 bp, synthetic construct
  source 1..120: mol_type = other DNA
cttcgctcaggcctgggtggggagctgaaagcaccatctgggggtctccaaccacacctgacaccttttcctcttctcgccgtttcaaacaggctgctttgggattcaggttccgctctg

SEQ ID NO: 19366 - DNA, 120 bp, synthetic construct
  source 1..120: mol_type = other DNA
tggcccaagcccagcctggtttcgctatcaggaagcaaacataacctagctaagccaggagagcttctgcagatcagagagggtgggtgacagatttgtttaaaatcaaaatacacccca

SEQ ID NO: 19367 - DNA, 120 bp, synthetic construct
  source 1..120: mol_type = other DNA
ggaaggggacagcagagctcacaggggatgaggcgggaaggggacagcagaactcacggggtgaggcgggaaggggacagcagagctcacggggtgaggcgggaaggggacagcagagct

SEQ ID NO: 19368 - DNA, 120 bp, synthetic construct
  source 1..120: mol_type = other DNA
cagagctcacagtggccctgcttcctgctggccaggcccctgcccttcctgagcctcagtttcctctgtttcaggcgttgaggggctgatgccctggggtgctggggtcagaggcatttg

SEQ ID NO: 19369 - DNA, 120 bp, synthetic construct
  source 1..120: mol_type = other DNA
tggaggtggtgaaggaagaggtgatgaaggaggaggtggaggtgctggaggtggtggaggaggaggaggtgctggagttggaggtgatatggagggtgtgatgggatagcactgacattg

SEQ ID NO: 19370 - DNA, 120 bp, synthetic construct
  source 1..120: mol_type = other DNA
gagagagggagagggagagagagaggcagaggtatacctttctgttctctggcttgttctgtttcttgttttctggagtcatgtcttataagagtatttattattctctgtgttctgtgt

SEQ ID NO: 19371 - DNA, 120 bp, synthetic construct
  source 1..120: mol_type = other DNA
tttcgagctcgctgagcgctcgagagagtgagcagagccatgaaaggaaggagagcagccctaaaattttaaatctttaatttccgttttcacgtattttcttcttgcttccaaaaggaa

SEQ ID NO: 19372 - DNA, 120 bp, synthetic construct
  source 1..120: mol_type = other DNA
gtggcggtgggcgaagccagcggccccgccccgttccctgcgctgccgttcactggcgtttcctagctaggatctgcagggatcctgcctacggagtgcccctggggcgggggtaaggga

SEQ ID NO: 19373 - DNA, 120 bp, synthetic construct
  source 1..120: mol_type = other DNA
ccagcccagccctgccacctgctacaggcaggagccccgagctgccacctggatgtcaccactcaaacgaacaggacacatccccggtggaggccctgggcacgctctggcctccccctc

SEQ ID NO: 19374 - DNA, 120 bp, synthetic construct
  source 1..120: mol_type = other DNA
ccaagtgctgcctcggccgatgggctcccagccacacgtgcacagacccccagaccaccacccactccctcccgccgggtggcatccacacccctgtgacaagctcagccccttcccatc

SEQ ID NO: 19375 - DNA, 120 bp, synthetic construct
  source 1..120: mol_type = other DNA
ccacagggtgtttctggcaccggaacgcaggggccacatccaggggggcagtgcttgtgacgccggtgccttcgtttctgatgtggcttactcagctgggagttcctgtcctaacatttt

SEQ ID NO: 19376 - DNA, 120 bp, synthetic construct
  source 1..120: mol_type = other DNA
ggctgcccctgaccacccttcagttctgcaggtggggctcctccctcctccctcctccccaggctgtcccgaggctccttgctggggaccgtcctgcctcccgtcggggcctgcgctgag

SEQ ID NO: 19377 - DNA, 120 bp, synthetic construct
  source 1..120: mol_type = other DNA
ctaggacggacagtcatctttcagctgcttcacgcccagcccccgctgtaccgcactggggccgggcttgcagccactccagcactgcaccccgtggagccggcccgcccccgccgctcc

SEQ ID NO: 19378 - DNA, 120 bp, synthetic construct
  source 1..120: mol_type = other DNA
cttgatgatcttgatgaggacccagttgttggtggaggacgtcatcagcttgaaaaagagcggggccagggacaggtagttcttagggttgcgtctggccagctcgcagatgacattgac

SEQ ID NO: 19379 - DNA, 120 bp, synthetic construct
  source 1..120: mol_type = other DNA
ctgtgaaggccagcagtcagtgttttcagcttcatgggccagacagcctctgtcatgaccacacagctgtgccttcacaaccaaggccaccagagacaacacaacacgtgaaaagaaggt

SEQ ID NO: 19380 - DNA, 120 bp, synthetic construct
  source 1..120: mol_type = other DNA
actgttaatctggctactgtgttttaaatgaaaaggaacaaaggtcccctcatgagctggaggttaagtcaggcacaaaacagatgtttctggggccaaaatttccaggggcttcccagg

SEQ ID NO: 19381 - DNA, 120 bp, synthetic construct
  source 1..120: mol_type = other DNA
tcccctcattcctcgtcctccccgcattcctcgtcctccccacgcctctcgtcctccccgcattcctcgtcctcccctcattcctcatcttccctgtattcctcttcctccccgcattct

SEQ ID NO: 19382 - DNA, 120 bp, synthetic construct
  source 1..120: mol_type = other DNA
tgctgaccctgtggtgtccccatcccatggggtggtggtgggagcgcagggggacccgcagtggtcaggccgtgattactgtcttataacaaactcttaagaagccgagagatttctggc

SEQ ID NO: 19383 - DNA, 120 bp, synthetic construct
  source 1..120: mol_type = other DNA
ggagaccgtcgaggcctcctgctccagggcccttggtgagaacaggcgcacccacactccactcccttgtccagttttgaccctgctgtgtgatcccgagtgggtttcctgtcctctctg

SEQ ID NO: 19384 - DNA, 120 bp, synthetic construct
  source 1..120: mol_type = other DNA
cccagatcccaacctcaaaaagtggccgcttctgtccagctccccgctccaggagccccctaccttcaagactggcgtgccctctgggggaggaggggtccgtggggacaaactcccaat

SEQ ID NO: 19385 - DNA, 120 bp, synthetic construct
  source 1..120: mol_type = other DNA
gttcagacatgtggctgccatcctgttcctgatgaggcaaatggctgtggcctgtttgtttccgtgacaggtcccctggggaccagggggtgcggctgtctctctgtctgggaggtttac

SEQ ID NO: 19386 - DNA, 120 bp, synthetic construct
  source 1..120: mol_type = other DNA
gcagtgccagcttcctgcttgtggaatccgtctttcctcatagctccatcctgctctgttaagcattaaattgaagaggtgggggtcgtcccttctggtccaggcccgtctactccgcag

SEQ ID NO: 19387 - DNA, 120 bp, synthetic construct
  source 1..120: mol_type = other DNA
accctggtcatcaatgcaagctgtccatgcggccttggggtgcagatccagaggcaccggccgagctccatgtggtagataagggtctctactgctccatgccggggaccctatccagtg

SEQ ID NO: 19388 - DNA, 120 bp, synthetic construct
  source 1..120: mol_type = other DNA
tcctttcccactgtgtcccgccccctcctggagccctcgaggtgtgccggcgaagaggcactagcatcttcctgtcagctttatgcatagtgtgtgcgtgtgagcacgtgtgtaatcagt

SEQ ID NO: 19389 - DNA, 120 bp, synthetic construct
  source 1..120: mol_type = other DNA
aattaattttctcagagctttattttgaaataatttcaaatgacagttgcaggatcgctacagagaactcccgtgtgccccgttctcagagggactggtcatttcttcacattcgcttga

SEQ ID NO: 19390 - DNA, 120 bp, synthetic construct
  source 1..120: mol_type = other DNA
tctcatttgcctgattccgttctctccctccacacacagactcacgcgctctcattcgcttgattccattctctccctccacacacactcatgcgctgtcattcgcttgattccgttctc

SEQ ID NO: 19391 - DNA, 120 bp, synthetic construct
  source 1..120: mol_type = other DNA
ttctctccctccacacacactcgcgttctcattcgcttgattccattctctccctccacacacactcgcgttctcattcgcttgattccattctctccctccacacacactcacgcgctg

SEQ ID NO: 19392 - DNA, 120 bp, synthetic construct
  source 1..120: mol_type = other DNA
tctctccacacacactcacatgctctcatttgcttgattctgttctctctctacacacactcacgcgctctcatttgcttgattccgttctctccctcgacacacactcgctctcattcg

SEQ ID NO: 19393 - DNA, 120 bp, synthetic construct
  source 1..120: mol_type = other DNA
tatctaaaaattaccttcacagaaacagctagaataatgtttgaccaaagaaccaaagcccggccaaggtattgcatagactgaaccatcccagggacacacttaggctacaaaaggatg

SEQ ID NO: 19394 - DNA, 120 bp, synthetic construct
  source 1..120: mol_type = other DNA
gatgtacttgggcgtgaacttgtaggcgatctcctccccctccaagacctgcctcttgattctccagttccccagagactgatcctggaagacacggcacacacctgaccctcagccacc

SEQ ID NO: 19395 - DNA, 120 bp, synthetic construct
  source 1..120: mol_type = other DNA
gacagccccgtcaccctgaccctggtcacccccatcagctgggtcaccccgttacccccatgccccggtcattccggtcaccttgtcccctgcctcgcattggccgacggccccgtcacc

SEQ ID NO: 19396 - DNA, 120 bp, synthetic construct
  source 1..120: mol_type = other DNA
tttcagaaccagaaaactggtgggatgtttaatcaaggatctctcccgctgggcaccatggacactgggctgatcactctcggacaactggtgatgacagcaacccggggccctcccaga

SEQ ID NO: 19397 - DNA, 120 bp, synthetic construct
  source 1..120: mol_type = other DNA
ctcaatcacagggatctgtagtcagagtccccaactccccaccccaccagccgcccccacctttcacccctcgatcacagggatctgtagtcagtccccagctgccccccccaccagtca

SEQ ID NO: 19398 - DNA, 120 bp, synthetic construct
  source 1..120: mol_type = other DNA
gaaagccggggcaacaaccagtgggtcccctacatctctcttcaggaacgctgaggcccttcccagcagcagaatctgttgagttgctgccacaaacaaaaaatacaataaatatttgaa

SEQ ID NO: 19399 - DNA, 120 bp, synthetic construct
  source 1..120: mol_type = other DNA
gaaggaaggaaggaaagaaggtaggaatgaaggaaggaagggccttgttcttagaaaatatccaccaagatctttagggttaatggggcatgatgtctccaacttaatttcaaatgactg

SEQ ID NO: 19400 - DNA, 120 bp, synthetic construct
  source 1..120: mol_type = other DNA
gatgcacactgggcacgctaatcttcaagcgcacatggttctaagggttgccattcatttctacagctatgcaaccatcagcataatctcaatgggacgctgtcatcgactcccagagct

SEQ ID NO: 19401 - DNA, 120 bp, synthetic construct
  source 1..120: mol_type = other DNA
ataaagacacagtgacttttgcttgttctttcttgggtcatgtgttctgggggaagccagctgccatgttgtggggaaatgcaggcagtgctgtgaagaaatccatgtgttgcagaaatg

SEQ ID NO: 19402 - DNA, 120 bp, synthetic construct
  source 1..120: mol_type = other DNA
gaacgatccagccccaatgtccacagtgctgagagggagagaccttgtcctcagccagagccactgcccctttcctcaatttacctcttttgtggcatgtcagcaagcatttcttaggta

SEQ ID NO: 19403 - DNA, 120 bp, synthetic construct
  source 1..120: mol_type = other DNA
tgcgacctcacctggaaataagatcttggcggacagaatttggtaagatgacatcataccagtgtacggcgggtccctagagcaataaccaatgtccttataaaaaggggacatttggat

SEQ ID NO: 19404 - DNA, 120 bp, synthetic construct
  source 1..120: mol_type = other DNA
cggggacaccgagggcagaggtgggtgacgcggccacacggcggggacaccgagggcagaggtgggtgacgcggccacacggcagggacaccgagggcagaggtgggtgacgcggccaca

SEQ ID NO: 19405 - DNA, 120 bp, synthetic construct
  source 1..120: mol_type = other DNA
tttgttgcactaacacgtctcctctctgggaaacgtcccttgtcaggagacggctcttctttgaaatgaggtcattaaaaggaaacagaaaaagagagaggctccctggcctggtcactg

SEQ ID NO: 19406 - DNA, 120 bp, synthetic construct
  source 1..120: mol_type = other DNA
tttatgtcccaaaatacagtctaggttgaggagtgttccacgtgagcttgacaagaatgtgttttctgctgttgttgaagttgtctacagacattcatcattgggggtgctgttgaattc

SEQ ID NO: 19407 - DNA, 120 bp, synthetic construct
  source 1..120: mol_type = other DNA
cattttgactcccatgttccatgggtgttgggatcatgtctatctcttttccaacatatttcaatttttgagctcaaataaaaagaaaaacaaggtatcttaggccgggcgcggtggctc

SEQ ID NO: 19408 - DNA, 120 bp, synthetic construct
  source 1..120: mol_type = other DNA
cagagacttacaaagaattactgagaaacggcaggtatgagggtggggaaacactgaaaaatctgaaaacatcattaagctaaggctggtggctcatgcctgcaatcccagtactttgag

SEQ ID NO: 19409 - DNA, 120 bp, synthetic construct
  source 1..120: mol_type = other DNA
ttgctttttctccttcctaatagactgtaagcctcattagcacagagattttcacctttgtgtgtactgctgtgtcaccagtgcctaaaagagtgctttgaacatcacgcgaggatagat

SEQ ID NO: 19410 - DNA, 120 bp, synthetic construct
  source 1..120: mol_type = other DNA
cgacattatgcactttgtacacatctgctcagaccgaaagaaggtccattttaaggctgggtgtgtactaagtaggtggaggaggaggaattatctgtgcctctttttcttttctttttt

SEQ ID NO: 19411 - DNA, 120 bp, synthetic construct
  source 1..120: mol_type = other DNA
cccgcctaattttatttcagcgtagctaacttaaatgtaaaaagtcatatgtggctgtgacccttgtactgatggctgtagaacgtgaggagttttcaggagccaaatgatggaagaatg

SEQ ID NO: 19412 - DNA, 120 bp, synthetic construct
  source 1..120: mol_type = other DNA
tgcagtttgggttcacaaaagggggtgccgtcatccctgggtggaggagggagtgttggttttttgtttttgtttttttaacatgtatgaaactgacatcttctcaaatcttgttccacc

SEQ ID NO: 19413 - DNA, 120 bp, synthetic construct
  source 1..120: mol_type = other DNA
atggatggaaggatggatggatggataaatgggtaggtggatggatggctgtgtgggtggatgaatgagtgaatagatgggtgatggatggataggtgatggatggatggatggatggat

SEQ ID NO: 19414 - DNA, 120 bp, synthetic construct
  source 1..120: mol_type = other DNA
gggcttatgacaaaggagtggctcaggggtggggtttataaaggagaacaagctcaggggaggggcttatgaaggaggaggtggctcagatggggagggcttataaagaagagtctgggg

SEQ ID NO: 19415 - DNA, 120 bp, synthetic construct
  source 1..120: mol_type = other DNA
tgcgggggttgagaagggcctccaagccactcttccttttcttcctgccccctctcctttttctcgccatggaaaattgggagatggtgatcacctgaccaactcccctatcccgcgacg

SEQ ID NO: 19416 - DNA, 120 bp, synthetic construct
  source 1..120: mol_type = other DNA
atgggtgagtggatgggagaatggatgagagagtggatgggtgagtggatgagagagtggatgggaaagtggatgagagtggttgaggggagtggatgtttgagtggatgggagagtgta

SEQ ID NO: 19417 - DNA, 120 bp, synthetic construct
  source 1..120: mol_type = other DNA
gatggttgagcggatgggagagcggatgggagagtggatgggagagtggatgggtgagcgcatgggagcgcatgggtgagcggatgcgagagtggatgagagtggttgagggagtggatg

SEQ ID NO: 19418 - DNA, 120 bp, synthetic construct
  source 1..120: mol_type = other DNA
actgtggatgggagagtggatgagattggatgggagagtggatgagagtggatgggtgagacagtggagggatgaatgtacccatggatagactggggcttcgagaccagcggcaaagct

SEQ ID NO: 19419 - DNA, 120 bp, synthetic construct
  source 1..120: mol_type = other DNA
aggaggcctgggcacataccccctacacacacgtgtgcctggacacacacatgcacacacacgcacactgcatgcccaggtagggccacggggtctcaggtacagactggggagttaatt

SEQ ID NO: 19420 - DNA, 120 bp, synthetic construct
  source 1..120: mol_type = other DNA
gaccctacaaacgccaggatggtctgagggggagctgtgcctggccttggctcccgcacccccccgcagctacaccctggttggggccccggctcctcctctgccatccatgggaaatac

SEQ ID NO: 19421 - DNA, 120 bp, synthetic construct
  source 1..120: mol_type = other DNA
ctccctctcaaaaaaaaagagacagtgagtccagttcaagatgctgaatcgtgttaagtgttgacaggtgggggtgctgaggtctgcaactttgaaaggcttccaaaaaacaagctgaga

SEQ ID NO: 19422 - DNA, 120 bp, synthetic construct
  source 1..120: mol_type = other DNA
atggagagatggaaggagggatggagggagggatggagggataaagggatggagggatggaggggtggaaggagggatggagagatggaaggatggagggagagatggagagatggcgag

SEQ ID NO: 19423 - DNA, 120 bp, synthetic construct
  source 1..120: mol_type = other DNA
gagtttgaatggtttattggtttcttcgggtacccgccagctttccttaacacccttgacgcttgagctttctccccattcctcctggaagctactgtttcccaccacatctcattcatc

SEQ ID NO: 19424 - DNA, 120 bp, synthetic construct
  source 1..120: mol_type = other DNA
gtgtgtttggttgtcgtgagctgtgggtatttagcaccacacagagcccaggatggccccagtgtccacagggccaaggaggagaaaccctgcctgggatgatcagcagatgtttcggag

SEQ ID NO: 19425 - DNA, 120 bp, synthetic construct
  source 1..120: mol_type = other DNA
agtgcaatgtgaaagcaggtgtgcgtgcacacccacacccgcatgcccacacatccatacagtccacaccatcacacacacacacccacacacatccatacagtccataccatcacacac

SEQ ID NO: 19426 - DNA, 120 bp, synthetic construct
  source 1..120: mol_type = other DNA
cacactgtcatacacacacatctatacagtccacaccgtcacacatccatatagtccacaccatcatacacacacacatctctacagtccacaccatcacatgcacacacacatctatat

SEQ ID NO: 19427 - DNA, 120 bp, synthetic construct
  source 1..120: mol_type = other DNA
cggaaaagctcgataattacccagcctaaccatttctcaggtgcttgcgaggtgatcagaaggcaaagatgtcggagcgaaaagtattaaacgtaagtgttgggcgactggggcttttca

SEQ ID NO: 19428 - DNA, 120 bp, synthetic construct
  source 1..120: mol_type = other DNA
agagaatctgaaaggagtaactgaggcttggggagtatctgggcttaataaatttctggaggaagttgataaagcttaggagtatctggggggaatacccgggaatcaaggaatatctgg

SEQ ID NO: 19429 - DNA, 120 bp, synthetic construct
  source 1..120: mol_type = other DNA
gggactgagaagtatctgggggaaatagctggatccccgaggagtatctgggaggaatggctcaagccagagaagtatctggagggactagcagagactgaggcatatctgaagggaatt

SEQ ID NO: 19430 - DNA, 120 bp, synthetic construct
  source 1..120: mol_type = other DNA
tgcggcccaaggagtatctggagggaatagctggggcccaaggagtatctggagggaatagctaggaacttgaggcgtatctgaagggaatagctggggttcaaggggtacctgagggga

SEQ ID NO: 19431 - DNA, 120 bp, synthetic construct
  source 1..120: mol_type = other DNA
gactctaccttctacatcgccttgcccaaccctggactgggcttgagaatttggcataaggctctgacttcgcccccagggctggctccgcctccatagccctactcaacttccaaaaag

SEQ ID NO: 19432 - DNA, 120 bp, synthetic construct
  source 1..120: mol_type = other DNA
gccaatctatagagatgggtgctctaggggtaagttaactaactggtttaatggtatcccattcatctttcatcatccagctacccactagccatctatctatcatccatctgtccatcc

SEQ ID NO: 19433 - DNA, 120 bp, synthetic construct
  source 1..120: mol_type = other DNA
attcatccattcaccatccacccacccacgcatcttcccgttcatccatccatacatccctccatcgtgcatccacctattcatccatctatcattcatccatgcacttgttcatccatc

SEQ ID NO: 19434 - DNA, 120 bp, synthetic construct
  source 1..120: mol_type = other DNA
tctctatccccctgcctctctgttcccctgcctctgtctcccctgactctctctgtccccctgcctctctctcccatctctctctgtcccctctgcctctgtctcccatctctctctgtc

SEQ ID NO: 19435 - DNA, 120 bp, synthetic construct
  source 1..120: mol_type = other DNA
agatactatgagctgcactctattctgggggttctggggctttcctgccttttccagaatccagaggccacccacatccattggctcacggccccctcctccctccattgtcagagctag

SEQ ID NO: 19436 - DNA, 120 bp, synthetic construct
  source 1..120: mol_type = other DNA
agccactccagcctgctgtgctcgcgctgactttcttgggggagaccagagcaatgcaactttataggcacttccctccctttcccagctctcttcttcccagagcactcgcttttctct

SEQ ID NO: 19437 - DNA, 120 bp, synthetic construct
  source 1..120: mol_type = other DNA
aagggtgttctttgtacctgttgcgatattttgggtcgttttcagcccagtttgcacagcacccttggccacgttcgcagcaccggtgaccccactgcagacagtgtccttggtaccggt

SEQ ID NO: 19438 - DNA, 120 bp, synthetic construct
  source 1..120: mol_type = other DNA
ctttgtagtgtccaggccgccctggacggcccctttggccacattcgcagcaccggtgaccccactgcagacagtgtccttggtaccagttagaacgatcttggtggtgtccacgcctgt

SEQ ID NO: 19439 - DNA, 120 bp, synthetic construct
  source 1..120: mol_type = other DNA
gacacagcatctttggtgccggtcagcacagccttggaggtttccacgccagtctggacagtccctttggccaagttcactgcccccatgaccccagtagtcactgtgtctttggtgccg

SEQ ID NO: 19440 - DNA, 120 bp, synthetic construct
  source 1..120: mol_type = other DNA
tgtgtgttcgggcaggtggaagagagtgcacagcttttgtctgattcccagatgtctgcaccccaagaaggctatgagccatcaggctggtccttcagagaacatgctggtaaagacctg

SEQ ID NO: 19441 - DNA, 120 bp, synthetic construct
  source 1..120: mol_type = other DNA
cccatcctcattctacagcctccaatctaccctccccacctcatcctcattctacagcctccagtataccctccccacccaccctgtcctcattctacacagtctccaatctgtgctctc

SEQ ID NO: 19442 - DNA, 120 bp, synthetic construct
  source 1..120: mol_type = other DNA
tgtctacagtcgttaaggaactctctaggtgttggtattgacagactgtggaggtggtttgaggtgaaaggagtaaggcgcaggaaggacacagcctgtgattccaggaggaaaagcacg

SEQ ID NO: 19443 - DNA, 120 bp, synthetic construct
  source 1..120: mol_type = other DNA
cttggtgttgagagagaacacagcctcaaagctcagggagcatctgccctgttgtagataagataagcacattaataatatataacacggctccacaggtggaaggagaggtgccgtctt

SEQ ID NO: 19444 - DNA, 120 bp, synthetic construct
  source 1..120: mol_type = other DNA
caaaacaacacaagattttttaaagatggaatcagaaactacgtggtgtggaggctgttgatgtttctggtgtcaagttctcagaagttgctgccaccaactctttaagaaggcgacagg

SEQ ID NO: 19445 - DNA, 120 bp, synthetic construct
  source 1..120: mol_type = other DNA
ttcacagatagacttgattgtgtcttcctatttgcaaactgcctttggagctttctgtctacttttgtgcactattttacaaaaatcccaggagaaacatgaggcaggtggcttcagccc

SEQ ID NO: 19446 - DNA, 120 bp, synthetic construct
  source 1..120: mol_type = other DNA
tgtgtgtatatatgaatagacatgtatacatacagacacctgacatttgtatccatctctgcatccatctatccacccacccatccacccatttactcacctatccatctatccacctgt

SEQ ID NO: 19447 - DNA, 120 bp, synthetic construct
  source 1..120: mol_type = other DNA
tttgtaactcccttggctgacagtgagaatccacccactgcctaccataaaagcatcctccagagtaggagccaatatttcttttttgtttgtctcaaagacatacagtcccaaactgta

SEQ ID NO: 19448 - DNA, 120 bp, synthetic construct
  source 1..120: mol_type = other DNA
aaaagttaacttttactgagaggaaattcacatacatcatattcactctttaaaggatacagtttggaggtcgttggtgcactcacagggctgggcagcatcaccactcattccggagca

SEQ ID NO: 19449 - DNA, 120 bp, synthetic construct
  source 1..120: mol_type = other DNA
gtgtgggtgttggtgttggtgtgcaggtgttggtgtggatgttggtgtgggtgttggtgtgcacgtattggtgtgcaggtgttggtgtgcaggtattggtgtggatgttggtgtgcaggt

SEQ ID NO: 19450 - DNA, 120 bp, synthetic construct
  source 1..120: mol_type = other DNA
ttcaacattcccaccagccgtgcatgagggctgcctctggtcttggaaaagactctcggaatagttgctcactttctccatttcgaccctggagccgtcgcttggtgcccagaggaagcc

SEQ ID NO: 19451 - DNA, 120 bp, synthetic construct
  source 1..120: mol_type = other DNA
aagtttttaataattttgtgcacgaagcgaagttttgactgtgtcttaactgtgaccggtcacatgaggtcagctgtgaaagttttcacttgtggcgtcgttatcggtactcagaacatt

SEQ ID NO: 19452 - DNA, 120 bp, synthetic construct
  source 1..120: mol_type = other DNA
tgtccgccatatcctgcgtggtgtttatcggagtgggggtgtccactgtatcccgcgtggtggttatcggagtggggtgtccaccttatcccgcgtggtgtttatcagagtggggtgtcc

SEQ ID NO: 19453 - DNA, 120 bp, synthetic construct
  source 1..120: mol_type = other DNA
tttgtgaaggcgccaagctgctggtgtgagtgcctgtttcccaggcgctgctttaagtcagctgcagagcgcactcctagacagacagccccacacacatgtacgcagcccaccatgctg

SEQ ID NO: 19454 - DNA, 120 bp, synthetic construct
  source 1..120: mol_type = other DNA
gctgtggtctggtggattttgtctggggaggtcggaggagaagtctctgcatagccgtgccctgtgagggacccaagtgtatgccatgggtgggcaccttgtcacacaagtaaccctggt

SEQ ID NO: 19455 - DNA, 120 bp, synthetic construct
  source 1..120: mol_type = other DNA
acagttcccaagtggaaaaggtttttgttgttgttgcttcgttggtttgttttcagaatgggagttaaaaaccaaacaaaaggccaagcgcagtgactcatgcctctaatcccagcattt

SEQ ID NO: 19456 - DNA, 120 bp, synthetic construct
  source 1..120: mol_type = other DNA
accctccatcaagtgccgactctgggccttgtcaccttgggaggaccagagtagtgcagtgactttgccaaggtcacacagcaggaggctgggcccagcacaccctagaccttcctctgc

SEQ ID NO: 19457 - DNA, 120 bp, synthetic construct
  source 1..120: mol_type = other DNA
attccggtaacccataacaaaacaaattactgaatccaaagtgtgtatatctccaggcccctcctcccaaaataagggaaccatacctggctccctaccacgttaaattaaatcatacct

SEQ ID NO: 19458 - DNA, 120 bp, synthetic construct
  source 1..120: mol_type = other DNA
cccccaaaatgtcgagtattttctcattttctacggatttaacaggaatagaatggcacaaggtttaattaccagggaaataaagcaatcacaaatgtggaactggcacggctgccacac

SEQ ID NO: 19459 - DNA, 120 bp, synthetic construct
  source 1..120: mol_type = other DNA
ttggactttggaagctaaatttggaagagtcatatctaaacgacgacagaatgaagactgtcaagaatcagccagaaggttttgggggttaaatctctgggatgcttttctcttccgtgt

SEQ ID NO: 19460 - DNA, 120 bp, synthetic construct
  source 1..120: mol_type = other DNA
agaagaatcccaggccccacgagagacagtgaggaaggctctgtctgtgggatgaagacacagggaggcagggatggagggactgagatgccactgggatgtgtgtgacactttaagtgt

SEQ ID NO: 19461 - DNA, 120 bp, synthetic construct
  source 1..120: mol_type = other DNA
tgcagaacaggtcccctgtcctccccctcacaccccccaccccctagtcaatctgggactccccaaagctgcactggccccacctcctccagctcctcccaactcccggctggtcagagt

SEQ ID NO: 19462 - DNA, 120 bp, synthetic construct
  source 1..120: mol_type = other DNA
cagagaggaagagaccaagagagccaggctgagagagacagagagagacacaggcggagacagagggaggtgtggaggtgaagagggagggatgggaggagaggagccattaggaaggga

SEQ ID NO: 19463 - DNA, 120 bp, synthetic construct
  source 1..120: mol_type = other DNA
caggcaagtcttctggaggggagaggctcctggcagccgtgaagcccagcgtgtgaggtcccaggtaagagagagggttggccacaaaggactccagcaggtgaggccccaggcagatga

SEQ ID NO: 19464 - DNA, 120 bp, synthetic construct
  source 1..120: mol_type = other DNA
tgcctgtgggtacaccttgcggtcggcagtgatgtggcagtcggctgtgccgggcaccatctctgaacagcgggacagagccacagggatgtggaaaggccatgtccgtagcaggatcag

SEQ ID NO: 19465 - DNA, 120 bp, synthetic construct
  source 1..120: mol_type = other DNA
tgacattcagtgtggcaaggtctctgggagcaggtcccagcaggtaaagtccccaacagccgagatcctcagtaggtgcagcctccagaaagcaaggtccccagtaggcaccatccccag

SEQ ID NO: 19466 - DNA, 120 bp, synthetic construct
  source 1..120: mol_type = other DNA
tgtcccacctagttgagcctgggaaccactctgccagctgcacagaggatgaaaagattcaatcctaatattccctcagcaattccacacatcccagcacccactgtgcactaagcactg

SEQ ID NO: 19467 - DNA, 120 bp, synthetic construct
  source 1..120: mol_type = other DNA
caaagagtaaggagggtgaaaggaggagggcggtttcaacagcccacatgtgagagttaaatagcaggcttcctggtagcacctctacaagcagcctccagggaccaggactcaaaaagg

SEQ ID NO: 19468 - DNA, 120 bp, synthetic construct
  source 1..120: mol_type = other DNA
taattctggtttccacctctccctctgctatcgtctgtcccctgatccagagaggtctgctatgtgaatacaaaaggcttgcactgatgcctgcgatttgcagaaagacaggaattccac

SEQ ID NO: 19469 - DNA, 120 bp, synthetic construct
  source 1..120: mol_type = other DNA
ttctctgatgtctgaattctcaagagaatgtcagagcccagtttaagtgctagagagcaactactagaaggacattctgacttcgatggcccgtcccagtgttaagatgccgaacacatt

SEQ ID NO: 19470 - DNA, 120 bp, synthetic construct
  source 1..120: mol_type = other DNA
gctcttttgaggaatttttgctagaaagataggaagaggaatggggaggcagctggaagaggaaactgagagcgggtttctgaaaatgaaagaaataatagcaggtaggacctaccagga

SEQ ID NO: 19471 - DNA, 120 bp, synthetic construct
  source 1..120: mol_type = other DNA
aataataaagcccagaaaatttagaaggggttataaacagggactccctcccctgctcccattttatagatgtgtaaactgaggctcaaagagggaatcatttcctggctcttggaactg

SEQ ID NO: 19472 - DNA, 120 bp, synthetic construct
  source 1..120: mol_type = other DNA
ttcagtgccttggaatatcaggatctgccttcaagagatgaggtttcaacattgagggactgggcagagggattggggacccagaatctggaatccagcagctgcagttgccaggatcca

SEQ ID NO: 19473 - DNA, 120 bp, synthetic construct
  source 1..120: mol_type = other DNA
acctggagagtgaggctctgccgcacactggctttgacccttgaccgctgctgtctctgaaagctgctacttcccctctttgaacgccaccgatccctctttctgacttgctctgactct

SEQ ID NO: 19474 - DNA, 120 bp, synthetic construct
  source 1..120: mol_type = other DNA
gctccctttgcctttcttcgaagtcctctcttaccaggtcccctgtccacccctcttaaagttcccttgattccctgatggatccttcctctagaacttcctcctttcctaacagtcttc

SEQ ID NO: 19475 - DNA, 120 bp, synthetic construct
  source 1..120: mol_type = other DNA
ttctgggaggaggggaccttaaaaagggaaggactcaaagagggtgggggatcagaacgaggaggtggaaaagttctcaagaggacaagggattcagagaggagaaggatattgagggtg

SEQ ID NO: 19476 - DNA, 120 bp, synthetic construct
  source 1..120: mol_type = other DNA
ccgaacttctcccactgctccgtttcatccaggtaatgcacagcgatgaccgtgggcgtcatgccgatcatgttctgttccccgcagcccgagggggtcacaatgaggtgcttcagccgt

SEQ ID NO: 19477 - DNA, 120 bp, synthetic construct
  source 1..120: mol_type = other DNA
ttctcttttttctcagttgtttcttgggaagagggtggaaagaacatattcatccatccgttcatccacccatccactcattcatccactcatctatccctccaattatccatccatcta

SEQ ID NO: 19478 - DNA, 120 bp, synthetic construct
  source 1..120: mol_type = other DNA
ttctccaggtgctcgtccccttttctgcgtctgacctggttgtcaggatgagacctgatccttgtcaccggcctccggaagatgcagctggtgagtctcatggggagagcagacctcgca

SEQ ID NO: 19479 - DNA, 120 bp, synthetic construct
  source 1..120: mol_type = other DNA
cataaagctgtttcagatacaaacataaagccttcatttctgtccttctcatttcatttctgttgtcctggcattaagattaatactaccccttacacgacccaaggtgttcccctttgg

SEQ ID NO: 19480 - DNA, 120 bp, synthetic construct
  source 1..120: mol_type = other DNA
aatgcagtggcttctgcatctagctcctcttttatagagggagtgataatgcaatcagtggataatccatagggaacgccctgtctccacccattggatttgaagcatttctaaatcttt

SEQ ID NO: 19481 - DNA, 120 bp, synthetic construct
  source 1..120: mol_type = other DNA
ctctgttgtaacagcacctaggattagtttggctggtttttgtttcacgtgtagggaaccacatggtatgcactgtcttgggtttggattaacctcagctttgagagatcaaggcttaag

SEQ ID NO: 19482 - DNA, 120 bp, synthetic construct
  source 1..120: mol_type = other DNA
agcctcctaagtagatgggactacaggcaggcatcaccatgcctgacaatgcttattttttattttttgtagagataaggtcttcctatgttgtccaagttgcttctagactactgagct

SEQ ID NO: 19483 - DNA, 120 bp, synthetic construct
  source 1..120: mol_type = other DNA
tagtgcgtttattatgtcttccttctcaccaagatgaaaatcaacagagtggtgatttatgaagtttacttctggatcaggggttctactgcacagcttggcacatcataagtgccccgt

SEQ ID NO: 19484 - DNA, 120 bp, synthetic construct
  source 1..120: mol_type = other DNA
tgtgtagctgacagtggcagggaagagaagagaggggtgtcctctgaggaggatgaggagggacaaggtctggaactgaccctgggtcatgaccttgagcatttagtccttgactcgcat

SEQ ID NO: 19485 - DNA, 120 bp, synthetic construct
  source 1..120: mol_type = other DNA
tgtttgaaattttcgaattaggggaacatgtacatgtttgttacatggatatatcgcttaacggtgggggttgcttttgtagtttatgggttacccaaatactgaatatcgtacccagta

SEQ ID NO: 19486 - DNA, 120 bp, synthetic construct
  source 1..120: mol_type = other DNA
gtagcatctgctgatgggcacttcctgccaccctaactctgctagagtgaaaacaaccagtagtttccacctaacccgagatgcataaaataattaccatgaagtattccattccatgtt

SEQ ID NO: 19487 - DNA, 120 bp, synthetic construct
  source 1..120: mol_type = other DNA
tttcgttgtcctggcataaagattaatactaccccttacagtacccctggcataaagattaatactgacccaagatgttcccctttggagggaaaattatttagtccccttagttacggg

SEQ ID NO: 19488 - DNA, 120 bp, synthetic construct
  source 1..120: mol_type = other DNA
tatagagaaagcgagtgataatgcaatcagtggataatccacagggaacaccctgtctccgcccattggatttgaggcatttctaaatctttatacagaaaccaatgtggtgttacctac

SEQ ID NO: 19489 - DNA, 120 bp, synthetic construct
  source 1..120: mol_type = other DNA
acccctcccacaaaatgctaatactttagaacacttttaattctctttttagctgtttctgacttttgtattaccattctcatgcatattaattctacacatattttactctccaggaga

SEQ ID NO: 19490 - DNA, 120 bp, synthetic construct
  source 1..120: mol_type = other DNA
gtgctgactagattatggagggaccagtctttcccgtaaggatagtgggagtttaaattggaataaccgctttggaaaactatatgcaaacatctattaaagctgtatagggccaggcat

SEQ ID NO: 19491 - DNA, 120 bp, synthetic construct
  source 1..120: mol_type = other DNA
atttatctcaacattgtacatgcgtgcccaccaatttcatgttctgcggggcacagaacctgcagtcataatagctcttgtcagaaaccagccaatgaacagcaggagaatgaataaata

SEQ ID NO: 19492 - DNA, 120 bp, synthetic construct
  source 1..120: mol_type = other DNA
ctctagttaattgagcttattagaaacagaaagcaacatggtgtttctgaggtttttcttcatgagcaggaggtgttcaggtgaaggtgggatctgggtgtggcagtgagtatttaaggt

SEQ ID NO: 19493 - DNA, 120 bp, synthetic construct
  source 1..120: mol_type = other DNA
cagtgagccaaaatggtgccactgtactccagccttggtgaaactttatctcaaaacaaaaattctaatttaattttcaaatgaaatcctttaaaaatgaaattctgtaattttaaatga

SEQ ID NO: 19494 - DNA, 120 bp, synthetic construct
  source 1..120: mol_type = other DNA
atttttccccttttgtgcgattatttgctcttcctgataaaattcccctcgaaatttcgaaactgcaagatctcttcctccacccaggaaagggctccattcagactccacccacccttc

SEQ ID NO: 19495 - DNA, 120 bp, synthetic construct
  source 1..120: mol_type = other DNA
gagtgatttttgtgactgtaggatcataaagtatgtatctggtcttcatcccggttcttggcacagagcttcaaaaacccttggaactttctgagtcacaggaatgcttttgttaggagt

SEQ ID NO: 19496 - DNA, 120 bp, synthetic construct
  source 1..120: mol_type = other DNA
attacccattctgctcatgctttttcattcattcctcaatctgttggtgcatgtctgatgagtgcagtctgtgcctcgctcaccttggtttccttcctgtgtggctcttctgccacaatt

SEQ ID NO: 19497 - DNA, 120 bp, synthetic construct
  source 1..120: mol_type = other DNA
caaatggtgaaaacgacccaaatgtccatcaacagatcaatggatacacgaaatgtggtatctccatgcaattgaatattattcagccctaaaacaaataaagcactggccgggcaccgt

SEQ ID NO: 19498 - DNA, 120 bp, synthetic construct
  source 1..120: mol_type = other DNA
actcatgattgactagcaatgtctgccataggcttgggatggggaagaggtgacacgtatgttggcttcaagatcattgagaccatcttccccctcccctcaccaactcattttatagtt

SEQ ID NO: 19499 - DNA, 120 bp, synthetic construct
  source 1..120: mol_type = other DNA
actatttacatttttaaaataagcatgtattcatgtactatgcaaaactgtgcgtggtgagcctttctgaagagtggggaaccctgggctgtttcacctctggatttgatgggggatccc

SEQ ID NO: 19500 - DNA, 120 bp, synthetic construct
  source 1..120: mol_type = other DNA
ttttgagtttccacaaatacttgtttcctggagagtctttcctttcagacatctgctagtccacctggcgcctgttcagtaagcaccagggaatggaagggcctctcccttcatttctgc

SEQ ID NO: 19501 - DNA, 120 bp, synthetic construct
  source 1..120: mol_type = other DNA
gaaagagacttctagctgctctcttcctgtaacatagacaaggcaatggtgtatcgggacctaggagccaggaggccacaggacagatcagatttcttttttttttctttttttttgtga

SEQ ID NO: 19502 - DNA, 120 bp, synthetic construct
  source 1..120: mol_type = other DNA
atttttaaaaatgatctgtagacaaagttgaggcttctgtgaaaatgtggagagttctcagagagtatcgaatcggatggagtcaccgatgtgcctttgttgcatgaggtcgtgtgtgtt

SEQ ID NO: 19503 - DNA, 120 bp, synthetic construct
  source 1..120: mol_type = other DNA
catttccgagctgttaatgcggtatctcgctttctgtttctgagatgttaatacaggctcttgctgtccatttccgagatgttaatatgggatcttgctttctgtttccatttccaagac

SEQ ID NO: 19504 - DNA, 120 bp, synthetic construct
  source 1..120: mol_type = other DNA
cagggctctctccgtgtacccactccctatttgagcagcaaactgaataaattccctttgaaatccagtttgctgggtgctggggttccttccttttttttttttttttttttaagagac

SEQ ID NO: 19505 - DNA, 120 bp, synthetic construct
  source 1..120: mol_type = other DNA
agaaacggtcctaggatgagggtgtggcctgtgcataggtggatggggcttggagaggtcagacttgggtgaggggcagagccttggacaggtggtcccaggacaggaatgtggcctatt

SEQ ID NO: 19506 - DNA, 120 bp, synthetic construct
  source 1..120: mol_type = other DNA
tggagagactgtccctggacaggggtgggaccttgagagacctggtgctgagatgaggtaggacccaaatgtcctcttgccgaggatcctggggatgtccttggcccgcctctcccatcc

SEQ ID NO: 19507 - DNA, 120 bp, synthetic construct
  source 1..120: mol_type = other DNA
tacctcatggccaaaaatgccaccaacaccatcatcacaaatgccttacaggcagctgaatatcagtcaccaacatcatctccacaaacaactcctcaaccaccattacatcatcataaa

SEQ ID NO: 19508 - DNA, 120 bp, synthetic construct
  source 1..120: mol_type = other DNA
aaacacctcatggccagaagcagctcaaccaccaacaccgttattataaatacattcttgaccatcaatgcttcaactgctgacaccattaccataaatacatccatggccagcaatact

SEQ ID NO: 19509 - DNA, 120 bp, synthetic construct
  source 1..120: mol_type = other DNA
gttttcctcatcttcaaaggggattaactgagaccttggctctcacaaatgatgtctctatggggctcagttcagggcttggcacacagtaggtgtttaataattgcagttccttttctt

SEQ ID NO: 19510 - DNA, 120 bp, synthetic construct
  source 1..120: mol_type = other DNA
aaggtatataggtgtgtgtatctgagtgtgtccatgtgtatgtgtgaatgtgcatgggtatgtgtgtattgagtgtgtgcatgtgtgtgtgaaggtaccgggtgtgcgtgtatccgaatg

SEQ ID NO: 19511 - DNA, 120 bp, synthetic construct
  source 1..120: mol_type = other DNA
gtgtataggtgtatgagtgtgtgtgtgtgagaataggcatgggtgtgtgtatccaagtgtttgcatgtgtatgtgtgagagtttgtatgtgagtgggggtgggtgtgaatgtgtgtacat

SEQ ID NO: 19512 - DNA, 120 bp, synthetic construct
  source 1..120: mol_type = other DNA
gagggacctgcagaaggggcgctgccagaacaggtggggcctgtggaggaggcgtggccaaaggagacattgggagtgaggcagagggtgagaaaggggcctgcccagggaatgaggcag

SEQ ID NO: 19513 - DNA, 120 bp, synthetic construct
  source 1..120: mol_type = other DNA
aagattgggtctccagagggggcatgatcagggaagagagaggtgcctgaggagagtgggaggccagagaagatagcgcctgcagagggtgtatggtcaggggtgagcttaggggtgaga

SEQ ID NO: 19514 - DNA, 120 bp, synthetic construct
  source 1..120: mol_type = other DNA
ttagctccccagaagtgggagatctggggaaggttggttccggggtgtggcgccagtaagttggaggaggcatggagggagcgtcccgctcttccagtatttaacagaagggacagaggg

SEQ ID NO: 19515 - DNA, 120 bp, synthetic construct
  source 1..120: mol_type = other DNA
aatggatggatagaaggataggaggggaataagtggggggatggatgaatgggtagatggagaatggttggatgggtggaaggatgaatggatgaaaggatgagtggaaggatagatgaa

SEQ ID NO: 19516 - DNA, 120 bp, synthetic construct
  source 1..120: mol_type = other DNA
ggaggggagaggtggtctggactcttggactccagagaggggacccagtctctctggatccagggaggagggcagccaggaaggaagcgtctcatgcacttaagtgttcaagggagccgt

SEQ ID NO: 19517 - DNA, 120 bp, synthetic construct
  source 1..120: mol_type = other DNA
tccatctttacccagagcccaagaggaaaaccccgaaacccaacagacatgactctcagcagccctcagaaatggcctgaaatagcagcatgaaagacttggggtagatattaagagtga

SEQ ID NO: 19518 - DNA, 120 bp, synthetic construct
  source 1..120: mol_type = other DNA
tggcctgcaggagtgtgagagaatcagcttctgttgttgaagccgtctggtctggggcactttgttacgggaaccccgggccaactcctacagcctcccaccacagctctccccacatct

SEQ ID NO: 19519 - DNA, 120 bp, synthetic construct
  source 1..120: mol_type = other DNA
agatcctgccctctttctcatggagagtcctgccttagattcagaactccaacctgggatctagatccctccaacctgggacctagatccctccaacctgggcctggatccctccaacct

SEQ ID NO: 19520 - DNA, 120 bp, synthetic construct
  source 1..120: mol_type = other DNA
agccttggctctggtttgctagttttaaagcctgaacagtagaaggctaggagtgaatcagtccccctctctacccttctcaataaaattattggtagaaaaatacatcattgcctcact

SEQ ID NO: 19521 - DNA, 120 bp, synthetic construct
  source 1..120: mol_type = other DNA
agggatcttgtcctgatggtcccttctggggtcagttctgcaggtgggggattgtgggaggggctgtgctagtccctgggtcatcctacaggaggtcagggaggtgtctcggtcagttct

SEQ ID NO: 19522 - DNA, 120 bp, synthetic construct
  source 1..120: mol_type = other DNA
ggcttcctggagagctgatgttcaagttgaggttagaggatcgtggctgtatcccaggtcagaggtaaggggaggtgggggttacaacctagatgagccaggagagagctgcagcttgca

SEQ ID NO: 19523 - DNA, 120 bp, synthetic construct
  source 1..120: mol_type = other DNA
gaacttctgctctcatgttgtgagatccttggatcactgcctgagagtgtagtcctgtcttttggggagtggggctgcgggcatggttagagtccagtggatttctgtagccttcggtag

SEQ ID NO: 19524 - DNA, 120 bp, synthetic construct
  source 1..120: mol_type = other DNA
ccagctgttgaaatgctcgtgggtccccacagccgcctgcagcttctgcagcagtgtctggtctgctcccccgcccgtggcgtgcatggtggcgcacacgtcgtccaagacgctcatgat

SEQ ID NO: 19525 - DNA, 120 bp, synthetic construct
  source 1..120: mol_type = other DNA
tgtctctctctgtgtctctgcctgtccctgtctctgctgccccatccaagccctgctctcagggtggggagaacaggttctaccctctccgaggttctcttcctcattggcttactctga

SEQ ID NO: 19526 - DNA, 120 bp, synthetic construct
  source 1..120: mol_type = other DNA
ccaggggaggtgggggagtccagcttggctctgtaaatctggtggttaggtgggtccagtcaccgtgctgaaggtctttgtcctgggggttgtctgtggttggcgtttgactattgaggg

SEQ ID NO: 19527 - DNA, 120 bp, synthetic construct
  source 1..120: mol_type = other DNA
ttccttccctcccttccttcttcctttttcccttcccttttctctctctctctctttttttctttcctcctttctttttctctgtcacccaggctgcagtgcagtgatgcaatcatagct

SEQ ID NO: 19528 - DNA, 120 bp, synthetic construct
  source 1..120: mol_type = other DNA
cttggattctaccatggctcttgccttgccttaaaatctatgctttgggttgtcacttttccctcttccttcctcctttccatttatctattcttccctatagccatccattcatccatt

SEQ ID NO: 19529 - DNA, 120 bp, synthetic construct
  source 1..120: mol_type = other DNA
tgcaagttccggcttccacactgggcctttattttgctgagcaggcaatgaattcagggccacctgatggaaaacttgccttcctctgtccccaacacaacgaccagtacctccctgacc

SEQ ID NO: 19530 - DNA, 120 bp, synthetic construct
  source 1..120: mol_type = other DNA
cttgatttcatcctcacccagcttggatgtcactgtccctcatttcagctgatttcctcctccctaccccccactgtcatgccagcccagcagaactccagccaggcgtgacttcaatca

SEQ ID NO: 19531 - DNA, 120 bp, synthetic construct
  source 1..120: mol_type = other DNA
ctgtaggttagtgatggtgaagttgagtgtgaatggcaccaggagagggccggtggctatagtgaaggtgggaaataaacactatgttcaaaagtagagaaaatttaagagtttgcaata

SEQ ID NO: 19532 - DNA, 120 bp, synthetic construct
  source 1..120: mol_type = other DNA
tcttatctcctttgctgaagaagaggacctatgggtttatgaggaggagtagctcctgttccgcttggtgtagaatcaggggcatgtggacatgagttgaatactcactgctggtggtga

SEQ ID NO: 19533 - DNA, 120 bp, synthetic construct
  source 1..120: mol_type = other DNA
tcatcatcataaacaatgtcaccaccaccatcatcatcatcccactcaacacatcatcattaccattgtaactaccaccaccatcatcatcatcacaagaatacaagctcactgagggca

SEQ ID NO: 19534 - DNA, 120 bp, synthetic construct
  source 1..120: mol_type = other DNA
atttgtccactcagtatcactagatttactatgattttccatctttatttgagtgaaaatgacagagatgtttacactaatcaggtatgctctcatagagatgtcattgactgatactta

SEQ ID NO: 19535 - DNA, 120 bp, synthetic construct
  source 1..120: mol_type = other DNA
aaaaaaaaaaaaaaagacaagagttggcaagggtgagaagaaaagggaaccccttgtgccctgtcggtggtaatgtagattggagcagacattatgggaaatagtgtgagggttcctaaa

SEQ ID NO: 19536 - DNA, 120 bp, synthetic construct
  source 1..120: mol_type = other DNA
taaaaaaaaaaaaaagaaacagaagaactgctgaaagccattgcactagagccgcactacccaatatggcagccactagacatgtgtggctactgagcacttgaaatgacctgtgtctga

SEQ ID NO: 19537 - DNA, 120 bp, synthetic construct
  source 1..120: mol_type = other DNA
tcaacaaagatttgtgggttcagttgtctagaccatatcaagatatcccctccaaggtgtcattcctagttagtgctccccaaaattaggtgcaacacttggcagacctataagattctt

SEQ ID NO: 19538 - DNA, 120 bp, synthetic construct
  source 1..120: mol_type = other DNA
gctaatgctactgctaggtgcctaatctgctaaaagcaaaaaccaaaactgaatatataagggcattaatttcttttttcttttcttttgggggggggacaggtctcactctgtcaccca

SEQ ID NO: 19539 - DNA, 120 bp, synthetic construct
  source 1..120: mol_type = other DNA
gttggcctagagtagtgcagggacccttccccttgccagggggactcaccttggcacctttctccccttctctgccttctcgacccatgtggcctgaaggacccttggaagggaaagaca

SEQ ID NO: 19540 - DNA, 120 bp, synthetic construct
  source 1..120: mol_type = other DNA
ctaacattgtttgagcctgactgttttaggacgccttggaccagaggacacccttccccaagcctcaccccagcaccgggtactcccacctcccacctactccctcaagctgctcacatt

SEQ ID NO: 19541 - DNA, 120 bp, synthetic construct
  source 1..120: mol_type = other DNA
aagtttaacatatgagtgttagaaaaaactaagctggcttttgtctccccgcaagagtctagagtgtcctactggaatgcctaatgctaagaagtcatctgatctgaacaaggttcccct

SEQ ID NO: 19542 - DNA, 120 bp, synthetic construct
  source 1..120: mol_type = other DNA
gtttgctgcctcctctcccctctaaaaaagtcttccgcttgattttgcacaatcccggcgatactcctggcgatactgactagaaagtcagggagctgggggagctgttcactttaggat

SEQ ID NO: 19543 - DNA, 120 bp, synthetic construct
  source 1..120: mol_type = other DNA
aaagagaagggtcatccagaaagaggcatctcccagaaacaggaaatgctagaggaggggtcctctagtgaacggagaagctgcataagcccccaggaaagttcttctgggaatagggac

SEQ ID NO: 19544 - DNA, 120 bp, synthetic construct
  source 1..120: mol_type = other DNA
aagccagagccctacctgtgggaagtggattcctggggaccccctaccctgcttggggaggtggcatttgggggaaacggacacaggtctgatctgaggagactaggaagacatggctgt

SEQ ID NO: 19545 - DNA, 120 bp, synthetic construct
  source 1..120: mol_type = other DNA
cggacttcgtgcgggacttcatgggcgccatgtacggggatcccaccctctgtcccacctgggccactgacgctctggcctctgtgggaatcacactgggctgacctggcattgggagag

SEQ ID NO: 19546 - DNA, 120 bp, synthetic construct
  source 1..120: mol_type = other DNA
ctgcactccagccagggcagcagagtgagaccctgtctctatttaaaaagaaatcaaaaaggttaataatcatgaaaagttctcaatgccttgcttggcatagagtcagtgttgaatagc

SEQ ID NO: 19547 - DNA, 120 bp, synthetic construct
  source 1..120: mol_type = other DNA
aaaagaaattccctgtgcctagaacctttcaccattttgtatgaaacaacagaatttcctttcgagcctttaatgtaccccgagcccactgtttctacttcagtcctcactggaaagctt

SEQ ID NO: 19548 - DNA, 120 bp, synthetic construct
  source 1..120: mol_type = other DNA
tccatttcagaattagtggtctttagtcattttacagtccttttttttttcccacacagagtctcgctctattgcctaagctggagtgcagtagtgcagtcatggctctgtacaacctca

SEQ ID NO: 19549 - DNA, 120 bp, synthetic construct
  source 1..120: mol_type = other DNA
tgagcagccaaggaaaccaccactcttcccgagacgatccgctctgtcccttctgacgtggcaaggctggggccggctcgcatctggagaaagttctgggttttcaggaaatcctaaaga

SEQ ID NO: 19550 - DNA, 120 bp, synthetic construct
  source 1..120: mol_type = other DNA
gtcactgagtgagctccagaaatgcgcttagccttcctatgcctcagtttcctcatctctgtgttgtggtttgattaaacgaattaaccaaagcaaggagctcagaatgaggtaattagg

SEQ ID NO: 19551 - DNA, 120 bp, synthetic construct
  source 1..120: mol_type = other DNA
atccctcatctatctccccacctgtcttccccttcgcctattttcttacctgctggccagtcatctgtcttcacctgtctcctcccctgcctaccttacgtattcctgtagtcatcttcc

SEQ ID NO: 19552 - DNA, 120 bp, synthetic construct
  source 1..120: mol_type = other DNA
cacccctcacctgttcatcccctcactgtctcttcacctgtccacccctcacctgttcatctcacttggccatcccttcacctgtctccttatctgtccacctcctcacttgttcatctt

SEQ ID NO: 19553 - DNA, 120 bp, synthetic construct
  source 1..120: mol_type = other DNA
caagtcagcccccttaggatttagcatgtcccagactccctgaaaaggtaaaacgggaatgttaagcccactctagctcttgcccgggacgcgatcaggagtcttggatcctaacatacc

SEQ ID NO: 19554 - DNA, 120 bp, synthetic construct
  source 1..120: mol_type = other DNA
agggtagtggacgaagatgcgctggatgatgttgcgaggccggaagacctccttggggaagatgttgagcagctggttgtacacagccaggtcccgctcgacaccatactcccgcatctt

SEQ ID NO: 19555 - DNA, 120 bp, synthetic construct
  source 1..120: mol_type = other DNA
gttacagtgatgctgtcgccgtatgtggacttgtcaacctgaaataaaagaatcagattccagttttttaaagtttactcaagcaagaagctgggaatggcccatttgggaaaacacagg

SEQ ID NO: 19556 - DNA, 120 bp, synthetic construct
  source 1..120: mol_type = other DNA
agtgctgggcttataggcatgagccacagtgcccggccaagatgttattttctaagtataaataatatttcaatgtattgtgtccggaattggtgggttcttggtgtcactgacttcaaa

SEQ ID NO: 19557 - DNA, 120 bp, synthetic construct
  source 1..120: mol_type = other DNA
tgcatatgtaataaactgggccaaaaaaacgctttcccacacaacttacatttataaggtccatctccacgctgcactgccatgtgtctttgaaggtttcccaaagaactgaaggacttc

SEQ ID NO: 19558 - DNA, 120 bp, synthetic construct
  source 1..120: mol_type = other DNA
tgactcttgaaaaacagaggtttgaactgcacaagtccatttgtatatacatatatatatgaatgttcttcagtctctgctacccaagacactaagaccagcccctcctcttactcagcc

SEQ ID NO: 19559 - DNA, 120 bp, synthetic construct
  source 1..120: mol_type = other DNA
ctaatgttgatttccacagtgggtctgcagtccttggcacgataaagtcctactacttattgtgcaaaagggagttaccattagcagtgctgagactgtgtgtccttacaaatgcttttt

SEQ ID NO: 19560 - DNA, 120 bp, synthetic construct
  source 1..120: mol_type = other DNA
gcatatgtaataaactgggccaaaaaaacgctttcccacacaacttacatttataaggtccatctccacgctgcactgccatgtgtctttgaaggtttcccaaagaactgaaggacttcc

SEQ ID NO: 19561 - DNA, 120 bp, synthetic construct
  source 1..120: mol_type = other DNA
ctaagaccagcccctcctcttactcagcctactcaatgtgaagacaatgaggatgaaaacctttccgaggatgcacttccacttaatgaacagtaaatatagtttctcttccttatgatt

SEQ ID NO: 19562 - DNA, 120 bp, synthetic construct
  source 1..120: mol_type = other DNA
tgtatttaggggagggccccaggagcataataacaggggtggagtgtgcctaaattgttcatgcaaaaaaaatatagtatttcgttaactcccatcttccttctgagagtctggaatttt

SEQ ID NO: 19563 - DNA, 120 bp, synthetic construct
  source 1..120: mol_type = other DNA
gtagctttaagtaagcagaacataaagcataagtagagtattaaacagcctggctaagtgttcaagggatgccccaggcacagagccatccacaaagactggaagaggtcaggcttttgt

SEQ ID NO: 19564 - DNA, 120 bp, synthetic construct
  source 1..120: mol_type = other DNA
actttttatctcctgctttatcatgtactatatcactcagcatcccatgaaacacagggtcaaatctgtacgagattttttttttttgagacagagtcttgctctgacgcccaggctaga

SEQ ID NO: 19565 - DNA, 120 bp, synthetic construct
  source 1..120: mol_type = other DNA
cacacacagccgggcgtggtcgctcatgcctgtaatgccaacacatagggatatatatatatcggaaacaagttgaaattaatacgtctctaaaagagtatttccattcagtcagcagaa

SEQ ID NO: 19566 - DNA, 120 bp, synthetic construct
  source 1..120: mol_type = other DNA
aaacctccacctcatttaatcccatatcttaaggaatgctgaatgatttgggtaataagaaattaggctgtgggctgggtatggttattcatacctgttatcacaacactttgggaggcc

SEQ ID NO: 19567 - DNA, 120 bp, synthetic construct
  source 1..120: mol_type = other DNA
aatattgtgtatctcattttacaaatggggaaactgggccccagagaggttgagtttctcactcaaggtcacacagccaggaagcagcacagtgagaatttgaacccagcatcctggccc

SEQ ID NO: 19568 - DNA, 120 bp, synthetic construct
  source 1..120: mol_type = other DNA
ttcaagctcagtggatgccagatatccccctctgtggcctagccaaattctaaggattccccttaatcaggcccaaagcagtccccaggtaggtctctgctgcctcttcgaatgagagcc

SEQ ID NO: 19569 - DNA, 120 bp, synthetic construct
  source 1..120: mol_type = other DNA
ggggtcgacgcaagccggggccaagagggtcgggctctgagtgaggcccacttacccggccccgggcagcagcggcggcaactcgcgctgcggcttctccagagactcgcgcggaaggag

SEQ ID NO: 19570 - DNA, 120 bp, synthetic construct
  source 1..120: mol_type = other DNA
ttgtggttacagaaggcacagtagagtcaaaagggggtgcaaagtaattgcattgtggagtcctagaaggtaccatgggatccaggggcattatgaagcccaaactgtgcagtgggatct

SEQ ID NO: 19571 - DNA, 120 bp, synthetic construct
  source 1..120: mol_type = other DNA
ctgccggctggagaagagagctttggccttcctggcttttacttctgtttggtgacacaaggaagtttcaagctaaataatgaattaaagagtaggatttttgtttcccattccttgtag

SEQ ID NO: 19572 - DNA, 120 bp, synthetic construct
  source 1..120: mol_type = other DNA
agaggctaaaggacttgcacatctagagagaaatcaaacagacctggagggacaatttcttaaaacaataaggtcaatctaatacttgtggggctctcagccttgtctatgaggggatat

SEQ ID NO: 19573 - DNA, 120 bp, synthetic construct
  source 1..120: mol_type = other DNA
catgcacttaacagactatagtgtaagcataacttttatgtgcactgggaaaccaaaaaaggcacgactccctttattgcaatattcgctttgttatggcgacctggaaccaaaccagca

SEQ ID NO: 19574 - DNA, 120 bp, synthetic construct
  source 1..120: mol_type = other DNA
tcagagccaatgagacctctaagggccccagtgggtcaaatcttgatttaaaaaaaattccacttctgggtctatatccaaaagaattgaaagcagggactcagctatttgtacacacag

SEQ ID NO: 19575 - DNA, 120 bp, synthetic construct
  source 1..120: mol_type = other DNA
ccaagtgctgggattacaggcgtgagccaccattagaacaatgagacaagcaggtcaggaggagatagcacatggacagggggtgaggatgttaccacctagtcatggcaggggcttgat

SEQ ID NO: 19576 - DNA, 120 bp, synthetic construct
  source 1..120: mol_type = other DNA
ggttgacccagcctcttagagaaaatgatgagtaagctgtgaaatgtcttagctcctgccataaatgctgatgaatctcagctgattctaggtgaagctagatttccaagtacacagact

SEQ ID NO: 19577 - DNA, 120 bp, synthetic construct
  source 1..120: mol_type = other DNA
tgcagtcccttatccttcctccaccccttagatcagcccggcccctgcatagcctcagtgtgctggcgtttgaccaagagcgtctggagcggaaggtgggtatccatcctgccgggctac

SEQ ID NO: 19578 - DNA, 120 bp, synthetic construct
  source 1..120: mol_type = other DNA
ctgattctcaacttcccatcagcccaaaccagccccataccatcatcacccccacagttaatcccaaacaccccatcactctgacccagtcttataactgccaagatgtcaaaccccaaa

SEQ ID NO: 19579 - DNA, 120 bp, synthetic construct
  source 1..120: mol_type = other DNA
ccacaacatccccataaccccaaactccccatcacactaactccaaacaacactataaccgccaagatgttgaccctaacaccactaatcctcagtccccgacaacttccagcatgtcca

SEQ ID NO: 19580 - DNA, 120 bp, synthetic construct
  source 1..120: mol_type = other DNA
tactcccctcccagggtctccaagcgctttctttcccactgcaacaggcatccgagcagaggaactggttagagggagtaaaaatggctggcttggtacggtgactcgtgcctgtgatcc

SEQ ID NO: 19581 - DNA, 120 bp, synthetic construct
  source 1..120: mol_type = other DNA
ccaggggctcaggaaccggacagtcatcctggatccctctcccctcacatcacatccagccccgtcaggtcctgtggctactccttcagagtccactcacctctcgccactcctcagctt

SEQ ID NO: 19582 - DNA, 120 bp, synthetic construct
  source 1..120: mol_type = other DNA
gtgcaataatggtcttcagtctgaggcaatgaaaagataggggagtgggtgcagtgagtggagggcaggcccaggctggtcagggacagggtttgaccctctggctttgtcctcagatgt

SEQ ID NO: 19583 - DNA, 120 bp, synthetic construct
  source 1..120: mol_type = other DNA
tccatccacacagcactgcatccgtctccttgttctaaacttcccacccgccgtccaggctctctgacccccacatctcctctctctgcagacgctttcccgattcttcgacaaagtcca

SEQ ID NO: 19584 - DNA, 120 bp, synthetic construct
  source 1..120: mol_type = other DNA
atccatgggtagagaaaagccacagtctattctgggctccaaatctaggtggccaagagatggtgtattttaaggaaataaagcaaagttgttttgttggtggggaaataaatttggggc

SEQ ID NO: 19585 - DNA, 120 bp, synthetic construct
  source 1..120: mol_type = other DNA
gtccagaaatatggtgggacttgcctgaggtaggaggtgacctgtgctgtgttgtttcactgccccatttccaatttatggtcctaatgtgaccctcaagccctgggtctacatatatga

SEQ ID NO: 19586 - DNA, 120 bp, synthetic construct
  source 1..120: mol_type = other DNA
ttgcagtcccaggcaacatcttgactacaatcacgcaagagatctcaagctagaactacccagctaagctgctctcagattcctgaaccacagaaactgtgagataataaatgcttatgg

SEQ ID NO: 19587 - DNA, 120 bp, synthetic construct
  source 1..120: mol_type = other DNA
tgcagatgacttgcagtcccaggcaacatcttgactacaatcacgcaagagatctcaagctagaactacccagctaagctgctctcagattcctgaaccacagaaactgtgagataataa

SEQ ID NO: 19588 - DNA, 120 bp, synthetic construct
  source 1..120: mol_type = other DNA
gaggaccagagttatgtggttgttttgtttttgataatgatgatgtacttatggttctgttggtgattgtgatggaaggatgaggaaggagatgatggaaaggaagaggatggttggtgg

SEQ ID NO: 19589 - DNA, 120 bp, synthetic construct
  source 1..120: mol_type = other DNA
agcttgactttttccataggcaacattgcctggcgacctatctgatcttccaactttatcacgtttcttgggaacagagttagaaagttaacccaaggtcaaacttgtccatagagaaag

SEQ ID NO: 19590 - DNA, 120 bp, synthetic construct
  source 1..120: mol_type = other DNA
aatttcatctctctctccccatctctctctttccacctttttccccatctctctcttttgatctctctctccatctctctttttccatctctctctctccatccctcttttcatctcttt

SEQ ID NO: 19591 - DNA, 120 bp, synthetic construct
  source 1..120: mol_type = other DNA
ttccatctctcttcccttctctctctttccatttctctccccatctctgtctttccaccactctccccatctctcttttctcatctttctctttccatctctttccctatctttttccat

SEQ ID NO: 19592 - DNA, 120 bp, synthetic construct
  source 1..120: mol_type = other DNA
taacatcatacattaatgaggacagagtcaatgctttctccctaagtacaggagcaagacaaaattgtctgctgttctagtcaacagtgtcctggaggtttcaaccagtgcaattggcaa

SEQ ID NO: 19593 - DNA, 120 bp, synthetic construct
  source 1..120: mol_type = other DNA
tcatattacaatgaaaatgcatgttatttatgcatttctttttcctttcctttccttctttctattcttccttcttcctctactcctctcctcctcctcctgtgctcctcctcctctcct

SEQ ID NO: 19594 - DNA, 120 bp, synthetic construct
  source 1..120: mol_type = other DNA
gagtgagactccgtctaaaaaaaaaatgacattggatgggattccctaggtgatccttgactctggttatggcccctcagaggccaacacttctgtgcaatatcaatgctgacctaaacc

SEQ ID NO: 19595 - DNA, 120 bp, synthetic construct
  source 1..120: mol_type = other DNA
cgctgggttatggaagcgtggagaggcctgggcacagcaggtgggccccgtgcagatgagcaggttatgaatatggtgaaacgccttcctcccagtgagtcatcagctgttgcctggggt

SEQ ID NO: 19596 - DNA, 120 bp, synthetic construct
  source 1..120: mol_type = other DNA
tgttgttcaccagagagagagacaaagaggcagaggtagagagaaaacggagattagggagatagagagactgaaagagagacagaaggagaaagacagagagagagagagaaagaaggg

SEQ ID NO: 19597 - DNA, 120 bp, synthetic construct
  source 1..120: mol_type = other DNA
ctcatccttttgataaatactaatctggtacctgcttcccaggcaccaggcttggcatcatagataaagtggtgactgagaaagaactagccttgtccttgaagagttaacattctaaag

SEQ ID NO: 19598 - DNA, 120 bp, synthetic construct
  source 1..120: mol_type = other DNA
cagacacagtcgtagcggttgatgccatcacggcagactccaaaggtgcaggggttgctggcacagtcgtcaatgttcacttcgcagttcacacctaggggccaggaacatggcatggag

SEQ ID NO: 19599 - DNA, 120 bp, synthetic construct
  source 1..120: mol_type = other DNA
cctgattcttgtcggactgtcattggcccgcctcaccctcggcacagcggcactcgtagccatcgggctggtccacgcatttggcgccattcctgcagggcgtgctggcgcattcgtcca

SEQ ID NO: 19600 - DNA, 120 bp, synthetic construct
  source 1..120: mol_type = other DNA
tctgctcaagagttggtaagcaccctcgcacttaaaacattccaaaacccaagcttttgtggttacattctgaggcaatgcatagagaaatgttaattctgtgagccttttcaaggtgac

SEQ ID NO: 19601 - DNA, 120 bp, synthetic construct
  source 1..120: mol_type = other DNA
tgctacacagcaagaaccttttggaaacagtacagtgagtgaaagatgccaggcacaaaaggttacatattgtaggattcctgaaatatccataacaggcagatccatagagacagagag

SEQ ID NO: 19602 - DNA, 120 bp, synthetic construct
  source 1..120: mol_type = other DNA
gtctctttgtgaaatttgctttgcagatgcttctggatctcttcgtcatcaaagctacggaacttgcatacagaacaggcaaactgaattctgtagaaggaaaacaaggaggggagtgaa

SEQ ID NO: 19603 - DNA, 120 bp, synthetic construct
  source 1..120: mol_type = other DNA
aaaaaaaaagaatctgtttttggcaagttccctaaagcttctctgttgccaaagccaactgacattttccttttcttcccagaactcttggtggcatttcccaatcctgagtctctgcaa

SEQ ID NO: 19604 - DNA, 120 bp, synthetic construct
  source 1..120: mol_type = other DNA
ctccagccggtggctccttcttgatgaggcacggcttggacttcttcttgaggatctctcgcagtgtgtcgatgggcgaaccattgacggaccactcggtcacacccatctgccgcaggt

SEQ ID NO: 19605 - DNA, 120 bp, synthetic construct
  source 1..120: mol_type = other DNA
ctagactgttttgaattcttttcctgactgttttcagtacactagtgaacctctgatgggttcctgtggcagagtgggggttacgcagcaggtattcaccattatttccacattatccac

SEQ ID NO: 19606 - DNA, 120 bp, synthetic construct
  source 1..120: mol_type = other DNA
gaagggagggacaggtcagagataggttttggagatagctctgtggactagcacctaccaggggactgctaaatgaaattgtgatgagtctgagatttactctatttataagttaataag

SEQ ID NO: 19607 - DNA, 120 bp, synthetic construct
  source 1..120: mol_type = other DNA
gacattgtagacggtccgagttccagctctccttccctcacctcctctggagtttatgggaaaaggcccacagagtaggattgggttggtcctagaaggatccctagtgagctcagagct

SEQ ID NO: 19608 - DNA, 120 bp, synthetic construct
  source 1..120: mol_type = other DNA
ctcagtgagctaggtattgatggtggctggggtctgcgaccccagagaagcaagagagatggctcactcattcctctgctaactcactcattcctctacccactcactcctctacccact

SEQ ID NO: 19609 - DNA, 120 bp, synthetic construct
  source 1..120: mol_type = other DNA
tccactgctggacttgaagccttctgagccccgatagacaggctgctccctgcatggcccatttgcttgtatctgcccatctctgggctgctgctttcccgcaggaattatctctgactt

SEQ ID NO: 19610 - DNA, 120 bp, synthetic construct
  source 1..120: mol_type = other DNA
gataagaatttattatgggaattggataatgtgatgatggaggccaagaagtcccatgatatatcatctgcaagccagaaaccagggacactggtggtgtaaattcagcctgagtccaga

SEQ ID NO: 19611 - DNA, 120 bp, synthetic construct
  source 1..120: mol_type = other DNA
tcactcattcccctcctcactcactcatttctctcctcactcattcattcctttacccactcactcattcctctacccactcactcattcctctcctcactcattcccttcctcccattc

SEQ ID NO: 19612 - DNA, 120 bp, synthetic construct
  source 1..120: mol_type = other DNA
ctcactcattcctctacccatgcactcattcttctcctcactcattccttcctctcctcactcactcattcttctgctcgctcactcactcattcctctgctcactcttattcttctcct

SEQ ID NO: 19613 - DNA, 120 bp, synthetic construct
  source 1..120: mol_type = other DNA
aatgtttcctggaggaagagttgttggagctatgtctagaccaataagtaggattttttaagtgtggggcaggatgatgcagtgggcatcattggtatttggggtcccagccagtccttg

SEQ ID NO: 19614 - DNA, 120 bp, synthetic construct
  source 1..120: mol_type = other DNA
cggcctcccaaagtgctgggattacaggcatgagtcaccacggaacgtaatttttaacaatagccttcggtaatccaatttagttgttcccagtgaatttctcctacatcattacatttt

SEQ ID NO: 19615 - DNA, 120 bp, synthetic construct
  source 1..120: mol_type = other DNA
gttactgcatgaagaaaagttctcagccttccccatacctggatttgcccaagggactgctcttgataaatggtttggttccattcccactctgtacctcctataatttaatactctcgt

SEQ ID NO: 19616 - DNA, 120 bp, synthetic construct
  source 1..120: mol_type = other DNA
ttatgtcctcatcagataacttcttcccgtcttcatcctggagagaaggcagtaaccccccccaacccccacccccataaaaagtcacactagctctaagggctcttgagtctaatctga

SEQ ID NO: 19617 - DNA, 120 bp, synthetic construct
  source 1..120: mol_type = other DNA
acatagacacagatatagacacagacatacgcacacatacacaaaaacacagacttagaaacacagacacacataaacatagacatagacacacacacacatagacaaagtcacagactt

SEQ ID NO: 19618 - DNA, 120 bp, synthetic construct
  source 1..120: mol_type = other DNA
agacacacacacatagacaaagtcacagacttagaaacacaggcacacaaatacaaatacacataaacatagacacagatagacacagacgcacacacatagatgaagtcacagacttag

SEQ ID NO: 19619 - DNA, 120 bp, synthetic construct
  source 1..120: mol_type = other DNA
tttagcgatgcaacatcccttaggctatgaaaagagatcaatgtttgtagcaggattttattttgagacactgactgaggtttctctcattctcctaccacctcacacagtcaggtacct

SEQ ID NO: 19620 - DNA, 120 bp, synthetic construct
  source 1..120: mol_type = other DNA
ggtgcagtaacacagggaagacaggcaggaaaaagatccaagcaggctggagtgggaggacagggaggtgagaaagacttgggatggcacatcagaggaatgagtgagcggggagaggaa

SEQ ID NO: 19621 - DNA, 120 bp, synthetic construct
  source 1..120: mol_type = other DNA
gaggcccagggaagggcccaggaagctccaaggacagtggaaaggggcaaggatgggcagtgctggaggcagatcagggaaggctctgagatgggtaaacaagagctgagatctaaagtc

SEQ ID NO: 19622 - DNA, 120 bp, synthetic construct
  source 1..120: mol_type = other DNA
tgtagattttcactcgagagcaagtgtaaagaagtgctgacatttccaaacgaagaaaaccaggccacgccttcattcaacaaatgtatagggaaaggaacaggaagaggctaagaagtc

SEQ ID NO: 19623 - DNA, 120 bp, synthetic construct
  source 1..120: mol_type = other DNA
ctggttttggtctggtctgatttgatttggtctggtttggtttggttttagtctggtctagtctggtctggtctggttttggtctggtctaatctggtctagtttggttggttttggttt

SEQ ID NO: 19624 - DNA, 120 bp, synthetic construct
  source 1..120: mol_type = other DNA
tttggtctggtctggtctggtctggtctggtcggttcggtctggtctggtctggtttggtctggtctggtcggtttggtctggtctggtctgtttggtctggtctgtttggtctggtctg

SEQ ID NO: 19625 - DNA, 120 bp, synthetic construct
  source 1..120: mol_type = other DNA
tgtgtatgctttcttttggaaaccgagatcctattcctcccaaccataatccatataaaaagaacggtaaaggatggattgtaaaggttgggactgaagctaggattctgggcaccacta

SEQ ID NO: 19626 - DNA, 120 bp, synthetic construct
  source 1..120: mol_type = other DNA
agaccctggctcaaaaaaaataataatgcatatttggtctcaaagcaaagattgatgaagcactgtgtgcaacagaagtggaggcgaacaagctgtggctgccctcaggagggttatacc

SEQ ID NO: 19627 - DNA, 120 bp, synthetic construct
  source 1..120: mol_type = other DNA
gagtgagactgattccaactctagtcaactgaatgtaaaggaacagaatgaaatcaaattgaactgaacacagcttatgtgttatatcctatcagaacctgggtaggggctgcctccagc

SEQ ID NO: 19628 - DNA, 120 bp, synthetic construct
  source 1..120: mol_type = other DNA
gctgcattcctgatgataccttttgcctccagctccaatatgattggtcccggctccgtaactgacagatgttatgtatcttggcgctcccctcatctcccctaggactggccctggata

SEQ ID NO: 19629 - DNA, 120 bp, synthetic construct
  source 1..120: mol_type = other DNA
agattttgagcaggacattcaagcttcaaacaggaaaaaaatacccaagaggaggctcatttacgatgattttgaacagctgtgtaaggtcattatcaccacccccattttatagggggg

SEQ ID NO: 19630 - DNA, 120 bp, synthetic construct
  source 1..120: mol_type = other DNA
atatagatatggaacatataccaggtgcccttggaagcgcccccttacatctgatttgtgtaattctcatgtcagttcagttttcctccaatttcacagttgaggagactgaggctggag

SEQ ID NO: 19631 - DNA, 120 bp, synthetic construct
  source 1..120: mol_type = other DNA
gtgtgtgtgtgtgtgtatgtaatcacctgatcactctggtgggcagtatgtgtgtgtgagaaatcacctgatcactctggtgggcaatgtgtgtgtgcgtgtatgaaatcacctgatcac

SEQ ID NO: 19632 - DNA, 120 bp, synthetic construct
  source 1..120: mol_type = other DNA
cctgaacacaaacacacatctctatcagggtcagagaaggcagaaacggcctgcactcagcatcggagaaatcacacacatatagcctctgatgattcaccctcggacagagaaaccctc

SEQ ID NO: 19633 - DNA, 120 bp, synthetic construct
  source 1..120: mol_type = other DNA
tgtctcttaaaagggcagcagtcacccgatgtagggtcctcccggctaatctaggatgatttcttcatcccaagatccttcccttaattatgtctgaaaagactgttttttcaaataagg

SEQ ID NO: 19634 - DNA, 120 bp, synthetic construct
  source 1..120: mol_type = other DNA
aaggtcagtggctggacaccccccccccgcccccttcttgttggaaacaaaaccaaactctcatcatggttacatgtggaaaagcaggacacagtcgcttaaacaatgaccaaactaaga

SEQ ID NO: 19635 - DNA, 120 bp, synthetic construct
  source 1..120: mol_type = other DNA
ctacaaaaaaggggtgggtctttcaaagaatggtattggaaaagctggacggctttataattattattacacatttttagagatggggtctcactctgtcgtccaggctagagtgcagtg

SEQ ID NO: 19636 - DNA, 120 bp, synthetic construct
  source 1..120: mol_type = other DNA
gctactgcatccaggtttgagcccgtcacccgcagtccacgcacgcctgacaccacgtcccttttcgttgacatcccccatacactttagactgtccttgctgacatctcccacacccct

SEQ ID NO: 19637 - DNA, 120 bp, synthetic construct
  source 1..120: mol_type = other DNA
ctgtgagtctgatgtgactgtggttgtgtctttgtcagaaaacttgtgccgagggccacatcaccatgtggcaaaatgatgggtgtccatcggtcaccaaggccacaattatccatctcg

SEQ ID NO: 19638 - DNA, 120 bp, synthetic construct
  source 1..120: mol_type = other DNA
acttctcatttctgcaaagatgcaacagtgcccgggtttactcctgcttctcctggccacaaaccctgggatagcctgggcctacttccggttcttcccatgcctcacccccctaaaaga

SEQ ID NO: 19639 - DNA, 120 bp, synthetic construct
  source 1..120: mol_type = other DNA
ctcctttttcctccccctcatctctctccttctcccttccttcccccttcccttctccagctcttacagaggttagggagggcatctgtgtactccctcacctctgtaaacttcacttct

SEQ ID NO: 19640 - DNA, 120 bp, synthetic construct
  source 1..120: mol_type = other DNA
attaatatccagcaccaagtgttgtgttttcattttttgatgggcacttgggtcatccacctactctttggctgctgtgaataatgtgagtatggctgccatgaagattcatgctgtaca

SEQ ID NO: 19641 - DNA, 120 bp, synthetic construct
  source 1..120: mol_type = other DNA
tactgtttccatgttaaaaccttcggaaatatttcttagcctcttggtcttagtgtctccctctttcacccccagttccacagaggacactggtggctgcctaccaggctatagagtcag

SEQ ID NO: 19642 - DNA, 120 bp, synthetic construct
  source 1..120: mol_type = other DNA
gagttcacactctgtctgtaaccctcagggagctcacactccgtctgtgtccctcagggagctcacactccacagcatcacctctgggacctcgcattccatctgcatcgctcaggaagt

SEQ ID NO: 19643 - DNA, 120 bp, synthetic construct
  source 1..120: mol_type = other DNA
gtggccattctaatgggtatgaggtgattttgtttgttatgtttcttttttcatttctctacaaattagtaattttgtgtgtgctttcaaatgcattttccaattttgtgtatttttttg

SEQ ID NO: 19644 - DNA, 120 bp, synthetic construct
  source 1..120: mol_type = other DNA
taaaacattacagaccaattagacctaagagacacatacagaacgttccagttaaaagcagcagaatacatgatattctcaattacacacagagcattctgttaggacacataacaagtc

SEQ ID NO: 19645 - DNA, 120 bp, synthetic construct
  source 1..120: mol_type = other DNA
ccttccgttacatgcaccatataaaaacagtatttaaaatggattaaatacttgaacataaaaatataacaaacttcctagataagtatatgggggaaaatatgacattggacttggcac

SEQ ID NO: 19646 - DNA, 120 bp, synthetic construct
  source 1..120: mol_type = other DNA
tgctcagagccagcagggggaaagactaagtctgctgatctgcagaaaccacctcattgttcctgttttatgtatttcttgtagataagttttttctcatttcctgttttactaccttta

SEQ ID NO: 19647 - DNA, 120 bp, synthetic construct
  source 1..120: mol_type = other DNA
gataaatttcagcgaggtctgatatggaagtacaggaaagtggtcccaatccaggctccaagatagggttctttgatcacacgcaagaaagaatttagagtgagttcatagagtaaagtg

SEQ ID NO: 19648 - DNA, 120 bp, synthetic construct
  source 1..120: mol_type = other DNA
aaagaagtgtattcatgtatcatcctaatagtcagtaatcacttgctacacctgttccctgtctgtggtactgcagtcactccactcctgtaacatttacctttggtctcagcagactca

SEQ ID NO: 19649 - DNA, 120 bp, synthetic construct
  source 1..120: mol_type = other DNA
ttgactagaagcaaggaggcccctgaccccttcttccaaatatactcttttgtctttgtctttattctcacattcatcctccgttgttcagtccaataaggtctgcagcaaaatgaaacc

SEQ ID NO: 19650 - DNA, 120 bp, synthetic construct
  source 1..120: mol_type = other DNA
aaaaatatgaataatattaaaataactaaggaattcaatctaagtaaatacgtggccttaaattcatactattgtagaaaatactgtttatatgaatgcaggttgtctacaaacactaca

SEQ ID NO: 19651 - DNA, 120 bp, synthetic construct
  source 1..120: mol_type = other DNA
gtataaaggctttcctgtgcaataaggtttgagcattgtgtaagttttgccacactgttcacacttgtagaagttttctccagaatgaattaccttacctacaatccagtgtgataacca

SEQ ID NO: 19652 - DNA, 120 bp, synthetic construct
  source 1..120: mol_type = other DNA
ttacactggttcctgtgtctcattgcataaaagttctgaaagaaatagtggtattctttcaaatgacagtttgaggctgctgagatgaaaggtaaggtaccaaaacagatatatagacca

SEQ ID NO: 19653 - DNA, 120 bp, synthetic construct
  source 1..120: mol_type = other DNA
gcagcacatatataaactctcacatatatggtcacatgaagagtcatttgcatacccacatttattttagcattgttactaaaagccagtaggtaaaagcaaggcaaatttcggtcacca

SEQ ID NO: 19654 - DNA, 120 bp, synthetic construct
  source 1..120: mol_type = other DNA
ccttcaagtcacaaaagtgtttccctcacacataggaaatatgtttattattaaacacaaggtgaaaataagactatttccatgactactcatttagacaagataaagccaccattaaaa

SEQ ID NO: 19655 - DNA, 120 bp, synthetic construct
  source 1..120: mol_type = other DNA
cctgcaatcatcccaaactcctcccagccacagtctgggagaggtcttgccctttcagaggtctggagagagacacccctttatagccacgcagcaggcctgcagaccttggccattact

SEQ ID NO: 19656 - DNA, 120 bp, synthetic construct
  source 1..120: mol_type = other DNA
tccttcaaactcacagacaccaatgcaaaagtttattatgcccattctcaatgcttctattttaacacagcactggaagtatgtggaataagtaaaaaaaaaaaaaaaaaaaatttaagt

SEQ ID NO: 19657 - DNA, 120 bp, synthetic construct
  source 1..120: mol_type = other DNA
caccgcgcccagcctcagctattacttagaaacaacatgcatttggttttctgctgctacgttagttttctaagaatagtggtctccagcttcatctatgttgctctatgttgcttcaaa

SEQ ID NO: 19658 - DNA, 120 bp, synthetic construct
  source 1..120: mol_type = other DNA
tactgttgcccacatcttaaaatctaattgccactaccagtttttgatttagtagtatcaggtagtgaaattaagaacttacaaaattaaaatatttcctaaatatttaaaattttttgt

SEQ ID NO: 19659 - DNA, 120 bp, synthetic construct
  source 1..120: mol_type = other DNA
ggtcctatagtttgccacctgaatgaaagcctgccttctgaagagaatattcctcaatcttgggcattagcagagtttcacagctccctccgtagatctcaaagctctttaagggcactt

SEQ ID NO: 19660 - DNA, 120 bp, synthetic construct
  source 1..120: mol_type = other DNA
ttacctttttcagcctttcacaagagcatgctcaagagtgtgttgtttaatttctatatatttgttaatttttcagattttttttctcgttgtatactcatttcattttggtgatagaaa

SEQ ID NO: 19661 - DNA, 120 bp, synthetic construct
  source 1..120: mol_type = other DNA
actgcacacacttaacttactttaatttttcagaaatgtaatttgttctgtatgcttttatatgtctgtgaaaatgttagagcgtgtaatattttgctgtaacatcttgtgatgtagttt

SEQ ID NO: 19662 - DNA, 120 bp, synthetic construct
  source 1..120: mol_type = other DNA
cattacaaatataaacgaagttgtggtaactttacttgtaacacagatcttgttgtattcattctgtattagagcaaaccctgaggcaattgctcaaactttgttcaacatcagagaatt

SEQ ID NO: 19663 - DNA, 120 bp, synthetic construct
  source 1..120: mol_type = other DNA
ggcacattctaaataatatgtctacctaggaaaaatctgaggaaacatagatataagttgaccgtttatttgggccaagcttgaggactgtaacctgggagcaaatattcaagttgcctg

SEQ ID NO: 19664 - DNA, 120 bp, synthetic construct
  source 1..120: mol_type = other DNA
taaaaaaaaaaagaaaaaggcggtctgttattagaacttttttcctcttttttatcctctctcaccctgggaggagacctgaaatcacagggtaatgggcagtgtgatggcctgtgtaca

SEQ ID NO: 19665 - DNA, 120 bp, synthetic construct
  source 1..120: mol_type = other DNA
ggcccatatttttattactgtagcagagattgttggtgtctgtagcaggggagggcacctaaagagaggaaaggagaaacttttatttcttcttcatggggaaactcattgttcctgaat

SEQ ID NO: 19666 - DNA, 120 bp, synthetic construct
  source 1..120: mol_type = other DNA
tcaccttgagtgaaacttaaaattctgcccaggggcacttggtaaatatgtgtgtttgtttgtgtttttcagggagcgttgacatttagagatgtggccatagaattctctctggaggag

SEQ ID NO: 19667 - DNA, 120 bp, synthetic construct
  source 1..120: mol_type = other DNA
cacagaagagagaatgacttattcctgagtttagcatacaggtgatttgattcttctgctgactcccagaagtcactgtaacatatatctgggtccatcgctgagactgtgtgactctct

SEQ ID NO: 19668 - DNA, 120 bp, synthetic construct
  source 1..120: mol_type = other DNA
aacagaattttacattagctctacaccctgtcccaaccctgatcagattcaccctttttgaagaccttatttaggtgtggccatactctggagtcttgtctcacagaactaactagaaga

SEQ ID NO: 19669 - DNA, 120 bp, synthetic construct
  source 1..120: mol_type = other DNA
gacttcctttttgtcctaagatgtggtctttcaagggaaatgttgtatgagctattgagaagggtgtgtattctgatgttgttgaggagtgttctccataactctgtttggaataattgt

SEQ ID NO: 19670 - DNA, 120 bp, synthetic construct
  source 1..120: mol_type = other DNA
ttccttcctttctttctttcccaaaatattgattaaggacccatggcagaccacaggctgtgttaatgctgggggcctggtggcgaagaaggtgtcatggccaagaccctcttgtggatg

SEQ ID NO: 19671 - DNA, 120 bp, synthetic construct
  source 1..120: mol_type = other DNA
tcttcttcgtcctcttcctcttccttttccttcttccttcttctccttcttcttctcctccttctcttttttttccttctagcattgttttttccactttctttctggaggttggaggtc

SEQ ID NO: 19672 - DNA, 120 bp, synthetic construct
  source 1..120: mol_type = other DNA
atagggcagagtattattaggaagaagggaagaaatagtactgaagaagccaagagtaaagtgtttgcatttttgcctgatgtggacctagatctagaaagctggcttgccagaaggagt

SEQ ID NO: 19673 - DNA, 120 bp, synthetic construct
  source 1..120: mol_type = other DNA
aaggcctgtaactcctaggtgtttacccaccaacgtatatatccacacaaaggcctgtacacaaatgttcacaatggctttatttacaaatccagaagcaggaaaactactcagatgtcc

SEQ ID NO: 19674 - DNA, 120 bp, synthetic construct
  source 1..120: mol_type = other DNA
cttttgttttcaactcactctaaccatctcatctttaagttctgtatttataatagctgtttttaagtcctcgcctgttaattccaatatctgggtatcttgggttcactttctggtgac

SEQ ID NO: 19675 - DNA, 120 bp, synthetic construct
  source 1..120: mol_type = other DNA
ccgtttaggaattttaccctttaattctcaagctgctatggcagccccaaactctgttctctgattcctcaagccacaaacatgactttctccttgaattgcagctggttaacaccacgt

SEQ ID NO: 19676 - DNA, 120 bp, synthetic construct
  source 1..120: mol_type = other DNA
gttcagatggtgttctttgcatctcctggctgctctctgcatctcctggctactctctgcatctcatggctactctctgcatctcctggctactctgcatctcctgggttctctatcacc

SEQ ID NO: 19677 - DNA, 120 bp, synthetic construct
  source 1..120: mol_type = other DNA
ctctctctgcatctcctgctgctctctgcatctcctgggtactctctgcatctcctgggtactctctgcatctcctgggtgctgtctgcatctcctgggtgctctctgcatctcctggtg

SEQ ID NO: 19678 - DNA, 120 bp, synthetic construct
  source 1..120: mol_type = other DNA
ccccagggaagggcctactggggtttggtcaccttctttgacatctgatgcctttgtgtttgtgttttatgcagaacacccttttaacgtgtgtattacagttttacagattttgtcaaa

SEQ ID NO: 19679 - DNA, 120 bp, synthetic construct
  source 1..120: mol_type = other DNA
ttctgtgtgtgacagagagggggagagagactggctgatgtggttattctgtgtgtgacagagagggggagagagactggctgatgtggttattctgtgtgtgacagagacggggagaga

SEQ ID NO: 19680 - DNA, 120 bp, synthetic construct
  source 1..120: mol_type = other DNA
cagtgtcacaaatcaaattagatacagttgatcttttggggctgttgatgttctttgggttggtctttgctttctttccagttctctgaggcaacactgctagagaaactgagcagtttg

SEQ ID NO: 19681 - DNA, 120 bp, synthetic construct
  source 1..120: mol_type = other DNA
ctcagctgaaactttgtaccattaaacactctctactattaactttccaagaatcatgtaggattcaaactggaaatctaaggaagcttgctttctgaagacttccacatgggctatcac

SEQ ID NO: 19682 - DNA, 120 bp, synthetic construct
  source 1..120: mol_type = other DNA
ataccgctgagcccctgttgggtgtctgacccatggctgaccagagagatgtaggttctgaggcctccacgttcctgtccacccggtgggatgacagctcagtggtccctgcaggtcctc

SEQ ID NO: 19683 - DNA, 120 bp, synthetic construct
  source 1..120: mol_type = other DNA
gggcttgggttctgtagctgaatccagcatccttggttagctaagtggcccttcaccctggctcagtgttcaaggtttggaggccaaggtagtggacctggcacagcaggaaggaactga

SEQ ID NO: 19684 - DNA, 120 bp, synthetic construct
  source 1..120: mol_type = other DNA
taggtgcatgtggcatgagacgtgtggtatgtaggtgtgtgtggcaagtgatgtatggtgtgtgtggtgtgtatggcgtgtcatatgtatgcagtatgtggtatatgtgtggtgtgtgta

SEQ ID NO: 19685 - DNA, 120 bp, synthetic construct
  source 1..120: mol_type = other DNA
aaaagggccccaaatgccccattcacagctcagagagaaagagcataatttcaatcaaggtctcaggctgtcatacacatcgcgttattaatctccttgtggcaaatgtgagctgggact

SEQ ID NO: 19686 - DNA, 120 bp, synthetic construct
  source 1..120: mol_type = other DNA
aaacaccctacacactacttacacacccacacataccctcatcacaaacaccctacacactacacacacacccaatacaccacactcacacccacaccccatcacaaacaccttacacat

SEQ ID NO: 19687 - DNA, 120 bp, synthetic construct
  source 1..120: mol_type = other DNA
tcacaaaaaacctacacaccacacacacaccccatcacaaacaccctacacaccacacacacaaaacacagcacacgcacacccacattcacccctcctcataaacaccctacacaccac

SEQ ID NO: 19688 - DNA, 120 bp, synthetic construct
  source 1..120: mol_type = other DNA
aagtctgaaaggaattatgccaatgatcgcagttcggagtggactggattggggcgactttcaaaggaatcttcacttccactgtattgtttgaagttttttcctgtgagaatgcattcc

SEQ ID NO: 19689 - DNA, 120 bp, synthetic construct
  source 1..120: mol_type = other DNA
ccttcccagcctctggttactgccaatcttgtctctgtcttcatgagatccaattttctggttcccacgtatgagtgagaacataatgatatttatctttctatgcttggcttatttcac

SEQ ID NO: 19690 - DNA, 120 bp, synthetic construct
  source 1..120: mol_type = other DNA
ctgagtttgatccctgagttcaatccctggctcagccactggccagctgtgtgaccttagtggctaaatatgtgtatatcacagcttcatcagtgtcaagctggggcaaaataataacct

SEQ ID NO: 19691 - DNA, 120 bp, synthetic construct
  source 1..120: mol_type = other DNA
tttctaggccccatctccaatcttttcttcaggacttctaacaccaccaactgtcctccatctacctattatcctcccacccaccatctccccaccaacttcccaccttccccctaccaa

SEQ ID NO: 19692 - DNA, 120 bp, synthetic construct
  source 1..120: mol_type = other DNA
tgacatcagtgtgccccccgtgtgcatctccccatcatcagtgcatcacatctgacaaggaagacacccttgtgtggtacaaaccccctcctcactcacacttggcagtcaagtgtgcta

SEQ ID NO: 19693 - DNA, 120 bp, synthetic construct
  source 1..120: mol_type = other DNA
tgctgtatctttgactccatctcagaatggtccttaaattcaaaataactccacaccctaaagctctttgagactctcctgggccttaggaggtaaggtctagtgtctttgcatggctat

SEQ ID NO: 19694 - DNA, 120 bp, synthetic construct
  source 1..120: mol_type = other DNA
ggaatctggtacaggtatgaggatctgcgtctgtcaaagtctgaggagttaccatctggtacaggaatgaggagatgtgtcttccagtgacttaggaggtacgatctcttataggtatga

SEQ ID NO: 19695 - DNA, 120 bp, synthetic construct
  source 1..120: mol_type = other DNA
ttaggaatctggtacaggtgtgaggatcttcatgtctctgtatctgaggaagtaggatctgatacaggtattaggatctgggtctatgtctgaggaggtagcatctgatacaggtatgaa

SEQ ID NO: 19696 - DNA, 120 bp, synthetic construct
  source 1..120: mol_type = other DNA
gagagaggcgcaggacgctcaggtaaaggttgtgattggcatgttattgtttttctgtcatttgaggatattttccagagaatagtttggggcagactttaaagccgtgttctttgaagt

SEQ ID NO: 19697 - DNA, 120 bp, synthetic construct
  source 1..120: mol_type = other DNA
attgggatcctctggtttaccttctcactgaattaggagaagttccttctaattctcagctgatcatgtgtaggggatgggacagtggaggtccagcatttttttttttttttcattctc

SEQ ID NO: 19698 - DNA, 120 bp, synthetic construct
  source 1..120: mol_type = other DNA
tctataagaaaaacctgttactcaaatacatgggcccagattctggccctgtatcagtgtgcttttattttattgtttaacctacagagaaattaaataatgcccttcaaatcttagcca

SEQ ID NO: 19699 - DNA, 120 bp, synthetic construct
  source 1..120: mol_type = other DNA
cttgagacatataagatttgcaggatatatacactgaaactataaaagattgcggagaaaaattaaagatctaaataaagggagagatatgccacgtttatgggttacaacactcaatat

SEQ ID NO: 19700 - DNA, 120 bp, synthetic construct
  source 1..120: mol_type = other DNA
tgtgttaatgcgttgatctatgagatgggtattatgatgagctctgttctgcaggggagaaagcagaaacatggagaatttaagtcatttcccccaaatcacaaagtcaggaagaaacag

SEQ ID NO: 19701 - DNA, 120 bp, synthetic construct
  source 1..120: mol_type = other DNA
tgcccttcatcctctgcccactctctggattcatcttcttcaccaccatctatctcaccgccctcttcctggcagctgtgagcattgaacgcttcctgagtgtggcccacccactgtggt

SEQ ID NO: 19702 - DNA, 120 bp, synthetic construct
  source 1..120: mol_type = other DNA
acacactatggattgggctctgggaaggggtcagggtgagaggctgctctggagaacaatgaggtcctcatagcagcaggcagctcctgtgttttcttgagggtggcagaggagctaaga

SEQ ID NO: 19703 - DNA, 120 bp, synthetic construct
  source 1..120: mol_type = other DNA
aagataattagtcagcacaatggacttcaggtttctgcaaagtcagagagatgttcctcagagctctattcatcaaaatatggccattcaggaagttttcatgttccctgagtggtggcc

SEQ ID NO: 19704 - DNA, 120 bp, synthetic construct
  source 1..120: mol_type = other DNA
tatgttttaatctgcatgtgttcatgctttgaaatatggtacaggtactatgacaatccctgttctgtaggggaggaagaagagacacatctcttcccccacatcacaaagtcaggaagg

SEQ ID NO: 19705 - DNA, 120 bp, synthetic construct
  source 1..120: mol_type = other DNA
cccttcatcctctgcccactctctggattcatcttcttcaccaccatctatctcaccgccctcttcctggcagctgtgagcattgaacgcttcctgagtgtggcccacccactgtggtac

SEQ ID NO: 19706 - DNA, 120 bp, synthetic construct
  source 1..120: mol_type = other DNA
acactatggattgggctctgggaaggggtcagggtgagaggctgctctggagaacaatgaggtcctcatagcagcaggcagctcctgtgttttcttgagggtggcagaggagctaagagc

SEQ ID NO: 19707 - DNA, 120 bp, synthetic construct
  source 1..120: mol_type = other DNA
gatcttagctaatgcaggatctcttcaactttttacatccttgtccccttcagaagcctctttggatatacatctttcctacacagcacattcctctgcctgcttatgcaatttcagtgc

SEQ ID NO: 19708 - DNA, 120 bp, synthetic construct
  source 1..120: mol_type = other DNA
ggacatgaggcagacagatggggaggagaacagtgaggaatggggatgggaaagaagcaggagggaaggcaggtgttgtggactttggctttatcctgagtaagatggacccatagaccc

SEQ ID NO: 19709 - DNA, 120 bp, synthetic construct
  source 1..120: mol_type = other DNA
tccaggaagggacccgcgccacccaagtggcccctgcaggggcctcctgaggctcctgggtccttccccagctcccatcccagcaccttcctcggcatccttctgccagccctcagccct

SEQ ID NO: 19710 - DNA, 120 bp, synthetic construct
  source 1..120: mol_type = other DNA
tagtccctgcttctaggggtaggagtctcggttgccagcaacccctagcacctccaaggacccagagatccagcctcccaagcctcccagcccttgcaccctcggggccctgcgatcctg

SEQ ID NO: 19711 - DNA, 120 bp, synthetic construct
  source 1..120: mol_type = other DNA
gtgcttggtaccctgaaatgggctcaaggtgacagttgttttcccatgactatttgatctacttcacatttcttttctcctttgagcactctggctggtagaggattgcattttttttta

SEQ ID NO: 19712 - DNA, 120 bp, synthetic construct
  source 1..120: mol_type = other DNA
gcacaaaagtacagagaatagttgacagtaatggccccccgatatgcaccagtctgcttcaacagttaacaaggtgtaccctgttttatctcttcccttctatcttttattccccatgta

SEQ ID NO: 19713 - DNA, 120 bp, synthetic construct
  source 1..120: mol_type = other DNA
tgtgatcctaataaaagtatggacaggcttttctcttttggaactaggggaactgatcctagacttactatggaaagagacaagctgcaagagccagtacagactgagaaagaaaaggcg

SEQ ID NO: 19714 - DNA, 120 bp, synthetic construct
  source 1..120: mol_type = other DNA
tcagtcctctagaatctgataaaagggatgcatagattcaggaagacagtctggaaatgtcatttaggtatctaaagaattcccagcaacagtcactctaaaagacaaaggctagtacga

SEQ ID NO: 19715 - DNA, 120 bp, synthetic construct
  source 1..120: mol_type = other DNA
gcttctctccagtgtgaattcgctgatgcacttggagctgtgattttttagtgaaagacttcccacagtcactgcactcataaggtttctctccagtatgaattctgtgatgtgtaatca

SEQ ID NO: 19716 - DNA, 120 bp, synthetic construct
  source 1..120: mol_type = other DNA
agtcactgcattcataaggtttctctccagtgtgaattctctgatgaataatcaactctgacctgtaggtaaaggccttcccacactcagtacatatggaagatttctctctactttgaa

SEQ ID NO: 19717 - DNA, 120 bp, synthetic construct
  source 1..120: mol_type = other DNA
aaaaaaaagaggcaggcaactgagtgagaagaattgtaatagcagaaggaagaatttaagttctcccagatgacctgaaaatcctaacctcaaaggctttcttgagggtggtgggagtgt

SEQ ID NO: 19718 - DNA, 120 bp, synthetic construct
  source 1..120: mol_type = other DNA
cagtattctattgtagttttcatgagaaggcttttcctattcaccaaattgactcggttccttgtcagtatgaataatgacccaaggtttactggggatggtgacaatgtaggaagggtc

SEQ ID NO: 19719 - DNA, 120 bp, synthetic construct
  source 1..120: mol_type = other DNA
atcaagtctgacctctgggtgaaggcctttccacatttggaacatatataagatttctctcctgtatgagttttctgatgtgtaatgagatttgaccggttggtgaatgccttcccacat

SEQ ID NO: 19720 - DNA, 120 bp, synthetic construct
  source 1..120: mol_type = other DNA
aaaatagcccaaccattgtatatttaccagcctttccagttgattctgatccacatccatatttgagtatcattgtagtaacttatttgcgtagttaccttcctctgcttcctgcattat

SEQ ID NO: 19721 - DNA, 120 bp, synthetic construct
  source 1..120: mol_type = other DNA
cctcttgtttctgtgggttttaggagtgctctcaggcaagaaagccacaaacaaaattattacccctttctgttgcaattttttgagcataaactcttccccatcttctggctggttatg

SEQ ID NO: 19722 - DNA, 120 bp, synthetic construct
  source 1..120: mol_type = other DNA
ttccaggaccacgggagggagaaaacaaaatgaacctgaaggtagtaccaggaaagaagtcctcaaaaaacagaaggatcagggtattaaatgaacataggaaccaagctaaaagagcta

SEQ ID NO: 19723 - DNA, 120 bp, synthetic construct
  source 1..120: mol_type = other DNA
tatggtatatatactgtgtatatatacagtatagacagcatatatactgtgtatatatacagtatagacagcatatatactgtgtatatatacagtatagacagcatatatactgtgtat

SEQ ID NO: 19724 - DNA, 120 bp, synthetic construct
  source 1..120: mol_type = other DNA
gtgctagcacaactggatattcacatgcaaaagaatgaagctgggcatctatctaccctttgtatcacatatgaaaattaactcaatgtggatcaaagacctaaatgtaagagctaaaac

SEQ ID NO: 19725 - DNA, 120 bp, synthetic construct
  source 1..120: mol_type = other DNA
ctgggtggtgagtgggttgaaaggtttaccagcgggttcaggctttggtctgcaggattttgtggtagtaaggatagccccagtcccctttaacatgggctgaggttttctttcaatttt

SEQ ID NO: 19726 - DNA, 120 bp, synthetic construct
  source 1..120: mol_type = other DNA
gaggtcctcacttcgcagatgaggaaactgaggcccagagataccttgacttgcccagagcccaaagagcctgggttttggagttttttttttgttttttttgttttttttttaattgat

SEQ ID NO: 19727 - DNA, 120 bp, synthetic construct
  source 1..120: mol_type = other DNA
acttcattcatttgttcaaaatgtgtttattgagcccctactgtgtgcaagctctgttcaaagtgaccacaacaaagtgcctgctcccttgcggtttgtgttctacagggaaagacaggc

SEQ ID NO: 19728 - DNA, 120 bp, synthetic construct
  source 1..120: mol_type = other DNA
agtgagaccccgtctctgcatctctgcatctctgcctaaaggagaaaaaaaaaacagtgcagttgtagccccagctattttcaggctgaggtgggaaaatcacttgagcctaggaagttg

SEQ ID NO: 19729 - DNA, 120 bp, synthetic construct
  source 1..120: mol_type = other DNA
ggggccattgtccatggtggttaaagttgtgggctttggagtcaacgtgctaaatatttaaatccaacttctacttcttactggctgtttcaccttggatgggttatttaacttctctgt

SEQ ID NO: 19730 - DNA, 120 bp, synthetic construct
  source 1..120: mol_type = other DNA
tccatctcaaaaaaaacaaacaactgatgctcgttatctctcgttggccctgcttagagcacatgacaattctgtgctagtcatcgtgtcagggtgggtgcttggagaaagcttctaatt

SEQ ID NO: 19731 - DNA, 120 bp, synthetic construct
  source 1..120: mol_type = other DNA
agagagaaactctgtctcaaaaaaaacaaaaaccagagacagtggttgggcttcagggaagcaggtcgaactgctggggcctcagcctctttgctgtctccagggtgtgcgtggtttgct

SEQ ID NO: 19732 - DNA, 120 bp, synthetic construct
  source 1..120: mol_type = other DNA
gatgttcagtcactgcaaaggacggggacagcggccaccacggagaggtggtgacagagaacacaggcatagactccacaggccgatccgaattcctccagcttgctgtacctcattctt

SEQ ID NO: 19733 - DNA, 120 bp, synthetic construct
  source 1..120: mol_type = other DNA
taaggaacggaactaagagggtcttaggaaccaagctacaggtgtctcagaagtgggattttggcctgtggggctggttgggtctgtgggaactggcctggggattctctgaggaatgtt

SEQ ID NO: 19734 - DNA, 120 bp, synthetic construct
  source 1..120: mol_type = other DNA
tctcactatatttctcaggctggtctagaactcctggcttcaagttctccttgtcttatcctcccaaagtgctgggattagaggcatgagccatcgttactagaagggacattttaaagt

SEQ ID NO: 19735 - DNA, 120 bp, synthetic construct
  source 1..120: mol_type = other DNA
ctgttgagccaacctgatagagcaattgtgaactgactgtaaaaaagttaaggggaaagaaaaacggggggcaaaaatactttcaggggctgttaaaaccttcctgtgcaacatgatgtt

SEQ ID NO: 19736 - DNA, 120 bp, synthetic construct
  source 1..120: mol_type = other DNA
gaacaatgttttttaaatagtgggaaccaacccatcagacagacgttcatgaatcagtttcacgcagaggttctcattgtaattgtacactggcatgcctggggagctttaaaagagact

SEQ ID NO: 19737 - DNA, 120 bp, synthetic construct
  source 1..120: mol_type = other DNA
gagaaaacgggtttaggccctgctgggtaggtgaggagggggagaagcaacagaggtgggggaggtgtatgctgagaccagccctcaccgagctgggatctctaggactcaagccagatc

SEQ ID NO: 19738 - DNA, 120 bp, synthetic construct
  source 1..120: mol_type = other DNA
tgtgtgtactggtggaagttttagttgtgtaagccctgaggtcatgcagctctgagttcaaatccattctccccactttactggctatgtaactttgagtgcatgactttctctatgtct

SEQ ID NO: 19739 - DNA, 120 bp, synthetic construct
  source 1..120: mol_type = other DNA
tctgtctcaaaaaaaaaaaaaaacatatgtaaagttgttcccaaatgccaggtagaccatgctccctccccacccccactcagacccttcttgtggctccccagcccactgtagataaag

SEQ ID NO: 19740 - DNA, 120 bp, synthetic construct
  source 1..120: mol_type = other DNA
gtgccccactatcctggccctaacctctcagcctgtaccctccatcctggccctgacccctctgcctgtgccccccacccaacctggccctgacccttctgcctgtaccccccattccag

SEQ ID NO: 19741 - DNA, 120 bp, synthetic construct
  source 1..120: mol_type = other DNA
ctgcaaaacgagggtgtcaatggtactaacctcataggttgtgatcaggattaagtcagttcataggcgctcggtgtctggctcatatgagtgctcaataaaggcctgagatatatatat

SEQ ID NO: 19742 - DNA, 120 bp, synthetic construct
  source 1..120: mol_type = other DNA
tcggtgggagggagggtgagctggaatggtggataatgggagagaggttcgtttaggaaaatgaaagtctcattagaaagggaatgcgtaatggatagactgagaaaggaatttgaggag

SEQ ID NO: 19743 - DNA, 120 bp, synthetic construct
  source 1..120: mol_type = other DNA
gaaggagcagctgttccaaggcagcctgaggtggggccgggcataaccttgggtccattaccagcgttgcttgaatttcctcatccgtagtaactgaggggcatggcagtggcttggtgg

SEQ ID NO: 19744 - DNA, 120 bp, synthetic construct
  source 1..120: mol_type = other DNA
cgggatcttataacacgctttccacccgtaggattggggcccacaaatgaccagaaaggtgggactcattcgccccctttgcagatggacccatgttggcgccccttagatctgcagtgg

SEQ ID NO: 19745 - DNA, 120 bp, synthetic construct
  source 1..120: mol_type = other DNA
gtcttcccgctgcctggcacacggagagcctctatctcatttcatgtatttatttgttagtaatttctcttattttatacacagacatattaggtcctgggaggccaatctgggtgggaa

SEQ ID NO: 19746 - DNA, 120 bp, synthetic construct
  source 1..120: mol_type = other DNA
tttcagcgcagacatttccagtctaggcaggaggttctcagctggagagaagggtctagagttcccgctgggcttggcttctcaggacccaacatgtctgtggataaaatgagcatgaga

SEQ ID NO: 19747 - DNA, 120 bp, synthetic construct
  source 1..120: mol_type = other DNA
acctcaaatctgatgtattcgtatttgcccccgtgcctttgtggctggggtccctaagtttccctaagcatttgaggtccctgggtaatctcagggttcctagatatagtcctatgactt

SEQ ID NO: 19748 - DNA, 120 bp, synthetic construct
  source 1..120: mol_type = other DNA
cgaggtgctcatcatcgcgtcagacgacggcttcaaggtgcgtctctgcgacaggggcgtggacgccaagacttaggtccctggagcagagggttgggcaaagccaggctattggtggaa

SEQ ID NO: 19749 - DNA, 120 bp, synthetic construct
  source 1..120: mol_type = other DNA
tgttccggaaccttagtgcagagccacatcttggtgggcgcgccaggccttgggtctcgatccccgcccttgagcctccgaccccctggcgtccgccttccgcattgctgcctggaccaa

SEQ ID NO: 19750 - DNA, 120 bp, synthetic construct
  source 1..120: mol_type = other DNA
cagcccctctcagtccactgaaggaccgggtcaggtgaggctgagaacttgaccacttccttttcatacacatccagaaggcggacccggagctggtagacgcagccgcagttctctcga

SEQ ID NO: 19751 - DNA, 120 bp, synthetic construct
  source 1..120: mol_type = other DNA
gaagagaccagattttctatggaagagccacagcctgaaggaggagctggaatgctttggggcagaacctgggtgttttgggaagaaggcattcatcctaagcctgtaggctctgaagcc

SEQ ID NO: 19752 - DNA, 120 bp, synthetic construct
  source 1..120: mol_type = other DNA
cagagaagcttgcaaggtcccaggcaacctggccactttcctgcctgccctgcttccctcttctcctgccaccattcctggaacattccaggcaggtcctaccccggggcctttgttctt

SEQ ID NO: 19753 - DNA, 120 bp, synthetic construct
  source 1..120: mol_type = other DNA
ctgtgttttcacttttcctacatcagctgggactgcccttctgtcagggataaaagctgccccatggagctcaggcaggaattacatcccagacagagctcaaaactgacagaaagagtc

SEQ ID NO: 19754 - DNA, 120 bp, synthetic construct
  source 1..120: mol_type = other DNA
tttcagttacataaattatgactgctatttgctgctgatgacccagtttctctctggaattgctcatatttgagctagtggcggcaaggaatgtaactcaagtgttcttagagaggtggg

SEQ ID NO: 19755 - DNA, 120 bp, synthetic construct
  source 1..120: mol_type = other DNA
tgcactccagcctgggcaacagagtcaggctaagaaaagaaagaaagaaagaaaaacagaaaagaaaaaacaaagagcctctataggctcatgtcactgactcctcatccttctcaaaaa

SEQ ID NO: 19756 - DNA, 120 bp, synthetic construct
  source 1..120: mol_type = other DNA
tgtcaggggtggggtcccaggacagggtgggaggagacagagatactagggagcagacagaaaaagggagagacagaaaacaagacacagagaggacacagagaaagaaatgggagaggg

SEQ ID NO: 19757 - DNA, 120 bp, synthetic construct
  source 1..120: mol_type = other DNA
tttctagatcttctcccttcatctctatctccctcttctgtctctctgtctctctgtctttctgtgtctctctccctctgtcttcacctaagtctatatcacttggtcttctctctctct

SEQ ID NO: 19758 - DNA, 120 bp, synthetic construct
  source 1..120: mol_type = other DNA
tcacatagctcataaggaggagaggctggattgaaacccaggtctataaaaaaggcaaatgctgaggtcctatgttaaagccctttgccaggggctaggctcatttaattcccagtaaca

SEQ ID NO: 19759 - DNA, 120 bp, synthetic construct
  source 1..120: mol_type = other DNA
agtgagaccttagctcaaaaaaaaaaaaaagatctaggtctcagggtcccccatgcctgagacctcagccccctggacatctccacatttgatagaaattggtctccaatttctctaggt

SEQ ID NO: 19760 - DNA, 120 bp, synthetic construct
  source 1..120: mol_type = other DNA
ctcctggcctcaagtgatcctcccaaagttctgggtgtgtgagccacggcaccagaccctctttacccttaatagttaatctcctattaataagtaagtgattctttaattaaactttcc

SEQ ID NO: 19761 - DNA, 120 bp, synthetic construct
  source 1..120: mol_type = other DNA
agccgactctcacatctctggcgttctggcacagaggggtttggcagacatcacagacaagggacatctctcagcaggatggccccttgtctgtgaagctgaggcacagcatggctttgg

SEQ ID NO: 19762 - DNA, 120 bp, synthetic construct
  source 1..120: mol_type = other DNA
acggtaccagatacatagtaagcactatctacacattttctgttattattaatattatttatgtgaggagaacaacagagagagggttccacccctaggagagctcacagtccccaaggg

SEQ ID NO: 19763 - DNA, 120 bp, synthetic construct
  source 1..120: mol_type = other DNA
agaaagtatactttgagtgagggtgggaccctagttcaagcccatgcctgatgctgatctttgtgacctcacctcttaggccctcagtttcctatttattaaatggatataataacaggg

SEQ ID NO: 19764 - DNA, 120 bp, synthetic construct
  source 1..120: mol_type = other DNA
aattcttggggaaatgaacttaaacctatgagctgaggaccagtggtttcagttaaagatttactaggctccaacaaagcctggtaaatccacccctggacagggcacagtggctcatgt

SEQ ID NO: 19765 - DNA, 120 bp, synthetic construct
  source 1..120: mol_type = other DNA
atctgctctcaccgtgaccttccactgtctctgctccagccgcagggtgaagtttgccacctggaccgtgatcaccctggtcacactgactcgcccattaccccaggccacgttctcctg

SEQ ID NO: 19766 - DNA, 120 bp, synthetic construct
  source 1..120: mol_type = other DNA
aaagaaaagaaaaacaaagagcctctactggctcatgtcactgactccttatccttctcgaaaacaggtacttttcctagaccagtttacagaggaatacactaggctcacagaggaaga

SEQ ID NO: 19767 - DNA, 120 bp, synthetic construct
  source 1..120: mol_type = other DNA
aaacagaaagaagggtgttaggggtggggtcccagaacagggtgggaggagacagagagagacactagggagcagacagagaaagggggagacagaaaacaagacacagagagaggacac

SEQ ID NO: 19768 - DNA, 120 bp, synthetic construct
  source 1..120: mol_type = other DNA
ttttctagatcttctcccttcatctctatctccctcccctgtctctgtctctctctctgtgtctctctccctctgtcttcacctaaggctatgcctctgggtcttctctctctctgtctc

SEQ ID NO: 19769 - DNA, 120 bp, synthetic construct
  source 1..120: mol_type = other DNA
ggctgatctctaaccactccctccttttagcaaccagaacatgatataacctttctcttatcttcttgcttgcttagactgcttcatcttccaagaatcgtctggctttgctctttgtaa

SEQ ID NO: 19770 - DNA, 120 bp, synthetic construct
  source 1..120: mol_type = other DNA
ttattatcttactactgcatgccaacctggatgacagagcaagaccctatcaaaaaacaaaacacacacacacaaatcaagagagttgtctgatggtggtaagcactgtgaagacgaagc

SEQ ID NO: 19771 - DNA, 120 bp, synthetic construct
  source 1..120: mol_type = other DNA
actattttcctatctctaggcccctaacaacttctgctgaagctctgtctcttgaacactctacttgtcgttgtttgttttcatttttgagacaagatctcgctctgtcatccaagctga

SEQ ID NO: 19772 - DNA, 120 bp, synthetic construct
  source 1..120: mol_type = other DNA
ccacctagtccccatccccaggcagaacgcgcgcgggttcctcgtcctgggtgttttccttctcctgcccccgcactcggggtcccctgctcaccgccagtgccccggagggcgtcgatg

SEQ ID NO: 19773 - DNA, 120 bp, synthetic construct
  source 1..120: mol_type = other DNA
ggaggaatcaggacagggacgctggagacaggtgagggatacacatggagaggccacaatgaagggagatggggagggaagaccagactggggactctgccttagcctccagttggcagg

SEQ ID NO: 19774 - DNA, 120 bp, synthetic construct
  source 1..120: mol_type = other DNA
ttggggcacctgtctccaggtaggggagcagttggcaggttgtggtaggggcgtcacgggccgggctgcagccagttacctgccccgtggaggttgacgtgaactggaagattcctagca

SEQ ID NO: 19775 - DNA, 120 bp, synthetic construct
  source 1..120: mol_type = other DNA
tgtataggtttaaatgctggtcaaagacatcctacacaattcgctgaaccttctctctaagggttttttcccaagctctgcagacgctatctgggcacaaatcatgcctctgttaacaga

SEQ ID NO: 19776 - DNA, 120 bp, synthetic construct
  source 1..120: mol_type = other DNA
cagtgcaagaacggtgtctgctcctcattattggggttccttagctattcaggcaggcagcagctcccttgagaagacttcctgacccccaggtccccatcatatgctctcatacaccag

SEQ ID NO: 19777 - DNA, 120 bp, synthetic construct
  source 1..120: mol_type = other DNA
aacagcatttcttcattttctcccatttctccttctccctctgtgtttttttttttaactttccccagattgtaaaggcagtcttctgctcttttaaaacaaaatactaaaatgtctcct

SEQ ID NO: 19778 - DNA, 120 bp, synthetic construct
  source 1..120: mol_type = other DNA
aaaggagagaggcagggagatggggcagaggccaagaaaaagacagaaggatgagggaggaagatgcagaaagaggtaaatgtgagatagatcaaaggagatatagagtcagtgagtgag

SEQ ID NO: 19779 - DNA, 120 bp, synthetic construct
  source 1..120: mol_type = other DNA
cagtgaattcagccaccagaacctcaacctcaacacgctctcgctcttctttgctggcactgagaccaccagcaccactctccgctacggcttcctgctcatgctcaaataccctcatgt

SEQ ID NO: 19780 - DNA, 120 bp, synthetic construct
  source 1..120: mol_type = other DNA
agcagcccctggggcgaggtcagccaactgagtccagcaggggcagggtgtggggtccgcaggatctaggaatggagaggaaacagtgggcggggaaagggctgtgaatggcccgcccag

SEQ ID NO: 19781 - DNA, 120 bp, synthetic construct
  source 1..120: mol_type = other DNA
ctttgactagacgcctccccacacacgcacacacctcttatcagcctggttgccctgtcgcgcccgctgataccctcgaccccgcttcccgcttcctctccagcccgcgtgcaggaggag

SEQ ID NO: 19782 - DNA, 120 bp, synthetic construct
  source 1..120: mol_type = other DNA
accccgagcattttttggatgccaatcagtccttcaagaagagtccagccttcatgcccttctcagctggtgagggcaggaatcagagtctttctggcccaatttctacctacattcctc

SEQ ID NO: 19783 - DNA, 120 bp, synthetic construct
  source 1..120: mol_type = other DNA
gggcgccgtctgtgcctgggagagtcgctggcgcgcatggagctctttctgtacctcaccgccatcctgcagagcttttcgctgcagccgctgggtgcgcccgaggacatcgacctgacc

SEQ ID NO: 19784 - DNA, 120 bp, synthetic construct
  source 1..120: mol_type = other DNA
ttcagactcagctctaactgcagagcccaagcctttcatccaactgcctcagtattcttggctggatcaacatccccagcaactccctgaaataataaaaatcaggttagtcattactcc

SEQ ID NO: 19785 - DNA, 120 bp, synthetic construct
  source 1..120: mol_type = other DNA
tggggctaaacccatggtttttagctaggaggattagaattacctctggagctttttcaacatacatgggcctatactttgttggcctaattcattaatgggctccaccaagaactcagt

SEQ ID NO: 19786 - DNA, 120 bp, synthetic construct
  source 1..120: mol_type = other DNA
gagttcatttcttggcactgggggtcttcctctaccctggtgttttaactcaccttgaatccgagtcttccctttccagctttggggttcccttgtcatttctgggtcttgtccatgatc

SEQ ID NO: 19787 - DNA, 120 bp, synthetic construct
  source 1..120: mol_type = other DNA
ctcagtctcttccctgtttctccatctctcacccctgcttcttctccatctgtctctccatcttcccagtgtgtccatctctgtctccctatgactttctccccatctctgctatccgtc

SEQ ID NO: 19788 - DNA, 120 bp, synthetic construct
  source 1..120: mol_type = other DNA
ctgggtctccatgcctccctgtctcttggttcccacgtcgtctccacttctgtgtccccacgtctctgtgtccccatgtctctgggtctccacatggctctgttttaatgtctagggtct

SEQ ID NO: 19789 - DNA, 120 bp, synthetic construct
  source 1..120: mol_type = other DNA
acgtgacacacccagacatgacgaactcacagacatgacgcgctcacagacatgatacgctcacagacatgacacacccagatgtgacacactcacagacatgacacgctcacagacata

SEQ ID NO: 19790 - DNA, 120 bp, synthetic construct
  source 1..120: mol_type = other DNA
agagagagagggagaaaatcagctgcccacccagaaaccttagttgaaggctgggagctgatgctcggggccccataaatgctaagggctgggccggactctcagatactgagagaggct

SEQ ID NO: 19791 - DNA, 120 bp, synthetic construct
  source 1..120: mol_type = other DNA
tacactggaccctgagtcccacgagggcggggactggcctgctgaatcatggtgctaagtcacatctgaagattctcaaacatctgctgaatgagtgaatgtgtgggaggactttgggtg

SEQ ID NO: 19792 - DNA, 120 bp, synthetic construct
  source 1..120: mol_type = other DNA
tcaaacgttatccaaccaccttgtctaaaacagcatccacgcaccagacacttttatctccttaccttgcttcacctaacacgatattaatatatcatacgctgtcagtttcccccacta

SEQ ID NO: 19793 - DNA, 120 bp, synthetic construct
  source 1..120: mol_type = other DNA
atctattggtctaggctggcgccggtcagtggggttgtgatcgctgattggctggctgctccagctgttgcaggtccattcaccattttgtgtgttggagtaaaaaaaaaagggagaatc

SEQ ID NO: 19794 - DNA, 120 bp, synthetic construct
  source 1..120: mol_type = other DNA
gcttggaaaaaactggagccagatctcagtccccaacatggtagtctagtgggtcagcgggtattaggtggtgatggctgcccaacttctgggcatttgggtgccagccccgggacgccc

SEQ ID NO: 19795 - DNA, 120 bp, synthetic construct
  source 1..120: mol_type = other DNA
taagtggtgtaccaactgccccgaaggtgcttgcattggacgcaatgggtcctgcacctctgagaatgactgtcggatcaaccagcgagaggtcttctgggcagggaactgctccgaggc

SEQ ID NO: 19796 - DNA, 120 bp, synthetic construct
  source 1..120: mol_type = other DNA
tatgtcatcagaactttccaccttttcatggttgcctctttttctcagtgtatctgttgtggcagtcattaataagagcctgtcaggtgagatttaggacagtgttttctaattctgcaa

SEQ ID NO: 19797 - DNA, 120 bp, synthetic construct
  source 1..120: mol_type = other DNA
gatctgctggaaatctggtcctcatggaccatgtgtgtttgatggatatgagacaaatttgaagagaagttttgggaatattttctttcactggacattctactctctgattccctggat

SEQ ID NO: 19798 - DNA, 120 bp, synthetic construct
  source 1..120: mol_type = other DNA
agcaatcttttgtagttttcagggtataatcatttgactttttggttaaacttattccaaaatattttattccttttgatgttaatgtgaactgaaattctttccttaatttcctttcgg

SEQ ID NO: 19799 - DNA, 120 bp, synthetic construct
  source 1..120: mol_type = other DNA
gaacttgtctgacaatgataagagtggttggagggacttcctatccctgtcccatggtcttgtccacaggtcagcctcacaaaggggaagagcccttgatgggaatacagtggaagctca

SEQ ID NO: 19800 - DNA, 120 bp, synthetic construct
  source 1..120: mol_type = other DNA
aagacttaaaaattaccagtgcctgggtccctctccagacctttgaactggaactaatgggtggggcttgagcatccacttttagaaatgttttccagtgattccaatgtgtagctctat

SEQ ID NO: 19801 - DNA, 120 bp, synthetic construct
  source 1..120: mol_type = other DNA
cagagtcaagcctggaggtcagttcagtcatcagccagtggaggcagaaagtggggcagtgttttgcaggtgtttcatgatgacttacttgaaccagtgacctctaaagatagagcagag

SEQ ID NO: 19802 - DNA, 120 bp, synthetic construct
  source 1..120: mol_type = other DNA
tgggagtttccactttgcagaaaacagagagaagattgccctgtgtggcacctttgattcctccaaaggcacttttcaatcagagttggcatttcccacctgtcagcccacccaagtcct

SEQ ID NO: 19803 - DNA, 120 bp, synthetic construct
  source 1..120: mol_type = other DNA
ttgagtaataataaacctctgtcctcctgtttggcagacttggagtcgttaaaatctttcttgactagaaaccaacatttcaataattttttttttttttttttgtgcaggaggccagaa

SEQ ID NO: 19804 - DNA, 120 bp, synthetic construct
  source 1..120: mol_type = other DNA
tttttgcactgactctgacggttgaggcagttgatttagttctggagtgcagactaatcagctgaccatttgctctcactcctctgaggtttagaagcctaagaagagaggatttgagcc

SEQ ID NO: 19805 - DNA, 120 bp, synthetic construct
  source 1..120: mol_type = other DNA
tgtgagagttctcagggccctccacacccttggtgttttattttcccccaattgttgaggattttgctgaggacagtgtttcatgtcctgcttatacttttattagaagtgtcatctgat

SEQ ID NO: 19806 - DNA, 120 bp, synthetic construct
  source 1..120: mol_type = other DNA
acctatgtattggggtgaaaagatgggtcctgagaaggtctcttcaatcctcagccttgaagacacacaaacacacacatacaaacacatacacacactaaaggggcgtgagtgtatgtg

SEQ ID NO: 19807 - DNA, 120 bp, synthetic construct
  source 1..120: mol_type = other DNA
aaatgcagaactgactggtggaaagtgtgggaatgaactgctggaaatctggtcctcatggaccatgtgtgtttgatggatatgagacaaacttggagagaagttttgcaaatattttct

SEQ ID NO: 19808 - DNA, 120 bp, synthetic construct
  source 1..120: mol_type = other DNA
ttctctcaccacttttctagcttgatgattagtttttggtcaattccatactggccatgctgcactcatatattttttaaagctttgggatgtgagaaaggctgattgctattttctttg

SEQ ID NO: 19809 - DNA, 120 bp, synthetic construct
  source 1..120: mol_type = other DNA
gctagaaggggatccgctgagcacagaggggctgttacggagtccctcccaccctcgctcgctatcccgaccctcgctggctccatccctcccctgactgctccctgaccatcgccccgc

SEQ ID NO: 19810 - DNA, 120 bp, synthetic construct
  source 1..120: mol_type = other DNA
tgttcattctcccttcctcttttatggattacacttctttattttcccacatccagatcccatgatgggagctgcagaaggcccctttgggaaggctgagcaggttgactcttgaggcca

SEQ ID NO: 19811 - DNA, 120 bp, synthetic construct
  source 1..120: mol_type = other DNA
agagaacatcagagagaaaatcaaggggactttgggtgtgacagagaaagcaagagttaaaggaggacactgagagggtccccacttacccatttaggtgctgccatggaagagagtgcc

SEQ ID NO: 19812 - DNA, 120 bp, synthetic construct
  source 1..120: mol_type = other DNA
ccatttatctttccttttgactgatgctgctgttaaggatctggccctggtctctgggaccagatgacactgataacccagaaggtatttcagaaacaaatcagacgcaacacatgccac

SEQ ID NO: 19813 - DNA, 120 bp, synthetic construct
  source 1..120: mol_type = other DNA
aacaacaagacgttggggaccaagtgcaggagagaagaggcttcagggtgatggaaccgcttataagaagccgcagcagtgggagggctgggtgcaaggatgcaggttactaaaaggggc

SEQ ID NO: 19814 - DNA, 120 bp, synthetic construct
  source 1..120: mol_type = other DNA
gccatgattttgattttgtcatctgtgaagtatgcaaatgagcagccctccagggtggcatcggttctgcaggtcgcatgtgttggtggaagctgggggctcagtctaagagtccctgca

SEQ ID NO: 19815 - DNA, 120 bp, synthetic construct
  source 1..120: mol_type = other DNA
ccaccattatgacacacggaaacttggctcaagaacccactgattggaccacatcgaataccgagatgtgcgaggtggggcaggtgtgtcaggagacgctgctgctcctagatgtaggta

SEQ ID NO: 19816 - DNA, 120 bp, synthetic construct
  source 1..120: mol_type = other DNA
ttgtggcctcctatacccacttctgctcctcggacctgtgcaatagtgccagcagcagcagcgttctgctgaactccctccctcctcaaggtatgggatccagggccgtggagaaatgag

SEQ ID NO: 19817 - DNA, 120 bp, synthetic construct
  source 1..120: mol_type = other DNA
tttccacgtgctctggcccatgcctctagtgccacccatttctcagaaagaaaaactaaggagagatggaatgtggtccttcgtgtccagtctcccaatgtagggctgtgggcagagact

SEQ ID NO: 19818 - DNA, 120 bp, synthetic construct
  source 1..120: mol_type = other DNA
acagcaaagtctgaaaggaagaaatcaaggttaaaactaaggggcctaggtagagttccaggccccactggagacccagaaatcctaggaacctttcctcttcaggaaactagagttttg

SEQ ID NO: 19819 - DNA, 120 bp, synthetic construct
  source 1..120: mol_type = other DNA
cctatctgctgaggtttaggcaagttcaggttgcccatgattttgacaaactcctcacagctgagggtgagccgagggttcagagtcctctcctcctccacggtggacactgtgaaccct

SEQ ID NO: 19820 - DNA, 120 bp, synthetic construct
  source 1..120: mol_type = other DNA
gtgccttctcctcggggtttgcctgtcactgccccctgtgctcgggcagggactggggctgtggctggggtacgagttggagctggcactggagaagacaaagagtagattaggttagca

SEQ ID NO: 19821 - DNA, 120 bp, synthetic construct
  source 1..120: mol_type = other DNA
tgtggaaacaagggatctagttagctcacatttaggtctcttgggaacagatggcgacagctgggctggtggtttgctgggggtcttcttttcttcttggttcaaatccaacttcctctt

SEQ ID NO: 19822 - DNA, 120 bp, synthetic construct
  source 1..120: mol_type = other DNA
gttttttctgtcctttgcatctaaggcactgggtaaacattagaggttagacaaggaccaaagagctgccgcctactggaagaactttgtctttcctccactctcccttcaccaaacctg

SEQ ID NO: 19823 - DNA, 120 bp, synthetic construct
  source 1..120: mol_type = other DNA
cccggggtcttggggctcagccagcttcctgcccagggtcccccacctcgcagcacgcacagggcagccactgtggcttgcaggtcgtcagcctgctctgctggctctgggacttttgct

SEQ ID NO: 19824 - DNA, 120 bp, synthetic construct
  source 1..120: mol_type = other DNA
ttaaaatatttttccccacaaacagctggtcacaattagttagctccctgttggccaggcttcggtctctatatactatttcccattaatgtgaactagggtgccttggagaaatagcta

SEQ ID NO: 19825 - DNA, 120 bp, synthetic construct
  source 1..120: mol_type = other DNA
gagactgctcactaaaacagaagttttatcagctgatacttacatacgatgtgcaatacacttcgataaattcttctgttttctgttctattaatctattttttttctttctttctttat

SEQ ID NO: 19826 - DNA, 120 bp, synthetic construct
  source 1..120: mol_type = other DNA
gcctctggcctttgtggagaaacttattgtataaaattgccactttaagcactgtggaaacaccgaagattaaaaaacaaaagcccaaagccatgtttctgccttctcagatagtgcttc

SEQ ID NO: 19827 - DNA, 120 bp, synthetic construct
  source 1..120: mol_type = other DNA
gaggagagtttaataaacagacggcttacaatggtgttggctcggggtaaggaaatcacaatggataaggctctatcctggggagtgacagggaggtgccattataatacctgggcctta

SEQ ID NO: 19828 - DNA, 120 bp, synthetic construct
  source 1..120: mol_type = other DNA
aaaaaaagaaaaatttagaaatgggaaaaaataaataaataaataaataaacttgaccgaaagaaaagaaagaaaagaagagaagagatgagaagagaagaacaagaaagaaagagagag

SEQ ID NO: 19829 - DNA, 120 bp, synthetic construct
  source 1..120: mol_type = other DNA
atcaactgggagcttctagagtcagaaactatgcctcctccatcagactaggagctcccagagtcaagatccaggtctcctccatcagactgagagctcccagagttatagaccatgttt

SEQ ID NO: 19830 - DNA, 120 bp, synthetic construct
  source 1..120: mol_type = other DNA
tgagtccatgtccctacagcagggccaggtttcccccattagctctcagacactggggatgagatcattccccaagtctggaatcttgcctcccccagcagacagagcattctcagaagc

SEQ ID NO: 19831 - DNA, 120 bp, synthetic construct
  source 1..120: mol_type = other DNA
attgtgtggtatatgaattacttctcaataaagccacagagtgaaggagctggggtagataagtggggagctatttagatagagtcactgaggacggcttttaggaggagatctgaaata

SEQ ID NO: 19832 - DNA, 120 bp, synthetic construct
  source 1..120: mol_type = other DNA
tccatcaggctgcataagttcaaatctgggccacaacttactacaatttactagccatgtaactttggccaaatgactaaacagctctgtgcctcagtttccctgttggtaaaatgatga

SEQ ID NO: 19833 - DNA, 120 bp, synthetic construct
  source 1..120: mol_type = other DNA
ctgcactcccgaccttagcttattgatcccacatttccatggtgtgagatcctctttactctgggcagaagtgagccccccccttaaagggaattcgatgcccccctagaataatctcat

SEQ ID NO: 19834 - DNA, 120 bp, synthetic construct
  source 1..120: mol_type = other DNA
tgaggatttccgcggggggaattgggcatcgggataaccccaccctgaaaaacaaatggacagaaccctacgaaggttcccacggcaactgaaaacaagcctctaggcctggcgttcaag

SEQ ID NO: 19835 - DNA, 120 bp, synthetic construct
  source 1..120: mol_type = other DNA
tctgaactcatctcaaaatgttacttttcttcaacctttccactctacactcttttccccgcaacttcttttagtttcccaaactggccaagctttcttgcctccaagccattgtacatg

SEQ ID NO: 19836 - DNA, 120 bp, synthetic construct
  source 1..120: mol_type = other DNA
agagttgatagaaattgggggagggtctggagggatggaaggaaaggaggaaaagtgcgaggagaggaggtgtctgcaggagttagagaatgggggcacgggaggataggaaatggaggg

SEQ ID NO: 19837 - DNA, 120 bp, synthetic construct
  source 1..120: mol_type = other DNA
cccgtcctaggaatggatgtggggatggtcgctttgtaatgtgctggttctctttttttttctttcccctctatggcccttaagactttcattttgttcagaaccatgctgggctagcta

SEQ ID NO: 19838 - DNA, 120 bp, synthetic construct
  source 1..120: mol_type = other DNA
gagacagagtaatggagggagagactgaggcacgggagaaatgaagagacggggaggaatagagagagggagagactgggggaggaatgaagtgatggaggagaaaatagagggacaaat

SEQ ID NO: 19839 - DNA, 120 bp, synthetic construct
  source 1..120: mol_type = other DNA
ccacatgttgagaagtttgtgttgtaccctagatttttatcctagattgcagggactgggatcagccttcctgcctgaggcttacaggcttctgactctgaaaagtattctttcttaggg

SEQ ID NO: 19840 - DNA, 120 bp, synthetic construct
  source 1..120: mol_type = other DNA
tgtgtgtgtgtttgtaggggggtgtgtatgtggtggatgtagtacacctgtattgtgctcgcggtctgtttctttgttggtggatctttagcctgtaagatccctcacagtggtggcacc

SEQ ID NO: 19841 - DNA, 120 bp, synthetic construct
  source 1..120: mol_type = other DNA
cattttacagatgaggctgaggaaagtaaaggcaaaggtgacccggcactgccccaccccatggtgcttgcccccatgcagccctcaggcctgcggcgctttgacgatggggcatgtgag

SEQ ID NO: 19842 - DNA, 120 bp, synthetic construct
  source 1..120: mol_type = other DNA
gggaagagcaggtccccaagcccccccaccaccacaccccctaatcccgacgtgcccattaatgttgttaattgcagcggttcagtctgacccaggctgatcctgggagagggaaaatga

SEQ ID NO: 19843 - DNA, 120 bp, synthetic construct
  source 1..120: mol_type = other DNA
ggggctattaaagtaacaagtagatctgaggaaagcaggttcactgaaagatcagtttgccaatgactggcgggccagatgcaccatatttgccaacacttgtttcttcttaacaatttt

SEQ ID NO: 19844 - DNA, 120 bp, synthetic construct
  source 1..120: mol_type = other DNA
atggtgttaccttagctaactaactctcctccatgttgcctgtctttcccagacttgtccctccttttccagcgggactcttctcatccttcctcatttgcaaggtgaacacttccttct

SEQ ID NO: 19845 - DNA, 120 bp, synthetic construct
  source 1..120: mol_type = other DNA
cagaacagacacaaatctctggcctcagggagctgacattttggtgaagaagaccagcaatacattaggacaataaggaaaaggcatagtagatcagatggtgcctagtgttctggagag

SEQ ID NO: 19846 - DNA, 120 bp, synthetic construct
  source 1..120: mol_type = other DNA
attgggggagggagcagggaggaagaaggaagaggaagagaaggaggaagaggagacacagagaaacagaaagagtgagacaaaatgacagggacagggagatgcagcaaagagagacaa

SEQ ID NO: 19847 - DNA, 120 bp, synthetic construct
  source 1..120: mol_type = other DNA
ctcaatacctgtgtttctccagagctaattttttcccctctcccgtcaccgtttctctctctcctttcccttgtccttctcttagtttctatttccctcttgtctctgttcacctctctc

SEQ ID NO: 19848 - DNA, 120 bp, synthetic construct
  source 1..120: mol_type = other DNA
actttcatcaacttgcattcccgggaatcagagaaagctgggaacagctcctcatacttttggacagccagctgggcagcagggaagggagaagatgagttagtaacaagagggtcctca

SEQ ID NO: 19849 - DNA, 120 bp, synthetic construct
  source 1..120: mol_type = other DNA
agtgaggtttgggaccccctaccccaacaaaaaaagagggtaagggaactccacggtcctgagctgtaaattcccaccattcagggatcaggtcttcttttccattgtgtattgtatgtg

SEQ ID NO: 19850 - DNA, 120 bp, synthetic construct
  source 1..120: mol_type = other DNA
atggatggaaggatggagggatgggtaagtagatggatagatgaaggatgggtaggtagatggatggaaggatggaggatgggtaggtagatggatggaaggatggaggatgggtaggta

SEQ ID NO: 19851 - DNA, 120 bp, synthetic construct
  source 1..120: mol_type = other DNA
tcagtcttcacctgggcagtgaatatgggtgctgagaaaagcccagagtggccaatgcagaggatgtttattgagcacctactgtgtgcctgactatgccggtcccatgactaagtgcca

SEQ ID NO: 19852 - DNA, 120 bp, synthetic construct
  source 1..120: mol_type = other DNA
aaaaaaaaaaaaaaagaacagtacctggcacaaattaagtgctcactgaacatgagctgtggctggttataactctgagatggtcctggttgccctttttctgtccggtgtctttcttcg

SEQ ID NO: 19853 - DNA, 120 bp, synthetic construct
  source 1..120: mol_type = other DNA
cacgtctgggcaggcaggaaggatgggaagggagagatgaagagggacagggattccgaggcagtgagacagcgacgcagggagacacaaggcctggagatgaggcagagcctgggcagg

SEQ ID NO: 19854 - DNA, 120 bp, synthetic construct
  source 1..120: mol_type = other DNA
cttttggggtcggggccagcctgaagcctctccctgtgctcaacagccccccatcccccaccccaccaaaagagggccccggctccaaggcctggagaatggagggaagagggagggaaa

SEQ ID NO: 19855 - DNA, 120 bp, synthetic construct
  source 1..120: mol_type = other DNA
gggccccgagtgaccaatgccggtgagtctacccactcctcctggctcctgggctgcctgccttgtccagccactatccctccttcctggatgaccttgcaacctcctctttggtacctc

SEQ ID NO: 19856 - DNA, 120 bp, synthetic construct
  source 1..120: mol_type = other DNA
gagtggcctcaaaggaccaaagaggaggctgtggggtcatccaggagagagggatggtgactggacaaggcgggcagcccgggagccgggaggagtgggtagactcgctggcattgatca

SEQ ID NO: 19857 - DNA, 120 bp, synthetic construct
  source 1..120: mol_type = other DNA
tcccaccccaccctcctccccctactttcccctccctcttccctcccttctccaggcctgggagccgggggccctcatatggtgggtgcggggtgggggtgaacaccgggagagttttga

SEQ ID NO: 19858 - DNA, 120 bp, synthetic construct
  source 1..120: mol_type = other DNA
taccttgcataggaagaaatatagaaaaagaaatacttaaaataacagggaagatgcaagctgaggaatttcgcgtcgtttccacgaagagaagcatcagggagcccatgggcagtcaca

SEQ ID NO: 19859 - DNA, 120 bp, synthetic construct
  source 1..120: mol_type = other DNA
tgtgtaagcttaaggcaaatgacttcatgactcagagcttcactttcctcacctgtaaaatgggaatgaaagtcactgacctcatgagttgttctgaggtgtaaataacatcaggtgtgc

SEQ ID NO: 19860 - DNA, 120 bp, synthetic construct
  source 1..120: mol_type = other DNA
tcccaaaggagcaccacatgaatcagacacgtaaagtttttaggacaatggctggcttcaagccagtgtgcagtccacactatcattagggattcatggcaaagtaggatgcttaccttc

SEQ ID NO: 19861 - DNA, 120 bp, synthetic construct
  source 1..120: mol_type = other DNA
tacccaaatgcatgagctcacttcccagggctgtctctctgtccctttcaatgctgctgattgtcgccaaaacacaggagggagagacttgaccatttctcccaaccaagactctgctta

SEQ ID NO: 19862 - DNA, 120 bp, synthetic construct
  source 1..120: mol_type = other DNA
ctaaattaagatgtccaaacaaatatatcccacaatgttttcagaacaaaagttcccatattggtaggtggaattcctggatgcctggacacaggcatcaaatcggcagggtccaaacat

SEQ ID NO: 19863 - DNA, 120 bp, synthetic construct
  source 1..120: mol_type = other DNA
ctgcatatttaatttattcatgtttaattattatgcttctcacagcctgcgaaaaatttaatttagctatcctctgaactacaagcttttcctttgttataacgaacacttttcttttac

SEQ ID NO: 19864 - DNA, 120 bp, synthetic construct
  source 1..120: mol_type = other DNA
gataaatgtggtagaggcggtgtggatccttgaaaacagagaaatgccctaatgtgacagagtacagaaatactacaaaaacacacttgtagaaagaacattctgcatataatcaggcat

SEQ ID NO: 19865 - DNA, 120 bp, synthetic construct
  source 1..120: mol_type = other DNA
aaatatgccctgagatacctgggttctccacgaagggtgctgtcacccccaaacctgaaagggattattcggtttcagacctcccaggggctctgatctcaatggccgcaccccctagtc

SEQ ID NO: 19866 - DNA, 120 bp, synthetic construct
  source 1..120: mol_type = other DNA
cacaacctcattccctgggacccacctgcacccccatcctacgtccccgacttctggggcccctgacagcccattcaccccacaccctgactcctaagaggctcagcagtcccctcaccc

SEQ ID NO: 19867 - DNA, 120 bp, synthetic construct
  source 1..120: mol_type = other DNA
agtgactgacacatagcgagtcttgctgctgttgtgttaatttcctctgaccccagagcccatgcactgaacttatgcatcctaaaataaggcagtttgggcacaccctgcagaaggaag

SEQ ID NO: 19868 - DNA, 120 bp, synthetic construct
  source 1..120: mol_type = other DNA
acccacacccggctcctctgcctcagtgggggccagagaggtggggtggagcctctaccttcatacacgtgttgtagagtgagatgtagttggtgaagaggtccagatatcgggcagtga

SEQ ID NO: 19869 - DNA, 120 bp, synthetic construct
  source 1..120: mol_type = other DNA
aaaaaaaaaaagaccagcctgggaaaaatagtgaaaccccatctctactttaaaaaagaaggaaagaaaaggggactctagggcctcaacaccaagctgaaagagagtctggaaccttat

SEQ ID NO: 19870 - DNA, 120 bp, synthetic construct
  source 1..120: mol_type = other DNA
ggtcagggctggactttatgctaaaggcggtgagaagccttgaggtgtggagattttacgtaaggaagggtatgatctgatttctgtttttgtttgttttgagacaggatctcactctgt

SEQ ID NO: 19871 - DNA, 120 bp, synthetic construct
  source 1..120: mol_type = other DNA
gtataaacatgggtgagaccgtttacataatttttttccccacacgctgtctttgatatctgtggcattttacactcacagcacatctaggttcagagtgaccacatttcaagtgatcca

SEQ ID NO: 19872 - DNA, 120 bp, synthetic construct
  source 1..120: mol_type = other DNA
ttcctctctcgtccccagaactgctttgaactttacatccccaacaacaaggggcagctcatcaaagcctgcaaaactgaggcggacggccgagtggtggagggaaaccacatggtgtac

SEQ ID NO: 19873 - DNA, 120 bp, synthetic construct
  source 1..120: mol_type = other DNA
tagaaagaggaagattggtttccggaagaagtctgttctttaatacccaaatgtttccccaccgcgcctagaatcagaccactgagaaaacaggaagtattctgtccctttaatagcttt

SEQ ID NO: 19874 - DNA, 120 bp, synthetic construct
  source 1..120: mol_type = other DNA
aaactgttattacatcatcatcaccaccaccatcatcatcaccactatcaccaccatcatcaccactatcaccatcaccatcatcaccactatcaccaccatcatcaccactatcactat

SEQ ID NO: 19875 - DNA, 120 bp, synthetic construct
  source 1..120: mol_type = other DNA
atggccctgacattttcagcctccttaaccatgctccaacaccgcaatttctcccaaatgtaccaggctctactcccgtttggggtttggattggctgtctccactcctgccatccccca

SEQ ID NO: 19876 - DNA, 120 bp, synthetic construct
  source 1..120: mol_type = other DNA
caaggaggaggagatgcagacagggacagggagagaggccggccgccatgccacctgcagggagtagtggaggctggaggaggctgggtgcagcgtgaggttctggaagggctggattcg

SEQ ID NO: 19877 - DNA, 120 bp, synthetic construct
  source 1..120: mol_type = other DNA
tttccaacttatcttatttgcttttcaccacaactctgggaggcagaggatatattgcctattttataaatagtaagagcatagaaggcccagggagagtaaagtcccacccagctacgc

SEQ ID NO: 19878 - DNA, 120 bp, synthetic construct
  source 1..120: mol_type = other DNA
ttcacagcttcccaacaagtcatgtccactctgagcacccactctgggcagtattgggctgggtgttcactgatgtgattttcatttcatctttgctgcatatgtgggaaaaggtaaaaa

SEQ ID NO: 19879 - DNA, 120 bp, synthetic construct
  source 1..120: mol_type = other DNA
catcaagctggaaaattttaaggtctgtttctttcccaatgtagagtaaagttgcgatgtcatcccccgaccccacactgttttctaccagagttctcatactgtgactctgtataaaat

SEQ ID NO: 19880 - DNA, 120 bp, synthetic construct
  source 1..120: mol_type = other DNA
tagagcagctgggccaaccctgaggtctctcagcatccagctctgttctttttctgcctgaccagttcctgggtataagtctcaggcccggccagtccggctgaggagtgtgcagacaca

SEQ ID NO: 19881 - DNA, 120 bp, synthetic construct
  source 1..120: mol_type = other DNA
cgggttcccgtgccgcgtccaacacccctcactccctgtctcactcccccacggagactcaatttactttccatgtccacatccccagtgcttgcggaagatatcccgctaagagagaga

SEQ ID NO: 19882 - DNA, 120 bp, synthetic construct
  source 1..120: mol_type = other DNA
gaagcgggggtcatcacaggtcaaggggtggtccttgggacccccgcagtcagtggtgctgcggcggcagagtgcacattgacagctgagagccacggcgtaggagaccacggggttcac

SEQ ID NO: 19883 - DNA, 120 bp, synthetic construct
  source 1..120: mol_type = other DNA
cttgagaacatggtctacagaaggcctttcagtatctgggagctggggttcaaatgagaaatcttacttggtgagagtgggcaggggtcggcttagaatattttgttttgagataatgag

SEQ ID NO: 19884 - DNA, 120 bp, synthetic construct
  source 1..120: mol_type = other DNA
agctgtagcacctccttcacctctgagctctgctgggaaccccaggcttcgggggccactgtggaggacacaggtggccccctctttcctgacatcgcaggagagggagcagcaaccggt

SEQ ID NO: 19885 - DNA, 120 bp, synthetic construct
  source 1..120: mol_type = other DNA
atccctgtcttggctctctttgtcccctccgccccacctatcttctctctgagggggtcccgttctctctgcgtctctttgtctctgtctccctctgtctccgtgtccctctctctctgg

SEQ ID NO: 19886 - DNA, 120 bp, synthetic construct
  source 1..120: mol_type = other DNA
ccgggtctctgtttccccttttctctgggtctctgtccttgtctctctgggtctctgtccctgtttctccgggtctctgtccccgtctctccgggtctctgtttcccctttactctgggt

SEQ ID NO: 19887 - DNA, 120 bp, synthetic construct
  source 1..120: mol_type = other DNA
cccagatgctttcattatgttccagcatctgctttcctctgttggatccatccatccattctttcatctttccatccatccacatgtacagatcgatctttccatctctttacctaccat

SEQ ID NO: 19888 - DNA, 120 bp, synthetic construct
  source 1..120: mol_type = other DNA
tgtccatccacacatccactgacaattcctgagaattccatccgctcattcctccatccatccatcttctcacctgtccatccacacatccactgacaattccattcactcattcctcca

SEQ ID NO: 19889 - DNA, 120 bp, synthetic construct
  source 1..120: mol_type = other DNA
gtttacttcacggttcgttacacagtgcattgttttatacactttttttttttttttgttagaggaagggtctcgcccagctgatttcaaactcctgggttcaagcaatcctcccacctc

SEQ ID NO: 19890 - DNA, 120 bp, synthetic construct
  source 1..120: mol_type = other DNA
cagaattaatggctctgtctcctgtcctcacccatcacttcagttaccagttagcacaagtttttggctgtctcattctcctttccttccccctccaaaattgaaaacttaatgaaacaa

SEQ ID NO: 19891 - DNA, 120 bp, synthetic construct
  source 1..120: mol_type = other DNA
agtgttctcagagtttccagaggaactcaattgtgatgaagtcacaatgattaccctagagtaatgccgagggccatgaaggctaaaggttcgggtatgaattacgggttttaaagaaga

SEQ ID NO: 19892 - DNA, 120 bp, synthetic construct
  source 1..120: mol_type = other DNA
tgcgccgtgggctctgatccaactcaagttcccagtgactttccggaggccgggaacagggaaaactttttccaatacagtcagatcccgcctccccggaggctccatgtcctccacagc

SEQ ID NO: 19893 - DNA, 120 bp, synthetic construct
  source 1..120: mol_type = other DNA
agaggcatttacagcaccagagagagtggagccgggtggggtggggtgcagaaaaaggaacaggataatggacaaggctcgaccagggagaacagcgccgtcggagcccacggcagaaaa

SEQ ID NO: 19894 - DNA, 120 bp, synthetic construct
  source 1..120: mol_type = other DNA
catttttttttttttttcctaatgtagccatggggtcttgccatgtggcccaggctggacttaaacacctagcctcaagggatcctcttgcctcatttttttcttgcaggagtaattggc

SEQ ID NO: 19895 - DNA, 120 bp, synthetic construct
  source 1..120: mol_type = other DNA
cgggaatcctgaatgtcctcagtggccctgcgtccctggtgcccatcctggcctcccagcctggaatccggaaggtggccttctgcggagccccggaggtaccttcgggacaggggtcgt

SEQ ID NO: 19896 - DNA, 120 bp, synthetic construct
  source 1..120: mol_type = other DNA
tgcacaggtgaggcagggggtagagacttgagggtgtcaggggaggaggggcctggagacccagctcctgggtccaagggaggagggagctgggcgtggacaactgggtccgaggaagga

SEQ ID NO: 19897 - DNA, 120 bp, synthetic construct
  source 1..120: mol_type = other DNA
tcggtctcagcaggaagggaccagaagtcgacttctagatcatttctctccctaggtgttccaggctggtgatgtgccttcggaacgcccattctatcccccaaccttggtctccaacct

SEQ ID NO: 19898 - DNA, 120 bp, synthetic construct
  source 1..120: mol_type = other DNA
acaatgtcaggatggggcagagatgaggggagatggacgggagaacagatggacagatgacgaggaaataggaggggagatggacagatgtgaggggagatggataggagaggagacgga

SEQ ID NO: 19899 - DNA, 120 bp, synthetic construct
  source 1..120: mol_type = other DNA
cctgcagacctatctcctcctgctgctgctgctgagctcgggactcagtgggacccaggactgctccttccaacacagccccatctcctccgacttcgctgtcaaaatccgtgagctggt

SEQ ID NO: 19900 - DNA, 120 bp, synthetic construct
  source 1..120: mol_type = other DNA
ggtccccagtgttgagaacagtgtctgccacacaggtggtctcagaggaaattgggataacgagcctgcgtcctgtcttttctgcagagcgggcagtacctgggcgtctgctcaaaacca

SEQ ID NO: 19901 - DNA, 120 bp, synthetic construct
  source 1..120: mol_type = other DNA
tttgtctctgagtgggaaggggatttggggacccagactccatgaccccaccttggccccagtgctttgtgaggctgtggccttcctgataccatgtcctcgtccatcagacgagctgta

SEQ ID NO: 19902 - DNA, 120 bp, synthetic construct
  source 1..120: mol_type = other DNA
cttaaaaaaaaaaaaaaaagaattctggggtagatgggatggttaggatagggctgagaattctgggatagatggttaggatggggccaataattctgggatagatggttaggatggggc

SEQ ID NO: 19903 - DNA, 120 bp, synthetic construct
  source 1..120: mol_type = other DNA
atagatggttaggatggggccgagaattctggggtaggtggttaggatggggccgagaattctggggtagatggttaggatggggctgggaattctgggatagctggttaggatggggct

SEQ ID NO: 19904 - DNA, 120 bp, synthetic construct
  source 1..120: mol_type = other DNA
catggttatggtgtttcttatatcttcatgggggatggcatgatcaccttccacatctccagcaaaaaatcaagcacaaaaacggtgagacaaacgtgtatacccaccaactccctcttt

SEQ ID NO: 19905 - DNA, 120 bp, synthetic construct
  source 1..120: mol_type = other DNA
agttgacataagtggaggtgaggatcctgtgggcagggattggatggtcatgtcttctttgcctccccccactgcatggagtagattttgcctggagaatgaatgaatgaatgaatggga

SEQ ID NO: 19906 - DNA, 120 bp, synthetic construct
  source 1..120: mol_type = other DNA
gacggtcatctgtgtgtttaactgggctttcaagaaatgtccagccccttctttctcctggacgggggctgccctctcccctagaagaaccagaccaagcacctcccacttctcagtgct

SEQ ID NO: 19907 - DNA, 120 bp, synthetic construct
  source 1..120: mol_type = other DNA
gggataacattgtagacattgttctgcaacttgtttttttgtttggcttggtttggtttggtttccacttaacaacatgtcttggagatgcttccctcttcccctcacaatagacagatg

SEQ ID NO: 19908 - DNA, 120 bp, synthetic construct
  source 1..120: mol_type = other DNA
ttctctccccattctgcacccagaagtgttctgggtatgccctccgttttcctgattgaatttttaaaaaaaaccctaggaccaaggagggaggcagagatgttgatgggggtgaggatg

SEQ ID NO: 19909 - DNA, 120 bp, synthetic construct
  source 1..120: mol_type = other DNA
tcagacagagagacaaaggagagagtgaggtgcggtgaacacgcggtggggcaagatgtctgcgaggagcagatgctgggatggtcggcggatgtttggcactggaagtggagattcaag

SEQ ID NO: 19910 - DNA, 120 bp, synthetic construct
  source 1..120: mol_type = other DNA
gtaggaattagcggggcttcttcatgcagggaatggggtcctttttgcggggtttggggaccttctttgaatggggaacactttctgtggagatgaggctttctctctatgaggaactca

SEQ ID NO: 19911 - DNA, 120 bp, synthetic construct
  source 1..120: mol_type = other DNA
ttatcagcccacttactcaccattctgtacatcaattcaaatattcatgtccccacattcacctccacatctatcctctctttgttcctttcccttccttccttccctcccaagctccat

SEQ ID NO: 19912 - DNA, 120 bp, synthetic construct
  source 1..120: mol_type = other DNA
gggaaggaggtgggagatgaagggtgggagaggaggtgagatgagggatgggagaggaggtgagagatggggggtgggagaggaggtgagagatgaggggtgggagaggaggtgagatgg

SEQ ID NO: 19913 - DNA, 120 bp, synthetic construct
  source 1..120: mol_type = other DNA
aaaaaaaaaaaagaaaagatggccagagcaggaggggagagaggaagagggagaaagaaggaaacagtgtagggggtcagaagtggaaagagaagaaaaaacagaagaggaaagaaagac

SEQ ID NO: 19914 - DNA, 120 bp, synthetic construct
  source 1..120: mol_type = other DNA
tctcagtcaggttgtctgtctgtccgtctgtcttggtccctttctccccggctctgtctgtctctctctttctccgcgattacaatttctagtcacacggcagtgcagagccaagctgtg

SEQ ID NO: 19915 - DNA, 120 bp, synthetic construct
  source 1..120: mol_type = other DNA
caggtgtgtgtgtgtctgaaaggacagagaggattggcccattgacattcacggcgagaacaagggtcgggacactgagtcttggacaaacagcaaagagacagagacagacagagggtt

SEQ ID NO: 19916 - DNA, 120 bp, synthetic construct
  source 1..120: mol_type = other DNA
tggaggcacaaaaaagaggagtctctgcaaatgcgaggagagatgaggctgtagggatgagtggggcaagtcctgcatggtatcagaggggctgagactctgtcctggggccactgggga

SEQ ID NO: 19917 - DNA, 120 bp, synthetic construct
  source 1..120: mol_type = other DNA
attataggcatgagctaccgcgcccggctcattctctattcttgcctgtaagtttgcagtcttccccagtgtgatacattttaacagaaaaatgtggggacaagaagtgaggaagttatg

SEQ ID NO: 19918 - DNA, 120 bp, synthetic construct
  source 1..120: mol_type = other DNA
cctcactgctggggtccggctgggaggtcagagtctgctgggtgaggggtcggggcagggctgggtacctgtagggggttggggggagaccaaggtgaggtcagtggctctgatcttcga

SEQ ID NO: 19919 - DNA, 120 bp, synthetic construct
  source 1..120: mol_type = other DNA
ttgtcaacaggaataaaaaataagcgtgtcaggaaaagaaatgacagttacagcccaagagtgcatggaatgagatgagtgtgcaaaaggaaagaagtggtagagctctcatccaggtag

SEQ ID NO: 19920 - DNA, 120 bp, synthetic construct
  source 1..120: mol_type = other DNA
caagacagcgagagggcaaatttgtgcaaaattgcagcccggggacgggaggggagagaggtgagcaggcgtgcaacggagcgtgcaagaggctgaggggggcagctgtgtgtgctgggg

SEQ ID NO: 19921 - DNA, 120 bp, synthetic construct
  source 1..120: mol_type = other DNA
gtcaatgtgacagagaaggggtcaggtgacagagtaggagtcagagtgatggggaagggtgagggtgacagggtgggggtcagggtgagagaagaggtaaaagagagacagtggaggagt

SEQ ID NO: 19922 - DNA, 120 bp, synthetic construct
  source 1..120: mol_type = other DNA
agttctccgtcacctcgtggtctggcgcctcagtggcagcgcatgtcctgccgctgaccagtggctggggaactcctgctaaggaggcagccctgagaggggataggggagagaatggac

SEQ ID NO: 19923 - DNA, 120 bp, synthetic construct
  source 1..120: mol_type = other DNA
gaggcataactatacaagtgactgtatgattggaagttggggtcagagctcaagggaaaataagagggtgtttggagagaagccagatgggagtatataacttataatggcaaaggggtc

SEQ ID NO: 19924 - DNA, 120 bp, synthetic construct
  source 1..120: mol_type = other DNA
aggaggattggagagctcagggcattgggagattggaggacttggggcattggagaattggagggcttggggcattggaggactggagagtaggatgaggtccctggaaccttgtgggtg

SEQ ID NO: 19925 - DNA, 120 bp, synthetic construct
  source 1..120: mol_type = other DNA
gccatttgctggaatctcttgaatggaaggggaagcaaggaggacactacaaacagaacctgcgcttctcttagactttatttctggatctaggggaaagggacaaaaaatgaaaaacca

SEQ ID NO: 19926 - DNA, 120 bp, synthetic construct
  source 1..120: mol_type = other DNA
tagagagagaataaaggagactcaaagacacagagataggaatgccaagatgcagaggaacatagagagcaagaaagagaaacaatttaagaatggagactgagaggtgtggagagaggc

SEQ ID NO: 19927 - DNA, 120 bp, synthetic construct
  source 1..120: mol_type = other DNA
tttctgagcaggactcgtgggggctctgtttgaggaaggacagtcccctcacaccatctgcttccttactacttctctttggttctttttgtttttagacagagtctggctctgtcccca

SEQ ID NO: 19928 - DNA, 120 bp, synthetic construct
  source 1..120: mol_type = other DNA
ggagaggagagagagactggaagagaggaggagaataaagagagagaaagaaagacagagatgggggagcggcagggagaggagagagatagaagaaagagaaagagagagacagtaaaa

SEQ ID NO: 19929 - DNA, 120 bp, synthetic construct
  source 1..120: mol_type = other DNA
gaatgacttcgaggccttgatcctctgagctctcctgtcgcccagcgtatcactgcccaggtgcacggtgtactcactgcgaggagtgacattcacagattcagaagagacactgtgaca

SEQ ID NO: 19930 - DNA, 120 bp, synthetic construct
  source 1..120: mol_type = other DNA
gacccagagagagagggacagagacccagaaagagaggagggggaacagagacccggagagagaaggggacagagacacagaggggaacagagatccagagagaaaggcagacagagacc

SEQ ID NO: 19931 - DNA, 120 bp, synthetic construct
  source 1..120: mol_type = other DNA
tctgactcagggactccttggagagggtcagtgggggccctgaggtgaggtcagacttcccagtccagctttcaccttcttctcctgcagtttccaaggctaaggatagcagtaagatct

SEQ ID NO: 19932 - DNA, 120 bp, synthetic construct
  source 1..120: mol_type = other DNA
gagcccaggaggtcacggttgcagtgagctatgattgcgttacagcatttcaccaggagactgagcaagaccttgtctcaaaaaataaaaagtaaacacatggatgaatgaatacaattt

SEQ ID NO: 19933 - DNA, 120 bp, synthetic construct
  source 1..120: mol_type = other DNA
ctttaggtaaccaaatcaggaagcccttcactggctgcaacagagtggcaaacccatccttttggtagtaatgactcagtggacttttggttgagatggcatgctgaaggctcccaatag

SEQ ID NO: 19934 - DNA, 120 bp, synthetic construct
  source 1..120: mol_type = other DNA
tagttaactaagatgatctacatggtaacttcacattggcaaaaattaccaaggggaccctccctaatgaacctagatgacccagtgaacttgttccactggctggaatgacaaagggaa

SEQ ID NO: 19935 - DNA, 120 bp, synthetic construct
  source 1..120: mol_type = other DNA
gctgagattacaggcgtaaaccaccgtgcctggcccaagaggatctttctaacacccagagggactctgtcctccctgctcaaactctctgtcagaagggtcagcaaagtcccaagctgc

SEQ ID NO: 19936 - DNA, 120 bp, synthetic construct
  source 1..120: mol_type = other DNA
ctccttcctcagacccaggaatccaggctatcagcccatcctccctcagacccaggggtccagacttccagcctcctcctccctcagacccaggagtccaggtcccagcccctccttcct

SEQ ID NO: 19937 - DNA, 120 bp, synthetic construct
  source 1..120: mol_type = other DNA
gagagctttcttcttttgcttattaaactttcgctccaacctcaccttttgggtggtctatgctctttaattctcttggttgtgaaacgagctcggataacaccttagacaacgtgacca

SEQ ID NO: 19938 - DNA, 120 bp, synthetic construct
  source 1..120: mol_type = other DNA
ctgcaggaggatgaagaggatgggagggaaagggcggagttattgttcaacgaatgtggagtttcagttttgcaagataaaagggttctagagatctagcacaaccataaacttaataaa

SEQ ID NO: 19939 - DNA, 120 bp, synthetic construct
  source 1..120: mol_type = other DNA
aaggctgtcctgtctcactccccgcagatcccaaggcttagatccacacacaaggtttctcaagttattgttttgtttctctctgtcttccttacacacacacacacacacacacacaca

SEQ ID NO: 19940 - DNA, 120 bp, synthetic construct
  source 1..120: mol_type = other DNA
actcttctgtctgggttgtttgtggccacaacctcagcgtagtatgggatctccccgtcccggaaccagtagacgtagagtgggggagaggaataccaggatctccaggggtaagagaag

SEQ ID NO: 19941 - DNA, 120 bp, synthetic construct
  source 1..120: mol_type = other DNA
taatagaaggctcccatcacagccccagagggaagagggtctttcctacctgtgcctgtgccatttctgaagaagatgctgatggcgaggttctgtggagcatctgggatagaaagatac

SEQ ID NO: 19942 - DNA, 120 bp, synthetic construct
  source 1..120: mol_type = other DNA
aactaaactgccactctcctgtctcaacatgacttataatcacatggtagtaggaacttgaggcaggaaagagctaggtgcaaatttgtggggaaaagcaagagagatcagattgttact

SEQ ID NO: 19943 - DNA, 120 bp, synthetic construct
  source 1..120: mol_type = other DNA
tgtggaggggcaacccaccccttcacaaattgatgggataatctatccccatataatcacagagattaatacacagagaaaagaacagacttgctgaagtctgcaaattcttaatgctgc

SEQ ID NO: 19944 - DNA, 120 bp, synthetic construct
  source 1..120: mol_type = other DNA
gcaaagcattttcagggggttcaggccttactgctcatcttgtaattcacactggagagaaactttacaaatgtaataaatgtggcaaggtcttcaatcgaaatgcacaccttaccagac

SEQ ID NO: 19945 - DNA, 120 bp, synthetic construct
  source 1..120: mol_type = other DNA
agatgcctgccaccatacccggctaattatttatttctaacgtaagcaattcatactgagagggtatcctgagctcttcagaaagtataatcaaacaccactgggaagacatcatgtggt

SEQ ID NO: 19946 - DNA, 120 bp, synthetic construct
  source 1..120: mol_type = other DNA
gtcgcgtctacaggggccgggctagagcgacatcacggtattccccttactaaaaaaaatgtgtattaggagagagaggaaaaaaagaggaaagaaggggaaaaaaaaagaataaaaaaa

SEQ ID NO: 19947 - DNA, 120 bp, synthetic construct
  source 1..120: mol_type = other DNA
aaaaaaaaaaaagttttaagtgtgctgtgtagagagtggcatgcttggatgacataaactgggcaagcctttgaggaaatgcatcaccctgattactatagttttaaggctacttaaaag

SEQ ID NO: 19948 - DNA, 120 bp, synthetic construct
  source 1..120: mol_type = other DNA
cctccagattgcctggtgatctattttgtttccttttgtgtttctttttctgtgttgagtgtctttgtttacaggtttctgcagccagaagatctccgttccgctcccagcagctccact

SEQ ID NO: 19949 - DNA, 120 bp, synthetic construct
  source 1..120: mol_type = other DNA
caccatcctctactttgccatctgttatgggtctttctcattcttcttttctctgtctcaggttttctactgctctcttagtccctctctctgtctcctgatccctttggcccacacgat

SEQ ID NO: 19950 - DNA, 120 bp, synthetic construct
  source 1..120: mol_type = other DNA
agatctggggagcagcagggcccagcaagaggaggagggaggtggggagcgacgacgccttcggacaagggtgggatccgcaggatcccaggaccacagaacgcagccttcccgggactg

SEQ ID NO: 19951 - DNA, 120 bp, synthetic construct
  source 1..120: mol_type = other DNA
tcccaaggttctgggatgacaggcatgaaccaccatgcccagcttgccataaggttttatgcctactttagttctggaacccacattgaggtatcatgaagaacgcagaacatctaaaca

SEQ ID NO: 19952 - DNA, 120 bp, synthetic construct
  source 1..120: mol_type = other DNA
aataactgaatgaatgaatgaaatattaggccatttttatggtcttcactttgggagactgatgtatgcaggggtggactgcatgtttgtccttggggtggtctttttcgtgagaaggga

SEQ ID NO: 19953 - DNA, 120 bp, synthetic construct
  source 1..120: mol_type = other DNA
gcaagaatgtggcagctttatcttcccaaggacagtcccagtggaagcctttgggccgcaggtcagtgtgctgtgtttcactctgattcttggagaaatctttcccttactctgggaccc

SEQ ID NO: 19954 - DNA, 120 bp, synthetic construct
  source 1..120: mol_type = other DNA
agaacaaacgaaaaaaaaccaaggcatcattcagcttcacaagctccctccacaagagggaggtttgaacctacaacaaattgaacccaggctgaacaaaggtttgttgatgagaatgaa

SEQ ID NO: 19955 - DNA, 120 bp, synthetic construct
  source 1..120: mol_type = other DNA
tctaagatttctcacttggcaatgatgttggcttgaatattattcacagacccagatccttgggtcttgcgtggggcaaactgactgcagaactgcaggaagtgagagtctgaacagagc

SEQ ID NO: 19956 - DNA, 120 bp, synthetic construct
  source 1..120: mol_type = other DNA
tgtatttatttccactcatagtgactccaccccacacaaaagtaccaccaaagcctaccaataaaacagagatgtctctaatgatgcacgtgccccaatgagatcctaatatcttccaag

SEQ ID NO: 19957 - DNA, 120 bp, synthetic construct
  source 1..120: mol_type = other DNA
tatgccagtggtaactgtcacttatacttttgagtgacctgataaatactgtggttctcttaacccctcctcggctttgattaactttctaggacagctcttccttctgactgttcatct

SEQ ID NO: 19958 - DNA, 120 bp, synthetic construct
  source 1..120: mol_type = other DNA
cacacactggtagtgggaatgtaaaaggctacaaccactttggaaaataggttggatggctttaaaaaaaatttttttaatggaaatatttctttttttattattattactatactttaa

SEQ ID NO: 19959 - DNA, 120 bp, synthetic construct
  source 1..120: mol_type = other DNA
cagggagtaagccgtgcatagtccacatttagggaacagaaaaatcaagagacaccagaagaggaaagcgtgacgtgatcagcgaggtatcaaaaacttgaaaacaaacagtttaaaaag

SEQ ID NO: 19960 - DNA, 120 bp, synthetic construct
  source 1..120: mol_type = other DNA
atatatacaatgtacatgtttatgatgaggttaggagatcttgtcatcttttccaggcaaaacaaaacctgtatacactggggtcacagctcatgagaacaaaggggctgagagttggga

SEQ ID NO: 19961 - DNA, 120 bp, synthetic construct
  source 1..120: mol_type = other DNA
agctacgtttatagtgtcacctgcaacccagcattctccacctcccattgctctgcccttagaaatacttaaagtcactcttctcttaagaggcttttgagagttgaatgcgtaaccttt

SEQ ID NO: 19962 - DNA, 120 bp, synthetic construct
  source 1..120: mol_type = other DNA
caaacggacgctaacggcctacctccccctcaggtgctcttacagcctgttccaagtgtggcttaatccgtctccaccaccagatctttctccgtggattcctctgctaagaccgctggt

SEQ ID NO: 19963 - DNA, 120 bp, synthetic construct
  source 1..120: mol_type = other DNA
ctaaggaaagaactgggcacctggtttctaagaggacgggcacttgattcctgggggccattaggacaaggaggtggaagctgtaggttttgcaaggactaaagaagcaaattggttttc

SEQ ID NO: 19964 - DNA, 120 bp, synthetic construct
  source 1..120: mol_type = other DNA
aggggcgggctttgtcaggcgatgggatcattaataggcgtggccaggcagattggctccttgggggcgaggccaggcagacgagattatgaatgagcgtatccaggcaggtagattctt

SEQ ID NO: 19965 - DNA, 120 bp, synthetic construct
  source 1..120: mol_type = other DNA
tctctctggtttctgtctcatgcctcccctccatctgcatacgatggggctctctgtgtttcttccttttctctgtgtctccttctgcatctctgtctacacttttgggcctttgtccaa

SEQ ID NO: 19966 - DNA, 120 bp, synthetic construct
  source 1..120: mol_type = other DNA
atctcatgcctgtgtctcttggttcctccatctgcctgtctctgtccctctttctctgggtctacctgtccggcactctgtctgtttgtctgtctgtctctctctgtgtttcccacagtt

SEQ ID NO: 19967 - DNA, 120 bp, synthetic construct
  source 1..120: mol_type = other DNA
tcaccatggcattatgctgccccaccaagattaagatcacaaaaaagaaggagatttaaaaggagaagttaaggacagaaatagtaccaatgccttgggacttggaatggaatagcctgg

SEQ ID NO: 19968 - DNA, 120 bp, synthetic construct
  source 1..120: mol_type = other DNA
tctctctctctctgctcccctgtctctctctctccccctagtgtctctgtatctgtcttttcttgtgtctgtgaatctgtttgcccgcctcgctctgtctctctttccctatatctctct

SEQ ID NO: 19969 - DNA, 120 bp, synthetic construct
  source 1..120: mol_type = other DNA
agcctcatgatattggtgctgcccttagttgataggaaacagctcagagaagggacactgcttgcttagagtcacacagcaaaaaaaaaagaaaatacttgcagtcaggtctgtgctcgt

SEQ ID NO: 19970 - DNA, 120 bp, synthetic construct
  source 1..120: mol_type = other DNA
ctgagttctgtcagtgttcccggctctggggatgaagcaacgaatgagagacaagtcttaccttcttggagccagtgggtggccgggcgcagacagctcagtaagatgtccagtgtagga

SEQ ID NO: 19971 - DNA, 120 bp, synthetic construct
  source 1..120: mol_type = other DNA
gtccgaagtagagacaaagatgaggggaagaaagaaaccaagagaggcagctctgagcggggcagagagaggccccagaagccaggagcggcagaggacagagggaggagaccgagtcca

SEQ ID NO: 19972 - DNA, 120 bp, synthetic construct
  source 1..120: mol_type = other DNA
ctcaactccatccccaagcgtggaaccctcctactccagggcagtggagtccaggctttaacttccttttccctctagctcaggagtgtgggaacccagcctctcctattcccaagacac

SEQ ID NO: 19973 - DNA, 120 bp, synthetic construct
  source 1..120: mol_type = other DNA
atggaggtttgtgggatgatggacatggggtttctttgcagggtatgaaactgttctgaatataactacacagtggtcatgtctgcacaactcggtgaatatactaaaaatcagggagtt

SEQ ID NO: 19974 - DNA, 120 bp, synthetic construct
  source 1..120: mol_type = other DNA
cagctcccgtgccttcagcagtcctgagtctccttctgctgagtgtggggtctgcgtaccccccgggctagtggatggccagagtggcgtagatgctgggctcagctggaggttcccctt

SEQ ID NO: 19975 - DNA, 120 bp, synthetic construct
  source 1..120: mol_type = other DNA
ctccctgggaacactcgctggatgaatgaatgaagaggagcccaggggacggaggtggttcatttattcgtcatcctcctgaggcctggggagagctctaacaaccagacggccaaacag

SEQ ID NO: 19976 - DNA, 120 bp, synthetic construct
  source 1..120: mol_type = other DNA
gagcctgaacctaggacagaacccacccctgcctcccctggaccccgcccatctcccactcagagcccctcactcaccattctgagggcctgaccctggggggttaaggggctggtcctc

SEQ ID NO: 19977 - DNA, 120 bp, synthetic construct
  source 1..120: mol_type = other DNA
actgtggggcccggctgtgctgacagggagacggtgtcatagatctgtcctggagagaagaaggatgggtgaggggctgccccaccttgctctgagctgacacctccccaggcctctccc

SEQ ID NO: 19978 - DNA, 120 bp, synthetic construct
  source 1..120: mol_type = other DNA
ctcatgccttcagcccgtccttcaacacatcactctgggtcctttccagattcagtcaccagccaaactccccacaacctgtcagctgccccgaaagtgtgttagacaaggccgtggctc

SEQ ID NO: 19979 - DNA, 120 bp, synthetic construct
  source 1..120: mol_type = other DNA
cattgatttattgagaagtctgtggcttcatttcaaaaatgcaaggatattagtcatctttgactgcagaatctagtgagtcccagagttcccaggatgtcctggtggtctttgttaggg

SEQ ID NO: 19980 - DNA, 120 bp, synthetic construct
  source 1..120: mol_type = other DNA
tttctcctcgtctcaccgagagccgggatgtagcagcaaatagaactggtgcttcttgtgtctgcccttcctgatgagggtagcagtggcttccccttccttctcacagcttcccacatg

SEQ ID NO: 19981 - DNA, 120 bp, synthetic construct
  source 1..120: mol_type = other DNA
tgattgatgagtccactcaagatgtcacatctgaccgtaatggagaaacgtatgtgtagcatttctgaaatacccagagtatcaaggtcatgagcagaaaaagacatgtggaaaccccaa

SEQ ID NO: 19982 - DNA, 120 bp, synthetic construct
  source 1..120: mol_type = other DNA
aaattataggtctgaaattctacattgcaaatcatatatttttatctgtatatgcatgtatgggaatcagtgcatttctattgctcattctaactatttctccccattgaagttcacaag

SEQ ID NO: 19983 - DNA, 120 bp, synthetic construct
  source 1..120: mol_type = other DNA
tcccatcacagagtccagggcagagccagatggaagggaagcctcatggcttcatcctggtcaccgttcacagctacgtcccctccctgtggagccctcctcctcttaagggaccttact

SEQ ID NO: 19984 - DNA, 120 bp, synthetic construct
  source 1..120: mol_type = other DNA
gcttgccccattctccctggggctggtcactccctctgctcctcccaccacaagctcttcttgacctcaggggactgctgaggtcctggagggacatgaagatgggttggatcctctcca

SEQ ID NO: 19985 - DNA, 120 bp, synthetic construct
  source 1..120: mol_type = other DNA
cacagcccaaccttagaacattcccacgcctcctgcaccttctacgtgcatgtgattctcatcactgcagagttttttcccagttgacagtgaggaccctgagacttgctcacaacttgg

SEQ ID NO: 19986 - DNA, 120 bp, synthetic construct
  source 1..120: mol_type = other DNA
cagttacttatcaatctgtttaaagacgtttttcatgggctgctaattccacaaatgtgagaaacacacacaggatgcctgccgtttggaggtggacttccagaagggaggaccggtatt

SEQ ID NO: 19987 - DNA, 120 bp, synthetic construct
  source 1..120: mol_type = other DNA
ggtaaggaaagtgtcatgtggaacccggagggagattcaggagccaggcatccgggtccgtagagccacctcctccttcgccctcaggtcctaggcgtcctagatcttcgctttcttaat

SEQ ID NO: 19988 - DNA, 120 bp, synthetic construct
  source 1..120: mol_type = other DNA
atatctgtcctcccttctagacgtccacctccaaagggcaggcatcctgtatgtgtttctcacatttgcggaattagcagctcatgaaaagcgtctttaaacagattgataagtaactga

SEQ ID NO: 19989 - DNA, 120 bp, synthetic construct
  source 1..120: mol_type = other DNA
tttcacacaggattgatggtcccatttgttattcctttccactgagccagaacctgccccaggcaatgtgcttctcctggtgtggttcatctcccactgggcagaacacagggtccaggg

SEQ ID NO: 19990 - DNA, 120 bp, synthetic construct
  source 1..120: mol_type = other DNA
cttcttctctctaggacagttctatgacagaccctctctctcggtgcagccggtccccacagtagccccaggaaagaacgtgaccctgctgtgtcagtcacgggggcagttccacacttt

SEQ ID NO: 19991 - DNA, 120 bp, synthetic construct
  source 1..120: mol_type = other DNA
tcatcctagacctgctcccgtctacagccctctctggccctctcctaattctcccaataactgagacttgttaagagttaaaaaaccaacggagatgggggcaggtgcatgcagttttac

SEQ ID NO: 19992 - DNA, 120 bp, synthetic construct
  source 1..120: mol_type = other DNA
gttctatttgctgctacatcccgtctctcagtgagaagaggagaaaccagacagacagtggctgggggtcaggaaagaccccattacagtctgaaatgtctgcagagggcctggttcctg

SEQ ID NO: 19993 - DNA, 120 bp, synthetic construct
  source 1..120: mol_type = other DNA
atgagtggagcagcggggtctttccccctccccgagcaggattccaggagacatcacctctggttgagactctccactgtctcatgtacataacaaaatctctccaattttctactgaaa

SEQ ID NO: 19994 - DNA, 120 bp, synthetic construct
  source 1..120: mol_type = other DNA
gccaagcattcagtcatctcctgtatgagagattggatctgagacgtgttttgagttggttatagtgaaggatgcaaggtgtcaattctagttggaacaatttccaggaagccatgttcc

SEQ ID NO: 19995 - DNA, 120 bp, synthetic construct
  source 1..120: mol_type = other DNA
tgtggtgtctgaaggacaacatgtgactcttcagtgtcgctctcgtcttgggtttaatgaattcagtctgtccaaagaagacgggatgcctgtccctgagctctacaacagaatattccg

SEQ ID NO: 19996 - DNA, 120 bp, synthetic construct
  source 1..120: mol_type = other DNA
tcttttaaggactttgggattctattggggtcaccaagataatccatctcaatctccctaaaatcatccagcgtaccctctttttaagttcagctgattagcaaccgtaatgccatctgc

SEQ ID NO: 19997 - DNA, 120 bp, synthetic construct
  source 1..120: mol_type = other DNA
tatgggcctgcagtagagatatgggcttgtagtggagacatgggcctggagatggagatatgggcctggagatggagatatgggcctgcagtagagataggggcctggagtggagatatg

SEQ ID NO: 19998 - DNA, 120 bp, synthetic construct
  source 1..120: mol_type = other DNA
ccaggagttaagggcacagaaaagaacatgaagacacagagaggaaggagagagacagacaccagcaaggggaagcctcactcattctaggtgccatggatgggatgataaagagagaca

SEQ ID NO: 19999 - DNA, 120 bp, synthetic construct
  source 1..120: mol_type = other DNA
atatatatatatttttttttttttttttttttttaccctccacccttttattcctggcctctggaagccaccattctactctctaccttcatgagatccaccttttagctctgtatatgg

SEQ ID NO: 20000 - DNA, 120 bp, synthetic construct
  source 1..120: mol_type = other DNA
tcttccctatttggctttctgtgagaatgagatcacatagaaaatgtgaaagccctcagaatcctccagcacagatcgtggaatagagaaagtgctctgttcatcgcaacaaaaaacttg

SEQ ID NO: 20001 - DNA, 120 bp, synthetic construct
  source 1..120: mol_type = other DNA
cccctgtatgttggtatctgcttatgaaatgagggcccagaagtgccctctgagctgttttgttgacttccgtcttctacagatgctgttgtaatggaccaagagcctgcagggaacaga

SEQ ID NO: 20002 - DNA, 120 bp, synthetic construct
  source 1..120: mol_type = other DNA
tgtagttttccctccttcaaataaacatgtctgccctcatggtttaggtaatgggactcttttcttgcctaaggcttccggtgttatcagtaccatgtccatataatcccatctgttctc

SEQ ID NO: 20003 - DNA, 120 bp, synthetic construct
  source 1..120: mol_type = other DNA
cagaggtggagatataggcctggaggtggagttatgggcctggagtggagatctgggcctggagtggatatatgggcctagagatggagtgatgggcctagaagtggagatctgggccca

SEQ ID NO: 20004 - DNA, 120 bp, synthetic construct
  source 1..120: mol_type = other DNA
ggctgtaaggaagatgagcttggtattcttatggagagagactgacttggtgaggtctgtgccaacagagacagagaaacaggagacacaagtagagaccaggtgtcataacagagaaca

SEQ ID NO: 20005 - DNA, 120 bp, synthetic construct
  source 1..120: mol_type = other DNA
atgagacatagagatgatgatgatgaagacagatagatagataatacatagagatacagaggcagacatagagaaatcatagagagagagagatgatacatagatatagataatagatga

SEQ ID NO: 20006 - DNA, 120 bp, synthetic construct
  source 1..120: mol_type = other DNA
aatccattttcatttgatttttgtgtatggtgacaggtagagttgcagtttcattcctctgcatgtagatgtccaggtttccctgcactgtttattgaaaagactgtcctttcctgattg

SEQ ID NO: 20007 - DNA, 120 bp, synthetic construct
  source 1..120: mol_type = other DNA
tccacaagattcgtgggtgaaaacaaaacggttttttaattatcttacagtgctgtagctcaaagtaggaagtgcatcttactgggctaaaatcaaggtgacagcaaggctgccttccct

SEQ ID NO: 20008 - DNA, 120 bp, synthetic construct
  source 1..120: mol_type = other DNA
agataatgctgagtgtatgatttcaggtgacaaagaaggtctcactattcagatatttgtgacattaatgaaaaacacggaatgaacccctgaaagattggcggaaggattttgcacaca

SEQ ID NO: 20009 - DNA, 120 bp, synthetic construct
  source 1..120: mol_type = other DNA
ccaactatatttggggtaaagggggattgaatacaggggaatgggtgctgtgttggaaagaataactgtccccatcgatggccacattgtaatccttggagcctgtgactatgttatagg

SEQ ID NO: 20010 - DNA, 120 bp, synthetic construct
  source 1..120: mol_type = other DNA
aattcaatcacctcatgtgtgagaggttggatctgagacgtcttttgagtctggtcatagtgaaggatgcaaggtggcaattgtagtcacaacaatttccaggaagccatgttccgctct

SEQ ID NO: 20011 - DNA, 120 bp, synthetic construct
  source 1..120: mol_type = other DNA
tggctgccaagacacacagtgcagtgggggcagcagggtgccctggtttgcctgcagttggatcgtctatcatgatctttctttccagggttcttcttgctgcagggggcctggccactc

SEQ ID NO: 20012 - DNA, 120 bp, synthetic construct
  source 1..120: mol_type = other DNA
tggctactgtgaacagtgctggaacagtcatatgagtgcagatatcacttcgatacactgatgtcctttcctttggatataaacccagtagtgaaattgctggacactatgaaagttctc

SEQ ID NO: 20013 - DNA, 120 bp, synthetic construct
  source 1..120: mol_type = other DNA
gccaatgtcatgctgttttgcttactacagctctgtaacatatttctaagtcaggtagtgtgatgctcctgttttctctttataccttcaagtctcaagacagtgggcatcgcacacaaa

SEQ ID NO: 20014 - DNA, 120 bp, synthetic construct
  source 1..120: mol_type = other DNA
acagccccatgctcaggctgtgcagtgtggaagcttttcctattgttgccataacaaatttccacaagattcgtgtgtgaaaacaaaacggttatttaattatcttacagtgctgtagct

SEQ ID NO: 20015 - DNA, 120 bp, synthetic construct
  source 1..120: mol_type = other DNA
cacgctgggataagaggcatgagccacggggccaagccaaattttcaaatcaataatagataatgctgagtgtattatttcaggtgacagagaagttctcactaatcagatatttgtgac

SEQ ID NO: 20016 - DNA, 120 bp, synthetic construct
  source 1..120: mol_type = other DNA
caggacgttgctgtcttagtccatttttgttgctataaaagaacacttgagcctgggttacttcttttttttttttttttttttttgtatagtgcttctgatgagcttttttttaaaatt

SEQ ID NO: 20017 - DNA, 120 bp, synthetic construct
  source 1..120: mol_type = other DNA
taatcttatgggaccaccatcatatatgtggtacattgttggccaaaatgtcattatgcagctcacaacagtatttcatgtccattcaaatatcttcttttgtgaaatgtctatttaaat

SEQ ID NO: 20018 - DNA, 120 bp, synthetic construct
  source 1..120: mol_type = other DNA
acccaggaggtcgaggcttcagtaagcaaagatagtgccacggcgctccagcctgggaaacagagcaagaccctgtatcatttttaaaaatggttttagacggtaaatcttctattgtgt

SEQ ID NO: 20019 - DNA, 120 bp, synthetic construct
  source 1..120: mol_type = other DNA
agtcctcacgcctcagcctttgaagtagctgggaccgtgggagggtgccaccacatctgttctggctaataatattattattaccactgtttgcagagactcactagatgtagggtctta

SEQ ID NO: 20020 - DNA, 120 bp, synthetic construct
  source 1..120: mol_type = other DNA
atggcattgaggcttggagagggactgcttgttctgaatgcaggtgctggatcttcataaaccctggtgtctgtcctggtccttattttctacctacttctttttttttttttttttgtc

SEQ ID NO: 20021 - DNA, 120 bp, synthetic construct
  source 1..120: mol_type = other DNA
ccggcctgagttgtattttgataccatggcatcaaagaaccaagaagccccttcctaggaatgtgggaacttcagaaattctcacaagcaatatactctactgctggcttaaaataatct

SEQ ID NO: 20022 - DNA, 120 bp, synthetic construct
  source 1..120: mol_type = other DNA
cttttttaaggctgcataatattccattgcatgtatataaccacattatgaggtatgctgctcttttttgaaagaaaccccctttaagaatggtagtcaagtccgacgcggtggctcacg

SEQ ID NO: 20023 - DNA, 120 bp, synthetic construct
  source 1..120: mol_type = other DNA
agggcttcctgccctcccacttccttcccacttatggcccctcccttggaatggccatcaggacctataaaggctgaggaagaaaggtttggtctgcactacccctacctgtgaccacaa

SEQ ID NO: 20024 - DNA, 120 bp, synthetic construct
  source 1..120: mol_type = other DNA
agtgaggagggccactttgactagggtggtgggggatatacttagcgagaagagagtatttgagtctgaccctgaaagaagtaatgaggcagccaggctggtccattctagtagcagaga

SEQ ID NO: 20025 - DNA, 120 bp, synthetic construct
  source 1..120: mol_type = other DNA
caggactcgcttttatggacattcctgcctgctgggcgcggtgataagacatttgcatgcatatgctttactctgtcctaataatttcttcaaaagacacacaggaatgtaatttaagtg

SEQ ID NO: 20026 - DNA, 120 bp, synthetic construct
  source 1..120: mol_type = other DNA
ttagacattgcccattgacttcctcagtggatgtgaggaatgggacctgagacattgctgtcccttcgtttcctcccttcagtctcccaatattaaataatatccaagtacattacaata

SEQ ID NO: 20027 - DNA, 120 bp, synthetic construct
  source 1..120: mol_type = other DNA
gaacttcctcccgctgttagaatttcaagggagttttaaagacagagctttcaactctgacctgtgaacaagtgtgacatcaaatgtactgttcgttgctattattctgttgctacaagg

SEQ ID NO: 20028 - DNA, 120 bp, synthetic construct
  source 1..120: mol_type = other DNA
ctcctcacccacacccgcttgcggcagcccagactgtttgcggcggcccagactctggcccaagccccgacactcaggaggaagccagagcctctctcctccctgcccagcctggggtta

SEQ ID NO: 20029 - DNA, 120 bp, synthetic construct
  source 1..120: mol_type = other DNA
gtccacttaatctgccagcctttcctccaggccagctgttgtgctggacagtgggaccacggaggcaaatcaagacacagccctgcatgaggaaggggtagacaaggtccagaggaatcc

SEQ ID NO: 20030 - DNA, 120 bp, synthetic construct
  source 1..120: mol_type = other DNA
aagcccccaggaaagcaagaagactatgggagaaactggatgattccctgggaatgacctccccgagagcagacctcacctctctgggcagggctgtcagagttctccactccagggacg

SEQ ID NO: 20031 - DNA, 120 bp, synthetic construct
  source 1..120: mol_type = other DNA
ggactcctccctccctataccttctgtgtttgctgctagagggcgcttggggctcctggccccggctctgggaagcttctttttggttccgaagctgcaaggagggaagggggctgcagg

SEQ ID NO: 20032 - DNA, 120 bp, synthetic construct
  source 1..120: mol_type = other DNA
ttccccgcagttcaccaccgtcttcacccctaccccgcgcagttcgcagttcaccaccgtcttcaccccttccccacgcagttcaccaccgtcttcaccccttccctgcagttcaccacc

SEQ ID NO: 20033 - DNA, 120 bp, synthetic construct
  source 1..120: mol_type = other DNA
tgcccacgcaccagaagccctaggcctggccttgggagcttcctgtcacctcacagagctcactgaacgctggcatggctctagtgctttccaggggcacgtactcccccgagctcctga

SEQ ID NO: 20034 - DNA, 120 bp, synthetic construct
  source 1..120: mol_type = other DNA
tgtcggcaccattttgttcatatttgaggccgagagttttaaaatctgtgcccactttctccacatccgagctggagctctcgcatttcccaaggggagagaagggtgtcatgattaaga

SEQ ID NO: 20035 - DNA, 120 bp, synthetic construct
  source 1..120: mol_type = other DNA
aatattgggctaaaagtagtgagtgaagcagaaaacataggagtctggtctctgattttgtagaattgccataccagccctggactaaaacctacctttccttccttccttccttccttc

SEQ ID NO: 20036 - DNA, 120 bp, synthetic construct
  source 1..120: mol_type = other DNA
agacctaggagtccagccccactccctcctccctcagattcaggaggagtccagacccccagtcccttctcttagactgagtccaagccccagaccctctcgcattaggaaccagaagtc

SEQ ID NO: 20037 - DNA, 120 bp, synthetic construct
  source 1..120: mol_type = other DNA
ggtgggagagcctctccaccactgcacgccccaacccctcccagtgcagcactcactcctcatattcctgctcctcggtgtccgacatcctggtgcggcctaaggaccagagagaagagg

SEQ ID NO: 20038 - DNA, 120 bp, synthetic construct
  source 1..120: mol_type = other DNA
gtcctcttttgtcttatgacaagtccatgggaacctgatccagttgggattaggaagaggcatttgagaagggacagtggcctgaagacaatagctgccccacccccaggagctattttg

SEQ ID NO: 20039 - DNA, 120 bp, synthetic construct
  source 1..120: mol_type = other DNA
ccaactcctccatcctacactccttttttattctccttatctcgtcttccagtaccgaggccttaccagtctcttcccggcttaggctcccagtctaggcttctaatcctggaactgaat

SEQ ID NO: 20040 - DNA, 120 bp, synthetic construct
  source 1..120: mol_type = other DNA
cccacccattctcaagctccgccccctgagcacctgcctgctctttcccagtcccgcccgtcctcaccttcagctgcaattttctcgaggcggagatcttagattttttctgccagggtg

SEQ ID NO: 20041 - DNA, 120 bp, synthetic construct
  source 1..120: mol_type = other DNA
catctaggagaagaggccagcattagccaggcagagagacccagagaggcacagagacaagaccacaggcagagagacccagagaggcacagagacaagaccaagacccatggacaaaag

SEQ ID NO: 20042 - DNA, 120 bp, synthetic construct
  source 1..120: mol_type = other DNA
gagagataaaattaatgatttcatttcctgaaatatatgtccttggaaaaccgagggcagagagcaatgaacagactgggaagggagaaaaaaaccaaggttggggatcaggaaccttgg

SEQ ID NO: 20043 - DNA, 120 bp, synthetic construct
  source 1..120: mol_type = other DNA
aaacaactgtattgggtaatttagataataattcaatgattgggcaacactttaagaatctccaagctcctgtctccttgctgtctctcctactctgacacagcacgggacgaatgctag

SEQ ID NO: 20044 - DNA, 120 bp, synthetic construct
  source 1..120: mol_type = other DNA
gagggggaaaggtcctgagcttgcagtcaccaccaccaccactgtcatcacaagcaccatcaccaacatcatcacaaccaccatcaccaacatcatcatcaccaccatcaccactatctt

SEQ ID NO: 20045 - DNA, 120 bp, synthetic construct
  source 1..120: mol_type = other DNA
cagctgagacacagtgtgaagggctctcaaccacatgtccctggcctgtggcttcatcagatgcagatgtgcaggcctgtaggtggacagaggggagaggatacatggtcaggatgcatg

SEQ ID NO: 20046 - DNA, 120 bp, synthetic construct
  source 1..120: mol_type = other DNA
caccggcaacaagaccccacgcccacttcttttctgcaggtttcttcctgacgtcagcatgctccagctgcgaccagatgaggggcacagagtcgcccacggcctgagacttgaaactgc

SEQ ID NO: 20047 - DNA, 120 bp, synthetic construct
  source 1..120: mol_type = other DNA
gaccccctctcatcctgtagcaatgtgattcacacttggagttgtgacctgttaggttgtgaagttgattttgcgggtagtgagcagcattttgaaaaatgaaatcaaatagaacagaag

SEQ ID NO: 20048 - DNA, 120 bp, synthetic construct
  source 1..120: mol_type = other DNA
agtggaggtttctggtcagggaaggaggttctatttaggatgggggtcccaggttagaacgagggacccctggggtcagtcagcatctcaccaagatgcaggcctgtgcctcaatgccac

SEQ ID NO: 20049 - DNA, 120 bp, synthetic construct
  source 1..120: mol_type = other DNA
acactcagagcctggcagggcccggggcaccttgccaaccttcttcccacctcaaggtctctgtgtctgctgttccccgggcctagaatgggcttctttcttatttctgtcctattcggc

SEQ ID NO: 20050 - DNA, 120 bp, synthetic construct
  source 1..120: mol_type = other DNA
ttatcaccctatgaggtcatgcagggagaagaggatccaggactaaatatgagattaactttagaggttggatgatgatgaggataatggtagctgctattttatcgcgtgctctccatg

SEQ ID NO: 20051 - DNA, 120 bp, synthetic construct
  source 1..120: mol_type = other DNA
cagtatctaaggagatacatctgcttccatacagcaattccacaacgaggcgtcgagaaattctcgcccatgagcctaaggacatgggcacaaagagttcactgaagccatatttgtgac

SEQ ID NO: 20052 - DNA, 120 bp, synthetic construct
  source 1..120: mol_type = other DNA
acccctcaccccacaactcctgacccttcctcaacccctgtcatcactactgtgtcccttccaacctccttggggacagaactctcctctcccactctagcaccaacagtcaagcccagt

SEQ ID NO: 20053 - DNA, 120 bp, synthetic construct
  source 1..120: mol_type = other DNA
gcctgtgacttgattggggtccagtgtgacctggggctgcctggtgagtctccatggtgtatcgtgtgagttctgtgatgtctatgaactccaaagaggcctaacaactccacgagtcct

SEQ ID NO: 20054 - DNA, 120 bp, synthetic construct
  source 1..120: mol_type = other DNA
tgtgtggctgtgttattgccctctgtgttattactgaattgtgtatccccaaaactcgtatgtgggagtcctaacccccccagtgctgaatgtggctgtatttggagatggggtctttaa

SEQ ID NO: 20055 - DNA, 120 bp, synthetic construct
  source 1..120: mol_type = other DNA
tttccatcatgggttttggtaaattcagctaaccttttggagcctgtaatatatgttgacatgctcccaatcgacatggactttttacgtatgggtgcgtttccccgatcaagctgcaga

SEQ ID NO: 20056 - DNA, 120 bp, synthetic construct
  source 1..120: mol_type = other DNA
gtgtaatcacctcacctctctgcctcatgagatggtggtggtgagggcgtgtgacctgctctttgatccccttgctgggtgtatgtatggaattcccatcgtaccaggctctgatctaga

SEQ ID NO: 20057 - DNA, 120 bp, synthetic construct
  source 1..120: mol_type = other DNA
ttatgcaagaagagataagcattttctccctgcatgcatatgtgtagatacggtatgtgtgtatacatggacatacatgtggcagattatattataggtcccaatcaatgaagaaatgca

SEQ ID NO: 20058 - DNA, 120 bp, synthetic construct
  source 1..120: mol_type = other DNA
cttcatgttttcagaaacctccctactattttctgtagtggttgtaccattttctttcccaccaaccgtgcacaagggttcccctttctccacatccttaccaacacttgtcttttgtct

SEQ ID NO: 20059 - DNA, 120 bp, synthetic construct
  source 1..120: mol_type = other DNA
atgtgagcaactttaaacgttctcaagcagatagtttacgttctcttttccccattatgtcttcaaaaataagagcgtatttggctcacagcacatctccattcagatacaccccatttc

SEQ ID NO: 20060 - DNA, 120 bp, synthetic construct
  source 1..120: mol_type = other DNA
aacttatttcgaaaggcatttctaatatgaataaggtggacttgttacaatgatcatattcatgcaacctatagatacaatttaacctcatcaggtggccaaacaagtttccccaggaaa

SEQ ID NO: 20061 - DNA, 120 bp, synthetic construct
  source 1..120: mol_type = other DNA
aataatttgaatgtgacccaacacagtaactgaatttcaaatgataaggacctatgaatacggcaaaattatatatgttcatgtattcagtttaacccaataactgaacactgacattca

SEQ ID NO: 20062 - DNA, 120 bp, synthetic construct
  source 1..120: mol_type = other DNA
tggggacacagagccaaaccgtatcacttgatatgatcccacagaatactattcattttcattcagtcttttatttcttaacaaatggtggtaaagtatatataattgaccatcttaacc

SEQ ID NO: 20063 - DNA, 120 bp, synthetic construct
  source 1..120: mol_type = other DNA
aagcagataaaaattaaaagatgtgagggatcagtgctccaggaacatgggcccataaaattacaagctggagaataactgctcccagaaatgtgagtatattttaaaaggatttatatg

SEQ ID NO: 20064 - DNA, 120 bp, synthetic construct
  source 1..120: mol_type = other DNA
tgaaagtcgcaccgttcattttagaggaattttaaatgtcaccccaaattttacgattttaattaattttaattaatttccaaattttaaccaataggcataatattcaagatcttatct

SEQ ID NO: 20065 - DNA, 120 bp, synthetic construct
  source 1..120: mol_type = other DNA
accatttcctcatctatttttctctcacagacgctggggttgtttccatggctgttgtgaataatgctgcagagaacctaagagtgcagatatctctttgatatgctgacctctttcttt

SEQ ID NO: 20066 - DNA, 120 bp, synthetic construct
  source 1..120: mol_type = other DNA
acatttgccatggctgagcacttcaaacagatcattagatgtcctgtctgtctaaaagatcttgaagaagccgtgcaactgaaatgtggatatgcctgctgcctccagtgcctcaattca

SEQ ID NO: 20067 - DNA, 120 bp, synthetic construct
  source 1..120: mol_type = other DNA
ggaaaggtctttgctgccagcactgtgcctatgactcctctctgggtgagtccccagttgcacagagtggggattttcctggatgtaggtatgaggtccattgccttttacaatgttagt

SEQ ID NO: 20068 - DNA, 120 bp, synthetic construct
  source 1..120: mol_type = other DNA
ttccaaagtcgcttccacattttcaggtaccatagtagcagtgcctcactcctggtaccaatattctgtaacagttcattctcacactgctctaaagaactaccggagactgggtaattt

SEQ ID NO: 20069 - DNA, 120 bp, synthetic construct
  source 1..120: mol_type = other DNA
tccactctctaattttatgacttcagtgtttttaggttcctagtaagttaggtcattcggtatttatcgctttctatatgacttattccacttagcaaaatgccctcaagtttcatccat

SEQ ID NO: 20070 - DNA, 120 bp, synthetic construct
  source 1..120: mol_type = other DNA
aaatagcctcacaacattgaatgacgtcctcctaaactcaccatctcttaccttgcagcaggcaaacccattaacattgttagtgatgggagaacccattaacattgttagtgatgggag

SEQ ID NO: 20071 - DNA, 120 bp, synthetic construct
  source 1..120: mol_type = other DNA
gttagtaatgatgtcaattaaagtagatctgtacttctcatggagaatactcattgcaacaaattttaaatcccaggagagctgctatgtgtgcacatgtgtaaggccactgcagcccca

SEQ ID NO: 20072 - DNA, 120 bp, synthetic construct
  source 1..120: mol_type = other DNA
ccatctgtagccaatctgaatgcagtctttcccctcactttcagaggatctcttcccagagccggaggtattaatatttcagcctgtggcaagaggctacacttttttttaattattata

SEQ ID NO: 20073 - DNA, 120 bp, synthetic construct
  source 1..120: mol_type = other DNA
atttaaaagtaaaaatgtaatttctgtagctgcggtgtaatttccaaagctgcggtgtaatttccaaagctgcggtgtaatttccgaagctgcggtgtaatttccgagactgcggtgtaa

SEQ ID NO: 20074 - DNA, 120 bp, synthetic construct
  source 1..120: mol_type = other DNA
ctgcggtgtaatgtccgtggctgcggtgtaatgtccgtggctgcggtgtaatgtccgtggctgcggtgtaatttccgtggctgcggtgtaatttacgaggctgcggtgtaatgtccgagg

SEQ ID NO: 20075 - DNA, 120 bp, synthetic construct
  source 1..120: mol_type = other DNA
gctgcggtgtaatgtccgaggctgcggtgtaatgtccgaggctgcggtgtaatttccgaagctgcggtgtaatttccaaaaatgtaaagtctatatttgcctggatattgaggctatgtc

SEQ ID NO: 20076 - DNA, 120 bp, synthetic construct
  source 1..120: mol_type = other DNA
ctgagctgtgtcattgggctgtgaaatcagagaatgagttcatgatggatgatgagagacaaacacaggtgtgcaggctgtgctcccattagatgaaactcatccaaaattttctttgtt

SEQ ID NO: 20077 - DNA, 120 bp, synthetic construct
  source 1..120: mol_type = other DNA
cctgagaacttggatagggaagttaaagtttcccaattgatgtagccatttcggaaaactgtgtgtattcagccttcatggattctggcagattatgtaacccaataattccacctggag

SEQ ID NO: 20078 - DNA, 120 bp, synthetic construct
  source 1..120: mol_type = other DNA
tgccacagcagcagagacagaagaacaaggtgaggaaaatagatgtattccttggttgccctcctggaagaaagttgggtgaaagaagtgtaagtagtttagatttcaagggtatgtagt

SEQ ID NO: 20079 - DNA, 120 bp, synthetic construct
  source 1..120: mol_type = other DNA
agaacccattctcctctcacactcctcagaaggagaggcccaaagacaggcaaccccatgctgcagggtgatgccacccaggtaatacggccgcagggtgatacggccgcagggtgatta

SEQ ID NO: 20080 - DNA, 120 bp, synthetic construct
  source 1..120: mol_type = other DNA
tcccaaaagtgggttgtaacaaatcacaaacgcagcggcttacaaatcacaaacgcagcggcttagaaatcacacaagtctgttacagttctggaggtcagaagtccaaaatggtttggt

SEQ ID NO: 20081 - DNA, 120 bp, synthetic construct
  source 1..120: mol_type = other DNA
tctggtctgtgggagctgacggtggtgtatagacagctgacatctgggggcatctagtgggagctgaccgtggtgtatagacagctgacatctgggggcgctgctgtggattggggtttc

SEQ ID NO: 20082 - DNA, 120 bp, synthetic construct
  source 1..120: mol_type = other DNA
ggtggtgtatagacagctgacatctgggggcatctagtgggagctgaccgtggtgtatagacagctgacatctgggggcgctgctgtggattggggtttcttggcatctggtgtgtggaa

SEQ ID NO: 20083 - DNA, 120 bp, synthetic construct
  source 1..120: mol_type = other DNA
acagcagcatttcccgcgatgaagtgtgtgttttgacctcacagaccagcgtttgaaagcccctggagtggatgactgttcccccacctccatcctcttcactccctctcccttcttcta

SEQ ID NO: 20084 - DNA, 120 bp, synthetic construct
  source 1..120: mol_type = other DNA
aactcctcaagatgtgtacattaaatgtgcgccatttttgtatctcgatgatgcctccataaagctaaaaaataaattcctctgtccttatcggaaatgcacctggcccccgcttcggaa

SEQ ID NO: 20085 - DNA, 120 bp, synthetic construct
  source 1..120: mol_type = other DNA
tttattttaaatttggggtgtacctgtgcagatgtgttacatgagtatattgagtgatgctgaggtttgaggtatgactctacccatcacccaggatgtgaggatagcaaccaataggta

SEQ ID NO: 20086 - DNA, 120 bp, synthetic construct
  source 1..120: mol_type = other DNA
aggcggtgatcactgatgaggatggggttccttttagggtgatgagataattctggagctagaaactagacagtggtaatggttgcacaacatggtgcatgtcttagtcccatgaaattg

SEQ ID NO: 20087 - DNA, 120 bp, synthetic construct
  source 1..120: mol_type = other DNA
gattgatttccacggtgctgagtccaatgctagaggggaagtggggtctgggattgggatgagggatttggaaggatggggtgggtagagtagaaactttaacagagctcatgctttttt

SEQ ID NO: 20088 - DNA, 120 bp, synthetic construct
  source 1..120: mol_type = other DNA
acatgaaagaaagacattggtgaaatattaggcctgatggaatgtagggaaggaggcattagagtgaactgaaggggggcccagaaataccatcctgaggcagggaaagtggctggtatc

SEQ ID NO: 20089 - DNA, 120 bp, synthetic construct
  source 1..120: mol_type = other DNA
ggacacagcaatcctgtctgaattttttcctctctagactccagcacctgcctgcgcctggaatattctagttaagtacataaacatgggtcctttagatgaaatagtctctaaaccaaa

SEQ ID NO: 20090 - DNA, 120 bp, synthetic construct
  source 1..120: mol_type = other DNA
ggtctgttgcaggattctcctagactccatgaggatgtgcaatttgcagccatatctagtggagaattttttaatcagtctctgagaaagctcttccagtagctggtatctaattgatac

SEQ ID NO: 20091 - DNA, 120 bp, synthetic construct
  source 1..120: mol_type = other DNA
tcctaatctcatctcagaaaatggatttaaagtctagtgctctttgatattttaaagaagtgggttgatacaataataagatttttaaaaattaattcctaaacctagcttcattaggca

SEQ ID NO: 20092 - DNA, 120 bp, synthetic construct
  source 1..120: mol_type = other DNA
actacctattgggtactatcctcatatcctgggtgatgggtagagtcatacctcacacctcagcatcactcaatatactcatgcaacaaatctgcacaggtacccactgaatctaaaaca

SEQ ID NO: 20093 - DNA, 120 bp, synthetic construct
  source 1..120: mol_type = other DNA
gatggaccgtgggccaagtctccactccagcctctgatggacggtgggccaagtctccactccagcctctgatggaccgtgggccaagtctccactccagcctctgatggatggtgggcc

SEQ ID NO: 20094 - DNA, 120 bp, synthetic construct
  source 1..120: mol_type = other DNA
cctctgatggacggtgggccaagtctccactccagcctctgatggacggtgggccaagcctccactccagcctctgatggacggtgggccaagcctccattccagcctctgattgaccgt

SEQ ID NO: 20095 - DNA, 120 bp, synthetic construct
  source 1..120: mol_type = other DNA
gctgtgcacattgctgaggaggatccacaccgccattctgattgtcactttcagttcagtattcaataaactacaggagagagtcaacactttattataaaataggttttctgttggacg

SEQ ID NO: 20096 - DNA, 120 bp, synthetic construct
  source 1..120: mol_type = other DNA
attggagagcagcctgggcaacacagtgatacccccatctttacaaaaaaatcttttaaaattagccaagtgtggtggtgcttgcctgtaattccagatactcactcaggaggctggagc

SEQ ID NO: 20097 - DNA, 120 bp, synthetic construct
  source 1..120: mol_type = other DNA
cagtgaatctattattgaggaaaaccaaaggaggcctgtctagataggtctcaattagacaccagctactggaagaactttctcagagactgactgaaatattctccaccagatatggct

SEQ ID NO: 20098 - DNA, 120 bp, synthetic construct
  source 1..120: mol_type = other DNA
tctttggtttagagaccctttcatctaaaggactcatatttatgtacttatgtagaaaaggaaaaaattcagacagattgctgtgtccacagagctgattctgcattgggaaggcagatt

SEQ ID NO: 20099 - DNA, 120 bp, synthetic construct
  source 1..120: mol_type = other DNA
ccaggggcatcccaagtttggacagaagcaatgtgaatggacacgaaaggagagattcgagtgagatttacacgttagaatccctggaaccaggtgactgatcagggctgggagaacaaa

SEQ ID NO: 20100 - DNA, 120 bp, synthetic construct
  source 1..120: mol_type = other DNA
gctataacagggtagtgagggggtgtggtttcagcacaaccaagcttatctcttctgtgagccttttctgggccaccaatagagtcttccataaatactgagcactgactacgtatcagg

SEQ ID NO: 20101 - DNA, 120 bp, synthetic construct
  source 1..120: mol_type = other DNA
agacagatgggaggtttctcttccctcgatagctgcaaagagggtccccctggcctctcccgcatcgccagagaaagtactaaggacagatgggagatttctcttcccttgatagctaca

SEQ ID NO: 20102 - DNA, 120 bp, synthetic construct
  source 1..120: mol_type = other DNA
tattatgaagtgaggtgatgagatttgcaagcacagggtacagaaggcctctgctgtcttacgttactctcttttaccccgtatcttgcagtgtttccttttaattgttcatacggagaa

SEQ ID NO: 20103 - DNA, 120 bp, synthetic construct
  source 1..120: mol_type = other DNA
ttcctatattgctataaataaatacttgagtgggtaatttataaacaaaagaggttcaattggctcctggttcagtaggctgtacaagcatggtgctggcacctccttggcttctgggga

SEQ ID NO: 20104 - DNA, 120 bp, synthetic construct
  source 1..120: mol_type = other DNA
gaaaatatagataataatcacgtacctcacaaggttttcatgagaattagaaataatgtgcgagatttctggcacatgctatgacctctaatctgccattccagtattcaaaaagctgag

SEQ ID NO: 20105 - DNA, 120 bp, synthetic construct
  source 1..120: mol_type = other DNA
cccacttctctcaggggccactgtctttaactctaattacctaatgagtgagtaatagcttagtataaaaagtcatggaggtccctctgagattcctcttcccaccttgtgtacatttta

SEQ ID NO: 20106 - DNA, 120 bp, synthetic construct
  source 1..120: mol_type = other DNA
tggcacaatggcattaattgaattattcatctcattctcactaatttgaaatgccacctatatcatgcactaaattcctgtgtgtatttggttctgttgctgtactacactcagttttac

SEQ ID NO: 20107 - DNA, 120 bp, synthetic construct
  source 1..120: mol_type = other DNA
atttgctcacatagctcattgaactcagggacatgctttatttacggttactggtttccaataaaggatacaactcaggaacagccagatggaagacacacagggtaaggtataaggagg

SEQ ID NO: 20108 - DNA, 120 bp, synthetic construct
  source 1..120: mol_type = other DNA
tccttctacccctgtcactcaggaaattccaagggttttaggggctctggtaccaggagctggggataaagattaaacatatatttcttattatatcacaagatcacaggaagacacatg

SEQ ID NO: 20109 - DNA, 120 bp, synthetic construct
  source 1..120: mol_type = other DNA
cttgccccagtcatggccaattcctataccagggtctagaacacacttcctttcatggacatcctttcttcatttatattctgcttgttttgtgattctctactcaacctaaaaatatgc

SEQ ID NO: 20110 - DNA, 120 bp, synthetic construct
  source 1..120: mol_type = other DNA
gtctaggaattgtggctgagctgcctgtccaaggagaagagcagatggtctggtgagcacctactcagtccactacactcagtctgttcctgaaaaatgatattagaaattatttttata

SEQ ID NO: 20111 - DNA, 120 bp, synthetic construct
  source 1..120: mol_type = other DNA
gcctatctccacagcctttcgatttcacgtcatgcatgcctcctgaattcatccctctatcacctccatgagacctatccttctgcttttttcttttttgagatggagttttgctcttgt

SEQ ID NO: 20112 - DNA, 120 bp, synthetic construct
  source 1..120: mol_type = other DNA
tttgtggttgttttatggtcacggttcaacgttttctttgcttggctgagaatagcttcacttcatggtcttccccatcctgcagtcccagatcagattgacaggtttctttcttctaac

SEQ ID NO: 20113 - DNA, 120 bp, synthetic construct
  source 1..120: mol_type = other DNA
tgtttaacaccagaaaattcacacaagagaaaggccttatgaatgcagaaaatatgtcatcttgttcatcctcataggactcacaccagagcaatgctctgtgagtaccctttgtgaggg

SEQ ID NO: 20114 - DNA, 120 bp, synthetic construct
  source 1..120: mol_type = other DNA
gatctgagaggatgttcctgcagcagtctaggtggatgttggtggtgacttgtcaagagtagcggtggcttcaggatgtgttttgaactggagctgcccacattttatgatgtagagagt

SEQ ID NO: 20115 - DNA, 120 bp, synthetic construct
  source 1..120: mol_type = other DNA
gggggagggcaggggaggggaggggagaaagtggttcataattggtttgatgttaatttatctcgtttgctttccttggaaaaagttaatatcgcatcctctaaaatcttaagctaaaaa

SEQ ID NO: 20116 - DNA, 120 bp, synthetic construct
  source 1..120: mol_type = other DNA
ctgagaggatgttcctgcagcagtctaggtggatgttggtggtggcttgtcaagagtggtcatagcttcagttttaactagagctgcccacattttatgatacagagagtgaggcagctg

SEQ ID NO: 20117 - DNA, 120 bp, synthetic construct
  source 1..120: mol_type = other DNA
ctgaccaatgaaaagaggtctgcccgagcgtgcgacacgcaatgggcgggacttccggcgtctcgtttggtattcactttcgcgactcaggtgaactaacctgcgagaagctggttgtgc

SEQ ID NO: 20118 - DNA, 120 bp, synthetic construct
  source 1..120: mol_type = other DNA
tcctatttaggagggagaatcttaaggttccctttcagatgggccctaaggtgagagaagggagagatggccctgtaggacggggctgcctctatagcatggagttttgtggtcagaagt

SEQ ID NO: 20119 - DNA, 120 bp, synthetic construct
  source 1..120: mol_type = other DNA
tttcctccttttcctagggagaggtctgttcttcccaaagctgaactgtgggcactcattccttctccagtatcctgaagtagctattgtaataggcctgggctgtgtatactaccacct

SEQ ID NO: 20120 - DNA, 120 bp, synthetic construct
  source 1..120: mol_type = other DNA
tggccaatgaaaagaggtctacccgagagtgcgacgcgcaatgggcgggacttccggcgtctcccctcggcggttgctttcgctgccctcaagagaactcagcttgccggaagctggttg

SEQ ID NO: 20121 - DNA, 120 bp, synthetic construct
  source 1..120: mol_type = other DNA
catggtgatcctgagatgtcccagagtggaggtgtcatgtccacatgagcagctggaaggcctggggctcgtatttaggagggagaatcttaaagttttctttcagatggtccctgaggt

SEQ ID NO: 20122 - DNA, 120 bp, synthetic construct
  source 1..120: mol_type = other DNA
ttttcctccttttcctagggagaggtctgttcttcccaaagctgaactgtgggcactcattccttctccagtatcctgaagtagctattgtaataggcctgggctgtgtatactaccacc

SEQ ID NO: 20123 - DNA, 120 bp, synthetic construct
  source 1..120: mol_type = other DNA
atgattactgaagctgtcatatttgctagaggatttcccacattcacaccacacagaaggttcttctgtagggagcagtctctcgtgctgactgagtatatctttggtgctaaaatgttt

SEQ ID NO: 20124 - DNA, 120 bp, synthetic construct
  source 1..120: mol_type = other DNA
aggccaaggaaaacacaagcacaacacagcagcttctgcttgaggacagtttaacaaagtgtacacatttgctaacacaaaacctgtatgctaatactggaaaccactgcagatgaagat

SEQ ID NO: 20125 - DNA, 120 bp, synthetic construct
  source 1..120: mol_type = other DNA
cctaagtccataacgcaggtggtatggaggtattcccatttcagtgaaactgtgtaaacacttagaaggtcagccttggatttggtagcagtatgtgaaatgctcagagataaaactgat

SEQ ID NO: 20126 - DNA, 120 bp, synthetic construct
  source 1..120: mol_type = other DNA
cagtgacttttgaagacgtggctgtgaaatttacccaggaggaatggaatctccttagtgaggctcagagatgcctgtaccgtgatgtgactctggagaacctggcacttatgtcctccc

SEQ ID NO: 20127 - DNA, 120 bp, synthetic construct
  source 1..120: mol_type = other DNA
cataccaggaacctattctactttagtagcatttttgtggcaagagaagtaggcacacataatttgtcttttcttcctcattcttgagaacatcacacttgtcacttgtctatcttatca

SEQ ID NO: 20128 - DNA, 120 bp, synthetic construct
  source 1..120: mol_type = other DNA
ccttaaaaggtgtgagtacaaatctcattcccactctgctctcttgaataatgtatcctagcctaacagcccgttttatcaaggtgataaggcagggttccaggttgttatattttgtgg

SEQ ID NO: 20129 - DNA, 120 bp, synthetic construct
  source 1..120: mol_type = other DNA
tgattgtggaaaatcctttagcagatatgtcagcttcagtaatcatcagcgagatcacactgcaaaaggaccttatgattgtggagagtgtgggaaatcttatagtcgaaagagcagcct

SEQ ID NO: 20130 - DNA, 120 bp, synthetic construct
  source 1..120: mol_type = other DNA
gcaccaaatgtggaaaaacatttcagcgaagctctaccctccttcatcatcagagttcacacaggagaaaggccttatgagtgcagtgaatatgggaaatcgtttgctgaagcatcccgt

SEQ ID NO: 20131 - DNA, 120 bp, synthetic construct
  source 1..120: mol_type = other DNA
tcctggaaaatggaggttgcaatcagccgagatggtgccatcgcactctagcctggggaatagagtgagatcctgcctcaaaaaaaacaaaaaaattctttattttctccataaactaca

SEQ ID NO: 20132 - DNA, 120 bp, synthetic construct
  source 1..120: mol_type = other DNA
tgaaagatttcacacattctccacacttgaaaggtctttctccggcgtgaactcgttgatggctcctaagatgtccttctgaactaaaagatttcccacattcttcacacccataaggtt

SEQ ID NO: 20133 - DNA, 120 bp, synthetic construct
  source 1..120: mol_type = other DNA
tattatctccatggaagtctgccccacgacaagctatgccctctgatacaccctacattcattgtcacttacctccctctcctgtgtgaatgcataacacaggttatgaatgccaataat

SEQ ID NO: 20134 - DNA, 120 bp, synthetic construct
  source 1..120: mol_type = other DNA
caaaaagaactttgtcttgcattttggatgtcacctcagccacaggatagggcactgggcagggttgtgaggacccattccaggcccacccagataatatttctagacacactctggacc

SEQ ID NO: 20135 - DNA, 120 bp, synthetic construct
  source 1..120: mol_type = other DNA
taaaggggtgcttctgtcccaacccccagtttcaggcacttcagcactgacagagacatgctgggacaaagtgagggaagacccaacaagagtctctacctgttatgttaatcaagggaa

SEQ ID NO: 20136 - DNA, 120 bp, synthetic construct
  source 1..120: mol_type = other DNA
agatgatacttcctgttaaataatttcccacattccctacaattgtaaggtctttccccagtgtgaagtctctggtgttcagtgaggtgggatctgtacctaaatgatttcccacattcc

SEQ ID NO: 20137 - DNA, 120 bp, synthetic construct
  source 1..120: mol_type = other DNA
gtatgcagtgtcatccaagttttttccacatgctccactcctgttcagcttctgcttgtgatgagtttcctggtggtcagcaaagtgaaaaacatcctccaagatgaggccacacatttc

SEQ ID NO: 20138 - DNA, 120 bp, synthetic construct
  source 1..120: mol_type = other DNA
gacagcccacaggagagtaaggtaagtattacaaaagaattcctaagcagggtcttgcaagaagagtctatggtctatggtctatgtaggtagtgacaatgtcaatgaaggcaattcttg

SEQ ID NO: 20139 - DNA, 120 bp, synthetic construct
  source 1..120: mol_type = other DNA
taaatatacatcattctttatactgcaaagacacatccccatggccacccctacctgagttttccctaccatcagcctctctctggcatccccacaaatagaactttgttttttggggtt

SEQ ID NO: 20140 - DNA, 120 bp, synthetic construct
  source 1..120: mol_type = other DNA
aaagagaggaaggtaaaaaatttccctgtttcttcttttccaggttcagattggcaggaaaaaaaaattacaaataaaaaacaattagttttttgaaaaaaaaaaagtatacttgggtgt

SEQ ID NO: 20141 - DNA, 120 bp, synthetic construct
  source 1..120: mol_type = other DNA
gcctggctggttcttggcatttttaacaaagaattggacgaaacacacaaagcaacaaaagaagcaacaaaagcatagctgtattgaaacaaaaatgcacttcacagagtgggagcaggc

SEQ ID NO: 20142 - DNA, 120 bp, synthetic construct
  source 1..120: mol_type = other DNA
tctgccttcatagtactttacaatgtaggggcttgagaggccagatgggtacctcatgtactcacccccagcagccatattctacctggggttctacttgcagaaattttcaccatcgtg

SEQ ID NO: 20143 - DNA, 120 bp, synthetic construct
  source 1..120: mol_type = other DNA
tttgtcatccaagacaccaaatgagaaacttccccttggaactggggccagatgttaggaacgggccacatctccccttacaaagtgtgaccggggccctcggcagagtaggggaggctt

SEQ ID NO: 20144 - DNA, 120 bp, synthetic construct
  source 1..120: mol_type = other DNA
tggcttctctgtgctctgggttttgcctccctacaaaagaaattttacagggacctccctgggccaggcttgagccatgaattttaatcagaacggtttgggaaatatatatatatatat

SEQ ID NO: 20145 - DNA, 120 bp, synthetic construct
  source 1..120: mol_type = other DNA
cagaagccatgtgcacaggaggtccctgggagagccttcgggaatgcctcggacctgaaggccgccagtggtggcagggatcgcagaatgggcgcagcttggcaggagcctcatagactc

SEQ ID NO: 20146 - DNA, 120 bp, synthetic construct
  source 1..120: mol_type = other DNA
gatccacaccacagagaagaccaatgccgcagcaccagactgcaccccggggccaggtttccttcagggacatcatcggaaggtgcgccggggagggaagccaagcccagtcctgaagcc

SEQ ID NO: 20147 - DNA, 120 bp, synthetic construct
  source 1..120: mol_type = other DNA
tgacctagagaaacttatgatgtctgcacacaaactggccgctagacggacgctgaggacattttccccctgaggcctctattcaaggcttcctgggggccatctcagcaaacaggagac

SEQ ID NO: 20148 - DNA, 120 bp, synthetic construct
  source 1..120: mol_type = other DNA
tagtatttgcaacttcaaatagatgtagtttcctttacagccgtgtggacctccacagcacagcctcctgtctctattccagggtatgattcagttgtttgtttgtttttgagacagagt

SEQ ID NO: 20149 - DNA, 120 bp, synthetic construct
  source 1..120: mol_type = other DNA
tccggcttagagaaaagacactcacagagcatgcgttgctggggaggcagcccaggacgcctgagcggcagaaaccatgtgcacaggaggtccctgggagaacctttgggagcgcccagg

SEQ ID NO: 20150 - DNA, 120 bp, synthetic construct
  source 1..120: mol_type = other DNA
cctcttccaccaccagaggatccataccggcgagaagaccgtccggcgatccagggccagcctgcacccccaggccaggtctgttgccggggcatcatcagaaggtgcgccagcgaagga

SEQ ID NO: 20151 - DNA, 120 bp, synthetic construct
  source 1..120: mol_type = other DNA
gtagtgagtgagaagatggatgtgtggacagttagagtagtgagtgagaagatggatgggtgaacagagtagtgagtgagtagatggatgggtgaacagttacagtagtgagtgagaaga

SEQ ID NO: 20152 - DNA, 120 bp, synthetic construct
  source 1..120: mol_type = other DNA
agccctgatgctacatattttggatttggttggtatgtgggaccagtgtgtttgatcagttttctaatggggagacaggctttggaggttattaatgggttggtctttgggtgggattat

SEQ ID NO: 20153 - DNA, 120 bp, synthetic construct
  source 1..120: mol_type = other DNA
accagtgagtcccaaggcatagtggttgggtgggtgggtgccaccccttccgtagcttagtgctcaggaacacatctgtctgctctcaggtaccagttcttagaggatgcagtgaggaac

SEQ ID NO: 20154 - DNA, 120 bp, synthetic construct
  source 1..120: mol_type = other DNA
tcctcttgttctgaaagtcctctaaaggcaagatctacgttaaagtcacctttgtgcacccaaagccacagcacaatgactcttgtataacagtcaatcatcacatgaaagtccctactt

SEQ ID NO: 20155 - DNA, 120 bp, synthetic construct
  source 1..120: mol_type = other DNA
aattacttaattacaactgtatttgaattgcaacaaaaatatttactttgagagccagagttcagctggactggtgcagatgactgctgtggtcttgacaatggctttggaggtaattct

SEQ ID NO: 20156 - DNA, 120 bp, synthetic construct
  source 1..120: mol_type = other DNA
tcaacacagtgaaagcatttgttactcaaattaatcactgcaatgtggaagtccaaagttagaactgaaaaataatatgacccatcaaatgagaggcagcatgggtcaggggaggcagca

SEQ ID NO: 20157 - DNA, 120 bp, synthetic construct
  source 1..120: mol_type = other DNA
ggactttggggtcttttaaccagtctttgtgtctctgactgttctgtgtttaaaatttgcttactaggacctacacctcatggaactactgtgagaatcagatataggcgtcaagtgtac

SEQ ID NO: 20158 - DNA, 120 bp, synthetic construct
  source 1..120: mol_type = other DNA
cagtcggactgaagtgtgaattttgagatgtttgttagacgtcctggtgcccagtccaacaggtgggacaggcaagaaacccagcgcttttgaaaccaggagatctcggagaagcatgaa

SEQ ID NO: 20159 - DNA, 120 bp, synthetic construct
  source 1..120: mol_type = other DNA
caagatcagtgttcagggcttatgggccacaaggccacagtctcagctccttcctgctcagggtctggcagttttactttttttctgttttatattttaaaacgtaaaagccatttttag

SEQ ID NO: 20160 - DNA, 120 bp, synthetic construct
  source 1..120: mol_type = other DNA
tgtgccaggaagaatctgagcagccttgccgtccactgcgtgtgacactcggttccatgcttggggtaggttctgagaagagctcctcttgggtggggtttctccaccaaggaacttgga

SEQ ID NO: 20161 - DNA, 120 bp, synthetic construct
  source 1..120: mol_type = other DNA
ccctacagtcttctccagaaggacctgtatgggggtggctgacaggtaacctgctccctgcacatggctctccaccctccatggtgagccaggctggcacctgggcaggagtcaagggcc

SEQ ID NO: 20162 - DNA, 120 bp, synthetic construct
  source 1..120: mol_type = other DNA
cttcttctgcaatgttttggaatagtttcattaggaatgataccagcttttcttgacttgtctgtgaatttgtttgtgaatttgtctggtcctggggattttctggttgataggctttta

SEQ ID NO: 20163 - DNA, 120 bp, synthetic construct
  source 1..120: mol_type = other DNA
tcaccaaaagtctgcagttcggtggtttgttgtgtattcacagagctgtgcagccatccctatagtccaatttaagaactctttagcacccttaatataaaaccccatgtccattaagca

SEQ ID NO: 20164 - DNA, 120 bp, synthetic construct
  source 1..120: mol_type = other DNA
gaattctctgtaccgtcctcgtcctctcagtttctctgtgaagctaaaacccctctaagaatgaaatctattttaaaatattaacgttggagctgggcacagtggctcacacctgtaatc

SEQ ID NO: 20165 - DNA, 120 bp, synthetic construct
  source 1..120: mol_type = other DNA
gtggacctcagtatcatcatttacttagagaatttaccgttgtctacttttagttatacttttctgtatagacttggcccgccacatccgtgggttcaaccaactgtggatggaatgcat

SEQ ID NO: 20166 - DNA, 120 bp, synthetic construct
  source 1..120: mol_type = other DNA
agaaagaaatgcacctttttttagagcacctaggaaaatattttctagagaaactcctggtatcaaaatccctaaagctgtgtgagcagctggctctaaaggcagtcacgtctggtcctg

SEQ ID NO: 20167 - DNA, 120 bp, synthetic construct
  source 1..120: mol_type = other DNA
tgtgtgctactgatgtgcctgatcaagttaagtcaccgtttgggggaaggagcagtacttttgctggtatcatttacatttgtactaacaggtgagatattatcagaacacactctatta

SEQ ID NO: 20168 - DNA, 120 bp, synthetic construct
  source 1..120: mol_type = other DNA
aactgtcaaggctgtcatgtatgggatgcctacattgccagggacttgccatggagcttccattagatccacaaaacaacatcttgaaataacgttgttcatctctgtttctatttcatg

SEQ ID NO: 20169 - DNA, 120 bp, synthetic construct
  source 1..120: mol_type = other DNA
atctctgtcctaagaaggagtgaaaacccttgggtggtggacagcgcggggctgagacgcaggcgggaaaccttgggatgtgcattttgaaaaactgagttgccaggtggagaagagact

SEQ ID NO: 20170 - DNA, 120 bp, synthetic construct
  source 1..120: mol_type = other DNA
tgcagttagttctctgtgtcccgtgactcttttccatgtgcttcttgcacaccctaaaaacagctctcccctacatctgctcactgcctgcaccctggagagaacagggatctcgtctgc

SEQ ID NO: 20171 - DNA, 120 bp, synthetic construct
  source 1..120: mol_type = other DNA
tctctgttgagtaaagagataagcaggtgcatcattgaaggtgcctctgacccacaggcactactcagcaagtaactcatgcatctctgttgagtaaagagataagcaggtgcatcactg

SEQ ID NO: 20172 - DNA, 120 bp, synthetic construct
  source 1..120: mol_type = other DNA
atatgtgaaaataacatactctgacttcagtcctttgagatttttgaggttttctttatgaccctgcgttttgtccacgtaggaaggagggtgttctgctgttgctgagcacagtgttca

SEQ ID NO: 20173 - DNA, 120 bp, synthetic construct
  source 1..120: mol_type = other DNA
gggttatcatgaaggatttaacagtgtgaacatttccattttctaaggtgaccgtgcctttattttgatggctctgaattgtattttccattcagttgcagcaccagccctcccttgatg

SEQ ID NO: 20174 - DNA, 120 bp, synthetic construct
  source 1..120: mol_type = other DNA
gctgtggggagggagggagggagagcgcagcgccacgctgtggggagggagggagagcgtcgcgctgtgctgtggggcgggagggagagggcggcgccacgctgtggggagggagagagg

SEQ ID NO: 20175 - DNA, 120 bp, synthetic construct
  source 1..120: mol_type = other DNA
atcttgcctcacaatagccgcacgttgagagttacattcatgtttaaggtccggaaaggaagcttcttatcagctctgttgagcctctagtaactggattttactacgataatttctgca

SEQ ID NO: 20176 - DNA, 120 bp, synthetic construct
  source 1..120: mol_type = other DNA
agatcaagcttagtgagggtgtcgtgttgaatgcttagataggcagagagctaggcctcttgcaacaaacaagtagtcaggtggtaaaacaaaggacaattcttgacagaaattaagaag

SEQ ID NO: 20177 - DNA, 120 bp, synthetic construct
  source 1..120: mol_type = other DNA
cgatttttcatggataaaactaaccaccttggtatttttgttaaacctgatggtctgtaaggtgctttccacagtgatcttccttcactcctgttgaggcagcttgggctccaccgtaat

SEQ ID NO: 20178 - DNA, 120 bp, synthetic construct
  source 1..120: mol_type = other DNA
aggcgaaggccttataggtgtgtcctcatatggtagagttactggcaagggccagcttactggcctgcaggcaaaggccttataggtgtgtcctcatgtggtagagttactggcaagggc

SEQ ID NO: 20179 - DNA, 120 bp, synthetic construct
  source 1..120: mol_type = other DNA
acacgtacgtgctccttaaggcagccttcagcctacttagcaaccgctctccaaaaaatctgttttaatacctaaaatcaccatgggcgattggatttgacaccgttctatacatagatt

SEQ ID NO: 20180 - DNA, 120 bp, synthetic construct
  source 1..120: mol_type = other DNA
aacagtggtttgctctcggtgatcacccagttcatacttaatgaaatgaggaagaatgaagctctcctctatgactggatggaatttacatgtggtgtttccaacacagcaaaactttcg

SEQ ID NO: 20181 - DNA, 120 bp, synthetic construct
  source 1..120: mol_type = other DNA
ctttgaggaggatcatgtgtactaagtgaggtttaacccttacagtcctttgaggaggatcatgggtactgaggattaacccttatagtcctttgagaagaatggtgtgtactaagtgaa

SEQ ID NO: 20182 - DNA, 120 bp, synthetic construct
  source 1..120: mol_type = other DNA
ctttgagaaggatcttctctactaagtgaggtttaacccttagagtcctttgaggaggatcgtgtgtagtaagtgaggtttaacccttacagtcctttgagaaggatcttctgtactaag

SEQ ID NO: 20183 - DNA, 120 bp, synthetic construct
  source 1..120: mol_type = other DNA
gcttgagttttcagaagtcttaactctgtagttataagaaataaggaatcatttcagggaaatcctgaagctctctagcactccactcatgccttaaagtggaaacatgagtccctgggc

SEQ ID NO: 20184 - DNA, 120 bp, synthetic construct
  source 1..120: mol_type = other DNA
cagttgtgaatacacacaggagaaaggaagcaacagcatcggaagattaaaactctactcagggttttgccgcttattttcgtccatgagcatattacaaaattaccaagacctctgtgg

SEQ ID NO: 20185 - DNA, 120 bp, synthetic construct
  source 1..120: mol_type = other DNA
aaaagtaaatttagctgtttgcagcccataaagctggctttccctgccacagcaccagtgggcaggcctgggcacacatctgcatgagacatttcattggctctaattggtgggtgacgt

SEQ ID NO: 20186 - DNA, 120 bp, synthetic construct
  source 1..120: mol_type = other DNA
tgtcgtttgttgttggtttgttggtggtgctttgttgtttgttgcttgtttggctcaaacatttcctaatgttttgttttcccggtgctaccttctgataaatgttgagacccttctgcc

SEQ ID NO: 20187 - DNA, 120 bp, synthetic construct
  source 1..120: mol_type = other DNA
catgccagatagaaatgtcctcaggtgaaataggaaggcatttatgttggatctcaggccatgggaactttcaaactttctaaatccagtcttcaaaacccattcaagctacatcaggtg

SEQ ID NO: 20188 - DNA, 120 bp, synthetic construct
  source 1..120: mol_type = other DNA
agcagaggagggttatgcattatgggaagacacagatgcaggtgcagtgaattctgacacacacagctttgcagcatctagacttttagtgtctcaatcagatttaaacaatggcaaata

SEQ ID NO: 20189 - DNA, 120 bp, synthetic construct
  source 1..120: mol_type = other DNA
ataaaaccttgtgccaaccctccaagctcacgtgggatctgattcttctggtatgctaaggcaagaaccccgggatacagaaagccttctgtccttgcgataaggcagagggtctaattg

SEQ ID NO: 20190 - DNA, 120 bp, synthetic construct
  source 1..120: mol_type = other DNA
gccacccacagacggcagaactgaagcctataggccgcccacagacggcagaactgaagcctacaggccgcccacggatggcagaactgaaacctacaggccgcccacagacggcagaac

SEQ ID NO: 20191 - DNA, 120 bp, synthetic construct
  source 1..120: mol_type = other DNA
gcatgctagttggttttctggatggtactttaatcatgtaaaagccaatttgctgtgcagtgagttgaccattgggctctctcttgtagagacgatttaaagcattgtgacaatggggtt

SEQ ID NO: 20192 - DNA, 120 bp, synthetic construct
  source 1..120: mol_type = other DNA
gaagagtagggattttttcctaactcattctacaatgccagcattacgtaatgcaaaaaccagaaaaggacacagcaaagaaaggaaacaacaggccaatatttctgatgaacacagaca

SEQ ID NO: 20193 - DNA, 120 bp, synthetic construct
  source 1..120: mol_type = other DNA
tgagttgccttctctgggtggaactgcatctgctccttctttcctgggaattcagaatcattcttgagaaatcactctgcatctgtgtcattctcccaactcacttctctaggctccgtt

SEQ ID NO: 20194 - DNA, 120 bp, synthetic construct
  source 1..120: mol_type = other DNA
gctgtagaggaaagtggtgcagtgatggagtgcgtctccctgtcctgcctgctgctggaggtgctggatcgctgtagaggaaggcggcgcagtgatggagggcgtctccctgtcctgccg

SEQ ID NO: 20195 - DNA, 120 bp, synthetic construct
  source 1..120: mol_type = other DNA
tgtctctactcacatcttattcctgctacatcaatgatggtgtaaacctccaaaggcagagttaggactctggactcagattccttctcaccactgactttacgaggatgaccacagtac

SEQ ID NO: 20196 - DNA, 120 bp, synthetic construct
  source 1..120: mol_type = other DNA
gttggttggccaagagtatggaatacatgactgtttatcgaggtgttcactggtgagttgtgtgcgtgtgtgtgtgtcctgtagctcaatgtaaaatatgcctaaaaataatagtctctg

SEQ ID NO: 20197 - DNA, 120 bp, synthetic construct
  source 1..120: mol_type = other DNA
tgcctgctgcagttatccagcagccagctgctccgaagatttagatttgaagatatggtcatcattgtttgtgaaacctcgcctaataaggccataaaaaatgatgagttcatgtccttt

SEQ ID NO: 20198 - DNA, 120 bp, synthetic construct
  source 1..120: mol_type = other DNA
tttactccaagtagttttttattcagttgtgcttgtcgcggggtcaagtgtcttaggggtgagtgtgataaatgctgaagggtcttgaaactgggaattcatgagtggataaaaccaaca

SEQ ID NO: 20199 - DNA, 120 bp, synthetic construct
  source 1..120: mol_type = other DNA
tgccagccatggctgtgatgaaggtgaaggtatgttccctgtcactcaagcctctgcatttagtaaaaagcaaattgcacctcaggagacagcactggaaatggtgatttagttcacaga

SEQ ID NO: 20200 - DNA, 120 bp, synthetic construct
  source 1..120: mol_type = other DNA
cattggagaaggttgggattctggagcatttagcatcagggcagcattggagaaggttgggattctggagcatttagcatcaggccagcattggagaaggttgggattctggaacattta

SEQ ID NO: 20201 - DNA, 120 bp, synthetic construct
  source 1..120: mol_type = other DNA
caggccagcattggagaaggttgggattctggagcatttcagggtttggattttcatttttgggatgctcaatctgtataggatgtttcctgttagagagacgtttatatcctaaaatgg

SEQ ID NO: 20202 - DNA, 120 bp, synthetic construct
  source 1..120: mol_type = other DNA
aagatattttcctttaatatttaaaaccttcttgaggacctaattaatgcaaatcagagccttcgtagcaagtcctctgtgaagacctcagggcagggatctcactccttagacaaggcc

SEQ ID NO: 20203 - DNA, 120 bp, synthetic construct
  source 1..120: mol_type = other DNA
aaaccacagcatggcaaatcattattggagacagacagtgcaattaacacagtgaggtggctgagaagttccacaatagcaaaagtatcccgccttcttcaatctacttttctccaaatc

SEQ ID NO: 20204 - DNA, 120 bp, synthetic construct
  source 1..120: mol_type = other DNA
tccatgaaagtcaccaacgctgagcatttcagtagaacttccgtgaaggtcaccgacgctgagcatttcagtagaacttccgtgaaagtcaccgacgctgagcatttcaatagaacttcc

SEQ ID NO: 20205 - DNA, 120 bp, synthetic construct
  source 1..120: mol_type = other DNA
catagaacttccatgaaagtgaccggcgctgagatggaatgactcctgtgaaaccctcacaaaatggaccccccccatgaaagaggaaccatgaatatttacctgataacaagaagtacc

SEQ ID NO: 20206 - DNA, 120 bp, synthetic construct
  source 1..120: mol_type = other DNA
tctttgcttttcttttaataaaataaataaagttccaaaccctgagaacaagtttcactggagtgaatactgcaggggcatttgcctggacattttaccccatggacaccgctggccccg

SEQ ID NO: 20207 - DNA, 120 bp, synthetic construct
  source 1..120: mol_type = other DNA
gaagtccataacagactcgtaggctccttaaaaaaactctccctccacagcccccaggacttcctggtcactgcccgctctgagatcagggaagccgtggggcctctccctgccagcttc

SEQ ID NO: 20208 - DNA, 120 bp, synthetic construct
  source 1..120: mol_type = other DNA
cctttaatagttgttttgcagctttaaatctgtttggaaaatgatgcccaatgactgtgtgtgggtttatgtcacctgtgctcacagacatgtgaagcaaaaaccttggcctgctcccca

SEQ ID NO: 20209 - DNA, 120 bp, synthetic construct
  source 1..120: mol_type = other DNA
tcaggccagtgccgtgactcacatctgcaatcccaacacagtattaggccagtgccgtgactcacatctgcaatcccaacacagtatcaggccagtgccatgactcacatctgcaatccc

SEQ ID NO: 20210 - DNA, 120 bp, synthetic construct
  source 1..120: mol_type = other DNA
agagagatccagcacggaggttttcttaactttgctgtatcacactgtaagaaactgggtggccaatggaacagacggagcagggcagagtgagcaggaagaaatgatgctggggaattt

SEQ ID NO: 20211 - DNA, 120 bp, synthetic construct
  source 1..120: mol_type = other DNA
tgggatacagagatgagtttgatcatttcatatcctcagaagtctatgctccttctgtaaagtcattgttctagatgccaggatacagagatgagttcgatcatttcatatcctcagaag

SEQ ID NO: 20212 - DNA, 120 bp, synthetic construct
  source 1..120: mol_type = other DNA
ctgaaaagtccatgctccttctgtaaagacagacacctgaagaaggcacttcatttagggatgaatttattagatcatcaggaaacatgatggtttgttggttggagaactgacttactt

SEQ ID NO: 20213 - DNA, 120 bp, synthetic construct
  source 1..120: mol_type = other DNA
caaaaaattgtgttatttcttgagttttgatctgatgaactactgcagtaaaccactgtgtctcacagtgttggaagggaatggagccagctccttcttgttgtatggtgtaggcaatgc

SEQ ID NO: 20214 - DNA, 120 bp, synthetic construct
  source 1..120: mol_type = other DNA
gtttgtatgatcccgtcattgctgcaggaggtaccatgttggatatggtaccatgttggataagtggcacagtggatagaatccatcgccatagtgaccatgagtggattcctgctatta

SEQ ID NO: 20215 - DNA, 120 bp, synthetic construct
  source 1..120: mol_type = other DNA
ggggtagcagttgtgaatatctggtgcatctcactggaaattccctgggtacacgtatatatagcatgtatgatagtgtgggtacacatatatatagcatgtatgatactgtgggtacac

SEQ ID NO: 20216 - DNA, 120 bp, synthetic construct
  source 1..120: mol_type = other DNA
cagatgtgtacatagcatgtatgatactgtgggtacatatatatatagcatgcatgatagtgtgtgggcagatgtgtacatagcatgtatgatactgtgggtacacatatatatagcatg

SEQ ID NO: 20217 - DNA, 120 bp, synthetic construct
  source 1..120: mol_type = other DNA
tttcagggctgtgatcactagcacccagaaccgtcgactggcacagaacaggcacttagggaaccctcactgaatgaatgaatgaatgaatgaatgaatgaatgtttgggcaaataaacg

SEQ ID NO: 20218 - DNA, 120 bp, synthetic construct
  source 1..120: mol_type = other DNA
gatcactttctaaaagatggatcgagagactgaagcacagacagtttaggcaacttccccaggtctgaattccagcaactggaggcatcgatgcaccagaaaggccacaaacctggcaga

SEQ ID NO: 20219 - DNA, 120 bp, synthetic construct
  source 1..120: mol_type = other DNA
gaggaggagtgagaagagaggccagggattcaccagggctcccaggaagaaaagatctccagtcttcaatatggagatgagtggccagacagataaagatatttgtgtgtgtgtgtgtga

SEQ ID NO: 20220 - DNA, 120 bp, synthetic construct
  source 1..120: mol_type = other DNA
cattgaggagcttctgctaaactggaataataggattcttgctgaaactcagctcctcagcgaagggcacaagggccagggtcaaggccagttatcaagcaagtgagtctgaaaagagat

SEQ ID NO: 20221 - DNA, 120 bp, synthetic construct
  source 1..120: mol_type = other DNA
tagatacacatatagattcaggcgctgatataattatagagggagctctgcttttgcagtgttttgttcctaacgttgcggttaaaggaactgtattcatttcctgggggtgccacagca

SEQ ID NO: 20222 - DNA, 120 bp, synthetic construct
  source 1..120: mol_type = other DNA
tctgggagacccggttcagcccacgacagccaattggtccatagtgccatcttttaatcttcagaataaaactttagaagaagtgtatacaacaggagcatgagttgcataaactaattt

SEQ ID NO: 20223 - DNA, 120 bp, synthetic construct
  source 1..120: mol_type = other DNA
gaataaaaagttttattcttcagttttattccctcccttgagggcagaaattggaagttgaactttcatgttaaaaatggcgctgctgttgaaagactcagacccgcacctgagaggccc

SEQ ID NO: 20224 - DNA, 120 bp, synthetic construct
  source 1..120: mol_type = other DNA
ccattcccacttcttggcttttattcaagcctcaatctctccatagaatactccctccttatcatctcaacctggcttcgaatgttcaagtctgacacatcgcaaaggctacacccaaac

SEQ ID NO: 20225 - DNA, 120 bp, synthetic construct
  source 1..120: mol_type = other DNA
ctctgtgcaacctccccaaatcccccacactgtgtgcaaactcctcaaatccccctactgtgagcaacctcctcaaatcaccccccactgtgttcaacctcctcgaatcaccccactgtg

SEQ ID NO: 20226 - DNA, 120 bp, synthetic construct
  source 1..120: mol_type = other DNA
tcaaatccccccactgtgggcaacctccccaaatccccccactgtgtgcaaactccccacattccccccagtgtgtgcaacctttacaactctactcactgtgagcaacctccccaaatc

SEQ ID NO: 20227 - DNA, 120 bp, synthetic construct
  source 1..120: mol_type = other DNA
cctcctcaaatccccccactgtgtgtaacctcccaaaatccccccactgtgtgcaaaccccccaaatctccctatgaccaaaaccacaaatccccccactgtgtgcaacctcctcaaatc

SEQ ID NO: 20228 - DNA, 120 bp, synthetic construct
  source 1..120: mol_type = other DNA
tcaagtccgccactgtgtgcaacccccgcaaatcctcccagtgttcgcaacctcctcaaatcctctcactgtgtgcaaccttctcaaatcccacgccactgtgagcaacctccacaaatc

SEQ ID NO: 20229 - DNA, 120 bp, synthetic construct
  source 1..120: mol_type = other DNA
gcaaatacccccactgtgtgcaacctcctcaaatccccccactctgtgcaacctcccctatccctcccactgtgtgcaaccgccccaaatcccccaactatatgcaacctactcaaatcc

SEQ ID NO: 20230 - DNA, 120 bp, synthetic construct
  source 1..120: mol_type = other DNA
tcaaatcctcccactatgtgcaacctcctcaaatctccccactgtgtgcaacccccccagatctcccccactgtgagcaaaagcacaaatcccccactgtgtgcaacattcctcaaatcc

SEQ ID NO: 20231 - DNA, 120 bp, synthetic construct
  source 1..120: mol_type = other DNA
atcctcctaaaatccccccactgtgagtaacctcctaaaatccccccactgtgagtaacctcctcaaatcccaactctgtgcaacctccccaaatctccccagtgtgtgcaacttcccta

SEQ ID NO: 20232 - DNA, 120 bp, synthetic construct
  source 1..120: mol_type = other DNA
cccaaatcacccccactctctgcaacctccccaagtctcccacactctgtgcaacctcctcaaatccccccactgtttgcaacctcccaaaatctccctatgcgcaacctcgcaaaatct

SEQ ID NO: 20233 - DNA, 120 bp, synthetic construct
  source 1..120: mol_type = other DNA
cactatgtgcgacctcctcaaatccccccagtatgtgcaacctcctcaaatccctccactctgtgcaacctcaccctatctttcccactgtgtgcaacccccccaaatacccccactatg

SEQ ID NO: 20234 - DNA, 120 bp, synthetic construct
  source 1..120: mol_type = other DNA
aaatcacccccactctctgcaacctccccaaatccctcacactgtgtgcaacctcctcaaatcaccctactgtgtgcaacctcctcaaatcacccccactgtgtgcaacctcctcaaatc

SEQ ID NO: 20235 - DNA, 120 bp, synthetic construct
  source 1..120: mol_type = other DNA
tgtgtccagcctccccaaatccctcccactgtgtgcaacctcctctagtcccccactgtgtgcaccccccaaaaatccccccactgtgtgcaacctcctcaaatccccctactgcgagca

SEQ ID NO: 20236 - DNA, 120 bp, synthetic construct
  source 1..120: mol_type = other DNA
gtgttcaacctccccgaatacccaccactctgtgcaacctccccaaaacgcccccactctgtgcaacctccccaaatccccccaactgtttgcaacctcccaaatcccccccaatgcgag

SEQ ID NO: 20237 - DNA, 120 bp, synthetic construct
  source 1..120: mol_type = other DNA
aacctccccaaatccctccccaatgtgtgcagtctcctcaaatcctccgccactgtgagcaacctcctcaaatccccccagtgtgtgcaatttccctaaatcgccgcaagtgtgtacaac

SEQ ID NO: 20238 - DNA, 120 bp, synthetic construct
  source 1..120: mol_type = other DNA
gtgcaacctgctcaaatccccaaactgtgtgcaacctccccgaatccccccaactttgtgcaacctcaagtccccgaatgtgtgcaacccccccaaatcccgtgtgcaacctccccaaat

SEQ ID NO: 20239 - DNA, 120 bp, synthetic construct
  source 1..120: mol_type = other DNA
aacctcaaatccccccactgtgtgcaacgtcctcaaatacccccactgtgtgcaacctccccaaatccctgccactgtgtgcaacctcaccaaatccgtccactgtgtgcaacctcccta

SEQ ID NO: 20240 - DNA, 120 bp, synthetic construct
  source 1..120: mol_type = other DNA
ctccccaaatccccccattgtgagcaatgtccccaaatccccccactgtgagcaacctcctcaaatccccccactgtgtgcaatctcaaatcccccccactgtgtgcaacctcctcaaat

SEQ ID NO: 20241 - DNA, 120 bp, synthetic construct
  source 1..120: mol_type = other DNA
cccaagggtcagcctgggtttgtctctgcttctctcctagtgccaggtggagctgagtgaacactgcatgctgtccacttgggcagctgccgggggatgtgcacctggtctctaggctgc

SEQ ID NO: 20242 - DNA, 120 bp, synthetic construct
  source 1..120: mol_type = other DNA
ccttctatttagccataggtctcaatctccacccccttacgtaaaatcccagagataacccccaccacaggcactgaagaaagcagaagtaagttcctgggataggaaggagaggacaga

SEQ ID NO: 20243 - DNA, 120 bp, synthetic construct
  source 1..120: mol_type = other DNA
ccagatgacaatctgcactctggagtgccttaaaattatgctacactccctacgtcacactgccagccccagtgtcagacaagaggcggcctgaccctgcttctcctgaatgtagcccaa

SEQ ID NO: 20244 - DNA, 120 bp, synthetic construct
  source 1..120: mol_type = other DNA
cataccacacacaatcacattatatacacagaaacacatacgccacctacacagaacattatatagagacacaccacgccacacataacacatcacacacacgccacacacagatacata

SEQ ID NO: 20245 - DNA, 120 bp, synthetic construct
  source 1..120: mol_type = other DNA
gacagaaaccagccccaacctgactgaaaccagccccaacctgactgaaacctgccaactcctgactgagacctgtcttctcctgaaggggacctgccctgtcctaactgaaacctgccg

SEQ ID NO: 20246 - DNA, 120 bp, synthetic construct
  source 1..120: mol_type = other DNA
caccacccactccaggcttttcccttttccatgctcaaacaggactcctccatctcttcttccccaagccggttcctccccagctgtctctgggtctcaatgggtgacactgacagagcc

SEQ ID NO: 20247 - DNA, 120 bp, synthetic construct
  source 1..120: mol_type = other DNA
gtgtggtttgtgtctacgtgtgtgtctgtaaatggtgtgtgtgtaaatggtatgtgtgtgtgtggatggtgtatgcgtgtatgtgcgtgtgtgtggtttgtgtctgcgcgtgtgtctata

SEQ ID NO: 20248 - DNA, 120 bp, synthetic construct
  source 1..120: mol_type = other DNA
atttcaggataaacaaacaattgcaaagaagctcccgtacctgagacacagcaagctgaggggcttcccagcatttgaacaggtaagaaaggctgtcccggaaggccgagccacgcatca

SEQ ID NO: 20249 - DNA, 120 bp, synthetic construct
  source 1..120: mol_type = other DNA
ctgtcccatccacaagcccctatgccctgggtctgagcacctgagaggtggcctagagtgatggacagagaggtgctgtcccatccacaggcccctgtgccctgctggacagagaggtgc

SEQ ID NO: 20250 - DNA, 120 bp, synthetic construct
  source 1..120: mol_type = other DNA
agggacaactccaggtgaaggagggacaactccaggtgaagcgggggacaactcccggtgaaggagagacaactccaggtgaagggggggcaactccaggtgaaggggggacaactccag

SEQ ID NO: 20251 - DNA, 120 bp, synthetic construct
  source 1..120: mol_type = other DNA
gtgaagcgggggacagctccaggtgaaggaaggacaactccaggtgaagcgggggacaactccaggtgaaagagggacaactccaggtgaagggggggcaactccaggtgaagggggggg

SEQ ID NO: 20252 - DNA, 120 bp, synthetic construct
  source 1..120: mol_type = other DNA
tgtgatatcaagtcctccagggagcaagtgcagtaacaactgtttaagtcacaaatcggacacggtctcactgcaagccacagaatcttacatcctgctggcattgccagaagccagtca

SEQ ID NO: 20253 - DNA, 120 bp, synthetic construct
  source 1..120: mol_type = other DNA
agagcatgcttcagtgttcagcgatcagctctaaacatcacctgccccactaattatacaatctaagagcacgctgcagtgctcaccaatcagctctaagcatcacctgccccactaata

SEQ ID NO: 20254 - DNA, 120 bp, synthetic construct
  source 1..120: mol_type = other DNA
atctgggttcctccagttttgcactattataaatagccctgcaatgacaagctttcggtacatcccatctgtgatgcgtgttaatatacttatgaaacaggttcctagaaatggcactgc

SEQ ID NO: 20255 - DNA, 120 bp, synthetic construct
  source 1..120: mol_type = other DNA
cacccactctccaccagcacccgctccaccagcacccactctccaccagcacccgctccaccagcacccgctccaccagcacccactctccaccagcacccactccaccagcatccactc

SEQ ID NO: 20256 - DNA, 120 bp, synthetic construct
  source 1..120: mol_type = other DNA
gggagggatgcagagagagagggaggggagggatgcagagagagagatgcacagagagagggagggatgcagagagagaggtggggttgaaggtgagaagagaggcagaagggaggtgta

SEQ ID NO: 20257 - DNA, 120 bp, synthetic construct
  source 1..120: mol_type = other DNA
ctaaccccttatcagataaatagtttgcaaatatttatctcccaacctatagggtgccttttcatcttgttgattatttccttggctgtacagagcttttactttaatgtagtcctactt

SEQ ID NO: 20258 - DNA, 120 bp, synthetic construct
  source 1..120: mol_type = other DNA
ccccgacgcagactcttcttttcaagctgccaagcataagaatggatttttcagccacataggaattgtgttggtcgcactaattggacctcaaatagcatttaaacacattccaaattg

SEQ ID NO: 20259 - DNA, 120 bp, synthetic construct
  source 1..120: mol_type = other DNA
tcatctctggcttgggctctgtgcacaggtctgcatcctcgtgtcagtgtgtcttgaacatgtcatgacgcactgggagaagtctgcctttctcttgggtcagagtggacaagaaaacac

SEQ ID NO: 20260 - DNA, 120 bp, synthetic construct
  source 1..120: mol_type = other DNA
tttcagagttagaactttaagtttggagactcttcttaaatttcactgaagtggagtgagaactgaagtggtggcaaaaaaggatgctcagggcactgcacatgagagagaagtctcaac

SEQ ID NO: 20261 - DNA, 120 bp, synthetic construct
  source 1..120: mol_type = other DNA
ccctaggttcctcacatctgcacccagcgaacacatggctgcttcctgtttcaacacagacttaaatctcctcttataaaatgtattgagtcaatggtgcaggaaaacttttcttaggag

SEQ ID NO: 20262 - DNA, 120 bp, synthetic construct
  source 1..120: mol_type = other DNA
gagaaaaaccatagtcaacacatgatggaatattattcagtctcaaaagggaaggaagcttggatacgtgctacaaccttgaggacatggggctccatgaaataggacggtcacaaaaaa

SEQ ID NO: 20263 - DNA, 120 bp, synthetic construct
  source 1..120: mol_type = other DNA
agaatggttgcatggatactcaaagcaccatttctaccaagtgtgtattgctcttgcaccactgtaagatcgaaaaattgtaagttgaggaccatctgtatacctaacactactgaacca

SEQ ID NO: 20264 - DNA, 120 bp, synthetic construct
  source 1..120: mol_type = other DNA
cttctttgctctgtgctatcctgataccacttttctttgctcttgggcaacctgaaaggctaaataagaaacacatttcagaaagcaccccacaccgttgatttcagtgagctttctttc

SEQ ID NO: 20265 - DNA, 120 bp, synthetic construct
  source 1..120: mol_type = other DNA
ttgtttgcctggtttgtgaatctttttttttttttgtagcccttaacttctctcatagggaaaagatttgtattctaatcggggtttgggggggtgttaaagacgctgtgctctgcctgc

SEQ ID NO: 20266 - DNA, 120 bp, synthetic construct
  source 1..120: mol_type = other DNA
accatggccaaggggatcttttttataaaaaaggaagatcacttaaaacagaggtcagagctaggcagagtcaggaccatggggtgttgtgagtggacaaaggatcaaggctccacagac

SEQ ID NO: 20267 - DNA, 120 bp, synthetic construct
  source 1..120: mol_type = other DNA
agggagagagagagaaagagagacggagggagagagacagagtcttgctcacagcaagcacagagtgcagcagtgccagggaagcagcttcagccccaggaagtcactgagtggagaaaa

SEQ ID NO: 20268 - DNA, 120 bp, synthetic construct
  source 1..120: mol_type = other DNA
caattccagaacactagttcttttgaactcaataatgagagtaaaggtacctctcgggctttgaccatttgtcaatgcatgtggacgcgcatcttggaggtagataaagtgcaaatggga

SEQ ID NO: 20269 - DNA, 120 bp, synthetic construct
  source 1..120: mol_type = other DNA
cagtcacccttcacaactgttgcccattttccatcattctcatcccacagctctatgctcatttatgattcttcttgctggaattttctctcctactgatcctttaagacccatctcaag

SEQ ID NO: 20270 - DNA, 120 bp, synthetic construct
  source 1..120: mol_type = other DNA
aggctgattgttttgaccacataaggaagtggtttgtggacaatgtggtctggaagaggctaggaaaccgggctaggagatgtgagtgctgctgtttatttagttcttttctcacacgca

SEQ ID NO: 20271 - DNA, 120 bp, synthetic construct
  source 1..120: mol_type = other DNA
cgggctgcctttacctagtgagtgagggccgccctgcctcagtgtgggctgtacagaaccgagtgtagacgggccgcctttacctagtgagggccaccctgcttcagtgtgggctgcaca

SEQ ID NO: 20272 - DNA, 120 bp, synthetic construct
  source 1..120: mol_type = other DNA
ccttttccatcatgaagcctaatacattgattcatgcctttcgtgcatgccttctttcctgcatgagttctttcctgcatgcgttctttcctgcaggcattctttcctgcaagcgttctt

SEQ ID NO: 20273 - DNA, 120 bp, synthetic construct
  source 1..120: mol_type = other DNA
tgcatgcgttctttcctgtaggagttctttcctgcatgtgttctttcctgcatgcgttctttcctgcaggcattctttcctgcatgcgttctttcctgcatgcgttctttcctgcatgcc

SEQ ID NO: 20274 - DNA, 120 bp, synthetic construct
  source 1..120: mol_type = other DNA
gctttctttcctgcctgctttctttcctgcatgcgttctttcctcatgcgttctttcctgcgtgccttctttcctgcatgcgttctttcctgcatgtgttctttcctgaatgcgttcttt

SEQ ID NO: 20275 - DNA, 120 bp, synthetic construct
  source 1..120: mol_type = other DNA
gaagttaaaatttatttctctgcacattttagagatgtggcatgtcaacatcactgggattcagggcaccttggatgctcagagctgtccaaaatctttctgaattcacagtggctgtga

SEQ ID NO: 20276 - DNA, 120 bp, synthetic construct
  source 1..120: mol_type = other DNA
tctagaaggagggccttacacacacccctcgccagtgcctctcatcctgtgaccgagagcagattctagaaggagggccttatacacacaccctcgccagtgcctctcatcctgtggctc

SEQ ID NO: 20277 - DNA, 120 bp, synthetic construct
  source 1..120: mol_type = other DNA
gggccttatacacacccctcgccagtgcctctcaccctgtggcccagagcagattctagaaggagtgccttatacacaccccctcgccagtgcctctcatcttgtggcccagagcagatt

SEQ ID NO: 20278 - DNA, 120 bp, synthetic construct
  source 1..120: mol_type = other DNA
ctgggttctctccagactccagactaagtagcttcgttactgtacacaggtcacttcatttttctcattaaatccctattgattaagaagctggttagtaagtcgtagggacattgaagg

SEQ ID NO: 20279 - DNA, 120 bp, synthetic construct
  source 1..120: mol_type = other DNA
gtgcagaagagagctcctaacttctccccaaccatctccaccctccaatgcgggtgcagaagagagctcctaacttctccccaaccatctccaccctccaatgcgggtgcagaagagagc

SEQ ID NO: 20280 - DNA, 120 bp, synthetic construct
  source 1..120: mol_type = other DNA
caacaatctccatcctccaatgcgggtgcagaagagagctcctaacttctccccaacaatctccaccctccaatgcgggtgcagaagagagctcctaacttctccccacaatctccaccc

SEQ ID NO: 20281 - DNA, 120 bp, synthetic construct
  source 1..120: mol_type = other DNA
tgacactccctgctcttcagtttgggactgtagggtccctttcacaggaacttaggccatttcctcattttcacatcgtatagaacaaataagtgattgtacaaactcagttgtagatca

SEQ ID NO: 20282 - DNA, 120 bp, synthetic construct
  source 1..120: mol_type = other DNA
gtgtggtttttgttacttccttgtattttaatagctctgttcaaatatgagtaactcaccacaaattgtgtggcgtgcaaactaatatattcacctgattggcctccacacgtgaggggg

SEQ ID NO: 20283 - DNA, 120 bp, synthetic construct
  source 1..120: mol_type = other DNA
ccttactggttaactgtagtcccgcactgttaatgtttttcgttttttgaagccaagatagcgtgctcaccgcaaaagaaatatggacctcgatgaacagataatagggagaatctcatg

SEQ ID NO: 20284 - DNA, 120 bp, synthetic construct
  source 1..120: mol_type = other DNA
agataatagcgtatcattacccttcatattcccaaaggagcccaagaatgaacagattacgaaacaacccagtacatcacaacccaacccattacatcccaacccaacccagtatgtcac

SEQ ID NO: 20285 - DNA, 120 bp, synthetic construct
  source 1..120: mol_type = other DNA
gagagatgccattcaaggaacagaaaaccttaccagacaggaaaagtaagtcctggagctctaacgcacagcatggtgactatggtaaatagcactgtatcgtctatttgaaatttgcta

SEQ ID NO: 20286 - DNA, 120 bp, synthetic construct
  source 1..120: mol_type = other DNA
ctgaattaggagagatgctggatggtgtgaaatctatgatccgcctttcctgatcacagtctgtgatactaaagcgtgctgaggcttcagagcagatgtgataggagctcaggaaagagg

SEQ ID NO: 20287 - DNA, 120 bp, synthetic construct
  source 1..120: mol_type = other DNA
ggagagagaggtagagaaagagagagaagaataaagccagagagagagagattccaaaggctggcaacccaaatacatacaatcaagcaacccaagagcggagttacattttaaaaactc

SEQ ID NO: 20288 - DNA, 120 bp, synthetic construct
  source 1..120: mol_type = other DNA
agagagaggcagacaccagtaccacgggtcaaatctgatggcagatattcagaaaccacgcatcacaaaaaggctgcaaccagcaagaccccgcatggtaccagtctgatataccacttc

SEQ ID NO: 20289 - DNA, 120 bp, synthetic construct
  source 1..120: mol_type = other DNA
tacactctagagctttcacagtgagtcaggtgcacacccaacacggccctgatacactctagagctttcacagtgagtcaggtgcacacccaacatggccctgatacgctctagagcatt

SEQ ID NO: 20290 - DNA, 120 bp, synthetic construct
  source 1..120: mol_type = other DNA
tactctagagcattcacagtgactcaggtgcacacccaacacggccctggtatgctctagagctttcacagtgagtcaggtgcacacccggcatggctctggtacactctagagcattca

SEQ ID NO: 20291 - DNA, 120 bp, synthetic construct
  source 1..120: mol_type = other DNA
tacatatatgggtctctggtcctatgacatgtattcacatatgaagcttcaaacacataaacaggtctctttgttcttctccagggtgatgtgaaactagaacactgggcaaagccagca

SEQ ID NO: 20292 - DNA, 120 bp, synthetic construct
  source 1..120: mol_type = other DNA
ctcctaaagaaaagccagcagatccctcctaaagaaaagccagcagatccttcctcaagaacagtgagcaggtccctcctaaagcaaagccagcagatccctcctaaagcaaagccagca

SEQ ID NO: 20293 - DNA, 120 bp, synthetic construct
  source 1..120: mol_type = other DNA
tctgtgcccttttcttttcttctgataataatcttaacacgtacaccctgctttcccaggtaatgctaaatgctctcagcctgtctggcatttcactgtgatatttacctccatctacac

SEQ ID NO: 20294 - DNA, 120 bp, synthetic construct
  source 1..120: mol_type = other DNA
agcattaatctacagtgaaggtgcataactcttgaacagctggagagcctctttatcatcaaagggcgatggaaaaccataaaattaccctgttgtggctaatcagccatcgaaccaatg

SEQ ID NO: 20295 - DNA, 120 bp, synthetic construct
  source 1..120: mol_type = other DNA
atgctgtacactgagcactgcacatccaaaaatgcgtgtggtctgatcatcaagccttaagcacagacagaagcagcagccacactcaatcatcacactcaatcatcgcactcaatcatc

SEQ ID NO: 20296 - DNA, 120 bp, synthetic construct
  source 1..120: mol_type = other DNA
gtctctgacaacaactggtaaggagaaatcataccaggaggcaaaactctgagcaggacacttggctgtccacattgtccagatgggcagatgggcagagatatggatctttattgattt

SEQ ID NO: 20297 - DNA, 120 bp, synthetic construct
  source 1..120: mol_type = other DNA
tgtagaagtaatattgttcattaggagaatcccacaggaggaataattataaccatgtgactgctttcaaccagcttagctgactcgtgacctggctttgacctgtgtccttgaactgat

SEQ ID NO: 20298 - DNA, 120 bp, synthetic construct
  source 1..120: mol_type = other DNA
tcctctttccacacatacaccctccatccagcccatcctctctccatgcacaacctccatccggcatgtcctttctacacacacacaccctccatatagcttgtcctctctacacacaca

SEQ ID NO: 20299 - DNA, 120 bp, synthetic construct
  source 1..120: mol_type = other DNA
catccagcccctcctctccctgcacacatacaccctccatccagcccatcctctctacacagacaccctccatccagcccatcctcaccacacacagacaccctccatccagcccatcct

SEQ ID NO: 20300 - DNA, 120 bp, synthetic construct
  source 1..120: mol_type = other DNA
attaagagctaatcttgttctcctgcctagcctggaagccatctacttctcccggcacccatccggcaggcaggtggtggcagtttctctctgtaccagaatcacttccttttgtccatg

SEQ ID NO: 20301 - DNA, 120 bp, synthetic construct
  source 1..120: mol_type = other DNA
ctatcactcaaatctccgatttacagtacttgttgcatggtttgaaaagatttcctgttacaaaatccccactgtgtgatttgctgactctgatgtaggaagacagacacggtcaccaag

SEQ ID NO: 20302 - DNA, 120 bp, synthetic construct
  source 1..120: mol_type = other DNA
cctccactgccatccagttcagccctccattcccgtccagttcaaccctccaatcccgtccagttcaaccctccagtcccgtccagttcagccctccaatcccgtccagttcaactctcc

SEQ ID NO: 20303 - DNA, 120 bp, synthetic construct
  source 1..120: mol_type = other DNA
ccaacacctgtaccccaccacagtcatcaccaccgccatccatatcactgtcttcaccacctccgtccacaccaccatcatcatcactagcatcgcccccatgcctaccatcatcaccac

SEQ ID NO: 20304 - DNA, 120 bp, synthetic construct
  source 1..120: mol_type = other DNA
atacacacccccaccaccatcaccaccaccatcatcaccacccccacacccactcccaccatcaccatcccagtccctacccccattccaccactgttatcgccaccaccattatcatca

SEQ ID NO: 20305 - DNA, 120 bp, synthetic construct
  source 1..120: mol_type = other DNA
attgtcatcatcttcacggtcatcttcgttatcccgttacctcatgtataaaataaggatgatgaaaatgatggaagccaaaaaccgtacatgacctgcccaaggacccaccacgagtag

SEQ ID NO: 20306 - DNA, 120 bp, synthetic construct
  source 1..120: mol_type = other DNA
cacgagacagtgtgagcagaggcaggtatgcactcgtgagatggtgtgagtggaggcaggagcacacactcataagacagtgtgagaaaaggcaggtgcacacacatgagacagtgtaaa

SEQ ID NO: 20307 - DNA, 120 bp, synthetic construct
  source 1..120: mol_type = other DNA
tgagcagaggcaggtgtgtatacactcatgagatggtgtgagcagaggcaggtgtgtatacactcatgagatggtgtgagcagaggcaggtgtgtatacactcatgagatggtgtcagca

SEQ ID NO: 20308 - DNA, 120 bp, synthetic construct
  source 1..120: mol_type = other DNA
agccatgtccaacccacaatctacgcccacagaccagttactgttgagatctctcctgttccaagtatgtacagtcctgtcgagacagcttctaccctgggcacagtccctcattttgct

SEQ ID NO: 20309 - DNA, 120 bp, synthetic construct
  source 1..120: mol_type = other DNA
aatattagatcgggatgtcctggtgaccagcttgatatatgagccatgcaatccctacacatcaatattctgaagccagggtatgagagagaagatcagacagaatgcattaaaagtacc

SEQ ID NO: 20310 - DNA, 120 bp, synthetic construct
  source 1..120: mol_type = other DNA
gtaggcaccatccctgaaaccacaggccatcttcatggtgggtcctccttccttttcaggtggccactggtaactatttttataaataagtaattcccttcttatattttttccagtaga

SEQ ID NO: 20311 - DNA, 120 bp, synthetic construct
  source 1..120: mol_type = other DNA
acatttgtcaaaaatagttacctgattatcatatttaagagactgcgtcccaaccaaaaaccgaatggcatctgtttctgcagtttgaggtgttaaggcacgtgcctgcaggagggaaga

SEQ ID NO: 20312 - DNA, 120 bp, synthetic construct
  source 1..120: mol_type = other DNA
aaaaagagagaaaaaaaagaaaataacatttcagttaacctcaaagatacaatactgaagataaaatcctctgggttttttgagagatttcttaaggagatcaagaagttaaattaagta

SEQ ID NO: 20313 - DNA, 120 bp, synthetic construct
  source 1..120: mol_type = other DNA
ctttgtgctgagatggagagatcttggctttctccaccccccatcttggggttgtcctagtttgagtctttcttctgctcacccgagagactgcagggactttgtgctgtgtccctgtca

SEQ ID NO: 20314 - DNA, 120 bp, synthetic construct
  source 1..120: mol_type = other DNA
gggtacacggcgtcttcttgagtaaataaagggatgagggaatgaatagataagagaacccccagtcggtaagctactcttttgataaagaagtagcgtcagaatgttgggtttaaagaa

SEQ ID NO: 20315 - DNA, 120 bp, synthetic construct
  source 1..120: mol_type = other DNA
caaacacatattaagcctcttctctttccagcaataacaataaaggttgctaagctagtgctcttgctccgtgaagttctgccttcttaaccatttatgggatttactcagatttagaag

SEQ ID NO: 20316 - DNA, 120 bp, synthetic construct
  source 1..120: mol_type = other DNA
tgttgcctgacttaggacatacctcctcttaggtgcttagtagatgcttcttaagtgagggagtgactgggtgcttctgttaatatcagtatgaacagagagctaagcctgccccaccag

SEQ ID NO: 20317 - DNA, 120 bp, synthetic construct
  source 1..120: mol_type = other DNA
acctgcatctccagtgtcttctctcctcagctacaacctgccatctgcaggtttaccaggcacttttcacgtgactgttccaccatcttgtcattttttatatcttctgtcattttgtaa

SEQ ID NO: 20318 - DNA, 120 bp, synthetic construct
  source 1..120: mol_type = other DNA
aaccaatagcggtacattgttgttaaagtacatagtttaccttagggctcactcttggtgttgtcccttctgtgggtttcaacaaattaatggcgttgcgtgttcattgtactgtcatgc

SEQ ID NO: 20319 - DNA, 120 bp, synthetic construct
  source 1..120: mol_type = other DNA
gattaatctccccaccacccctggattaatctccccaccacccctggattaatccccccaccacccctggattaatcccccaatcacccctggattaatcccccaatcacccctggatta

SEQ ID NO: 20320 - DNA, 120 bp, synthetic construct
  source 1..120: mol_type = other DNA
gtttccccttttccaaaggtcttatagttggaatcatacagtatgtggtcctcagattggcttcgttcacttaggaatgtgcatttagggttccgctgtctttttctgcttgatagtacg

SEQ ID NO: 20321 - DNA, 120 bp, synthetic construct
  source 1..120: mol_type = other DNA
accactctgcggttctctgtgaaattagaccatcaggattgtggttttttcctccaaatacagacttttctctgatgctttgtaaagcaggggctctaaagtttggtcttaagcgtcact

SEQ ID NO: 20322 - DNA, 120 bp, synthetic construct
  source 1..120: mol_type = other DNA
ctttacagactcactcccagctggaggaggcagagggtaaggtacattttcgtgcactccggaaaagaaacgtattcaacaatgtccatgtagcttttgcttctctattgataattgcta

SEQ ID NO: 20323 - DNA, 120 bp, synthetic construct
  source 1..120: mol_type = other DNA
tctagtggttaggggaaaaaaaaaagacaggaacttttttttttcttgttgctttgtctgtaatctgctcccggatagagatagttctgcaggtgaggcatgggtgagaaagtccctgag

SEQ ID NO: 20324 - DNA, 120 bp, synthetic construct
  source 1..120: mol_type = other DNA
gttggaaaccaagtggactgtcctgcagcccagacaagcccagtggcctttgtgcttttaattgtgataaatgtacctgctttagaaaatgtttaattatgttggaagcaacttaaactg

SEQ ID NO: 20325 - DNA, 120 bp, synthetic construct
  source 1..120: mol_type = other DNA
gctagtggatagctttctagctcgttgcagcgggggcacagtggcagttccctgatgaccggtcacgaacatctgtggcttccatggcattatgctgtggagactcacctggagaaaaac

SEQ ID NO: 20326 - DNA, 120 bp, synthetic construct
  source 1..120: mol_type = other DNA
gtccaaggatttttaataaaatgtattaaaaattgcacttttgaaaacaatgtagatctacaccatgtagatcccacagtggacacccacccctgtcacatcccacagtggacacccacc

SEQ ID NO: 20327 - DNA, 120 bp, synthetic construct
  source 1..120: mol_type = other DNA
aaggatctgactcttggataccagggagaaaagagaggggctggatttctgaataaaagtccttgttttaaaagctccttcggcaccgcagagatgaggaggaacggctgcttggaaggt

SEQ ID NO: 20328 - DNA, 120 bp, synthetic construct
  source 1..120: mol_type = other DNA
agaatcaggctgaagtgttggcctgcccaaggaaacccgttagcgagaaagacttccaaagaatttatcttaaattggtgacaattctcagcaaggacaatactgccttagattttgtgt

SEQ ID NO: 20329 - DNA, 120 bp, synthetic construct
  source 1..120: mol_type = other DNA
cctctggctctggttagatgggaggtcctctggctctggttagatgggaggtcctctggctctggttagatcggaagtcctctggctctggttagatcggaagtcctctggctctggtta

SEQ ID NO: 20330 - DNA, 120 bp, synthetic construct
  source 1..120: mol_type = other DNA
ccgcaccatggtgtctatgctgggagtttcctgggtgggtgtgaagtaggcagtaggaaggacaccaaatgaatttggcttagtgccggcgggggcgatgatcgattctgatgtcagctt

SEQ ID NO: 20331 - DNA, 120 bp, synthetic construct
  source 1..120: mol_type = other DNA
ccagggagaggtgattgacctcaggtggtttagcggaatcagcctttacttctcgtgtctggaaagggattcaggctccgctgaaatgtatgaatagtatttgaaaaaattttgaatttt

SEQ ID NO: 20332 - DNA, 120 bp, synthetic construct
  source 1..120: mol_type = other DNA
gcagctgtggctctgagctaggcagctgtcgctgtgggctaggcagctgtggctgtgggctaggcagctgtcagggtacaggatgtttaatctgtgccatctgccccttcttcatcatag

SEQ ID NO: 20333 - DNA, 120 bp, synthetic construct
  source 1..120: mol_type = other DNA
tgtaaagtctgcttagcgttactacttttattcttattgttagaaatagctgacttgcaaaaatattcctgaccatattatgggggaggggaacacgtgtgagctgcgtcttgcctatgc

SEQ ID NO: 20334 - DNA, 120 bp, synthetic construct
  source 1..120: mol_type = other DNA
taatccatttgttatgtggcattccatcctctggaactctctgcagccaacctaagtgcacgtgactgggaaaactaatgtgtattcatagtgatgtccctgaaggaaaataatatctgg

SEQ ID NO: 20335 - DNA, 120 bp, synthetic construct
  source 1..120: mol_type = other DNA
gaaaccatatttgagtgcttttatcaggggataagaaaagtgctttttaaataaacattaattttgtacatgaaatctggctgtgtgtcagccactccgctccgttggaccccatgcggg

SEQ ID NO: 20336 - DNA, 120 bp, synthetic construct
  source 1..120: mol_type = other DNA
agtgactgtggtgatggttgcgtaactctgtgaacacactggaaaccattgaatgtgtgtacttgatctgaattgcgtggcacaggaattatgtcccaataaagctgtatggataaacaa

SEQ ID NO: 20337 - DNA, 120 bp, synthetic construct
  source 1..120: mol_type = other DNA
cagaaacactagacactaaaccattagatgctgtcacctctaggaaggaggtaatggagaacgacagggacttgaaatattccagtatttctaatactacacgtacaatgaagcctcctg

SEQ ID NO: 20338 - DNA, 120 bp, synthetic construct
  source 1..120: mol_type = other DNA
tatatctgaaactgatcttttgcaaatagcatctctctcagtctacagcttagtcttgtatctttgtttatggtgtcttttccaatagtgatttcctttacagtctgtgagctctttagc

SEQ ID NO: 20339 - DNA, 120 bp, synthetic construct
  source 1..120: mol_type = other DNA
taattgctggctattaaagggacaactgccacgatgtaggtgacctcaaacttagaaaaaaattgtttgccaaatctacaaggtactgtgtggaatggctctagtggggatgtagatagg

SEQ ID NO: 20340 - DNA, 120 bp, synthetic construct
  source 1..120: mol_type = other DNA
ggggtatagatgttggtgtagaggctgtagtagtggggtatagatgttggtggaggggctgtagtagtggggtatagatattggaggggctggagcagtgaggtatagatattggtggag

SEQ ID NO: 20341 - DNA, 120 bp, synthetic construct
  source 1..120: mol_type = other DNA
tgggggttgtgagtgaaggaggtcggggagccacatccgcagcagggatgcagaagagcagccgtgtcggcttgggtgcctgcgaggggcctcagggacgtttcccagactttcttaaag

SEQ ID NO: 20342 - DNA, 120 bp, synthetic construct
  source 1..120: mol_type = other DNA
ttatactaaaaataaaactttcctttgcttgatggtatgaatgaatacataaggtcccaagtccctcttctcgtccttctccttctctgggcctgtaatctagaagcccagagtgtcaca

SEQ ID NO: 20343 - DNA, 120 bp, synthetic construct
  source 1..120: mol_type = other DNA
aaggttctcttaactctaggaattgtggttggccagcatgttatcttgaccagacacttctgaaaatctgctttgtgtgtcttaagttggcaatgtcactgttccagaccagcatgaatc

SEQ ID NO: 20344 - DNA, 120 bp, synthetic construct
  source 1..120: mol_type = other DNA
ggataaaaccttgcaaatggcttgtgcttgttcctacattacatgaaagatagagtaagagcaacattcatctgtctcttcgtgaacttaatttggctagcagaggcacacacctgaccc

SEQ ID NO: 20345 - DNA, 120 bp, synthetic construct
  source 1..120: mol_type = other DNA
gcaatgggtttatcagggtgtagccccattttaagttgaggagtatctgtgtctgaactcttacattccttttgaatatccactgaagcacaattctaataacagccaaggcactcacaa

SEQ ID NO: 20346 - DNA, 120 bp, synthetic construct
  source 1..120: mol_type = other DNA
tttccattcaatctaatacttccggattcctactaaaaaggaatacattaagagcatggaaaagttgcttactgaaaggaaacccccgaagagtaagggagggaatgtagaaattaagaa

SEQ ID NO: 20347 - DNA, 120 bp, synthetic construct
  source 1..120: mol_type = other DNA
ctgtatttttcagaaatgtcagtgatgttacacaatgtttctgagtatggttgtgatggttcctcatgtttagattcaggttctgcatccctggccaaaacaagtgccgtgtcctcctca

SEQ ID NO: 20348 - DNA, 120 bp, synthetic construct
  source 1..120: mol_type = other DNA
ctggtgatgccagcctgaggatggtctggatgacaagtgtaacgtttgatctagagtgaatcagctgtttgtccttggagcaattcacccattctctttaaaaatattaaaaatagcctc

SEQ ID NO: 20349 - DNA, 120 bp, synthetic construct
  source 1..120: mol_type = other DNA
accatcaccatcatcatcactgtcatcatcaacatccatcatcactgtcatcaccatcatcatcactatcattaccatcaccatcaccaccattatcactgtcatcatcacctttctcca

SEQ ID NO: 20350 - DNA, 120 bp, synthetic construct
  source 1..120: mol_type = other DNA
atatgatgtgcaaggagagtgttttccagtagcaggcgttggcatcatcaaacagaatgaagtgtactgtgttttcaccatgatagtacaaaaacgagactgtgagagcttctcacttct

SEQ ID NO: 20351 - DNA, 120 bp, synthetic construct
  source 1..120: mol_type = other DNA
tgatcttaaatacacagccctgcgtgctgaccttgtgttagaacttaatgatgcgacgtttgctttgcaaactgtggtcccctcctcatagatccttcaattcaacaattgaattcaaca

SEQ ID NO: 20352 - DNA, 120 bp, synthetic construct
  source 1..120: mol_type = other DNA
tccagggctcaaggagattggggagcagtttgcaaaggcatttgaagattaggctccacagagatggacactttttttttttcctaaatagatacagagtagccttgtgaaggtttcttt

SEQ ID NO: 20353 - DNA, 120 bp, synthetic construct
  source 1..120: mol_type = other DNA
ttagcgtgtggttagctgagaaaaaagtatttttctcagcagaaaatagacacaactgcatgtgaaggggccacttccactccttcattctccatccaccagccttactggagctagaga

SEQ ID NO: 20354 - DNA, 120 bp, synthetic construct
  source 1..120: mol_type = other DNA
agacaagcttccaggctctgggcttctgatggagaacagaccagagtaaacctggccccaaggaccttgagctccactcaaggggagacagacagtgaactcaacaaaacagaaatgaga

SEQ ID NO: 20355 - DNA, 120 bp, synthetic construct
  source 1..120: mol_type = other DNA
tgccttccgagacaggaagaccaatccctcctcttcttcctcttcagaccactcaacatgaagacaacaaggatgaagacctttacaatgatcctctcctacctaatgaataaatatatt

SEQ ID NO: 20356 - DNA, 120 bp, synthetic construct
  source 1..120: mol_type = other DNA
agggtcaactctactagcttctttattcatggacatatctttagttagttcatcagaaccagaattttgaggtgcttctgaattctaaattcaaggattcactacatctggtgttgcaga

SEQ ID NO: 20357 - DNA, 120 bp, synthetic construct
  source 1..120: mol_type = other DNA
gagacccctggcctagagatctcatgcacagtcctgcctgagctgctgcagaatgaaagaaaagtacattcatcagagactttaaggccacagcaagaaactgacaaaaaagactaacat

SEQ ID NO: 20358 - DNA, 120 bp, synthetic construct
  source 1..120: mol_type = other DNA
aagcccttaagtggctagcccattactacattcaaaatttcttaatagagtattcgctatcttgcatgatctacctcatgccgagctctgtagcctcattctgaccactgaattcctcat

SEQ ID NO: 20359 - DNA, 120 bp, synthetic construct
  source 1..120: mol_type = other DNA
ctaggcagatcacatgtgaagctatattggccttattttctacaatgtgtttcagagctggaagagacccagagtagacaacaaaggcttccttttatagatgaggacactgaccaagat

SEQ ID NO: 20360 - DNA, 120 bp, synthetic construct
  source 1..120: mol_type = other DNA
gtaggcatcaaagctcatgacaactgtgctaatacactttcttttccttttggttttaaaacgaaaaacttttaagaacccaagaagcggaggctgcagtgagccgatatctcaccactg

SEQ ID NO: 20361 - DNA, 120 bp, synthetic construct
  source 1..120: mol_type = other DNA
aacagctacctatcctctatatgaaccaagttattgaagtaatactagtaactgttttaacagagaagtataaagataaaatttgggtcaacaaaagggaaagaaataagtttataagct

SEQ ID NO: 20362 - DNA, 120 bp, synthetic construct
  source 1..120: mol_type = other DNA
gggctggtgctcagcagagggacaggactggcaaaagccaccagagctcagaggtatgtgaatcctaaacactcagcattattttttaatactttgattttggattccgattttaaatct

SEQ ID NO: 20363 - DNA, 120 bp, synthetic construct
  source 1..120: mol_type = other DNA
tctgctgggagacagcaattaggtagacagcttaaaaccaagaagtatctgactccaattttagcactgaaaaccatattaaaatactttaattaaatccacaaacataaatgtgtagca

SEQ ID NO: 20364 - DNA, 120 bp, synthetic construct
  source 1..120: mol_type = other DNA
acacgtattctcaggttaatggcataaggctaattttttcagcctctcaagaataaactggaactctaacttgtacctgaaagcacccgtccgagaatggaggaaaccttcccttattag

SEQ ID NO: 20365 - DNA, 120 bp, synthetic construct
  source 1..120: mol_type = other DNA
ttggagtgggctctcatgatttattttctttcctttttgaattaggatttgatcaggagtcctggattcgtaagagtcaattgcaacagggatgtaaagagagctctggacaggagcttg

SEQ ID NO: 20366 - DNA, 120 bp, synthetic construct
  source 1..120: mol_type = other DNA
acctgacactaactgcgctgtagatgtttgctgaatttcactgacatcaaaaacccatttgtttattctgtcttgggcagagggtgacattgacattttgctggacaaatttcaccagga

SEQ ID NO: 20367 - DNA, 120 bp, synthetic construct
  source 1..120: mol_type = other DNA
gaggcagcatccaaggactcagattggaggtagcaatgtcagaggcacatccacaagacaggacatcttttagtgtcacagtagacctgatacctaatttaaaattcagtctttaattat

SEQ ID NO: 20368 - DNA, 120 bp, synthetic construct
  source 1..120: mol_type = other DNA
gaggtagggacagaggcaggggcagggacagaggcaggggcaggggcagaggcaggggcagggacaggatgccttcagtgggtgaaggtgcagaagggtaggagcgaggaggtcggtatg

SEQ ID NO: 20369 - DNA, 120 bp, synthetic construct
  source 1..120: mol_type = other DNA
gcatgttctccagagtggtttttattttgtccctgccatggtatccatggcctgggacacatttttatgtcaccgttctcaacacttacaaatccgtaagaaaaaaggccattgcaatag

SEQ ID NO: 20370 - DNA, 120 bp, synthetic construct
  source 1..120: mol_type = other DNA
cactgcagggcaaaatccagaggtatctgtaaactcctaagccttttattttcccccttccggtaatcaaatgtggtcactgacctaacacttgtttgttggatgacttcgtttttttcc

SEQ ID NO: 20371 - DNA, 120 bp, synthetic construct
  source 1..120: mol_type = other DNA
aaataagaggggtgagctaaaataggagtacaatggggacaagagaggaattgaactcatagtctagaaatttcagccaggaagtgacttcggaggtttatcatctaatcaggtcccttg

SEQ ID NO: 20372 - DNA, 120 bp, synthetic construct
  source 1..120: mol_type = other DNA
ttatccaataaaagttaccaggtatgtaaagaagaaggaaattatggcttataaccagaacaaaaatcaatttcttgaaacagatcaagaaacaccaatgacatgagaacaagaggcaca

SEQ ID NO: 20373 - DNA, 120 bp, synthetic construct
  source 1..120: mol_type = other DNA
ccttccactccaattctctctacaccatcttcctctgcttccacagtcagaaatccacaacagtagataaatgcctaagtcatcagaagctttccacatcctcctgaactcaaatcaata

SEQ ID NO: 20374 - DNA, 120 bp, synthetic construct
  source 1..120: mol_type = other DNA
acttcaaagcaggcacaggtgcaaaataacaaaagaataaaaaattgacatatgcacagatgctacataaaaaccagcaagatgacaattttcccctgaaaatatttatgtgctaaggaa

SEQ ID NO: 20375 - DNA, 120 bp, synthetic construct
  source 1..120: mol_type = other DNA
tctgtgtatggcatgagaaagggttttaacttcagtcttttgcatgtgcatatccatgtgtcccagtgccagttggccagtcattgaaatgagaaacattcaaacacaaaagggtactgt

SEQ ID NO: 20376 - DNA, 120 bp, synthetic construct
  source 1..120: mol_type = other DNA
ttggtgtcctaagattcatggtcctttatgtatatcttttccacattaaactataaccaggtaaatgcttataggcattaatagctgaaagagacttttctacatgcaagtcatggtatt

SEQ ID NO: 20377 - DNA, 120 bp, synthetic construct
  source 1..120: mol_type = other DNA
acacacacatatatgtgtgtacatatatgtatatacacacacagcatgtgtgtgaaaaataaagatgaaacccatcacatgcaccacaggttgatttcatagtttgcctgtgttatttta

SEQ ID NO: 20378 - DNA, 120 bp, synthetic construct
  source 1..120: mol_type = other DNA
aagactgttttgcaacacataaggataatacaattctgagaaagagatggtaccatattcgccagattctctggcaggatcatctggttgccttgcttctctgtgtgaatgactgactgc

SEQ ID NO: 20379 - DNA, 120 bp, synthetic construct
  source 1..120: mol_type = other DNA
tcgaaaaatgcagttatcagagatgggagcacccagcacatggggtcaatgatggctgatcctaatgccaggctgtgtgtgagtgtgagagagaccctaatgccagggtgtgtatgacac

SEQ ID NO: 20380 - DNA, 120 bp, synthetic construct
  source 1..120: mol_type = other DNA
gtgaatgtgagagaaatcttaattttaggatgtgtgtgtgagggagagatcccaatgccaggttgtgtgtgagagaaatcctagttctagcgtctgtgtgtgagagagagcgatcctaat

SEQ ID NO: 20381 - DNA, 120 bp, synthetic construct
  source 1..120: mol_type = other DNA
taatcccagcactttgagaggttgaagtaggaggaccgcttgaagccaggagttcaagactagcccaggcaacataatgagactcccatctctacgaaaaaaattttttaaaaattgctg

SEQ ID NO: 20382 - DNA, 120 bp, synthetic construct
  source 1..120: mol_type = other DNA
cttaaagacaggcagccttgggttcattccactggtaagctgcttaaccattgtgtggcctctttttcctcatctataaaatggagataacaacagtactgccttaaaagaaattccacg

SEQ ID NO: 20383 - DNA, 120 bp, synthetic construct
  source 1..120: mol_type = other DNA
tatagagggctctgcttttgggggacaagctctctctgaaacccaggcccacatattttataagtgttcagggaagactgtcttttaaaaaggtacaattaggcaggcatttgcttatca

SEQ ID NO: 20384 - DNA, 120 bp, synthetic construct
  source 1..120: mol_type = other DNA
aacttcaagttggagacttaaatttgttcaaaatattaaaagtacacacaatccggcctcttctaatagaagtgctattagatctacctgactgaagctttatggtccttcaactatggg

SEQ ID NO: 20385 - DNA, 120 bp, synthetic construct
  source 1..120: mol_type = other DNA
acaccactgcactacagccttggtgaagggaatgagacgctgtctcaaaaacaaagctgtttttgcttttgttttaaaaaaaaaaaaatgtgctttcagccaggtgtggtagctcatgcc

SEQ ID NO: 20386 - DNA, 120 bp, synthetic construct
  source 1..120: mol_type = other DNA
gcctatggggttcctcaataatttttaagactgtaaagttcctgaaaccaaaaagagaacttctgcactataccatactggtggtggatgaaatgaggcaggagctcatgtaagctgagt

SEQ ID NO: 20387 - DNA, 120 bp, synthetic construct
  source 1..120: mol_type = other DNA
taatgaagacagaaggtcctttacccatgagagacaatttaaaactaggaattggaagcttcagtcatgtccaatagctgtgggggtttattaagggtttgctccatccatctcaggtct

SEQ ID NO: 20388 - DNA, 120 bp, synthetic construct
  source 1..120: mol_type = other DNA
ggaattggtgaattggccattttttataatgtgttttacttgtgatcttactggattgattgcagtccttgatccctcaaatgatcaaacctgtagagtttggccaggcacggtggctca

SEQ ID NO: 20389 - DNA, 120 bp, synthetic construct
  source 1..120: mol_type = other DNA
cgaaaatgtgcttgacggaatcctatttcgtgagtgagactgttgccaaaaggttggagaaactgcagggcaaggcaggctccccctgaagtacaaagtcttttttttttttttttgaga

SEQ ID NO: 20390 - DNA, 120 bp, synthetic construct
  source 1..120: mol_type = other DNA
tgaaaagtggaaaagagcaggaaaagtgctggagcaggtagtaatctccaggaagtaatacatctatcagtcgtcagtgaatcttttcttttttgagacggaatctctctgtcaccaggc

SEQ ID NO: 20391 - DNA, 120 bp, synthetic construct
  source 1..120: mol_type = other DNA
atactctgtataagatggaactatctcaggaaagagtctgaaataaggtccttctaactaaataagtacaaactggagtgtgtggcgcacatgcagtctgagaaaccttctgtgcacagc

SEQ ID NO: 20392 - DNA, 120 bp, synthetic construct
  source 1..120: mol_type = other DNA
agggacttcatcagtctctggtgaccctagtgtccctctgtaacatgctgatgaatcctacaaccgtatttctgactgtaagcactgggcttttactgagcaatatttaaaatattttca

SEQ ID NO: 20393 - DNA, 120 bp, synthetic construct
  source 1..120: mol_type = other DNA
aaatccatctttttctaatatgaaaatggtagtgtacccttgagggattttatgctggcgagtgagagctatacagcgttccctgtctccagcactcaggaaacaatgcagtattgttac

SEQ ID NO: 20394 - DNA, 120 bp, synthetic construct
  source 1..120: mol_type = other DNA
tgggaagcactaaaggcaatagctacttcagaaggaaggcattaagtccgacacttaatgctataaaagcacatctgtaaacactaatggcagccacagctgatggaagggaaaaaccta

SEQ ID NO: 20395 - DNA, 120 bp, synthetic construct
  source 1..120: mol_type = other DNA
attcaccaaatgagagagaacattacaatgaaccaccacatacccatcacccattttcaacaattatcaacacatggcctatcttgtttcctccataccttcagacaccctccgtccaca

SEQ ID NO: 20396 - DNA, 120 bp, synthetic construct
  source 1..120: mol_type = other DNA
gggtcctcgatggagacgagtctaggtggcagctgggacagtgtcctatacctcatttttaatactacataggctacaagttctagaataatgccaaataacagtaatgatagcaagttt

SEQ ID NO: 20397 - DNA, 120 bp, synthetic construct
  source 1..120: mol_type = other DNA
acagaggtctttttaatgcataatttgctgctttaacatacatggaggagaagaatcccaattaggcagtgggagtaagtaggagagctctaagggcaagtagcagtgtcacttcagtat

SEQ ID NO: 20398 - DNA, 120 bp, synthetic construct
  source 1..120: mol_type = other DNA
tccctaaatcttccacctccctagtacttgtaaccagtgaaatacttcctcgacttattgcctctactccagaaccattcacagtgctctttggaaagcatgttttgttatgagcaagat

SEQ ID NO: 20399 - DNA, 120 bp, synthetic construct
  source 1..120: mol_type = other DNA
cctcctaaagtgcgtgagccactgtgtccaactaaaatttaaagggttgtacctgtacaaggataggatttttaaaaatcacctttagtagttagccaggctcagcagcacacagctata

SEQ ID NO: 20400 - DNA, 120 bp, synthetic construct
  source 1..120: mol_type = other DNA
ttcatctcaggcctactaattagtgtccctctctccagcctgtcattcataccgtcaggtgcctcttcctgaaacattgctttcattcttgtgatttctctattcagatacctttagtaa

SEQ ID NO: 20401 - DNA, 120 bp, synthetic construct
  source 1..120: mol_type = other DNA
actcgaagtctctgtcattcttactacttgcagtttcccaggacttttacagaaatcaacctgtggtggagggagggctcctttcaccgtgacttttgtgagaactgaggtttcttcctt

SEQ ID NO: 20402 - DNA, 120 bp, synthetic construct
  source 1..120: mol_type = other DNA
agaaaagaaaaagaaagaaacatgtatgtgttaataagagctcctactttgtgagaccctccacacgccaggccttgtactggacactttattttacatgctgtcttctaaccgcaaggt

SEQ ID NO: 20403 - DNA, 120 bp, synthetic construct
  source 1..120: mol_type = other DNA
gtcccctggctcagacattcactagctgtgtgggcttgaatgagtcatggaaactttctgtgtctcagtttccttatctgcaaagtggacataatactcatctaaaatgtttgtgaagac

SEQ ID NO: 20404 - DNA, 120 bp, synthetic construct
  source 1..120: mol_type = other DNA
tatggatttttaaaaggatgtaatcttcttaaagcactctgtgaacatccattgcagtctgttcctcatggcagggaatccatagacaaggaatgccggtatgaccagcctgacgtgaag

SEQ ID NO: 20405 - DNA, 120 bp, synthetic construct
  source 1..120: mol_type = other DNA
caatggataatcttgaagactttctcagaatcgatgcaagaaatgaatctacagataaagtatctagcccagtgtctggtatctggtggatgtttggagactgtctgttccttccccact

SEQ ID NO: 20406 - DNA, 120 bp, synthetic construct
  source 1..120: mol_type = other DNA
tatgtaggatgaaagatgaagatgaatggaggtaaaaggaccctttaagcacacttcaacctacattttgagatctcttctttaaggccttggtgtccttacttgctccactgcccctca

SEQ ID NO: 20407 - DNA, 120 bp, synthetic construct
  source 1..120: mol_type = other DNA
gcctttgtgtctgggactcctgtctcccctttccttctgggactcctattactgtgtcccatatacctattggctcttttatctattttctttccatgcttcattatggatattttcttc

SEQ ID NO: 20408 - DNA, 120 bp, synthetic construct
  source 1..120: mol_type = other DNA
agagggagagggagagggagagggagagggagagctaaagggcatatattttaaaatccatgttttattacaccaatatctggattgccttggatttgtttttattccccatgtttatct

SEQ ID NO: 20409 - DNA, 120 bp, synthetic construct
  source 1..120: mol_type = other DNA
tcagcagggcacatgtttccgtgtttgtcatctcattttaattgcaagaacctggatggtgctttagacgtctttgtaatccccaggcctctcatcaaaggaccttttgtaactttattt

SEQ ID NO: 20410 - DNA, 120 bp, synthetic construct
  source 1..120: mol_type = other DNA
aagctacctacacacacagttaatattggttaccttgaaaagtgggggtgagagaggggtggaagagcttttactttataaatttctgtatggtttgacttgttaagacaagcctaaatt

SEQ ID NO: 20411 - DNA, 120 bp, synthetic construct
  source 1..120: mol_type = other DNA
gcaagggctctgagtcaagcagatctagtttaaacctggttcctgccactcaccagctgtcacaaaatgtaacttctctgagcttgtttcctcagtcataaaatagacataataatacct

SEQ ID NO: 20412 - DNA, 120 bp, synthetic construct
  source 1..120: mol_type = other DNA
gtgcatgtgtctttatagcagcatgatttataatcctttccccaggtagtttatgtaggaactatttaatgttaaatgaatcattaggtaaagtgcgtatactacttcatgagatggctt

SEQ ID NO: 20413 - DNA, 120 bp, synthetic construct
  source 1..120: mol_type = other DNA
ctgaagacaagagcagtagataaggcaggaaagaaaagaaaagagaaaagaaggaaggtggggagggagggaaaagaaagaaaggaaagagagaaggagagagagagaagaaagaaaggg

SEQ ID NO: 20414 - DNA, 120 bp, synthetic construct
  source 1..120: mol_type = other DNA
acttaaaggccttatgggggattttctttgctttcttcagaacattcccacagtcaattggtagaatgaagacagcctttgtggtctgataacatgtctcatagaatacgagcacgtctc

SEQ ID NO: 20415 - DNA, 120 bp, synthetic construct
  source 1..120: mol_type = other DNA
tgttatctcaagcctgctactgagcccacctagtgaatctttcatttcagttagtgtacttctcaactccagaatttccattttatatcacttctatttgttgtcattgtcttcatggct

SEQ ID NO: 20416 - DNA, 120 bp, synthetic construct
  source 1..120: mol_type = other DNA
aagaatgtctgacttacacactgggagcagcgatgtttctatattctttagattttgttgaatggttaaaatttcagctttgtcgctcatacctgtgatcctagcgcttgggatgctgag

SEQ ID NO: 20417 - DNA, 120 bp, synthetic construct
  source 1..120: mol_type = other DNA
gtggacagttgaaaaaaatcctgaattgttctttaaaatgtagctcttcttaacacagtctcacccaactcctgccttgtcacagtcccttgttctctgtcactgactcctttgccttca

SEQ ID NO: 20418 - DNA, 120 bp, synthetic construct
  source 1..120: mol_type = other DNA
gagtgtctttgtgtgtgcacacatgtatgagtgcctgcaggtatgtgtgagtgtatgtgtatgagtgtgtatgtgtgcatgtatatgtgagtatatgcatgtatgtgagtacaagagtgt

SEQ ID NO: 20419 - DNA, 120 bp, synthetic construct
  source 1..120: mol_type = other DNA
cgtgagtgcatgtatgtgagagcatgtgtgactgcatgtgtgtgcatgtgtgcatgtgtgtgagtgcatgtgtttgtgtaactacgtgtgtgaagccatgtgtggtgtgtgttcatgtgt

SEQ ID NO: 20420 - DNA, 120 bp, synthetic construct
  source 1..120: mol_type = other DNA
gagtgcatgtgtgtgcatgtgtatgtgtgtgagtgcgtgtgtgtgagtgcatgtgtgttcatgtgtatctgtgtgtgtgcatgtgtgtgcatgtgtatctgtgtgtgagtgcatgtgtat

SEQ ID NO: 20421 - DNA, 120 bp, synthetic construct
  source 1..120: mol_type = other DNA
aggagacacatgccatgttggcctacagggtttattttttgatctcttcccagctgctttccatttccatttgggtactttacacttgattgtaagttttcctgtgccacatcatcacat

SEQ ID NO: 20422 - DNA, 120 bp, synthetic construct
  source 1..120: mol_type = other DNA
ttccctggtctgtgccctttatagcgatggctatccatacaattactttggcaattaatcatgcctgtgatatctctcctactattgtctagaacctgactggcattgtggactgttatt

SEQ ID NO: 20423 - DNA, 120 bp, synthetic construct
  source 1..120: mol_type = other DNA
gctccatagctcagtgccctgcacatagtaggggctctatggctcagtgccttgcacacagttggggctccatggctcagtgccctgcacacagtagggcttcatggctatttgtggagt

SEQ ID NO: 20424 - DNA, 120 bp, synthetic construct
  source 1..120: mol_type = other DNA
cacaaacgattgaaaggatcagctcataaaagcaaaagagagttgaggcattcaacctctctgggccttttaagaccacagacttattatgaccatgtgagtttccaggaagaagcttct

SEQ ID NO: 20425 - DNA, 120 bp, synthetic construct
  source 1..120: mol_type = other DNA
atattctcactcataggtgggaattgaacaatgagaatttcctagaccttttaatacactcccagggcttgaagactactcctgcatgccaacaactcctggtttttggagtttggaaag

SEQ ID NO: 20426 - DNA, 120 bp, synthetic construct
  source 1..120: mol_type = other DNA
ctcactactggagaaatgggtatagtgtggctataggggtgtgtgtgggggttctcttctctttctcacttctttcaaaagaatgcagtgaagctgagacctctatttttctaaacaaaa

SEQ ID NO: 20427 - DNA, 120 bp, synthetic construct
  source 1..120: mol_type = other DNA
ctgctatccttcagtatttttcacctagagctgcttctagctttccctgtggtttcagaaacacagagagattacagtcatgtctgtgtgtctttgcaagagcagaataaagcctatata

SEQ ID NO: 20428 - DNA, 120 bp, synthetic construct
  source 1..120: mol_type = other DNA
ggttttgattttctacagggtgtggggagtaaaaccagcttgcttctacaccaccattttaaaactggaagtctccttttcttaatagaaagcaaatagcatttttagatataaatattt

SEQ ID NO: 20429 - DNA, 120 bp, synthetic construct
  source 1..120: mol_type = other DNA
gcattgtgttagatgagtttgcccaactataaacttgtgtaagtgttccgagcacgtttaaggtaggctaggctaggctatgatgtttggtagcttacgtgtattcaatgcatttgtgac

SEQ ID NO: 20430 - DNA, 120 bp, synthetic construct
  source 1..120: mol_type = other DNA
tgtaagagcagagaatgagacttcccttactctcggtcctactgcatgttgcccaagactattaccaagcaagtttgtgtatactttaggcttatcacaggatatgttcagaggaccaat

SEQ ID NO: 20431 - DNA, 120 bp, synthetic construct
  source 1..120: mol_type = other DNA
cctattgacacaaggtcttctttaatcccatccagggctaagacccttgctattcacagtgatccagtgccaatagcaccagcatcacatggaaacttgttagaaatgcagaatacattg

SEQ ID NO: 20432 - DNA, 120 bp, synthetic construct
  source 1..120: mol_type = other DNA
ctcctaggagttctggatatatattacactttgagaagcatgctttagagcttctctctttatgccctgaggcacaatgactcctctatacgctaaattcttagttcctgatcagctcct

SEQ ID NO: 20433 - DNA, 120 bp, synthetic construct
  source 1..120: mol_type = other DNA
ctgcgcccgtgtcatcctcactcgggacgcagggaccgtttttaaatcacaggggcgtgtgtcagcctgccctaggacttcatgtctatatatttccccattcactggtgagtaccctgc

SEQ ID NO: 20434 - DNA, 120 bp, synthetic construct
  source 1..120: mol_type = other DNA
caataatgagatactgctatacaccttccagaataactaaaattaaaaagatggacagtgccggtgttgacaagggtgtagaccaactggatctcttacatattgttggtgggggccagt

SEQ ID NO: 20435 - DNA, 120 bp, synthetic construct
  source 1..120: mol_type = other DNA
gctctagtgagaatatggcaatgcaagatcacttaactttaaatgagaaaaaacagcagggataattatgaaagaggtactttaaaagaatttaaaaggagtgtgagaggctccaggaga

SEQ ID NO: 20436 - DNA, 120 bp, synthetic construct
  source 1..120: mol_type = other DNA
ccgcgcccagccaaggaaatatctttatagatgtcttcttgtgtacctgtgtaagaattcctttgggatatacagtcatgcaacacataatgacgttctagttagtggcaaaccacatat

SEQ ID NO: 20437 - DNA, 120 bp, synthetic construct
  source 1..120: mol_type = other DNA
taataatgcaggaaagagaagtggagagtgaggtaaaattagtgaggttgcaaaaaatggctggattctagatacattttaaggtggaagtgtaggggtgggttgcccctacacacctgt

SEQ ID NO: 20438 - DNA, 120 bp, synthetic construct
  source 1..120: mol_type = other DNA
aatggagccggtctgcccttcctacaaactcaagaggctcattgttcaaggtgtaacaacatttaattgcatgtcctctaacgctttgaaacctttagagggaagatcctcattttttac

SEQ ID NO: 20439 - DNA, 120 bp, synthetic construct
  source 1..120: mol_type = other DNA
aacagcaccatgttagaaatatattggcagccaagactctgaactctgcagaaacatttgtttcacccagacttcaaactctagccctgactatgatgcccctgtgtgcatttacaataa

SEQ ID NO: 20440 - DNA, 120 bp, synthetic construct
  source 1..120: mol_type = other DNA
ttaaaatatgactgagctgtagctgtgatatcaatctgtgctaatgttgtctgaggagacagaggcccagaggggtgaggaaaggggcgaacttgctccatgattcttggtcagaggaga

SEQ ID NO: 20441 - DNA, 120 bp, synthetic construct
  source 1..120: mol_type = other DNA
ttttggttgattcattttcattctaccagtccatattttccaaaatgtctgcaatgaccatgggttactgttgtaatggaagataaggtaagtcgcagcctactccatcccctgccaagg

SEQ ID NO: 20442 - DNA, 120 bp, synthetic construct
  source 1..120: mol_type = other DNA
ccaggatcatagagtcaaactcccaaatctcaaagagatccaagaggtcaacttgttcaagctcccaaccaaactgggggattctttcctcaggtttctttctcttttctttttttcttt

SEQ ID NO: 20443 - DNA, 120 bp, synthetic construct
  source 1..120: mol_type = other DNA
tgctcatgcaaatccatggcaagaatttttaaatcgctggtatgttgtaacatagaaacggatctttgtttcaggtctggggccacagagagcttacgaaaatgactgagttctgcatca

SEQ ID NO: 20444 - DNA, 120 bp, synthetic construct
  source 1..120: mol_type = other DNA
cctctttttccctccatccccccaatattcatacagtgtccttaacataaattaaaaaaaaaaatgctagcgactgactcatactaaagattaggctctctggagtttcatccatcatcc

SEQ ID NO: 20445 - DNA, 120 bp, synthetic construct
  source 1..120: mol_type = other DNA
gtacaccaaacccctgagacatgtagtttacctgtataacagaactgcatatgtaaacttgaacctaaaaataatttttttaaaacaaaagacagttaagagaataaaagagacaagtca

SEQ ID NO: 20446 - DNA, 120 bp, synthetic construct
  source 1..120: mol_type = other DNA
tttgtcttgttcattcagttatcaaggtcccatcaaagtcttgaaaaagacatcagccaccacatgcataagtgatgtgactgaccactgtatggaacaccaagacttcttgggaaagtg

SEQ ID NO: 20447 - DNA, 120 bp, synthetic construct
  source 1..120: mol_type = other DNA
agcagtgtaaggtctgcaatgatttgaaaaacactaagaacactcttcaatgtttcctcatttgcagactatcaaacatgatctttgaagtcaaggattacatctacgttcttttaccaa

SEQ ID NO: 20448 - DNA, 120 bp, synthetic construct
  source 1..120: mol_type = other DNA
atattcattccattcttctggagctctgtgatagcctagaaaaaagaaaaatttggttaggacacacatcacataaaaaactgggcactcaatgtgtttgcggtttgactttgtccactt

SEQ ID NO: 20449 - DNA, 120 bp, synthetic construct
  source 1..120: mol_type = other DNA
acacacactcttaagtaatttgcttctatcttcagccccataaggcccagagaagttcagtaacttgttcaagatcaccagaaagtatgttgggagctgtattttcaacctaggcaggtt

SEQ ID NO: 20450 - DNA, 120 bp, synthetic construct
  source 1..120: mol_type = other DNA
ataggcgtgggccatcgcgcccggcgaagggtttcttaattttaatatgcggtttttacgtagcaacatcccaaaagatcgattaaaagccaccaagaaaaatgattcagacagtatccc

SEQ ID NO: 20451 - DNA, 120 bp, synthetic construct
  source 1..120: mol_type = other DNA
tatacagtatactatatcgtgtgtatagagtatatatacagtatactatatcgtgtgtatagagtatatatacagtatactatatcgtgtgtatagagtatatatacagtatactatata

SEQ ID NO: 20452 - DNA, 120 bp, synthetic construct
  source 1..120: mol_type = other DNA
aataataaaaccctcccctttgcatagttgcaaaaattgaagttgtcagcacagagtcctgagtaatcaggcccctaccaaccttactaaccatccatctatctattcctgaccatttgt

SEQ ID NO: 20453 - DNA, 120 bp, synthetic construct
  source 1..120: mol_type = other DNA
ttggaatcacatttgttgagtctctggacagtgtcttttagagtatagattgcagggaacatagttgagattcactgaatttgatgggtcaaatctagtcagcatctccctctgcgctgt

SEQ ID NO: 20454 - DNA, 120 bp, synthetic construct
  source 1..120: mol_type = other DNA
gcgtgagccaccatgcctagccaattgctcattgaccaagcttacaatgttgaatttgtgtccactaaatgaagggcacagtatgactgcactgtaatgagtggtgttttttttttttta

SEQ ID NO: 20455 - DNA, 120 bp, synthetic construct
  source 1..120: mol_type = other DNA
gataatttttagattcacagccaaaatgaagggaaatagatatatagtccatatactccctgcccccaaatgtgcacagcttcttccattatctattaccactcccacaccagaggggta

SEQ ID NO: 20456 - DNA, 120 bp, synthetic construct
  source 1..120: mol_type = other DNA
atgtttagcttttaagttcaggggtaaaagtggaagctcaattttgatagctttataatccttacatgaagcataaattgagatggtgactggaactcagggatactcctctctagtact

SEQ ID NO: 20457 - DNA, 120 bp, synthetic construct
  source 1..120: mol_type = other DNA
gtgcacgaagcgtcctagccaggacccagttctggggcaacagcatgagatttctagctgaatttaggatctatttcagttctgcatcaagagcttttattttttttttccttctcttct

SEQ ID NO: 20458 - DNA, 120 bp, synthetic construct
  source 1..120: mol_type = other DNA
gtagaattctgcatcagtcagcagagaggaaagagccttcatatttttcatgaaatatgtatctgaatcaaacatcacaagaaggttgcagcatcaaatatagggaggcaggctccttgt

SEQ ID NO: 20459 - DNA, 120 bp, synthetic construct
  source 1..120: mol_type = other DNA
taacagatttgtattttataagaatttgtatttattcactcatttattttccaacttgcttattccagtccagggttgagggtggccacagcccatcccagcagctctgcaagctgcaag

SEQ ID NO: 20460 - DNA, 120 bp, synthetic construct
  source 1..120: mol_type = other DNA
agaagggcatttagccatggtgcactggagaggttactcaatgtctccatctctatttcatcacatacgaaatgaagaagttacacaagatagtctctaagcttccctctcaatcctatg

SEQ ID NO: 20461 - DNA, 120 bp, synthetic construct
  source 1..120: mol_type = other DNA
gctagtgctaacagtcagaattggagataattcaatggccacatcattggcacaggttagctagtgtcttagttcatgcagtctgctatacaaaactgctatagactgagtggcttagaa

SEQ ID NO: 20462 - DNA, 120 bp, synthetic construct
  source 1..120: mol_type = other DNA
tgtttcaaatgagaaagtgcacagttgtaatttctaaatgataaaaattaatagatataactcgtacaaactaaaggtctttggggtctttgacaatttctgagagcataagaaggctga

SEQ ID NO: 20463 - DNA, 120 bp, synthetic construct
  source 1..120: mol_type = other DNA
cttggaaagtatatatggtgctcagaagagcacaaagcgcatgaaatgtcccctgaagtcctagaagttgagcagatacattaaaaagacattgatggtcacaaatcaggaccttcacag

SEQ ID NO: 20464 - DNA, 120 bp, synthetic construct
  source 1..120: mol_type = other DNA
cccacaactgcacaacattaaagttaaactttgcctttaacatttccttgaatcctgaaatccacaccttttatagaatgcgctgctaataaagatcaatctgtaagtattcaaatttgt

SEQ ID NO: 20465 - DNA, 120 bp, synthetic construct
  source 1..120: mol_type = other DNA
gttccatctgctgcttttcaagcaaggaagtaatcttttagaaagagtcccagacacaaatgatggggatggagaagaacacatgtatggaatatatctccccttcacaatgccagatag

SEQ ID NO: 20466 - DNA, 120 bp, synthetic construct
  source 1..120: mol_type = other DNA
ctttttagtggaccagagcaatcagtgctatgaaatgtcatgaaatctacagcaagtggacctggacttgccacctaacttggtctcttaatatctgtgtgaccttgcccaaattattgt

SEQ ID NO: 20467 - DNA, 120 bp, synthetic construct
  source 1..120: mol_type = other DNA
ccctacatcacagactggagagctgttaagaggattaaactaaagaaacatggatgactatcagtaataaggatagccgccaacatttcacatagcactaagtgttaggcactgttaagc

SEQ ID NO: 20468 - DNA, 120 bp, synthetic construct
  source 1..120: mol_type = other DNA
ttttcaaatcattaaaagcaaatgacaatcagccatcacatttcccagtttctagcttcctccccttattctgtagaccttcataaagtcttgcagcctgggtgatgaatcggtccacac

SEQ ID NO: 20469 - DNA, 120 bp, synthetic construct
  source 1..120: mol_type = other DNA
gctaacctgaccttgtcagaagccaaaaatgagaagaagggtcctagacactggtccctccatctctaactcactaggacttttcagtatttttgctattgtcaacaagaatctcaaaag

SEQ ID NO: 20470 - DNA, 120 bp, synthetic construct
  source 1..120: mol_type = other DNA
gcctttgttagcaataaaatactagagtagatgcaatacatccccagtgccttggactacagcaaatggcactcagtaaagaaggggagaagctttttcctgtttagctctcctttagaa

SEQ ID NO: 20471 - DNA, 120 bp, synthetic construct
  source 1..120: mol_type = other DNA
gtggaaaggggagagggagagggagagaggagtacaaaaaaatttagatgtgaaatctttctaaataagtatgtagaaactcactttttaaataaataaaatatttttcagaaacaaggt

SEQ ID NO: 20472 - DNA, 120 bp, synthetic construct
  source 1..120: mol_type = other DNA
gttcctagtcagccatcttgcctggaaccacagaagcatcttttttcaaatctagggctctgtgaaacattttgaaaacagtcgatctgtggttaatagttggcagttaagcctgagctt

SEQ ID NO: 20473 - DNA, 120 bp, synthetic construct
  source 1..120: mol_type = other DNA
gggggagggagagggaaaggtaaatacatttttttcataagtacctgccctaccctgggtattatgtactaaggtaggaataggatagcaaaatagacatgttttcaggctacaggggag

SEQ ID NO: 20474 - DNA, 120 bp, synthetic construct
  source 1..120: mol_type = other DNA
ggggcagggcatagaatacttgagtgtaacatttatttaggaggggaaagccaacatcccccacaccataaccatacccaccaattctgtctttgattacagattttaatctcctcttat

SEQ ID NO: 20475 - DNA, 120 bp, synthetic construct
  source 1..120: mol_type = other DNA
accaagtgtggaggttggtgattttgctaaaacaaacaatagttttgctcttattgtaaagaaagcattagttggttttttagaagtttaagaaaaaaaaaaaacccaaaagccaaaatt

SEQ ID NO: 20476 - DNA, 120 bp, synthetic construct
  source 1..120: mol_type = other DNA
tactttacactatcttttggattcctggttctgtcatcccaagtgtatctgcctcctagcttcatgctgtctgttatattgtgagaaaaatatgtatcttcacctagtcatacacaaggt

SEQ ID NO: 20477 - DNA, 120 bp, synthetic construct
  source 1..120: mol_type = other DNA
ctgtctttgcaaccttccatgatcgctattctagatgtctttcagctccaataattcttcagcaccacaagaacatacagttctttggtataactactaccttttcactgtccctcccca

SEQ ID NO: 20478 - DNA, 120 bp, synthetic construct
  source 1..120: mol_type = other DNA
gaagacaggcaatgacaatgatgtaacctcagaaacttcattcttacattttaagggagtgttcgtttgtcaaatagttttccccttaaaaatgaagacacacccagtgtgtcttgctcc

SEQ ID NO: 20479 - DNA, 120 bp, synthetic construct
  source 1..120: mol_type = other DNA
gagagtgctaaggttttataggtaggaaactaaagaaggaagggaacttaaatattggctggggtcagatgatatgggcctttagtgtccacaaagtgtgagtgatagggaaccaatgaa

SEQ ID NO: 20480 - DNA, 120 bp, synthetic construct
  source 1..120: mol_type = other DNA
tcagaataaagtccaagttccttaacacagtttacatggccgtgttttaacttgcctctgcttttctcttcagacttatattttgttaccctcgacttctccctctgcattcaagccacc

SEQ ID NO: 20481 - DNA, 120 bp, synthetic construct
  source 1..120: mol_type = other DNA
aacgttttatgtgaaacctccttagctggtaagttccaagggggaatgcaggctaatagtttaaagaacaggatgtaccagagctttgaactcaaaggcgagaatccttgccgtttagat

SEQ ID NO: 20482 - DNA, 120 bp, synthetic construct
  source 1..120: mol_type = other DNA
gcagtgagctgagactgtgctactgtacacacacacacacacacacacacacacaaatcagcatgaagcattaaagtagcattaaaggttcctcaagtaatcttcctgttacagttttaa

SEQ ID NO: 20483 - DNA, 120 bp, synthetic construct
  source 1..120: mol_type = other DNA
catttttattgtggagagacataaacaatgatttgtggtagtgataaaagctgtgaagaaaagaaacagggtgaaacagggactcagggaagatcttgctgaggtggcgatttcgcagct

SEQ ID NO: 20484 - DNA, 120 bp, synthetic construct
  source 1..120: mol_type = other DNA
gaacatttcaaaaagacatttgtgctctaccttctttcaaactcttaactctgggcacctacactgtagagatgtaacagaaggcagaagaaatcaggggcatacaggtaggtgtgtcat

SEQ ID NO: 20485 - DNA, 120 bp, synthetic construct
  source 1..120: mol_type = other DNA
tcaaatggtaaatgtgtgtgtgtatataacagagcaatagaagtcaatgtagcggaattcctttccttggctcaaacctgaggcttcctctcagaccttgggacaaaggtctgagaaata

SEQ ID NO: 20486 - DNA, 120 bp, synthetic construct
  source 1..120: mol_type = other DNA
tcatgcctctttgtagtcagccccttccctctacatagactccagttcttggcaactgctgatctgcttttttccattgtattttgtcttttttttcttctcctttttttggagcggggg

SEQ ID NO: 20487 - DNA, 120 bp, synthetic construct
  source 1..120: mol_type = other DNA
ggaaaagtctcacctctcacactattccagccacccaattcccctccctggagtcaacaaatataatcactttcttatgcatccttccagagctatttgatgtatgtacaaacaaacaaa

SEQ ID NO: 20488 - DNA, 120 bp, synthetic construct
  source 1..120: mol_type = other DNA
caggcatgagccactgcgcccggcgtccagtgtaactcttaagtttagtctcccatccactttgtgttaaatcttgaaagaagaattttgaaaagcactggaatgaaatgtgaaaaataa

SEQ ID NO: 20489 - DNA, 120 bp, synthetic construct
  source 1..120: mol_type = other DNA
tttgtagcaaagaggagtctcccgctggagattggtgagagtctcatggatcagactctggctcagaggcattgttcaactttatttatttatttatttcgacatagggtcttgctgtat

SEQ ID NO: 20490 - DNA, 120 bp, synthetic construct
  source 1..120: mol_type = other DNA
ccactgggcccagctggttaactcgagaaaacatgggattgtttgaatcgtgagctgaactagctgcctttttcttggaataccatttttacttcaagataatcactgaaagctaaacta

SEQ ID NO: 20491 - DNA, 120 bp, synthetic construct
  source 1..120: mol_type = other DNA
aactctccatcccctctgccctctagccactacccttctacttttgtctctatgaatttgacggctctcagtatctcataagtttttcgttactggcttattttcacttagcatgttttc

SEQ ID NO: 20492 - DNA, 120 bp, synthetic construct
  source 1..120: mol_type = other DNA
atcatctccaggtaccatttccctatccttcctacccactgctgctagaggacagcattacattcaaaaggaatttcatttatttggcacagtcagaaatatggctcagaaatctgctct

SEQ ID NO: 20493 - DNA, 120 bp, synthetic construct
  source 1..120: mol_type = other DNA
ggttggagattccagtgtaatgtctgcaacatgaacagtcattgtgaaagttaactttagatatcaaaactgccactccctaactaaccaagggagagtgctaattttgacaggctgctg

SEQ ID NO: 20494 - DNA, 120 bp, synthetic construct
  source 1..120: mol_type = other DNA
tctagtgctcagagagctcctgcatattatacagttcctggccttcactcttacgtcactcatcaagacagcctgattgtcttgtgccaaaataaaaagggcaagaaagaaaaaatgcaa

SEQ ID NO: 20495 - DNA, 120 bp, synthetic construct
  source 1..120: mol_type = other DNA
tgaatgctttaagatcccctaggatcaggaatgagacaagatgtctgctcttgccacttctattcaacactgtattggaggttctagccagagcaattagtcaagaaaaaaggagtccac

SEQ ID NO: 20496 - DNA, 120 bp, synthetic construct
  source 1..120: mol_type = other DNA
atctggggtagttctcttatcttagctcctatttaagcagctcagatcacttctgttctcaaccacaataagcaagaagtactagaagcttcttgtcatggagccagcactggagttaat

SEQ ID NO: 20497 - DNA, 120 bp, synthetic construct
  source 1..120: mol_type = other DNA
gccatctttgtagtcttgagcacttcacatcattgtaacagctgtccatggaccagatactgcctctccttatatttggctatatcctgtggataggagttaggaggtacttcttttgat

SEQ ID NO: 20498 - DNA, 120 bp, synthetic construct
  source 1..120: mol_type = other DNA
gacacaacaaagcagctcccattttactaataaggtttgtttcctttaaaagcctgcttgactttaagaactctcacagcagacaatgaaccacattgctgggagaagttgattgctgcc

SEQ ID NO: 20499 - DNA, 120 bp, synthetic construct
  source 1..120: mol_type = other DNA
gtattccattgtacgtgtgcaccatgatgtgtttatccattcactagttgatggtcatttgggttgtttccagttttggcaattacgaatacagctgctgtaaacattcacatacaggtg

SEQ ID NO: 20500 - DNA, 120 bp, synthetic construct
  source 1..120: mol_type = other DNA
tggtaaagtatctgtctaaatccttttagcatttttaaaaatggggttatttgtattcttgaattgtaaaaattccttatatattctggatacaagtcttttatcagatgtgttttgcac

SEQ ID NO: 20501 - DNA, 120 bp, synthetic construct
  source 1..120: mol_type = other DNA
gtactactcacataaagattgttttgctcataatggaaagacaattatcagcccacctctacatcttatctttttgactgttcatagcttgatccataaagaaaatggagaatctaactc

SEQ ID NO: 20502 - DNA, 120 bp, synthetic construct
  source 1..120: mol_type = other DNA
ctcactctctggatagaactctcactatctatctggatagaattctcaccatctggatagaactctcacgatctgggtagaattctaagtctcttggtagaactctcactatctctctgt

SEQ ID NO: 20503 - DNA, 120 bp, synthetic construct
  source 1..120: mol_type = other DNA
tatctgtctcgatagaatgctcactctgtggatagaactctgactatctatctggatagaattctcaccctcttaggctacagtaaccaaaacatcatggtactggtaccaaaacagaaa

SEQ ID NO: 20504 - DNA, 120 bp, synthetic construct
  source 1..120: mol_type = other DNA
tggatagaattctcaccctctggatagaactgtcactatctggaaggaattctcaccatctggatagaactgtcactatctggatagaattctcactctctagatagaattctcactatc

SEQ ID NO: 20505 - DNA, 120 bp, synthetic construct
  source 1..120: mol_type = other DNA
cgtagtatccagccagtgctttgttatgaatccggcattcttgcaggtatgtattatcttaatagttagttgacatttggactcctagagataatcatgacttactggtgatttctaccg

SEQ ID NO: 20506 - DNA, 120 bp, synthetic construct
  source 1..120: mol_type = other DNA
gtcaaaatgcagagaagcaatatgatggagatgtatgtaaggactgtgtcgtttgttcattcagtaattcagttaaccaatatttaccatgctagacaatctgttaggtcctggggtata

SEQ ID NO: 20507 - DNA, 120 bp, synthetic construct
  source 1..120: mol_type = other DNA
acagaattacagaaattcgtcgtgggaaggtattgagagattatttggtgcagcaaaccagttgggaaggatgtagtcaaaattcccagtctcttcagctgaatttgtccctttctttct

SEQ ID NO: 20508 - DNA, 120 bp, synthetic construct
  source 1..120: mol_type = other DNA
atactataatgaaatcttagctcagaagaacctaatttgcagcaagcttaggacctttaaaatcagaagtcctttgggtcttgtcttagcaacttacttgttaaaggctctgggtgggga

SEQ ID NO: 20509 - DNA, 120 bp, synthetic construct
  source 1..120: mol_type = other DNA
ccatcagcagagtaagcagcctacagaatgggagaaaaatgaatactgttgataaaaagttgggttgtttccagctggaagctattgtgaatcaagctgttagggacatttgtgcacaag

SEQ ID NO: 20510 - DNA, 120 bp, synthetic construct
  source 1..120: mol_type = other DNA
ctgagcttagtgtccttgtcaaatgggaataataacaccaaccctgttgtttgtcatgagacataatagatacaatatgcgtaatattcgtagctcaggcacaggaagccaggaagctct

SEQ ID NO: 20511 - DNA, 120 bp, synthetic construct
  source 1..120: mol_type = other DNA
tcatccgtgggcttgtgtagaaaaagcagaaataaataaagcccaaggattaaagcccatggcagtgatgcacatactgcatttctcatctcagaaagcctcaaaagactagtgggaaaa

SEQ ID NO: 20512 - DNA, 120 bp, synthetic construct
  source 1..120: mol_type = other DNA
agacacggggaagctgaggcacaccccaaagaggccactgagagacatggggaagctgaggcgtaccccacagaggccacgggaaaggtgaggtgcacaccacagaggccactgagagac

SEQ ID NO: 20513 - DNA, 120 bp, synthetic construct
  source 1..120: mol_type = other DNA
atttccgaaggagtgccttccccatcacaactctcaaaccgctgaaccttatagaaaggagatttgcttttctggataattatcaacacctttaggctgcagtagaagtgatgattctgt

SEQ ID NO: 20514 - DNA, 120 bp, synthetic construct
  source 1..120: mol_type = other DNA
accagtaccatgctgcctgttcacatgatggacaccagctctgatattcaccctaagatataatccataagatgacaaacttgtattcaacaccgactcctactctggctaaaatgctga

SEQ ID NO: 20515 - DNA, 120 bp, synthetic construct
  source 1..120: mol_type = other DNA
cccgtgctttctcccccttctcttgctgttttgaaatactttaaattccaggaaccagaagttctggcaacatgttgggattagtaaggcagatcctaggatatttcactattagcatgt

SEQ ID NO: 20516 - DNA, 120 bp, synthetic construct
  source 1..120: mol_type = other DNA
tggaaaaaagatgtatgtgtatgagtcacgtttcttctagagctggaagggtagaccatggagatgatattttgcagattaggaaaccaaggcccagagcagttgaagggattaaattgc

SEQ ID NO: 20517 - DNA, 120 bp, synthetic construct
  source 1..120: mol_type = other DNA
cctcaggagtgggacagggcaaaaaacagaaataagtgtttttctagcatgatgtcttagatctgtttctaaataatgcaggagttaggggaagtgggtgggagtattaacccaaaacac

SEQ ID NO: 20518 - DNA, 120 bp, synthetic construct
  source 1..120: mol_type = other DNA
attgggccattaagctttcccaacatagccatacatttgaaaatttatgtgacacatgtgtaagaaatggtgtaccttctttacggtccaaggccaatttattccctgcctgcttatccc

SEQ ID NO: 20519 - DNA, 120 bp, synthetic construct
  source 1..120: mol_type = other DNA
cagcaatatccagattaaagcctactataaatcaagaagacttcctagcactaactttcccaactgctacaaaggcgaataaatttggttcttccttgtttccagggagtgccattttct

SEQ ID NO: 20520 - DNA, 120 bp, synthetic construct
  source 1..120: mol_type = other DNA
aagtattcctagtgtagtcaaagcttctctttagactgataaaacttagagcacctgcatttacttccaacaaagcagaattaaagaaaatgagacttggccgggtacgtttgtaatccc

SEQ ID NO: 20521 - DNA, 120 bp, synthetic construct
  source 1..120: mol_type = other DNA
gagggaaccttttgttttattccagtaggaccagctagaaacagaaggtgattgaccagtattagggatggaatcagggtacaattatggagacaggctatctaaacaattcactctcac

SEQ ID NO: 20522 - DNA, 120 bp, synthetic construct
  source 1..120: mol_type = other DNA
gtgaagattaaatgaggatgtagttcccacatgcatcccacagtgcccgggacatagtaagctccccaaaagcaccaagcttagctgggaagcacgatgggtgaggcatggaccttattt

SEQ ID NO: 20523 - DNA, 120 bp, synthetic construct
  source 1..120: mol_type = other DNA
gactaatcctttccagggatgagatcactgccccttctaacccccccccccgcccccacacacagaaagagcagagccctcatctcagcccagaattttgggagaagactaaatccaaga

SEQ ID NO: 20524 - DNA, 120 bp, synthetic construct
  source 1..120: mol_type = other DNA
acatgggtctctctctcttttcatccagcccaaaatgtcaaagcacaagggtctctgtcagggcctggctgtggtcactggactgcggctgaggggtaaggtgcacccctcctctaatgg

SEQ ID NO: 20525 - DNA, 120 bp, synthetic construct
  source 1..120: mol_type = other DNA
tgtctcctctcatgggatacatttggaagggttagccaccagatgacagagtagtaccccacagtacttacttcctaaaacaggaaaaatcatgtttcttgtgcagaactcctctattaa

SEQ ID NO: 20526 - DNA, 120 bp, synthetic construct
  source 1..120: mol_type = other DNA
acaagattagctcagagtagaaatgaatagcaaaatctattaatgcattcattaaatttcttgaactataaatatcacaattagattttcagcacttcaaaacagtcctgtgacttttcc

SEQ ID NO: 20527 - DNA, 120 bp, synthetic construct
  source 1..120: mol_type = other DNA
gaatgtcttcaagtttgagctactatcacaaaataccatagaccaggtggcttataagcaacagagatttatttctcacagttccagaggctgaggtctaagatcagggtactagcatgg

SEQ ID NO: 20528 - DNA, 120 bp, synthetic construct
  source 1..120: mol_type = other DNA
agaatgctgagtagtagatgtcctaaagaagcagttacagaggccttcaaaacattaggaataacggaaaggaaaagagaccccatcactactgtcaccaccatcatcatgatcatcatc

SEQ ID NO: 20529 - DNA, 120 bp, synthetic construct
  source 1..120: mol_type = other DNA
acactctcatcttgccaatcctgcctctgctacctgtcttgtctgaattcccctaagacttgtgtatctcttgtggcacattgatttgtgcatgatttcttcttcttctttcttcttctt

SEQ ID NO: 20530 - DNA, 120 bp, synthetic construct
  source 1..120: mol_type = other DNA
gttacaccttgggaagtactttcaacacaacaagtacaggaagatatctgttactctagggttgcccattgttttagggtctcgtctattatagacctggttcttatccaggatacactg

SEQ ID NO: 20531 - DNA, 120 bp, synthetic construct
  source 1..120: mol_type = other DNA
ataagggttcaaacaacaggcccgaccctaattcagacattatctacttcaccccaagttgcatcaggctttgaaaaacagtttaattataaatgatcgccaaagagttttccctgaaaa

SEQ ID NO: 20532 - DNA, 120 bp, synthetic construct
  source 1..120: mol_type = other DNA
ccatcagcagtctgtagaaaaatgaaatgctgcaagtctatttttatgcagctgggatcaagttactaaatggatcaaaagaaataatttctttgaagaggtggctgttgacaccagtgc

SEQ ID NO: 20533 - DNA, 120 bp, synthetic construct
  source 1..120: mol_type = other DNA
cccttcacagataataataaagaaataagccaataagcccttaaaatagaacgatatagtcttagctctggaggacaaaatattctctacttggaccctgactcatttagaactcctgca

SEQ ID NO: 20534 - DNA, 120 bp, synthetic construct
  source 1..120: mol_type = other DNA
taggttggctaatacaataatgttttgcttttttttcactctttataaaattcattttacttattttagatacatgtcataaaatcctcacttgcatttgcttatttttgtggtaagcta

SEQ ID NO: 20535 - DNA, 120 bp, synthetic construct
  source 1..120: mol_type = other DNA
acaaacaagatataaaatacatgaaaatctttgagtattgtctatctttctttgggtaaaagtcttaaggttttggacactactatccttcttaattcatactaaaaatcataatcactc

SEQ ID NO: 20536 - DNA, 120 bp, synthetic construct
  source 1..120: mol_type = other DNA
aaagaaagaaatttgaaaggattgccagatgtcaggaaagtgcttactatagagatgatgtttaagcaaagatctaaatatgagagggagccagccagaccagcagctgggtaatcgctg

SEQ ID NO: 20537 - DNA, 120 bp, synthetic construct
  source 1..120: mol_type = other DNA
gagtatcagtcctggatacctatttgtactaaaaaccaaaggcttctccttctttgctctgattctaattttctgaccttgtatacactggttacttacagattaataccagtaatatca

SEQ ID NO: 20538 - DNA, 120 bp, synthetic construct
  source 1..120: mol_type = other DNA
atctagtacaaaccagcacttacgtgggacaagttggggaggggcaaccccaagaagataagagtttagaccttaacgttttcctgtagtgagttttggggagttaatattgttattatc

SEQ ID NO: 20539 - DNA, 120 bp, synthetic construct
  source 1..120: mol_type = other DNA
gtcagacacatgcctggtttctgacccttgtcagaccaggaacaaattataatttgaaagtagggcataaagcgctggagttgagacttgtaaggatgtaagagcttacaacaaaagaac

SEQ ID NO: 20540 - DNA, 120 bp, synthetic construct
  source 1..120: mol_type = other DNA
agtttgcacagaatgtggaaagaaagaagacattgttattccgttcagtaaggaaccagaaaaaataaaatattgaaaacaatcgcctctccctctccctctccctctccctccgtctcc

SEQ ID NO: 20541 - DNA, 120 bp, synthetic construct
  source 1..120: mol_type = other DNA
tatagaggagaactaacagaatacttacaaagcctggcatggtaacattccagtttctttcctaatggttatgacctgtggtagctcatgccagagctgtagaagcctctttacctcaaa

SEQ ID NO: 20542 - DNA, 120 bp, synthetic construct
  source 1..120: mol_type = other DNA
tatcaaattggtaaaaatcaaggttaaacagtttatactctacactggtgacatgtgaggtaggagaaggcataagtgtcaagggagagagaactccgcataccacctgccagctgaata

SEQ ID NO: 20543 - DNA, 120 bp, synthetic construct
  source 1..120: mol_type = other DNA
gggcttattagttttatagaagaaagaacaagaaattaagtgagcttagaaacctttttcccataaggcagcccttcagatcagtgcctgggtagagaaatcagatactctggaggaggt

SEQ ID NO: 20544 - DNA, 120 bp, synthetic construct
  source 1..120: mol_type = other DNA
cctaggagagctactctctgcactctgcttttctgtttccgttttcctggtcattcctgctggcttattcttccatgagagctttaaaatcaaattgtctaactccagattaaacacaca

SEQ ID NO: 20545 - DNA, 120 bp, synthetic construct
  source 1..120: mol_type = other DNA
tgagctacacaaaggtatgaaattaacatgtttcaatactgaaaggagttaatttttaaaaccctaccatatgctgtaatataatgccctctatggactaaattacagcacttcaacatt

SEQ ID NO: 20546 - DNA, 120 bp, synthetic construct
  source 1..120: mol_type = other DNA
caagtctttttaccgagttggacatcttaataaaatgtattcgaattcacattttctctccaaatctaggcttcacatttaatctaaaatatttcaccctattcccatacacccttaaag

SEQ ID NO: 20547 - DNA, 120 bp, synthetic construct
  source 1..120: mol_type = other DNA
aagaaggattggtaaagaattcttacttaaaaaaaatcctgccctctctccctctctccacctctacctctacctctacctctacctctacccacggtctccctctccctctctccatgg

SEQ ID NO: 20548 - DNA, 120 bp, synthetic construct
  source 1..120: mol_type = other DNA
atttgtattattacctcttcaatctattagtatctttttgttttcaaacctttaagctttttcaaaaactgggtacaatttgcatccctggggcataggacagtgcctgacttagggcag

SEQ ID NO: 20549 - DNA, 120 bp, synthetic construct
  source 1..120: mol_type = other DNA
tggtttgttttggagaaaaagtgagtagctgccagacccattccctactgagagcaagatatttgtggtttttctatttgtgagtgtccatgtgcttaggcaaatgaagacagctttagc

SEQ ID NO: 20550 - DNA, 120 bp, synthetic construct
  source 1..120: mol_type = other DNA
aggctgacagagagggaaatacacacactttcatgtctcaaattctatagtcaattatttggagcagccttcctcttccactgcttcctatttcactcctgccctcattaacattgcata

SEQ ID NO: 20551 - DNA, 120 bp, synthetic construct
  source 1..120: mol_type = other DNA
tctccctcttctctccctgctctacctttttgagcctggtgaacacttaagactttttattgaaattacccaccactggttgaatctgacatcatttgagaacctgtccaaagtttccat

SEQ ID NO: 20552 - DNA, 120 bp, synthetic construct
  source 1..120: mol_type = other DNA
atgatatatatgatatatatgtgtttgtatatatatctcttacctttcttgtcaatcctgcagaaaaaggaactgttcagtttagggtaagaaagcccagatgccctgaattgtacaaga

SEQ ID NO: 20553 - DNA, 120 bp, synthetic construct
  source 1..120: mol_type = other DNA
ggggtaaagcgggtgaggagaagaggctcgcttctctaccatccttcatgattcctgaccccccaatcctttttcccatttcctttgatgttattttattacagctttttaaatattttt

SEQ ID NO: 20554 - DNA, 120 bp, synthetic construct
  source 1..120: mol_type = other DNA
gattacctaggagttaacaaaaataaacaactggctttgaatctggtctcagggtgcatgccctgctcttcagataccatttacaagatgggtaagtgtcatctccctcccatctaaaaa

SEQ ID NO: 20555 - DNA, 120 bp, synthetic construct
  source 1..120: mol_type = other DNA
atgccccttcccagtctgtacctacacctctaaatctattttcaatcttaatggccttttaaataactgggcttctcacaaccatagtgaacagaaacagctgggttgtcaacgtctaac

SEQ ID NO: 20556 - DNA, 120 bp, synthetic construct
  source 1..120: mol_type = other DNA
ccagtctagaaagagaatttctttaatagtgtgaagcatgaactgtttcagtgtagctgccaaaccatgtcactctgcagtgtttcaggtgggtttacttacaggtgaggagaccatatg

SEQ ID NO: 20557 - DNA, 120 bp, synthetic construct
  source 1..120: mol_type = other DNA
tgttggcatattgcttgtacttgatgtaatttgtagagtgcttgagattgtttattcaggaactagtgaaggtgggtttctttcatttccctcactccctatttaaatttctctctcctg

SEQ ID NO: 20558 - DNA, 120 bp, synthetic construct
  source 1..120: mol_type = other DNA
gcttctctgtgtgtggccagttatcacaccagtggaactaagtggtggggaatggtgtacttttgaaagtcgatcttatgagtttgagaggggtcatctttaaattttgtaaattggtca

SEQ ID NO: 20559 - DNA, 120 bp, synthetic construct
  source 1..120: mol_type = other DNA
ccagaatgatttgactaggagtggtgagagcagacatccttgccttattccttggcaggaaggcatctagtttttcactgttaagtataacgttatccttaggttttttggtagacgttc

SEQ ID NO: 20560 - DNA, 120 bp, synthetic construct
  source 1..120: mol_type = other DNA
ctctaagggacccctgtagcctgttgagtagactgctgaaagttttaaataactgaaaatacgttctcactttaactgctatgttccttgttagaccgcaggcatggctgtatgacataa

SEQ ID NO: 20561 - DNA, 120 bp, synthetic construct
  source 1..120: mol_type = other DNA
aagcaaaatttattgactctcttcttgtagaatgagagatgcagtatgattctcttctttatttaaacccttccctccaaccccattggctattatgtttatttcaataacattttgcta

SEQ ID NO: 20562 - DNA, 120 bp, synthetic construct
  source 1..120: mol_type = other DNA
tcaccttttcatttgaatgcttgacttctattggataattctcttccaagagaccttcttgggaaaaagaggtgacagccaactcattgcctaattgatttaggaacagtgcccagggag

SEQ ID NO: 20563 - DNA, 120 bp, synthetic construct
  source 1..120: mol_type = other DNA
ctttgtaccatagagccaaattccataaagggttttaaaatgtatttacctatgttttcaaatagccataatgtacattaattaaaatttattttttacacctaagtgaggttctctcaa

SEQ ID NO: 20564 - DNA, 120 bp, synthetic construct
  source 1..120: mol_type = other DNA
agaagtctctcacattcctgcaagcaaggcactgctttgttcttgactattttttcaaaaatagcaagcagtcttagaaaatcaagctagtttactaacagagcaaagggcaggcatgct

SEQ ID NO: 20565 - DNA, 120 bp, synthetic construct
  source 1..120: mol_type = other DNA
agacactgtcaggaagattataaggtataaacacagtatctcctcttttttttatttcaacttttaaatgcagggggtacatgtgtgggtttgttatatgggtatattgcgtgatgctgg

SEQ ID NO: 20566 - DNA, 120 bp, synthetic construct
  source 1..120: mol_type = other DNA
atggtctgcttggtagagggttaaaatagaaagacaacatacatatctgtcatcagtaattctgtaatgcaaccttgaaaaacatggcaaaggagggctgcctaggggacaactaccata

SEQ ID NO: 20567 - DNA, 120 bp, synthetic construct
  source 1..120: mol_type = other DNA
atgaatccagtaaataacatgaatcctagactaactctggcattttaactcttcatctagttgtaaactattttaatacaatgaaagcacaattcataatttggcattaagagtttattt

SEQ ID NO: 20568 - DNA, 120 bp, synthetic construct
  source 1..120: mol_type = other DNA
attcagcatattaggggcagtgacctacttaatgcttatgcgtagcctcagcccattagccagttctgtgaggtttgtgagaagttagaggctaaagcttatgctttatttttcaacctt

SEQ ID NO: 20569 - DNA, 120 bp, synthetic construct
  source 1..120: mol_type = other DNA
aacatgtttagaattttgtgctaagatgcctgacctccatcacagaattgtatggtccttgcttgactccatacctctgactcaggttaaaatatttaacagagcaggcttggtggctca

SEQ ID NO: 20570 - DNA, 120 bp, synthetic construct
  source 1..120: mol_type = other DNA
acatttggaagatctgcttaactcagtggagcactatttttcaggtgaccagtgcatgatgttacaaaatcagggatgagtaagagatctattgaaagtgaaagagtccctctccctctc

SEQ ID NO: 20571 - DNA, 120 bp, synthetic construct
  source 1..120: mol_type = other DNA
ccttactaactccccttctctgtgagtagctgtattttctttatatacttcaaccaaaataatatattacagattaaaagcaggagcagataccagaatccagctattttctggtaagcc

SEQ ID NO: 20572 - DNA, 120 bp, synthetic construct
  source 1..120: mol_type = other DNA
atgtcttaccagtgactagattagataagctaaagggccactttaggttgaagtattctatgacaaaccatagaaataccaggaaaaagtagctctaaaaacataagccttcagacaaga

SEQ ID NO: 20573 - DNA, 120 bp, synthetic construct
  source 1..120: mol_type = other DNA
tgtcaggatctaaaagaaaatgcggatatcaatgatgcaggtactgtaggctgactgtattgtgtagtggtataaagcatgagtttggagtgaaatttacttgttccaaattcaaccttg

SEQ ID NO: 20574 - DNA, 120 bp, synthetic construct
  source 1..120: mol_type = other DNA
ggataaatacgctccctgcttgcctggagttcatagtcggagggtggggaaagacagatgttaaaaagtcatttcagaagtcttctgtttccaaagagttagaatcacactaagacatta

SEQ ID NO: 20575 - DNA, 120 bp, synthetic construct
  source 1..120: mol_type = other DNA
attacaggcgtgggccaccatgcctgccctgctgtctcttctttctcctcctaagcagctgtcttagtctcctgaattttgatgttctacttaacaccctcatgttcttacgcatgttgc

SEQ ID NO: 20576 - DNA, 120 bp, synthetic construct
  source 1..120: mol_type = other DNA
ggtatccaaacatcctggagttgcgagcagacagcacgggtttcttccttgagggggggctccagacaacaggaggcaggaccctctgtggggtgcccgtgttccaagggataagacaca

SEQ ID NO: 20577 - DNA, 120 bp, synthetic construct
  source 1..120: mol_type = other DNA
tttgaacccgggctgtgcgattccacagctggcgctctggcctgtgtgcctcatgatcatggatacagcatctattcttattttttcctgtagtcctggggtacttagcaccatggcata

SEQ ID NO: 20578 - DNA, 120 bp, synthetic construct
  source 1..120: mol_type = other DNA
ttaagagcctattgtaggatcacttctgggctgacagtatttctagaccttctttcctctttcaatttttgctaactcactaggatggtttggctgaaatacgcattctgtaacactggg

SEQ ID NO: 20579 - DNA, 120 bp, synthetic construct
  source 1..120: mol_type = other DNA
tcaataactgaggaaaccagtattcctggaactgtttcacatttttaactggaactcttactggggagagggaatggagagaatatgtaatctgctgccatcaaaaagaattccagccgg

SEQ ID NO: 20580 - DNA, 120 bp, synthetic construct
  source 1..120: mol_type = other DNA
tattacaagttaatgattattgaggactgaataacttcctttaaaagaaacgtatacactttccagttcaccatactcctcaccactctccattgtcaccccagtacccaggccaagcat

SEQ ID NO: 20581 - DNA, 120 bp, synthetic construct
  source 1..120: mol_type = other DNA
cctgaaaaggctaatcttaggttctacaagagagatgttttctgcaggagtaattggggaagttgcaactcttaggaccgccagaataatggctggtaatcatttacatctacaccttag

SEQ ID NO: 20582 - DNA, 120 bp, synthetic construct
  source 1..120: mol_type = other DNA
ggagggggagggagagagagagacctcctgtgtgtatttccaaaactctaactccaccaggttatatacatagtgatacaaatatggcctgataaaaacaaaattcatgcacctcaatac

SEQ ID NO: 20583 - DNA, 120 bp, synthetic construct
  source 1..120: mol_type = other DNA
ccaccctgctaagactagtccgtgactctctgtgcctttctccattcttctcttaactaacctcatgtttttattagcatctgtaagacccataaggggaaactgagagagaaaattcaa

SEQ ID NO: 20584 - DNA, 120 bp, synthetic construct
  source 1..120: mol_type = other DNA
attgctctttgggaaacaaaatttgaggagcaactcaagcatttggaagatctgggtatgaagcccaaatggtgacctcaagaaaggagggtattttgccccttagttggtgaaagtagt

SEQ ID NO: 20585 - DNA, 120 bp, synthetic construct
  source 1..120: mol_type = other DNA
gctatactgtttggattcacacttgcgcagtaatcttgtcattacaacaactgcaaattgctttgtactcaccttctctcaagtaaaatctaaagaaaaccccaccgtatccaatgtttg

SEQ ID NO: 20586 - DNA, 120 bp, synthetic construct
  source 1..120: mol_type = other DNA
attcaattcatccaagtccccctgttctgattccatctcccaaaaaattcttctgattgtgattcagcttctcacattcacatgaggccaaaggagcacaagtcatgggtaaaacactac

SEQ ID NO: 20587 - DNA, 120 bp, synthetic construct
  source 1..120: mol_type = other DNA
ctgcttctctcaaccaccaacagtgaacagccgcttcctctcagagcagctggtgtgacaaggtctctagatgctcctccagccacccagcaccctgatcactcaaaatggcctgagtga

SEQ ID NO: 20588 - DNA, 120 bp, synthetic construct
  source 1..120: mol_type = other DNA
aggttatttgtaaataaagtgcaggccaatggcacaaagtagtgaaggtgggattcactcaggtctgtcacttccaagcccatgttttctactttgcaaccctatttgaaaggaaaactg

SEQ ID NO: 20589 - DNA, 120 bp, synthetic construct
  source 1..120: mol_type = other DNA
agtcctacgttcggagggttccgtttagacaacaggaagttggaatccaagtttaaaaggctctctgctgacaaaatgtggtacatccatcaacagaattctactcagcaataaaaggaa

SEQ ID NO: 20590 - DNA, 120 bp, synthetic construct
  source 1..120: mol_type = other DNA
gctcctccaccctgggccttccaaagtgttggagttacaggtgtgaaccactgtgcttggccctaaactaatatttatctaattccttttctctatgctaacactattttaggtattaga

SEQ ID NO: 20591 - DNA, 120 bp, synthetic construct
  source 1..120: mol_type = other DNA
aagtgctgggattacagggattagccaccatgcctggccccagggaagtttttctattattattttttgatttatttccttcaatttttaatattctgtttttctggaaataataccagc

SEQ ID NO: 20592 - DNA, 120 bp, synthetic construct
  source 1..120: mol_type = other DNA
ttcctgtcacctggctcattgacgctaaccagggggagatacagtgagtcagtgatgagttactcgcaatacatatatagttttaattggcatgcgcttttcttcatttcaaagaaagaa

SEQ ID NO: 20593 - DNA, 120 bp, synthetic construct
  source 1..120: mol_type = other DNA
aagatcacacccagcatacacacagatcacacccagcatacccaaagatcacacccagcatacacacagatcacacccagcacacagatcacactgggaacacccacagatcacactcag

SEQ ID NO: 20594 - DNA, 120 bp, synthetic construct
  source 1..120: mol_type = other DNA
cccagcacatgcacagatcacacacagatcacacccagcacacccacagatcacaccgagcatggatcacatccagcacacccagcacagatcacactcagcacacacacattacaccta

SEQ ID NO: 20595 - DNA, 120 bp, synthetic construct
  source 1..120: mol_type = other DNA
ttagagaaataacttttaggaagttccgactctggtcacaaagagacaagggatgagggggtgtccagaagatctcaaatgagtgatgtcaaagtgaggagatgtttcattaacaaggag

SEQ ID NO: 20596 - DNA, 120 bp, synthetic construct
  source 1..120: mol_type = other DNA
ggtggtgtgtgtgtgtgtgtgtggtagaggtggggtataagtgtgtgtggtagagatgggatgtgtgtgtgtggtagaggtggggtgtgtgtgtggtagaggtggcgtgtgtggtagagg

SEQ ID NO: 20597 - DNA, 120 bp, synthetic construct
  source 1..120: mol_type = other DNA
ataccaagaagtctctcaaatcaccacagaacagaaaacaaacaccaacagatggaaaatgtacaaatgacaaggatgagcagaagaaatacaaatggctgataaacccgtgcaagtttc

SEQ ID NO: 20598 - DNA, 120 bp, synthetic construct
  source 1..120: mol_type = other DNA
ggtttgatccacattactgcttctaaatgacctagaggttaaagtaaggagtacaaagtgtggtgctgaaatatgacagcatgatgaaatggggacaggtgggctggcaaaagcaattaa

SEQ ID NO: 20599 - DNA, 120 bp, synthetic construct
  source 1..120: mol_type = other DNA
gttacatctgaatattataatacaatcatgattatttcattaagttcaaattctaaaaggggaattacatagtaaaaaggtaagcacattttaaggggtttctgaggcatattgaaaaac

SEQ ID NO: 20600 - DNA, 120 bp, synthetic construct
  source 1..120: mol_type = other DNA
caatactatgtttaataggagtagtgagaatgagcatccttgtcctggggaatggttccagcttttgcccattcttaaaggaaaggcagtcaaccttttcccattcaggatggtgttagt

SEQ ID NO: 20601 - DNA, 120 bp, synthetic construct
  source 1..120: mol_type = other DNA
caacatcacttttagactgcactaaaacctcttgcccctagactacagcctcttggtaactaagtgcattcagattaggccaaggatgatgtttgctggctttccttgttacattaatca

SEQ ID NO: 20602 - DNA, 120 bp, synthetic construct
  source 1..120: mol_type = other DNA
ggagatgagagacaactgggcttgtaaacaatgaatgaatggaaaaaaatataatgaaacaaaataaaatccgggggggggggggggcctttatgaactgataatagagtgtcacagtct

SEQ ID NO: 20603 - DNA, 120 bp, synthetic construct
  source 1..120: mol_type = other DNA
gaaacattggcactatatcaaatcaccaaactaaactaaataatcccaaagtgatgtcccaacatagcaaactacataacagtgcattcatcatgactttgcattaccaccactaatcag

SEQ ID NO: 20604 - DNA, 120 bp, synthetic construct
  source 1..120: mol_type = other DNA
caggggttacatattcataacagaatacaaggattatcaaatgcatggtgatgccaacatgaaaagcaatttaaagtaaattcccaatgaattaaagagttatataaagaaggaaaacac

SEQ ID NO: 20605 - DNA, 120 bp, synthetic construct
  source 1..120: mol_type = other DNA
ggagagaaggggggaggggggaaaggaagagaggaagttgaggaaagagagaaagagaagaaaccttgaactaaatcttacacctcacatgaaaattaactgaaaattgctcatagatcc

SEQ ID NO: 20606 - DNA, 120 bp, synthetic construct
  source 1..120: mol_type = other DNA
ggtgtgccatagccagaacatatcttaaccatcagcactgcaaactgtttttaaaaacaagggctttcgaatgttctacttcccttccagttaacctctcactggtacagaaggcaatta

SEQ ID NO: 20607 - DNA, 120 bp, synthetic construct
  source 1..120: mol_type = other DNA
aatctgatgataatttcctcctctgcacacacactcatgcatgcgcacacacacacacacacccaataaaaaggaacaacttaggtggccacaagacctacacaattcttttcatttaca

SEQ ID NO: 20608 - DNA, 120 bp, synthetic construct
  source 1..120: mol_type = other DNA
ggagacatgtcatgaggagacataacagccaggtgcctatttggatcctaactcaacaaatcacctacgaagaggcattttagatatcaagacaacttgaatgtgggctggatattagat

SEQ ID NO: 20609 - DNA, 120 bp, synthetic construct
  source 1..120: mol_type = other DNA
actaggaccttcatgactgagatgaaatgttataaacttaaaatatatgacaacaatatcttacaggttagaagctgcataaatggagttaattttttccaagtttcttaagtgtttggg

SEQ ID NO: 20610 - DNA, 120 bp, synthetic construct
  source 1..120: mol_type = other DNA
tctgttccttatgcttgggcacacagcacaactcacaacagtgcctttttcacagacccctctttaatttcctccacaaaacccatcaggtcaccatagttcatgatgtttcaaaataaa

SEQ ID NO: 20611 - DNA, 120 bp, synthetic construct
  source 1..120: mol_type = other DNA
aagcatggctgacagaaaatcctaaaggcccaagattctatagtggctgtttgcaagggagacgaggctataagtaactgccacactggatcctcttatgtgagaagaaagaaagtatcc

SEQ ID NO: 20612 - DNA, 120 bp, synthetic construct
  source 1..120: mol_type = other DNA
cagcactttgggaggccatctccctcactaatatttcaactttcctattttaaatttagtgatgtttactgatgtgtagtgatgtttttaatattcagttgggcgtggtagctcatgcct

SEQ ID NO: 20613 - DNA, 120 bp, synthetic construct
  source 1..120: mol_type = other DNA
gaaagaaacttcttaaaaaggttttcatgagatttctttgccactaaatttaggtttcttcccccctatattcccaaacagcttggaataacagggaaattattgaagtagaaatccaga

SEQ ID NO: 20614 - DNA, 120 bp, synthetic construct
  source 1..120: mol_type = other DNA
taaagagagaaactttttaaaaaggttttcatgagatttctttgccactaaatttagatttctttccccctatattcccaaacagcttggaataacagggaaagtattgaagtagaaatc

SEQ ID NO: 20615 - DNA, 120 bp, synthetic construct
  source 1..120: mol_type = other DNA
aggctgcagtgagtcaggttcacaccactggacttcagcctgagtgacaaagtgagaccctgtcacaaagaaacaaataaacaaacaaaagtaatattcatgttttggacattcctatct

SEQ ID NO: 20616 - DNA, 120 bp, synthetic construct
  source 1..120: mol_type = other DNA
tctacatggcactgcactaggtcctgaacagcagtgagtaaaatggcccctgtccttattggtgttcctttataggtatgggagaagacaataaacagataagcaaataaatacagctga

SEQ ID NO: 20617 - DNA, 120 bp, synthetic construct
  source 1..120: mol_type = other DNA
taaaggcaaaggtagcttttatcctggccatagcacactgctgatggtcaacaagacaccaagtcctgctcacagatgctaaacagagctttcttttttcttttcttttttttttctttt

SEQ ID NO: 20618 - DNA, 120 bp, synthetic construct
  source 1..120: mol_type = other DNA
gggcggccaatgaattctcaggcctgtgtgggttttgtttggattctttttgctttctcagctggatggttttgggtgcagttggggcttggtttgttgaactgtttttttttttttttt

SEQ ID NO: 20619 - DNA, 120 bp, synthetic construct
  source 1..120: mol_type = other DNA
cagagcctttaggtaccaaataacatttaaacctttctctttcttctctgttgcccccgacggtaaccagaaactcaaacaaaagcacactgaggctgtcttctgaccaaaagttgttct

SEQ ID NO: 20620 - DNA, 120 bp, synthetic construct
  source 1..120: mol_type = other DNA
tcctaccaggcaacctagacatcttcacagggagaacatcagtgactcagaccccaagtcaccaaacagagtccttctgaccttgccctcccagtccacagggagatctttaaatagcag

SEQ ID NO: 20621 - DNA, 120 bp, synthetic construct
  source 1..120: mol_type = other DNA
acctcttaaagtgctaggattacaggcatgcccagcctaacagcagaaagtttacacactgccatgagcacctgcaacatataaacacacacattcataaatacacacaaacctacctct

SEQ ID NO: 20622 - DNA, 120 bp, synthetic construct
  source 1..120: mol_type = other DNA
taatttaataaagttgatttaaatcaaattaaattcttctcctgggggcagagtggcatcatgtaaagaaggtggagaaatatcggcagtctgtcttcctgtccgaaggtccctcccgct

SEQ ID NO: 20623 - DNA, 120 bp, synthetic construct
  source 1..120: mol_type = other DNA
tatggtggtgtgaagtatagatggaggtatgaggtatacatggtgatgaggtgtggacaagggtggtgaggtgtagatggtgatggtgaggtatagaaggaggtgtgtggcgtaggtata

SEQ ID NO: 20624 - DNA, 120 bp, synthetic construct
  source 1..120: mol_type = other DNA
tgtgtggtttaggtgtaggtggtgaggtataggtgagggtggtgaggtgtagatggtgatagtgacgtatagatggtggtggtgaggtgtagatggaggaggtgaggtctagatggacgt

SEQ ID NO: 20625 - DNA, 120 bp, synthetic construct
  source 1..120: mol_type = other DNA
tgggagcagatcaaagctgtccagtcccagaaggaagctgctcctccagtgaggactcctgcgagatgcccttctcttcctccttctccagttttttgggtcttccccttggtttccttc

SEQ ID NO: 20626 - DNA, 120 bp, synthetic construct
  source 1..120: mol_type = other DNA
cgacgtggttccagttctccctacccagagccagccctcccactcttagcctggggagactagcagagcaaatatagagaatccagatcccaggaagaggaaaaggagaaggaggagaaa

SEQ ID NO: 20627 - DNA, 120 bp, synthetic construct
  source 1..120: mol_type = other DNA
tcataacatggacactgtggaacagttctgactggaaatcaaaggaatagaagctgaaataaaaaggaacttgctggggacaaaaaggcaggaataaagaatgattgagatgagaaacaa

SEQ ID NO: 20628 - DNA, 120 bp, synthetic construct
  source 1..120: mol_type = other DNA
tgacagccaaatatgtctccagacattgctggatgtcacttgggaagtaaaatcaaaattccgttgaaaaccattactttaagccctagcatccctgctttacagatgaggaaatccagc

SEQ ID NO: 20629 - DNA, 120 bp, synthetic construct
  source 1..120: mol_type = other DNA
tgtagctatatcttctacatactgatgtcgtttcctttggatactcattttatgaggccaacattaccctgacaccaaagccagatcagggcactatcagaaaagaaaagtgaagggagg

SEQ ID NO: 20630 - DNA, 120 bp, synthetic construct
  source 1..120: mol_type = other DNA
aggctcagcatgggtttgataagagcctgtattaccaagagacacttaattcagtataattattggctttaggttatagatgggttgcttccagccccaacactttcctatgaaggagac

SEQ ID NO: 20631 - DNA, 120 bp, synthetic construct
  source 1..120: mol_type = other DNA
ttttaacattggaatatatcttgattatgtcattagagcctatctgtcttttctgaccattcttgtgcattctgcgtctgtactaaatagcagtagaaaagatgctgatgtgcttaatgg

SEQ ID NO: 20632 - DNA, 120 bp, synthetic construct
  source 1..120: mol_type = other DNA
acatgtaccctaaaacttaaagtataataataaaaagctaatgtgagaataattatgtgatatatgaaaaaataaggcagtttagagagaccaataaatgcattgaagaagatgcccttc

SEQ ID NO: 20633 - DNA, 120 bp, synthetic construct
  source 1..120: mol_type = other DNA
ggattgaatgggatcatagatgaaataagtttgcctgttttgaaaattctttaaaataatgatacatgaggtttcattgtactgtcctgtctttgaacatgcttgaaatcttacaagata

SEQ ID NO: 20634 - DNA, 120 bp, synthetic construct
  source 1..120: mol_type = other DNA
gtttccggcatctgggggaaagggagaatgagggttgattaatgggtatagagttttagttttgcaagttgaagagagttctagagatagttggtagagatggttgcacaacaatgtgaa

SEQ ID NO: 20635 - DNA, 120 bp, synthetic construct
  source 1..120: mol_type = other DNA
gattgccagtaaagttcaaaagcttgaaggtaatataacagcattcacatacaaatatttagcagagttccttcaaataagagaaaactgaaaatcttaatgagataaaattgcttgaga

SEQ ID NO: 20636 - DNA, 120 bp, synthetic construct
  source 1..120: mol_type = other DNA
gaaattcaaattcatgttaaaatacccaaatggtaaagactaacacaacacaaaaattgaaagatactaatacctttgttttacaatttaagtttcaatactcagcaccattccatcttg

SEQ ID NO: 20637 - DNA, 120 bp, synthetic construct
  source 1..120: mol_type = other DNA
tagatgtcagaatgtatttagcaatttcttgatgaaagaaacaaacccctgatagaatgtatactttttcggggggggggggggaggggctagaactgtaattttttgcttgttgtgtgg

SEQ ID NO: 20638 - DNA, 120 bp, synthetic construct
  source 1..120: mol_type = other DNA
cagcaggactccctgtaaaccccagaatggcttcagcttagccacctaaatgacttggaaagataccagaaaaggagatctctgatattcttttgtgaatccctcttaattttgacgtaa

SEQ ID NO: 20639 - DNA, 120 bp, synthetic construct
  source 1..120: mol_type = other DNA
cctgcattctaacgcaaaattaagagctgcctaatgagattggtagcttcattcaaggggaagagtcctaatattctacattggtgcctgtggtgaggttttccttgcgtttttcttact

SEQ ID NO: 20640 - DNA, 120 bp, synthetic construct
  source 1..120: mol_type = other DNA
cgattcatgatacctgtcatagttaggtgtgagaagagcaacaatactcatgtggtacattcaccaactcagagcaaaggaaactcatttggaggggttagagggatttgtgatatgcta

SEQ ID NO: 20641 - DNA, 120 bp, synthetic construct
  source 1..120: mol_type = other DNA
ggtcctgaaatcttccgagaagtgaatcataactcattccaagtgacaggaaacaggtccgaggggatggaaaagggatatgaatcagacctgagttaaagttaacctttacaatacctg

SEQ ID NO: 20642 - DNA, 120 bp, synthetic construct
  source 1..120: mol_type = other DNA
tgctgctttggacagtggtgtaaagatttacctatagtacattttctaaataatatctaagaaaaaaagtcatgatttttttaaaggacagaatgttttctcccacaaaataattggtcg

SEQ ID NO: 20643 - DNA, 120 bp, synthetic construct
  source 1..120: mol_type = other DNA
acaattaaagagaataaataactggaggactatcaagaggtgccagctctttatttttgccaagcattgctagcttggtttccccctactaagattctgttgggtgaggagttaggccta

SEQ ID NO: 20644 - DNA, 120 bp, synthetic construct
  source 1..120: mol_type = other DNA
tttccagcagtttttaaccatcaggatttttatgattgcatgtatgtacttttattttacatgtttcttttcctcttgaattttctgtaaattgaaaattgatcctaaatggctgacctt

SEQ ID NO: 20645 - DNA, 120 bp, synthetic construct
  source 1..120: mol_type = other DNA
cacgacagagatttaacccaactttatgttccaagatttcccagagggtcgctaaagaatactcctaggaagctacagaacatctcctttttacatcttggaattgccgatacagggatt

SEQ ID NO: 20646 - DNA, 120 bp, synthetic construct
  source 1..120: mol_type = other DNA
aatagagataagaatggatcaacagttggaggattcagaggttgacaatgtaggtatcacaggtgaaatccttccaggaacactacagtggtgaatggtgaattgtagcaatggatctgg

SEQ ID NO: 20647 - DNA, 120 bp, synthetic construct
  source 1..120: mol_type = other DNA
gggagactgcaggaacttcctctccatcctctcataaagcccaaaatgttgggaaccttttagctacatgttagataatgaaatgtttgtgtattgattgaaaggaagacatggcacacc

SEQ ID NO: 20648 - DNA, 120 bp, synthetic construct
  source 1..120: mol_type = other DNA
taacacaaagaggattctgttatttctatttgataacttgcttccccccccccccccacttaatagggtatctcagagacctttcgatgtcagtacatacgcgcttacctcattctaatt

SEQ ID NO: 20649 - DNA, 120 bp, synthetic construct
  source 1..120: mol_type = other DNA
cttttatgactgatgagttttcttttgtttctgtgtgagttgcaaatgggtttgggtcttggtgcacgtcagtatcttggacccctgaggaaggatgtcatcacccccaggttgagcatg

SEQ ID NO: 20650 - DNA, 120 bp, synthetic construct
  source 1..120: mol_type = other DNA
tggtgaggtttgttgctaggacacggctgtctttgttttggtccctgctcagcagtgtttttaaggccctgtatacatttctctgtattgttaatgtaatttgttcaggcagtgaacagc

SEQ ID NO: 20651 - DNA, 120 bp, synthetic construct
  source 1..120: mol_type = other DNA
gggagaatgggaacatttcaatggtagctgcctttgggaagtggggaggagcataagactggtggagtgtttaagaggatttaactttctgtgatgttttatttaagaaaaaaagaacaa

SEQ ID NO: 20652 - DNA, 120 bp, synthetic construct
  source 1..120: mol_type = other DNA
tccaggctctgccatttactagctgagatcttgggcaagttgtttaacctctctgtgcctgtttcctgactgtgaaacagacagaagctttcttatgaggttgtataaagactcaatgaa

SEQ ID NO: 20653 - DNA, 120 bp, synthetic construct
  source 1..120: mol_type = other DNA
atgccttctgcctaaagtcaggaccaagacaaggatgtctacgcttgccatttctattcaacaatgtactagaggttctagccagggcagttaggcaagaaaataaataaaagacatcca

SEQ ID NO: 20654 - DNA, 120 bp, synthetic construct
  source 1..120: mol_type = other DNA
acagcatgttttgctgactatttcaagtacctgttgagacctactgctctgaaaaaaaggttccttcaaaatattactactgttcattgacaatgcatctggtcacccaagagctctgaa

SEQ ID NO: 20655 - DNA, 120 bp, synthetic construct
  source 1..120: mol_type = other DNA
acctaaaactcataggcatattagcatgtgatgaggtccacttggatttatatgtcagcccactgcaggacacaatgtaagcatgaagtctcctatggctttgcaccgtattcaatcaaa

SEQ ID NO: 20656 - DNA, 120 bp, synthetic construct
  source 1..120: mol_type = other DNA
ataagccactgcgcccagcctgcatgagcttaatttcaaaagcagtaagaaaactatgctctcataaaactctgtctctaccccagttcagttactgatgtcacaatgttacatttaggc

SEQ ID NO: 20657 - DNA, 120 bp, synthetic construct
  source 1..120: mol_type = other DNA
tgagcccaggagtttgagactacagtgagccataattgcaccactgcagtctggcctgggtgacacagcgagacactaactcttaaaacacaaaacaaaacaaaacaagataaaaattga

SEQ ID NO: 20658 - DNA, 120 bp, synthetic construct
  source 1..120: mol_type = other DNA
gtctttttttgatgtttacttacattttacagagtcaaatctggagtggaggggaagacaagagcaaagtccagaatgagtatcaattaaagcttctccaggctgaacagcatgtggggg

SEQ ID NO: 20659 - DNA, 120 bp, synthetic construct
  source 1..120: mol_type = other DNA
atgcactaaggcatgaaatgacttacacagaggtcttacagcagttaaaggtagggctggtaactttactgtggtcatggtctagatcagcactgtccaacaaaacttttctacagtgat

SEQ ID NO: 20660 - DNA, 120 bp, synthetic construct
  source 1..120: mol_type = other DNA
gatccttgaagaaaagggaggaataaacatagatttgtctaggcagtttggcagtgaaagaaatgagtgcttgaggagggttaaattaagtttcctcccccaggtaggtcaaacccattt

SEQ ID NO: 20661 - DNA, 120 bp, synthetic construct
  source 1..120: mol_type = other DNA
agtgagctgagaagaacttcaggatgaaaaaggtaggaggaagagttttctgggccaaggaaagggcaagtgcagaggccctgaggcacgaactagctgggctcctgaagaaatgcaaag

SEQ ID NO: 20662 - DNA, 120 bp, synthetic construct
  source 1..120: mol_type = other DNA
ctgggcggagtggtgagggccggtttccgcctccttgtttatggagcgcgtagttgttgcgctctccgagcgctggggctgtctccaaagttccctatttagctcctcaggccaattggg

SEQ ID NO: 20663 - DNA, 120 bp, synthetic construct
  source 1..120: mol_type = other DNA
cggaaacccagccgggagcggcgggctccagtccggataaacgtgggtgagggggccgcccatcgcacctgcaaactgccgacccccgagtgggcgcccctcgtcccccgctcccagccg

SEQ ID NO: 20664 - DNA, 120 bp, synthetic construct
  source 1..120: mol_type = other DNA
gaagcaaacctgcagtcatagtggatgagattttaatatggaaaaaccgtattaattctcataggagttgcaatactagtatggaaaaacgagcagaccttggtggctgcctgtgaaggg

SEQ ID NO: 20665 - DNA, 120 bp, synthetic construct
  source 1..120: mol_type = other DNA
agatggataaaatgatggtgagaaattgctgaggcaggaatttgtttttgactctccactgggtactagggaacttttctcagaatttatggtttgaggggtattggccacacagtatgc

SEQ ID NO: 20666 - DNA, 120 bp, synthetic construct
  source 1..120: mol_type = other DNA
cacccttattccagattgtaaatactgcctgattgctggctgggagatagtcctgcagtgagccctaaaatttctcaggtggtctaaatcacctttaagtagcttgaaattcttttacat

SEQ ID NO: 20667 - DNA, 120 bp, synthetic construct
  source 1..120: mol_type = other DNA
tactagctaaaattaccattcgcatcagtggtatgggagcggtgctttggataaccctggcttaacagggttaactactgtatggttaacttttagtgatttgatttgtgagtatatgcc

SEQ ID NO: 20668 - DNA, 120 bp, synthetic construct
  source 1..120: mol_type = other DNA
cttagtgttatctcactttgcaagttggtaaagatgtcttcatctgtgggagtgatcaacatatactgtattagcacctaaaactcctttggtgtgtgtgtatgttgtgacttctagtag

SEQ ID NO: 20669 - DNA, 120 bp, synthetic construct
  source 1..120: mol_type = other DNA
tttcttcacatggggtagagatgaccaatggagctcaaaagacaggaacatggccattttgttggagatactccagggagtacctttattattccgttatggatcctttccctgaatcag

SEQ ID NO: 20670 - DNA, 120 bp, synthetic construct
  source 1..120: mol_type = other DNA
taggcttatattaccaagtctttctccacttaagatggaggcctggatggtgatttcgtctgttatgggggcacaatgtagtgtcaggctgtgtgttatttatgatgagtttgttgtatc

SEQ ID NO: 20671 - DNA, 120 bp, synthetic construct
  source 1..120: mol_type = other DNA
aggagtgagaggtgaaggaccagattgcaggggaaaggcgataagagcattaaaattaaattggaatcaggttttgtaaagccatggataccagggaaagtagtagactgggaagatatt

SEQ ID NO: 20672 - DNA, 120 bp, synthetic construct
  source 1..120: mol_type = other DNA
gcctgtatcttttttcttctctctgcaattcttgcctcatatactttgaagcctttcctgtcttctctatgatagtcattgatactgttctttgctccaggagcactattagtctgtacc

SEQ ID NO: 20673 - DNA, 120 bp, synthetic construct
  source 1..120: mol_type = other DNA
tccccccccaccagccttcttagtgatgcctaatactcttttagctttctgattttagtgtttttatttaaatagctaatctagaatgaattctggagtatatctctatgaggtctgagt

SEQ ID NO: 20674 - DNA, 120 bp, synthetic construct
  source 1..120: mol_type = other DNA
gagctggacacgagacgtgcttttttttgaggcttgtgatcagtagggaagaaagtaaaacaaatgtatgtacaaaatgctaaaagtgtattgaaggtgtaaccaaggtattagtaggga

SEQ ID NO: 20675 - DNA, 120 bp, synthetic construct
  source 1..120: mol_type = other DNA
gtgtgaaactctgatagggaagtataggatgctatggaaacaaacatttttcttatttattgtttctgtgaaactagtgggcatacatcctaaaatggcaaagcagtgaggctcaagggc

SEQ ID NO: 20676 - DNA, 120 bp, synthetic construct
  source 1..120: mol_type = other DNA
ggatttcaaggttggtgcgtggaagttcagtggtaaattctaggtgacctctttcctccagcttggcttcatccttttttatttttattattattgttttcgagaccgagtctcgctctg

SEQ ID NO: 20677 - DNA, 120 bp, synthetic construct
  source 1..120: mol_type = other DNA
tatggtgtctgcaccattttatattccactagcaatggataaggctttgaatttctccacatcctttccaacagttattattgtgttttcctgatagccaatcttgtgggcatgaagtag

SEQ ID NO: 20678 - DNA, 120 bp, synthetic construct
  source 1..120: mol_type = other DNA
tagtctttgttagcctccttttccagttctatttcttcccagcctcataaacttggagttctcaagactcagttcttttatcacttctctgtgtctgtactgactcccctggtgatttca

SEQ ID NO: 20679 - DNA, 120 bp, synthetic construct
  source 1..120: mol_type = other DNA
gaaatcctggactgagccagtgtcatttctcatctggattgctgccacagcctcttattttcctgctcagttctggtactcccgttgccagttagactgaccatattgaaatgttttatc

SEQ ID NO: 20680 - DNA, 120 bp, synthetic construct
  source 1..120: mol_type = other DNA
tttcactgctgtacctgtcatatatagtgagtgctcaataaatattggttaaatgagcaggcatcctagggctgttttactcttgggctccttgtttaaattctcaggttccatcccgga

SEQ ID NO: 20681 - DNA, 120 bp, synthetic construct
  source 1..120: mol_type = other DNA
gcattagattctcataggggcatgaaccctgttgtgaactgcacattcgagggatctggctcacgtgctccttaggagaatctaactaacgcctgatctgaggtggaacagtttcatcct

SEQ ID NO: 20682 - DNA, 120 bp, synthetic construct
  source 1..120: mol_type = other DNA
gttttgacacagtgctgtaaaagaataaaggatactgttcaaaaattggcctccgaccacaaagacatccacagcagtgtttctcgggttggaaaagccattgataaggtatggtattga

SEQ ID NO: 20683 - DNA, 120 bp, synthetic construct
  source 1..120: mol_type = other DNA
tcattgaatctggagagtggttcgtgtaactcatgggtagacccaactgttagaaattatcctgtgaaaaggctaggcttgacgctgcttgagtcagaactatatgcttataaggcaata

SEQ ID NO: 20684 - DNA, 120 bp, synthetic construct
  source 1..120: mol_type = other DNA
aatcagagattcttggaataaggggggatgggctcagcaactataattctagtgtgtgggctactgaccaggatctggagcagttgggcaaataattcaccaattatgctttctgcagct

SEQ ID NO: 20685 - DNA, 120 bp, synthetic construct
  source 1..120: mol_type = other DNA
tgcaggccttaatctcttatttgtttgtgatgggccgggtgaggggcccacctgaaacacgaaccctagaggagtctggtccagctgaccccaattctttcacccctcccctcagccttg

SEQ ID NO: 20686 - DNA, 120 bp, synthetic construct
  source 1..120: mol_type = other DNA
agtgaaaagcaggcagcttcagcagccattgaactctccagggttgaatgtgtcccttctctcatttttccacatcgtgctcgttactgaccgatgtctttttgtagcaggacaccaaaa

SEQ ID NO: 20687 - DNA, 120 bp, synthetic construct
  source 1..120: mol_type = other DNA
cagtaccaaggggatgaaataataggtgggatgaaataacggatgggatgagtttgggatactctgcggtattctgtgcatgcaaagcctgattgctctcctcaggagagctaagaatgt

SEQ ID NO: 20688 - DNA, 120 bp, synthetic construct
  source 1..120: mol_type = other DNA
cctatttgttctcccaacctggatgaacctcaaaacatggtgctaagtgaaagaagccaagcatgaaagaccccatggtgtgtgattccacttctatgagatgccctggggaggcaaatc

SEQ ID NO: 20689 - DNA, 120 bp, synthetic construct
  source 1..120: mol_type = other DNA
gaacaaaatttgtcttacatccaagtactgaagtccttatgactgttccccaggctgctacagggcttgaaggtcacagagcaatagaatgtttgatctgctttctgaattctcagatgt

SEQ ID NO: 20690 - DNA, 120 bp, synthetic construct
  source 1..120: mol_type = other DNA
aaacccctgtcctgactcctggatgggtcacccctctccttcatttttacccagtgacccctgctgaagtgttgggaggggcagtgggccagcacccagagcaaaggaagacagctgtgg

SEQ ID NO: 20691 - DNA, 120 bp, synthetic construct
  source 1..120: mol_type = other DNA
tactaacttcgactcaggtatgaattcgagctgtaggccctcacagagaacataagggcacctgcccctagaaatgccctcactgggtatatcagggcagtgagggcctcctttccctgt

SEQ ID NO: 20692 - DNA, 120 bp, synthetic construct
  source 1..120: mol_type = other DNA
attaaatctcaaggagaaggatcagaacaggttccatacacaccaaggctgcacagcttccaacaaacacaatctgacctggtgagcccttcattttggctgtggagcaaagggagacat

SEQ ID NO: 20693 - DNA, 120 bp, synthetic construct
  source 1..120: mol_type = other DNA
tctatttgttgcgcgatccagccctggtggggagatttgtgaggggagacctggctcaggctgtgtcttcctgttcaaacgggggttagtagagagggggttggggaggtccagggagaa

SEQ ID NO: 20694 - DNA, 120 bp, synthetic construct
  source 1..120: mol_type = other DNA
gcagtaaaacaaaccaagtaaaaattgccatggctgtaaatagtcaaaaaggggtaagctaagtttctgcaaactaaacaatttcagagggtgtaagaatgtattggataaaggatgaag

SEQ ID NO: 20695 - DNA, 120 bp, synthetic construct
  source 1..120: mol_type = other DNA
aagctggacaaatgaactgtatttgcaacatggtaggaatatatgacattggacattaatgcaaatggaattttcagtgccatggtgaaaatgttataccactgaacaaaaaaaaagtag

SEQ ID NO: 20696 - DNA, 120 bp, synthetic construct
  source 1..120: mol_type = other DNA
atgatattagttaatacaaatgaagtgctaacaaaaagagctttggaacacagcaagtacttgttaggtatggctattgtcatcaacacacttttcaaggcaaacttgtggtttcaccta

SEQ ID NO: 20697 - DNA, 120 bp, synthetic construct
  source 1..120: mol_type = other DNA
acaaaatgctgtttttccttttttagaaaggcaatacttgttcattatatcaaaatttagaaaatatggaaaaacaaaaaggataaaaaattatccacaaccaaaatagcccaaatttcc

SEQ ID NO: 20698 - DNA, 120 bp, synthetic construct
  source 1..120: mol_type = other DNA
ggcgggatacctttggcgccggatcttcctctttctcccggtttgttcccgacggtgctcgctcgtgggcccgccctggcccgggctttctggccccatagtacccgcgcggcctagttc

SEQ ID NO: 20699 - DNA, 120 bp, synthetic construct
  source 1..120: mol_type = other DNA
acttggttacttaaactcagcaacttaaaccctcaaatgtggtcaaactggtcacataatccgatcaatttcagcttaaaacattgattgattgattgattgattgattgtctgtctacc

SEQ ID NO: 20700 - DNA, 120 bp, synthetic construct
  source 1..120: mol_type = other DNA
cttacgtggttttacttacctgcgtcacccgtggtccaaaaatattgaatggaagattatataaataaacatttcatgagttttaaattgcaaacagttctgaataacatgataaaaatc

SEQ ID NO: 20701 - DNA, 120 bp, synthetic construct
  source 1..120: mol_type = other DNA
agtacagttctaagtttaatttacttttgtattacttttgaaaaacagatacgtatgtacttaccttagtgtgcaagagagggatcccagagctcacagatttctgggtcttctttatga

SEQ ID NO: 20702 - DNA, 120 bp, synthetic construct
  source 1..120: mol_type = other DNA
gtaaagttttcaaggaaaagataaaaggtggtttctctagtatataagatgtaattactaaaaatggtaggaagttcttgctagtgtattgactggtcctgatattctttatagagcaaa

SEQ ID NO: 20703 - DNA, 120 bp, synthetic construct
  source 1..120: mol_type = other DNA
actgttaacacctttcctgtatcagattttttttttttttggaattgaaatccatgagatttataattgtcatgcaaagtaattccatttctcctaaaatttaaggcttgctaaggtaaa

SEQ ID NO: 20704 - DNA, 120 bp, synthetic construct
  source 1..120: mol_type = other DNA
gaatgcaacatgcctctgtttatgtattgtctgtggctgcttacatactacaaggttggaattgagtggttgcagcagagattgtatgcctgtaaagccagattagtaatctcctccttt

SEQ ID NO: 20705 - DNA, 120 bp, synthetic construct
  source 1..120: mol_type = other DNA
ctgtactttttaaagtagggtgtcatatctactcaaataggacaacatctgctgttgtcctatttattcagggcagaaaagtaatataattaaattttccatttctctgaatgtaacacg

SEQ ID NO: 20706 - DNA, 120 bp, synthetic construct
  source 1..120: mol_type = other DNA
ttggatgaattttgtaaagagcaagatgtaatattaaatcaaagttattataagctttggtgtatagttaggctgttggccaaagctcacattgctcttttattccatagcccacttttt

SEQ ID NO: 20707 - DNA, 120 bp, synthetic construct
  source 1..120: mol_type = other DNA
ttctttcatgtttatcaggcaagaactaaattatactgctaaagttacatcaaggatatgctgatgtgtggcgattattacagtgtgatcagcagtatttgcaaattgagagaatactat

SEQ ID NO: 20708 - DNA, 120 bp, synthetic construct
  source 1..120: mol_type = other DNA
aaaattaagagtttaagtgcattggacgtattattatatacataataaattatctgcagctactgcttttttccctttcctggtggagcatttgaacgtcacctggagaattagttgtat

SEQ ID NO: 20709 - DNA, 120 bp, synthetic construct
  source 1..120: mol_type = other DNA
tacgtacgacagacttctgaaatggtagtagtagtgcccttttttttttctctttttagcccaggaaagatttagaataaaatctagtttagatgagcacatttgtgtgatggttcctat

SEQ ID NO: 20710 - DNA, 120 bp, synthetic construct
  source 1..120: mol_type = other DNA
cacttcaaatgcattgaccatcagatggcatcttggttccttacgtcctttctgtgactgaatgtccataattccacatcatactgatctttcttagaaaaggcaacagttactttctcc

SEQ ID NO: 20711 - DNA, 120 bp, synthetic construct
  source 1..120: mol_type = other DNA
attctcaaaaatgaggtcaatggcaaaccaagaatgctgatgcgaagagaccaagtactaaaagtgtgtgctaatcattggataacaactacaatgaacctgaagcccctctctggatca

SEQ ID NO: 20712 - DNA, 120 bp, synthetic construct
  source 1..120: mol_type = other DNA
ttctaattaatataaaaattaatgatattttacattattgtttttcaccaagtcttcaaaatccagtgtgtgtgtttacacttactgttagcatgtcttgatttggactagccaccttgt

SEQ ID NO: 20713 - DNA, 120 bp, synthetic construct
  source 1..120: mol_type = other DNA
cagagtgagaccctgtttcagaaaaaatatagtttatcagcaaacaggaaagtcttgctaggcaacgtaattgattagttctgtgccctggattctgggctcttaactgtatgagcactg

SEQ ID NO: 20714 - DNA, 120 bp, synthetic construct
  source 1..120: mol_type = other DNA
tacaggttcactgtctttaatttattctaacaaaagtaaacctaattttatagttataaaaaagaagaaatctacttctagtcacctaagagtaaaactgcccctataaaaaacaagaca

SEQ ID NO: 20715 - DNA, 120 bp, synthetic construct
  source 1..120: mol_type = other DNA
ccaataaaatctcaagcaatattaaaaaaaaaagaagaaatctacttctagtcacataagagtaaaactgcccctaaaaaagacagagagaaatctcaaaagcagccagagaaagaagac

SEQ ID NO: 20716 - DNA, 120 bp, synthetic construct
  source 1..120: mol_type = other DNA
cattagctaagggggtaaagtaggttacccaactctgaaaagcagcatcaaaatctttataataaacacatactaggggcccaacttaaatttcaagcagatgtcatgagctgctcagag

SEQ ID NO: 20717 - DNA, 120 bp, synthetic construct
  source 1..120: mol_type = other DNA
actaagtttgtagtaatttgttacacagcagattgtaaataacacgtagataaaaccagacagaacagaaaaataaaatggctttaaacctagaaagtttccccatgtaaaattttgaaa

SEQ ID NO: 20718 - DNA, 120 bp, synthetic construct
  source 1..120: mol_type = other DNA
tattcaatgatgtgtttttctggttgctttgtttgagcatagtgtaaatatcacccattgcatagctatggcagtgacataaatctagcagcgtaagatcgagaaaagctagaagtccca

SEQ ID NO: 20719 - DNA, 120 bp, synthetic construct
  source 1..120: mol_type = other DNA
gatccataaaatatgcagccctaacatgatttcatttttgtttcctttcctggaaaaggagaaatcattcagatcagctttcatattgccttatagacgatgacttcaaaatagttttaa

SEQ ID NO: 20720 - DNA, 120 bp, synthetic construct
  source 1..120: mol_type = other DNA
cagtgactgaaaattcccccaaattcatgatagataaagctatggtctgaatgtttgtgtctcctcaaaagttatattgaaacttaatcctcaatgtgatagtactgaggtggggctttt

SEQ ID NO: 20721 - DNA, 120 bp, synthetic construct
  source 1..120: mol_type = other DNA
gtcatccaaatgcatttcagctgggtgctgcagcatttgtgtggtcagattttcaatttctctattgataggctgcttctggcacagtagctaatattaccattgctactgtgacagcca

SEQ ID NO: 20722 - DNA, 120 bp, synthetic construct
  source 1..120: mol_type = other DNA
tttgctccacaatttgagtcaaacatgtgatgagagttctaacttgatatgtttacttcagtcccaaacatagtcatctttggtcttttctcagatttggcctaaaactcgtagtttcat

SEQ ID NO: 20723 - DNA, 120 bp, synthetic construct
  source 1..120: mol_type = other DNA
agtgcagccagaggcttggccatcatagagctcacattctagtggaatcagacaggggggttacaggaaatattcaagtaaacaatataaaatgagatcacttgatgatacatggataca

SEQ ID NO: 20724 - DNA, 120 bp, synthetic construct
  source 1..120: mol_type = other DNA
aatgctacttggagttttgccgtgatactagacacaatatggcaaatcatcctcaagaatacaagaactaaggtgtttccagtcctctttaacacctgtgatgcaggatatttggagagc

SEQ ID NO: 20725 - DNA, 120 bp, synthetic construct
  source 1..120: mol_type = other DNA
cctgttttcagccattatcacacattgttgctctttactgtgatattggaatgccctgcagaacgaagcaggaaatccaataagtatttttctttatttaaagaaaacaaatgtttatta

SEQ ID NO: 20726 - DNA, 120 bp, synthetic construct
  source 1..120: mol_type = other DNA
tttgtactgggctgatgacagtcacacaacactactaactggggagaaatcagtttttccaaggtgttgacaggtatctggatttcggaggaaattgtaaaaaagcagaacctgggacaa

SEQ ID NO: 20727 - DNA, 120 bp, synthetic construct
  source 1..120: mol_type = other DNA
agattgaatttcaagtatacattatttacaggaagaactactagcaaatcgtatgattccgttcgtatgaaatgttcaaaatggcaaagatataaatacagaaagtagattagtggttgc

SEQ ID NO: 20728 - DNA, 120 bp, synthetic construct
  source 1..120: mol_type = other DNA
tacaagattttcaactgggagtttcatgaatcaaaaattaaatgaattgcacataaagccatggcatatgtatttgtactgcattgtgggagaaaaaataattattataatttaaaaaaa

SEQ ID NO: 20729 - DNA, 120 bp, synthetic construct
  source 1..120: mol_type = other DNA
taaatcaattgacctctctattttagatgtgaaataaggaccagaaagcattgttcctctttccaggcagtgaaattcctgcctattcattaactggcaaaagagtagaggtgggagccc

SEQ ID NO: 20730 - DNA, 120 bp, synthetic construct
  source 1..120: mol_type = other DNA
ctggaaatagcaagaacttaattaatctactaaggattcatataaagcatccctctgtcgtggtaagggtcctcggcaagtttatctgtgccctcgatgccaatgtgcaggttgttttta

SEQ ID NO: 20731 - DNA, 120 bp, synthetic construct
  source 1..120: mol_type = other DNA
caccaggactccccagaggagagacgagggtccttctgctctgaggtccagactcaccatggataaaacagagttgcaccaaatcatccttcccatctctcacattgattgttctctaag

SEQ ID NO: 20732 - DNA, 120 bp, synthetic construct
  source 1..120: mol_type = other DNA
aagaaagaaagaaaggaaaggaaaatgccccctagtggattacgttttaaccactgtgctaacttgagagatagcctgctatctctttacgggacatgagggctgataagcacctcattg

SEQ ID NO: 20733 - DNA, 120 bp, synthetic construct
  source 1..120: mol_type = other DNA
gctgggattacgggcattagccaccgcgcccggcctatttgaacgttcttatgcctgctacaagtgcagcagcagaatctccacacatcttgagtgcgaaagtttcctgtagttccttta

SEQ ID NO: 20734 - DNA, 120 bp, synthetic construct
  source 1..120: mol_type = other DNA
cctctaatccccggaaaaatcacacgcatccatttgccagatgctgtgtgcagacagtgattcaacaaatactcacttagtgcttgggttaggtcgctacatttttacacatacatacat

SEQ ID NO: 20735 - DNA, 120 bp, synthetic construct
  source 1..120: mol_type = other DNA
ctcatcttccctggagggctcgctgtcttcagagccaggcttgtctcccgctgccgcctccactgctctcctcgtcactctataacccactccctctgcctgcagcccccaccacgcccc

SEQ ID NO: 20736 - DNA, 120 bp, synthetic construct
  source 1..120: mol_type = other DNA
atgttaaaaaaaaaaaaagacagcctaagtgagctacaggcataatcaatgcatgttctacccagatccagaagaaagaacagtgcctaaggttgaggcagctagagaaggctcagggag

SEQ ID NO: 20737 - DNA, 120 bp, synthetic construct
  source 1..120: mol_type = other DNA
agaaagttggaaaatgcaaagaaacgactcgttgtaagcacataactcacgtggggggaacagacatgggtgggcacactagcaaacacctgccagctgcatgtggacccaggtgggcac

SEQ ID NO: 20738 - DNA, 120 bp, synthetic construct
  source 1..120: mol_type = other DNA
tccttagtactccataaaatttaagtcacatattactctgcctcaccatgttacttcaataattctgaatcaaagtttaagtttgtgaataattttgcaaaaaaagagccaatcatgctt

SEQ ID NO: 20739 - DNA, 120 bp, synthetic construct
  source 1..120: mol_type = other DNA
aaggaaagactgggaaaacctgactgaggtctggagtttagttagtgatactataccaagacgaatttcttagttttgataatttgttaacagttatgttaacattgggggtagctatgc

SEQ ID NO: 20740 - DNA, 120 bp, synthetic construct
  source 1..120: mol_type = other DNA
ggtttatactaagagcatattatgccaccaaatacagatatttactattatacttcgtgtaggaggtatattgagacattgttctagactaccacagttccatattttgtgaaaagttat

SEQ ID NO: 20741 - DNA, 120 bp, synthetic construct
  source 1..120: mol_type = other DNA
tatgtaccaccaccgaccaaggcctggcacatttttacctcctcaaagttctccctggctgcttctcccactccttggcaaccactaacctgttttctgtccttatagtactgctttttt

SEQ ID NO: 20742 - DNA, 120 bp, synthetic construct
  source 1..120: mol_type = other DNA
agaacttctagaaagtagaaggaagcaatattgcttagggatggacaacttggcactggttatgtgttccaagtgaggtaaccttgttcccaggaataaagagaaccagatgactgtaaa

SEQ ID NO: 20743 - DNA, 120 bp, synthetic construct
  source 1..120: mol_type = other DNA
caggcctctagaccagggattctcaaggtatgggccccagaccagaagtatcagcaacgaattgctaaaaatgcagaatcttgggtcagaaattggggaccagcaattggaattttagta

SEQ ID NO: 20744 - DNA, 120 bp, synthetic construct
  source 1..120: mol_type = other DNA
gagattaaataatgtatgtagagcccagggcctgggtcataagaactcctcaataagcagtatgactatattctgaggggtgatttatcagtgagccagggtggaaatacctcatttgag

SEQ ID NO: 20745 - DNA, 120 bp, synthetic construct
  source 1..120: mol_type = other DNA
taaacttgggtgcatgtgtatggagggtccagaaaaccaaactggcggttttcacagtggccaggtttctgatctcaccttaatttgctccataaggactgcactggttgcctctgtttc

SEQ ID NO: 20746 - DNA, 120 bp, synthetic construct
  source 1..120: mol_type = other DNA
ccctttgacatgtattggtttattgactcccaaaaatctgaagttcagagaaatttaatgactttgcccaaggtctcataactgagttagaaaccagaattgtaatctagatttttaaac

SEQ ID NO: 20747 - DNA, 120 bp, synthetic construct
  source 1..120: mol_type = other DNA
attcaagcatgagtccgtacactgtaccaagttcttttgctctgccctagcatgatagaagtatcttccagttactgaaatgtctttaactaagttctcttgctctttgaaacctcaccg

SEQ ID NO: 20748 - DNA, 120 bp, synthetic construct
  source 1..120: mol_type = other DNA
aaacaacttgttcattttcctcaccactggatacttcaactagatcaggtaaaggaacaacaggttcaaagtactgtccatctctctcttcttcttgagtaacatcagattcttcatcag

SEQ ID NO: 20749 - DNA, 120 bp, synthetic construct
  source 1..120: mol_type = other DNA
cccctgtgaatacagaactttttcaccttcttctcctgttacaagttctactttttcaggcatttgaactactggttcaaaatggatgtcatcgctgtcctcagtcttacaggcatcatc

SEQ ID NO: 20750 - DNA, 120 bp, synthetic construct
  source 1..120: mol_type = other DNA
agaaggataatttctgtatttggagataaatttaaaatatctacattttaagggacataaaagttttaatagtgaactgctctcttgaatttatttgaaggaaccctaaacaatttaaaa

SEQ ID NO: 20751 - DNA, 120 bp, synthetic construct
  source 1..120: mol_type = other DNA
tgctgacttactgctatttagtttctattggaagaaaaaaaaatcaaataattttaatcatttaattatatcatgccagaaacagtgctggggaaacttactcttttaaatttaaataac

SEQ ID NO: 20752 - DNA, 120 bp, synthetic construct
  source 1..120: mol_type = other DNA
tctctgtagtcctggcttcgtggcaggctaagccaagaggctctcttgagctaggaggtcgaagccacagtaagctgtgatcataccactgtactgcagcctgcacaacaagaccctgtc

SEQ ID NO: 20753 - DNA, 120 bp, synthetic construct
  source 1..120: mol_type = other DNA
ggatgagaagaaatgctcttaagttgtcagcaacaactttcaatttcagcaaagttcattaagaattagtcctgaggttataatatttgttttgattacactgctaagataacacctaga

SEQ ID NO: 20754 - DNA, 120 bp, synthetic construct
  source 1..120: mol_type = other DNA
tatccttagatgactgactagaaaacagagcattatataacacagactgcccgcttttgttggcaaaagtttcaacaacctcttttaaaaaatcttgcttgccacgacttaagtttagca

SEQ ID NO: 20755 - DNA, 120 bp, synthetic construct
  source 1..120: mol_type = other DNA
aaacatgccaaaagtaactatatgggtgactagagcatcggcttttaattctatcaccactttcttaattggtggtggaaatgtaatttgatacaacctctttagggttagatatttggc

SEQ ID NO: 20756 - DNA, 120 bp, synthetic construct
  source 1..120: mol_type = other DNA
tgtacaacacacgaattccactctaaacttgaacgcaaagctatgttcctctctgcctcatggcagcgggccacagcatccttcaatcttttatttgagcgatacaactccactagccgg

SEQ ID NO: 20757 - DNA, 120 bp, synthetic construct
  source 1..120: mol_type = other DNA
caggttctaatgtaaatgactttaaatttgggggaaaaaaaaagactctaagtgtaagagaggtgaggccgaggccgaggccgccgccgccgcccggccaggccgaggccgccgccgccg

SEQ ID NO: 20758 - DNA, 120 bp, synthetic construct
  source 1..120: mol_type = other DNA
ggccaggtcgaggccgccgcccggccaggtcgaggccgtcggtctcttcgagatccactcacctttccaggcgacggggcggagccctgcaccgaggcgaggtaccgctccccgtaggct

SEQ ID NO: 20759 - DNA, 120 bp, synthetic construct
  source 1..120: mol_type = other DNA
gggcgtgtagagaaatgcaaggtggagatattaatgctacagtataatcttctgtgggtgtttagcctggggatgagaaaactaaggagaaccatgccagttgtgttgaaatatttgaag

SEQ ID NO: 20760 - DNA, 120 bp, synthetic construct
  source 1..120: mol_type = other DNA
cctggcttcatatatttccttactttagtttacattgtttttacaaacgtatcacatcagctgatagaattttgatgtcgtcatttaagtttctggttatctggtgtagaatgcaactgt

SEQ ID NO: 20761 - DNA, 120 bp, synthetic construct
  source 1..120: mol_type = other DNA
tctagttgtttgtatgtctgtatgtagcagataaaagaaaatctccatgggaattgagatgcaaatgagattgagacatcattaggataaaaatgttagaatcatgaatgtcagaaaaaa

SEQ ID NO: 20762 - DNA, 120 bp, synthetic construct
  source 1..120: mol_type = other DNA
caggtcatttagacctcttggaacattcatttcctcttccaaaaattggtgttttacagtagtcagccatctattaaatactttggcagctggcagggggttgacacataaaacagcctc

SEQ ID NO: 20763 - DNA, 120 bp, synthetic construct
  source 1..120: mol_type = other DNA
cgtgatgttttcaaggttcatccatgttgtatcatatatcagtactttttcgattgtatggatataccatacagtggtatattttgtttatcagtttatcagctgatagacatttggatt

SEQ ID NO: 20764 - DNA, 120 bp, synthetic construct
  source 1..120: mol_type = other DNA
gagttggatagtgcatactgttggagcttccttgatgttaaatctcttggagaccttaaacaaggtggatggccacccaggggactgaaggcaatatcttaagtgttttatatagctttt

SEQ ID NO: 20765 - DNA, 120 bp, synthetic construct
  source 1..120: mol_type = other DNA
agatatcttgtaaaatctagggaagatgtcagttagttgtaccaagttttctcctgggaccttgagtattaattttggctgaggtcacaagtgccgaggtggttcctttccaccacattc

SEQ ID NO: 20766 - DNA, 120 bp, synthetic construct
  source 1..120: mol_type = other DNA
tggggctccaggacgtcacctcattggctgagcaccactcctccctccctgttgcttggctgggctaagggagtggcactagcaggagctgccccagggcttctcccctggggaccaagg

SEQ ID NO: 20767 - DNA, 120 bp, synthetic construct
  source 1..120: mol_type = other DNA
acctcgcagcagcaaaaagtaagcagagggaatgagagacgtccaggcatggaacaaaacatcttccacttttcagctgagaccctctgttcatagctcacccatcccagtccttgctgt

SEQ ID NO: 20768 - DNA, 120 bp, synthetic construct
  source 1..120: mol_type = other DNA
aacaggtgaaattaattttaataattaacccatatatccaaaatcctatttcaagatgcagtcaatgtaaaattattaggatattctggccaggcatggtggctcacacctgtaatccca

SEQ ID NO: 20769 - DNA, 120 bp, synthetic construct
  source 1..120: mol_type = other DNA
aatcagcaagagaaacattagtattaccaaccgagatttggagatgagagggagctgaatccggtttattttcttctggccttttaaagtttctggcgagggaacgtatttgcgaccaat

SEQ ID NO: 20770 - DNA, 120 bp, synthetic construct
  source 1..120: mol_type = other DNA
agtgactgagtgagtgagtgactgagtgactgagtgagtgagtgggtgagtaacagagtgagtgagtgactaagtaagtgagtgagtgagcaagcgagtgagtgagtgactgactgagtg

SEQ ID NO: 20771 - DNA, 120 bp, synthetic construct
  source 1..120: mol_type = other DNA
taagagactgagtgagtaagtgactgactgactgagtgagtgactgagtgagtgagcaagtgagtgagtgactgagtgagtgaccgagtgactgagtgagtgagtgagcaagtgagtgaa

SEQ ID NO: 20772 - DNA, 120 bp, synthetic construct
  source 1..120: mol_type = other DNA
agtggaacatatgggcacaggttgagaggactgcgacaagacagggcctatctcctttgcagcagaatgttaatagatattatattttagtaaacagaggacatttctctgagtcagcat

SEQ ID NO: 20773 - DNA, 120 bp, synthetic construct
  source 1..120: mol_type = other DNA
ggtaatggtccataagagattattttaattgtaagaaaatgtacaaaaagttttgccttttacaaattttttatttaatagcaataaaaatgaagtgacactaaagtacaaaaaagcctg

SEQ ID NO: 20774 - DNA, 120 bp, synthetic construct
  source 1..120: mol_type = other DNA
tctgtcaaatccatagactctgtattgcactgccattctaagaacattaatccccattccattgtgtttctcctctcaataatgacatatttatcctctcactgccccagtcatttttta

SEQ ID NO: 20775 - DNA, 120 bp, synthetic construct
  source 1..120: mol_type = other DNA
tgcttcagaacccactatgctagcccctgattttgtagtgtgctactcccatactcatttgtccagtaatattaaatatatttccaaaatacctttctttgcactggtagttttggtagc

SEQ ID NO: 20776 - DNA, 120 bp, synthetic construct
  source 1..120: mol_type = other DNA
aagaatgtcggattttttgaggtgttagtatccaccaaattgcttgggcttcaagggtttcatcaacctgtaaactcaaagtttgagtcttgaacggtctgaaaatcagtaacagtcttc

SEQ ID NO: 20777 - DNA, 120 bp, synthetic construct
  source 1..120: mol_type = other DNA
gattgggtgtgaggaagaggaaagaaatagaatagtatataaaatagtatatagagtaaaaatatagtaaaaggaaaaatcaatctgcataatatagtgtatggctaaatgtgttttaac

SEQ ID NO: 20778 - DNA, 120 bp, synthetic construct
  source 1..120: mol_type = other DNA
aaagttcctccctcttagaaggaggagacacatatatgatatatatattatatatatatatgtggtacatatatatgtatacacacatatgcatatatatatacccccacacacacacat

SEQ ID NO: 20779 - DNA, 120 bp, synthetic construct
  source 1..120: mol_type = other DNA
accatagatatgtgtgtgtgtggggggtatatatatatgtatatgtgtgtatacatacatatatgtaccatatatatcatatatgtatctcctgcttctaagagggaggaacttttccaa

SEQ ID NO: 20780 - DNA, 120 bp, synthetic construct
  source 1..120: mol_type = other DNA
tgagccaccgcgcccggccttttttttttaaatttatataagtatttttagagacaggatgatctagacactttgccgtgtcaccagtctagagttcctgagctcaaaaaacctgcctga

SEQ ID NO: 20781 - DNA, 120 bp, synthetic construct
  source 1..120: mol_type = other DNA
tcccttgcctgtgtataccactcagattgtggaatctttggcatttgactttctgttgttcaaccttgtaattcttttgcaggagaaactcttaaagcaaatgaggattttatggaaaaa

SEQ ID NO: 20782 - DNA, 120 bp, synthetic construct
  source 1..120: mol_type = other DNA
gttatgaaaggtcgctaacgagacatagacatgaccttcctcccctttatactttttgagtttatggaaattgtgatcatcctagtttagccatttacttgtgcagatctcctaacaccc

SEQ ID NO: 20783 - DNA, 120 bp, synthetic construct
  source 1..120: mol_type = other DNA
gtattcagggttaaataattggaacagaaggaggacagtcaagttcaggcatatatggagaaagagagcttctgtcagtgcctgacaccaagtaaaactctttctttaatggaatgcacc

SEQ ID NO: 20784 - DNA, 120 bp, synthetic construct
  source 1..120: mol_type = other DNA
gtatgctataatctgaaaaaacaaacaggcaattcccgtacagagtcatacatacaatgacaggcataagacagcacttattggaagacatagaagggatactagcccaggtttgtgtca

SEQ ID NO: 20785 - DNA, 120 bp, synthetic construct
  source 1..120: mol_type = other DNA
cccattttctaaatagatgcagtgacgcgatgaagcatccagcaaagcttttgttgctgatcgtttgtttaagacatcatcttgtttttgttgaagctgtctcacagctacctgataaga

SEQ ID NO: 20786 - DNA, 120 bp, synthetic construct
  source 1..120: mol_type = other DNA
tctctttttgatgagtgactttgatcatgatcacatagagcagcattcagtctacaacggtatgattgcatttctgtttccagtctttgcccgctctctctttgcttctccagtttagaa

SEQ ID NO: 20787 - DNA, 120 bp, synthetic construct
  source 1..120: mol_type = other DNA
taatcttttatttcaagacaccaaaagtcaagaaaattaaatctataaagctcttcttagaaaatcatgagattatttgctattgtgataacttttattccttttccataacattcgaaa

SEQ ID NO: 20788 - DNA, 120 bp, synthetic construct
  source 1..120: mol_type = other DNA
atattcagctgagacccaggcacccttttgggtctgataagaaacattttacaatctgctgtctctgaagtctgctgagagattcctctgcacagtaaaacttggtttccacaatcattt

SEQ ID NO: 20789 - DNA, 120 bp, synthetic construct
  source 1..120: mol_type = other DNA
acactttcagtctatcctgctgattagtatgtactttataaccaattgtaaaatctgttttggaacaacacaagatctaatatttaattaaacaataaagaataatacatgtcttcagca

SEQ ID NO: 20790 - DNA, 120 bp, synthetic construct
  source 1..120: mol_type = other DNA
agttcttttgacagagttttgacggaggttcgaggccatgacaaagggagaaaatctgacatagagctggggtgatgaagctgagaggccagtaaaacgaaagcagatagagatcacagg

SEQ ID NO: 20791 - DNA, 120 bp, synthetic construct
  source 1..120: mol_type = other DNA
ggaaaagaaggggaacacagaacagttgggactaatagcaatcacacagctaccagacaaacataactatatcaataatcacattataaatgacacttgtctaagaacctcaactataac

SEQ ID NO: 20792 - DNA, 120 bp, synthetic construct
  source 1..120: mol_type = other DNA
cccaaagcaagcagaggaaaggaaataataaacatctgctgtggtctgaatgtttgtcttccccaaaatttatatgctgaaagccaatcacagatgtgacggtattaggaggggggattt

SEQ ID NO: 20793 - DNA, 120 bp, synthetic construct
  source 1..120: mol_type = other DNA
atagtggagtgaataaactgtggttacacagccatacagtggaatatcactctacacataaagaaatgagcaatcaattcatgaaaatatgtgaaggaaacttaaatgcatattaccaag

SEQ ID NO: 20794 - DNA, 120 bp, synthetic construct
  source 1..120: mol_type = other DNA
agttaatgcagtcaggcaagaaaaagaaataagaggcatccaagtttaaaaaaagaaataaaattgtctttatacacaaccatgaccataaaataggtatgggtaaaccccaacctgtgg

SEQ ID NO: 20795 - DNA, 120 bp, synthetic construct
  source 1..120: mol_type = other DNA
ttaaacaatacttttaataatttggggcatgaaacaatgtttgtatacatgaggtcggatgtagaatttttccactgtggtgtctgtgttggcaatcaaaaagtctggggttttagagca

SEQ ID NO: 20796 - DNA, 120 bp, synthetic construct
  source 1..120: mol_type = other DNA
ggtcatccctagaatgtatttggtttttcacctacaaaataaataacactgtttcaaaatgtccccaaaatatttatagcatatacaaaatgtacagaagtgggaattgcccatctgttt

SEQ ID NO: 20797 - DNA, 120 bp, synthetic construct
  source 1..120: mol_type = other DNA
actgtttacactttcatcagtgtacagtctcttctttatatctaaaatattttcctcaactattctgacagatttctttcataatttaagactcagacagctatgtgaagtcttccttga

SEQ ID NO: 20798 - DNA, 120 bp, synthetic construct
  source 1..120: mol_type = other DNA
ctaatctctaagacactttcatggaactgtgatcttatttaaaaaaataggtttcttagtaaaatcagtcaaagtttcttagttcaaataaatttcatttgattaactaatatcaacact

SEQ ID NO: 20799 - DNA, 120 bp, synthetic construct
  source 1..120: mol_type = other DNA
catgactacagtcagcaataacttgtccattttagcattactgaggaagtacaaattaaaagacagcacaaagaaatggttaacgcttgaggtgatggataacccattaaccatggtgtc

SEQ ID NO: 20800 - DNA, 120 bp, synthetic construct
  source 1..120: mol_type = other DNA
caagacagccagcactttggaaaaaaactaaatattcatattaaacttcaactcatttgaataactaataaaaaatatatgtgtgatgtctgatactaataaacatgaataatgaggcac

SEQ ID NO: 20801 - DNA, 120 bp, synthetic construct
  source 1..120: mol_type = other DNA
cacatctcttaagtggaagggacctaaatcgatcaacgtggatgtatgtttcctgaatccaagtaaataattcattatttctcacacccatgtgctgtaataatttgcctaagcttcttg

SEQ ID NO: 20802 - DNA, 120 bp, synthetic construct
  source 1..120: mol_type = other DNA
ccaatattcattgaaaatgatcactctaggacttaattagaatgcaacataatttttgtctctaaaagagccttgttgggagtatcatgttatgttctagaaaagtttcattaaacagct

SEQ ID NO: 20803 - DNA, 120 bp, synthetic construct
  source 1..120: mol_type = other DNA
tggactgaacatgacattaaatgtgttttgcaaagttacctgtcctagatgtttctccatcctttctttctctggttatatttgaaaaagaatctttctcatcacttgtagcctgaatgg

SEQ ID NO: 20804 - DNA, 120 bp, synthetic construct
  source 1..120: mol_type = other DNA
cttgtagcctgaatggaattggaaatgaaataataaataaaatatgtttcatagaccatacattaactcgttcacaatataaatgagagtttcattaccttcaaggctggtggtttctga

SEQ ID NO: 20805 - DNA, 120 bp, synthetic construct
  source 1..120: mol_type = other DNA
attcattgaaaatgaccattttaggagttaattagaattcaacataatttttgtttctaaaacatgatacttcttgggagtatcatgttagtctctaaagaagtttcatgaaatagctat

SEQ ID NO: 20806 - DNA, 120 bp, synthetic construct
  source 1..120: mol_type = other DNA
gaatctttctcgtctcttgtagcctgaatggaatttgaaatgcaataataaattaataaagtatgcttcatagactatacatttactagttcacaatataaatgacagtttcattacctt

SEQ ID NO: 20807 - DNA, 120 bp, synthetic construct
  source 1..120: mol_type = other DNA
tggctatactcaaaacagaatcttcctcgtcacttgtagcctgaatagaatttgaaacgaaataataaataaataaagtatgtttcatagaccatacattaactcgttcacaatataaat

SEQ ID NO: 20808 - DNA, 120 bp, synthetic construct
  source 1..120: mol_type = other DNA
gagccccttatgtcttgaacctctctccatatttcttcttcccaatttcaacgtggggaagtgtataatcatactgcaaagatcacgttccaagccagcagcattagcgtcacccaagaa

SEQ ID NO: 20809 - DNA, 120 bp, synthetic construct
  source 1..120: mol_type = other DNA
gaagtctacaatcttactactcagatcatgaccaaggaccagcagcatcagggtcacctgagaactcactacaaatgaagaatctcaggcatactgaatcagaacatgcagcttagacga

SEQ ID NO: 20810 - DNA, 120 bp, synthetic construct
  source 1..120: mol_type = other DNA
tgacacatgtgaagataaggttttgctttattaaaatgttaaatatgtcagacacttgactaacatgtacaaattccttcttcacaaaagcagccccattgcctcctctctcccatagac

SEQ ID NO: 20811 - DNA, 120 bp, synthetic construct
  source 1..120: mol_type = other DNA
ccatgactacaactaacacaggaaagtacttctaccaatgtgatcctcttaactgaagccaaaaaatgtgatgtcaaaagaaaggaccaaataggaccccagaaggataaatgtcaaagc

SEQ ID NO: 20812 - DNA, 120 bp, synthetic construct
  source 1..120: mol_type = other DNA
ttccttcttcacaacagcagccccatgtcctcctctctcccatagacacagtttcatagtttctattcactcacatcagtttcatcgagtatcaactctcattttatctttacggcttta

SEQ ID NO: 20813 - DNA, 120 bp, synthetic construct
  source 1..120: mol_type = other DNA
caaagatgaccaaactgtgtcaacctggacagatctgaaatatattccactgattacaaaagccgagttgcagctattatgtacattgtgtgaaagcgtacagaagacttgatacttgga

SEQ ID NO: 20814 - DNA, 120 bp, synthetic construct
  source 1..120: mol_type = other DNA
ttgaaatgtgatcactgtctttcaccgtatgctgaatgggtttgacaacataatgattaacatatcatgtatatatcacagagcattttgttaataattaaagaaaatatgtttaccgtg

SEQ ID NO: 20815 - DNA, 120 bp, synthetic construct
  source 1..120: mol_type = other DNA
aataactaatgagtactcagattttcatttacaaaatgtaaccaaaaatctctgaatcaccattgacttttttttcataacaatcaactttcttttttttatttttgacatggagtcttg

SEQ ID NO: 20816 - DNA, 120 bp, synthetic construct
  source 1..120: mol_type = other DNA
aaaatatattttcttaatgtatgcagatatttatttctggaatattatggtcatctgcatttttgaacttaatgaaaacagttatctaaaccaataattcaaggtatcctaagaaagctc

SEQ ID NO: 20817 - DNA, 120 bp, synthetic construct
  source 1..120: mol_type = other DNA
aattgccaccattactacatgatctaacacaaaaaggatggactttgaagtcactcatatgtagattcaaacctcaagtctgccatttacttatctacatattcacatgggatgatgatt

SEQ ID NO: 20818 - DNA, 120 bp, synthetic construct
  source 1..120: mol_type = other DNA
ccttctggatccctcttcagcagggatccatggcaatccccaatctacatcttcaaatttggctgtcccctgcaaattccattcttatccactttcattgggttcaacagctcattcaat

SEQ ID NO: 20819 - DNA, 120 bp, synthetic construct
  source 1..120: mol_type = other DNA
gtaacaaagagtttcatttgtttactataaaataacacatcccaagagttaaccatgatgattgatctgaaaactgacacattcttactacagagagagagagagggaaagaaaaaaaaa

SEQ ID NO: 20820 - DNA, 120 bp, synthetic construct
  source 1..120: mol_type = other DNA
taagatatggcttccgttttagaaaacatttcagttacctatttctgcctccaactctcctaacctatgaaatatccaatgcagactcacccttaaacccatcacaaatagtgacaggca

SEQ ID NO: 20821 - DNA, 120 bp, synthetic construct
  source 1..120: mol_type = other DNA
aagcatgtaatacggtgtctagcacagaggagaacactaaacgggcactagtttctattctctctattaactaagttaacatatcactttaaaaaatctgtgaaatcatacctgtttaaa

SEQ ID NO: 20822 - DNA, 120 bp, synthetic construct
  source 1..120: mol_type = other DNA
aatcctattatatgctattcattatttttcatacccatgtggtataataatgagcctacacttttgtattttctggtttaaccttcagaaacttttgtcagtaactcatgggaacaaggt

SEQ ID NO: 20823 - DNA, 120 bp, synthetic construct
  source 1..120: mol_type = other DNA
cttgatggagacatgctgtagaattaaagcaaaattatgctgtcccctcagcctgttgtatcttgaactgctctccaatggttcttcttcccaatttcagtgtagggaagtctatagtct

SEQ ID NO: 20824 - DNA, 120 bp, synthetic construct
  source 1..120: mol_type = other DNA
taattgcccaagtttcttgtgttctctagttcagccttctgaaagttttttcatccactcatggcaataaggtataatatataaacctcaataaaaagtatcatcatttatcaatattga

SEQ ID NO: 20825 - DNA, 120 bp, synthetic construct
  source 1..120: mol_type = other DNA
ctaaagctagtttgatataatataccataggggtctctcaggtccttttatgaaataaatacctcagccaacacagctttcctaaagaaaaaaaaaaaaacactttttctagattaagct

SEQ ID NO: 20826 - DNA, 120 bp, synthetic construct
  source 1..120: mol_type = other DNA
aacatgtcagtaattgacatgaaaaatgaagaatggtgtaattttttgcaggtacaaataagacacgctgagatccttactagatccaagaagagcagagtgccatgagacagcaaataa

SEQ ID NO: 20827 - DNA, 120 bp, synthetic construct
  source 1..120: mol_type = other DNA
tgtattggagaggatccaggcagctgaatacagctacctggatgctctccaaatccaatccttttgggattttatgaaagcttcattacataggcatgactgattaattgaacattcagc

SEQ ID NO: 20828 - DNA, 120 bp, synthetic construct
  source 1..120: mol_type = other DNA
tttaatttgtttctaatcttttttcttaagttcttataaaactaaaaatatctattaaaactaaaaatcatctgttaagggcagttcttcatagaacaggtcgaaaagtcaaaaactgca

SEQ ID NO: 20829 - DNA, 120 bp, synthetic construct
  source 1..120: mol_type = other DNA
ggaattgcactaaaacaaagtgtcccagaacacagagacttggtatacttagcatatcatcttacatttttctccatgatgttatataaaagacgtcagcttctccaaactgctggtctg

SEQ ID NO: 20830 - DNA, 120 bp, synthetic construct
  source 1..120: mol_type = other DNA
tcacacattacccttaggttttgacaattctgtaaaagcgtgggcacatgtactcagaagtcaagaccattttccctgaccctgtgcacgtagcttctgcagttacaaaagggttacgca

SEQ ID NO: 20831 - DNA, 120 bp, synthetic construct
  source 1..120: mol_type = other DNA
gtaaatttactttattttaccatggatgggtgaacaccttacactagattgatagtagttcaagcatcgaactacaagcaaactaaagcttcaactactgcaaaagcttcctttctctag

SEQ ID NO: 20832 - DNA, 120 bp, synthetic construct
  source 1..120: mol_type = other DNA
ttactatctcctttcactaggttgttaaataggtttaatgaagtagcatttttaacattcacagagaaatagtaaagcagtggagcttgttcttgaactttatcgctgaaactattttga

SEQ ID NO: 20833 - DNA, 120 bp, synthetic construct
  source 1..120: mol_type = other DNA
ttgactcacagcaaggaacagtggcggatattcatcctgtaaaataacagcaacaatttataatcacaaaattacatatttatcaactgaaatgaaaaccttatgtaagatcctgtgagc

SEQ ID NO: 20834 - DNA, 120 bp, synthetic construct
  source 1..120: mol_type = other DNA
tgttgagacaatttgtagaggcaaactaaacacatctatgggacacatttggactatagaccttgtatttttatatttgctgtggatatgtctccaagcgattgtatgtaacgcaagtat

SEQ ID NO: 20835 - DNA, 120 bp, synthetic construct
  source 1..120: mol_type = other DNA
tcaagaaatgttttattgttgttgttgtgttgttgctgttagaggcagtgtcttaatctgttgctctggctagaggcaccaccatgcccagcttcaaggaaatattttaaaacatacatg

SEQ ID NO: 20836 - DNA, 120 bp, synthetic construct
  source 1..120: mol_type = other DNA
tattgtaattcatgtttgtataattatttaccataagtgcatgaaaaatagctgttccttataatgcttctttaaaagttccaaaatttaaagtaaaatcttagacagttaaggcatttc

SEQ ID NO: 20837 - DNA, 120 bp, synthetic construct
  source 1..120: mol_type = other DNA
gctgttagtaaataacttgtggaaattaacagcacattttcatatctagaaaggcaagtcttttttgactccatttcaaaagttttcttaatgtcgtcacaatagtaaaagacagcatga

SEQ ID NO: 20838 - DNA, 120 bp, synthetic construct
  source 1..120: mol_type = other DNA
ttacctttccttcctgtctctcttattgatgtcataacgcgtgagcagaacgaacttcagttcctccagatcacgatagaagacagctctgtggatccccttcagatgatacggtttaat

SEQ ID NO: 20839 - DNA, 120 bp, synthetic construct
  source 1..120: mol_type = other DNA
ggctgacgtggcttcccggagctgcggccggccagcgcccaagggcccacaggctgcgctgcccttgccagctgcttctgacccgcgcccggagcgcaggacctggcgcttggcactctg

SEQ ID NO: 20840 - DNA, 120 bp, synthetic construct
  source 1..120: mol_type = other DNA
tatcgggcagctggccctggcggaggaaggcggcagcctgtgcaaaggccttgagcagcgggctgagcaggcggcagaggaaaagaaagaaatctgggcagtgtgactgctggctgagct

SEQ ID NO: 20841 - DNA, 120 bp, synthetic construct
  source 1..120: mol_type = other DNA
acccaggaggtttcagaggtagagcatgggcagggatgggccattcctaccaccaagaggggaaggcctaggaccaagtgggccgtaggggaggcctgacctttagcagcagcaggtctt

SEQ ID NO: 20842 - DNA, 120 bp, synthetic construct
  source 1..120: mol_type = other DNA
cactcctgctccttctcagtgtctgggacagcagtactgagatagagacacagattacaggatgaagggtccaaacacaaaaacagctgtgggaatgcctagagctttctaaaaggtgag

SEQ ID NO: 20843 - DNA, 120 bp, synthetic construct
  source 1..120: mol_type = other DNA
aagctcctctttccttatccatgacacaggaaaaatccctccctatcaaggtcttcagaggatgaaatgagatgatggtaatggccttgacaggtgctgccagatgattgtaaggacgat

SEQ ID NO: 20844 - DNA, 120 bp, synthetic construct
  source 1..120: mol_type = other DNA
tcggagcagagaggccacgaagagggcctttagtagggagctgctgccaacacaccccgatacacaccccgccccagcctgcgacttctcccatgtatgtctagaggcaaaaggttttta

SEQ ID NO: 20845 - DNA, 120 bp, synthetic construct
  source 1..120: mol_type = other DNA
ctatcctcattttacagaagaaggaaagtgagactcagggaagctacagaactgcttcctggtagtgaacgctaagaagtagcagtgctgggactggaagttctgacaccagagttcatg

SEQ ID NO: 20846 - DNA, 120 bp, synthetic construct
  source 1..120: mol_type = other DNA
aggtaggcagatcaagagactagaacagcagagggctggtcaaggtcaccaacaacctctactttctgtccttgctcagttggccactcagcacattcaagacagctgagcttgacacat

SEQ ID NO: 20847 - DNA, 120 bp, synthetic construct
  source 1..120: mol_type = other DNA
taaacactatccagcaacccaggaggagagtccagcacttccccaagcccggccaacacccgctctccagaaggacagagtccccagcccaagggtgagtgcccttcagcccagttacct

SEQ ID NO: 20848 - DNA, 120 bp, synthetic construct
  source 1..120: mol_type = other DNA
catacatgctcacagaaggaactgcaagagagctccaagtctgcccctccctgcaggcttgtgtatggaacagaggacggggcccttctttctctatcagaggaagaaaatggcaccaaa

SEQ ID NO: 20849 - DNA, 120 bp, synthetic construct
  source 1..120: mol_type = other DNA
cagggacataaaggaagcagcttcccagagcttcggctcccagaaccaagcttcctgcttggggcctggccctaccatcactcacccagctcttgggggtgcaggtctggcaacagcgac

SEQ ID NO: 20850 - DNA, 120 bp, synthetic construct
  source 1..120: mol_type = other DNA
cagacttttccacaatcactcccctctcacattaacgttctccacagaagacgccacttgtatctcctcagcccctccttcccaccacaatatttccctgaactaataaatacctatgtt

SEQ ID NO: 20851 - DNA, 120 bp, synthetic construct
  source 1..120: mol_type = other DNA
atctgccagttaacaacacagctcaggactcctacagcagaggatgcaaactggcaccccgagggcaaattcaactcatagacacatatatatacacacacatatatacatatataatac

SEQ ID NO: 20852 - DNA, 120 bp, synthetic construct
  source 1..120: mol_type = other DNA
ctcacctcacaccagcttccaactcccgccaaagcagcagctccgcaaagccgccacaaggcgtggactgctcaagggaaggagcggattgcccacctccgcgcgtccggctaaaaggca

SEQ ID NO: 20853 - DNA, 120 bp, synthetic construct
  source 1..120: mol_type = other DNA
tgtgccatttcgtgtctatccaggctgtgtgtgcatccactcaccttcattgggatttgcaacgtcctcccggtacctgcagaatccattttgtaccccatcttaccgttcttttgtatc

SEQ ID NO: 20854 - DNA, 120 bp, synthetic construct
  source 1..120: mol_type = other DNA
tgatgtttaattttaggtgtcagcttgactgggatacccagatacccagagagctggcaaggcattatttctgggtatatctgtgagggtgtttctggaagagactggcatttgaatcac

SEQ ID NO: 20855 - DNA, 120 bp, synthetic construct
  source 1..120: mol_type = other DNA
taaccattggtggtactctatgttgtagatcccttccgttataccagaaccttccataatgtcttgctaagcactgcagcaaatggcagcctagaatggagaagtcaaatatgggtgcta

SEQ ID NO: 20856 - DNA, 120 bp, synthetic construct
  source 1..120: mol_type = other DNA
tttgttcttcctgaaggctcttttctataaaaacctgactgccaaccgcccaagacttatatccaccctcctcatcaaccttagtaggaagaaacttctgtccctcaacatacacatgaa

SEQ ID NO: 20857 - DNA, 120 bp, synthetic construct
  source 1..120: mol_type = other DNA
tggcctgatatatggagatgtcagttctccctcaattcatccatcacttcactgtagtcccagtaaagattccagttttagaaactcactctgaatcatgcgaggagggataaaggtcca

SEQ ID NO: 20858 - DNA, 120 bp, synthetic construct
  source 1..120: mol_type = other DNA
tccggccaatcaagcttttctttgatgggttgtgctgtgttgctgtatctaagaacacattatgggtggccataatgttctgtggcagcttgccccacatatgtcaccttccatcctgaa

SEQ ID NO: 20859 - DNA, 120 bp, synthetic construct
  source 1..120: mol_type = other DNA
gtgtacagctgctagtttgttttgctgggggttaaacttggtgttgctggagcattccccagaggttacgatcagaattgcttccatgctgcagggctgatttactgtgaaggggtaggg

SEQ ID NO: 20860 - DNA, 120 bp, synthetic construct
  source 1..120: mol_type = other DNA
acacaggctcgcaaacgcccacatttatgcatacatggactgtcaccaggagtcctgccttaaaccgaaacctatttctcatgaaactttcccaagagttagaagtcagtttcaaaaatt

SEQ ID NO: 20861 - DNA, 120 bp, synthetic construct
  source 1..120: mol_type = other DNA
tcagagatgttactcattagatacttgcacttgatcctctaatgatcctctaaaatatttcctgttcttgcatgggaataccacaacctcatcatagaatggccagtttcctgagaaact

SEQ ID NO: 20862 - DNA, 120 bp, synthetic construct
  source 1..120: mol_type = other DNA
atataaaaatactcaaatatttacaacaaataaatacgcggggacacaataagttacactgttaggagccctcctcctagggctggaagagagtatgccattgtccacagcaggcccacc

SEQ ID NO: 20863 - DNA, 120 bp, synthetic construct
  source 1..120: mol_type = other DNA
cttctgagacacagacccacctctaccttatgaactgtggcctctcggatcctgagtgttctcatctgtaaaatggatcacacatacttcccaggagaggaggggtacccaaacataccc

SEQ ID NO: 20864 - DNA, 120 bp, synthetic construct
  source 1..120: mol_type = other DNA
tctttcctaacagaatcaacgagacttccttatcatcatccaacacctgtgttcagttttctctgtctctaaaatgtcctccaacagttggtctgtttgaagggagattcaacacaaggc

SEQ ID NO: 20865 - DNA, 120 bp, synthetic construct
  source 1..120: mol_type = other DNA
aagtagtccaggttgttgaagtagcttcctgagcccccccaggaaaactggagaaacaggacatgggaatgaggacgacagagaagtacaaagatagaggagaaaaaagaaaaaaaacta

SEQ ID NO: 20866 - DNA, 120 bp, synthetic construct
  source 1..120: mol_type = other DNA
gccatggcatctgtggcctatgggggcaggggatttggccatacaggaggttagatcacgggtgacaccaacacctgtggcaagggatctcaaagctgttatcccatgttagtagccaga

SEQ ID NO: 20867 - DNA, 120 bp, synthetic construct
  source 1..120: mol_type = other DNA
tatccagcagtaaggtactcaggaatataaactaccctgtacatcacaaaactccaaggtaacctaaatatgtcagggagaatatttaatggcatgaaaaaatgctcctgatggagtctt

SEQ ID NO: 20868 - DNA, 120 bp, synthetic construct
  source 1..120: mol_type = other DNA
tgactttggagatctctgcttaacaatatgtaacaatacatagagagtgtcctctttatttcttgtggctgcatattactgctctatagagatatacccaagtccctaatgaggggcatg

SEQ ID NO: 20869 - DNA, 120 bp, synthetic construct
  source 1..120: mol_type = other DNA
cggtccaggcttgtattttacctgctatacttcataaggtgaaacttttgtagaggagcaactactacatgctacgcagtaagtcccagggattccagcgttccttcaaccagtgctttc

SEQ ID NO: 20870 - DNA, 120 bp, synthetic construct
  source 1..120: mol_type = other DNA
tttaattcttgacgcttgtggaaggtaggtactgttagtcccattttacagatgaaacagttaaggcttaaagcggttaagggatttgcccaaggttacacagtcttaaagctaggaggg

SEQ ID NO: 20871 - DNA, 120 bp, synthetic construct
  source 1..120: mol_type = other DNA
tccgtgtggtcggaaacggccgggaacctggttctagttctgccctccgcgggagacctgcgccagggacacccttctggcctaacccagccaggcctggtctacctggcggcggcggcg

SEQ ID NO: 20872 - DNA, 120 bp, synthetic construct
  source 1..120: mol_type = other DNA
ctttacttgtcccacaaaggagtctggacctcgtttaagtgcacaggagaccgctggaaggtcctcagtggcgtgccatggcccgacttctatttgagaagtttttctctggccacccgt

SEQ ID NO: 20873 - DNA, 120 bp, synthetic construct
  source 1..120: mol_type = other DNA
cacagagctgtcttacatggtaatctagagaaactgaagtaccttctgctcacgtattatgacgccaataagagagacaggaaggaaaggtaatgggggccgggagccggggctgcggga

SEQ ID NO: 20874 - DNA, 120 bp, synthetic construct
  source 1..120: mol_type = other DNA
ttctggcaggtgtattgtgatattttctcttatctgtgatgtataaatgatcagtatgtttaaaacttctagtaaatgttttttattaatgaaattatccttggaaaaagaagaaatata

SEQ ID NO: 20875 - DNA, 120 bp, synthetic construct
  source 1..120: mol_type = other DNA
gaagcattatagggaacagccttttttcatgcacttatggtaaataactataaaaacaaatgaattacaataaatttataattcatgacaactgaatttgggaaaggtaatagttaagtg

SEQ ID NO: 20876 - DNA, 120 bp, synthetic construct
  source 1..120: mol_type = other DNA
ctcttatgacctttcaattgtatatattgaagctcacaggatcttacttacataaggttttcagttcagttgataaatatgtaattttgtgattataaattgttgctgttattttacagt

SEQ ID NO: 20877 - DNA, 120 bp, synthetic construct
  source 1..120: mol_type = other DNA
aagaaatcaagaaaaaggctagataagtagcagtaggtgcaagattcttgatattgaaactttcaggacttttctccttagggattccaatgttgtccattttatttctagtataacccc

SEQ ID NO: 20878 - DNA, 120 bp, synthetic construct
  source 1..120: mol_type = other DNA
gctgccaatccccatgctgttgaaaatacgtatttggtatgttgtatatattatatattgtattctgagtacaagaaagtaagctagagaaagaaagcttttgcagtagttacagctgta

SEQ ID NO: 20879 - DNA, 120 bp, synthetic construct
  source 1..120: mol_type = other DNA
ctcaaaagccaattagatttaacttttaaaagctctttggcggtacccttttcaaaagaaccatttttgaggtgtaatgtgggctattgatgtgattggtatgtctgttgtccaaatatg

SEQ ID NO: 20880 - DNA, 120 bp, synthetic construct
  source 1..120: mol_type = other DNA
cattattttttggcataattatttctattcctttatggatttattcatgcggaaatacaggaatctcaaaggcaaccgttaaggagaacagattagggaaaggtgttttataaacagcct

SEQ ID NO: 20881 - DNA, 120 bp, synthetic construct
  source 1..120: mol_type = other DNA
ctaaaaaagaaagctgaatttaaggattgtttgtgccctacatagggtgaatgaatagctagaactaagcaagcttaccgcatcttccctaggagaggattagtgagagtaaggacactg

SEQ ID NO: 20882 - DNA, 120 bp, synthetic construct
  source 1..120: mol_type = other DNA
gggaaagcatagagacaaaataagagacgatagatactcaaaccaatgtgagtgaagaacagctgtgaaagagtgtctatgggagagaggaagccatggggctgcttttgtgaagaagga

SEQ ID NO: 20883 - DNA, 120 bp, synthetic construct
  source 1..120: mol_type = other DNA
tgcaatacacatttaatgccatgtacagtcaagatagagaacttcccttccccaaataaatcagcagggggctcattgaagctgcgcattctgattcagcgggcctgagattctgcattt

SEQ ID NO: 20884 - DNA, 120 bp, synthetic construct
  source 1..120: mol_type = other DNA
ccaagctggtctgaaatgcctgggcttctcaagtgatatttctgcctcagccttttgagtagctgagattataggaacaagtcactgtgctcttttatgtttttaatattttataggttc

SEQ ID NO: 20885 - DNA, 120 bp, synthetic construct
  source 1..120: mol_type = other DNA
tttgtggatctgaataaggcagaatctatataatgacgataattggattttaaaatttttaatgttttaatcttctgtgaagaatattcccaataacaatctaacaacatatacatttgt

SEQ ID NO: 20886 - DNA, 120 bp, synthetic construct
  source 1..120: mol_type = other DNA
tttaaagaaatgggaggggttaattttaattttttttactttggcaaataagaaatagttgataaatactttgagaggtgtgatctgaaaaaaaattgctggaaaatacacagtgacaga

SEQ ID NO: 20887 - DNA, 120 bp, synthetic construct
  source 1..120: mol_type = other DNA
ggaatgttacaggtaacctaatatgcatgacatatctaataattaaatctattaaatgtcttgaatgttttgaatttatctttttttctaatgttgagaatgtataagttgaggtgagtt

SEQ ID NO: 20888 - DNA, 120 bp, synthetic construct
  source 1..120: mol_type = other DNA
aggagtaacattttgaagatatctgtatcaccaatcataaccatcaccccatgtgaatctgtagattagtaaatggcagacttgaggtttgaatctacatatgagtgatttcaacgtcca

SEQ ID NO: 20889 - DNA, 120 bp, synthetic construct
  source 1..120: mol_type = other DNA
ttttttcctctctctctctctctctctgtttgtagtaagaatgtttcagctttcaggtgaatgatcatggttaattcttgggatgtgttattttatagtaaacaaattaaactttttatt

SEQ ID NO: 20890 - DNA, 120 bp, synthetic construct
  source 1..120: mol_type = other DNA
cccgtgctttattcacttgccatctccctgtctttataacgatgacaaggatcctataaaggaatggaagttctcaaggtaataatagaaaagaagtgtgacaacaagggaaatgtatgc

SEQ ID NO: 20891 - DNA, 120 bp, synthetic construct
  source 1..120: mol_type = other DNA
taagatgattttttaaaaatgagctttcttaggataacttgaattattcctttagataactgttttcattaagttcaaaagtgcagatgaccataatattccagaaataaatgtctgcat

SEQ ID NO: 20892 - DNA, 120 bp, synthetic construct
  source 1..120: mol_type = other DNA
ctctgtctgtgcccaagttttaccacgttattgtggtagttcttattggctatgctgtttcatttttttgcacatgctgccctcactagaaacacttcacactcttagtcttcacttgtc

SEQ ID NO: 20893 - DNA, 120 bp, synthetic construct
  source 1..120: mol_type = other DNA
atccaagtgagatggaaggatttgatgtaaatatgctgatgttcttgttaatatctttgtttataaaatgatttttaaggcataaggcggacattttacacggtgagctctagcccaaat

SEQ ID NO: 20894 - DNA, 120 bp, synthetic construct
  source 1..120: mol_type = other DNA
aaaatgagattttactggtttgatcacaggggtggtgagaataatgaagaacaaaatgtggaaggcaaagaatgaagaccagatagtgagattagatttatcaacaaaaaagagtacaag

SEQ ID NO: 20895 - DNA, 120 bp, synthetic construct
  source 1..120: mol_type = other DNA
ttcagatctatccacattgacccagtgaggtatttcttgatttattgtatgatctcatgatatgccatgtgatgactacagcatattatgctctcttcatgccgataccatatagactta

SEQ ID NO: 20896 - DNA, 120 bp, synthetic construct
  source 1..120: mol_type = other DNA
cgaggactcgtgaagtgtacattctactaaagtgtcattgtcattgtgtacctcctcaattaccaggcaagttaaaagagcgtgatgaatacttgcagtataatggtataaatccttctg

SEQ ID NO: 20897 - DNA, 120 bp, synthetic construct
  source 1..120: mol_type = other DNA
agattatgcatttctagtaagttgtcaggtggtgctgatgctgctggtccttggccatgatcttagtaacaagcttgtagagttccctacattgaatttggatagaagaaccattggaaa

SEQ ID NO: 20898 - DNA, 120 bp, synthetic construct
  source 1..120: mol_type = other DNA
ccaggtgattgagtttcccctctgatttttgatcacatttgtcgtgatcacttggcataccctttttgatattgacactgatttatttttcttttagatatacgagaaatcatattatgt

SEQ ID NO: 20899 - DNA, 120 bp, synthetic construct
  source 1..120: mol_type = other DNA
ggatatatttcatggagcctgtattcccttttaccagtgtatttctgtcatgttccagtcccaagagacaaagtagaagacatcagagcctacactagtacaggcagaaggatacagctg

SEQ ID NO: 20900 - DNA, 120 bp, synthetic construct
  source 1..120: mol_type = other DNA
attatgtatcccttttgcttttcagtgtcttctcagaaaccaccagccttgacggtaatgaaacactcatttatattgtgaatgagttaaggtatggtctatgaaacatactttattaat

SEQ ID NO: 20901 - DNA, 120 bp, synthetic construct
  source 1..120: mol_type = other DNA
ctcttcttgttactaggaggcctcagagatacatgttttgttgattttagttataaaaatcagataatcttgaatgtgaataaattttgcttccttgttcaaggagctacctgttggata

SEQ ID NO: 20902 - DNA, 120 bp, synthetic construct
  source 1..120: mol_type = other DNA
aattcacttccctaaataaatcagcggggggttcattgaagttttatgtttggattcagcatgcctgagattcttcatttgtaataagtcctcaggtgaccctgatggtgctggtccttg

SEQ ID NO: 20903 - DNA, 120 bp, synthetic construct
  source 1..120: mol_type = other DNA
tattacaccacatgggcatgataaataatgaatattaactactaggattcaccaaacatatatccaagcagatcaattcaggacacttacactgaagacacgtgaagtgtatgttcaact

SEQ ID NO: 20904 - DNA, 120 bp, synthetic construct
  source 1..120: mol_type = other DNA
ataatgtcctcctgttccatccatgtcattgcgaatgagaggatcttattctttcacatggctgagccgtatatgtatcacatttttagaacccatttttctgttgatgtacatttaggt

SEQ ID NO: 20905 - DNA, 120 bp, synthetic construct
  source 1..120: mol_type = other DNA
ctgggattacaggcgtgagccaccgctgaccatggcttttatctaactgttctgtgtagctcattttaactaaatatataatttttttagcagaacaagacttagaaatggcatcagagg

SEQ ID NO: 20906 - DNA, 120 bp, synthetic construct
  source 1..120: mol_type = other DNA
gataagttttaacagatgtatacacatgtgaaactattaccatcatcgagatagtcaacatatatccatcacccactaacgtctcctcatggcccttcatattcctgtttttaaaagctg

SEQ ID NO: 20907 - DNA, 120 bp, synthetic construct
  source 1..120: mol_type = other DNA
tgtgggaaacccagtgtttgagtcaaaagcaagttaatacttcagtaaacccactgtaaagtcagtaagtcaaaccaccttaagttggggattgtctgaatttgactttctttatacagg

SEQ ID NO: 20908 - DNA, 120 bp, synthetic construct
  source 1..120: mol_type = other DNA
tagtgtagatgtatttgactttctttatacaggttgagcattgctaatccaaatatacacttttataaaactatagaaaatgatagttttaaaattttcatttgattgtttatcgctagc

SEQ ID NO: 20909 - DNA, 120 bp, synthetic construct
  source 1..120: mol_type = other DNA
ccataatttgcattggggttcactcttggtactttacatgtatggatttggacaaatgtacaatgatgtgtatccatgttatataaattattttgacttccctaaaaatcctctgtgctc

SEQ ID NO: 20910 - DNA, 120 bp, synthetic construct
  source 1..120: mol_type = other DNA
ctattgtttcttctggaaccaacagtataacaaaataccatagactggttcaaacaacagaagttgatttctcgcagttgtgggttcagcaaagtccaagatccagatgctgtcatgttt

SEQ ID NO: 20911 - DNA, 120 bp, synthetic construct
  source 1..120: mol_type = other DNA
gagtattcattgtcctgtgaagtatgcggtattttggcctggctcatgggaatggaccctcttccagtcattgtgtgaaccccagacatcgtttctgctaattttctttaactgttgttt

SEQ ID NO: 20912 - DNA, 120 bp, synthetic construct
  source 1..120: mol_type = other DNA
ctggttacagattgtgttcacctattgaaaattaaaaatacattttgtttatggaaaagattaataaaacttaaagataaccactgtgagcaacttagagtaaaaattcgaaaactgaaa

SEQ ID NO: 20913 - DNA, 120 bp, synthetic construct
  source 1..120: mol_type = other DNA
ataaatgattgtggggaccaagttttactgtgcagaggaatctctcagcagacttcagagagagcagattgtaaaatgtttcttatcggacccaaaagggtgcctggctctcagctgaat

SEQ ID NO: 20914 - DNA, 120 bp, synthetic construct
  source 1..120: mol_type = other DNA
gtaagtattttgttcctagtgacatagttcagcatatttcccctatttcatgttaattacatttcaaatgttatggaaaaggaataaaagttatcacaatagcaaataatgtcatgattt

SEQ ID NO: 20915 - DNA, 120 bp, synthetic construct
  source 1..120: mol_type = other DNA
gtatcagttatgataattagtatgtctttgtgaagccaaaaaagtttcatttgtaagctatatcgaaatacatcatttttctacattattcctaaattttgcatattatcaccaaaacac

SEQ ID NO: 20916 - DNA, 120 bp, synthetic construct
  source 1..120: mol_type = other DNA
ttctttttcattctaacttctgaatttaaatctgaatcctctatagcaggggtccccaactcccaggccacacacagttccatgacctgttaggaagcaggctgcacagcaggaggtgag

SEQ ID NO: 20917 - DNA, 120 bp, synthetic construct
  source 1..120: mol_type = other DNA
tctaaatgatctttccatggttgaaattggagtattgaggtctcctactattatagtattgcagtatatttttctcatgagattatttaataattgctttatgaatttaggtcttgtgac

SEQ ID NO: 20918 - DNA, 120 bp, synthetic construct
  source 1..120: mol_type = other DNA
ctcccttacaattgtacaattttatgtcaaaacttacccttttagttcatacttatataccttagcaatttattgtagctacagttattttcaatacctttgtctgctaaccctactagt

SEQ ID NO: 20919 - DNA, 120 bp, synthetic construct
  source 1..120: mol_type = other DNA
aactgttattatatgaaagttgggttgtttgattgagtcccataattgccataggcatttgttattcttttttgttgttgtttttccccgatggaatcatttcaaatgttttttctttaa

SEQ ID NO: 20920 - DNA, 120 bp, synthetic construct
  source 1..120: mol_type = other DNA
caagctatctatgagggctgaaatcaatttcttccaaacttcatattttgacctcctccaaggaatcacaaatatctttaatttcatctagaatagtgattgctttctaaaaaaatccag

SEQ ID NO: 20921 - DNA, 120 bp, synthetic construct
  source 1..120: mol_type = other DNA
tcagctttggcttagcgaaatgttgtggctcatttgattttctatccagaccactaaaactgtcttcacatcagcaataataccattgtacttatcatttgtgcattcactggagtagtc

SEQ ID NO: 20922 - DNA, 120 bp, synthetic construct
  source 1..120: mol_type = other DNA
atcccttctgccccggtaggtatggattctccagagcccgcgggctgtaacgactaagttgcacaaacagcaaagatggctccttgctcttgcgcgtgggaactcattccaggaattcaa

SEQ ID NO: 20923 - DNA, 120 bp, synthetic construct
  source 1..120: mol_type = other DNA
ctaactggggcctccggccaccctcacctgtgttctcatgctgacagagatttgaactcttcctgacatggaggtctccacttcctgtccgctgtgggtcttttcaattcaggcctccag

SEQ ID NO: 20924 - DNA, 120 bp, synthetic construct
  source 1..120: mol_type = other DNA
acagttttttcaggaagggctgctggaatacctggatatccacatgcaaaaaaaaaataaattgcagaccttacacccccaccaaaattaactcaaaatggatcagcaacataaatatac

SEQ ID NO: 20925 - DNA, 120 bp, synthetic construct
  source 1..120: mol_type = other DNA
tgctctagtattgactgtttttggtggctccctggaacttaggatgtgccacgccttgtcagtaaccagaaattggttaaggtaggagccagacaatccagatgtagctagaaagttaga

SEQ ID NO: 20926 - DNA, 120 bp, synthetic construct
  source 1..120: mol_type = other DNA
aatccaagaggcatttatcaacacacatcacaatgaagttattaaaaatgaaaaacaaagaatactgaaaacagcaaaaaaacaagaaatacatcacattcaagggagcttcaatatggc

SEQ ID NO: 20927 - DNA, 120 bp, synthetic construct
  source 1..120: mol_type = other DNA
gaagaagtaaatgcaaacagctggaggtgaagacgatcactgtggagctccatgtagtctagtttggctggatgctagaacaaaggtgtagagtatggtaagtggcgaaagataaggctg

SEQ ID NO: 20928 - DNA, 120 bp, synthetic construct
  source 1..120: mol_type = other DNA
tatctcagaagaaaagtaaaattccagtggccttagatgctctaagtaacccgccctccacctcccgccctgactcagctgctatatctctcctccgtactcactccattcctactctac

SEQ ID NO: 20929 - DNA, 120 bp, synthetic construct
  source 1..120: mol_type = other DNA
ctctgttggttgaattataaattaatatgaacatccttaagaacaatttagaaatattgatcacagatctaaaacagatctaaaaaagtttctatactttaaccagaagaatttatccaa

SEQ ID NO: 20930 - DNA, 120 bp, synthetic construct
  source 1..120: mol_type = other DNA
accttaacacaaaccataatcccacagattcaggaaggaagtgtctgggacagaaaaaaatgaaaatgtatcattgtcattttttataccatctaggatgtataatattactgaaggtga

SEQ ID NO: 20931 - DNA, 120 bp, synthetic construct
  source 1..120: mol_type = other DNA
agatgtacagatggcaaataaacacatggaaagatgctcaacattttagtcattaggatcatgtacattaaacccataagaatatacataatacacccatcagaataactaaaatttaaa

SEQ ID NO: 20932 - DNA, 120 bp, synthetic construct
  source 1..120: mol_type = other DNA
aaaaacatgttcagtatctggtttgttgtcattttcacagtctactttatttctatttaaataaagctccgaaggtgactggcaagcatattctggagacccagagtatgaatgagaaag

SEQ ID NO: 20933 - DNA, 120 bp, synthetic construct
  source 1..120: mol_type = other DNA
ggttgattttatgacccattctctccctcaacatagaaactgaagtcagagatcaaaagggaaaataaattcttaaccttggtattagtgactggcaataaaaaaactgcaaagtttgaa

SEQ ID NO: 20934 - DNA, 120 bp, synthetic construct
  source 1..120: mol_type = other DNA
tacttctttaagaaaggcttttaatcctccaaaacttcagcaaaccacttggggaggcactagatgtcaccaggttcaagccatgcaaacgtggtcaaagattcactcacaaattcatcc

SEQ ID NO: 20935 - DNA, 120 bp, synthetic construct
  source 1..120: mol_type = other DNA
gtgtatctatttcaatgtaaacatgttgactgataatgagaaaaatgatccttataaagaatagcaaatcatgatcctaagacagtaagtgtcaaagctgatgggaggatgctatggcct

SEQ ID NO: 20936 - DNA, 120 bp, synthetic construct
  source 1..120: mol_type = other DNA
cttctatatagctcttataaattattcccaccacaaatgaagaggaaagcctcttaatttagcagtagtaccttacatgtataatttctatttcctaaatttgtgttcctttccctctgg

SEQ ID NO: 20937 - DNA, 120 bp, synthetic construct
  source 1..120: mol_type = other DNA
tacagtagtcattggagcagccagaaatcagatcttctggtatgcaaatattctaaatgcatgtgaagtgagttcactcaggcttcctcagcagaaaccccaaaattacctaaataactt

SEQ ID NO: 20938 - DNA, 120 bp, synthetic construct
  source 1..120: mol_type = other DNA
agtttgtgtctttgggacaggaacatgaggaaatatgctgaagaaaataggaatacacgcttccagaaaatattcagtcagaaattacaaagaggtattttgcgtcatgtgtgtattact

SEQ ID NO: 20939 - DNA, 120 bp, synthetic construct
  source 1..120: mol_type = other DNA
tgacgtttccctctgtttataacaatataatctgacgcctataatatctattacttcatctctttctccttcccctcttgatggaaacttgctgtagaattaaagcaaaatgatgctgtc

SEQ ID NO: 20940 - DNA, 120 bp, synthetic construct
  source 1..120: mol_type = other DNA
tcccaatttcaatgtggggaagtctatataatcttactgcaaagatcatgtccaagaccagcagcatcagcgtcacccaagaacttattaaaaatgaagaatgtcaggcctgctgaatca

SEQ ID NO: 20941 - DNA, 120 bp, synthetic construct
  source 1..120: mol_type = other DNA
cccctgatcctcttatgtcttcaactgttttccaatggttcttctatccaatttcaatgtagggaactctataagcttgttactaagatcatgaccaaggaccagcagcatcagcaccac

SEQ ID NO: 20942 - DNA, 120 bp, synthetic construct
  source 1..120: mol_type = other DNA
tccttcctcccttggtgaaaacatgctgtagaattaatgcaaaattatgctgtcccctgactccttatgtctttaatggctctccaacgtttcttcttcccaatttcaatgtgaggaagt

SEQ ID NO: 20943 - DNA, 120 bp, synthetic construct
  source 1..120: mol_type = other DNA
tgtggatatgctgagtgatgaggacaaatgtgatctaaaatcagagtccaactcatacacctgggaatcagcgtcaaagcaggtgatacatgcacccacatgtctttcatgcaagatatc

SEQ ID NO: 20944 - DNA, 120 bp, synthetic construct
  source 1..120: mol_type = other DNA
tccaagaagagcaaagtacgttagacaggaaataaatatggaacacaaatattttcacttgtaatgaaaattcctctatttacagttttcagaagagaaaaaaatacacacacacacaca

SEQ ID NO: 20945 - DNA, 120 bp, synthetic construct
  source 1..120: mol_type = other DNA
gaaatgtatcccccatgtgtaagaggaaattactgtacttattttgttgaaacacaacagtttctccacctcttcagtttaaactatttaggataaagcactctaattcaaaaaatctag

SEQ ID NO: 20946 - DNA, 120 bp, synthetic construct
  source 1..120: mol_type = other DNA
aaagtacaacctcttgagattgtccctttccactgctagtctatctggacccatctcacagaaaaggatgatccagttagtgctgtgtagtacacagcatgaagtcattttcctcaaccc

SEQ ID NO: 20947 - DNA, 120 bp, synthetic construct
  source 1..120: mol_type = other DNA
attgccatagtaacttctgtacagagacctgttaaatattcaccaaaattccaaaatctaacagcacagaaacttagtatttcatattaagttgcaactgactcaaatgaaataagcacc

SEQ ID NO: 20948 - DNA, 120 bp, synthetic construct
  source 1..120: mol_type = other DNA
ttctgattgaaacttgaaactctcgaaatgcggctgtgttatgattccatgttggagagagtcgggatgtatgtgctttggacaaggtggttccagttactgctgccagacttttgtttc

SEQ ID NO: 20949 - DNA, 120 bp, synthetic construct
  source 1..120: mol_type = other DNA
acatggcctcttcactgatggttttcacaggaaaagatccctatcaactattattgtttttttataaataaaaaattaagtaaaacaaataaagaaggcatacaggcaagaaaaagacca

SEQ ID NO: 20950 - DNA, 120 bp, synthetic construct
  source 1..120: mol_type = other DNA
accactattacttctctacagactctaactgaatgagcagatgtttgctagaatgatggttcatctccatcagtgatgttatctccaactgacatggaagacaaaaccctactttcattt

SEQ ID NO: 20951 - DNA, 120 bp, synthetic construct
  source 1..120: mol_type = other DNA
gatctcaaacagaaagggcatgctggtagcaaaggttaatcactaccagactgcaagagtactttcaatggtaagaaagcagcaacagaatcaatgaaaacaaagcaatgattagaatgt

SEQ ID NO: 20952 - DNA, 120 bp, synthetic construct
  source 1..120: mol_type = other DNA
tcgatatataaagtaatgtggcatcacccaatccgtgatgccttacattaagtgggatacagttcatagaacaggcagttctattcatataattggcacctaaatgaagtactgtggaaa

SEQ ID NO: 20953 - DNA, 120 bp, synthetic construct
  source 1..120: mol_type = other DNA
aggaatataaacatgcatcaatataagtaggcatttgtgtttttttctgttatctttcttattttgtgcatttaaaatttttaatctacattccataacgaacttatttctgtgacatga

SEQ ID NO: 20954 - DNA, 120 bp, synthetic construct
  source 1..120: mol_type = other DNA
cagctgcagcgcccgtgggctgacgtggcttcccggagctgcggccggccgcgcccaaaggccccataggctgcgctgcccttgccagctgctcctgacccacgcccagagcgcaggacc

SEQ ID NO: 20955 - DNA, 120 bp, synthetic construct
  source 1..120: mol_type = other DNA
ccctaactgagcatgaaaacccctggggcaatcctctttttaacaattgagacattccacacacaccccacatcagattttggggtgtggggatagaccttcacatttgtagttttctaa

SEQ ID NO: 20956 - DNA, 120 bp, synthetic construct
  source 1..120: mol_type = other DNA
actggaggccacggctcaactctgcagttccctctgggcagcatttccagggactcgtaggtcagcatggtcatcaaggacaggtggtgagagcagctcctcattgtcctggtgaccccg

SEQ ID NO: 20957 - DNA, 120 bp, synthetic construct
  source 1..120: mol_type = other DNA
agaaaagggttctgaaccacagctgtctgctgaaggaagctgtccaaaggccagtgaagtctctcctgagggtgcctgggctgtgcatcaggagtgaaggttgagggtcaccttaggtgt

SEQ ID NO: 20958 - DNA, 120 bp, synthetic construct
  source 1..120: mol_type = other DNA
agaatctgttctgattcatctgtgccctcacaaactttaccctatttttatgagtcatcttgcgaacagcctcaaaggtgcatcagaatgacaacagaaaccagaagagttattagggca

SEQ ID NO: 20959 - DNA, 120 bp, synthetic construct
  source 1..120: mol_type = other DNA
tcagttgccttatacttatactggaaagtatactggaaaagtaaagtggactctaaatttgaaaagtttaacttatgttgtccctttaaatggagtaggccacactggaaaacttcaaat

SEQ ID NO: 20960 - DNA, 120 bp, synthetic construct
  source 1..120: mol_type = other DNA
tgttactgtgctgtgaaagattacaaatttgaatatgtagtgtacgtgctattgagttgtgaactggtgggctgtatgtaacagctgaccaacatgtgaagatactggtacttgatagcc

SEQ ID NO: 20961 - DNA, 120 bp, synthetic construct
  source 1..120: mol_type = other DNA
gacactcctgccctaggagctaccacagcatttaatggtgaatgattgaatgcttttcctccaaaatttaaaacaaggcaaggatgccctctcttatgacagctatctaacactgtattg

SEQ ID NO: 20962 - DNA, 120 bp, synthetic construct
  source 1..120: mol_type = other DNA
ctcacccttgaacagaccacaagcaataataatggaattattacaactgacttatcaagatttacccctgagctagggacagggtgccaggcctaaaggctggataactgcaaaaaaaaa

SEQ ID NO: 20963 - DNA, 120 bp, synthetic construct
  source 1..120: mol_type = other DNA
taactagaaagcacaaattattgaaattaactccaaaataaacagaaaatcttaacaaacctaattagccatcaaagtttccccgcaaagaatagcctagggacaggtggcttcactgat

SEQ ID NO: 20964 - DNA, 120 bp, synthetic construct
  source 1..120: mol_type = other DNA
gacaccaggaatgatgaatctggatggctgtgacaagccccatggctgggcaccaattcatctaatctcacaaacagcacagattacttaaaaatttcctaatgaaattagggaatgtgt

SEQ ID NO: 20965 - DNA, 120 bp, synthetic construct
  source 1..120: mol_type = other DNA
aacagaacgcatctgctggaagagcagtattggctggctacaaggaatctggagaagatggtttcttccttccttcagggttttttctcgcttccagtttactgacttgtataaatttac

SEQ ID NO: 20966 - DNA, 120 bp, synthetic construct
  source 1..120: mol_type = other DNA
tgagatagagagttctctgtctctcaattcagcagctggcacttctctgggattgtctgcttactgggggaggtgtgcatcttccagaatcactggtttaagctgtgtgtgtgtgtgtgt

SEQ ID NO: 20967 - DNA, 120 bp, synthetic construct
  source 1..120: mol_type = other DNA
acggcaaagaatgtgagatgttactagcaaaccaaggtgggccaattactggaaatggggtttagtcttggtctctggattccttggcaacttagttataaagggaaatacaaactgcat

SEQ ID NO: 20968 - DNA, 120 bp, synthetic construct
  source 1..120: mol_type = other DNA
attaaggagactatatatttcaagaattgcttaaattctgatacccagatttaagcatgtgaacatatgagactcttaaacatacaattaaagctattcatcataatttgctatactacc

SEQ ID NO: 20969 - DNA, 120 bp, synthetic construct
  source 1..120: mol_type = other DNA
tttgtatcacaaagcttatgtagtagtggctttggcatgtctgtgtttgttttttgggggtaggggcaagttggattgtagtgctggatgtgaacccaagtcagctttctcatctgtaaa

SEQ ID NO: 20970 - DNA, 120 bp, synthetic construct
  source 1..120: mol_type = other DNA
tctggagagggtgcacagaaatgttttctctagtctgtaactatggagaggtaatttgtttctgggagggagacgaagtagggcacctttaactatttgatctgagtttttgtccttgaa

SEQ ID NO: 20971 - DNA, 120 bp, synthetic construct
  source 1..120: mol_type = other DNA
aggtatagcttaatcctggaaattgcaaaaccatcaaattataaaaagtttttataacaggctttctggaaaacaatatacaaacatcggtagcatttctacatactaacaatgaactat

SEQ ID NO: 20972 - DNA, 120 bp, synthetic construct
  source 1..120: mol_type = other DNA
ctacacgacattggcctgggcaatggttttttggatatgaccccaaaagctcaggcaacaagaacaaaaatagacaaataggatcacatctaactaaaactcttctacatggcaaaggaa

SEQ ID NO: 20973 - DNA, 120 bp, synthetic construct
  source 1..120: mol_type = other DNA
aagaacagagagaaaaagactgggaaaaaagtgaatctgaacacagcctcagtgaccagtggtgcagtattgattggtctaacatatatttaattgagtcccagaaacagggagtggggg

SEQ ID NO: 20974 - DNA, 120 bp, synthetic construct
  source 1..120: mol_type = other DNA
aaagatacacaagagtcctcataggaccttgtagtcagagggagagcagacatagacagttgaaggagtctccaccagaaagagaagaatgttcttacggcagtgcaggagcaggtgcca

SEQ ID NO: 20975 - DNA, 120 bp, synthetic construct
  source 1..120: mol_type = other DNA
gaaggcaggggacagaggctcagtgggaggggaggtaggggacagaggctcagtaggaggggaggcagggggacaaaggctcagtaggaggggaggcagaggatggaggctcagtgggag

SEQ ID NO: 20976 - DNA, 120 bp, synthetic construct
  source 1..120: mol_type = other DNA
gcagcaaagactcacgatacattcgacatggaaaaggtgctcgataccacgatacatttgtatgcacgggaccagttacccagaggaacctgatattccctcaaaattcgcttccccact

SEQ ID NO: 20977 - DNA, 120 bp, synthetic construct
  source 1..120: mol_type = other DNA
gctcaggagcactgtgtatggcagttatgctcattttccttaaatgccatcagatctcagttatggaaggaccctttattgctttagggaacattattagtaggggtcctaactggtagt

SEQ ID NO: 20978 - DNA, 120 bp, synthetic construct
  source 1..120: mol_type = other DNA
tccaccactccaacataagctactattagcattttggtcataataccttccttaggtcccctaatgccaaatcagagcaatcagattaggaactactatgttagctctggttggggtttg

SEQ ID NO: 20979 - DNA, 120 bp, synthetic construct
  source 1..120: mol_type = other DNA
gagcacaactgctgggttgtatggtaaatgtatgtttagtcttaccaaaaactgccaaatcattttccagagtggctgtaccatttcatattcttaccaggaatggatgagtgatccagt

SEQ ID NO: 20980 - DNA, 120 bp, synthetic construct
  source 1..120: mol_type = other DNA
aaatcagaaattacaccacagcatgattactgctacatcagagtaatgcacacagatgctaaggtaacactgagaaagaagctacaaaaaaagtatttctgccgggcgcggtggctcacg

SEQ ID NO: 20981 - DNA, 120 bp, synthetic construct
  source 1..120: mol_type = other DNA
tatattttctagttcctgccactgaaaacacctgaaataaacgacagctccatagcaatggagcacttttacttcccacactgtggtctctaaataccatttcctgctaagtggaaccag

SEQ ID NO: 20982 - DNA, 120 bp, synthetic construct
  source 1..120: mol_type = other DNA
atggatagttggatggatgaaggaatgagacagaaagggattgtttaaattatctggatcaagtgtccttatattgacaggttcagtatcctttcactgggaggcagtctttgccaggct

SEQ ID NO: 20983 - DNA, 120 bp, synthetic construct
  source 1..120: mol_type = other DNA
ttaccagcctagaagacctctgaaagtttgatcattttcttccctctgggcaggcaaatcttccctgcatagagacactgtgagctggaagggagttccttctctcagtgcgtcctctgt

SEQ ID NO: 20984 - DNA, 120 bp, synthetic construct
  source 1..120: mol_type = other DNA
acactcacctgtcttcagtcagtgctcctccttagaggtggtgagcccacagcgatttatatagagtcctgttctcttgttaaaagtgttcatctcatcctattttggagagatttatga

SEQ ID NO: 20985 - DNA, 120 bp, synthetic construct
  source 1..120: mol_type = other DNA
caaacacagcgccattctttgcactaggcattcctacaggatctttcctttttatctaaaccctcagggacaggggctgtgtctcattcgtctttataataccagcatgcaacactctgc

SEQ ID NO: 20986 - DNA, 120 bp, synthetic construct
  source 1..120: mol_type = other DNA
tattctacatgtgttttgatctagactctttcctcctcctactgacacattcagaagcagagcagtcatcagcttttgtgaaaatcccaaaagcaattccagaagatcatgtgccagcca

SEQ ID NO: 20987 - DNA, 120 bp, synthetic construct
  source 1..120: mol_type = other DNA
gccagttccaaagttcagaatttaccgcaccactcaggcctttctctctaagtttcttgtctcttgtttcattgcacaacaagggattcttcatacttgctatgaaatacaacaaggcga

SEQ ID NO: 20988 - DNA, 120 bp, synthetic construct
  source 1..120: mol_type = other DNA
ttcaagggcaattatatgcatgaagttgtcatctcctaggacaacaatgccatcttctggaacacctctggaaggatctgcctgaggctgttttacaggtaactttttaatatataagca

SEQ ID NO: 20989 - DNA, 120 bp, synthetic construct
  source 1..120: mol_type = other DNA
tacacacctactaagtggtaggcagtctccaagggctacgttcacaagtctatattctagatggcatggggcagagcaagttagagggtggacaagaaaaataataaagaagaaaatgaa

SEQ ID NO: 20990 - DNA, 120 bp, synthetic construct
  source 1..120: mol_type = other DNA
taaagagtggagaataagaaagctggaaaaaaaagtatagagaggatagatttcatatatttttgcaataaatggcaacttccacataacacaaatcctgaaactttgtggaaatgttaa

SEQ ID NO: 20991 - DNA, 120 bp, synthetic construct
  source 1..120: mol_type = other DNA
tatgcagatttgtcacctctcttataaatcattttcattttcctgaaacctggagacaagaggcaaaatgaaacctaccatctcttctaaagggagggagggaggaaaggacagtctatt

SEQ ID NO: 20992 - DNA, 120 bp, synthetic construct
  source 1..120: mol_type = other DNA
ccccctcatcatctggcttaggaaccatttggcctctgacccacccatgttctatattcacagacaaaagaatagggagactgtggattaggatcacagggcctctataattaactctga

SEQ ID NO: 20993 - DNA, 120 bp, synthetic construct
  source 1..120: mol_type = other DNA
caaggacttacactacagctataaaagggatatgtgaagctatttagtcatgattttgtcatggagtagtgacctagacaactcaaattccaattaatacttgaaaagcccttgggacat

SEQ ID NO: 20994 - DNA, 120 bp, synthetic construct
  source 1..120: mol_type = other DNA
actattctactacaaattgttgatgcctttgggcatatacaggatggaaatagcttagaaaaaaaagtattctatttaacaaaactttacagtaatcggtacagtccctcatttagtcaa

SEQ ID NO: 20995 - DNA, 120 bp, synthetic construct
  source 1..120: mol_type = other DNA
ttatcagtttctgtctcaactattttgagatggcagtgaacagactaactatgatttgatgataaactaaagaaaaatatcacgctttgtcgaatataatcaatttggaattgaagaatt

SEQ ID NO: 20996 - DNA, 120 bp, synthetic construct
  source 1..120: mol_type = other DNA
gatcttgtgcagacactgagttacatcttgctccaaaggaacctcccacaaaggcatcaagatgtcaacactggatttactgtggtcagaaaactgtagaaatcaaactctttcaaattc

SEQ ID NO: 20997 - DNA, 120 bp, synthetic construct
  source 1..120: mol_type = other DNA
ggccaagaaagtacaggtgtgggtgtgtgttgtttactgtattttgcttgttttgcttttcatctgaatgtattgaagcaaggtagtagagcttcaaatggaccacaagccccatcacat

SEQ ID NO: 20998 - DNA, 120 bp, synthetic construct
  source 1..120: mol_type = other DNA
agtgaatgacaaagctttcctttcaagatgagaaacaaaccaaagatgtctactcactccactactatttaacattctcctggaggtcctagccaggccaatcgggcaagaaaaaaaaat

SEQ ID NO: 20999 - DNA, 120 bp, synthetic construct
  source 1..120: mol_type = other DNA
tacattttaaaaaagtgttacacttatttttctgcaggcctgaatacagaccctgcctgctctaaaagtcacgaggtataaagtgtgaacctatgctctgggggctcctgataagttcca

SEQ ID NO: 21000 - DNA, 120 bp, synthetic construct
  source 1..120: mol_type = other DNA
agcctgtttactctttccaggtcactgaagcaatgcttctttctagaattagagtcatacaactagaagagatggtctgactttgtacagaccatttgtacaccatgtgtagttccattt

SEQ ID NO: 21001 - DNA, 120 bp, synthetic construct
  source 1..120: mol_type = other DNA
gggaccttgggcaagttaccttgtgcctttgtttccttctctataaaatggggaatagtagaatccaccctacaggtaatgaagattaaaagagataatacatacctgtgaaaggctcag

SEQ ID NO: 21002 - DNA, 120 bp, synthetic construct
  source 1..120: mol_type = other DNA
acatttaaatccaaagggttcctctttccccactcagcttgctcttcctcctactttccctatctcatcacacaagctagatagcctcaaagcaccctcatccccttctacccagaaaat

SEQ ID NO: 21003 - DNA, 120 bp, synthetic construct
  source 1..120: mol_type = other DNA
aagtggtcctcaacctctttggcaccagggaccagttttgtagacgactttttttccatggaccaggggtggagagatggtttcaggatggttcaagtgcattacatttattgtagactt

SEQ ID NO: 21004 - DNA, 120 bp, synthetic construct
  source 1..120: mol_type = other DNA
catctaaaggtcagaacctacctgaccatcatcagtagctttttctattcttaaggaactcctgaatgtcgcttcttgggacccaacagagtaaacctctgagtctgacagtcttttttt

SEQ ID NO: 21005 - DNA, 120 bp, synthetic construct
  source 1..120: mol_type = other DNA
caactgaagtatctgaaacctactatgggttccacgtagagtcttcagttgtgatttctcgtaggacactaggaaagttgcaatttgcagctatggccacggggtagtgcaataattctg

SEQ ID NO: 21006 - DNA, 120 bp, synthetic construct
  source 1..120: mol_type = other DNA
atttcccagaactggtggtgatccactacagtaaagcctcttcctatctaaattgccaggtaactaattaacatgtcaatgaacactggctgaaattctgttctgtcacttcataacgca

SEQ ID NO: 21007 - DNA, 120 bp, synthetic construct
  source 1..120: mol_type = other DNA
ggttaatagatctacatatgtgagtagtaccaccgtaagtaagagcatatttgtctgctggactatgatgcacgactaagaaaagctaccaacctctactcaaaaccgtcccagggtcct

SEQ ID NO: 21008 - DNA, 120 bp, synthetic construct
  source 1..120: mol_type = other DNA
atacatttggttaaaaacctatccacacattaaggtgcacactccctgggttcctcctccctggtatcctctggggccccagcccagctggagtccccaagttctcggcgccctgaacta

SEQ ID NO: 21009 - DNA, 120 bp, synthetic construct
  source 1..120: mol_type = other DNA
tttctattcacagtcttcccaccacgtggttttcctcctttccatttcctcctgaaattctactccaggacccatttcaaatgccaccccaccatgaatatcttactttcaacaggatgt

SEQ ID NO: 21010 - DNA, 120 bp, synthetic construct
  source 1..120: mol_type = other DNA
tttttaactcaatttttcctctttccatcctccacccaagtcccaaatatggtctcttttctgaatcaccagtgttgaaaacttcctttttcatgtgtgttcttgtcttaatttcctcac

SEQ ID NO: 21011 - DNA, 120 bp, synthetic construct
  source 1..120: mol_type = other DNA
cagtcaccactaataaattccaatttgttcaattggaaaatgatgtccatcaattagaaaaagttcttagggattaagattctcttttgccattaatctgtacctcctccttcctccttc

SEQ ID NO: 21012 - DNA, 120 bp, synthetic construct
  source 1..120: mol_type = other DNA
atataagcttttgtaaaatgtaattctacatctgcaaaactagaaaccctcccggtcaagccaaactgtcctagtatattgtgatcaagaaagtctacatgccttcataagccaaaactc

SEQ ID NO: 21013 - DNA, 120 bp, synthetic construct
  source 1..120: mol_type = other DNA
gctctacaataagcgattaccagaggcagaacagagtgcagttaatatgcttgttccagcagatgttcatccccgtaaatattaaacataacacaagttcctccaggaatatgcaggcag

SEQ ID NO: 21014 - DNA, 120 bp, synthetic construct
  source 1..120: mol_type = other DNA
gcccctcgccgctcccgcccgcccgaagcggccggcacggggacttaccacagtgactcgaggtcccattcctggagcagggctaagtcgaagctgtccatggtgggaggtgtcagcgtc

SEQ ID NO: 21015 - DNA, 120 bp, synthetic construct
  source 1..120: mol_type = other DNA
aacatatttggactatctgtccctgcagccagcttccataatagctgattattgcccagatgtcaaaagagctgctcctagggttcagtctgctcatcagacaacagatatttattgaat

SEQ ID NO: 21016 - DNA, 120 bp, synthetic construct
  source 1..120: mol_type = other DNA
tcctcccaaaagcacatgaggtatgttgccattgtttttattttgcaggtgagtatgctaaggaacaggtaagtgtcacaaacccaagcatggcagatcaggaattggtatggtattact

SEQ ID NO: 21017 - DNA, 120 bp, synthetic construct
  source 1..120: mol_type = other DNA
tacagattctttttctgggtcagaaatggggactgatgagagagtcacagcactgttagtggagctcagagccatcatggaggctgacagacatccagggtcacctgacagctgatcaag

SEQ ID NO: 21018 - DNA, 120 bp, synthetic construct
  source 1..120: mol_type = other DNA
tactgctgatattcccaaagcagcattctcaaacacatcagaatcccttggggcccttgagatccatgttcctaggcctctagtgaatctgatgagacaagaactctagatgtataacca

SEQ ID NO: 21019 - DNA, 120 bp, synthetic construct
  source 1..120: mol_type = other DNA
tgcctaaagacacatagctaggaagcaattggagaaaccaagtgttaaggcatttcagtcctgacttctaagtttagctcttaacctttttgccagatttgtttcccagggtttcgacag

SEQ ID NO: 21020 - DNA, 120 bp, synthetic construct
  source 1..120: mol_type = other DNA
atgagacggactttataaatcttttgttagtagggcagtcactctctcatctcaccttatgtctgagattctggcccttcctatgctttggggaggtccattattttacactaaagggag

SEQ ID NO: 21021 - DNA, 120 bp, synthetic construct
  source 1..120: mol_type = other DNA
ggctggaaatgagttattctgaatagccagagtttctcagagagcaactctttaagcaccaggagtttagtaactttcatggtgggaagagttctaagtgttgaaggtacttttgtcatc

SEQ ID NO: 21022 - DNA, 120 bp, synthetic construct
  source 1..120: mol_type = other DNA
cataagccgttaagtgcctagctgaatatcagggtttaaagatgtggttaaaactgcttgtctggttgtgcattactaaattatttctggatccactagcttgtaaaacactgccctaga

SEQ ID NO: 21023 - DNA, 120 bp, synthetic construct
  source 1..120: mol_type = other DNA
attgtgtattcagataatgtttgcttctgctgtaagtcctctacctttttatcttttcacttccttctgttttgaatttggggaccagtccaggctccacagcctgggcacaacactgat

SEQ ID NO: 21024 - DNA, 120 bp, synthetic construct
  source 1..120: mol_type = other DNA
agagtagtttctggctgtaaactcagagccaattgccttaatcagatgccagggtaatttgaagtggaagaagtgcaaccgtaagaggacacacagaggctatttttaatatggctatgt

SEQ ID NO: 21025 - DNA, 120 bp, synthetic construct
  source 1..120: mol_type = other DNA
ctatgtctgtgtctatgtctgtgtctgtgtctctgtctgtgtctatgtctgtgtctgtgtctctgtctgtgtctatgtctgtgtctgtgtctctgtctgtgtctatgtctatgtctatat

SEQ ID NO: 21026 - DNA, 120 bp, synthetic construct
  source 1..120: mol_type = other DNA
tggttgtgtttgtgtctgtgtctgtgtctctgtctgtgtctatgtgtatgtctaggtctaggtctaggtctgtgtctgtgtctgtgtctaggtctaggtcttggtctcggtctgggtcta

SEQ ID NO: 21027 - DNA, 120 bp, synthetic construct
  source 1..120: mol_type = other DNA
ctggatatcagtaattgttacaatgtgtccttctaagcaatggctaacctttctactctggtaatgaggtctcagacttcctagttttaatgcagtctgatgtattgattttcctttgtg

SEQ ID NO: 21028 - DNA, 120 bp, synthetic construct
  source 1..120: mol_type = other DNA
tggtttaccctggaatatctgggaatgctaatagcctcaataacggctcaagagacttgtgaaagatacaatttaggagaatctaatgcatttcttctctcaaggctctcttcttccccc

SEQ ID NO: 21029 - DNA, 120 bp, synthetic construct
  source 1..120: mol_type = other DNA
tgggtatttcatgttctttctgagtccacccagagctaattggaatcaccatggtgtctacgctgtataaatgccaaatgggaaaggggatctattgtcccttgagatttttctagtttg

SEQ ID NO: 21030 - DNA, 120 bp, synthetic construct
  source 1..120: mol_type = other DNA
catcagcaatcagggctactgtttaccgttttgtaacaatactttgacagggattgtggaaattgctggaatacaaatctgatgtatcccattccgaagcctgtgagttaagtgttggga

SEQ ID NO: 21031 - DNA, 120 bp, synthetic construct
  source 1..120: mol_type = other DNA
acaaggacatgtagtccaaggttgcatggtgagttcacagtcggattgtcctccctccaaactgaaactaatttgattttgatttcatattcaatatgcaataattatgttctatcagag

SEQ ID NO: 21032 - DNA, 120 bp, synthetic construct
  source 1..120: mol_type = other DNA
acaggcttccacttcaacctcccgatatttatccttacctaaaaatacgaagcttccagaaaagctacaaaagaggaggactatttctattgcaggtagtgaatatagttggagcagaaa

SEQ ID NO: 21033 - DNA, 120 bp, synthetic construct
  source 1..120: mol_type = other DNA
tcatggggcccaagggcaggtaaacaaaaagttgtaagtctgcaaatgtttaagtaattaaatttttacagtaattctaatatattttcatgaaagcagccatatatttattctggctat

SEQ ID NO: 21034 - DNA, 120 bp, synthetic construct
  source 1..120: mol_type = other DNA
acccacctggggagaattggtatcttcattatgttcaatcttctaattcatggacacggtttatccttctgtttatttaggtcttctttgattcctcatggcaaaccaaatccagcagca

SEQ ID NO: 21035 - DNA, 120 bp, synthetic construct
  source 1..120: mol_type = other DNA
ttacagaaaaattgagtagaaagtacagagggttcccatcccaccacctacacagtttctcctattattaacatcttgctttatcttggtacgtttgttacaattgatgagccaacattg

SEQ ID NO: 21036 - DNA, 120 bp, synthetic construct
  source 1..120: mol_type = other DNA
tgtaggttgatattgtctcacctagcttggtatctaaaaagcccatatggaagtgagtgttaaccgttttccttgacaccagtgacataattctgctgtgctagactttgctgcaagtga

SEQ ID NO: 21037 - DNA, 120 bp, synthetic construct
  source 1..120: mol_type = other DNA
tatagcgggccccttttggtatcgcattttattaaatatagcgggccccttttggtatcgcattttattaaatatagcgggccccttttggtatcgcattttattaaatatagcgggccc

SEQ ID NO: 21038 - DNA, 120 bp, synthetic construct
  source 1..120: mol_type = other DNA
atacagctgatatctatgtaatttgagaagtgtaaaaatggcattatgtttctcaatagggtcacttggggacataaaatgcctccttcctagggtggtgtgagggtgaccatcagtgac

SEQ ID NO: 21039 - DNA, 120 bp, synthetic construct
  source 1..120: mol_type = other DNA
tttggtgtggtggtttctggaaattttctcctttaatattaaaagttagaatttcctcttacttggtctgctactactacaaacacatcttgtgaatatgttctttctcttcgaccacct

SEQ ID NO: 21040 - DNA, 120 bp, synthetic construct
  source 1..120: mol_type = other DNA
cttttgacagttgaactgcaatgtgccttggagaggactttcttaggttgaatatatttaaggatcttagagtttcctggatctggattctttctcccacaaagggaagtttcctgctat

SEQ ID NO: 21041 - DNA, 120 bp, synthetic construct
  source 1..120: mol_type = other DNA
agtcagctttcaggctctggggagactgtgcattggctccctttgttctaggggaagccttccttctgtgctggaccacctgttctacagggtgtaggatgctgcttgggttcaggtgtt

SEQ ID NO: 21042 - DNA, 120 bp, synthetic construct
  source 1..120: mol_type = other DNA
ggtctgttcaggtggggaggattattgttccaccttagaatcacaggcgaagctaatcagtcatttcccgttgtatggtttacctgcctcccactctttgttcttgccactttaagaagc

SEQ ID NO: 21043 - DNA, 120 bp, synthetic construct
  source 1..120: mol_type = other DNA
atcaatcctgactgtgcactagtcacccagtgaggtgatgcctgggtccccaacaccctgaagcaggctgggagactctagaccttcattcatatatatatattttttttaacatttgaa

SEQ ID NO: 21044 - DNA, 120 bp, synthetic construct
  source 1..120: mol_type = other DNA
gcacaattaactgcagcatatttacttcatagccccttaacatgtcacttttaccaacaaagctttttccttcatattctaatcacaaaaatttctcaacaatttataacaatctgtaaa

SEQ ID NO: 21045 - DNA, 120 bp, synthetic construct
  source 1..120: mol_type = other DNA
cagctatgagtctgaattttgttccaccatttaccagcttcaatttttctcttaaccagtgatgagattaaataatatacgtagagcccagggcctgggtcataagaactcgtcaacaag

SEQ ID NO: 21046 - DNA, 120 bp, synthetic construct
  source 1..120: mol_type = other DNA
tgtggtggaactgagcttctgaaccaattcttctttagtaaattcagcataccataatggaggctctgcaacatgttgttccaagaattaattttcaaaatcatacattacagatgaaga

SEQ ID NO: 21047 - DNA, 120 bp, synthetic construct
  source 1..120: mol_type = other DNA
gcagcaactgaaaaaaatcttaaaacataagcaagtattagtatacatatgaaactaatccaaagccaactgtgattagttcctgtaaggaaagttaacaattgccaagaatggaaggtg

SEQ ID NO: 21048 - DNA, 120 bp, synthetic construct
  source 1..120: mol_type = other DNA
cttaaactggcattctttgacatgcatgttgtagtggtaagtacttcatttcatacagccacagttattaatactttgctaagggctacccagctgctaaaaactgctgttatctcatac

SEQ ID NO: 21049 - DNA, 120 bp, synthetic construct
  source 1..120: mol_type = other DNA
aggggtgttcacaaagcatcgttcatatcccaacattagtatcccacaaagagtctgcatcaagctaaacattaaaagaaagaaaaattgtgcttaactttaacaacaaagtacctaccc

SEQ ID NO: 21050 - DNA, 120 bp, synthetic construct
  source 1..120: mol_type = other DNA
cttagatagactcaaagcagatttaaaactgaagttagatcctgttgttgactcatcaaagtggaaaagattttttctcacagggctacttgccaatggagaagcatgtactgagctact

SEQ ID NO: 21051 - DNA, 120 bp, synthetic construct
  source 1..120: mol_type = other DNA
caggtccaaactccttttctttctttatataaccataatatttcaaattaagtaagatttcctatataacgtcctgcctctcatcattatcatcaaaataattccccagaggtgtaggtt

SEQ ID NO: 21052 - DNA, 120 bp, synthetic construct
  source 1..120: mol_type = other DNA
aatgagttctaggtacctggtgctgattttaaaatatgattcttaatttgttaaaaatttatctgctcccattttcgttaatacaaaacttaattcattaactctctcacctaaacaaat

SEQ ID NO: 21053 - DNA, 120 bp, synthetic construct
  source 1..120: mol_type = other DNA
gtagtgatgaagaatgtttaagtccatcttaaaaaatgacactgactagaactcaataaaccaaaatcaactgacaaaagccaaataaagaacacctaacctaataagaaaccccaaaac

SEQ ID NO: 21054 - DNA, 120 bp, synthetic construct
  source 1..120: mol_type = other DNA
taggtgactgactagaaaacagagcatcatataatgcagactgcccgcttttgttggcaaaagtttcaacaaccacttttaaaaaatcttgcttgccacgacttaagtttagcaacatgt

SEQ ID NO: 21055 - DNA, 120 bp, synthetic construct
  source 1..120: mol_type = other DNA
tttaaagaatgtgctatttcttcgcatctcttccatacctattgctcttaactgatacggcgaaaagaaataattttgacaaattatctcctggacagactgagattttatcataagata

SEQ ID NO: 21056 - DNA, 120 bp, synthetic construct
  source 1..120: mol_type = other DNA
gttcaaacgttttcctccttcttttaaagacaggggatatatgtgtgtttacttggagatgcataaaacatttcctgaagaacacacaagaaagcaataacattagtttctttgggggtg

SEQ ID NO: 21057 - DNA, 120 bp, synthetic construct
  source 1..120: mol_type = other DNA
ctagtggttcactgtattaactataactcctaggtacattatagaaataatgattcagtaaagaaatttagagcaatgaacttactgcaaaaagaaaaactacaatttatactaaagcat

SEQ ID NO: 21058 - DNA, 120 bp, synthetic construct
  source 1..120: mol_type = other DNA
cccaactctcaagaccaagccgcccattagtactctgtatttcattcccctctctcctttatcaatttctcctcttctggatgagatggatgaaaccctggcctctccctattgcaaaag

SEQ ID NO: 21059 - DNA, 120 bp, synthetic construct
  source 1..120: mol_type = other DNA
gaaaacatattacttcaaaggtgttcaaataaaagtgtcttggaattttctggaaatgaaccaaataaagattatatttgtgtcatttgaatgcaaaaaacacaaaagaacaccatttct

SEQ ID NO: 21060 - DNA, 120 bp, synthetic construct
  source 1..120: mol_type = other DNA
aaggtacaagagttaacagtcacagtgctgctagttacataatttatgtaccaccattttcctttcttaccagcatttccatcttcctttggatgcctttaaaagcctgcctcccagctg

SEQ ID NO: 21061 - DNA, 120 bp, synthetic construct
  source 1..120: mol_type = other DNA
gttgacttctaaaaaaaattaaaagttgttttacgtttcatacagaaatattttccaacattttttcaaaagtagtaaaaatctgccctaagtttatgttcaaatatgccattttcattc

SEQ ID NO: 21062 - DNA, 120 bp, synthetic construct
  source 1..120: mol_type = other DNA
taaaataagggttacttgaacacaagcactgcaatactccaacaattgatctgataactgagatggctagtatgtaactagcaggtggggagcacatacagcatgaatatgttggacaaa

SEQ ID NO: 21063 - DNA, 120 bp, synthetic construct
  source 1..120: mol_type = other DNA
agctcaagcaggcaaatgccttgtttaaagatatatagctaggaaggagcacagcccatgttatgtaaacaggacaatatctgattcaagcagtacttctttgcatgacagcagatgtca

SEQ ID NO: 21064 - DNA, 120 bp, synthetic construct
  source 1..120: mol_type = other DNA
ttcacatgttccaaagttactcactagttaatccatattccgctgaaatccccaggttctaatgtaaatgactttcaatttgggggaaaaaaagactctaagtgtaagagaggtggtcat

SEQ ID NO: 21065 - DNA, 120 bp, synthetic construct
  source 1..120: mol_type = other DNA
accgaggcgacgtaccgctccccgtaggccttgctgcaactcatcgcgccaccaacctggctcccgagatgcgtgagaccagcgctcagccccgcagcagtcgccaattccaagaggaaa

SEQ ID NO: 21066 - DNA, 120 bp, synthetic construct
  source 1..120: mol_type = other DNA
ggaaaaattcagctccactggtcctggctctaagtctactagcaaaatcttccagagaagtggaaaagccatcagccaatgtgttagactatcatttccatgaccttacacctatcaaaa

SEQ ID NO: 21067 - DNA, 120 bp, synthetic construct
  source 1..120: mol_type = other DNA
tgtatgacccagcaattgcactgcctgagtacatacctgaaagaattgaaaacaggcacccaaacatatatttgtacaagaatgttcacagtagcattactcacaaaagtcaaaaagtag

SEQ ID NO: 21068 - DNA, 120 bp, synthetic construct
  source 1..120: mol_type = other DNA
ctaagggtggaaataaaatacccccatatcgcattaccccgggggaccggagagcccctgactgaggccacctcccctcaaaagcctggacgcaggagaaggggaggcagtgaaaagggg

SEQ ID NO: 21069 - DNA, 120 bp, synthetic construct
  source 1..120: mol_type = other DNA
aaaaattccaaagccagtttgaggcttgattgagttcctttatgcaagggccaggcatataagtacacaataaacaaatggcagctctctcccctgtacctttgtaaagctgaacttagc

SEQ ID NO: 21070 - DNA, 120 bp, synthetic construct
  source 1..120: mol_type = other DNA
gcctacagctcgaattcatacctgagtcgaagttagtaaggagactgagccaggcccagctctgcttgcaaacttgccatgctttctcccctgggcctcagtgttctcttctgtgtcaca

SEQ ID NO: 21071 - DNA, 120 bp, synthetic construct
  source 1..120: mol_type = other DNA
agggcttgcaatcagaccttcttcggagccgaaccccaccttctcacccaagaaaggccttttagaggacaaagctgggatggttgagaaagtgtttggggagagacagggcctttttca

SEQ ID NO: 21072 - DNA, 120 bp, synthetic construct
  source 1..120: mol_type = other DNA
agccagtcacaaaaatccatatactatatgattccatgattatggaatatccagcatatgatcctctgtagagacagaatgtagattggttgctgcctaaggctgggggcttgggaaaga

SEQ ID NO: 21073 - DNA, 120 bp, synthetic construct
  source 1..120: mol_type = other DNA
tcagtttccttgtctgtgaaatggggatgcaggattaaatgagatgctattatacaccaggcactcagagcttgtggggcgtccacacagacctcaaagcctgtgatcatgaatgaaacc

SEQ ID NO: 21074 - DNA, 120 bp, synthetic construct
  source 1..120: mol_type = other DNA
aatacctttcttcctcacaagatgggagtttgcatttagtatgtacttagcacatatgtattcagtaaaaattctctctcttccttgacatccacaatgctttccaattttccgaacctc

SEQ ID NO: 21075 - DNA, 120 bp, synthetic construct
  source 1..120: mol_type = other DNA
cctgtccctggagtcaggcaaacctgggtttgagtgcaacgtggctgtttcctgatccagtgccccggtctctctgagcctcggctgcctcagatgggggtaggacattagctacctccc

SEQ ID NO: 21076 - DNA, 120 bp, synthetic construct
  source 1..120: mol_type = other DNA
ctttgaaatttgaccatctccctgctgctgtctttgcaattgcatgtacttgttcacaagttctcatggggttgggctgggggcaggggtggtttgtgctcctccgtcagttttctgtgc

SEQ ID NO: 21077 - DNA, 120 bp, synthetic construct
  source 1..120: mol_type = other DNA
gatgtgatgagtgacttgaaaattttaaatgtgagacttcatcattgctgttatcatcattactgttatcatcactgtcatgacattcaggacgcaaagcggctgctgccagccccatga

SEQ ID NO: 21078 - DNA, 120 bp, synthetic construct
  source 1..120: mol_type = other DNA
ttcctctttctcccggcttgttcccgacgcttgttcccgacggtgctcgctcctgggcccgtcctggcccgggctttctggccccgtagtacccgcgcagcctggttctcgggggcttag

SEQ ID NO: 21079 - DNA, 120 bp, synthetic construct
  source 1..120: mol_type = other DNA
agtacaaactgtaacatgtattctttttttaaaatcaatgccttttctcattttcttctttgaaataggtaaaaatatatccttagtagttcttcctaagtgtattctggaataagggat

SEQ ID NO: 21080 - DNA, 120 bp, synthetic construct
  source 1..120: mol_type = other DNA
tgtatattgtaatgttttatctattaatgtatactttattgtgtatgtacaatataaaattataaatgtatatttgcctttagcctcctcctacccccattatatatgtttctgatagaa

SEQ ID NO: 21081 - DNA, 120 bp, synthetic construct
  source 1..120: mol_type = other DNA
tttaaaacttgatgatgttattgtcttgaagggagcttgtcatgtggtatttctgaaagtaagggtatgtaggccctcagtgaggtggaagaataagaaggatggtatggtggtttcggt

SEQ ID NO: 21082 - DNA, 120 bp, synthetic construct
  source 1..120: mol_type = other DNA
agtacagtgtaatagataagaccatgttactattagaagtatgggtatcatcaaattaagatttttgattctaaaattattaggttccaagaccaaagattaaattaataaaaggtgaag

SEQ ID NO: 21083 - DNA, 120 bp, synthetic construct
  source 1..120: mol_type = other DNA
ttttccttttctcttttccttctacccttgcagggctctcataagtgcctttgcgtggtgtcacagttagataaaaattgcctgtatttttttttatgtctttgatctgggcatcccgag

SEQ ID NO: 21084 - DNA, 120 bp, synthetic construct
  source 1..120: mol_type = other DNA
ccttcagaaaatggtgagttttaaagtataagcattttaaaagaacattaccttaattttttaaaatcatgaactttttattgaaagtttttttgttctgaaaacagcagctttgtcata

SEQ ID NO: 21085 - DNA, 120 bp, synthetic construct
  source 1..120: mol_type = other DNA
ttaaatgctcttttgtgatttttattttttttttagtattctcccaaaacaccacctcgatgggcagaagatcagaattctttactgaaaatgattcgccaagaagtaaaggccattaag

SEQ ID NO: 21086 - DNA, 120 bp, synthetic construct
  source 1..120: mol_type = other DNA
tttaagaaaatttttgatgaagcaaaaacagcccaggaaaaagattctttgataacacctcatgtttctcggtcaagcactcccagagagtcaccatgtggcaaaattgctgtagctgta

SEQ ID NO: 21087 - DNA, 120 bp, synthetic construct
  source 1..120: mol_type = other DNA
atagaagttttttctgtttctaattttttgcgctttgcattaatggtggctggggatgggttgttttcagccatatgaatggtcttagattttatagtgttagctacccatagagtaaca

SEQ ID NO: 21088 - DNA, 120 bp, synthetic construct
  source 1..120: mol_type = other DNA
actactaaacagttttcaggtggagatggcaaagtggcatgggaagtttttcctgtttaaagtagacaccagaaacatctaggaatgttgcagaacagttgaggattactcaaatgaggt

SEQ ID NO: 21089 - DNA, 120 bp, synthetic construct
  source 1..120: mol_type = other DNA
atattcctgaattttcactgtgtctgaacttttgattaagtgccgttcactgtggacgtcttaactgcctgggacttcaggaacagcgtaggggcagggggttagtggaggctaccaatg

SEQ ID NO: 21090 - DNA, 120 bp, synthetic construct
  source 1..120: mol_type = other DNA
taatagtatttttcattcaggttgctacctattagtggatggtgaaattaatttggtggatcacattcagaatatttttttaaaatcaaaagaatacaagctgggctcagtgactcacac

SEQ ID NO: 21091 - DNA, 120 bp, synthetic construct
  source 1..120: mol_type = other DNA
gtgagagaccttgaaatagaaccatttctgatctcctgacccacagaaactgtgaaataaatatgtgttaaggtactaagtttgtagtaatttgttacgcagcagattgtaaataacacg

SEQ ID NO: 21092 - DNA, 120 bp, synthetic construct
  source 1..120: mol_type = other DNA
tcatggtgtctttccaggctcttgatagggtgtcactgcatgcaagccatgaatctgttttgagaatcctctccattttcccaaataaaaacctatcccaacagtgactatatcactcag

SEQ ID NO: 21093 - DNA, 120 bp, synthetic construct
  source 1..120: mol_type = other DNA
ctttcatggtttctgcaatgagaggaagtgtaatgattattttaatatttctattaaatatgtttaactgtatatttttatggcagctcttttatgttacacactgtctctttggggttg

SEQ ID NO: 21094 - DNA, 120 bp, synthetic construct
  source 1..120: mol_type = other DNA
gatgattaacccagtttccctgcaaggatgtgctcactgtgaacagatgtagtggttaccactccagatgtctgcctagcatttgagacaacctgtcacccctgcctctctctgggaact

SEQ ID NO: 21095 - DNA, 120 bp, synthetic construct
  source 1..120: mol_type = other DNA
agaaacccaggaaaaagcttcaaaaagggcagtcaggactaaggcaacttaatgaaatgcaaaataaatgaaatctgaagtttaaaaatctagattacaattctggtttctaactcagtt

SEQ ID NO: 21096 - DNA, 120 bp, synthetic construct
  source 1..120: mol_type = other DNA
ggactcatagggcttgtattcagttagatgacatgctttacaacagagatactgttttatttgtgtcacctacaacatataatctgttgattgaggtatgccgaatagatgaatggcaaa

SEQ ID NO: 21097 - DNA, 120 bp, synthetic construct
  source 1..120: mol_type = other DNA
aatgaggtatttccaccctggctcactgataaatcacccctcagaatatagtcatactgcttattgaggagttcttatgacccaggccctgggctctacatacgttatttaatctcatca

SEQ ID NO: 21098 - DNA, 120 bp, synthetic construct
  source 1..120: mol_type = other DNA
cctcaaagacttgaacatcctattaccttttttatatcattctttgcctcatttttctgatagtgttttacattatcttatattcctgaattttcactgtgtctgaacttttgttttgat

SEQ ID NO: 21099 - DNA, 120 bp, synthetic construct
  source 1..120: mol_type = other DNA
aaggaatcaagagcgagagaagtctgcagctaacctggaatacttgaagaacgtcttgctgcagttcattttcttgaaaccaggtagtgaaagagagagacttcttcctgttataaatac

SEQ ID NO: 21100 - DNA, 120 bp, synthetic construct
  source 1..120: mol_type = other DNA
tttgacatttacaagcatacaaggaagacactataatctctcttgcgttgtcacccatctctaagttttcaactcatggacaatcttttggcgtaaataggggagagttagagacttaaa

SEQ ID NO: 21101 - DNA, 120 bp, synthetic construct
  source 1..120: mol_type = other DNA
ttgaaaattcttaatgatgtactttaagcaaaaagaaaatttcctaggtaaaaggtctaagatgcaagaaagaaagacatgcaaaggaaacttaccaccatattacagatatggactgtc

SEQ ID NO: 21102 - DNA, 120 bp, synthetic construct
  source 1..120: mol_type = other DNA
gcaatatcgcttcctcctactttctagaagttcttcagattgtggaagacagacttctcagaattctttgccctcattccctcctccagaaattcatgcctttgtataatctcttcccct

SEQ ID NO: 21103 - DNA, 120 bp, synthetic construct
  source 1..120: mol_type = other DNA
tctcagttatccttcaactggcaaatgaataaactggtacagccatgcaattgaatactgctcagcaataaaaaagaatgcactgccagtacagcaacatggataattctcaaatgcctt

SEQ ID NO: 21104 - DNA, 120 bp, synthetic construct
  source 1..120: mol_type = other DNA
gtgtatatatgtttgcatctacatatatttgtacatctatatgacagatgtattttaaaagtttcatcttgaagtaaaagtacaacagcttgaagtgttgatagcaggccacagccctct

SEQ ID NO: 21105 - DNA, 120 bp, synthetic construct
  source 1..120: mol_type = other DNA
acaacagtgactatatcactcagcattggatctaaatataaaagtggtgctttcagtgtttttggcagatagtgttccataagctttccatcagaagggattttagacaccttagaggtc

SEQ ID NO: 21106 - DNA, 120 bp, synthetic construct
  source 1..120: mol_type = other DNA
ctcagcttatttctaattagcgataattaatactcttagtattaatacgagttaatttgtaattcttacaaaagagtgtgagataaatgagcatgtgctgtctttaatttccaaaggagg

SEQ ID NO: 21107 - DNA, 120 bp, synthetic construct
  source 1..120: mol_type = other DNA
agccacagcaacacgtgattgtaatgatgattgcatttctgaagactttttaaaagcatttttttggatagaagagttaaaatgttgtgaattcttgataaattgaataagcaacaaata

SEQ ID NO: 21108 - DNA, 120 bp, synthetic construct
  source 1..120: mol_type = other DNA
ggagtactatgtttggaaggaaagctgaaggtagggcagccggatggttagctttgcagatatgaggccagtgagaagaaaacagctagttcgatattttgcttaggattaagccctgat

SEQ ID NO: 21109 - DNA, 120 bp, synthetic construct
  source 1..120: mol_type = other DNA
tggtacctttgatcataaaaccaggtcatgttaaggtgacctctattgaagagttctatttagggttactgtgtgccaaccaccctcattaaaatagtcacagatgtaagtagaggaaac

SEQ ID NO: 21110 - DNA, 120 bp, synthetic construct
  source 1..120: mol_type = other DNA
ctgtggtgatggaatagtcctgtaacttgatagaggctgatgttacaggaagctgcccatgtgatgaaatgacagacacccgcacacatgcattgttgcaatgtcaggttcctggttttg

SEQ ID NO: 21111 - DNA, 120 bp, synthetic construct
  source 1..120: mol_type = other DNA
aagctaggctaatttatattattaaataggttttagcaaacacatttttttaagaaaatgcagagtagccatcagaccagctcaagattattgacctcattcaaagttgtgagcttagaa

SEQ ID NO: 21112 - DNA, 120 bp, synthetic construct
  source 1..120: mol_type = other DNA
ctggtcagtgataatcaaacgttttaatctaagggcctcttaacactcttaaaaactattaaggttcccaaaggactttcatttatcagtatttaccatatgagaaattgaaactgggaa

SEQ ID NO: 21113 - DNA, 120 bp, synthetic construct
  source 1..120: mol_type = other DNA
aataaagttgagctttgacgggtctgaagtgatgaacatggtgtgtctgcacgcagttatttatggcaaggctacaaaacaggatgactgttttgtgaaacattttggggagaaaggcaa

SEQ ID NO: 21114 - DNA, 120 bp, synthetic construct
  source 1..120: mol_type = other DNA
tcctaacctatgaaacgtggtggtatccctgtcatgtcctttcaagtgtttgaaattcgtggtgtaatctgttttgattgacagtgtgattttatgagcaggggacctggatttctagtc

SEQ ID NO: 21115 - DNA, 120 bp, synthetic construct
  source 1..120: mol_type = other DNA
gtttccctgttatataaaccatgcttgagcaaggaaaggtagttgacaaagatcattggtaagtccattgtatgccactccggcagcattttcccatagaaacaaacatgagagtggggt

SEQ ID NO: 21116 - DNA, 120 bp, synthetic construct
  source 1..120: mol_type = other DNA
cttccctttggccacagaggcaagtatagaatgagatccttgtttcctaaccacttaccagaacatatatctgaagaaatgagcaccagtatttctgtctcaactacagtttctcttttt

SEQ ID NO: 21117 - DNA, 120 bp, synthetic construct
  source 1..120: mol_type = other DNA
tgtaaggagctcgaagactcaaggggagacattactataacatttctcacaagttagtaatgtgaaaaaggcttcttagcatttctctattaaaaaaaaaaaaggaacacccaaaataga

SEQ ID NO: 21118 - DNA, 120 bp, synthetic construct
  source 1..120: mol_type = other DNA
ccatagctttcatcagattcattaaaggcagggtatttgagccagaaaacaattcagcacagtcagaggccaggtcaccagtccctgtaggtgtactgttcactctagcctctacttatt

SEQ ID NO: 21119 - DNA, 120 bp, synthetic construct
  source 1..120: mol_type = other DNA
tgcccagaaagaggcagggaagaaatcagtgaggtgcttcagaagcttagggatgcttaaacattgcttgcacggcgcataagtgatggacttgcttgcacgttggccacttcactggtt

SEQ ID NO: 21120 - DNA, 120 bp, synthetic construct
  source 1..120: mol_type = other DNA
attttcatccttgtcagatgtgggtggacaatgtgactgtgacaagatcatgtgtattctccatgtgggatgtaaggcagttctgtaggacactgaattgagggcatgggaactcagaca

SEQ ID NO: 21121 - DNA, 120 bp, synthetic construct
  source 1..120: mol_type = other DNA
aatttctcatgagtcccagtatgcgtctcctgagaataagagcattttcctatggaaccacgatactttttgtaaatttttttttgccttgagacagggtctctctcgctctattgccca

SEQ ID NO: 21122 - DNA, 120 bp, synthetic construct
  source 1..120: mol_type = other DNA
gtataagttcagccatctcatcttttgtgattgaattatcagtttgtgccttatctcgttttcttgcctgtccttcctcttggggattcacctctgtccacttttcattagcatctctcc

SEQ ID NO: 21123 - DNA, 120 bp, synthetic construct
  source 1..120: mol_type = other DNA
ctaaagattaaacgtggacattttaaagacaattgactttgctgacagctaagaatatataatgtacactgcttttgtgaatgtctcagtaatgatacaggatgtgtacttttgctccta

SEQ ID NO: 21124 - DNA, 120 bp, synthetic construct
  source 1..120: mol_type = other DNA
ttgtcacttgagtcaatatcctcacagcattttttccactcccagactggacccagcctctggctgtgatgtttctttagccttcttaaatctggaacgtttccagagtcttttaaaatt

SEQ ID NO: 21125 - DNA, 120 bp, synthetic construct
  source 1..120: mol_type = other DNA
taatggatttaaagggaagaattctaatctcttaatagaccctggaaaacattttaaaggatttttgtctgattaactgtagcttttaaaatcctggtttttggtttccttgccacgatc

SEQ ID NO: 21126 - DNA, 120 bp, synthetic construct
  source 1..120: mol_type = other DNA
aggctgacgtggagcggtacatcgcctcggtgcagggctccaccccgtcgcctcgacaggtgagtgggtctcgaagagaccgacggcctcgacctggccgggcggcggcctcgcgctgct

SEQ ID NO: 21127 - DNA, 120 bp, synthetic construct
  source 1..120: mol_type = other DNA
agaagctattaaaggtggatgtgcgcagaatcttgagtcagtttgctttggcttgaataatcacagcactgtcgtttataagctgggtatttggggccagttacacttttcatccataga

SEQ ID NO: 21128 - DNA, 120 bp, synthetic construct
  source 1..120: mol_type = other DNA
tgtgaagaatatgaagaggttagtattctcccccagtttggcagaggctggccatctgtgaactgcccatgctttctagaatgtcggagttttggagtgtgatgatgcgtctgtatatca

SEQ ID NO: 21129 - DNA, 120 bp, synthetic construct
  source 1..120: mol_type = other DNA
gagaacagctgatcagatgggtttttggaggattttagggggagggagattcatttgactgtgcaagatgggcgacagagtgagactccatctgaattaaaaaaaaaatttagaactgca

SEQ ID NO: 21130 - DNA, 120 bp, synthetic construct
  source 1..120: mol_type = other DNA
atagtgtgtgataagtgcttagttgagatggacaagacattaaatttgtgggtggaggacacaaacaggaaacatgtttcgattgacggcaacctggtttgatactattcatcgttttgg

SEQ ID NO: 21131 - DNA, 120 bp, synthetic construct
  source 1..120: mol_type = other DNA
gagccaggctgtggacctcgtttattacttgaagaattcaatatttatttctgcctttttgactccttgactgtaaaatactgatctgatctgtagagagaacagtacatggaccaggga

SEQ ID NO: 21132 - DNA, 120 bp, synthetic construct
  source 1..120: mol_type = other DNA
agcctttaaaaaaacttttaagtgaatgaaagtggcgtatttgaacatcaacttaggacagatttttactacttttgaaaaaatgttggaaaatatttctgtatgaaaagtaaaacaact

SEQ ID NO: 21133 - DNA, 120 bp, synthetic construct
  source 1..120: mol_type = other DNA
ctgctcccagctgggaggcaggcttttaaaggcatccaaaggaagatggaaatgctggtaagaaaggaaaatggtggtacataaattatgtaactagcagcactgtgactgttaactctt

SEQ ID NO: 21134 - DNA, 120 bp, synthetic construct
  source 1..120: mol_type = other DNA
tttttatttgattcatttccagagaattccaagacacttttattttaacacctttgaagtaacatgttttctctagaagtagaattttttaagggttggagtgataattttttaaccttt

SEQ ID NO: 21135 - DNA, 120 bp, synthetic construct
  source 1..120: mol_type = other DNA
aggtgtgaagtgtcagagtggagaaagtgagtattagtactaaaatggtattttgttttaggcagcaccagtttgatggttgagataatgcaaatgaaatcagttagcttggggttatga

SEQ ID NO: 21136 - DNA, 120 bp, synthetic construct
  source 1..120: mol_type = other DNA
tcagaagggatgaataaggtatataggatggtgtttttggtggcatcatcataaaactagacatagtggaatggtgctctttgggagcatgacttgtttaaaattgcacaagtgttactc

SEQ ID NO: 21137 - DNA, 120 bp, synthetic construct
  source 1..120: mol_type = other DNA
gtcaagcctaaaatgaatgttctaactgctatttcatattttattttttaaaatagtataatcttgagtgaaaattaaagttcatctgtcatcagatggctaggttcacatgtattagta

SEQ ID NO: 21138 - DNA, 120 bp, synthetic construct
  source 1..120: mol_type = other DNA
ttgacatttcactgagtcttgatgtgtttgaaatgaaggtgtgctctggtatgtaatgacaatatgtgaacaaacctgtggaattaaagttgaaatagtcaatttgatacagtggaaaat

SEQ ID NO: 21139 - DNA, 120 bp, synthetic construct
  source 1..120: mol_type = other DNA
cctttcctagatgacaactactgttaggagtttcttgggtgttcagaaatattttttgcatatgcaaatgtgcaatacattctttctctgcttttaaaaaatattgtgcctcaatgtggg

SEQ ID NO: 21140 - DNA, 120 bp, synthetic construct
  source 1..120: mol_type = other DNA
ttcaaaacaaaaagaatgatgtcaacattttgtttcttattttgtgtgctcttttcaacatatagatgacaaagggctttgacatgatgtttagaaaacttgtgagtaaaaggataggca

SEQ ID NO: 21141 - DNA, 120 bp, synthetic construct
  source 1..120: mol_type = other DNA
tcacgtcttccctttgccattctattcatcatgctttttttttttcataggttattgcatgaggatctctttaatttcctggttgtcccatttattccagtgctatcccatattatccat

SEQ ID NO: 21142 - DNA, 120 bp, synthetic construct
  source 1..120: mol_type = other DNA
gtgtaatagataagaccatgttactattagaagtatgggtatcatcaaattaagatttttgattctaaaattattaggttccaagaccaaagattaaattaataaaaggtgaagctggac

SEQ ID NO: 21143 - DNA, 120 bp, synthetic construct
  source 1..120: mol_type = other DNA
gtagatactgagaatattaaacctgtactcttctcatttgctacataagcaccggttttgttgtccagctgtattttttgggttggagggttaggtatgcagtaatcatgttatttcccc

SEQ ID NO: 21144 - DNA, 120 bp, synthetic construct
  source 1..120: mol_type = other DNA
cactgttaataatcatactctgataaaaacttcaacaaaaagtgtcttcattgcaagttatttccatagagatacctaaaaacagaattagagacaaaggccatgaacatctttaagtct

SEQ ID NO: 21145 - DNA, 120 bp, synthetic construct
  source 1..120: mol_type = other DNA
ttaagatatatataatgtgaattgtttatgttggcaaaactaatggcacaaggaaaaatttcaaacccttaagccaattttttaattttatttcaggtgctattcgagcacataatggta

SEQ ID NO: 21146 - DNA, 120 bp, synthetic construct
  source 1..120: mol_type = other DNA
ctgataattattcagcctgaaaattaaaaaaaaaaattagcacaaggctttgtaggtaagaccattatagatctttctatatacttaaggtgtgttttgtgtcaccatgaggtgtagatg

SEQ ID NO: 21147 - DNA, 120 bp, synthetic construct
  source 1..120: mol_type = other DNA
atacactgcttaaattaattgccttgttatttaatggtaatcttgttttctaaattcactagctctcacacataagatatgacagagaagaataatgagatgtttgtctcttaagatcat

SEQ ID NO: 21148 - DNA, 120 bp, synthetic construct
  source 1..120: mol_type = other DNA
aggtttggtgtgtctttttaaacttgggaatctaggtatatgctcttaaaaagtacttcttggggaattagaaaagatttctaagataagacattgattttgttatcttagcagtgtaat

SEQ ID NO: 21149 - DNA, 120 bp, synthetic construct
  source 1..120: mol_type = other DNA
ctgttttgttatttttatttttttttagtattctcccaaaacaccacctcgatgggcagaagatcagaattctttactgaaaatgatttgccaacaagtagaggccattaaggtaagtca

SEQ ID NO: 21150 - DNA, 120 bp, synthetic construct
  source 1..120: mol_type = other DNA
ttacagtgtgatcagcagtatttgcaacttaagagaatactgtgtggtggggaagacatttttgaatttgcacaaaaattttgaatgttaattctgtgtagtcatggcctatgacaatta

SEQ ID NO: 21151 - DNA, 120 bp, synthetic construct
  source 1..120: mol_type = other DNA
tctggttcaaattccagctgttattccctgcatccgtttctctcattttaagataggagctaatattgtttacctaacagtgtagatagtataaaaattaagagtttaagtgcattggac

SEQ ID NO: 21152 - DNA, 120 bp, synthetic construct
  source 1..120: mol_type = other DNA
tgtttaaaattatttgatttttttttcttccaatagaaagaaatgcaggagttgaaactaaatagcagtaactcagcatcccctcatcgttggcccacagagaattatggaccagactca

SEQ ID NO: 21153 - DNA, 120 bp, synthetic construct
  source 1..120: mol_type = other DNA
cactccggtggtgtaactccaaagcacttgccagtataatacattgctcccaggcagcgagaaataacaaaattgttccttttacgtacgacagacttctgaaatggtagtagtagtagt

SEQ ID NO: 21154 - DNA, 120 bp, synthetic construct
  source 1..120: mol_type = other DNA
gacactgtcctagttttatagggtattcagaatattcagtttatgctcttaccactagtatctgatagtgccattttcgcactttgctaatgctgacttactggtttataaaatcctttg

SEQ ID NO: 21155 - DNA, 120 bp, synthetic construct
  source 1..120: mol_type = other DNA
atgactattggtagttttgccattaacatgggtgccttctagtcattttgtttcctggtaaaacacacaaaacagagggagcagacagtttgtacatcagcatgagtgttgatgtgcttt

SEQ ID NO: 21156 - DNA, 120 bp, synthetic construct
  source 1..120: mol_type = other DNA
atgggagtggtggtggtggatccttcatcgttctgttttaacagaaatagaactgtaatgcccttgctgacccactatgtggtaagtactttcaggcctgatacagctatatatataaca

SEQ ID NO: 21157 - DNA, 120 bp, synthetic construct
  source 1..120: mol_type = other DNA
agttcatgcttagtgcgaaatgaagcaaatgctacaagatgtgttgcttgtcagaatccggataaaccaagtccatctacttctgttccagctcctgcctcttttaagtttggtacttca

SEQ ID NO: 21158 - DNA, 120 bp, synthetic construct
  source 1..120: mol_type = other DNA
ctctaaaccaactcataaacctattgcagaagctccttcagctttcacactgggctcagaaatgaagttgcatgactcttctggaagtcaggtgggaacaggatttaaaagtaatttctc

SEQ ID NO: 21159 - DNA, 120 bp, synthetic construct
  source 1..120: mol_type = other DNA
caatacggtaaaatggccaataaagcaaacacttccggtgactttgagaaagatgatgatgcctataagactgaggacagcgatgacatccattttgaaccagtagttcaaatgcccgaa

SEQ ID NO: 21160 - DNA, 120 bp, synthetic construct
  source 1..120: mol_type = other DNA
aagaatctgatgttactcaagaagaagagagagatggacagtactttgaacctgttgttcctttacctgatctagttgaagtatccagtggtgaggaaaatgaacaagttgtttttagtc

SEQ ID NO: 21161 - DNA, 120 bp, synthetic construct
  source 1..120: mol_type = other DNA
ttcacggtgaggtttcaaagagcaagagaacttagtttaagacatttcagtaactggaagatacttttatcatgctagggcagagcaaaagaactcggtacggtatacggactcatgctt

SEQ ID NO: 21162 - DNA, 120 bp, synthetic construct
  source 1..120: mol_type = other DNA
gacacccttgttggtttgttttttaaaatgtactgggatgctgatttgtaatgtacttcattgctctgctatttcaggtctgctcaatgaagacctatgttttatctaatgtttatgttt

SEQ ID NO: 21163 - DNA, 120 bp, synthetic construct
  source 1..120: mol_type = other DNA
gtgcctgtgcctcttaaaggttggtctgagacttgggtaacagtttaaaatcctaatgcatttctcaaagcttttgctatgctgctctgggtgttttttgtgcaggtaaagaggcattaa

SEQ ID NO: 21164 - DNA, 120 bp, synthetic construct
  source 1..120: mol_type = other DNA
catagagtctacatctgagtatctttttttacaatccttccttcgaaaacttgcggatctctcctttctttagtgccccccccattccttctgttttcctctgtcctccccttcctaacc

SEQ ID NO: 21165 - DNA, 120 bp, synthetic construct
  source 1..120: mol_type = other DNA
agatgtaaatatgggggtgtggggaggtggtgctgctctctctctatcagaggcacatcagggaacctcaaatgcttttgtggacgagactatctctgcgctgataagcaccttgttgtt

SEQ ID NO: 21166 - DNA, 120 bp, synthetic construct
  source 1..120: mol_type = other DNA
atactgaacaccgtaggcagttgagacatagtggcaaatgtttgcgtagctaaatgcagaaaaggtacagtaaaaatacagtcttatgggaccccatggtatatgcagtcatcatggact

SEQ ID NO: 21167 - DNA, 120 bp, synthetic construct
  source 1..120: mol_type = other DNA
atggaatggaatggaatggaatggaatggaaataacaaaattgtcttggggattagggcttagatgtagaaagcttaagtgtacacaaccttcagtctatagcacccgctgtacagcacg

SEQ ID NO: 21168 - DNA, 120 bp, synthetic construct
  source 1..120: mol_type = other DNA
ccccgactcctaccctgttctttcttcaggtttctgttgaaaagttatttggtaaaagaagagggcctgagcagtgattcttaagatggagggaaggaaacctaacacataatctttgca

SEQ ID NO: 21169 - DNA, 120 bp, synthetic construct
  source 1..120: mol_type = other DNA
tttaattcgcaaatttgcattgtaatatatgatattgaagatgttctgctaggatgctcacaggagcacttggccagaagttaggaggggaacaatttgtgggcaagcagaacgctgcat

SEQ ID NO: 21170 - DNA, 120 bp, synthetic construct
  source 1..120: mol_type = other DNA
tttatgcttggtgggtcagataacaccagttcacagtgggcagctctagttgcatggtaattggtggctcatggtcaagcatttagtctctaccaaggcccagtggcagaccaagaacta

SEQ ID NO: 21171 - DNA, 120 bp, synthetic construct
  source 1..120: mol_type = other DNA
cgtcccatattccggcatttttcctttaatctatgtttgcagggttgtgagttgtgctgaatagtatgaaatgtgttattagtggacgcaccactgttgacctcagagcatgtgactaga

SEQ ID NO: 21172 - DNA, 120 bp, synthetic construct
  source 1..120: mol_type = other DNA
ggctgattcatgttgtagtatgcattggtacttcattattttttatgcaaaagtaatattctattgtatggctataccacatttttctttgagacagagatctcactatgtcgcccaggc

SEQ ID NO: 21173 - DNA, 120 bp, synthetic construct
  source 1..120: mol_type = other DNA
atacacagtgctgaggcagaacgcaggttcgtcacagtgggcctccgtgggcggcgccgcacgctcgtcacagtgggcctccgccggctacgccgctgcttcagtggcttgcaggcactt

SEQ ID NO: 21174 - DNA, 120 bp, synthetic construct
  source 1..120: mol_type = other DNA
gtgctgggattgcaggtgttagcctggcattgagcaaggttttgtaatttaagcatacaagtctctcacctccttgtttacatttattcccaggcatttttttcttttagatgcgattgt

SEQ ID NO: 21175 - DNA, 120 bp, synthetic construct
  source 1..120: mol_type = other DNA
cataatttgcttgctactttctgttattgggcatccaagttttctcaacttttccactgttaataatcatactctgataaaaacttcaacaaaaagtgtcttcattgcaagttatttcca

SEQ ID NO: 21176 - DNA, 120 bp, synthetic construct
  source 1..120: mol_type = other DNA
gacgtggagctataaactgcttaaattaattgccttgttatttaacggtaatcttgttttctaaattcactagctctcacagataagatatgacagagaagagtaatgagatgtttgtct

SEQ ID NO: 21177 - DNA, 120 bp, synthetic construct
  source 1..120: mol_type = other DNA
ggttcccgagtgattgaagtgctacaatgtactaatcatactctggtctatgagttcattcccagattagctgtggattacatgtgtttcaaatgtatagctaggaatcgaaaagtggtc

SEQ ID NO: 21178 - DNA, 120 bp, synthetic construct
  source 1..120: mol_type = other DNA
aaatattcagtttatgctcttaccgctagtatctgatagtgccattttcgcacttttgctaatgctgacttactagtttataaaatcctttgccaatttgtaggaacaaaagtgatatca

SEQ ID NO: 21179 - DNA, 120 bp, synthetic construct
  source 1..120: mol_type = other DNA
gtacaatgataaagtaacaatctctgatttttttttaagtataccagttttattaccagctaaggtagctcttaatcttttattttaaagatacggtctttgagaaatgtgaaaagtgtt

SEQ ID NO: 21180 - DNA, 120 bp, synthetic construct
  source 1..120: mol_type = other DNA
ttatttttgacatttacaagcacaaggaagacgctataatctctcttgagttgtcacccatctctaacagttttcaactcatggacaatcttttggcgtaactaggggagagttagagac

SEQ ID NO: 21181 - DNA, 120 bp, synthetic construct
  source 1..120: mol_type = other DNA
gatattttttttttaaatcaaaagaatacaagctgggctcaatgactcacacctgtaagcccaacagtttgggaagaccaggcaggaggattgcttgagaacaggagttcagaatcagcc

SEQ ID NO: 21182 - DNA, 120 bp, synthetic construct
  source 1..120: mol_type = other DNA
ttattcttttgtcaaaaagtgtgtatatatgtttgcatttacatatatttgtacatctgtatgacagatgtattttaaaagtttcaacttgaagtaaaagtacaacagcttgaagtgttg

SEQ ID NO: 21183 - DNA, 120 bp, synthetic construct
  source 1..120: mol_type = other DNA
cttgcctttgacacctgtgcatatgttttaatgactagatccaaactgtgttgttcttaaatcaaaaattggataatttttaatatttatgtattaatcacacagtgtgctctctgaagt

SEQ ID NO: 21184 - DNA, 120 bp, synthetic construct
  source 1..120: mol_type = other DNA
ttttattgaaatgggtgattatgacaaaggccttaggagagctcggtccaggggagcaatagagaagaactcagagaaaaagacaggctttgttttcccaaacattttccttatatccct

SEQ ID NO: 21185 - DNA, 120 bp, synthetic construct
  source 1..120: mol_type = other DNA
gtggcaaggaaatctatttctaagtcctcctattctggttttgaaggactcaatttctggatccttttctctttgcctgaaaacatatttatattcacaatagtacttctctcacattgc

SEQ ID NO: 21186 - DNA, 120 bp, synthetic construct
  source 1..120: mol_type = other DNA
ccagtagtgagattgctggatcatatggtagttccattaattactgctaaaagctaaatatcagatttttatacgtataggtggcatacattcatcagaaatatatcacgcttcataaat

SEQ ID NO: 21187 - DNA, 120 bp, synthetic construct
  source 1..120: mol_type = other DNA
ttgaacctgagtcttctagtggaaagccatattgatgcatgagatacatgaaataattgtgggaggaaagggcagccctactcatttcactatcactaagatatgcttttcaagtaaaca

SEQ ID NO: 21188 - DNA, 120 bp, synthetic construct
  source 1..120: mol_type = other DNA
agagcctagtagctcatttggaaaggaaagctagattcagagatgacacaaaacagcccaaaaatgtggctgctgaatcaaaaacaaaaattcggatgaaataaaaacttttttgctaat

SEQ ID NO: 21189 - DNA, 120 bp, synthetic construct
  source 1..120: mol_type = other DNA
gctgaactaccaatgggggatgtacctagatggagtttcttaaaaatcagtcatattagggttggaacacatttttcatgtggcttgattctgccccgtgaagcacaggagtgatttttt

SEQ ID NO: 21190 - DNA, 120 bp, synthetic construct
  source 1..120: mol_type = other DNA
tgcagggattgtcatagtaatatctttaaaaaccttctaaaaagtgtgctagccccatcggttggccatttttctctcttagtattaagctgggtgtctttctcacagacaggaaggatc

SEQ ID NO: 21191 - DNA, 120 bp, synthetic construct
  source 1..120: mol_type = other DNA
ctcactataaccaggtattgaccttagtcactggatgctagatagacttttatgaacctaagcttatcagtagtttagctacaaggaaatctcttggaagatgtacattgttcagtagag

SEQ ID NO: 21192 - DNA, 120 bp, synthetic construct
  source 1..120: mol_type = other DNA
tctctgctcttaataaggcctggtgcgtgaactgctttgcctgttctacctgcaacactaaattaacactcaagtaagtgtacggttttgtccagtgtgaatcctaagactgaaaacttt

SEQ ID NO: 21193 - DNA, 120 bp, synthetic construct
  source 1..120: mol_type = other DNA
tggctgctggaaaacttaggccagtaagcatctctttgtttaaagtcctacaagacaatttgaaataattcattgttcatgccaaaattctaagtactgtttttcttagcaagtgtaaca

SEQ ID NO: 21194 - DNA, 120 bp, synthetic construct
  source 1..120: mol_type = other DNA
aggccagtctcttcctctttgtacagatgggaagctagagtgaaagaaactaattcaccatagtgcaggccaaggagaaaaggaaagaagcagagaacatcccttttcccctgagatgta

SEQ ID NO: 21195 - DNA, 120 bp, synthetic construct
  source 1..120: mol_type = other DNA
tctttggagatgctgcctgactctgggatgtaggttctgcagtatccagtggtgaaggtgtgggcaggctgggaggtaggaggaagaagaccaattccaggtccattctggaggtagagt

SEQ ID NO: 21196 - DNA, 120 bp, synthetic construct
  source 1..120: mol_type = other DNA
aggaagaaaaggtggagaaatacagaggttggcatttaagaaggcataatctaagtgttgactgccatgtgttctggatgtgaaatctggactgtttcctcatctgtcagttgaggacat

SEQ ID NO: 21197 - DNA, 120 bp, synthetic construct
  source 1..120: mol_type = other DNA
ttattactgagatgtgcttccctgcagattccttctggggaggcaagtagggctgccagtttcactggggccaaccctagagatcaggatatcatttgtttttcaaattttaacatttta

SEQ ID NO: 21198 - DNA, 120 bp, synthetic construct
  source 1..120: mol_type = other DNA
ttttgcctaagctgtatgagtttggtttccggaacttgcacccaaactgtccttactgaagtacaaatgacattataaacccgaagccctggagacaaatgtgacctcccttcgctcttg

SEQ ID NO: 21199 - DNA, 120 bp, synthetic construct
  source 1..120: mol_type = other DNA
actcctcgctgagatgttgcggcagccttttcttccaatgcggttgtggcaggagaatccacggatgtaatgttttcacctttttccctgagggtgctttctgaggaaccagtccttaag

SEQ ID NO: 21200 - DNA, 120 bp, synthetic construct
  source 1..120: mol_type = other DNA
ttttcccaggaaaaagaaaagcttcctcctattcagcagagtgaatttaaatgtccaaacaaagtgtggtgtcatcgctcagtctgcaaggacgttctgttaatcccgtggacgttttag

SEQ ID NO: 21201 - DNA, 120 bp, synthetic construct
  source 1..120: mol_type = other DNA
cactgtccactcacacgctcctcattcagtcagtcagtcaacaaatatcttttaaggacctgctttccttcaagagcaactgtgggtataacagtgaagaaaatattcaaaaattcctgc

SEQ ID NO: 21202 - DNA, 120 bp, synthetic construct
  source 1..120: mol_type = other DNA
acatcaatcaggtgaacattttcctctctggctacatagcagtaaagaatgagcaaatgaggcaggccagccccctagagtcctgccttttttttttttttttgcagtgtgatttggttt

SEQ ID NO: 21203 - DNA, 120 bp, synthetic construct
  source 1..120: mol_type = other DNA
aaagaaaaacatattttctggggagaaattcaagctgtcagctgcagaaattttcatgagtaatgagggtccccaagacaaaggggacgatatctccagggcatttcagagatcttcaca

SEQ ID NO: 21204 - DNA, 120 bp, synthetic construct
  source 1..120: mol_type = other DNA
ccggagatgggggaccactgtatactgtcttaggtatgctgaggaattgtttacttcgtatacatgtgataatgtgagaaagtttgcggagtttttttggaaacatactgaagtgtgtgg

SEQ ID NO: 21205 - DNA, 120 bp, synthetic construct
  source 1..120: mol_type = other DNA
agacatacatcacccatccttgcagcaaggggtatactatgtgggtggcggctaccatggtccagaccaagaacccaaatatctggaagataaaagcataaaagaaggggcttcattagc

SEQ ID NO: 21206 - DNA, 120 bp, synthetic construct
  source 1..120: mol_type = other DNA
ctttgattaactaagcccgcaattttaatgcagttgaatatgtcaatcttttcctctattgactatgttttttatcaagtttaagaaattcttctcacgcacaccaacatggcacatgta

SEQ ID NO: 21207 - DNA, 120 bp, synthetic construct
  source 1..120: mol_type = other DNA
gttgataaaatgcattcactcagactgcctcatttagaccacacaacaattctaactcccttggaaagaccagagaactaccattcgacaccttccactgcttactgccagctcacctgt

SEQ ID NO: 21208 - DNA, 120 bp, synthetic construct
  source 1..120: mol_type = other DNA
agccatttagagcaagtagatttcaagcacaactttggcagatccttttcttataagcaaacacacacagtcatatacaaattttccaagaggctgaactgaaacttgaaaggacgtctt

SEQ ID NO: 21209 - DNA, 120 bp, synthetic construct
  source 1..120: mol_type = other DNA
tggtcgacgttctcacaacaacctaatagggaccaaccatggaaggccagtagtaaaggagtttgaagttccctttcagaaaccaattaacaaccccaaagagacagtgggtaacataaa

SEQ ID NO: 21210 - DNA, 120 bp, synthetic construct
  source 1..120: mol_type = other DNA
ttgggataggtttttatttgggaaaatggagaggattctcaaaacagattcatggcttgcatgcagtgacaccctatcaagagcctggaaagacaccatgaaatcacctcaactcaagtg

SEQ ID NO: 21211 - DNA, 120 bp, synthetic construct
  source 1..120: mol_type = other DNA
acacacacgaaccatttttgtaaacagattctatttggttaatagaagtattccttccatcaacctatcgaagtccaaaccaactacgaagataggatgctcatccagaagaacgggaag

SEQ ID NO: 21212 - DNA, 120 bp, synthetic construct
  source 1..120: mol_type = other DNA
aaatattgttgacgataaggggatttaaaaaaaaattcttttaaaacagaagcttatatacaacttagaatctaaaaccaatagatttatgggaaaccttaaaactgaaccacaacaaac

SEQ ID NO: 21213 - DNA, 120 bp, synthetic construct
  source 1..120: mol_type = other DNA
atatgctgagttttaatgcgtgtgggggcagggtgaattaacatttgtgatgcaaggagaagagcaatctatacttaccactgtctatttgacattggggactactgctacactctaagt

SEQ ID NO: 21214 - DNA, 120 bp, synthetic construct
  source 1..120: mol_type = other DNA
ttatcaggcctctagaccgggggttctcaaggtatgggccccagaccagaagcatcagcaacaaattgctaaaaatgcagaatcttgggtcagaaattggggaccagcaattggaatttt

SEQ ID NO: 21215 - DNA, 120 bp, synthetic construct
  source 1..120: mol_type = other DNA
tctagatttttatttaaacttcagatttcatttattttgcatttcattaaattgccttagtcctgactgccctttctgaagcattttcctgggtttctggtaagctgactgcttattcca

SEQ ID NO: 21216 - DNA, 120 bp, synthetic construct
  source 1..120: mol_type = other DNA
ctctccttcattataaacaaaaacttagtatcatttcctagctaggagaaataacagtacaccataagatacagattcttgttccacttctgctattactcagtaaagaccccttgggta

SEQ ID NO: 21217 - DNA, 120 bp, synthetic construct
  source 1..120: mol_type = other DNA
ttctaattccccaagaagtactttttaagagcatatacctagattcccaagtttaaaaagacacaccaaacctaagacaaagcaagcaaatctaagcatttagacacacgcatcccttct

SEQ ID NO: 21218 - DNA, 120 bp, synthetic construct
  source 1..120: mol_type = other DNA
tgatacatgctacaacacagatgaaccttgaaaaccttgctaaatcaaagaagccagtcacaaaagaccacatactatgattccatttatgtgaaatgttcagaagaggcaaacctacag

SEQ ID NO: 21219 - DNA, 120 bp, synthetic construct
  source 1..120: mol_type = other DNA
cactttttaaaagaaaaatgttaaaggaaacacaaacacctgagcttaaggtttgctattgaaaagtaatttaaactccaaatattagaaatggttatgtcttaagttttctccctttat

SEQ ID NO: 21220 - DNA, 120 bp, synthetic construct
  source 1..120: mol_type = other DNA
ctaaaaaaaaaaaaaaagcctgcctccctcttaatttcctgctttaatccactcccagccaggaaatcagaatcaccaagcttctcatccctaggatagagccttagagcatcacatatt

SEQ ID NO: 21221 - DNA, 120 bp, synthetic construct
  source 1..120: mol_type = other DNA
attgccaagggctgggtggaggggaaatctgggagtgcatgtgactgccaacgtgaatggagtctctcgttggggtgatagagatattttggaattagattttggggaaggctgtaaaac

SEQ ID NO: 21222 - DNA, 120 bp, synthetic construct
  source 1..120: mol_type = other DNA
aatgtgctgccctgtccggcttgtttttgttgttttaatttttattttacttcccaggactctaaaagacttgctgacctattaacacacaaactagtgcccacttccctactccccatc

SEQ ID NO: 21223 - DNA, 120 bp, synthetic construct
  source 1..120: mol_type = other DNA
ccttaatttagaggatatgtttgtcaatgttgcaagataattccgagcatcaaatcactagaggtgctgagagtacaaaaagtatacttggccgggtgcagtgggtcatgcctgtaatcc

SEQ ID NO: 21224 - DNA, 120 bp, synthetic construct
  source 1..120: mol_type = other DNA
gatcagtgcgatttctcccctgaaatcctgatgttttgtgtcctctttccttatccccactgttttgtctctctcacatcagtttggatagaggcctatcaattttgttgctttttccat

SEQ ID NO: 21225 - DNA, 120 bp, synthetic construct
  source 1..120: mol_type = other DNA
tagagcacaggcagagtagattcagcataattcttaatggccttaggatttttgaaatagtaaatgaccattggcttcaacttaaagccactagctgcattagcccctaacaagagattc

SEQ ID NO: 21226 - DNA, 120 bp, synthetic construct
  source 1..120: mol_type = other DNA
ttccttctcttttcacttggatttcaccagggtgctcatttgaagcttagaactctgtcctcggcaaagaaagcctggcatacactgtacaaggtgttgactcatctttgtgttcctctg

SEQ ID NO: 21227 - DNA, 120 bp, synthetic construct
  source 1..120: mol_type = other DNA
gaaattgcaaagaaattctggcattttagagaacaactgaggatttgagaatggaaaagtgaacagcactgggagctcagaggaggtaaccagagggctagaaattctagaagcaaagcc

SEQ ID NO: 21228 - DNA, 120 bp, synthetic construct
  source 1..120: mol_type = other DNA
agtatgtctgcttctcaaatgtgttcataaactcttcctggtgccaagtccttttaacttacatttaatcactgctttctcctaagagtctgctggactgggaatgcaggcagtactgga

SEQ ID NO: 21229 - DNA, 120 bp, synthetic construct
  source 1..120: mol_type = other DNA
cttattgcttcctctgggatgtcaggagaccccctgagctgagacatgccccttaccatgagctgtggagtcagctagttactagacaaagggtgagaaaatggccttattcaaggaaga

SEQ ID NO: 21230 - DNA, 120 bp, synthetic construct
  source 1..120: mol_type = other DNA
cagagagtccagagaataccacttggcctccaggtgcatgccttccaagtctactctgcagacgcaaatgtcatgtgggtttttgccaaaatctcaatggaaacatttctatttgcttta

SEQ ID NO: 21231 - DNA, 120 bp, synthetic construct
  source 1..120: mol_type = other DNA
ccttctcctgtttaaggtgatcacatcataagagtgtctggcattgtcaccagaagtacaaacttattttagacaggacaactgtgacatctgaggaaatgctaaagcgctcttttgcca

SEQ ID NO: 21232 - DNA, 120 bp, synthetic construct
  source 1..120: mol_type = other DNA
ccccaggtttctggtgaaattccctatcattccttctattttcctggaaacattagacatagttattttaagttccagtatgataactccaatatctgaatcacacataagtctgtttct

SEQ ID NO: 21233 - DNA, 120 bp, synthetic construct
  source 1..120: mol_type = other DNA
tttgtttttgagggcaagtgagtccaatacaagcaattccatcatggccataaccagaagtctctagatagtaaacttttatcagaggcttgcaaaacagcaaaaaactagtaatgtaat

SEQ ID NO: 21234 - DNA, 120 bp, synthetic construct
  source 1..120: mol_type = other DNA
caggttctatagccggtattgaggctactctgacaagctagactgagtccctgtcattgtagagtttagagtgttgttgggggagacagatattacacaaataatgacacaaacaaatgc

SEQ ID NO: 21235 - DNA, 120 bp, synthetic construct
  source 1..120: mol_type = other DNA
acagaatgtagctgatggaacctcagagaaatggagttgaagacactggaaaaagatgaccctttacgtgccttacctgcagacctctaataacataggcatacttgtgtccttactgtt

SEQ ID NO: 21236 - DNA, 120 bp, synthetic construct
  source 1..120: mol_type = other DNA
tttcaagaaggaaaatgtagctaaaagcctcaccattgtagagatggagtgagatgaaaactgtagactccactgaacacagttgtgaggatgtcagtctactgggaggtggaaacattt

SEQ ID NO: 21237 - DNA, 120 bp, synthetic construct
  source 1..120: mol_type = other DNA
ggttagtattaacccaaagcaagcaactgtcagatatttactgggagcatttgaatgaactaaaaagaatgaaaagatcaaggagtctactcctgaaaatcagtttcaggtgtatttaac

SEQ ID NO: 21238 - DNA, 120 bp, synthetic construct
  source 1..120: mol_type = other DNA
ttgaagaggaaagaggacaacaatctatttaatcaaagagtgctctgtctcttcatcagagttgtagactgagtattttttaaatgtggctccgaattataaagggtcggggggtggtcc

SEQ ID NO: 21239 - DNA, 120 bp, synthetic construct
  source 1..120: mol_type = other DNA
ggtctgaaagatatgataatactgaaaaggtgtatgtattactaatttgcctaaagtgaataaattggtctgatcctttaagaacattattaagcattattttctgcattacccctttag

SEQ ID NO: 21240 - DNA, 120 bp, synthetic construct
  source 1..120: mol_type = other DNA
aattaagtcccaagagacagttaaggatagtaagtgctacagaagagaggaatggaccaaactaggacaaaatgagtagataggacatcacagagctatgccttgggttgggctgggaag

SEQ ID NO: 21241 - DNA, 120 bp, synthetic construct
  source 1..120: mol_type = other DNA
aagagaaaggtggtaaacactgaaaacataaagcagaatatggatgggtatcattcttgtagatgacagaaactatcatctgtcaaaactgatgtcttataaattttaagttgtttcttc

SEQ ID NO: 21242 - DNA, 120 bp, synthetic construct
  source 1..120: mol_type = other DNA
tgaatgcacttagtattactgagctgtaacttgcaatggttaagacaataaattgtgtgcattttaccacaactttttaaacttgggaaaaaaacagtatcactcaaggttcaagattga

SEQ ID NO: 21243 - DNA, 120 bp, synthetic construct
  source 1..120: mol_type = other DNA
tattttattatttattttatcacataaaaagcaaacagagccacagtcagtctttacaatctgcaacaatgaaaaaggaagcagatccacctttgaagtttatagcaatgggcgaggaag

SEQ ID NO: 21244 - DNA, 120 bp, synthetic construct
  source 1..120: mol_type = other DNA
tccctatatcccctagctctatgcctagggtacatgaggtactaaatatctattaattggtttgcagcaagaagaaaataatgctgcaaatctaaggacagaacaatacagaaaacagct

SEQ ID NO: 21245 - DNA, 120 bp, synthetic construct
  source 1..120: mol_type = other DNA
gatacagactgttttacagaagacataccctacatatagtcttgaatgagattaaagggtgatgagtcacattccagataataatctataatttataccttcttatatacttctattcac

SEQ ID NO: 21246 - DNA, 120 bp, synthetic construct
  source 1..120: mol_type = other DNA
ccccaggggatagaagttccttaaggaaaatgacaatgtcatctcattttgtaccccagagcctagcacggttttgagtcacagaaggtacttaataatttgctgaatgaaaggaggata

SEQ ID NO: 21247 - DNA, 120 bp, synthetic construct
  source 1..120: mol_type = other DNA
ccttaaggattgatagggaagaagggggaagacaggatgtcaattcttctcagacagcaaagttcttctacacatacatacttgcacatacatatacacacgtccttgaaacacagtaca

SEQ ID NO: 21248 - DNA, 120 bp, synthetic construct
  source 1..120: mol_type = other DNA
ctcatacagacattgccactaaatcagacaaacttttctcttggaattaaataattagagcacaaaaaaagtatcctgaacttcccttggcaactatcctttacctgatgattttttccc

SEQ ID NO: 21249 - DNA, 120 bp, synthetic construct
  source 1..120: mol_type = other DNA
tattaattctaaacaattaaagaaagacaattccacaaaacatgttgagaggaaatacacacctttctgatcaactttactttttgtacttctgaaaaggtgagttccaatggtaagctc

SEQ ID NO: 21250 - DNA, 120 bp, synthetic construct
  source 1..120: mol_type = other DNA
agaacattaataattgtgtcatcaaaagacaccactgagagagagtgaaaaggcaaacaagccctagggtggcaaagatagctgcaacaaacaaagctgaccaagggcttaggacatagt

SEQ ID NO: 21251 - DNA, 120 bp, synthetic construct
  source 1..120: mol_type = other DNA
tgcatggcagaagcagagacgggtgctgtgagttgaaagtgctatacagaatcttgatctacatgataacaaagagatttttctgtggtagatagctctttgacctgtgcacctatgatt

SEQ ID NO: 21252 - DNA, 120 bp, synthetic construct
  source 1..120: mol_type = other DNA
cagaattacatgaggtatgacaacccgtgaatattatggccttttttattctcttgtcacaagaactagatacctgtgcatccttccagggtaatcatattctcacctaagttaatatcg

SEQ ID NO: 21253 - DNA, 120 bp, synthetic construct
  source 1..120: mol_type = other DNA
agacgctaggatagctaatttgcattatacatcacttacgacaaagtttccaaattcaaatcctctgagcacggcaattcgatttcactgagagagatactattttctcttataatctgt

SEQ ID NO: 21254 - DNA, 120 bp, synthetic construct
  source 1..120: mol_type = other DNA
gaaaagtggaagctgataggaaatatcaatcaggagaactgtgaaattgttatctctcctatttgcagtatccctgatgtaataaagaccaaatataacattataaagtctgaagtaaaa

SEQ ID NO: 21255 - DNA, 120 bp, synthetic construct
  source 1..120: mol_type = other DNA
ggcaggggtcggtaaactatttctaaaagggtcaaatagtaaataccagcaactactgatctatgcatttgtaacaaaaaacagctacagacaataagtaaacaaatgggcatggccata

SEQ ID NO: 21256 - DNA, 120 bp, synthetic construct
  source 1..120: mol_type = other DNA
agcagaaaagattatcttcatgatggggttagacaaatggtttttttcataggaatagagaataaccataagaaaaaactgacaaatcagacattatttaacattctaatatcttctgct

SEQ ID NO: 21257 - DNA, 120 bp, synthetic construct
  source 1..120: mol_type = other DNA
atgcccaaaggaaatgctcattgaagtatttcagatgtcagagtttcagatgagggatgctcaaccagtaagtataatttcgagtattccaaaatccaaaaacgcttctggtcccaagca

SEQ ID NO: 21258 - DNA, 120 bp, synthetic construct
  source 1..120: mol_type = other DNA
tacaatttctagggacctgaggctaaaagagaaggcggtggtctgtgcagcacagaatcttaaaatggaagttcttaggtctttaagaggtatcctaatgatcaatattgccttcataag

SEQ ID NO: 21259 - DNA, 120 bp, synthetic construct
  source 1..120: mol_type = other DNA
actgcatggctgactgggagctgcagcttgctgccattacccaacaccatgagagcatcatactgccaggagtacaagaaaaaaattaaaattaaaattggaagtagtttcttctgaatg

SEQ ID NO: 21260 - DNA, 120 bp, synthetic construct
  source 1..120: mol_type = other DNA
ctaagcaagagaaattctggcttcacaaagtccaacaaatacatggtgtcaggggctcggagccaatctgcaatagatctggtggtggaggaaaacagtaaggcacactgttcaagtaga

SEQ ID NO: 21261 - DNA, 120 bp, synthetic construct
  source 1..120: mol_type = other DNA
aagagttctaaattattataaaattcctctgaataataactatgcttaaaattaacacatttaccaatgtcagtatgaacactagtattttccaattaacttcccagcttccagactttt

SEQ ID NO: 21262 - DNA, 120 bp, synthetic construct
  source 1..120: mol_type = other DNA
accacatttcaagtgaaacaatcatttaatgaaacatttctggtaattctgtacacatctcttggatggagttaaagatgggtcaatcagatactgcattttgtcacaaggaagatgcta

SEQ ID NO: 21263 - DNA, 120 bp, synthetic construct
  source 1..120: mol_type = other DNA
aaagttctaaaagttaaaaaaaggcattttacagaccatcgactcaatgaatattacacaaaatttgttttaaaacccatttataacaatgatctataaaaacaatttttaggcggggca

SEQ ID NO: 21264 - DNA, 120 bp, synthetic construct
  source 1..120: mol_type = other DNA
cagccggctacacatctacagcctaaagcagagctgcctgggccaatgctatgcctgtatgtatgtagcatcactgtggcaatagctatctgatacaattatactaaagaataatacatc

SEQ ID NO: 21265 - DNA, 120 bp, synthetic construct
  source 1..120: mol_type = other DNA
aaatactgcctgccactttcaagaagtacttttatgttgacaggcaaggtgagaggcactgagaatacagcagtaaactaaacaaacatggtccttgctctcatggacctaatgacttaa

SEQ ID NO: 21266 - DNA, 120 bp, synthetic construct
  source 1..120: mol_type = other DNA
aaataccatattttatatgactccgttcacatgaaaggtccagaaaaggcaaacccatagacacggaaagtagattagtggttggcaggaagtgaagtgaaggtgggggggggtgaggta

SEQ ID NO: 21267 - DNA, 120 bp, synthetic construct
  source 1..120: mol_type = other DNA
ccagtccccaccagcctgttcaggtgtcggacaaagacttccaatctttcctatcatgtttttcctactgctcttctgagaaatgttacttagttatgtgtctctttgagaaattgcttc

SEQ ID NO: 21268 - DNA, 120 bp, synthetic construct
  source 1..120: mol_type = other DNA
gcaggcagctttacaggtcactgagacatttggagatgaaatgtttatcttattatggcacctaccaaaagggggaagaaattagggagccctttctgacagccaagcaggcagcatcca

SEQ ID NO: 21269 - DNA, 120 bp, synthetic construct
  source 1..120: mol_type = other DNA
gatatttttctcaatcccttagctgtacctagggagacctttcgtttacctatgcctttttaatcatacctgaaagcccgactcctctgaggtagggatattttagctcacatgggaacc

SEQ ID NO: 21270 - DNA, 120 bp, synthetic construct
  source 1..120: mol_type = other DNA
taataatctagggggacatgcccatgacaaccctattttgcaaaatcctggaatagaacagtccattttcagaggttttcttcctgtcctttctaggtgtccctaatatatgggcatgga

SEQ ID NO: 21271 - DNA, 120 bp, synthetic construct
  source 1..120: mol_type = other DNA
tattccatgtactatgagacaaatggacttagaagtacaagaatgaagaaagaagagcaaatagagcaattaggagctactacaatagccagccaaggcacaaagccaggcactgggagc

SEQ ID NO: 21272 - DNA, 120 bp, synthetic construct
  source 1..120: mol_type = other DNA
aataaaatgttggattaatgtcataaacacattttaaatcatgcaaattcaattaaatgtattcagaaaaaaagatgcatgtatatattttttaaacccacccaagtatcacttgagtgc

SEQ ID NO: 21273 - DNA, 120 bp, synthetic construct
  source 1..120: mol_type = other DNA
attttctgataattaaacaaatataaaattataaatatgtggaaataaacttagtaaacatatatactaaaatgttaaaaggagtgatgcagaagagtgggagtactgcaagcgaccatt

SEQ ID NO: 21274 - DNA, 120 bp, synthetic construct
  source 1..120: mol_type = other DNA
ctctctctaggcattcaaaaaaaaaaagaaatttaaaattccactccgatggatgctaaccttctcaaaggaaaatacagtacttttggggtttttatcactgtgttaatttcagtctag

SEQ ID NO: 21275 - DNA, 120 bp, synthetic construct
  source 1..120: mol_type = other DNA
ttatatcccctgaatataagatgccactgataagatgtatcattatttcatgagaaactaagaaagaaaaagcactgccaattaaactatgacacctgttcactgaaatacacaactgat

SEQ ID NO: 21276 - DNA, 120 bp, synthetic construct
  source 1..120: mol_type = other DNA
atgaaacatgacaagagatagtgcacgtgttttctttcacctgttttccttttcctcgatgaactcgtggtcactgagctctgggtactgcactacgttgacacggacaggatgcgcact

SEQ ID NO: 21277 - DNA, 120 bp, synthetic construct
  source 1..120: mol_type = other DNA
taatgctcatcttaacaattaataagacgcgtacaattacaaaccccgtctggcatataatataaaagacaagctaatatatatacttagaaaaagccttaaaggaaaatgaagaacatt

SEQ ID NO: 21278 - DNA, 120 bp, synthetic construct
  source 1..120: mol_type = other DNA
agtcgattaactattgaggcaaaaaatgtttccttatatgagaataacacttattaaatattatgcaatatacaaatggatagaactaatccaatatttttcagcataggtatcctgtat

SEQ ID NO: 21279 - DNA, 120 bp, synthetic construct
  source 1..120: mol_type = other DNA
agtgctgaaagaactggatatccaaatgaaataataaaaaccttgacttaaaacctgacatgttataaaagattaacaaaatggattagagatctaaatgtaaaacatgcaaagaaaccc

SEQ ID NO: 21280 - DNA, 120 bp, synthetic construct
  source 1..120: mol_type = other DNA
agacaagaactcacccactgataaatacttggtggctcagacgtaaaaaatgatggatgatgcataaatcctgtttgacctttaaaattagataaatattcaaaaagacacgaaaataca

SEQ ID NO: 21281 - DNA, 120 bp, synthetic construct
  source 1..120: mol_type = other DNA
ggctcacaggcccttacaaaaccagtatcttcaaacaactctgtggtttacagagatgccctagttttctgagaaggtagatttcagaaacttatttacaaggtccctatatgatacaag

SEQ ID NO: 21282 - DNA, 120 bp, synthetic construct
  source 1..120: mol_type = other DNA
tccacctgcattcagctggtgtattcatctttccacatgtataagatgccggggctagtaatataatctaataatcaactgatttttatattcagactgattggactacattttccaaat

SEQ ID NO: 21283 - DNA, 120 bp, synthetic construct
  source 1..120: mol_type = other DNA
acaaggaaattttatggagttataaaaatattgtgtgtctttataggagtgtaggttacatgagtgtgcatatattaaaactgatcaaactaaacccaagctgtatttcatttttgtaaa

SEQ ID NO: 21284 - DNA, 120 bp, synthetic construct
  source 1..120: mol_type = other DNA
atagtgagcctatcttctaactaatacaactacataaaagcagttttctacaagttgctcttcttcaatttcccctggcataatctttgctgccccagctacttcacatgggcattgacc

SEQ ID NO: 21285 - DNA, 120 bp, synthetic construct
  source 1..120: mol_type = other DNA
attttatcctaagctttgactatgaggacaaaagataacaagggtttaaccatgcagtcctataaataaatagcaaagcaacttggcctcaagaattgatttccttattccttcctttat

SEQ ID NO: 21286 - DNA, 120 bp, synthetic construct
  source 1..120: mol_type = other DNA
aaacaggattactgtggccactggactgagaagagactggaacatagacaaaggacatgaaatacgaatcaaaaaataagaactataaataactgatgaaattttgaaaaaaacattccc

SEQ ID NO: 21287 - DNA, 120 bp, synthetic construct
  source 1..120: mol_type = other DNA
agtgttgggattacaggtgtgagccaccatgcccagcaggcatgtccatatattattatactgcacaatattccccaacagaagaacctcagggaacagaactagcacatccttcacctg

SEQ ID NO: 21288 - DNA, 120 bp, synthetic construct
  source 1..120: mol_type = other DNA
ccctcagttctggaactggggacaacagaacaacctgtaaaaagttgtaaatacgatacaaatgaattgttttctgagaaattaaggacaaggaaatttaactgtttcttttttgcatat

SEQ ID NO: 21289 - DNA, 120 bp, synthetic construct
  source 1..120: mol_type = other DNA
agatgacagggcaagactccatctcaaaaaaaaaaaaaagactaaactgtgatttgaggcagctgaggaactaagagcccaggaagaaaggacagtaatgaaaaagccaacaaatgagac

SEQ ID NO: 21290 - DNA, 120 bp, synthetic construct
  source 1..120: mol_type = other DNA
gctaaccggtctccttatctttaatcccaaaatacacctatttacaacacagatccaaaacctcataactcctttctcaaaatcctgtaatgccctgtcaattgcattcagaataaaacc

SEQ ID NO: 21291 - DNA, 120 bp, synthetic construct
  source 1..120: mol_type = other DNA
gttaactttttggcaacacctagtccttttcttacctcgtccaatgatccaaggagtttactaagaggctttggagtactaacgccatctagtggagtactgggccgaggcattgtgttg

SEQ ID NO: 21292 - DNA, 120 bp, synthetic construct
  source 1..120: mol_type = other DNA
cgcccagcccagaaggttttcagtggactttgccagatctctcagaggaatcactatctatggcagctccagttaagtaatgtatttcatagtaagactttaaagtcaaaattactcctt

SEQ ID NO: 21293 - DNA, 120 bp, synthetic construct
  source 1..120: mol_type = other DNA
aaggtacccatgcttcaatttcaaaactttaactttaaaaaaaaaaaaaaatctacctatactcattgaaggtttcccatctgtgacaggtttagagtaccaatgcatttaacagcagtg

SEQ ID NO: 21294 - DNA, 120 bp, synthetic construct
  source 1..120: mol_type = other DNA
ttgtttactcttttgtaacttcctttaatctatcgtatttcaaaatatgaaggtaaataaatgggcaaaagatctgaatagctattttacctaagaagataaatgaatggctaataactt

SEQ ID NO: 21295 - DNA, 120 bp, synthetic construct
  source 1..120: mol_type = other DNA
taccgtaactggagctgggactctactaaaaagcacaggaacttttgcccacataggtcagatgtaataaacacttttgaggcttgtgaatttttctctctataatagatacattaataa

SEQ ID NO: 21296 - DNA, 120 bp, synthetic construct
  source 1..120: mol_type = other DNA
tttgccttccatttcagataaaacgaggctctaaggcttgagctcaacctcctgccttacatatctgatcaaccttcacttctttatcccaatctcaccacttatgcacctttctggtta

SEQ ID NO: 21297 - DNA, 120 bp, synthetic construct
  source 1..120: mol_type = other DNA
gtacctcctctctgggttcaactctcagggccacacttcaccagtacctggcaatactggcatctctgtattcttgaaatgttcttttttgtattctgtatttcctgctgcttctcccat

SEQ ID NO: 21298 - DNA, 120 bp, synthetic construct
  source 1..120: mol_type = other DNA
aagtagtccctcctgtgtcaccatccttcagctatctgcctcttttgaggacagggacagtgacttattagactgttaactagcacacacattggcatataaattaacacgtgaattatt

SEQ ID NO: 21299 - DNA, 120 bp, synthetic construct
  source 1..120: mol_type = other DNA
taacgcaggagaatgagcacgactgcaaaataaacagaggagagagtacatcacagttagcaaggcaggcttatatgacacacactccaatgacacttccaaaaattccacagacagaag

SEQ ID NO: 21300 - DNA, 120 bp, synthetic construct
  source 1..120: mol_type = other DNA
agaacaaccaagccaaagagagcacaaaatttattactatcttaaataattaactctgaatttttaataaatttactttaggcatcaacttccttaaaatacattaaagatgagagcatt

SEQ ID NO: 21301 - DNA, 120 bp, synthetic construct
  source 1..120: mol_type = other DNA
aaagaaaagaaggaacaacaatcatgccaaaaaggggcacagccacatgcagcctattcgttgcacaaactgtgcccgacgtgtgcccaaggacaaggccattaagaaatttcatcattc

SEQ ID NO: 21302 - DNA, 120 bp, synthetic construct
  source 1..120: mol_type = other DNA
tgtgcaattcacagaaaagtcgtcaggaatccaccttgtaaagcccacaaggaccaaacacacccaccaaagcccatgtaaggagctgagtccttcaacactgaagacaaggccaggcgt

SEQ ID NO: 21303 - DNA, 120 bp, synthetic construct
  source 1..120: mol_type = other DNA
aagtaatacaaataagcaactctaagataaaatcaaatctaataaagaggagttgttcaatgtgaaattcctgccactggccaggatcagtaacaaaatgacaatgtgttaacaatagcc

SEQ ID NO: 21304 - DNA, 120 bp, synthetic construct
  source 1..120: mol_type = other DNA
tacaatgagataaatatttggaatcatcataagaaaaataaaatttcaaaaagaaacttactgtaggccttttcagacttatcctgtgatataatgaagtcacaccacaatgcctaaaat

SEQ ID NO: 21305 - DNA, 120 bp, synthetic construct
  source 1..120: mol_type = other DNA
tttgccaaggcaccaatcttttacctgaacagtcacaaaatagtgcccctgacaacagtctccctcctctccagtcaatcctatatatatattgctaacaaagcaatctcttctcaaaac

SEQ ID NO: 21306 - DNA, 120 bp, synthetic construct
  source 1..120: mol_type = other DNA
accatcaaaaagatcactggcttcaacactccaggacacaaatgctttcacatatgccctcaaatgttggaataatgattcagtttatcctttccaataaatagaatacagtactcatca

SEQ ID NO: 21307 - DNA, 120 bp, synthetic construct
  source 1..120: mol_type = other DNA
cttcatgttttataggtttttgctggcaataacaaattgaattacataaggacagagtgtttaaagattaccattaaagtgacaaagaagagtgtaaaaaaagtgatgatataaaaataa

SEQ ID NO: 21308 - DNA, 120 bp, synthetic construct
  source 1..120: mol_type = other DNA
ggctgctgctttaaatgctagtgacatgtgaaaagtaccttcacagcaacatctaggctagggtttgaccaaacaactgcgtacaatggcctagccaagctgacatataaaattaactat

SEQ ID NO: 21309 - DNA, 120 bp, synthetic construct
  source 1..120: mol_type = other DNA
gagactccatctgaaaaaaataaaaaaaacaaggtttattaagttcattagttcactctgtgaacaagtgctgactctaaggtgggcactgagctctggggacactggagggaacatgac

SEQ ID NO: 21310 - DNA, 120 bp, synthetic construct
  source 1..120: mol_type = other DNA
aagttgtgtggcacaaggcgggaagaaatctgaagtgtaagaattaaagactggatgcacggaacattaactttcaaaaaggacgagtggagggaagttagtggtagctaagttgtaact

SEQ ID NO: 21311 - DNA, 120 bp, synthetic construct
  source 1..120: mol_type = other DNA
agaaagatgtagcattacagaaagattcataactctacagaaagacgtagcattacagaaagattcataactctacagaaagacgtagcattacagaaagattcataactctacagaaag

SEQ ID NO: 21312 - DNA, 120 bp, synthetic construct
  source 1..120: mol_type = other DNA
cattacagaaagattcataactacagaaagatgtagcattacagaaagattcataactctacagaaagatgtagcattacagaaagattcataactctacagaaagaggtagcattacag

SEQ ID NO: 21313 - DNA, 120 bp, synthetic construct
  source 1..120: mol_type = other DNA
catcgctgggacaaactcggcagcggaggcaaagttatttcccctcccaggcagcgggattccgactggcaagatggtgcccagctctccgcgcgcgctcttccttctgctcctgatcct

SEQ ID NO: 21314 - DNA, 120 bp, synthetic construct
  source 1..120: mol_type = other DNA
cctcccgcctctctcccctgtccctcccgcctctctccaggtcagtgtccctcccgcctctgtcccctgtcccgcgcgcctctctccacgccagtgtccctcccgcctctctccaggcca

SEQ ID NO: 21315 - DNA, 120 bp, synthetic construct
  source 1..120: mol_type = other DNA
tatgagacattggtctttcctgggtctccatgagagctccaggtcacctaattagcttagagaacgtccccgccctccaaactccgacatttaaatttccaaccgaagtatcagaacact

SEQ ID NO: 21316 - DNA, 120 bp, synthetic construct
  source 1..120: mol_type = other DNA
ggatttactggtggctggatgtggacaatgagagaatagaatgaaccaaagctattgtaaacgtctagaaatcagatgaggacttgaccaaaggcattggcaatgagaaagtaggcacaa

SEQ ID NO: 21317 - DNA, 120 bp, synthetic construct
  source 1..120: mol_type = other DNA
ttagatttagaaactgatcagtgtcagagcgatcagacacaggaatgttaattcatgttcaaaaataataaccaggctagcatttgtttagcacttgctatgtgacaggtactgttttaa

SEQ ID NO: 21318 - DNA, 120 bp, synthetic construct
  source 1..120: mol_type = other DNA
gtataaggatgttaataatctttatattttaagagactatgaagtcaagtctggctaacttagatctggaagtttttagctgtggaaagcaattctattgtgtacaggtttcagcctgtg

SEQ ID NO: 21319 - DNA, 120 bp, synthetic construct
  source 1..120: mol_type = other DNA
ctccttataaaattctgaagtggtagagttaacattctgcttttaatttatctccaaaaaaatgtgaagaattcccaaataagattttctcatagaagattcatggattttgagtctgag

SEQ ID NO: 21320 - DNA, 120 bp, synthetic construct
  source 1..120: mol_type = other DNA
actaaccccctgcccctaccctgttcctaaagtcccaggcagttaagacgtccacagtgaacggcacttaatcaaaacaaaagttagacacagtgaaaattcaggaatataagacaatgt

SEQ ID NO: 21321 - DNA, 120 bp, synthetic construct
  source 1..120: mol_type = other DNA
tttgcaacatctgcaaatgtaaaagtgctacttgtttggccaaaaatcacaccacggcccttcttccggcccctaatatcctgagcctgtaagccagtatcattttcaagaggcttttcc

SEQ ID NO: 21322 - DNA, 120 bp, synthetic construct
  source 1..120: mol_type = other DNA
cttgcaagatgtctgtctgcatgaaagcaaaaagaaaaaataaaatattaaataaaaaaaaatcttagtctgaagtttaagtagggactttaattgactactgactctaaactgtgcggc

SEQ ID NO: 21323 - DNA, 120 bp, synthetic construct
  source 1..120: mol_type = other DNA
aactacatatcaaaaaattttaggctgtgcgcagcagctcacacctataatcccagcactctgggaagctcgagcccagttcaatgttatggtgagctacgattacgcaactgcactcca

SEQ ID NO: 21324 - DNA, 120 bp, synthetic construct
  source 1..120: mol_type = other DNA
atcgtgccattgcactccagcctgggcgacagagactccatctcccaaacatcatcatcatcatcatcatcatcatcatcataaataagctgggtgcagttggtcacacctttaattcta

SEQ ID NO: 21325 - DNA, 120 bp, synthetic construct
  source 1..120: mol_type = other DNA
aaactgcacaacaagggcaattcaaatgcaaaaatatttaccttctatttatataaatgttaactattcatttaaacaaaaactgcagtaacagtactgaaagaatgaggggcaaaccaa

SEQ ID NO: 21326 - DNA, 120 bp, synthetic construct
  source 1..120: mol_type = other DNA
gaactaggccgcgcgggtactacggggccagaaagcccgggccagggcgagcccacgagcgagcaccgtcgggaacaaaccgggagaaagaggaagagccggcgccaaaggtctcccgcc

SEQ ID NO: 21327 - DNA, 120 bp, synthetic construct
  source 1..120: mol_type = other DNA
ccttaatgaaagctcaaaaaaaaaaaaaaaaagacaaaccatcagtgataataaatgagttcaaagagattgtaccatacgaggtcaactaaaaaaaatgagatgtctacttatacacca

SEQ ID NO: 21328 - DNA, 120 bp, synthetic construct
  source 1..120: mol_type = other DNA
ctagcaaactgaaaccacaacgaactgtcactacacttttattaaaatggttataataagaagtggtgacaactcactaaagagtgagttcagccatgttacgggatatgagagcaacac

SEQ ID NO: 21329 - DNA, 120 bp, synthetic construct
  source 1..120: mol_type = other DNA
agtcatacatatgacaagggactcagatctagaatatgtaaacaactttcaaaacttaacagtaaacaacagacacacaatccaattagaaaaagagcaaacagtaagaccccagctcta

SEQ ID NO: 21330 - DNA, 120 bp, synthetic construct
  source 1..120: mol_type = other DNA
gcaatgctgcaagggacgtacttgaacattcatctttatgcctttatcttcctggtagttctataagatatagtgaaggaaggggatttattgttgttatagtctttattgtggtagcca

SEQ ID NO: 21331 - DNA, 120 bp, synthetic construct
  source 1..120: mol_type = other DNA
gggtcattggctgcacccagcctacccctcctcagggcagagatctggagcttctaccccagcaagttcattcagagggacgacctgcagtgtttctacatactcaacatgctcttcaac

SEQ ID NO: 21332 - DNA, 120 bp, synthetic construct
  source 1..120: mol_type = other DNA
gtgaggtcaggccattgcactgtgtgaaacccattaatgggttttcattgtacctcaaatgaaatccaaatgcaagctctgcaagcactagtctctgcatatttttcctccttctcaaaa

SEQ ID NO: 21333 - DNA, 120 bp, synthetic construct
  source 1..120: mol_type = other DNA
cagaagactaagttctatgagactagaggctttgatgcaccactgtccacactgctgttggcactatgcctgaaaaatagaaggctctcagtgaataatgcttgttgaatgagttcatga

SEQ ID NO: 21334 - DNA, 120 bp, synthetic construct
  source 1..120: mol_type = other DNA
ctgttcctcagctttcccttcagtgggatgatatcaactggacaacaggatgtgcgattcttttagttccagccttccaggatgttttcactcccctgtttgttgttgtaggatggtatt

SEQ ID NO: 21335 - DNA, 120 bp, synthetic construct
  source 1..120: mol_type = other DNA
ggtaaaaacatgctttggatctcaaatcaccccaaaacccagtggcttgaaacaaccaaaattttttcttatgattctgtgggttgaccaggattagctgggtagttctgttccatgtgg

SEQ ID NO: 21336 - DNA, 120 bp, synthetic construct
  source 1..120: mol_type = other DNA
actaaattaacagctgacagtagttggaggcgtcacctctgattgactgcatgttgacaggggatgctaacaggatgacagggaggggacaaagtgtaggggctttgggagtagggagtt

SEQ ID NO: 21337 - DNA, 120 bp, synthetic construct
  source 1..120: mol_type = other DNA
tgcagatccaaaaaggcggagctagataaagaggaaggggtggagctagaactggacacctcgggggtttcctgctttatggcgaagggtgagtgaggatctgccggagggagggagaca

SEQ ID NO: 21338 - DNA, 120 bp, synthetic construct
  source 1..120: mol_type = other DNA
gtcagggtggccttcccgtcgtccagggtgctgttgagcaagggcagcgggtagaggccctggggagcaaagagaagtcagcgcacagagacgatccaacaagccgaccttcctgcagac

SEQ ID NO: 21339 - DNA, 120 bp, synthetic construct
  source 1..120: mol_type = other DNA
acagaaagtcttccctggctttccctgcctgctctctttggtcctttcttttaaataagccaggacatagtctcagtaagcagaatataagtgcctgttggttattgaaaggaaagaaca

SEQ ID NO: 21340 - DNA, 120 bp, synthetic construct
  source 1..120: mol_type = other DNA
cttctaacctgggccatagagactctatggagaatgatgggaggtgatctacacagactcctccctcactgggttgatagctctgttgggaagatgttaacatccatcaggggaaaaaac

SEQ ID NO: 21341 - DNA, 120 bp, synthetic construct
  source 1..120: mol_type = other DNA
acagttgcctatcagatgcttaggggctcaaaacattactattgttgttgttgttgttttaccctaaagtaaatgagacaaaatagcaaagctaaatgaggaggaatttttaagttacat

SEQ ID NO: 21342 - DNA, 120 bp, synthetic construct
  source 1..120: mol_type = other DNA
aaggctcagcataaatctgtaacgtattagaaaccttcgaatgaatgagctatgtcttaaagtgttttttttttcataatatggttaaaaagccctagtaaatcttctcttagaagattt

SEQ ID NO: 21343 - DNA, 120 bp, synthetic construct
  source 1..120: mol_type = other DNA
tgactatcaaaaaagagaaaaaccttacattatgttctactagttaagttttcaaggacagtgttcactagtctaccatagaccctagaagagttacccaacacatagtagcactcaaat

SEQ ID NO: 21344 - DNA, 120 bp, synthetic construct
  source 1..120: mol_type = other DNA
gtacttttaagctgttaatagaatttgaagttttattgattgacttaggattatttgtaagaacagaagttgttaaaaataaggacatgtaggaagagcagagacgttctacctctaagt

SEQ ID NO: 21345 - DNA, 120 bp, synthetic construct
  source 1..120: mol_type = other DNA
ccatgaatacttttttttggtcaaattattagatcctctacttcatgacgccagtttttttaatactgaattttcttttgttgttcgtatgtattctaattgctttgatttgtcttttac

SEQ ID NO: 21346 - DNA, 120 bp, synthetic construct
  source 1..120: mol_type = other DNA
aatacattagaaactttcttagttaagcgactatgttttctccctttctctttccctttttcacctttttaaaaaccagtcgaaattttcttactttttcaaaagtaataatcattaaga

SEQ ID NO: 21347 - DNA, 120 bp, synthetic construct
  source 1..120: mol_type = other DNA
tattgagagctgggaatatggggattgattgtttaattttctttatgtttgtatctgaaattttctttaacaaaaacctttctcaaaaagatatcctgaacaataggtgaaatttgtgtt

SEQ ID NO: 21348 - DNA, 120 bp, synthetic construct
  source 1..120: mol_type = other DNA
ggggttttgatccttagccttttgaatatgttggattaattagtatcaaaattatttttgtcttttttgatatataagcaaaagccatagttgttaagcagagataaggaatactttgga

SEQ ID NO: 21349 - DNA, 120 bp, synthetic construct
  source 1..120: mol_type = other DNA
tagcaagtaacagaacttagtaaatactttgcgaatgggtaatgtgaaatctgaacttgcatagtaatgaacacaattcatccacattgaacaattagcggattaggagtaaactgagtc

SEQ ID NO: 21350 - DNA, 120 bp, synthetic construct
  source 1..120: mol_type = other DNA
cttttaaactttgtcttcctcatttattatttatttcagatccataaatggactaggacaaatcttagaaacacaaagatcaaggtactttaaaaaagctattcctattaataacaaatc

SEQ ID NO: 21351 - DNA, 120 bp, synthetic construct
  source 1..120: mol_type = other DNA
tctcacttataccatgagccattcctcagtatctgtcctcttcctgttagtgttctacaattcctttctccttaatttttctccgctttacaaaatgtcacacagacaagtgcataatac

SEQ ID NO: 21352 - DNA, 120 bp, synthetic construct
  source 1..120: mol_type = other DNA
tggggttgactattttaattacctgacgcaagtggaatcatgcattatttgtctttctgtgactggtttatttcacgtagcataaagtcaccaaggttcatccatgtttttgcatatggc

SEQ ID NO: 21353 - DNA, 120 bp, synthetic construct
  source 1..120: mol_type = other DNA
tgtagtttgtaaaaaaaaaataaagaaagaaagaaaaaagaaattgattgagattatttcagcagccagaagtgtgggacaggcagggcagttattcctccttctcagtttggaaactga

SEQ ID NO: 21354 - DNA, 120 bp, synthetic construct
  source 1..120: mol_type = other DNA
agtttgtattaaacctgttggaatggtaaagaaatttactgacatatttaaccatacaaaatagtgttgctaaaagactagtttttctctttattctgtgcatatgtatatatatgaatg

SEQ ID NO: 21355 - DNA, 120 bp, synthetic construct
  source 1..120: mol_type = other DNA
agtgatcactcagtttttgaattgctattggttgtaatagggccgagataacagctacttgcatttgtattcattttggttcacatttatgagcaggtttgccactatgtttgtggcacc

SEQ ID NO: 21356 - DNA, 120 bp, synthetic construct
  source 1..120: mol_type = other DNA
aaggatgacactgagagaacaaatcgattggtcctccttggtaagtctgaaaggattcacagttttaaaacaaagtgaaaaatatatttgaaagggatatcatgtgccactcaaacagat

SEQ ID NO: 21357 - DNA, 120 bp, synthetic construct
  source 1..120: mol_type = other DNA
aggaaagggagagagagaagcccttatagagtgggtgcatttcttgtatgtggggccactttgtaagaacaggatttttcaaactgggcccatactggtatgtgtgaaatcaatttagtt

SEQ ID NO: 21358 - DNA, 120 bp, synthetic construct
  source 1..120: mol_type = other DNA
ttctattccaagtcacctatctcctcactaagataggtgcatatctgattccctgctttggagaggctaatcagaaactcaaaacaatgcaacctttgtctctcacctacctgtgacctt

SEQ ID NO: 21359 - DNA, 120 bp, synthetic construct
  source 1..120: mol_type = other DNA
agacaaaagtgactatgccaccgtgacagattgggtaaaggtggtaaagatgctttcttggagggactctctgaaatagagaaaactgggtagaactgacgattgactataatcattgtg

SEQ ID NO: 21360 - DNA, 120 bp, synthetic construct
  source 1..120: mol_type = other DNA
taaatatcagaagtataaaatcatggttagagtgtattacactgacaggcaagcagtgacccttcaaaacgtgagggaaaaaaggttgcaatgtcaagagagtggtcagggaaggcctag

SEQ ID NO: 21361 - DNA, 120 bp, synthetic construct
  source 1..120: mol_type = other DNA
cttcatcgggaattcaagacaacctggtgattcattgaaatttgcctgtgaaagagaatctacatagacttcctgccacctcttgagatgtgacagttgctgaccctcccgccaccacac

SEQ ID NO: 21362 - DNA, 120 bp, synthetic construct
  source 1..120: mol_type = other DNA
aatgtcctaccttctctctacagcagacataaacgtgacccaaaaaagcttcaattttgccaagaagttctccctgcccctgtatttcgtctcggctgctgatggtaccaatgttgtgaa

SEQ ID NO: 21363 - DNA, 120 bp, synthetic construct
  source 1..120: mol_type = other DNA
ttccccaccccctccccccaggcagacagtgaagagaatcagaaaacatgattatgtgtcactttaatacaggaaatttaggtgttttttggtgtttttgtttttgttttctttccaaag

SEQ ID NO: 21364 - DNA, 120 bp, synthetic construct
  source 1..120: mol_type = other DNA
gaatgctaactctgcttgccagttacaagcgcatggactgtctaggaagcagccatagctttgtgtttagtgaaactcttactgtatcacttggtggaaatgcctcccccactccccaca

SEQ ID NO: 21365 - DNA, 120 bp, synthetic construct
  source 1..120: mol_type = other DNA
gagagtttctttgggaaatcaggacattcaaaaaatacttgtgtttattggggatttcaaatgtcatgcacatacccagggcaggtcacgcattcaggaaagatctgagaagaccctaag

SEQ ID NO: 21366 - DNA, 120 bp, synthetic construct
  source 1..120: mol_type = other DNA
tgtccagaacaggcaaatctacagagacagaaagattactgaacagaaagattacagacaaaaataacagatagtggttgtttagggtgggggggttgccggtgaagttgggaaggaatt

SEQ ID NO: 21367 - DNA, 120 bp, synthetic construct
  source 1..120: mol_type = other DNA
atattgactttggattgcaaatactatattgcggtgaacgaactttcaggcttattgtaaaacacagttcagaattttaggcacagaacggaaaggtcctgtggaggacctgctggccat

SEQ ID NO: 21368 - DNA, 120 bp, synthetic construct
  source 1..120: mol_type = other DNA
tagtaggaattcaaatctttgttgtatgaatgaatgaacaagaattaggagtatggtttttaaaaaaactgtgcatcagaaacaccccatacccagtgactcagaatctcaagggttgga

SEQ ID NO: 21369 - DNA, 120 bp, synthetic construct
  source 1..120: mol_type = other DNA
aattgcttggttatattgcaacttcaaattttttttcagtgttaggcttttcttgttttcttttggaaacagggtcttgctctgtcacccagtgcagtggctgagtcatggctcgctgca

SEQ ID NO: 21370 - DNA, 120 bp, synthetic construct
  source 1..120: mol_type = other DNA
agaatgtattctcaccattcttattggatgcagcattggaagttctagccattgctacaaggaaaaaataaataaggaaggaaggaaggaatgaaggatgaaaggagaaggcatacaaat

SEQ ID NO: 21371 - DNA, 120 bp, synthetic construct
  source 1..120: mol_type = other DNA
tttgtttttttgttttaccagaatagtttgagaagtgctagtgtagggagcagaaactgcttgcaggctgcatttccctttatggacccgtgagaaacatgcatcttgagcatccaaatt

SEQ ID NO: 21372 - DNA, 120 bp, synthetic construct
  source 1..120: mol_type = other DNA
aaatcataaaccctctttttgtcctacggaaggcacaggcaagaatttggatgacacatggtggtgcttctgcccttactagtgacctaaaaccaatctgccaaagtataatgattgagt

SEQ ID NO: 21373 - DNA, 120 bp, synthetic construct
  source 1..120: mol_type = other DNA
tataagccatgtctacacacctatgtatatataagccatgtctacacacctatgtatatataagccatgtctacacacctatgtatataaaagacatatctacacaactatgtatatata

SEQ ID NO: 21374 - DNA, 120 bp, synthetic construct
  source 1..120: mol_type = other DNA
ttagcctactataactgacagagtaacgaaaaagtattcaaacaggaattgggacacttgtgtccaaattgcctttctcacgtttactaactatgtaaccccagggatttactcaatctc

SEQ ID NO: 21375 - DNA, 120 bp, synthetic construct
  source 1..120: mol_type = other DNA
gggttttcattcaccctgtgctacacacaggatatgtttatgagctgagctctgtggaagcagagacatttcttaacctcccaatctccacatctaccttataaagatttggtaggtttt

SEQ ID NO: 21376 - DNA, 120 bp, synthetic construct
  source 1..120: mol_type = other DNA
tattaccaagtggagggataatctttttttttccctttccttttgtgctgctcttccaagatggcattcagaatttgaatttcaccagtggacacttgttgattctaatagtccctttct

SEQ ID NO: 21377 - DNA, 120 bp, synthetic construct
  source 1..120: mol_type = other DNA
acatgagattctcaccaggtgccacctccgacgctggagatgacatttcaacatgagattttcaccaggtgccacttccaacacgagatgacatttcaacatgagatttgagtggggtca

SEQ ID NO: 21378 - DNA, 120 bp, synthetic construct
  source 1..120: mol_type = other DNA
aatgccactgctatgtatgctaggtatatactcaaaagaatggaaaacaaagacttgtacatatacttgcgtgccaattattataccaacattactctcagtagccccccactccccgaa

SEQ ID NO: 21379 - DNA, 120 bp, synthetic construct
  source 1..120: mol_type = other DNA
cagcttccccaaattgtgatctcctatgtggcagtggttagaaacaaataaaattcttatctcttatccttaaagaaaatcgaaattaccacacatgtatttattcagatagctgttctg

SEQ ID NO: 21380 - DNA, 120 bp, synthetic construct
  source 1..120: mol_type = other DNA
tttactatgcaatttcttatcttgttgtacccaagcgagttagtgagaacgccacactatgagatgaatcaagagtcctttattaagccggcggccaaagagacggctaacgctcaaaat

SEQ ID NO: 21381 - DNA, 120 bp, synthetic construct
  source 1..120: mol_type = other DNA
cattttagctacaaatcagaaaaacatcatttagttgagtggctatcaactgctccattatctagcctgaaaaaggctctttatcacaggaagtaccattcataggatcggcacttccac

SEQ ID NO: 21382 - DNA, 120 bp, synthetic construct
  source 1..120: mol_type = other DNA
aatcctcctgccttctagtgcccatagaatactcacctttcctcgtttgtagttgctgctgctgaactgccttcctatgtaaccttctccttactacacagagatattaaggcattaaaa

SEQ ID NO: 21383 - DNA, 120 bp, synthetic construct
  source 1..120: mol_type = other DNA
taaaagaaaaagaccttcctctcagacaaatgttctatgtgaggaaaaaaatacacctgtttgcaaggtgacatttctttgagggctcactcatggcacagcctggggatacacagacca

SEQ ID NO: 21384 - DNA, 120 bp, synthetic construct
  source 1..120: mol_type = other DNA
aatagcagagaaaaggagtaagtgtcagccctgccatgtacaacgctgacatattttaaaagcaaacctttgttcaaaataaatcttaaccattttagagcactgctatttcttcactgg

SEQ ID NO: 21385 - DNA, 120 bp, synthetic construct
  source 1..120: mol_type = other DNA
gtgcttatacctttctagatttccatgtacaactgtgcactgcaaaacactaaggaatagcattcacttagactaggatgtaagcattactccatggagttgtgtgacatgctggcccta

SEQ ID NO: 21386 - DNA, 120 bp, synthetic construct
  source 1..120: mol_type = other DNA
agagctctcagttgtcacctgtccctcagtaacatggaggaagcataatcaattggaagttgctagatcagccacaactcaccctaaaaaagtgcttccgttgatttttagcttttttat

SEQ ID NO: 21387 - DNA, 120 bp, synthetic construct
  source 1..120: mol_type = other DNA
ttgcctttcctcagtcagccttactggaaaaatggcttatattcttgccatttacctccctctcagtccctaaccagcctaatttggctttagctttctactatcacaccagaattgaat

SEQ ID NO: 21388 - DNA, 120 bp, synthetic construct
  source 1..120: mol_type = other DNA
caaggtatagaggcaagaggatgggttttggaatcagacctgaagtggaatttcagttttgatactgcatgtcatgtgaccataagcaaattgctgaatctctttgacttggtagcctca

SEQ ID NO: 21389 - DNA, 120 bp, synthetic construct
  source 1..120: mol_type = other DNA
gaggagagttctgtagctactgaaccttgctaaaagcaaccagatgatgatgatgaggaggaggaggaggaggaggaggagagttctgtagctactgaaccttgccaagagcaaccagat

SEQ ID NO: 21390 - DNA, 120 bp, synthetic construct
  source 1..120: mol_type = other DNA
gttgaacacagagctttgatgtggcatagccccagtaaaaaggcccgttgtctaagtgtttatcacatggaactgacaggttgtggaggttactagtacttacagatattctcattttca

SEQ ID NO: 21391 - DNA, 120 bp, synthetic construct
  source 1..120: mol_type = other DNA
aagaaaagaaagagtgtgagagaaaagaaaagaaagggaaagaaagaaagttttcttaatgtattggagatttctccatttcactcagaatcaggagatctgagcctcagcttgaactta

SEQ ID NO: 21392 - DNA, 120 bp, synthetic construct
  source 1..120: mol_type = other DNA
aactctttgaagatgaaataacatgatgttttgaatttacttaaaaagatgggggtagtaggtagggatggagatgaaacaaacaggccatgagtggataccgctgaggctggggatagg

SEQ ID NO: 21393 - DNA, 120 bp, synthetic construct
  source 1..120: mol_type = other DNA
tttttcttcatcaacattcgtatgagaacatcaggaaagtgcttttgattttctcttggcaagacattttcctagagaagtagtccacagtcccaaccattagccccaactctgagggac

SEQ ID NO: 21394 - DNA, 120 bp, synthetic construct
  source 1..120: mol_type = other DNA
acttttgtcactagccctaggatattttccacctgtgtgggttctgaagaggagggctcaccttccttaaaatagactttcctcagaattacatagttataattagcttgctaagggtcc

SEQ ID NO: 21395 - DNA, 120 bp, synthetic construct
  source 1..120: mol_type = other DNA
gtatgaggattcctgtttctccacatccttgccaacttgtgatttccccttctttttgtttagccatcctagttggtatgaaatggtgtctcattgtggtttcgatttgcatttccctaa

SEQ ID NO: 21396 - DNA, 120 bp, synthetic construct
  source 1..120: mol_type = other DNA
tcaaacctagctgattatagaatttcctgggagactttaaaaaaaaaaaacacctcctgaataatattggtggagttggagaactgggactctttcagtggtgctcttctggtggttctg

SEQ ID NO: 21397 - DNA, 120 bp, synthetic construct
  source 1..120: mol_type = other DNA
tggaattaactaagcaaatttatctaaagcacctgacaccctttcaggcacacagaggttccaagatcttcaatgtgacgctttcaagaaaggcaactcaagttcagggcttctgaatcc

SEQ ID NO: 21398 - DNA, 120 bp, synthetic construct
  source 1..120: mol_type = other DNA
ttttgggatggaatgtcataggggacaactaaggccctgtaggttgattccagaatacactatccaggtccagggtgcagtggctataacttgcagatcaaacaattcacaccacttcag

SEQ ID NO: 21399 - DNA, 120 bp, synthetic construct
  source 1..120: mol_type = other DNA
tttgcttggaggatggtggtagctgttaaatgagtcagtggatctaagcgtcactaaatggtggttgtcactgggtcattatttgcataagaattcagaagcaggcatttatccagatac

SEQ ID NO: 21400 - DNA, 120 bp, synthetic construct
  source 1..120: mol_type = other DNA
gaccgtcttctgtgtacccactgtagctctgcttactaaaatatctgtaagccccagtcttcatagcccaatagaataaacagcgaaagcagaaagtttagctgacaaggatgtcaaaag

SEQ ID NO: 21401 - DNA, 120 bp, synthetic construct
  source 1..120: mol_type = other DNA
ggaggcttcacctttaattgtgctgaggacaaaacaggattcatcttggaagttctgcaccatctgagagacaaaagagagaacatgttccttcaaccacgagttcatcatttggaaagc

SEQ ID NO: 21402 - DNA, 120 bp, synthetic construct
  source 1..120: mol_type = other DNA
ttgtttggaataatctagtcctcaacaattaagtgtttagtccccaagccaagtgcccagcaaacagcagcattgattaaatgtgatgctaactcctctctacctttccccagtgaaact

SEQ ID NO: 21403 - DNA, 120 bp, synthetic construct
  source 1..120: mol_type = other DNA
actgatttccatctgcatgaaccccgaggaattagatttgagagtagcttcctctacagaagtttaatgtttgttcctggcaggcacccttgggggctataaacacaaactactttaatt

SEQ ID NO: 21404 - DNA, 120 bp, synthetic construct
  source 1..120: mol_type = other DNA
tgaaggggaaaactgggctgatatgtgcataatctacacagcagggacttctggaaggggtatggacgcgagatgggaaggaaagcaccagtctagtaattttctattttattttatttt

SEQ ID NO: 21405 - DNA, 120 bp, synthetic construct
  source 1..120: mol_type = other DNA
aaacaacatattctctaaacacagtaaaacgctttcatgctaaaaacactacaagcagggattagaagagaactcccgcaacctgataaagaccacctacaggctgggcacagtggctca

SEQ ID NO: 21406 - DNA, 120 bp, synthetic construct
  source 1..120: mol_type = other DNA
atgcagactggattggaagaactaaaactatctccatttacaaatgacttgatttggtatgtagaaaacactaaagaatgcatgcaaaaacttagaaccaataaacaagttcagtgaggt

SEQ ID NO: 21407 - DNA, 120 bp, synthetic construct
  source 1..120: mol_type = other DNA
ataattgtattttaaaatgcagaaaacttagaaaataagagggaaaaaggatgacgtggaggagtgagagaagaaggaggaggagttacaggaggaagaggagctggaggagaaggagaa

SEQ ID NO: 21408 - DNA, 120 bp, synthetic construct
  source 1..120: mol_type = other DNA
agttacaggaggaagaggaactggaggaggaggagttggaggagttacaggaggaagaggaactggaggaagaggaggagttggaggagttacaggaggaagaggaactggaggaggagg

SEQ ID NO: 21409 - DNA, 120 bp, synthetic construct
  source 1..120: mol_type = other DNA
acaagaagaagagtatgaggaagaggagttacaggaggaagagcagcatgaggaggaggaattataggagaaagaggaactggagaaggagaaattggaggagttggaggaggaggattt

SEQ ID NO: 21410 - DNA, 120 bp, synthetic construct
  source 1..120: mol_type = other DNA
ccggcgaaggagactctgatctgtaattatatccttccttcggtctctcattagtgcacactgttgctgaatacagataagcctgtatttgagaattctgtgcccgatcattgttattaa

SEQ ID NO: 21411 - DNA, 120 bp, synthetic construct
  source 1..120: mol_type = other DNA
atactgcatgtttaagaaagtacaagttcaaattgtggccagatgtacgctatggtaagggaatgaagtggttctctagtgcatatgcaatcctctagggacataggcagttgtgactgt

SEQ ID NO: 21412 - DNA, 120 bp, synthetic construct
  source 1..120: mol_type = other DNA
gagaaatattagcaatttatccccggttcaccttttacttctaaatgctagtcagattacaaaactgcctagatattttgcaggtcattgaaaagacactagagtttttgggtggaggac

SEQ ID NO: 21413 - DNA, 120 bp, synthetic construct
  source 1..120: mol_type = other DNA
ctgctataaacaaaggttgccatattatacaaaaaaagtcttccctccctaaaggggtccaatttttgggtcctgccaagtggccagtctgaaaagactggaaactgaacacacaaattg

SEQ ID NO: 21414 - DNA, 120 bp, synthetic construct
  source 1..120: mol_type = other DNA
tctagtgtctaaaagaatagaggcaatgctaagatgttgtaacacgtctgcaaatgaaatggaaatgattctacttttctcatatattttataaatctgtgagtgttaagagtaggtaag

SEQ ID NO: 21415 - DNA, 120 bp, synthetic construct
  source 1..120: mol_type = other DNA
ttggaaattcagttgcagggttaaaagtgaaggcctccatcgaggaaaataaactgaaaaaaataaagaaaaaggaagcaagtagatgcaaagggaaaataacaaaaatctcacaccagt

SEQ ID NO: 21416 - DNA, 120 bp, synthetic construct
  source 1..120: mol_type = other DNA
taggaaatttatctatatttttgttcattgcttctggattttgaatcattgttagtaatacttttgctgcttctaatttacatagaaattcagccttgtttttctctagtacatgtatgt

SEQ ID NO: 21417 - DNA, 120 bp, synthetic construct
  source 1..120: mol_type = other DNA
atatgtgtattttctcccaaaacatttcttattagttcattgcttatttgtcatgatttctgtgtccctcagtgtatcctgaggctgggcatggtggctcgtgcctctaatcccagaact

SEQ ID NO: 21418 - DNA, 120 bp, synthetic construct
  source 1..120: mol_type = other DNA
aggagtctacccctgggtaaataaatatacataggtatgtcatatgtatctgtatttatatttattggcctttctcagggctgttgactcacaggaactcaggagctggagaggcagcag

SEQ ID NO: 21419 - DNA, 120 bp, synthetic construct
  source 1..120: mol_type = other DNA
acactgtacttccccacccctctggagtcccagcagaagtgaggggtgactgcccctcgcacagccaacaccttggcattctctgcgttaccctctcccacttcagtcctttgtgtggcc

SEQ ID NO: 21420 - DNA, 120 bp, synthetic construct
  source 1..120: mol_type = other DNA
gttatttagttcctgctatagcctgaatccagatacggtgcaaacccagaattatgtatcttcacatgtaaggtgttctgtaacaacacccagggcttcctgatgtttcacaacctaaga

SEQ ID NO: 21421 - DNA, 120 bp, synthetic construct
  source 1..120: mol_type = other DNA
cacacctccacacctccgcatggcttgcctcccaaccctgctccactttcgcgttctcaaggagaccacctgcactcaaagccttgcctccagatggactttggaggacccaagctaagc

SEQ ID NO: 21422 - DNA, 120 bp, synthetic construct
  source 1..120: mol_type = other DNA
tttgtgggtagtgattctctgtaccatcaattttcaatcctagcagacccaatacccacccttccaccttttttcttttgagtttttaaattctcacagtaaaactgacttggggcgggg

SEQ ID NO: 21423 - DNA, 120 bp, synthetic construct
  source 1..120: mol_type = other DNA
aattatataaaactagttgttagatattttaatccttggccacatgcttaggatggcaaagcagtaagttaaaaaagagtgcatgcttccctctccctctccctcctcctccccctccct

SEQ ID NO: 21424 - DNA, 120 bp, synthetic construct
  source 1..120: mol_type = other DNA
tgtctccacaggcttcctggagaagaaccgagacgtgctgagcacagatatcctcaccctggtttactcctccaaaaacaagtttctgagggagatattcaacttggagttagcagagac

SEQ ID NO: 21425 - DNA, 120 bp, synthetic construct
  source 1..120: mol_type = other DNA
atgggtgggtggaatggtgaatgaatgggtgcatgggtgggtgcatgtggcagcttatataagggggtttggagtgggaatgggaatctggggggtccagagtttagataggagaagtga

SEQ ID NO: 21426 - DNA, 120 bp, synthetic construct
  source 1..120: mol_type = other DNA
ggaatttatgagtggtttgccattgttggggcatggagcttggattccatcctaagggaagtggggaaagttttaagcaagagaggatcttgatcatatttgacttccagaaagacctcc

SEQ ID NO: 21427 - DNA, 120 bp, synthetic construct
  source 1..120: mol_type = other DNA
gcagttgacattggctttggtgggaacatgtacaccacagaaataagcaaatgctgtgaattgggcttttcttcttgggggagctggttgataaacatttaccagcacaccactgagtat

SEQ ID NO: 21428 - DNA, 120 bp, synthetic construct
  source 1..120: mol_type = other DNA
cagcagtacagtccagcttcggctccgcatcttcctttctgttctaaaagccttttcatttctttttcttgccttattgtactgttccaaactttagggaggaggcatttctcctttact

SEQ ID NO: 21429 - DNA, 120 bp, synthetic construct
  source 1..120: mol_type = other DNA
atgaattcaattttattttatttttgaaaccaggtctcactccattgcccaggctacagcgcatggccagaggaccacagttcactgcagcctcgaactcctgggctcaagcgatcctcc

SEQ ID NO: 21430 - DNA, 120 bp, synthetic construct
  source 1..120: mol_type = other DNA
ggctctctttctggcttgacggaaagagaaacagcaaactttctggtgtttctgctattaaaggtactattcccatcatgagggccccaacctcatgacctcagctaaacctagtgatgt

SEQ ID NO: 21431 - DNA, 120 bp, synthetic construct
  source 1..120: mol_type = other DNA
tgctaagggtcatccatccttagtctcgaagaaatctcttcctgatctcttcaccaactctccccactactagagaattgagctactcccaaagatgtaagtaaacaggagactgtttac

SEQ ID NO: 21432 - DNA, 120 bp, synthetic construct
  source 1..120: mol_type = other DNA
gggcaaggcggcggcggaccgagggaggcctggcccggcagcggggagaagggtgcggcgcagcccgagtttcccaccttttctcctggcccagacgcggctggggcggacgggacctct

SEQ ID NO: 21433 - DNA, 120 bp, synthetic construct
  source 1..120: mol_type = other DNA
cgggcgcgcccatccgactcttcgaggggcggcagggccccatctgtgtctttcgctctcgagcccccagctagagttggcttcagcggaatacctactgtgcaggattattcaacaagc

SEQ ID NO: 21434 - DNA, 120 bp, synthetic construct
  source 1..120: mol_type = other DNA
cagcttcaggacacggtctttatgatctaaaaccttaagcatggagtctctggcttcactgatttgatccatcacaagtttacacctctgcatatttccctgaaacagaagacattgcat

SEQ ID NO: 21435 - DNA, 120 bp, synthetic construct
  source 1..120: mol_type = other DNA
acaaaaaaatgcacatcatatgattctatctatccattggttagttacctttgggaaaagatgttggtaactgttaaggtcaccacgaccagaccatttccttcccctcccacaggcctt

SEQ ID NO: 21436 - DNA, 120 bp, synthetic construct
  source 1..120: mol_type = other DNA
gctcaataaagcttgcttgcctgactttgggtctcctcatcctttctcttggctgaccttacagtaacattgtttcttgacctatacagtggttggacactgtttattttgagactatac

SEQ ID NO: 21437 - DNA, 120 bp, synthetic construct
  source 1..120: mol_type = other DNA
tcaggagcctagcagactttctgctaaatagacttccttccatcgcctctctctgcctttctttctcagcatagaagtggcaaaacaaagacaaaaccattgtatgtatttcatggtgat

SEQ ID NO: 21438 - DNA, 120 bp, synthetic construct
  source 1..120: mol_type = other DNA
ctctttgtcatttgaaatctttcaaaatttccaaagacagggagggaagaggttaatgagaatgtaactcagtggcacctgcctccctctcaactggtgtcatcttcccaaatactatca

SEQ ID NO: 21439 - DNA, 120 bp, synthetic construct
  source 1..120: mol_type = other DNA
tgagacaagacccgtgcttccgtgtgagttgggatgcggggcataagttaacacatattccaatatgtacaaaacaacctgcgctcaggcccgcgcacccaggaagcccatggtgaaggt

SEQ ID NO: 21440 - DNA, 120 bp, synthetic construct
  source 1..120: mol_type = other DNA
ggaaacctgcgcggctgctgggaacagagcatggccagccttttgccagggggtggggagcatggggaaatgcaaggagagccagggtggggagggctgagtgtctgttgtcagggaggc

SEQ ID NO: 21441 - DNA, 120 bp, synthetic construct
  source 1..120: mol_type = other DNA
cactacatccctgctctgttttttttcaggacgcagctacctctgtggagcaggtttgggatgctcatcccttgacagtcttgggtggacctgtcgtctgtcctgttttatcccccacac

SEQ ID NO: 21442 - DNA, 120 bp, synthetic construct
  source 1..120: mol_type = other DNA
ctggaggagcatcggtccgggaggtctctgggctgaggcggcgacagctcctctagttccaccatgtccgcgggcggagacttcgggaatccgctgaggaaattcaagctggtgttcctg

SEQ ID NO: 21443 - DNA, 120 bp, synthetic construct
  source 1..120: mol_type = other DNA
ttcaaaatgatggaaatctcaacagtatgagtatggcttggttaacgagcagtatgttcacagcctgctttatctctccttgctcttctcacctctcccttaccccgttccctatttccg

SEQ ID NO: 21444 - DNA, 120 bp, synthetic construct
  source 1..120: mol_type = other DNA
tacatatgtgcttgctttttagcatcattggactgtgtacttcagtgtgtttttgtagtagcaggtgatgatcttttctttccatatttagtgcttccttcaggagctctcgtaaggtag

SEQ ID NO: 21445 - DNA, 120 bp, synthetic construct
  source 1..120: mol_type = other DNA
agttccactgcagaggcagtggcagaaaggatttcatttgctcctggaagctctgtcccaggaactgcagagttgctactggcttgatagctccagtggtgggctggctagagacccagg

SEQ ID NO: 21446 - DNA, 120 bp, synthetic construct
  source 1..120: mol_type = other DNA
ccgatattctacatttctaatatttctatactcagttataagaattacatttatttataactgtcaaataagcactgtacccttctacactgtacacatctgtatctaggcattgctctt

SEQ ID NO: 21447 - DNA, 120 bp, synthetic construct
  source 1..120: mol_type = other DNA
cttcacaaaattgcttctgagtatcattttgttcgtcactagaagaaattttaattttcatgaaatactggagctgtccctaaaatgatgtacagggcaagatggcgccatcagatgtca

SEQ ID NO: 21448 - DNA, 120 bp, synthetic construct
  source 1..120: mol_type = other DNA
gcgggggggggggggggttatccttatttttaaaatatctaaatgtcattatttataattcaaaatagcaatttttattacttatgattttgtttgaaaataaaatgatctcgtaaattt

SEQ ID NO: 21449 - DNA, 120 bp, synthetic construct
  source 1..120: mol_type = other DNA
atatccttttctcaaagggaggataatgtcacacatgcagggcacttttacaaataaaagtcactgcattagcagcaccttccttttagcacaagggtcagcaaataagcacctgtgggc

SEQ ID NO: 21450 - DNA, 120 bp, synthetic construct
  source 1..120: mol_type = other DNA
cctaaagtggcattacctagcattttatggcaccattcgggattattccataataatgaaagaatagctctagggtttgcacctcttcaaaattcaatgtacagaattctgagttaacta

SEQ ID NO: 21451 - DNA, 120 bp, synthetic construct
  source 1..120: mol_type = other DNA
aggtcaacgagagaccacaaggcaggatatgtccttaaccttggtatcagtgactgacaatataaaactgtggattttcaatcacaggccatgattactctttaaccatgaatccagctc

SEQ ID NO: 21452 - DNA, 120 bp, synthetic construct
  source 1..120: mol_type = other DNA
acaacattaaacaaaagtttaaatttaaaagtttccatgcctctggctggccattttcactgcctttaagcctttgtgactcttcctctgatgtcagctttaagtcttgttctgttgaaa

SEQ ID NO: 21453 - DNA, 120 bp, synthetic construct
  source 1..120: mol_type = other DNA
gagatttctaacgttatttattttaccatggacgggtgaaaaccttgtaatacattgatgctactccaaggatgtgtgacatggaaactatagctgactactgcaaaagcttcctttgtc

SEQ ID NO: 21454 - DNA, 120 bp, synthetic construct
  source 1..120: mol_type = other DNA
ccctaaataaaaaaattaatataaagaatgtagcttattacaaagagccaaaacgattttaaaaatgcagacaattaccaggcaaaactgttaggaaagaaccatgtcaaactttttttt

SEQ ID NO: 21455 - DNA, 120 bp, synthetic construct
  source 1..120: mol_type = other DNA
accctttgtcttcttcttcttagaaaggcggttttaaataaagaactgaaggaatggaaagagttaagctaggaggatatctgggggaaaagcatcccagacacagggaactgccaagca

SEQ ID NO: 21456 - DNA, 120 bp, synthetic construct
  source 1..120: mol_type = other DNA
agaatgttattgtgtttgtgcactaacaccaaaggttccattctgcaagatatgattcttgtaataggcagctgtgttgcttttatgacctggttccctccctgaacagaaacgctgagg

SEQ ID NO: 21457 - DNA, 120 bp, synthetic construct
  source 1..120: mol_type = other DNA
aacactctttctcttttttcattttgttatttatatattgctttgtttaaaggaagaacacaaaaatgccctgctaaagggattctgtttggttgcaggctgcaagcggggaaaaaatca

SEQ ID NO: 21458 - DNA, 120 bp, synthetic construct
  source 1..120: mol_type = other DNA
ttctggcaaacacacgacctcgctgcatgttccttctgccaaacattcttcttctgcttctttacctagaaaaattcttctctctctgcatgcttaccttaaatcatacctactttttcc

SEQ ID NO: 21459 - DNA, 120 bp, synthetic construct
  source 1..120: mol_type = other DNA
aaaatatcttaaaatcttgagctagagatggaagtagctccgataattttcattatcatgtaaatcagatcactcaaggggccaaccacagctgggagccactgctcagggcaaggttca

SEQ ID NO: 21460 - DNA, 120 bp, synthetic construct
  source 1..120: mol_type = other DNA
gttatgtagggataagctaacactaatattcttcaaagaaagcaacttaaagcaaagtcattaaaaagacaaaaggattttcaacccctatttatgtttaatacagcatatttaatggaa

SEQ ID NO: 21461 - DNA, 120 bp, synthetic construct
  source 1..120: mol_type = other DNA
tgccagatgtgcaggtttgttacacaggtaaacacgtgcaccaagggggttggttgtacagattatttcattactcaggtgttaagcccagtacccattcattctatttcctgcttcctt

SEQ ID NO: 21462 - DNA, 120 bp, synthetic construct
  source 1..120: mol_type = other DNA
tagccaaccacagatagaaaaataaataatagaatgtgacaaattatttgcatctatgcaagaagcatattccttctcttcccaaggattattgcattactaatgaactttaactaaaac

SEQ ID NO: 21463 - DNA, 120 bp, synthetic construct
  source 1..120: mol_type = other DNA
acaggcgtaagccactgtacccggcctttcattcctcttctaacttaaatagaaaacagtatttcattcctcttctaacttacattccttcttctaccaggaacgctatcttttcctatg

SEQ ID NO: 21464 - DNA, 120 bp, synthetic construct
  source 1..120: mol_type = other DNA
tgggagtcagctgagctttcaagccactgagaagcctctggtgaaaaaaaaaaagcctcttaaaggaggactggggctaagcgtctggaacttgaggatgctgacagcctcctttgaaaa

SEQ ID NO: 21465 - DNA, 120 bp, synthetic construct
  source 1..120: mol_type = other DNA
gaacggcttcatttttctgcatgtggcttgccaattataccagcagcatatgttgaatagggtgtcctttcccattttcttgtttgctttgtcaaagattaggtagtctgatgcctccag

SEQ ID NO: 21466 - DNA, 120 bp, synthetic construct
  source 1..120: mol_type = other DNA
gttctagcataagtcttgaaaaatctagtaaaaatttgtaaagactataattgcacaaactccctctctcatgagtcacacagttaatccagaatactatttctaagttattggaaagcc

SEQ ID NO: 21467 - DNA, 120 bp, synthetic construct
  source 1..120: mol_type = other DNA
gactatctacaacatgattaaatttatctgacctgtcctgtatttccctcttttgtaattagtcattctactttaggacaacaatttgccatataagatcctctctcatataacatttct

SEQ ID NO: 21468 - DNA, 120 bp, synthetic construct
  source 1..120: mol_type = other DNA
cgcattagcccatttatgccagaggctgcaattttttgaatttttgcacgagtgaaaaatcaaaccttctaatgaccttgagcagtaggatgtaattaactccctcatgcttaccattcc

SEQ ID NO: 21469 - DNA, 120 bp, synthetic construct
  source 1..120: mol_type = other DNA
aaaaaaaaaaaaaaaaaagccacacacacacacacacagtcaccccctaaattttgttaagaatgagacaatgctgccactcatgcctggctcagaaggaggccaccctccagagattgc

SEQ ID NO: 21470 - DNA, 120 bp, synthetic construct
  source 1..120: mol_type = other DNA
cagagcatggggtgtgggcgggaggtgcaggccggagaaccgcagtgggtgtgggggccctgccctgctcaagattgcaccaggaggaactctggagtctggaaaagagaagagtcaccc

SEQ ID NO: 21471 - DNA, 120 bp, synthetic construct
  source 1..120: mol_type = other DNA
taactcacctacaccaggacatttctaccactctggccgagctgcagtgtcccacgtcaccaccaaacacagcaaggcgagccccaggggctcaggctccagcctccagcatgccgctcc

SEQ ID NO: 21472 - DNA, 120 bp, synthetic construct
  source 1..120: mol_type = other DNA
ttagccccttggctgatgcatagtttgcaaatactttcttccattctctgggttgtttcttcgttctactgatttcttcctgtgctttgcagaagcttttaagttttatgtaattacatc

SEQ ID NO: 21473 - DNA, 120 bp, synthetic construct
  source 1..120: mol_type = other DNA
caatttggatgccttttattgcattctcttgtctaattgccccacttaggacttccagtactatgatgaataaaagtggcgtaaaagtagccacacttgttccaggccttagaggaagag

SEQ ID NO: 21474 - DNA, 120 bp, synthetic construct
  source 1..120: mol_type = other DNA
aaaccccattcagattcagttcttcactgacaatgaggctctgggaggagagcccgatggccaggcaggcagcgtgcagggctcctcctggtgcttcagccagtcctggggctgccactt

SEQ ID NO: 21475 - DNA, 120 bp, synthetic construct
  source 1..120: mol_type = other DNA
acgggggatcctgctgccggcacccctgtgtcactcgtgtgagggccgtgtccccattgtgaaggatgaagagccaggccctctggacccgcgtcctcagaacactacgcactgccaccc

SEQ ID NO: 21476 - DNA, 120 bp, synthetic construct
  source 1..120: mol_type = other DNA
gacgcctgatagccagtgaggagccaggcacacaacttggaaataaacaagctttattttcagtttcaacaggtaaggcgatacctgcttcatcgtgtgcttttatgtaaatgccaaata

SEQ ID NO: 21477 - DNA, 120 bp, synthetic construct
  source 1..120: mol_type = other DNA
gaatcaatgtggttctgagggtgaagcccatgggtggtgcctgtgaacactctagaacaatcaacatagtggaagctggccccatcttgggtaaaatgaaactgcatgagaggcttggga

SEQ ID NO: 21478 - DNA, 120 bp, synthetic construct
  source 1..120: mol_type = other DNA
tccgttgatgcagacccagcgagcgcccaagggagcagaggccctggaaaggtggtttcctgaggggccatctggaaagcaggagggcttgggacacatggaacagcaggtcccgaggga

SEQ ID NO: 21479 - DNA, 120 bp, synthetic construct
  source 1..120: mol_type = other DNA
cgtccacactgccaggcagaacctgggctttaggggtacagaggtgaactctggaatccctggctatggcggtgtcatgatcccgtgggcatcagggactggggggaggctcaagaagat

SEQ ID NO: 21480 - DNA, 120 bp, synthetic construct
  source 1..120: mol_type = other DNA
agttgatggctgtgtttctgtgctgcgggagcggcagtgttgagtgtgcctggggaggcagggccggcctagggccccgcgccggctcacccttgttttcccgcttcagatgctcgatct

SEQ ID NO: 21481 - DNA, 120 bp, synthetic construct
  source 1..120: mol_type = other DNA
gtatagtggcgtgatgaaggctcactacagccttgacctcctggaccctgatgatcctccaaactcagcatcccaagtagctgggaccacacatgtgaaccgccatgcctaactttttga

SEQ ID NO: 21482 - DNA, 120 bp, synthetic construct
  source 1..120: mol_type = other DNA
gtggaaaaaaggccccgagagctggcttggccgtgagtccttggcggagggagggaaaggccgccgctgagctctgcgctgtcacagagcgtagctgttgagccctggcagctactcctt

SEQ ID NO: 21483 - DNA, 120 bp, synthetic construct
  source 1..120: mol_type = other DNA
cagcacaactcctgcacacacctcaccctccgtcccatacaaacagcccactctgctggccctggtgggcctggcagtcagggccaccccaactcttctgacagggttgaagaatatgag

SEQ ID NO: 21484 - DNA, 120 bp, synthetic construct
  source 1..120: mol_type = other DNA
tggcacaggctgtgcccttgggcgctggtgcctgtcttgatccccagggcaggagaaagccagcatcacccacaagctctggatccagggtctcccacctgcctcccaagtgtgtgcaga

SEQ ID NO: 21485 - DNA, 120 bp, synthetic construct
  source 1..120: mol_type = other DNA
ccttcaagacgggacccactctccccagtgactgaggtcacactatgtgtggcaaatgcaaaccagagccctccaagagcccagggccctcactgggacatgctgccagccaccaagacc

SEQ ID NO: 21486 - DNA, 120 bp, synthetic construct
  source 1..120: mol_type = other DNA
cctggacaagcggcaagaagccttgggagacacagacctccacagctgcctttctctgactcccacccaccaagttttcttgcgttttgtgttttgcctgaactggaagaggcgaagagt

SEQ ID NO: 21487 - DNA, 120 bp, synthetic construct
  source 1..120: mol_type = other DNA
taaagggctgtgtcctagtacctgtgacatgtgataggtgcccaggtgaagacagtcttccctctgaaaatgtatgctgcttgtcttctttgtagattacaattaaattctgtagctaaa

SEQ ID NO: 21488 - DNA, 120 bp, synthetic construct
  source 1..120: mol_type = other DNA
gccatgagggaatctcttcacagcccatcttactgctggcaaagcagcttttccctgtaggtcaggttttcctaaattaggagccgagtctcacagacactttcatcacaaacctttcag

SEQ ID NO: 21489 - DNA, 120 bp, synthetic construct
  source 1..120: mol_type = other DNA
ctgtgctctcgaaggctgacccttgagaacagcatcagaggccttcctcgccctctggcttcttgctggtttggtcaatggcaggcagcagtgggatactggggggctggaggaaagcag

SEQ ID NO: 21490 - DNA, 120 bp, synthetic construct
  source 1..120: mol_type = other DNA
ggagcttaatttttagcctgttgattttactgtctacgttagacttgttgagaaagaatctgttctcttttaggtgagataaatgagaattcattgtcttctgtaaataaacctgttcat

SEQ ID NO: 21491 - DNA, 120 bp, synthetic construct
  source 1..120: mol_type = other DNA
caagaaaacaaataaagccatgccaatctcatgttgttttctgagaagtttggttttgtcaagaaagggtgtaacgcaactaagtcagagtccacctagaagcatttgcggtggacaatg

SEQ ID NO: 21492 - DNA, 120 bp, synthetic construct
  source 1..120: mol_type = other DNA
gttcaggggggcctcggtcagcaggatggggtgctcctcaggggccacacgcagctcgttgtagaaggtgtggtgccagatcttctccatgtcatcccagttggtgatgatgccgtgttc

SEQ ID NO: 21493 - DNA, 120 bp, synthetic construct
  source 1..120: mol_type = other DNA
ttccaaaatacagttctttaaaatatacacacatataaaaacatttgaaaataactaaagaaaatacctcagaattcattttttcaaccacttctatctgcttttcttcatgaatcagaa

SEQ ID NO: 21494 - DNA, 120 bp, synthetic construct
  source 1..120: mol_type = other DNA
aataatcatcaaacaacaacttatacaatgggaaaattttgaaaattatgacgctaacaaacgactaatatctataacctacaagaaactcaaacaaatcaacaggaaaaacgcaaataa

SEQ ID NO: 21495 - DNA, 120 bp, synthetic construct
  source 1..120: mol_type = other DNA
aaggcataacgaaggccaacatagtaaaatgagtaactgagatttctaacattatttatttcaccatggacgggtgaaaaccttataatacattgatgctactccaaggatgtgtaacat

SEQ ID NO: 21496 - DNA, 120 bp, synthetic construct
  source 1..120: mol_type = other DNA
ctgttaggaaccatgccacacaggaggaggtgcacagcaggcaagccagggaagcttcatctgtatttacagccactccttatggctcatattgcagcctctactctgcctccagtcaga

SEQ ID NO: 21497 - DNA, 120 bp, synthetic construct
  source 1..120: mol_type = other DNA
gtaaaacaatggaataatttgttcctaaactttatgactgaaattatcttggaatcccaaataaaacccagtgcgaattttgttcataggttctaatatgcaaatgttgtagttttcagg

SEQ ID NO: 21498 - DNA, 120 bp, synthetic construct
  source 1..120: mol_type = other DNA
aaataatgaaaatggcaatgataagaaaaagctcctgtctgtatttttaattgtctgtggtctatagcattagaaaaatggttaccatctaaaagacatttgatagttatatgttaagtg

SEQ ID NO: 21499 - DNA, 120 bp, synthetic construct
  source 1..120: mol_type = other DNA
cactgccacgcgaaaactacctgaaccaaactatgacatctcacctgatatgtcagatgcaactgttataattattttaaacctcaattcagcattaactagccttttaatgtgaacact

SEQ ID NO: 21500 - DNA, 120 bp, synthetic construct
  source 1..120: mol_type = other DNA
cttaacgacttactgacctaagtacttgaatgactgaacaaagagacacaaaatcctgagagggccatactcacagcaaatttctaaagaccttctgaatggcagtgaataactgatggt

SEQ ID NO: 21501 - DNA, 120 bp, synthetic construct
  source 1..120: mol_type = other DNA
gaggcagccggcattgaatcaacctcagctaccatctgcttttaacagcctggggaggccggtagtagcgagcagatcacgtctaccaaccagtttcaccaactagcaggtaactccggg

SEQ ID NO: 21502 - DNA, 120 bp, synthetic construct
  source 1..120: mol_type = other DNA
tccagctgcatcccatttctctgttcccctgtagagcaaaatggctccaaagcgtggtctcgtcttaccttgaacacccctcctccctctcgctatgtgagctactccagttcagctctc

SEQ ID NO: 21503 - DNA, 120 bp, synthetic construct
  source 1..120: mol_type = other DNA
agatcctgggagggctgactgaggccgcctgtaataccaatgggaatgagagaggggctggagtgatgctgcagtgggggaagtttcttttattaaaaaaaaatatattatttaatttta

SEQ ID NO: 21504 - DNA, 120 bp, synthetic construct
  source 1..120: mol_type = other DNA
ggcctcagtggctccttagtccatggcggttctaatggtgtgaacagctcttgcctatttgtttttaaatgtgggttttattgttatttaggtaggacaagaatgcagacatggaaatga

SEQ ID NO: 21505 - DNA, 120 bp, synthetic construct
  source 1..120: mol_type = other DNA
ttgttgttacttgaaattctgtgctataatgtactttatatcagtaaaacttataataaagtgatatcggccgggtgcagaggctcaggcctgtaatcccacccagcacttagggaggcc

SEQ ID NO: 21506 - DNA, 120 bp, synthetic construct
  source 1..120: mol_type = other DNA
ctaagctggcaaggaaagggcagcttctataaacactgcagaatggacacagctggggactgctctgggaagggagatgccctccctccatccgggtgagcaaagccagaggtgtgaaca

SEQ ID NO: 21507 - DNA, 120 bp, synthetic construct
  source 1..120: mol_type = other DNA
aagtctttcgggtctggaaaaacagagaaaccggagatgtatgaaataaagtgttccggctcggtttgagagagtgcaatagaaacgcctgctccctgccttctgcaggcccttttctcc

SEQ ID NO: 21508 - DNA, 120 bp, synthetic construct
  source 1..120: mol_type = other DNA
tctgctatacctccaggagatgtcctctggacttgggaacctggcatgagcatgaaactggaaattaacaaggaatgatgcagatgaacacctgcagcaagaaccactctacacctgtcc

SEQ ID NO: 21509 - DNA, 120 bp, synthetic construct
  source 1..120: mol_type = other DNA
ggtaaaagaacacaaaggtgttactgccctctctgcacctgacagatgactctgaaggatgactgcactattttgtctagctttgatgaacagaggccacattttcagagccattatcat

SEQ ID NO: 21510 - DNA, 120 bp, synthetic construct
  source 1..120: mol_type = other DNA
cagcttcctctccgattaccagctggtcatctcctgaaattctgctcactgaaacggacatgtgaggacatggtttggaaatcatttttaaactcagcaatctggatatgagaacttcaa

SEQ ID NO: 21511 - DNA, 120 bp, synthetic construct
  source 1..120: mol_type = other DNA
tggcttcttgggtggggctgctttctgtctcacacattttcctcatctagagattgcatgtgaggggaatcatgcagtattttccttttgcgtccggcctatgccacgtagcataatgtc

SEQ ID NO: 21512 - DNA, 120 bp, synthetic construct
  source 1..120: mol_type = other DNA
aaatacctgccagaaaagatgtacttgaacaaaacatggtgcagaaagcaaaaattccctgaagtaaaaatggaagctgaaaataatgcactttaagagagagatgggggccgggcacgg

SEQ ID NO: 21513 - DNA, 120 bp, synthetic construct
  source 1..120: mol_type = other DNA
taagggtggaggttgcacattggcatgaaggccaggaaggactctttggggccctgtcagagacttagccacacccatagattaaactcgttttgccatatgtgctattttgtttttagt

SEQ ID NO: 21514 - DNA, 120 bp, synthetic construct
  source 1..120: mol_type = other DNA
ttctttaagtggcgattgggtcctgagggcttcattctcacgaatggactcatccaccatgagttaatggattagtgcattatgatatcaatgggactgaaggctttaaaggaagaagaa

SEQ ID NO: 21515 - DNA, 120 bp, synthetic construct
  source 1..120: mol_type = other DNA
acaggcatgagccactgcacccagccagcctgcagatttattttaatgagaaaatcaaagcaaaagcaggggcataagtggagcatatggatgggacagagaacgttggaggctttagca

SEQ ID NO: 21516 - DNA, 120 bp, synthetic construct
  source 1..120: mol_type = other DNA
gtaactgcttggctggcctgtagcggcttggcttggctttgcgttctttgcttggcttggtgttggtcgcttggcctggtgttcctccttggattgacgtttcctccttggattggcgtt

SEQ ID NO: 21517 - DNA, 120 bp, synthetic construct
  source 1..120: mol_type = other DNA
ctttcaaagaagcattagagggtacagttttttttttaatgcgcttgtggtaaataatttttttgaaagcactgaatttgtagaaggtaatacttactatttttcaatttttccctccta

SEQ ID NO: 21518 - DNA, 120 bp, synthetic construct
  source 1..120: mol_type = other DNA
attacttggactgggcaacataaagaacagttttagtaggattcgtcttctcattatattgactgatgttatttgttatgtgacgtttttggttacatgatcttatgttagctaaaggca

SEQ ID NO: 21519 - DNA, 120 bp, synthetic construct
  source 1..120: mol_type = other DNA
agatagtaaccatttttctaatgctatagaccacaaacaattaaaaatacagacaggagctttttgttatcattgtcattttcattattttactactttattcagtgcttactgtgtgct

SEQ ID NO: 21520 - DNA, 120 bp, synthetic construct
  source 1..120: mol_type = other DNA
ataactcgcatcctactagtttgactctcactaataagacttgtcaaagatccaagaatctgaaagttgatgataaatgtccatgtgtatcaccatcaatgatcaaaagttagcatccac

SEQ ID NO: 21521 - DNA, 120 bp, synthetic construct
  source 1..120: mol_type = other DNA
agcaggagagaccaagtgggtgaaacaggaggatttcatttaggttcgcaccagctcagcggatttgcatccgaaagctgagccctgaacaaagacagggcttggcttatgtaggcaagc

SEQ ID NO: 21522 - DNA, 120 bp, synthetic construct
  source 1..120: mol_type = other DNA
cccagaaattaatgtagtatgcaaccattttttacaagtgaggttagatctagagtatactgattatttcacaattaaagtgtatttaaagcatcagtgatgacatcttaagagttcttg

SEQ ID NO: 21523 - DNA, 120 bp, synthetic construct
  source 1..120: mol_type = other DNA
taagatgcaattgggagcatacaaggaatgctctctaaggtaatcaaggcaaggttcaatgaaacaaagtgatttatcatctctaacttcaaacctatttgtatcttgacatcaacgctg

SEQ ID NO: 21524 - DNA, 120 bp, synthetic construct
  source 1..120: mol_type = other DNA
gcggccacacaaatttttgaagcattctatattttgcgcagtcactggaaggtcatttgactgtttgctgagtagctttaaggaaatggtgtgaatcaaagcagaatgggtgccacaaaa

SEQ ID NO: 21525 - DNA, 120 bp, synthetic construct
  source 1..120: mol_type = other DNA
aatgttagaaatctcagttacttattttactatgttggccttcgttatgcctttttcacttgttttgcttaatttttttcctgtaagaaataacattaatagttggcagttttcttttaa

SEQ ID NO: 21526 - DNA, 120 bp, synthetic construct
  source 1..120: mol_type = other DNA
cttgccgcctgcagccaatcagaattttttagcaggacataatgaaaagaagtaagagaaagagtgtttttttgtatgggatagtatttaacgtaaacttgagagtgagtaccaggatta

SEQ ID NO: 21527 - DNA, 120 bp, synthetic construct
  source 1..120: mol_type = other DNA
gaactggacttacgcagataatctggatacataacactatcatatgacagtatataatttcaattaaaatgtgagaatttgcatttctttctgtttggtgttgatttcggctcctaatag

SEQ ID NO: 21528 - DNA, 120 bp, synthetic construct
  source 1..120: mol_type = other DNA
agtaccacgctgcttctgttactgtggtcttagagtatcatttgaagtcaggtaatgcgatgccaacatatttgttccttttgcttggtatgtctgttgctgttcaggctcttttgtggt

SEQ ID NO: 21529 - DNA, 120 bp, synthetic construct
  source 1..120: mol_type = other DNA
tgcctctgggttttttgtaactcagaaaaaggcttttttaattctgggattcttaaaaatcctctagtgatttatttttcatcgtctttaaataaatatttaaacttttaggaatttagg

SEQ ID NO: 21530 - DNA, 120 bp, synthetic construct
  source 1..120: mol_type = other DNA
cttttggtctccctgagagtggctggaggcagccagggcttacctgtactctgacttgaggagagttggataaaagtgcacaccttaaaaaaaattgaggaagcacagtatttcagtaca

SEQ ID NO: 21531 - DNA, 120 bp, synthetic construct
  source 1..120: mol_type = other DNA
ttgagatgtaaggttgattttgctgtacaactccttttttgaagttttactcatttccaacaaggaaggcaagttttcctgcttccattgacaaaggagagcaggcacctcctttcctga

SEQ ID NO: 21532 - DNA, 120 bp, synthetic construct
  source 1..120: mol_type = other DNA
cacagtaaaagcacagaggtgattgggaacaaagctgcagtggagcttagcaggtggcaacccaaatccatagaaggaaatgaagagaatgggaaatttaaaagttaacataggctgggt

SEQ ID NO: 21533 - DNA, 120 bp, synthetic construct
  source 1..120: mol_type = other DNA
gatggaacataaggaaatattttgcataaaaggagacactttcctaagaatggataaagtttcagcagggaagcgtagttcaaatagaggggatagcaacatcactgcaacctctgcctc

SEQ ID NO: 21534 - DNA, 120 bp, synthetic construct
  source 1..120: mol_type = other DNA
gtgtgcaatttaatagttttttgttttttacattttaaaggattgttaacaaataaaataaaataaaaagactaattcttcacaaactcttccaaaaagtagaagaggagggaacacttc

SEQ ID NO: 21535 - DNA, 120 bp, synthetic construct
  source 1..120: mol_type = other DNA
aggtctgttgctgtcaagagggtgccattcacgttataatctgaagaaagtggtcttcccttcaatacaaccccaaatgaaaagtgaatcattggcatggaagaaaagactggagatact

SEQ ID NO: 21536 - DNA, 120 bp, synthetic construct
  source 1..120: mol_type = other DNA
agattccacaaaatcacctacaggaaataatttagtcaagttgcaagatacaatatcagcacacccatgcaccaatagtgaaatacctaagaaggaaatcaagaaagctatttcattacc

SEQ ID NO: 21537 - DNA, 120 bp, synthetic construct
  source 1..120: mol_type = other DNA
tctatctacccaaaaccttttctccccactgtcttttcacaaaaccttctctctctactgctcaacgctgtttctcccccccaccaccctctctttcctcctcccttgccaccctctttt

SEQ ID NO: 21538 - DNA, 120 bp, synthetic construct
  source 1..120: mol_type = other DNA
agtggggagggctggctgggtctgagtttctcctactcctgctccccaaggagtgcagccctggtgggcccagcaatttctggccagttgcacctggatgggggtggtttcagcataggc

SEQ ID NO: 21539 - DNA, 120 bp, synthetic construct
  source 1..120: mol_type = other DNA
agaagtgctttaatgtcataaattgatgctttgactttggaaaatagttttgtttacctggtttggagccgttagatttctaggtaaggtctccggacaggtggagttagccatgtctcc

SEQ ID NO: 21540 - DNA, 120 bp, synthetic construct
  source 1..120: mol_type = other DNA
aggcatctaaataggaagggaaggggtgagattgtctgtgttttagactccacaaaaaacccattacagctgataaacactatattcaataaagttgagagttacaaaattaacattggt

SEQ ID NO: 21541 - DNA, 120 bp, synthetic construct
  source 1..120: mol_type = other DNA
ctaacagctgaaaagacatcaatgaatacaacagaataggaaatttagaaatacccaaatatatgttaagaatttagcgcttgataatggtggtgttttttattatttgaaaaagatgga

SEQ ID NO: 21542 - DNA, 120 bp, synthetic construct
  source 1..120: mol_type = other DNA
acttcatgtaagacaccagggattgtgtgatgccccattattttatgcctcaataagagaattatttaaatgccgcaaattatagtaaatcatgaattgtaagtggtatttcagtggaga

SEQ ID NO: 21543 - DNA, 120 bp, synthetic construct
  source 1..120: mol_type = other DNA
taaatttagttacaaactatgacatagttgagatgccctgaattataagccataaagagtaggacaactaagaagcaaaattaggacttaataacattttctgaaaactacaacatttgt

SEQ ID NO: 21544 - DNA, 120 bp, synthetic construct
  source 1..120: mol_type = other DNA
tgctgcaggggctcattggagaaatttgagcaggggagtcataagattaaatctgagtattaaggcattctggttatggtgtaaaacgggttagcaagctttttctgtaaatggccagtt

SEQ ID NO: 21545 - DNA, 120 bp, synthetic construct
  source 1..120: mol_type = other DNA
ctaataagacttgtcaaagatccaagaatctgaaagttgatgataaatgtccatgtgtatcaccatcaatgatcaaaagttagcatccacaacatagaatgggacagatgaacttaatgg

SEQ ID NO: 21546 - DNA, 120 bp, synthetic construct
  source 1..120: mol_type = other DNA
aggaggcaggagagaccaagtgggtgaaacaggaggatttcatttaggttcgcaacagctcagcagatttgcatccgaaagctgagccctgaacaaagacacggcttggcttgtgtaggc

SEQ ID NO: 21547 - DNA, 120 bp, synthetic construct
  source 1..120: mol_type = other DNA
tcatttataaaataagattattttctgcatttctcccactttattcctgttaatagaacccagtattttgctgtgatgaattattttgtatatttgatgagtatcagttttcctagaatt

SEQ ID NO: 21548 - DNA, 120 bp, synthetic construct
  source 1..120: mol_type = other DNA
ttatcgtgttaaatcattataacaacctagtaaaataaggcagcatagtcctcactttgtagaagacattgagcctaagagaagcagcttgttcaagagcaaatagctgttcattatgga

SEQ ID NO: 21549 - DNA, 120 bp, synthetic construct
  source 1..120: mol_type = other DNA
gatctgactggagacagagtagaggctgtaatatgaatcataaggagtggctgtaaatacagatgaagcttccctggcttgcctgctgcgcacctactcctgtgtggcgtggttcctaac

SEQ ID NO: 21550 - DNA, 120 bp, synthetic construct
  source 1..120: mol_type = other DNA
tcgtgtagggtattttgagtaggtaattggataatcagcatttataactcgcatcctactagtttgactctaagtaataagacttgtcaaagatccaagaatctgaaagtcagtaataaa

SEQ ID NO: 21551 - DNA, 120 bp, synthetic construct
  source 1..120: mol_type = other DNA
ttaacagtttaattttaattactttctaatttttattgtccatacttgattacttcagaataaaattattttaaaaacatgcactccaaaagaggaaatgtcacagaaatacagcaagca

SEQ ID NO: 21552 - DNA, 120 bp, synthetic construct
  source 1..120: mol_type = other DNA
taattccagtgggcttggtcggactgctgctttgccatctcttgtttgttttgaggaagtggggggaggctaggtaagaacacggaaatagggaacggggtaagggagaggtgagaagag

SEQ ID NO: 21553 - DNA, 120 bp, synthetic construct
  source 1..120: mol_type = other DNA
cttttaattttttagagacggggtctcactttccattcaggctggaaaggatgcctggatgccttttattattatttttttagacagagtctctgtcgtccagattggagtgcagcggtg

SEQ ID NO: 21554 - DNA, 120 bp, synthetic construct
  source 1..120: mol_type = other DNA
cgcccagttcctaatgtcttcttgagcctcccccgcagtccctgatccccacgggatcatgacactgccatagccaggggttccggagttcacctctgtacccctaaagcccaggccctg

SEQ ID NO: 21555 - DNA, 120 bp, synthetic construct
  source 1..120: mol_type = other DNA
tccaggatttggggatgaaggtgcagctgaaaagagccctgcaagctgaagccaccgggaggggattaagggggggtgggcaggaccagggaccagtcacagggcagtaaggcctcacag

SEQ ID NO: 21556 - DNA, 120 bp, synthetic construct
  source 1..120: mol_type = other DNA
tcttagcattggcatcatggtataaactccacagcaagatctgccctgagccctatgaggatacagtaaattcctcttcaaaggtttttattcaaataaaaaaccgcagataggacccac

SEQ ID NO: 21557 - DNA, 120 bp, synthetic construct
  source 1..120: mol_type = other DNA
gaggaactcagaactcattgtacttaatcttccccctcttgaattttaaaggatgtttacaggctaaaatctttgaagaggaattcactgtatcctattcatcaggtgttctttccacca

SEQ ID NO: 21558 - DNA, 120 bp, synthetic construct
  source 1..120: mol_type = other DNA
taataaactagtaaataataaaaaatgacaatgataatagcaagaaagatgcttagtaccttaatgatacctgacagttatttgttaagtggacaagtggataaacaaatagaaaacata

SEQ ID NO: 21559 - DNA, 120 bp, synthetic construct
  source 1..120: mol_type = other DNA
actctcatgttgctcaatactcgactgtaattaattctaattttctgaatgcaaatcatttattacaaaaattaaataaagcccagaagttcaagaccagcctgggcaacataaggagac

SEQ ID NO: 21560 - DNA, 120 bp, synthetic construct
  source 1..120: mol_type = other DNA
ccttaactcggaataagtcctagcatggctaccaacaggtattttttcttgaacaagttgcttctcttagactcaatgtcttctaaaaatgaggattttagggccttatttcactaggtt

SEQ ID NO: 21561 - DNA, 120 bp, synthetic construct
  source 1..120: mol_type = other DNA
tgcaacaccttacagatttctatgtcatctttgtgcggggaccatgctgatcttctcaacgttgttttaattttactatatgtaccactgaagccagcacaaatccttacttttatacgt

SEQ ID NO: 21562 - DNA, 120 bp, synthetic construct
  source 1..120: mol_type = other DNA
aattttagaagacaaccccattattaatgaattaatgtaaaatataaactatatattataaacacctataaactgtcttcaataacttgaaatctttacccaaatgtactatgagagagg

SEQ ID NO: 21563 - DNA, 120 bp, synthetic construct
  source 1..120: mol_type = other DNA
cctgttttcaccatcaaggacgtcaagctgacactttctatctaccagaagtgttactacttctgcatggccattggcacaggcccagtatagagcagtcctacaagaatgagaggcctt

SEQ ID NO: 21564 - DNA, 120 bp, synthetic construct
  source 1..120: mol_type = other DNA
aatggtacaattatgcctaatttgtggtatgttttaaaggttagagataaagctattttaataattctgaaatactctatttctcgtattttaacatctctgacattgaaatgccgctta

SEQ ID NO: 21565 - DNA, 120 bp, synthetic construct
  source 1..120: mol_type = other DNA
ttacggaaagtgagaaattatttttattggtgcaaaattatatttctgctcttcccaaaaatttttcattaataataaactttttctaatagcattgtacatgctcaatgtggaaatcaa

SEQ ID NO: 21566 - DNA, 120 bp, synthetic construct
  source 1..120: mol_type = other DNA
gaagtgggagtgaaggagaaagcagctaaagtttggggttgattttaaggtggcctgtgccctccgccctgcagggcgccctcatccaaggcctgggggacctgcccgggaagaaggcca

SEQ ID NO: 21567 - DNA, 120 bp, synthetic construct
  source 1..120: mol_type = other DNA
tttttggatgcttcctatgtgattccagtatttagccaagtcatttgtcaatgagagggactgagaaagaagaagcagaaggacactcatagtgaaacatcgctcaagttgcagtcttcc

SEQ ID NO: 21568 - DNA, 120 bp, synthetic construct
  source 1..120: mol_type = other DNA
agatgtgtttacgcttaatcctcttgaaacacaataaatggagtctatctttattgccctgtcagagaaataagctctggtgggttgcctgctgtgaatttgacaaggaaggctctggta

SEQ ID NO: 21569 - DNA, 120 bp, synthetic construct
  source 1..120: mol_type = other DNA
cactgtccaatgttctcatctggcagttggattctgagatagagagacagagagagaagggaatagagaaggctcacataaaaggataaaagaatcatggaaattggggtatgatctgga

SEQ ID NO: 21570 - DNA, 120 bp, synthetic construct
  source 1..120: mol_type = other DNA
cacctccactttggcaggtaggtagcagcccatggacacaagtaaatcaggtctaaagcctaaaacaccaaaagattaatacatggtgtttggctgattcactatgactgatttgttctg

SEQ ID NO: 21571 - DNA, 120 bp, synthetic construct
  source 1..120: mol_type = other DNA
gagtccagacgtggtagggtaatgtcacctaggtcttttccattgcctctcaccacactatgggcactcaaatcaaaaaagtaaaaattgggttgtagcaacagcgtaagaaatcctttt

SEQ ID NO: 21572 - DNA, 120 bp, synthetic construct
  source 1..120: mol_type = other DNA
agaagaaatacaatgcatggcttgtgctcttaagggctacagtagatagaacaacagcctaccaaagttgtccacaccctaatccctagaaaatgtgaatttggcaagagtggttttgca

SEQ ID NO: 21573 - DNA, 120 bp, synthetic construct
  source 1..120: mol_type = other DNA
gtctaactgaaatattttagatcagcaaagctataaaggatgctacctgagcaagcaaataagaacatgaattgaactcacctccagagactcctgtgttgctcctcaagctgagtcagc

SEQ ID NO: 21574 - DNA, 120 bp, synthetic construct
  source 1..120: mol_type = other DNA
gagccaccgcgcccggctattgttctatttttgactcgataataaaaaatgcttaagtataagggtgtgttttgcctgtgtatgtacaactggggaaagcaatttggtgatccatgttgt

SEQ ID NO: 21575 - DNA, 120 bp, synthetic construct
  source 1..120: mol_type = other DNA
tttaaagtaatggatattatatagaaaaatacagtcccagaaaataatgtccatgaagatttgattataaattttagaaagcttgatctgaaataccacaaggaaaccatttcctttata

SEQ ID NO: 21576 - DNA, 120 bp, synthetic construct
  source 1..120: mol_type = other DNA
atgaataaataaatgtggaaataagttaatgaggagtagcctgagatgtgggaagaaggcagtgaggagtagaaaacttggatgccaccttgtcattgccttcagctttgtctggactga

SEQ ID NO: 21577 - DNA, 120 bp, synthetic construct
  source 1..120: mol_type = other DNA
tcaaacaattgcttttggctcttgcctcatctgatccttatataagcccagaagaaaacagaggctcagaagaggttaaagattttgagggtagcacatggctaattagtagcagagctg

SEQ ID NO: 21578 - DNA, 120 bp, synthetic construct
  source 1..120: mol_type = other DNA
gggtttacaccaatagaatcttcttaaaacaaggtttgggggcctgaactgcaaaggggtgaaggctgacttggacaaactgattccatttatgtccagccttccaggtgacatactata

SEQ ID NO: 21579 - DNA, 120 bp, synthetic construct
  source 1..120: mol_type = other DNA
taataaaaataaaaaaaaagaaggtggtggggctcaccttggggtccagctttattggtagcatcctctactggtgggttaagcttgttaaaggaccctggacagatcaaaagaaaacaa

SEQ ID NO: 21580 - DNA, 120 bp, synthetic construct
  source 1..120: mol_type = other DNA
gaatgtcacaaagaattcagggaagatgaggattgatgggggcagtgagtgaatctctggatttggtaaactttcgtttggcgaaaagcagtttcaataaaacagtgaagtagcaacagg

SEQ ID NO: 21581 - DNA, 120 bp, synthetic construct
  source 1..120: mol_type = other DNA
ggtgaaaaggaggacagaccccgagaactgtgctggtgaaaagggcacagaagggctgaggaaaggttttacgaggcctacaggggaaggggaggagaaagcagagagagaaaatcaaag

SEQ ID NO: 21582 - DNA, 120 bp, synthetic construct
  source 1..120: mol_type = other DNA
aatgatgtaggtctgcatattatggcatgcaaaaatgtccatgatatacaattgagtgaaaaaatggaaggtatagggcaatacgcacagtacaaccacatttttgtgtttaaaaaaact

SEQ ID NO: 21583 - DNA, 120 bp, synthetic construct
  source 1..120: mol_type = other DNA
tcaaggggaatggttgtagcctttgcccactcagtatgactttggctgtgggtatgtcatagatggctcttattattttgagatatatcccttcagtgccttgtttgttgagggttttta

SEQ ID NO: 21584 - DNA, 120 bp, synthetic construct
  source 1..120: mol_type = other DNA
cagaaattgtccagtccaaagaacagagaaaaaagtttggagaaaaaacagaacttctgagatctgtgggtcagtgtcaagtgttccaaagcatgcatgtaatgggactcccaggtgaag

SEQ ID NO: 21585 - DNA, 120 bp, synthetic construct
  source 1..120: mol_type = other DNA
atgcatttacgagattaggaaattagagtaaaagcttccttttacctctctgcctgtctcctcaaaatgacaactgttagcagtggcttgtgattatctccattagaaaaattacaggtg

SEQ ID NO: 21586 - DNA, 120 bp, synthetic construct
  source 1..120: mol_type = other DNA
ccaacctcccaaagtgccaagataacaggcatgagccaccgcgctgggccttagtccttcttcttaagaaatcattaatgaatatgatcttcagatcttttatgtcacatctcttttttg

SEQ ID NO: 21587 - DNA, 120 bp, synthetic construct
  source 1..120: mol_type = other DNA
actgcagttgggtactaacattggccaagttcattctttctttcctctctatgtcacccacattcaaaggccactgtgtaggtaaataaaaagtctaacgtttaactgtctacaccactc

SEQ ID NO: 21588 - DNA, 120 bp, synthetic construct
  source 1..120: mol_type = other DNA
acccccacctccctcccagatggggcggctggcatggcagcatatctttaatcaatccagataatttggtcagtggaaaattatgagatcagttaagaaaagagaaaatttaatagtata

SEQ ID NO: 21589 - DNA, 120 bp, synthetic construct
  source 1..120: mol_type = other DNA
ggaggggaggggacgggaggggaaagagaaagaaagaaggtcatggtgtttgaaaacaaaagaaaaagagcaagaaaactaacatttgttgggtatatgagacatattcttcctatgctt

SEQ ID NO: 21590 - DNA, 120 bp, synthetic construct
  source 1..120: mol_type = other DNA
aaacaaggggcaaagggaaagaatagcaggcatggtcaggatcatcgggtgttcctttgagacagcaaacatatgataaggggtaaaactaatcccttaagtgaggatatttccagacaa

SEQ ID NO: 21591 - DNA, 120 bp, synthetic construct
  source 1..120: mol_type = other DNA
aatgcaacagactaatttgatacgcaaccaagataaactcagccctctatttccacaggttttgtatctgtggattaaaccaaccaactctacaagccagaagagagtgggggccaatat

SEQ ID NO: 21592 - DNA, 120 bp, synthetic construct
  source 1..120: mol_type = other DNA
tcagccaaataataaggattataagacaacaaaaacagcacacctaaatgggtaatgtaacagaaaacttttcaattttaggagagaaaacaaaacaatgaaagaaattaggttgtcatc

SEQ ID NO: 21593 - DNA, 120 bp, synthetic construct
  source 1..120: mol_type = other DNA
gaaacctgtgggatatcctataatgtctttcatcaatctccagtgatcttgtagaagcatttcacagcagtttgtctggctctaccttacgtagagaagaggcagctcctaaacaggaaa

SEQ ID NO: 21594 - DNA, 120 bp, synthetic construct
  source 1..120: mol_type = other DNA
ctgggcggggggctggcccattcatagttttatgtcaggacttttcaggaagtttggggataaatgggattatttgagattgatgtttcatttttctgttaaagggtaggatatcaactt

SEQ ID NO: 21595 - DNA, 120 bp, synthetic construct
  source 1..120: mol_type = other DNA
tgcagggaagctgacacttgaccaagcaggagctgcagcttcaagattttgtttttaaggtaattatgaacctggagaacatacaccactcattctgaggcatttacagaaatgtcaaac

SEQ ID NO: 21596 - DNA, 120 bp, synthetic construct
  source 1..120: mol_type = other DNA
agatgtgttttgtatttttccctatgtggctgtggtagactgtttgcaaaaatggctgcaatacttcctcttgctcctgcatgtatattcccctgcaatcatgttgcttttcctcccatc

SEQ ID NO: 21597 - DNA, 120 bp, synthetic construct
  source 1..120: mol_type = other DNA
agaaaggttagagtagattctaggagtgaagatcttcaactttcctcaatgtgtagaagcctctattgtcggctcattcttacctgagccgaaaaacaatgctagcagtaacatgctgac

SEQ ID NO: 21598 - DNA, 120 bp, synthetic construct
  source 1..120: mol_type = other DNA
ttacagctcatgtagcagaaggcacacaaaaacatggcttaaaaacaaagtggtttatttgctcacaaaacaggaagtccagaagttgacaattcagacagtggctgcagctctgtgatg

SEQ ID NO: 21599 - DNA, 120 bp, synthetic construct
  source 1..120: mol_type = other DNA
gtcatcatctgtggaacatccttttgctctcgatcatcttgaatcccttgtttcctgttctgtttctcttctttgcctttattgtcgtgttttccagaactgctaaacgcatcctctagt

SEQ ID NO: 21600 - DNA, 120 bp, synthetic construct
  source 1..120: mol_type = other DNA
atgtctgacagtttttatgttttttcagtaaattgtcaatgccaggaaaaactggaggtcctttagaactcaaggagctacattgagaggggattgcattgggaagcaagggaaggagac

SEQ ID NO: 21601 - DNA, 120 bp, synthetic construct
  source 1..120: mol_type = other DNA
gtcactgcaattatgattgttatttcaaagtgtctttcatggcatttgcatatgcacctgcctattatcacattatggaaagaaaaggtaagaatgcaaattagcctttgctgttagtct

SEQ ID NO: 21602 - DNA, 120 bp, synthetic construct
  source 1..120: mol_type = other DNA
ggatggatttggcatgctcggcaaagatccgtaagtcagctcagcattggctggatgtacaaaacgggttggcgattaaactttcatagtttgtgaaatttcacagcgaaagaaaatgtg

SEQ ID NO: 21603 - DNA, 120 bp, synthetic construct
  source 1..120: mol_type = other DNA
tgtttttctttgcattcaaggaacccctttaaagtaaagatgtttttctgggaaaaaaaattgagcaaaataattcactttcaaaattagttgtggattacctttagttttatttattta

SEQ ID NO: 21604 - DNA, 120 bp, synthetic construct
  source 1..120: mol_type = other DNA
ttgggaattgattgaaggcattaagctttgtctggagaattgaagtcaatataaagaaatgcttgagttaaggggagttgtagaagccagggttctttttattttattttattttattct

SEQ ID NO: 21605 - DNA, 120 bp, synthetic construct
  source 1..120: mol_type = other DNA
ttttttgtagaaccggtctgacagtaacgagtttcctcaatatttgcttatttgggaaagactttatttttctctatttatgaagcttgatcttactaggtaaaaattcttggctgcagg

SEQ ID NO: 21606 - DNA, 120 bp, synthetic construct
  source 1..120: mol_type = other DNA
ccacttttggtgggtcctgagttcttgtcccacatcaaagaagaatgaggatacactgataatcgaagagtgaaaaggacagagaataatgttactgagtgatgaaatagctctctgcag

SEQ ID NO: 21607 - DNA, 120 bp, synthetic construct
  source 1..120: mol_type = other DNA
tatttgctattgttctactgttttgcatgtgtctctcctggtttgtcctctaaacttgaagatgctagaaggcatgtgtcttatcttctatcgccattatgagtctccaagggctgagca

SEQ ID NO: 21608 - DNA, 120 bp, synthetic construct
  source 1..120: mol_type = other DNA
tttcaagcttggatggctggtaggatgctaacatcattagtggacagagaacaccttgagggctggacattatgcgattcgttccagacatgctcggtttgaggtttcttttttttttat

SEQ ID NO: 21609 - DNA, 120 bp, synthetic construct
  source 1..120: mol_type = other DNA
atagaattatcaatgattgatgatgaaattagaagtagaggttctagtgatctgaaagatggtgttttcacaattttcttccctcactgtctttctcttccttccacgtgtgcatgcata

SEQ ID NO: 21610 - DNA, 120 bp, synthetic construct
  source 1..120: mol_type = other DNA
tctgaagccacagaatagcagagataagttaaatttagtggttaattgtgagggtagttaacagaaatctaagcagggctttccccagtgaacgatgttgagcttcccctgaatgcaact

SEQ ID NO: 21611 - DNA, 120 bp, synthetic construct
  source 1..120: mol_type = other DNA
ctggcttgtacagtaagttagcaaacaagcatttattagacagttataactgctcaaaactcactagagatgcattcactttagtttaagggttacacgtttccctataaatggcttgtt

SEQ ID NO: 21612 - DNA, 120 bp, synthetic construct
  source 1..120: mol_type = other DNA
taaataaatgacagggcccaggaaagtacaaaacatagcaggacaggcatgaaatgttaaatttctggaacatattcatttgacttcatgtcctgggcatactggtgcaagagatgggct

SEQ ID NO: 21613 - DNA, 120 bp, synthetic construct
  source 1..120: mol_type = other DNA
aagaaggaggagacactcagttttcaagtgcatagttgtcagactgtcatctaataatggattgtagcatgtagcatacctgactgcagcaacagagatgcaaaaagactgggaagtttg

SEQ ID NO: 21614 - DNA, 120 bp, synthetic construct
  source 1..120: mol_type = other DNA
ccgttttgcattcccccagcaacgaatgaaaattcctattgttcaacatccttgccaggatatagtgtcagcattttggattatggccattctaataggtgtgtagtggtatctcactgt

SEQ ID NO: 21615 - DNA, 120 bp, synthetic construct
  source 1..120: mol_type = other DNA
tcttattccgtaggatggtggggtttcttccgtctcttttgctgcaggttcctagctgggctaagttttggtctgcccaccacagtttcttatctagaaaaaggaaagatattttttaaa

SEQ ID NO: 21616 - DNA, 120 bp, synthetic construct
  source 1..120: mol_type = other DNA
gatttttgagacaaaactttaacttcctcccaagtgaatagacagttatttcaattccattctttgagtatgcttctaggggtatacttaaagtagctgggatggattgaactggactca

SEQ ID NO: 21617 - DNA, 120 bp, synthetic construct
  source 1..120: mol_type = other DNA
cttgttctgttagagaaagtaacaattacacctggcaagaatggctaatttaaattctctaaccatttaatctaactttgcctcctgttgataccccttttattttctagcacagtaccc

SEQ ID NO: 21618 - DNA, 120 bp, synthetic construct
  source 1..120: mol_type = other DNA
cagctgccaaatctaactgcctaaaaggtaacgacacactgacctaacattttgactgtgaggcatccctcattcttaggctgtaattgaaactctataaacccacctctgtcttagata

SEQ ID NO: 21619 - DNA, 120 bp, synthetic construct
  source 1..120: mol_type = other DNA
taaagaggaaatagttaaaatgaggacattagtctgcacaccaatctaattagactgatgtccttgtgagaagaggaaatgaggacccacagacaggcatcaggaatgcacacaccgagg

SEQ ID NO: 21620 - DNA, 120 bp, synthetic construct
  source 1..120: mol_type = other DNA
ctcatgatgacacagcaagaagcacctcactagacgatggcccttcaatcttggatttttcagcctccagagctgtgagaagtaaatttctatttattaaaaattacccagtcccaggtt

SEQ ID NO: 21621 - DNA, 120 bp, synthetic construct
  source 1..120: mol_type = other DNA
tttactcaatgcacattcctatggcactagcctttgggataaccttgtagtgaggtttcaatgaacctgaattactttgaaaatcaaaggaatgcaaaattgtgctgctgatttttcttt

SEQ ID NO: 21622 - DNA, 120 bp, synthetic construct
  source 1..120: mol_type = other DNA
cctttctgtaaaagttctaaaagttaccctcagagaaaacacttcataaacctgagaaacttcagaaatgttatagtcagaaaacaaaaaaatgactcagcagttctcacaagcagcaag

SEQ ID NO: 21623 - DNA, 120 bp, synthetic construct
  source 1..120: mol_type = other DNA
taatgaggcaaaatacactgattctcctcacagctcttttcctttctcccatcctccccaatcccaacaccatggagataaaggagatgaattggaagagttccttgagagttactaaaa

SEQ ID NO: 21624 - DNA, 120 bp, synthetic construct
  source 1..120: mol_type = other DNA
ttacctgggaaactaaacagaccttaaatctggactactaaagattcaccttgattagaatttcttagggttaaatgtggaagggcccctaggaaaccaatttcctaatacaggcttagc

SEQ ID NO: 21625 - DNA, 120 bp, synthetic construct
  source 1..120: mol_type = other DNA
cattagcttgaaagccaagctaaaagttacgtccttggaccagattgagaactcatcttcctgcttggcatgctttcccctgattgatccccacccttcaccttttttatatttatatac

SEQ ID NO: 21626 - DNA, 120 bp, synthetic construct
  source 1..120: mol_type = other DNA
cctgagcctactaccgaggtctgatacatgtgcaaacagtgagttcaatataaatatggttgattgatggaaatacagatgaaatgagactctgtgccatacaggagtgtacagaaccca

SEQ ID NO: 21627 - DNA, 120 bp, synthetic construct
  source 1..120: mol_type = other DNA
aagccctcatgggaagccgattccaccattttgctttgtgtatagcccgcagaactgtgagacaaaactaaatctctttttttgttgttgttttttaatgaattgcctagcctctggtgt

SEQ ID NO: 21628 - DNA, 120 bp, synthetic construct
  source 1..120: mol_type = other DNA
tcacacaaagcacagagcaccacgcagactgagaaagtagattcattcctggacccaggagtacgcatcatcaagcaatttgaaggcttatgtgacatagttaataaaaagaaatatgag

SEQ ID NO: 21629 - DNA, 120 bp, synthetic construct
  source 1..120: mol_type = other DNA
tacttacatgaaaaaaaatacatacaagaattgtccaagtctcaaaactgcctctaaatcataaaaattttccctccctccctccttccctccctttcttcctgcctgccctaccccctc

SEQ ID NO: 21630 - DNA, 120 bp, synthetic construct
  source 1..120: mol_type = other DNA
ttgttatgcctttgcatcctcatagctcagctccaacgtataggtgagaaagtacagtatttggttttccattcctataatcacactaattggagcaccaacattaattttgcctgtcgt

SEQ ID NO: 21631 - DNA, 120 bp, synthetic construct
  source 1..120: mol_type = other DNA
tcctttgggtatatacccagtaatgggatggctgggtcaaatcattctttaaacaaatatggcacatatttctatatagatgccttgaacagaattacaaattaatttatagttttacta

SEQ ID NO: 21632 - DNA, 120 bp, synthetic construct
  source 1..120: mol_type = other DNA
acaaggcatgggctgggagattccccagtctggctgaatatcagaatcacttgagaaattgcaaaaaggatcactaaacccagaaaaacagattagcaaatagtctggatggttcgtgtt

SEQ ID NO: 21633 - DNA, 120 bp, synthetic construct
  source 1..120: mol_type = other DNA
ctgagaataatcaactgaccatctgtttgtgctattttgaacatttatagtaagacaagatgtgacagcaagtaagaaattggcttcatccctgggatgcaaggctggttcaatatatgc

SEQ ID NO: 21634 - DNA, 120 bp, synthetic construct
  source 1..120: mol_type = other DNA
gtaccaagcagtgtcactgaagtactttagcttttcccagccacaatttattagatatttgaaatccaaatgttcctcagtcccgttgcaacctatttttatctcagctgatgtcgcaat

SEQ ID NO: 21635 - DNA, 120 bp, synthetic construct
  source 1..120: mol_type = other DNA
tccccagtctctcagaatctgatcttatttggaactagagttactgaagaagtagttaggatgaggtcatagtggagtagaatgggcccctaatcccatatgtctggtgtcttcataaaa

SEQ ID NO: 21636 - DNA, 120 bp, synthetic construct
  source 1..120: mol_type = other DNA
ctatatggaacgtataatgaatgacaaattgaatatatgttaatttgttgtccggctgtcagtgtgagagcttgagtgagggcaatgagttcagcttttgggaggtagtgcctaggggca

SEQ ID NO: 21637 - DNA, 120 bp, synthetic construct
  source 1..120: mol_type = other DNA
aagtacacattgcttcagttcatgctgtgttccaacaatccatggaagtcctcagaacccaaatcactgaagctgtaagtagagtctagaatactaatggctctgggaggaaatatccaa

SEQ ID NO: 21638 - DNA, 120 bp, synthetic construct
  source 1..120: mol_type = other DNA
ataataaaaaaaaaaaaaaagaaaatacactggttgtccccaaagcggagggtgtccccaagttggaggttctccaaaatacaaaatgtttcctgcgacaaaggagaacagaagaaagca

SEQ ID NO: 21639 - DNA, 120 bp, synthetic construct
  source 1..120: mol_type = other DNA
tcccttgagtctatctcacagtacataatagggaatattctgatactatttaagtcacccgctttctacatcaaagaacctaggaagctgaactaggattcagatggctgccaatgagca

SEQ ID NO: 21640 - DNA, 120 bp, synthetic construct
  source 1..120: mol_type = other DNA
taaggcattgttggacgttggagtgtatgtgtgcaatggtttcattacctgcagaataatgaagtgtttcttcctgactgaaaaagaccatcatagcttcagctgatgtgctacattgga

SEQ ID NO: 21641 - DNA, 120 bp, synthetic construct
  source 1..120: mol_type = other DNA
ccgcctaatcataccagcctctagtagccaccattccattctcttcttctatgaggtcaacctttttgaattccacatgtgagtgagatcatgcaatacgtatttttctgttcctggttt

SEQ ID NO: 21642 - DNA, 120 bp, synthetic construct
  source 1..120: mol_type = other DNA
tctagtatacttaccatacttttacttacatatagccaattgctatgtgtacatttcactatttaagtttatttttataatactcctttgtggttactattattcttcctattgtttcca

SEQ ID NO: 21643 - DNA, 120 bp, synthetic construct
  source 1..120: mol_type = other DNA
ttctaaacattatcacagtgaaggtgaagaacaccaaagacaaagacaagatctttaaagtagctagagagaaaaccctttttaaataacttctcggtggggggtcagccccccgcccgg

SEQ ID NO: 21644 - DNA, 120 bp, synthetic construct
  source 1..120: mol_type = other DNA
ttaccctgcaagtctgtttcttctagttgctactaccaagcagggaagagcagaaatctcctgagtaactgtccagggagagtgagtaataagttgtatgagtagtacgttgaattagta

SEQ ID NO: 21645 - DNA, 120 bp, synthetic construct
  source 1..120: mol_type = other DNA
gttttggatactgtacactgatatgggtgacctctgatggtctcttttacacctatggaaaacatcgttcaggtgaatagagaaacagtgtaccatagtgcaaagatgtctggacatgtt

SEQ ID NO: 21646 - DNA, 120 bp, synthetic construct
  source 1..120: mol_type = other DNA
tcacaatgcttgcatttcatttgaacttgtgagtatttgagaaaccacaattcaagaaactgccattgtttccccggattcttttgccatgtgttaagagagtgctcctggcccttctct

SEQ ID NO: 21647 - DNA, 120 bp, synthetic construct
  source 1..120: mol_type = other DNA
cccgcaaagcacaaatcatatcatgtcagtccagtctagtaaacaacgaataaaatacactctgaatgagcatgataatatcttttccgtattttaggcatagttgactaaataaatgca

SEQ ID NO: 21648 - DNA, 120 bp, synthetic construct
  source 1..120: mol_type = other DNA
aggcgccttccgcgctcttgccaatcacttttctcttttattcccacgattttgtttggggtaatacctagggggtctctctctcactctcttcctctctctctgtttctctctgtcccc

SEQ ID NO: 21649 - DNA, 120 bp, synthetic construct
  source 1..120: mol_type = other DNA
ggctgcttcttaccgtttttcctcctgggattggcttgtttgcgcctcttgcaccgggggccatccgccatgatcggctgcttcattgataagagcggatcagatggcagttcgcatgga

SEQ ID NO: 21650 - DNA, 120 bp, synthetic construct
  source 1..120: mol_type = other DNA
aagctctactaaatgatcgtatcctttctggcttcgaaacttttgtacctaaaaatcgagagaggcgctgcattttttcagttgaaactgtcaaaacttggagaagggggacctcggagg

SEQ ID NO: 21651 - DNA, 120 bp, synthetic construct
  source 1..120: mol_type = other DNA
acagtgagaacagtatgtttgcagtgtagggtttagaactgggttgggagggtcaattattgccaggttatttatgtaggtccttgaatgtcagagtaaaagagttggaaaggtgtttgg

SEQ ID NO: 21652 - DNA, 120 bp, synthetic construct
  source 1..120: mol_type = other DNA
gcactgtcagttcatgctataatttcttccacagttgagaggaagtccatggcaccattactgcccacaaatactggcaacttataactacatctctgtgctagtatattgtagaaccac

SEQ ID NO: 21653 - DNA, 120 bp, synthetic construct
  source 1..120: mol_type = other DNA
tgttgaaccgtgttatggtgacaaagataaacggcggcattgttttgctacctggaagaatatttctggttccattgaaatagtgaaacaaggttgttggctggatgatatcaactgcta

SEQ ID NO: 21654 - DNA, 120 bp, synthetic construct
  source 1..120: mol_type = other DNA
ccaccatgcctggtctaccccaagagacattttaacttgacattcagaatttcatcagaactaacagtcctcaaactacatacttgttttaattgctttactctgtactggaagtaaaat

SEQ ID NO: 21655 - DNA, 120 bp, synthetic construct
  source 1..120: mol_type = other DNA
caaccagcagtacgttttttatgcagtctcaacccatatcccatttgttacctctcagaatattggtaagcagttattttcgctttactctgtatttcttgtgttttgggcacaggttat

SEQ ID NO: 21656 - DNA, 120 bp, synthetic construct
  source 1..120: mol_type = other DNA
gacagcccctaatttagcatgtcttaaaatgaacttatcatcttctacatttatttttctctctatatgcccttgtgggcaacactgtacagttcttcactgaatcattaattaattaaa

SEQ ID NO: 21657 - DNA, 120 bp, synthetic construct
  source 1..120: mol_type = other DNA
ctgtcagaggcataacctggaatgatttgagcaacaattgcacattcttatattttatacaaaatatgtattcacaaataatatccaatgtgtcaagacttttaacagggtactttggtt

SEQ ID NO: 21658 - DNA, 120 bp, synthetic construct
  source 1..120: mol_type = other DNA
caataagccctcaactgaggttggaagctacaaattcctatagacaaatatcagcatcctcactgtagatgtagataaggcaggcagttgaattgatccaagattgggattttgcctggt

SEQ ID NO: 21659 - DNA, 120 bp, synthetic construct
  source 1..120: mol_type = other DNA
tttagtgtagcctgagtgtagtctacaacagtgtaatgtcctaagcctttgcattcagtcacccctcaactcacctagacaacttgccatcctataagctatatttatgatgtgccctat

SEQ ID NO: 21660 - DNA, 120 bp, synthetic construct
  source 1..120: mol_type = other DNA
gtatatggatgatgaagctggagagagggcctagaggaaaccataccacaaagagtgaaatcttgaaaattgtacttccttagtagcctttgctgatcattcacattcccagtttctcag

SEQ ID NO: 21661 - DNA, 120 bp, synthetic construct
  source 1..120: mol_type = other DNA
gaaagaaacagaccaaaacaaactatcaccataattgtggaagtttgtttcagtagcagcactagggacccatttagtggaatctcaagcatggttcatatttcacacccctctggactg

SEQ ID NO: 21662 - DNA, 120 bp, synthetic construct
  source 1..120: mol_type = other DNA
ggtgggatgcagatttggggtagattttaaccaccctgtacattgcaaaatgagacgattgcctactttctctgttgaaattaagcaaggtttagagttgctatgtttctgctgactgtg

SEQ ID NO: 21663 - DNA, 120 bp, synthetic construct
  source 1..120: mol_type = other DNA
tgattcctacagcatttttacaaaggttttgtttacttttgttgggggggctggagtactgtagccctaagaattgactggcaaaatgccttttgtagttgctttaactggtgtgtgcaa

SEQ ID NO: 21664 - DNA, 120 bp, synthetic construct
  source 1..120: mol_type = other DNA
taatggcgatagtccacatcacttgccagtgcctgaccttctttggcagcgctgatggacaccatgtccacagggatggagatcttggctttgtggtcgttgtaggcctttttgtacagc

SEQ ID NO: 21665 - DNA, 120 bp, synthetic construct
  source 1..120: mol_type = other DNA
aaaaatacttgtgcatgtactacataaaattattataggaaacaccggtagtatacacgccacactttgagtaacaacagaattctctgtactatgaaattaaatctctttaagtacttg

SEQ ID NO: 21666 - DNA, 120 bp, synthetic construct
  source 1..120: mol_type = other DNA
acgcagacccacacagctacttatcattaacttaaagactagaaataaaaggaatgggaagaaaatgccttttgacaaactctctttggggtgtataataaaaggtttggttaggcagag

SEQ ID NO: 21667 - DNA, 120 bp, synthetic construct
  source 1..120: mol_type = other DNA
tgaaatccagaggctgctaagagactgactacacaaagatccatctggatacatgcaaacgtgtttcagatcctgacgctgacatgaagagtctaaagttcacgtttaaaattcttctgg

SEQ ID NO: 21668 - DNA, 120 bp, synthetic construct
  source 1..120: mol_type = other DNA
atgttaggttctattaagattaccatttaaattatgcctctggggaatgcactggatttaaacacacaaatacacatctccccggggtctggcgataatatacgcacatcgctctgcagg

SEQ ID NO: 21669 - DNA, 120 bp, synthetic construct
  source 1..120: mol_type = other DNA
caggtgtgagccaccgcgcccagccctatgtcatgttctttcttcttctttattcaccattgtatctttagtgcttagcacaatgcctggcacatggtgtgtttaataagtatttttaaa

SEQ ID NO: 21670 - DNA, 120 bp, synthetic construct
  source 1..120: mol_type = other DNA
aagctctctcccaataattattttttgaagaaggaaacttaggagataataaatcatgtaaaaatcagaaaaaaacatattgcttggcttttacaaggaaaaagcaatgatggatggccc

SEQ ID NO: 21671 - DNA, 120 bp, synthetic construct
  source 1..120: mol_type = other DNA
tgggtaagtccacattgcagatagctctgataattcccattgctgagcaggacctagctgtttttggtccaaataactaccataatgtctaacattgaagttgtccctagacttctcaac

SEQ ID NO: 21672 - DNA, 120 bp, synthetic construct
  source 1..120: mol_type = other DNA
ggaacggcagccagcaatggcacataactttgtatgcttggattagtttctacactcaccacttgaagtctgccttttatgtaccactggaagtaacatcagtaataacatcagttggat

SEQ ID NO: 21673 - DNA, 120 bp, synthetic construct
  source 1..120: mol_type = other DNA
atttcagagaggacatgagtaaatcaggagggagatggtatggtgaacaagagtaatgaaaacaatagctaacatttactaagtaattactctatgccggacactattatgactacttct

SEQ ID NO: 21674 - DNA, 120 bp, synthetic construct
  source 1..120: mol_type = other DNA
gtcctttgacttttcagaagtttctgctaaagggttgtgacatagatatcatacatagcccgccatttggatgtaattaaaaatggtcctttgtctttcttatggccttgaaatgtcaaa

SEQ ID NO: 21675 - DNA, 120 bp, synthetic construct
  source 1..120: mol_type = other DNA
ctcccaggcatcgcgatacaatggctgggaaaaatgaaaaacgatggaatggtcaattagtaaataagtcaattaccacataaataaaattataaagtcatgaaacatatacttgaataa

SEQ ID NO: 21676 - DNA, 120 bp, synthetic construct
  source 1..120: mol_type = other DNA
attcagatttcttccatttgtctgaaaacatcatccacctggacttacctcactgatctgtacagcattgatctttgcctggattacttccggggtgtcaacaatgctggtgaatttgag

SEQ ID NO: 21677 - DNA, 120 bp, synthetic construct
  source 1..120: mol_type = other DNA
attaatgccactgaattatacactttgaaatggttaaactgaatcatgaaatgtgatcttttctttctgatttctctcttagcatgttttcaagcttcatccttgttgtaccctgtatca

SEQ ID NO: 21678 - DNA, 120 bp, synthetic construct
  source 1..120: mol_type = other DNA
tttcaaaaaagtgtaacatatcaaatcaatgcttcagtgcaggctgcgacacaatacatgcagactcaggatgatttggtttctcttctgtcaagctgtgcttgtgttcctgggaccttt

SEQ ID NO: 21679 - DNA, 120 bp, synthetic construct
  source 1..120: mol_type = other DNA
accaaaaaaaagtgcatagaaaagatgggaacgtaccctccgtgaaaacgtcctcttttttgttcttgctggatccgtatgttctccaatctgagtggacttggaatgaagccaatttca

SEQ ID NO: 21680 - DNA, 120 bp, synthetic construct
  source 1..120: mol_type = other DNA
acacacacacacacacacacacacacacacagttagctgggtatagtagtgcacctgtagtcctagtgtactacacaatactacaccattagctagctatacaattagtgtagtgtacta

SEQ ID NO: 21681 - DNA, 120 bp, synthetic construct
  source 1..120: mol_type = other DNA
tgataacaagaaaagagcaaattacacaaacaggtgcactgagtagagaatgctgaagtgcaaattcaagaagcctcattttctttttgaggcaattgtgagcactcttaccttcttttt

SEQ ID NO: 21682 - DNA, 120 bp, synthetic construct
  source 1..120: mol_type = other DNA
acatttagtgagcacaataaatgaatgcatcttaaatcaatcaagtggaataaagcctatacaggaagcccttcaagtacttcgcaacctctcagccccacatcttactccagcctctgc

SEQ ID NO: 21683 - DNA, 120 bp, synthetic construct
  source 1..120: mol_type = other DNA
aataaataaattaattaattaaaaaaaagaagtgcaggggagtaaatgcctgtgggccactcttggccaatggggacagaagcaaatggacacatgcttctgcatgtcagccccaaggca

SEQ ID NO: 21684 - DNA, 120 bp, synthetic construct
  source 1..120: mol_type = other DNA
gtttctagactacacaattcttgtgtagtgaaatttagattaaaatatttaaatgcccaatacctcaacctgatagactgtaaataattctactccttctctcccttaaatgacaatgac

SEQ ID NO: 21685 - DNA, 120 bp, synthetic construct
  source 1..120: mol_type = other DNA
agtgttaactaagtgcaggaaggctgagatgtgccttatggagaagatatgtatattggtaagcttctttcatgcatgaatttagagagctgttggctgtgaggctgtgagttcagtgtt

SEQ ID NO: 21686 - DNA, 120 bp, synthetic construct
  source 1..120: mol_type = other DNA
aagaaagggagaccgagaattggtgcctcaaaagaaaggacaggacttggattcaaattgatccttgtttgcatcagggactcctgagattcttatgaaaaccatagccaagtgcatata

SEQ ID NO: 21687 - DNA, 120 bp, synthetic construct
  source 1..120: mol_type = other DNA
agtcacatatgccttttgggtgacttcactttgaatcctcaaaggatgacttagagaatgccaaataaacaccctggcaactggtaatgaccttctgggagattctgacagattaaggtt

SEQ ID NO: 21688 - DNA, 120 bp, synthetic construct
  source 1..120: mol_type = other DNA
cccctgttttctcatcttcctttgtcagagttctgtttgaggtgaccaaagccacttggatcctgatttagtggatgatttcagtgaaattaagactttgggattgacttttctctcccc

SEQ ID NO: 21689 - DNA, 120 bp, synthetic construct
  source 1..120: mol_type = other DNA
cccattctctctattaagaggttttcagtatttttaatgagtgtgtagatacctcctagtcaaacacagctgactcctgggaagaacttgcttttcaaaatgaagggcaagggactgtgg

SEQ ID NO: 21690 - DNA, 120 bp, synthetic construct
  source 1..120: mol_type = other DNA
ccctgctggggagcgcagaatgaccaccaggaggccaggaacaaaacgcttaaatgttgcatttattaaggaaatgttaaataagaaaaaaacaaaaagtcaaaacggtgtcacggatgt

SEQ ID NO: 21691 - DNA, 120 bp, synthetic construct
  source 1..120: mol_type = other DNA
atggtttaacaagttttaacagtctcatgctacttgacccagaaatcccagttctgggcattttatcctaaggaaacaatcacgctgtggcagaagatatatgcacaaggaccttcacag

SEQ ID NO: 21692 - DNA, 120 bp, synthetic construct
  source 1..120: mol_type = other DNA
atttatgattttgaattattttttaacctttactttttttctgatttatttatttttaacttttagcttcaagggtatgtgtgcagatttgttatataggctaattgtgtgttacagggg

SEQ ID NO: 21693 - DNA, 120 bp, synthetic construct
  source 1..120: mol_type = other DNA
gttgacgatgagtaactggaaccatggaaggcaaaaccataagtaaggggggacttatttattttgatcttttagtttctcttaatcccatgtctggttgtttttttttaatgttgagtt

SEQ ID NO: 21694 - DNA, 120 bp, synthetic construct
  source 1..120: mol_type = other DNA
gtcttcatgattttgtcttttgttgttgttgttgttgttttagtttttatttccaaaggtttgggggagcaggtgtggactagtgagggttctctagagggacagaactaataggatata

SEQ ID NO: 21695 - DNA, 120 bp, synthetic construct
  source 1..120: mol_type = other DNA
tagcctgagtatggtagatgtagtctaggagaacttggctgggaacacaacaccatgtcttcatattcatttcgaatgagatgggggtagacagagatagggtcttcctaaagaagtata

SEQ ID NO: 21696 - DNA, 120 bp, synthetic construct
  source 1..120: mol_type = other DNA
aacacctctatgcaaataaactagaaaatctcaacccacattctttagtacggtgttctgttacccatctcactgctgttgtctgtttgactgactgtggcagttgtgctgattggagca

SEQ ID NO: 21697 - DNA, 120 bp, synthetic construct
  source 1..120: mol_type = other DNA
agttaggtgctaagataaggtagaaacttgctggaggtcacacaagtacactggctggaagagggtactcagaatcaccaggctatgccaaattgtttctggttactttttcatttggta

SEQ ID NO: 21698 - DNA, 120 bp, synthetic construct
  source 1..120: mol_type = other DNA
ttgaccctgctcaaataaagtgcaattatctgcatgactttctgctccacttcatctaaagatgcaactgttcctctggcaacagaacatatcatctctcgtagtcagggtgatttaagg

SEQ ID NO: 21699 - DNA, 120 bp, synthetic construct
  source 1..120: mol_type = other DNA
aatggataaacatataagaagaggaaaatcaggagactccaagaaaacagtcaacaagataataaatgcatcaagggatatttgttattttgaccagaggaattgtgaggagctacataa

SEQ ID NO: 21700 - DNA, 120 bp, synthetic construct
  source 1..120: mol_type = other DNA
attcaaagatgcattttaagaccgtaacaccaaggaatgatcaaagtggtcttgatagctcaccatagccagtgtccaattcatggtttacacattactgagagcaagtgccacttctgg

SEQ ID NO: 21701 - DNA, 120 bp, synthetic construct
  source 1..120: mol_type = other DNA
cagacaactgggtgaatggggtttggagattctgagaggggtttggctgaggatacagacttaggaattatttgcatataggttatatttgatactggatggagttacctacagagaatg

SEQ ID NO: 21702 - DNA, 120 bp, synthetic construct
  source 1..120: mol_type = other DNA
aatgcctattactttttctctacttgatttagctgcatgttccaagaagccttcttgggtctgtataagaggtgcctcctgtggctcttgtagcctcttttctatgcctatatccacttt

SEQ ID NO: 21703 - DNA, 120 bp, synthetic construct
  source 1..120: mol_type = other DNA
agttgcctcttccaacagcatttaaattaatagataatagtccacgctaattgtaagaaacatgtctattgtataaaaccggattgaaacatgtctattatataaagccagattgatatg

SEQ ID NO: 21704 - DNA, 120 bp, synthetic construct
  source 1..120: mol_type = other DNA
tctctaggcaatgggcatccagtgaatgcaaacagcatttgatacaggtactcagggtgcagaaaactgaatgattaataggagggcattagatgagattttatgctgatgggaaggaat

SEQ ID NO: 21705 - DNA, 120 bp, synthetic construct
  source 1..120: mol_type = other DNA
gaacagttagatgagtaacaatttcgtaaaaaaaaagagaaaaagcatagataatcaacgaattttatatcaaatctgtgattacacaagcatgggtacaatattttatgagtacttatt

SEQ ID NO: 21706 - DNA, 120 bp, synthetic construct
  source 1..120: mol_type = other DNA
cagaaagctgatgctctgacttgctccatgaaactcaaaaaataacaaacactacttggcaccgttaatggtggcctcaagatacaaatcatgctcaaagtaacattaatagaaaagttc

SEQ ID NO: 21707 - DNA, 120 bp, synthetic construct
  source 1..120: mol_type = other DNA
tccccagcacatagtacagagctatattcacagaagacacttaaaatactgatgacaagggcaagttatacttctctgtcctaaagtctatgctagctagtgggaatgtggagccaagat

SEQ ID NO: 21708 - DNA, 120 bp, synthetic construct
  source 1..120: mol_type = other DNA
gatcattttcttgtcaacttgggtaaacttgaactatggctcccagagtatcatttcctatatggttccaggtcaaagttaggatgcttgcacatatgttcatgaatgagaatggcttgt

SEQ ID NO: 21709 - DNA, 120 bp, synthetic construct
  source 1..120: mol_type = other DNA
ttattacctatataggtgcaagcatgtattacttcatcatgtcttcttgtagactcatgcccaactacaccataatatatcacatttgggcttttttggagggggtggggggtgggggtt

SEQ ID NO: 21710 - DNA, 120 bp, synthetic construct
  source 1..120: mol_type = other DNA
ttcccctctaacctaacagtgcagacctttctttccctcccatgacttacagtgttagaagcactgctcatctgacacagctgtcccaattctcaggctaatgtgattaatctataataa

SEQ ID NO: 21711 - DNA, 120 bp, synthetic construct
  source 1..120: mol_type = other DNA
aacccaagtgagaatcgataaagatatagaaagacacaaggcctggtaaaatgttttgaggtgtatggaatgaaagccatgtggaaaggctaggcatgatggctcacacctgtaatccca

SEQ ID NO: 21712 - DNA, 120 bp, synthetic construct
  source 1..120: mol_type = other DNA
ggagcttgctagaaatgcaaattcggacacacatcagcaactcactgaatcagaatttccagaagaagagtccatgaagtgtccggctgattgttatgcatgctacactttgagaagata

SEQ ID NO: 21713 - DNA, 120 bp, synthetic construct
  source 1..120: mol_type = other DNA
ggaagactctattctgagactgctccaacataacatcagctatggaagtcctaggagggtatggcttgtggagtaataccctgattagtgtgcaccaaaagctcacagtattttttttta

SEQ ID NO: 21714 - DNA, 120 bp, synthetic construct
  source 1..120: mol_type = other DNA
aacaagatggtgaggaacgaatgtgacaagtgaagatctccttttggaaatttggatagctactccaaatcagagattcttttgtgaaaaactgagggtaagcactggggcattcaccaa

SEQ ID NO: 21715 - DNA, 120 bp, synthetic construct
  source 1..120: mol_type = other DNA
gggatactacatttggtgtcgtatctcagaaatctttgccaaaaccaagatcataaaaattcccccaagttgtcttccccatgttttgtagttttcagttttacatgtgggtttatgatc

SEQ ID NO: 21716 - DNA, 120 bp, synthetic construct
  source 1..120: mol_type = other DNA
ctcaccctactgtgcaatagaacaccagaactgattcctcctatctcattgtaacttcatactttattggccttgagatcccaattccaaaatcacttcctcagaaaagccttccctaac

SEQ ID NO: 21717 - DNA, 120 bp, synthetic construct
  source 1..120: mol_type = other DNA
agctgtccatagtgaaccctcctctaaaacatgttttagaagcctcaaaagaattcagtctaatggtatgattttaaaaaaagagacctggagggggaggagccaagatggccgaatagg

SEQ ID NO: 21718 - DNA, 120 bp, synthetic construct
  source 1..120: mol_type = other DNA
aaaaaaaaaaagagacctgggcaaagaaaacattcattaagtaaaggctgggataaaatgagaacacagatatgcatacccacacatgtaagagttggtcacaggttcatctctgagctt

SEQ ID NO: 21719 - DNA, 120 bp, synthetic construct
  source 1..120: mol_type = other DNA
gttccagttctgtctcacagtggacatagctgatgtagcagttttgaaaacttctctgcctgttttgttaagggaaaaaccactaaattgacaggctgtggagtagaagccatattgtct

SEQ ID NO: 21720 - DNA, 120 bp, synthetic construct
  source 1..120: mol_type = other DNA
aatgagtcctggttcacctgtatacaatttggctatactctggagtcagaccaggaattttaaagggtactgatgatgcccagctcctacgttcagagactcagattaaatgcatatgaa

SEQ ID NO: 21721 - DNA, 120 bp, synthetic construct
  source 1..120: mol_type = other DNA
gaagagccctgtggcttaaggcctacttcctgagttccttagacaaactctgaaattagccattctaggaagatcgatctttcctccagggatatctttaaatcaaagtttgtggttgtt

SEQ ID NO: 21722 - DNA, 120 bp, synthetic construct
  source 1..120: mol_type = other DNA
tgtcagatctcatagctgggggctgggggtgggagatacgtctctggcccatcagtctgcatgtagaatatttcttaatctactttttccttagcagttacaagtttaaaaaaaacatga

SEQ ID NO: 21723 - DNA, 120 bp, synthetic construct
  source 1..120: mol_type = other DNA
tgcatttaaaaaatgaaatttggactaagcatttgcggaaactttggcctcttcataactctggtcaggctcaactctttagctttctgcaggggaaaactgaagctcacagaccttgag

SEQ ID NO: 21724 - DNA, 120 bp, synthetic construct
  source 1..120: mol_type = other DNA
caagatctaccagtgatgtcaaacgacatgctaccatggtataatatccagcctgaacactaataaaatgtaacaatgatgcattctggttttcatgtcaggtaaataggttgtagcaaa

SEQ ID NO: 21725 - DNA, 120 bp, synthetic construct
  source 1..120: mol_type = other DNA
gcagcttcagcctcccaggttcaagctcagcctccggagtagctgggacagcaggccagcactacaacgtctaaataatttttgtattttttttaagagatggggtcccactatgttgcc

SEQ ID NO: 21726 - DNA, 120 bp, synthetic construct
  source 1..120: mol_type = other DNA
aaaattaatgttcccagtctgaacaatgtgaacatgggcacatcttgtttctgcccctttgataggcagcagatgtcacaaccagtcataaatgcaggtccacagaagttttcaagaaag

SEQ ID NO: 21727 - DNA, 120 bp, synthetic construct
  source 1..120: mol_type = other DNA
tggagctgttaatttgacaacaagaattagaggaatatgaggatcataggcatagtggcagtatggcatatagtacaccaacttactgggaaaaaaagaccttggggtggagccacttct

SEQ ID NO: 21728 - DNA, 120 bp, synthetic construct
  source 1..120: mol_type = other DNA
cttcctacatttataagataaatgtgagacagaagtgagtggaatcacctctacacatcttgctcctcatcctggaatgaagtaacttctggattgacccattccagcaggacgttctta

SEQ ID NO: 21729 - DNA, 120 bp, synthetic construct
  source 1..120: mol_type = other DNA
aaactgctcagcctgtggggtttcgcccttcccttccatgggaggcattatctacgccatccccattggcttcccaacttccaaagattaggagatgaattaagaggaaaggtgaagaca

SEQ ID NO: 21730 - DNA, 120 bp, synthetic construct
  source 1..120: mol_type = other DNA
tgaaaccagatgtatttgggtctgtgagacagtatcaaggtacagagtgagtgggtgggcattcaataagcagttgaataaatgaatgaatgagttcccctaaaattatgctcctgtccc

SEQ ID NO: 21731 - DNA, 120 bp, synthetic construct
  source 1..120: mol_type = other DNA
caacactcaccacacattttcctgttgccatggtttgaatgtaatatatccctccaaaacgcatatgtgatagtattaagaggcagggccttctgggaagtaataaagtcatgagtgctc

SEQ ID NO: 21732 - DNA, 120 bp, synthetic construct
  source 1..120: mol_type = other DNA
aatggtgctatgagaaataaccagcagattaggtaccctgaaagattcttttggtcaaactagttgaaatgctggataaaacattttgaaaacatctttataaatgtatggctgagctgg

SEQ ID NO: 21733 - DNA, 120 bp, synthetic construct
  source 1..120: mol_type = other DNA
aagcatctgcaccactgagtcaagatggccatatgtttaagacctcagctctaggattagttagcagttttcaaaaaaacaaaaacgaaaacaaacaaacaacaatgtttcccaaggaaa

SEQ ID NO: 21734 - DNA, 120 bp, synthetic construct
  source 1..120: mol_type = other DNA
aagagcctgactcttaaaaggcaggagaatcaccttgttcatccacttttactcctgtgatcagggagattagctaagatttttgacaggacctggacaaaaactaagaaatgccttagg

SEQ ID NO: 21735 - DNA, 120 bp, synthetic construct
  source 1..120: mol_type = other DNA
gaagcactggttagcagtaccagatatccaagaaatctagtaagatgacaactgagaagccaattgcatttggctatgtggaggttactgacatttatgaaggcagttaagttgagtggg

SEQ ID NO: 21736 - DNA, 120 bp, synthetic construct
  source 1..120: mol_type = other DNA
ctggaccatatggtaggtatatgtttaacttcttcaaaaactgccaaattgtttttcagattggttgtatcatttatattcccaccagcagtgtgtgagagttcccgttcttccacatcc

SEQ ID NO: 21737 - DNA, 120 bp, synthetic construct
  source 1..120: mol_type = other DNA
ttaaagcaaacattattgcttctgctatagcagagtggagatttggctgagctggtaagaacctcagtgaaaaggtgtcttagcaatgaaagggctgaatccgagattcctctagatgaa

SEQ ID NO: 21738 - DNA, 120 bp, synthetic construct
  source 1..120: mol_type = other DNA
accatccaagtcctgctcctcttcctgcctcgcctccaccgcctgctcctccgcctccgctggcgccgccgcgggatcccctggcccttcgggctcccccggtcccgcaggctccccgag

SEQ ID NO: 21739 - DNA, 120 bp, synthetic construct
  source 1..120: mol_type = other DNA
agcctctaaggcagaaggggcatgaagttacaagatctttcttagtactacctaacacacattactgagaaacttggcagtttgatgacaacctactaatcaaacagtgccatatgcctg

SEQ ID NO: 21740 - DNA, 120 bp, synthetic construct
  source 1..120: mol_type = other DNA
aaaaaaagtaggagtttcaggttgggacagacctggattcaagtttatttctatcagtgtagccttggataagttatcaaacatttagttcctcccatctataaaatgtagcaattaaac

SEQ ID NO: 21741 - DNA, 120 bp, synthetic construct
  source 1..120: mol_type = other DNA
gagatgtagctagatgacatattctgtattttcttatcattcagatgcagcttccctgtcactccttctaagagaccttcctcaaccacccagttgaaagtatccatctagtctatgcag

SEQ ID NO: 21742 - DNA, 120 bp, synthetic construct
  source 1..120: mol_type = other DNA
tataccctgaaatgaattcctcaagaaatgttgtgaaatgtgcaggaaaaactttatgcaaattaacttaaaaatgtaaataggatcatgtgtagaaaagtcaaaagggaaattatgata

SEQ ID NO: 21743 - DNA, 120 bp, synthetic construct
  source 1..120: mol_type = other DNA
ctaaagattatggagatgatgaccacgaacaaaggagatatgaaactaacaaagcaatattccacagagccaaacctaacagacatatctttaatccttctccctcccctcccctcctct

SEQ ID NO: 21744 - DNA, 120 bp, synthetic construct
  source 1..120: mol_type = other DNA
ttatatttttcggatttaaaaatttactctcagtttggcttgaaagccttcaccagaatggtcaaagaggcacacacacggcacaacagaagattaagaacccctgccaggtgcagtggc

SEQ ID NO: 21745 - DNA, 120 bp, synthetic construct
  source 1..120: mol_type = other DNA
atttatcttggttctcactaaatcctggggagtggagggttggactgagtttacacctcactgtgtgaattgaggaacttttactttcagacacagtggtttctgaaacaccatactgaa

SEQ ID NO: 21746 - DNA, 120 bp, synthetic construct
  source 1..120: mol_type = other DNA
gccaagtcaagacttaatttcatacaacctccatgttgcaacacagcaaataattccacctctggtggactattcagacttgactgagattttgttaacagcccaagactgaaaaagagc

SEQ ID NO: 21747 - DNA, 120 bp, synthetic construct
  source 1..120: mol_type = other DNA
aaatgttgtgccaatgagcgacagggatatatataaatagataccagtctgaatgatcgcagtacagacaatccctccacatttgacagaccaagctccattaaactgaggctgacaata

SEQ ID NO: 21748 - DNA, 120 bp, synthetic construct
  source 1..120: mol_type = other DNA
ttaggtctataagtgagtttttaaggtgcaggctacttggctttcaaacagggtcaacccagagccagagtcctatagtccctattgtagcaggtagtggtgatttgactttcaaaaatt

SEQ ID NO: 21749 - DNA, 120 bp, synthetic construct
  source 1..120: mol_type = other DNA
aggcccaaatactcctgcctgttttcttgcaatccatctatagtttagaactcatcatataaagtgctgttattttaaaagtcattcggtcttgactttactggctggagttgagaggtt

SEQ ID NO: 21750 - DNA, 120 bp, synthetic construct
  source 1..120: mol_type = other DNA
tcttcaacaggggtttgatctccatttgtcaacattgtgtaactttcttttacatccagtagagttggtagcttcaacatttctgttaaatagaaatcataagtattgaaaaaatgccta

SEQ ID NO: 21751 - DNA, 120 bp, synthetic construct
  source 1..120: mol_type = other DNA
aggaagaaagaaagacagagagaggaaggaaggaaagggagagaggaagaaagagagaggaaggaaggaaagggagagaggaagaaagaaagagagagagaaaggaaggaaggaaggaaa

SEQ ID NO: 21752 - DNA, 120 bp, synthetic construct
  source 1..120: mol_type = other DNA
atggggtctgagattagggaccagggcagaaagcccaagatgcagatctcattctcacttttatcttccatatgttaagcttctgcgtggaattttaattgaaaaatggacacattccct

SEQ ID NO: 21753 - DNA, 120 bp, synthetic construct
  source 1..120: mol_type = other DNA
tatatatcctattttcaagtctttgttcagatcttaccctcttcatgaggcctatcctgaccactgtatctaaaatcgccatcacccaaccatgctctattattttctcctgtcattttc

SEQ ID NO: 21754 - DNA, 120 bp, synthetic construct
  source 1..120: mol_type = other DNA
tgagatgaggaaactgattattagataggtaaagtcacacagtaagcggctaaaatgaaattatataacccagtatctggctccagagtataaccatttaccaactttataactgtggcc

SEQ ID NO: 21755 - DNA, 120 bp, synthetic construct
  source 1..120: mol_type = other DNA
ccttcagaatggttttattaagaagagttgaatgagctggaaaagtttgatctgagtgtctactttgtaccaaacatgtttaagtaggtcaccacataaaaggagagacatgcatgcata

SEQ ID NO: 21756 - DNA, 120 bp, synthetic construct
  source 1..120: mol_type = other DNA
tttccatacaccaataacatccaagctgagagccaagtcaataatgcaatctcattcacgatagccacgaaaagtataaaatacctagtaacacagctaaccagggagatgaaagatctc

SEQ ID NO: 21757 - DNA, 120 bp, synthetic construct
  source 1..120: mol_type = other DNA
agtcacacacatacgacgttctgatcttgaacacaatcgataatagcaagcaaggcagaaaagactccctgttaaataaactgtgctgggataactggctaaccatacgcagaagattga

SEQ ID NO: 21758 - DNA, 120 bp, synthetic construct
  source 1..120: mol_type = other DNA
ttgaagactagcatttatactgtttccatttttgttactgaaatgaatatctaaatagctatgttctcctaattgcatgagtactttttaataatatgttaatagaacttgggtcaacag

SEQ ID NO: 21759 - DNA, 120 bp, synthetic construct
  source 1..120: mol_type = other DNA
ataatccacaattttccttgtgttttgttattttgtatccttattggttgtttttaacttctgtttttggcttagtttggtatttgcccatgtgtctattgggatttttactatattctt

SEQ ID NO: 21760 - DNA, 120 bp, synthetic construct
  source 1..120: mol_type = other DNA
ttggaaatctacatagcaaatgaagaataaaccttcttcagcctaaacaagaggaataacattccccacgccttcttccctggcttcctccagagacaatcccaactctacaatctttct

SEQ ID NO: 21761 - DNA, 120 bp, synthetic construct
  source 1..120: mol_type = other DNA
attagcaaactgaatgcaacagcccattaaatgatcatgtactacgaccaagtgggagttgtccctaggatgcaaggatggttcaacatatgcagaccaataatgtgatacaccacatga

SEQ ID NO: 21762 - DNA, 120 bp, synthetic construct
  source 1..120: mol_type = other DNA
ataaagggggaagaatgagagtgaagagggaacagggtcacatgactgtcaaaattatcagggagactttataaaccggaggtcatctgagctaacatgaaaaatcacaacatactacat

SEQ ID NO: 21763 - DNA, 120 bp, synthetic construct
  source 1..120: mol_type = other DNA
ccccaaaaatagtggggttagaacattagtggctttacaattgtttagaagtctctgatgagcttggcagttcatctgatcttgtctgatgtcactcatgtgtctatggtcagctgcaaa

SEQ ID NO: 21764 - DNA, 120 bp, synthetic construct
  source 1..120: mol_type = other DNA
actgaggaactttcagattagtcgagacacaggaggcatgacagctgagtgcaatgtggaattctgaatttgatcctgggccagaaaaaaaaattaatgggaaaactttagttggaggag

SEQ ID NO: 21765 - DNA, 120 bp, synthetic construct
  source 1..120: mol_type = other DNA
aaaaaaaatttgaaggcttaatttaatgtgtaggtaaggcttccaatactgcatttcaatagcacttctggatgtcttcaaattacaatatggtaggacagcaatgatgttaatgatatt

SEQ ID NO: 21766 - DNA, 120 bp, synthetic construct
  source 1..120: mol_type = other DNA
tacattgttgacatatacaactgtgaaaacataaactgctttaaaaaataatcacaaacctgaaactaaataagtacataattatggacctttgtgcatcccaactttttagctgtgtta

SEQ ID NO: 21767 - DNA, 120 bp, synthetic construct
  source 1..120: mol_type = other DNA
ttttcatctgggacttggtctgcagcattttatgtatgctcctttccctgcaccatcccctaaagcaggaagtttgtcagtaatttttcattatcttttatcctagccacctcttaggcg

SEQ ID NO: 21768 - DNA, 120 bp, synthetic construct
  source 1..120: mol_type = other DNA
cacatatattatctcagcagaatcctggtaaatatctaaagcaaagcaaaataattgtttatttaatcatgtgcatgaaatgcttgttcaagccacccccccacccccccacccctctgc

SEQ ID NO: 21769 - DNA, 120 bp, synthetic construct
  source 1..120: mol_type = other DNA
tcatcaaaaccaatgcacctgagctacttctgcacttcccgaaggggcataggtctcacaggactactcaggtgcttttcaaattgcttccaatgatacctatcaaaattagttttctat

SEQ ID NO: 21770 - DNA, 120 bp, synthetic construct
  source 1..120: mol_type = other DNA
atggaatggcatcatgtctcccaaagactgttataatagccgatttactacctccctgcttccaccttgtcccttaaggtctattctccactgtaacagacaaaaagatcctgttaacat

SEQ ID NO: 21771 - DNA, 120 bp, synthetic construct
  source 1..120: mol_type = other DNA
ccttcaccacaaagaaaaaaaaaaaaaagaaaagcctttttgaaaagccattcaagagccatctcctgccccagggtgttagagcacaatacaggtcagcacaacatgcttagccttaca

SEQ ID NO: 21772 - DNA, 120 bp, synthetic construct
  source 1..120: mol_type = other DNA
tggcatagcatacactgcttggtttatttttaatctccctctgctagaatgtaagctccataaaaatgggattttgttcactgcagcatccccaacacctagagcagggctgatacataa

SEQ ID NO: 21773 - DNA, 120 bp, synthetic construct
  source 1..120: mol_type = other DNA
ggaggaggatgaggtactagaaagtgatggccgaggggcaaggggtttctttttctagtaatgaaaatgttttaaaattctagaaataccatttgacccagccatcccattactgggtat

SEQ ID NO: 21774 - DNA, 120 bp, synthetic construct
  source 1..120: mol_type = other DNA
atctggcaatattcacacttgtttagactccttccaaattacaccagggttggtttctgtgacccatagaatatggcagaaattacagtatgtctcttctacaattaagttacacgagac

SEQ ID NO: 21775 - DNA, 120 bp, synthetic construct
  source 1..120: mol_type = other DNA
aaagaaaataaagtccaaagtctataaactcgcttggcctctcagttcctttttgaactcagtgtccaggaacagccatgattccaaaagcacccacaagttctgaacttcaactcaggg

SEQ ID NO: 21776 - DNA, 120 bp, synthetic construct
  source 1..120: mol_type = other DNA
cgaagtatttcagagtaggaaaatgacttcaaggaggaaatggcaccattgtgcaaagcaggggctgtattttcatcaaaggtggcaaataagtactgtcttaccacacctcttttcctt

SEQ ID NO: 21777 - DNA, 120 bp, synthetic construct
  source 1..120: mol_type = other DNA
aaaaagatgactgagcaacaaggctgcaacaaggaaatttagatatctgcccatcaactctagagacctttgtacttttcagaaaagtatggcaacagcaagcataagaggtccctctcc

SEQ ID NO: 21778 - DNA, 120 bp, synthetic construct
  source 1..120: mol_type = other DNA
catcttgatgcttctactaattcaatataggattatatggaaagctaactcagctctttgatgtgccttttaagagaggatacacacactgtgggaagggctaagggtattaccatcagc

SEQ ID NO: 21779 - DNA, 120 bp, synthetic construct
  source 1..120: mol_type = other DNA
ttatttgaccaatttccttatctgtggtctaatcaatgaccaatcagtcattggactccctaaatctttctagagcctggcaatcccagtcccactactaacaaaggcatcctcatatac

SEQ ID NO: 21780 - DNA, 120 bp, synthetic construct
  source 1..120: mol_type = other DNA
tgcatgtgagaaagtctttgatttatagtgagtgtctagtcttttcaagcactgtgttaattattcaaagtaggaggtttcaaccagggacacaactagcatatacacagggcttttggt

SEQ ID NO: 21781 - DNA, 120 bp, synthetic construct
  source 1..120: mol_type = other DNA
atgtaatgcctccctcaacaaagcatacagagtttaaccactgactatgaggaatattttaaaaggtaggttgccaaaaagagtccaggaccagatggattcacagccgaattctaccag

SEQ ID NO: 21782 - DNA, 120 bp, synthetic construct
  source 1..120: mol_type = other DNA
taaattcataactactatatgcaattgtcctaggatcagtggaagaaaaaagaaaaataagatatggtccttttttgctctgcctctccctctccctctccctctccctctccctctccc

SEQ ID NO: 21783 - DNA, 120 bp, synthetic construct
  source 1..120: mol_type = other DNA
cagcaccatttaacgttttgaaagtattatttaaaagaaaaagactattcttacggaataatcaaaattctgctttcttaattgtaaaaatctggtttaaatatcccatggctcctggcc

SEQ ID NO: 21784 - DNA, 120 bp, synthetic construct
  source 1..120: mol_type = other DNA
gtatttatgtcactggaggatactcctactcaaagggaacgtatcttcagagcattgagaaatatgatccagatcttaataagtgggaaatagtgggtaatcttcccagtgccatgcggt

SEQ ID NO: 21785 - DNA, 120 bp, synthetic construct
  source 1..120: mol_type = other DNA
ctacaaaatcaacccttaacacttttttcaccttcagaattatttagaatgtggatttactttgtctagttttttcctttatagtgtaatttattgttactctctatttactgactacca

SEQ ID NO: 21786 - DNA, 120 bp, synthetic construct
  source 1..120: mol_type = other DNA
agtataataataaagtaaaagcagtaatttattatgaatacatagggatgtctcagggttagggcacctggacctcagggatggactggaaatctgaataggaactcctgtcgcctgcct

SEQ ID NO: 21787 - DNA, 120 bp, synthetic construct
  source 1..120: mol_type = other DNA
ttttattcttatgttgtgtttgagactccttcacattcttttactttatacaaaataaaccaaacttgaaatatgtcctagtagaaacggggaaacttactggcttctgttcattctctg

SEQ ID NO: 21788 - DNA, 120 bp, synthetic construct
  source 1..120: mol_type = other DNA
gttatacagtagtaagtgtggaacaagagctattaatcaagaagttttgcatgctctttactatttcttcatattaaagcaaattgaggagagtatgccccccccacccccctacagggt

SEQ ID NO: 21789 - DNA, 120 bp, synthetic construct
  source 1..120: mol_type = other DNA
tttctacctctgtgaagaatgtcattggtattgataggggattgcattgtgtagatcacttttggtagtgtggtcattttcacagtattcttccaatccatgacatgagatgtctgtcca

SEQ ID NO: 21790 - DNA, 120 bp, synthetic construct
  source 1..120: mol_type = other DNA
tccagagcctaagttttaactatcattgtatgcttcttttcctagtactagatcttaggaatttccggaaaatttgattggtttttccacacccaccccccccccccccaatatttgctc

SEQ ID NO: 21791 - DNA, 120 bp, synthetic construct
  source 1..120: mol_type = other DNA
acttgctgggattttgattgagattgcattgaatctctaggtcaagtagcaaagaactgacatcttgacaatattgagtcttcctactcatgaacatggactatctctctccatttatgt

SEQ ID NO: 21792 - DNA, 120 bp, synthetic construct
  source 1..120: mol_type = other DNA
gtgaaacagtggataatggaggaatgacaacacttggcatcctctgcccctcttagggaatatcagctgaaaatgaccaaacttgcagttttccagaagggaaactggtatatagatttt

SEQ ID NO: 21793 - DNA, 120 bp, synthetic construct
  source 1..120: mol_type = other DNA
tatcccaggatacgaaagaccctcttcctattggaagcctggacaaaaacatcccaattaaccgtctgagaaccaaagaataggccacatagatggaagagatcttaataagaatggtga

SEQ ID NO: 21794 - DNA, 120 bp, synthetic construct
  source 1..120: mol_type = other DNA
gattgaagcttttttttgtctcacagtaccttcattcaaggagagggggtggtgcaagaaaagctgcattcaggtttgcattcagaaaaataccacttacgttcaaccctgtgagcatta

SEQ ID NO: 21795 - DNA, 120 bp, synthetic construct
  source 1..120: mol_type = other DNA
ctgtcctcacctctcctcctacctctgctgttctctcccctcctccttctgcttatacagcccataaacagtgctggcagcatcttctctgattgtgtctcctcctttaaagccctatcc

SEQ ID NO: 21796 - DNA, 120 bp, synthetic construct
  source 1..120: mol_type = other DNA
ctgactttaatgaaagtgtacaggctgcctagtggaggcgaatgaattccccaccattctcatcacccctgctcagctggctgggcttgtattttttgttttgtttagtttttttgagac

SEQ ID NO: 21797 - DNA, 120 bp, synthetic construct
  source 1..120: mol_type = other DNA
cctctccagcaaaatccatgagatggtgcataggagttatatttacaaagcatcattgttattctctcttgcattggtggtgataatagccaagtcatttctgaggctgtcacaacacac

SEQ ID NO: 21798 - DNA, 120 bp, synthetic construct
  source 1..120: mol_type = other DNA
catatctttctttaagctcctgctgtgagcagccatctcaaatcctatagagctgtgtaccctaaatataccatgtggtatatactatagatctcccagtgcattatgaattgatgtcta

SEQ ID NO: 21799 - DNA, 120 bp, synthetic construct
  source 1..120: mol_type = other DNA
tacatgtgtgggaactagcaatggttaacagtacagctttgaagccaaattgcctgagttcaaatctagctccaacacttgctctgtgatttatggcaatttaatttacctcgtgcctca

SEQ ID NO: 21800 - DNA, 120 bp, synthetic construct
  source 1..120: mol_type = other DNA
cagataatccatagtgatactcagctaacgggtggtactgccaagacttgaacccaccattcttgtaacttccttgatatctctaattatggttttggtctgccagtttgttatggagca

SEQ ID NO: 21801 - DNA, 120 bp, synthetic construct
  source 1..120: mol_type = other DNA
caaaagggaagaactatacggggaacaattatgtattcaggattcaggccaactcctgaatcatcactgaacagtaagagtgcagaaagaaggcatcagatggtgggaatgtaaactagt

SEQ ID NO: 21802 - DNA, 120 bp, synthetic construct
  source 1..120: mol_type = other DNA
aaaactcaaattccaatttcatcttccctgagacagcagcagacatctctgttcagttctttctccttaactgagtggcttggagtctgcttcacatatgtatagtactgggatcagtca

SEQ ID NO: 21803 - DNA, 120 bp, synthetic construct
  source 1..120: mol_type = other DNA
actcacggagatattacaacataatctcatttcctaatttataaacatcttgtttcccagaggatcatctggggtcctcattttttgtgagttttttgtttgtttatttgtttgtttgtt

SEQ ID NO: 21804 - DNA, 120 bp, synthetic construct
  source 1..120: mol_type = other DNA
tgagtattgtcttatgcaaatgcattataattcctagtcctagctggtttgggctggtttctttgctacatcagcagggtggtgaccaaggctgggaaaacaaatcctgctgatcttcta

SEQ ID NO: 21805 - DNA, 120 bp, synthetic construct
  source 1..120: mol_type = other DNA
tctcctctgaatacttcatcatcaagtcttccttggttattctatttatcccaccccaggcttagcacttttcctaaaccacagtctgggccttacctggtacagctgtatttttaaaga

SEQ ID NO: 21806 - DNA, 120 bp, synthetic construct
  source 1..120: mol_type = other DNA
caccactgcactcctgcctgggcaatggagcaagacgccgtctccacaaataataatagtaagttgaagtcataagttcaataggaagtagtatcttacccttatgtgataaaagatgtt

SEQ ID NO: 21807 - DNA, 120 bp, synthetic construct
  source 1..120: mol_type = other DNA
tcctatcttgacacagccaagatgatgacttcatcaggcagatactgtgagggctacaagcttctaaataagcacaaaggtaattttatcatataaataatattaggatgacaaactaca

SEQ ID NO: 21808 - DNA, 120 bp, synthetic construct
  source 1..120: mol_type = other DNA
gtttcctggtagacgtgagggttggtgacctagtctttagtttattagagcaacttagggcctttcagtaaacaactggtctctagcacatttttgacaatgggtcccgaaattatacaa

SEQ ID NO: 21809 - DNA, 120 bp, synthetic construct
  source 1..120: mol_type = other DNA
ggagaactgctgccatttccttttggaggcagcaatgataatgatacactgaaaacatgaagtcactttcataaataaccaacattaaactgatatgtctgatttgaaataattatcctt

SEQ ID NO: 21810 - DNA, 120 bp, synthetic construct
  source 1..120: mol_type = other DNA
cacaaataatttcctgggccccatttgagttttctttaatcattacagcatgggattctctggtaaggtgtagatggtcccaacacaaaattgatggccatgagcttggtcacttaccat

SEQ ID NO: 21811 - DNA, 120 bp, synthetic construct
  source 1..120: mol_type = other DNA
ctcacaacacctctttttgattctgtcagaaaatccgcccagacccagcttatgaacctgtcaaactccatcagcagaatatgactgagaatgagaagcagataacctatgacttaagaa

SEQ ID NO: 21812 - DNA, 120 bp, synthetic construct
  source 1..120: mol_type = other DNA
agatggtacatatgcaggtatgttacatgggtatattgtgcaatcctggggtttgggcttctattgaacctatcaccaaaatagtgaacatagcacccaacaggtcgtttctcaactagt

SEQ ID NO: 21813 - DNA, 120 bp, synthetic construct
  source 1..120: mol_type = other DNA
gaaggcagaacatatcttttccttggtatccccagagcacagcacattgcctgatatggactgagtagacagacatattttagagaggaccacgtaattctatgtctaggaggtaaaaaa

SEQ ID NO: 21814 - DNA, 120 bp, synthetic construct
  source 1..120: mol_type = other DNA
tatgagacactgctaaacagctctagaatgtctatgattaaaaagacagggagaaccaaatgttgacaagaatgtgggaacaactggaattcccacacgctgctggtaggaatgtaaacc

SEQ ID NO: 21815 - DNA, 120 bp, synthetic construct
  source 1..120: mol_type = other DNA
acaaagacaaaagtcattgcaaactcagaatatcttttcccatgccagtctggggaatattttatgtaaccacttaatataatgacggttaaaattttatataacatttaatgatgtaat

SEQ ID NO: 21816 - DNA, 120 bp, synthetic construct
  source 1..120: mol_type = other DNA
ttcttcaactatccaataaacccccctccccgctgacctttagggactctatttactcacttattaggctctttgaagttccacagcgcactgctactcttctcatttttttcttttagt

SEQ ID NO: 21817 - DNA, 120 bp, synthetic construct
  source 1..120: mol_type = other DNA
gctgccttcctttgtaatagtgttttcaggcagaaaaattgaaaaaatcaggttttggaactagtcattgttcaatttgggatttggaatttcagttgatagcaggggaattaagatcca

SEQ ID NO: 21818 - DNA, 120 bp, synthetic construct
  source 1..120: mol_type = other DNA
cagattttcccagtgtggctattgggagtttctttaagttggcttctgtgtccttttgatctgggaaagtaggtttttgaagaggaagaaaatgggcgcacatacttaggaagagtcagt

SEQ ID NO: 21819 - DNA, 120 bp, synthetic construct
  source 1..120: mol_type = other DNA
gacgctggatttatcccttttagattaggactgtttggtagtttctgctaaatcttcaatccgttaagcctcaaagagtagtttcagataatttttggtggccagattggcctccatgtc

SEQ ID NO: 21820 - DNA, 120 bp, synthetic construct
  source 1..120: mol_type = other DNA
agatggtgatcttggctttttgtagctctagtgttgactctcaggctagatttatacttctagagcatcagaagtcaaaggaatatgttgggtcagtagctatgaatatcccacatcaga

SEQ ID NO: 21821 - DNA, 120 bp, synthetic construct
  source 1..120: mol_type = other DNA
cagacatcttacctcatagtcaattttaaatttctgtaccatccccagctccatgaacatccggagagcagctgtgatcatggcatcaacgtcgagagaaaagtcatcaaaatgaatgtc

SEQ ID NO: 21822 - DNA, 120 bp, synthetic construct
  source 1..120: mol_type = other DNA
tctgtccctctacaaccttttaggattaaggaagagtgcacagtctctgaggagagatgaaaaaggaattcagcaggacttgtttcacaagatacagaccacaaagactgctgataaaac

SEQ ID NO: 21823 - DNA, 120 bp, synthetic construct
  source 1..120: mol_type = other DNA
agagcaaatgagtccaatgtatgaactctagtatatacatttgtggtttatttgacttttgcttacttcctgattctctcctgtgtttcagggttgtgtttgatagatatgatctccaaa

SEQ ID NO: 21824 - DNA, 120 bp, synthetic construct
  source 1..120: mol_type = other DNA
aaagctgtatgcagtgtcccttagcacacagacttatattttctggcaaatttctcttcagtattaggtaaggcttcatttgcagtaactgtgaaagacaccccaaaggacagttcctga

SEQ ID NO: 21825 - DNA, 120 bp, synthetic construct
  source 1..120: mol_type = other DNA
atagctccccagtcagcatagtcttacaagaaatcttgggctaagtagacaaaactcaatgaagattaaggactccaaatgcactggttggtaagaacaactaacttttattaagtacca

SEQ ID NO: 21826 - DNA, 120 bp, synthetic construct
  source 1..120: mol_type = other DNA
atttatcacagttttgagactaggaagaccaagatcaaggcactggcagattcagtatctagtgccttcttgctttagttcagtgtctagtgccttcttgtcctcacatggtagaaagaa

SEQ ID NO: 21827 - DNA, 120 bp, synthetic construct
  source 1..120: mol_type = other DNA
ggagagggagagggagagggagaggctggaattcctaatggtctactataatgcagaatcgtaacactgagttagagctttcaaaagcttgcttctcttctttacaaacaaaaggtaatt

SEQ ID NO: 21828 - DNA, 120 bp, synthetic construct
  source 1..120: mol_type = other DNA
tgcttgatctgttacacaatcacttctataaatatatctctactttaaaatcttaattttagaagttcctcagctacgactaccaggtacctcggcttcctccctcctccgagagaccgc

SEQ ID NO: 21829 - DNA, 120 bp, synthetic construct
  source 1..120: mol_type = other DNA
agggcaataaatgaagctagaggtatagcagttaggacctggaaattcccaaagtattctaggacagtgcttcccaattaatgtgtctaagagacattgaagagctggttaaacagccag

SEQ ID NO: 21830 - DNA, 120 bp, synthetic construct
  source 1..120: mol_type = other DNA
taccaaataaatgggactagggtagaggttggtaggcacttaggtggggaagaaaagctttggatctgctaaactgagagaagggaagttgtgcctatgataacagctctgatgagagat

SEQ ID NO: 21831 - DNA, 120 bp, synthetic construct
  source 1..120: mol_type = other DNA
atatggcttacatggttggtaattatttttatattgttatgagatagccaactcaaggttcaggatgcataaatgctgtcttgtgagttgcctaaggccttggtggtttgtctatatagc

SEQ ID NO: 21832 - DNA, 120 bp, synthetic construct
  source 1..120: mol_type = other DNA
tatgttttggtcttaaaccttttttattgtcaacacacacctctctcctgtattggatctcctgctttctatgtcttcatgttttcctcttctttgcttgtccctctgtctttccctccc

SEQ ID NO: 21833 - DNA, 120 bp, synthetic construct
  source 1..120: mol_type = other DNA
ttattctttcaggacctcagtctgataaggccagggtgattagttattttgccccgggatgccttccaactccagaattccatgacctcactaagtgagaagatggttttaacataaatt

SEQ ID NO: 21834 - DNA, 120 bp, synthetic construct
  source 1..120: mol_type = other DNA
aaggagaaagaataggcttaaatatgagcaggaattgatttaggttagattaaatgcgcagatagagctgctttgtccattctggcaaaagtggctttgtggctaggaccagagagcaag

SEQ ID NO: 21835 - DNA, 120 bp, synthetic construct
  source 1..120: mol_type = other DNA
ttagaagttatgaagaccattaggaaaaatattttcaagagtagaagagatagatcttctgacgcttaaactcaatgacaaatacctttaacaggtgggacttcaggctttttaggagga

SEQ ID NO: 21836 - DNA, 120 bp, synthetic construct
  source 1..120: mol_type = other DNA
tctgaagcttaaggtcaaatgacaagtacctgtaacaggtggaacttctggctttttaggaagcaccagtgttttcttttctggcacaatttcttgtgggacttcaggcacttgaaagat

SEQ ID NO: 21837 - DNA, 120 bp, synthetic construct
  source 1..120: mol_type = other DNA
ttaggaggtggagcttctggctttttggcaggaggcaccggtactttcttttctgggaccacttccttcggtggcagcacttcaggcacttcaaagatatttgtaatttgtgtttagaaa

SEQ ID NO: 21838 - DNA, 120 bp, synthetic construct
  source 1..120: mol_type = other DNA
aagtcagtgacaaatacctttaacaggtgggacttcaggctttttaggaggcaccaccgacactttcttttcagggataatctctttgggagcttcgtgcacttgaaagatattagtatt

SEQ ID NO: 21839 - DNA, 120 bp, synthetic construct
  source 1..120: mol_type = other DNA
ttcatccttagggacgaacacaaatatgttaggaggaagagtaacaagtgggtttaaagtcctttgttgtgcagctgttataccttaaccacggttcctaatcatacttgattatggcct

SEQ ID NO: 21840 - DNA, 120 bp, synthetic construct
  source 1..120: mol_type = other DNA
ggttgcattagtcacaaaattggaagtttctaattgaatttcctctaaggctggctgaaaaataggtcaagcgtttaatgccaattatagcgggtgttaagggcctaccatttccacccc

SEQ ID NO: 21841 - DNA, 120 bp, synthetic construct
  source 1..120: mol_type = other DNA
ttagcacattccttagatagctcagtgctttctgcaatttgtgaaagggatgcagtatggcacaactgtgtatcttgaacagatgcagctgtgtggatggaactttgagatacactttca

SEQ ID NO: 21842 - DNA, 120 bp, synthetic construct
  source 1..120: mol_type = other DNA
atgcaataaaacaaacagcagagactctcattagtaacagtgggactgagaggtatacagcaaatcaaagtccttgaagcaagatgggctttaccttttggagtcactgtgagtgtagct

SEQ ID NO: 21843 - DNA, 120 bp, synthetic construct
  source 1..120: mol_type = other DNA
tgaaactgctgaagcctagtggacacccctattacctaatgcacagcttggagctaaagtaaagaaacttagtaaaaaacgtagttattcatttttcaaaggggagaatcccttgtcttc

SEQ ID NO: 21844 - DNA, 120 bp, synthetic construct
  source 1..120: mol_type = other DNA
agttcagaaatgtacctatatgtctatggccaattgattttcaacaatggtgtcaggaccattcaattaggaaagaatagtctcaaactagtggaactagaagtactagatattcacatg

SEQ ID NO: 21845 - DNA, 120 bp, synthetic construct
  source 1..120: mol_type = other DNA
gggaatggaagggaagtgagaccaatacatgctacaacattggtgaacctctaagacatgctaagtgaaagtgaaacgccaaaggtcacataatggatgattccacttacatgaaatatg

SEQ ID NO: 21846 - DNA, 120 bp, synthetic construct
  source 1..120: mol_type = other DNA
cagcatagcaggaggaaatgagacagtcattcaaagatctctaatttacaacagaaactggtaagaggcgtgagagcatagagcagaaaatgattacttccgcttgggaagaatgagaca

SEQ ID NO: 21847 - DNA, 120 bp, synthetic construct
  source 1..120: mol_type = other DNA
gagtgggaagaaaatgagtgggaagtgaatggttggaagcagaaacataaggaaatacctaggtattagaaatcttggggttttcttggtgaatacctggtagttgagcatagagctggc

SEQ ID NO: 21848 - DNA, 120 bp, synthetic construct
  source 1..120: mol_type = other DNA
acaatgttttattagacagtgctggtctatagaaatgagagcaccaatccattactgcataatattatgccctgtgttcacaacagggaacctgagcctcaaggaaagagtcagggaaga

SEQ ID NO: 21849 - DNA, 120 bp, synthetic construct
  source 1..120: mol_type = other DNA
gcaaggggaggagagggagggaggaaagaagggaaagagaaaacacataagatggtagaagagaaatccaagcatatcaattatctctatcagcataaatggactcaactatttggattc

SEQ ID NO: 21850 - DNA, 120 bp, synthetic construct
  source 1..120: mol_type = other DNA
cacagtataagtacaataatagaatatgtatactgcctgagtgtaaaagtggctatggactaaaaaagcctgttccttagccatatgtagaaagctgaaactggatcccttccttacacc

SEQ ID NO: 21851 - DNA, 120 bp, synthetic construct
  source 1..120: mol_type = other DNA
tactatcagagaggcactaactgcaccaacaagagcagatatgttaagatttacactcatgggctttattagagccacaaaggcttagtttctgtagaaactcttctgaaaagacctcaa

SEQ ID NO: 21852 - DNA, 120 bp, synthetic construct
  source 1..120: mol_type = other DNA
atgctgcaagtgcccaaactagaaactgggtactcttctcaccagcaaatgttgtttctgttatatagtaccatggagcatgttagagcaatgagaatgagtccagagtaattagccatg

SEQ ID NO: 21853 - DNA, 120 bp, synthetic construct
  source 1..120: mol_type = other DNA
caactggagtcccgctttgactatttcaaaggttttgctgtctatttgttcccttttgacagactgcaaccctggtaagcaaatctttattaacatgtacaataagactacaaaaacgag

SEQ ID NO: 21854 - DNA, 120 bp, synthetic construct
  source 1..120: mol_type = other DNA
tcctctttctcttccttaccattcctgctcctctgttcctgtatgtatatattctgcacaaatctgactccagttattccaaaccaattgccattcttcacatgtgccatgctgcctatt

SEQ ID NO: 21855 - DNA, 120 bp, synthetic construct
  source 1..120: mol_type = other DNA
tatcttttcatttctttttctttaagacacagagtcttcttatgtttgcccagtctagaatggagtggttattcacaggtgtgactgtggtgcactacagccctgaactcctgggctcaa

SEQ ID NO: 21856 - DNA, 120 bp, synthetic construct
  source 1..120: mol_type = other DNA
tgcataaatttgtgcaaaaaataaaacaggttctatactctttataaggcaattattgacttaaagagtaaattgtttctctttctctttgccaaacctcaagtaaataaaattattatt

SEQ ID NO: 21857 - DNA, 120 bp, synthetic construct
  source 1..120: mol_type = other DNA
tgaagtcatgtagcatgatgcctccagctttgttctttcatttggatttccccataataaaaaaatgtcttttttgttgctcagtttcctcctgaaatatgtctttgacattactaacca

SEQ ID NO: 21858 - DNA, 120 bp, synthetic construct
  source 1..120: mol_type = other DNA
acctggccacatcaacattttcaaccaatgtttggctatttctctcttcctagataacttcccaaggatgacttcttttttttttttttttttttcttgtttatttttcttttatttttc

SEQ ID NO: 21859 - DNA, 120 bp, synthetic construct
  source 1..120: mol_type = other DNA
aatttcttcacgaagccattccacattaattcctcatagtatcatcttctggctggtagctttttctctttgctgaaactctacttcagggcattaggaatctcccaactcatccagtgg

SEQ ID NO: 21860 - DNA, 120 bp, synthetic construct
  source 1..120: mol_type = other DNA
tcatgtgggcctttgtagggctgctctcaatatggtagctagcttctgtgatagtaacagagatgaagagaagtagatttgtaaaagaccaagaatgcaaagtcagtattacttggtgac

SEQ ID NO: 21861 - DNA, 120 bp, synthetic construct
  source 1..120: mol_type = other DNA
aagtacgtgggcatgggtgaactgtcactataatcatgataataaacatatccatcaccctcaaatataccttgtgcccctttacaataatatttttcctactgttgtgagccctgaatt

SEQ ID NO: 21862 - DNA, 120 bp, synthetic construct
  source 1..120: mol_type = other DNA
accacaagcaagccaattaacatatcctcacttcatgtagttactatttgtgtgtggtggcagaagaacacttaagagctactctctttctacatatggctagccagttttcccagcacc

SEQ ID NO: 21863 - DNA, 120 bp, synthetic construct
  source 1..120: mol_type = other DNA
agttccatgaggaccgttttttatctttgttcattgctgagactccagggcctaaacattgtctggtgcccagcacaagttagtgctgaataaattgaagagatgaatgtacgataagag

SEQ ID NO: 21864 - DNA, 120 bp, synthetic construct
  source 1..120: mol_type = other DNA
gggtatactgtgagatagagctctcatttgactttttctgaatcgtgaaccagttgaacctgtggcatatgaaaactaatgcatttcattcttgctgattcgagtgctatctgctatagt

SEQ ID NO: 21865 - DNA, 120 bp, synthetic construct
  source 1..120: mol_type = other DNA
taggaatggttgtcataggttataccaactggtcccatgtgttccccatctgaagctttatgataagcttcacattatcaagtgtctgtgtctcactcagctgctgtctggatttctaaa

SEQ ID NO: 21866 - DNA, 120 bp, synthetic construct
  source 1..120: mol_type = other DNA
tgggactcaaaggtatctcaaaagattagatgaatagcatttgaaatatttttaagtgaggttgacttttccctggctttgaactccaatatgacctgagcatttgagaaggagagttaa

SEQ ID NO: 21867 - DNA, 120 bp, synthetic construct
  source 1..120: mol_type = other DNA
acattataaactgggtgtcattgtgccagtcctgcccctgggctttatctctcactcagctcttgatcatgattactaaggcctacagtctgaatcttttaggtcatttttttttttccc

SEQ ID NO: 21868 - DNA, 120 bp, synthetic construct
  source 1..120: mol_type = other DNA
ccctcccggtccccctggtacatctggtcatcctggttcccctgtaagtatagccattggtggtgttttcttcctcatttttagaaaaatcaaattaatatatattctgctataattcag

SEQ ID NO: 21869 - DNA, 120 bp, synthetic construct
  source 1..120: mol_type = other DNA
acatatatcttagacagtagaaataaacataatcttagagagtcctttagaaggatatgctctgtaaataagcaagtaaaatagtttaaatacaacatttcatgacatttagaaatacct

SEQ ID NO: 21870 - DNA, 120 bp, synthetic construct
  source 1..120: mol_type = other DNA
ttgtgagaaaaatgcaaagtaaccattttgcttattggctacaatgtattttctcatacatgagcacctacgtattctttatttctctacctagggagaatcaggtagacccggacgacc

SEQ ID NO: 21871 - DNA, 120 bp, synthetic construct
  source 1..120: mol_type = other DNA
gtcaagaaacatttttaactgtcacaattgtatgggggatggcagtttcaactggcatctagtgggtagataccaggaatgccgcaaaacttcctacaatgcatatggaattatttggcc

SEQ ID NO: 21872 - DNA, 120 bp, synthetic construct
  source 1..120: mol_type = other DNA
tagttgttacactatctctgctttcccaagcaggttgctgtttgagactctaaaaacaaagtggtttgcagatggcacagatcagcaagcagagtcattgattattgtcaccttttccag

SEQ ID NO: 21873 - DNA, 120 bp, synthetic construct
  source 1..120: mol_type = other DNA
acactttgctgctgctctttctgcctctgtgaccactccttataggttccttttcttcttgtgcctgcccctttaatgctgatattgatgttttctcccaagccctttggacagtttcct

SEQ ID NO: 21874 - DNA, 120 bp, synthetic construct
  source 1..120: mol_type = other DNA
acccatacaacctagtgaacacatttctacttcttatggaacactggtaagtggctcaacccatttatctgaccctttaaagatttgtttaaagattagggggaaggaaaatcagttgtc

SEQ ID NO: 21875 - DNA, 120 bp, synthetic construct
  source 1..120: mol_type = other DNA
ttgattactatcattagactgtgccaggtgagaagacttctgctttcctaaaaagtaaacaaagccttccttatctgattaggatgaactgcaaacctgcactagagaatatttcccaga

SEQ ID NO: 21876 - DNA, 120 bp, synthetic construct
  source 1..120: mol_type = other DNA
tgttttgttcagtaagcttaagtcagtggcagaaggaagaaaaacaaaacaatcctagttccctagtactgtgtcagttctcactcctcccagccattataatgtgatttccccaagcca

SEQ ID NO: 21877 - DNA, 120 bp, synthetic construct
  source 1..120: mol_type = other DNA
ccatcatagaaataagccttaataaccagtgttgcctcattcagctcaaacagatttcatagccaaagcaaaaggactggtacggtagtctgtggaaaccaggaagataaaacaacagcc

SEQ ID NO: 21878 - DNA, 120 bp, synthetic construct
  source 1..120: mol_type = other DNA
ggttcaagggtcactgaactacaggccacaggctacagctagcctgcttgcgtgttctcatacaacctgcaagctaagaatggtttttatatttttaaccgttgtttttaaaaaagcaaa

SEQ ID NO: 21879 - DNA, 120 bp, synthetic construct
  source 1..120: mol_type = other DNA
aaaagtaagtatgacgtaggcaacatagttctgcaaaacaagacgaggtattgttcatctgagaatgaatgttgcctcctctcactcaaccctcatggaaagctcaggtagacaatctac

SEQ ID NO: 21880 - DNA, 120 bp, synthetic construct
  source 1..120: mol_type = other DNA
aaaaatgaaaaaggccctctcaatccatgtcccttggtagacctcgtttcctttattccatttacagtgaaacttacaagtgttgtctctgctccttttcttcacttctgcactcacctc

SEQ ID NO: 21881 - DNA, 120 bp, synthetic construct
  source 1..120: mol_type = other DNA
gttagttggccagtggttaatggtgcagagaaaatttaagataccatcaattggaaagaatatggtagagactttcaaagaggaatgtagtagctcatatatcaagagcctcaagcacaa

SEQ ID NO: 21882 - DNA, 120 bp, synthetic construct
  source 1..120: mol_type = other DNA
ttggtaacagatggatatgccaacagatgtgtttgatcctcttcaattgactacctacagcaactgccagtttttgagagttctgtaaggattgtgtttctaacaggcaaccactttgca

SEQ ID NO: 21883 - DNA, 120 bp, synthetic construct
  source 1..120: mol_type = other DNA
cctggaccaacactgtggtagtcagtaaaacagtttaattagctgatgactactcttcagtgcatgatcttggaacactaaataggctttatggatcctttaataagttgtgctttattt

SEQ ID NO: 21884 - DNA, 120 bp, synthetic construct
  source 1..120: mol_type = other DNA
caggctgtcagttccataaactggagtgagaacttatggtgctttttcccggcacgcccatggctacccatggaccaatcggcatgcactccctcccctctgaagtccataaaaaatctg

SEQ ID NO: 21885 - DNA, 120 bp, synthetic construct
  source 1..120: mol_type = other DNA
ctcttttgtaggtaaagtaataataacaggcccaagctcagaaagctagaaagtagtgagaccagcatcacacccaggatcattacttcaaagggttttcctctatcctgcagtctttct

SEQ ID NO: 21886 - DNA, 120 bp, synthetic construct
  source 1..120: mol_type = other DNA
tgcagcaatttgttggtctaggagacatctgcatttaaactctgatttgcggaacaacagtctgtagaagtcttcaggccagtggctcactagaccaaagaaagcttcttatagaattgt

SEQ ID NO: 21887 - DNA, 120 bp, synthetic construct
  source 1..120: mol_type = other DNA
ataagcagtgaggataatctctggctttttttaacaataagttgagataacagacatttaattcttattctgtgacgttatcactatttgattagacgatgtcaatcacaaactcctact

SEQ ID NO: 21888 - DNA, 120 bp, synthetic construct
  source 1..120: mol_type = other DNA
ccgaattcagccagagtgtgcagcagagggccataatctgttttgatttcacatccctgcatgaataagtataagagctcatagtctaatggcaaagacaaccaactacacaattacaac

SEQ ID NO: 21889 - DNA, 120 bp, synthetic construct
  source 1..120: mol_type = other DNA
cataatattaaaattaatgctaggtaagattacttcaaaagacctaaacacagaacaattctttacctcaatgatgggttaaaaaaaaaaataagaaaaacagggacaggaagaccctaa

SEQ ID NO: 21890 - DNA, 120 bp, synthetic construct
  source 1..120: mol_type = other DNA
ctgattcttgacgaatgtgtaggtataaagcacaagcccaatttataccactactcttacaaagctttctgatcggcttatgtctttatggtattgtctcctatgtgggccaaacacata

SEQ ID NO: 21891 - DNA, 120 bp, synthetic construct
  source 1..120: mol_type = other DNA
cttcgtttctttgttctattttcttcatgtgttcaactggcagctcctttgaaggctgacgtaggggactgtgtcttatccttctttgtattgcagtgttttctactcataggtgctcta

SEQ ID NO: 21892 - DNA, 120 bp, synthetic construct
  source 1..120: mol_type = other DNA
gcttacttttgaacaggaaagagggtaaggaagtgggggtaaggagaattgacctgaagctgtcttactttactccccattttaagaacttaagtaaatgtggcaaaatgttgatgtcta

SEQ ID NO: 21893 - DNA, 120 bp, synthetic construct
  source 1..120: mol_type = other DNA
ctacctgcttcatgaagttgccagatcccgttcttgggctctgtgaacttatagcttgtcattctctaagtgtactttgttttatttttatcaggttggcatttcacaccccaaagatgc

SEQ ID NO: 21894 - DNA, 120 bp, synthetic construct
  source 1..120: mol_type = other DNA
agagagccgctaccacttcatacatcttaatgcttccaggattattttctaatgccagtccctttagacctccttaaaaatacatttgagtcacagcattggacacttccacagggaaca

SEQ ID NO: 21895 - DNA, 120 bp, synthetic construct
  source 1..120: mol_type = other DNA
gctttctcttatgctggatcttcaaattttggtttggaaaatgccttctgactccaacaatgtaagctgaaatatgtagagataaaatgatgggaccaaagctgaaagtgtacattttgg

SEQ ID NO: 21896 - DNA, 120 bp, synthetic construct
  source 1..120: mol_type = other DNA
cttggagaaacaagcatacctgtacttacccaccaaaatctctattttcatgacttaatttctatgcacactccactcttgttccacctctgtacctttgatcacaccgtctctctcacc

SEQ ID NO: 21897 - DNA, 120 bp, synthetic construct
  source 1..120: mol_type = other DNA
gggagagggagagggagagggagaggcccccttacatttttgcacgcaaggcaagtgcttcactagctttaccctagccgtaggcctgatctttgaaaatcaagaccttgtctctgctgc

SEQ ID NO: 21898 - DNA, 120 bp, synthetic construct
  source 1..120: mol_type = other DNA
ctcaaggtcagcgtggggctgttttctttaccagaggtctgtggacatggacagcattgcataaggcctgacaaacttctggattctctacatggtgatagtttaaagtttctttaaaaa

SEQ ID NO: 21899 - DNA, 120 bp, synthetic construct
  source 1..120: mol_type = other DNA
atgtactgccattctagacattctggatagccacttgtaattttctaaacatgcaatgctctttcgtacctctgcatctgtactgatgatcatgcggttgcccaaaacattcctccttct

SEQ ID NO: 21900 - DNA, 120 bp, synthetic construct
  source 1..120: mol_type = other DNA
ccccacccacatcccccttccccacctgccttgccacgtctgtggatctttagagtagtttcatgcatatgaaatactttgaagtaccaaaaaaaaaaaaatagggcttttaaagacatt

SEQ ID NO: 21901 - DNA, 120 bp, synthetic construct
  source 1..120: mol_type = other DNA
aaagcacatgttgaccttagggtctaattttcccaaatgttcctcctgccctatgcttcctgaggctcataagctaaaatgtatagcatttacttgtctccacttaggccagaataggaa

SEQ ID NO: 21902 - DNA, 120 bp, synthetic construct
  source 1..120: mol_type = other DNA
gggcaggaaggacaatcacaaaaaataccccccaaaaccccaacaccttttcatctacagaaaccttttccacatggaaattccattttatttcttactcttttagtctgccaacatcac

SEQ ID NO: 21903 - DNA, 120 bp, synthetic construct
  source 1..120: mol_type = other DNA
tgttaaaggtcagcatgttctaattgggaatctagatatagcttagatttcctattggcttagagtatttgctataacaaatgaagtgcaatgacaattatatattcctactcggtcata

SEQ ID NO: 21904 - DNA, 120 bp, synthetic construct
  source 1..120: mol_type = other DNA
ttgcatgtttcttccatacaaagtgtgccattttatactgtgtatagtgaaaaagtgtgtcatcttccagaactacattattatctttgatcgtagtttgtttcttcataatgacactgt

SEQ ID NO: 21905 - DNA, 120 bp, synthetic construct
  source 1..120: mol_type = other DNA
agagagtgagttaatttctcttctactcgggggtagatgggtaagagagacaatacagtgacaaagattctgagatgacacattgtgaaaatcccaggttccctgaaatctagacgtcat

SEQ ID NO: 21906 - DNA, 120 bp, synthetic construct
  source 1..120: mol_type = other DNA
ggggttcttcttactaaaccacaacttttctggggcagggagtatgcctcacttgcatttgcatttccggttcttaacaggacctagtacatagttagcacttaattcatgtctattgaa

SEQ ID NO: 21907 - DNA, 120 bp, synthetic construct
  source 1..120: mol_type = other DNA
actgccaacaggtctcatgtaccctttgcccattttccctcaatgggaacaccttgaataactacagtaaaatatcaagaccaggaaattgacattgctacagtctacaaagtttactca

SEQ ID NO: 21908 - DNA, 120 bp, synthetic construct
  source 1..120: mol_type = other DNA
tgccctagaaacaacaaactaaccttgaagtgaaaggcctttctgcgtttatcttaccttttttgagcagcattaaaactgttttactcagaccaagtgccgtggctcatgcctgtaatc

SEQ ID NO: 21909 - DNA, 120 bp, synthetic construct
  source 1..120: mol_type = other DNA
aaaaatgcaaaattctcattctgtttgaggacccaaaggaacaccaatatggctggaatagagatagtaaggatagagggccatggtgaggaaatacagggaagtctggtggcacctgag

SEQ ID NO: 21910 - DNA, 120 bp, synthetic construct
  source 1..120: mol_type = other DNA
cgacttgaccttgacttcacaatgacattttaataagtttaataaaaggaggctggcaatatcagacatccctattcacccagaaggagaagcagtggcttgatcaccacaatgagatag

SEQ ID NO: 21911 - DNA, 120 bp, synthetic construct
  source 1..120: mol_type = other DNA
aatggtagggggaaatggaagaatactgttttaagagtgtcactttattaaatataatgttatttgaagatgggctttgataagttaaaggtatgtattgcaacctggagcaagcagtga

SEQ ID NO: 21912 - DNA, 120 bp, synthetic construct
  source 1..120: mol_type = other DNA
catttttccttcaaggcatttatgccttgagatggccaagaagttaaaaagctgagcagagctttgagatagaaatacaacgatgtgagaacaaaaaccagagtccagggcttgttggga

SEQ ID NO: 21913 - DNA, 120 bp, synthetic construct
  source 1..120: mol_type = other DNA
gataagtgctctcttgattatccttactactaaacttagatcataggcagcagggatggaaaaggacagaagggcctcaagttctaatgagaagtacaaagtatttgagcccagacctct

SEQ ID NO: 21914 - DNA, 120 bp, synthetic construct
  source 1..120: mol_type = other DNA
tttgggtttcaggttggtccaggcaatcaacagtgatccttaatacaaaatgtcttggtgagagcaataatcaagaaacttggccaaagtgcttccctgccagattgtgtgcttaataag

SEQ ID NO: 21915 - DNA, 120 bp, synthetic construct
  source 1..120: mol_type = other DNA
aaatgaactgttcagtactgaaagtggggtggtgaagtctccagctgttattgtattggggtccatctctatttagatctaataatatttgctttatatatttgtgtgctccagtgttgg

SEQ ID NO: 21916 - DNA, 120 bp, synthetic construct
  source 1..120: mol_type = other DNA
tgtttttttcccctggaaattcaggggagattattcattaggaagaataaatactgccaggtttcttagagctagagtctttcacatttcaaaggtttccccaaatgacaaaaccgtcag

SEQ ID NO: 21917 - DNA, 120 bp, synthetic construct
  source 1..120: mol_type = other DNA
tttttgccacgctgccctcagagtatcttatttgcattaaatcctctagactccagccagatatcaaatttcctctgccttcagctttgcttgactaacgccttgccagtttttttttct

SEQ ID NO: 21918 - DNA, 120 bp, synthetic construct
  source 1..120: mol_type = other DNA
tatcctgatcccaatgtcactttttaaggcattcgcttcaagagacaagcagtttagaatcaggcagaactggattgcaaaatttatgggcagaccggtatgtgtgcaggtgaagacaaa

SEQ ID NO: 21919 - DNA, 120 bp, synthetic construct
  source 1..120: mol_type = other DNA
tgacggagacctttagttaaggaaagattagttttagcattcaacataactaaatacccagcattatgttttacggtttttttcaacaatgatttatgtgtcgtgtttggtgttgcctcc

SEQ ID NO: 21920 - DNA, 120 bp, synthetic construct
  source 1..120: mol_type = other DNA
aactgagtacctattagggtatgccattaaaactgtcctcatgctgggactcattccacatgtaaaacttctaatagctaacatctgcccaaaaaggcacttgctttccagagcccaaac

SEQ ID NO: 21921 - DNA, 120 bp, synthetic construct
  source 1..120: mol_type = other DNA
atcactgtgtttgttaggtactttacctaatcttcatagtaaaaattcagctatcctcattttttaggagttaaagccaagcctcacagaaggtaatacctagcctataatgcctttgag

SEQ ID NO: 21922 - DNA, 120 bp, synthetic construct
  source 1..120: mol_type = other DNA
aagacatatttaaaaataccattacaaacacaaataaacctgaagcagaaactacaagaaagaaagcatgtctctccctctccctctccctctctccctctgtccctttccctctccctc

SEQ ID NO: 21923 - DNA, 120 bp, synthetic construct
  source 1..120: mol_type = other DNA
tcagagcaaacatgtaattttactgaatacttgtacaggtacacatacctttaagtcagtatagtgtaacattattataaggatgaatgttgcttactgtgcccattattttgtgtcctt

SEQ ID NO: 21924 - DNA, 120 bp, synthetic construct
  source 1..120: mol_type = other DNA
gttttgcacagaagctctgttgcttgggtaatgttggcgggggtactggaacaggaggggtagggggagagggtggaatgtaagaagcagggaaagctggctgcttttttgctgggggca

SEQ ID NO: 21925 - DNA, 120 bp, synthetic construct
  source 1..120: mol_type = other DNA
ggatgcagaagttggtggtgatcataaagatggacaatgtcaggaaggctaaaatctgattgtgcgggcaagaaggaaacagaaaacttgttttaccccacagtaaaatagctagaccat

SEQ ID NO: 21926 - DNA, 120 bp, synthetic construct
  source 1..120: mol_type = other DNA
gtgtattgatcaaacctctgtttgagaagcaaccatgcaaacttatcacatcatttgaccttgttcagatcttggtgcacacattttcagggctaattttctcccactgcagcttgctgc

SEQ ID NO: 21927 - DNA, 120 bp, synthetic construct
  source 1..120: mol_type = other DNA
aaacattagagattatactgaggaattgattgaggtaaaatattatccagattcggtttagaaattaatggtaatatttctgtaggaaggtctggactggagtattctgctctctgctgt

SEQ ID NO: 21928 - DNA, 120 bp, synthetic construct
  source 1..120: mol_type = other DNA
atggtgtgagataggggtacagcttttccaccatacacgtgatcaattgtcaggcatcatttattataaagcctgtcatttctctacaggaacacacagctattataattctgtgaaatt

SEQ ID NO: 21929 - DNA, 120 bp, synthetic construct
  source 1..120: mol_type = other DNA
tatatacacagcggactgtatgtacaaaaaatatatatacacagcggactgtatgtacaaaaaatatatatacacagcggactgtatgtacaaaaaatatatatacacaacggactgtat

SEQ ID NO: 21930 - DNA, 120 bp, synthetic construct
  source 1..120: mol_type = other DNA
tcccctctcatttcagttagctttccttgtacaatatgacttctactctaccatatattcaaggttttgcccaaattatcttcagtactcctaattacctgccctctgttgtgcattagg

SEQ ID NO: 21931 - DNA, 120 bp, synthetic construct
  source 1..120: mol_type = other DNA
actcagaagtattcactagaggaaaagataaaaaaaaaaagagagtctgacataggaaccacactgtgcttgagccccacaaagcttccacattccaagtcttctgggctgtaaacatgg

SEQ ID NO: 21932 - DNA, 120 bp, synthetic construct
  source 1..120: mol_type = other DNA
gatatctctcgaatgagaattttatgaccttcttcaaagaaaggtcagaaaaaacatttatgtcctgcttaaggagggtgggaggaggtcagagagaccttcctgcttctgctgtttact

SEQ ID NO: 21933 - DNA, 120 bp, synthetic construct
  source 1..120: mol_type = other DNA
atccctgaaaatctgctaagcccttggcctgcaggtgagcagcatgcacaaaagtagatttgttaattttctgaaaagaatacagctggctggctcaaagagttaaggcaacatgataat

SEQ ID NO: 21934 - DNA, 120 bp, synthetic construct
  source 1..120: mol_type = other DNA
ttagcttctatatgtactgagagagagtagttcattctgctggaggtgcatagttggagacagagtgctaggaaaactatagagacattttgggagttgcctcagctgacatactttgtt

SEQ ID NO: 21935 - DNA, 120 bp, synthetic construct
  source 1..120: mol_type = other DNA
agaggaggagatggttgagctgttttgaaggatgactaatttgagggtgagtagttcagtacttttgggtgtggtgagggacaataactttttgagcatccatttattttagctggccat

SEQ ID NO: 21936 - DNA, 120 bp, synthetic construct
  source 1..120: mol_type = other DNA
ctgcctgcctcaagtgaaccatcctgtatagcataatgtacaaggaaggttctggaatgacatttagagactgaatccaatgctccactcataagcagaataaagtgcacagatttatgg

SEQ ID NO: 21937 - DNA, 120 bp, synthetic construct
  source 1..120: mol_type = other DNA
cctcctttcttcattccccaaagcatgcttgcttgtatgcctgcactctcactattgttttaaacatggagacatcaaaagaaaaaagatctgctctccaagaagagtacgatgagagga

SEQ ID NO: 21938 - DNA, 120 bp, synthetic construct
  source 1..120: mol_type = other DNA
tgtttgtttgtcagtctgtctggctcaccccccaagaaggcagacatccagtggcccttttgttttgttttgtttcagtcaactaaaaaggaaaaaaaaaaatcaatgcaggagagggag

SEQ ID NO: 21939 - DNA, 120 bp, synthetic construct
  source 1..120: mol_type = other DNA
ccaggaaatcaggagttagaaaagatggattctgtatctaactgcatggatctgctatgaggccttgagtaaaagtcagctgctctgagcctcaggaaagtgttttgttttttgttgttg

SEQ ID NO: 21940 - DNA, 120 bp, synthetic construct
  source 1..120: mol_type = other DNA
cacaaacttactggcttaaacaacacaaatgtattgttttccagttctataagatcagaggccttcattggatctcactgggctaaaatgaaggtgtcagcaggactgcattccttcctg

SEQ ID NO: 21941 - DNA, 120 bp, synthetic construct
  source 1..120: mol_type = other DNA
gacaatggttatgctccagtgatatggagaacttgcttatactgttgatgggtataggtaattgtatccagaactttgaaaaggttcagaatatagtagttctgaatatagaaacactct

SEQ ID NO: 21942 - DNA, 120 bp, synthetic construct
  source 1..120: mol_type = other DNA
ataaatgaatatcatcacagatgaatacagttgactcttgaaaagcatgggtttgaacagtgcaggtccacttatacctggattttcttctacctctgccacgcctgagataggaagacc

SEQ ID NO: 21943 - DNA, 120 bp, synthetic construct
  source 1..120: mol_type = other DNA
cccagtcacccaccgctgagtctaatgattcatgggcagagctagggctttgggaattaagatttgcttacaataaaatatcacatcactttagtgcctgttatttgagaaagcctttct

SEQ ID NO: 21944 - DNA, 120 bp, synthetic construct
  source 1..120: mol_type = other DNA
tgtgaaagaaaaaacacaaacgagttttctgtcgcttgattattaagaaagggcttttctggaagggattcatctcaggacctggggccctactaaaacatgggcatttgttctttcgac

SEQ ID NO: 21945 - DNA, 120 bp, synthetic construct
  source 1..120: mol_type = other DNA
catgggccaaacactaagggcttcactgattctaacttacttcattcccacgacaaccccatctttgcgtccctgtttttacaaatgaaattgagaattacagaggttagaacatttgcc

SEQ ID NO: 21946 - DNA, 120 bp, synthetic construct
  source 1..120: mol_type = other DNA
caagcttgtcccactcgtggcctgtgggctgcatgcagcccaagactgctttgaatctggcccaacaccaattcataaacttcttaaaacattatgacattttttgcgattttttttttt

SEQ ID NO: 21947 - DNA, 120 bp, synthetic construct
  source 1..120: mol_type = other DNA
tacccagccttgtgtctgtcctattcttaacttgaaccccggcacccagtgcagagactggtacagaataggtgctcagacaatgttgtcgactaactgatactttttttaaaatttatt

SEQ ID NO: 21948 - DNA, 120 bp, synthetic construct
  source 1..120: mol_type = other DNA
ttctggatattagccctttgtcagatttattctcttctcttcacccaaaaagcatacctaactgacatcccaaccaaggttccactcatcaaaatcccatccatcctctggaccatcaaa

SEQ ID NO: 21949 - DNA, 120 bp, synthetic construct
  source 1..120: mol_type = other DNA
ggcttaaaacaatacacatttattagcttatagtctttatgggtcaggaattctggcacagcttagctaggtcctctgctttaggatctcccacatggctgcaatcaacatattggcctt

SEQ ID NO: 21950 - DNA, 120 bp, synthetic construct
  source 1..120: mol_type = other DNA
cttatacagatgaattttagatggcccaagtacctagctaccaagtgacatgatgcctgggtggggggaggggggaatgatctgcttttttcttaagaattcgccattttaatgatatat

SEQ ID NO: 21951 - DNA, 120 bp, synthetic construct
  source 1..120: mol_type = other DNA
ctgtcagccaggcaccactctgcattgagaaggcacctgcatttcttctcacatgctccccctctaccttccaaccagcaatagcatcttgaatccttttttttttaaattttttaattt

SEQ ID NO: 21952 - DNA, 120 bp, synthetic construct
  source 1..120: mol_type = other DNA
ctcattaacttaggttgaccttatttaagttagttgcccagtacttgactgagtaaaatgttcactgtggagagaaaagcagcaaccacatgtactggtgaccagctgaaggttatagtc

SEQ ID NO: 21953 - DNA, 120 bp, synthetic construct
  source 1..120: mol_type = other DNA
aagtctccctcctccatcccctctgttagcttagaaatatggcctttgtgtgggacaactgaaatccagactcgatttctagctctttttcttatcatttgtaagttacgtaaactgtcc

SEQ ID NO: 21954 - DNA, 120 bp, synthetic construct
  source 1..120: mol_type = other DNA
catagcaaaatataataaatcttacaggagagaccaaagatttgcttgcatttctttctttttatgcaggagttggggctaaatttataaaaatctcatggttaattacagtgtgtgtgg

SEQ ID NO: 21955 - DNA, 120 bp, synthetic construct
  source 1..120: mol_type = other DNA
agaccagcaggagagtattcttactctaacaattcaccctatctggaatccatttctcagtttttttcacttcctccttctggcccagctcaagttctgtctcttcaaacaagacttcca

SEQ ID NO: 21956 - DNA, 120 bp, synthetic construct
  source 1..120: mol_type = other DNA
atcttgggcctagcctctgaattggtcctgtaattaaggcaaataagtaaacatacacatgccatcatttgagcttttcctttccagaaatatctcttattgaaaacacatgatgtcatc

SEQ ID NO: 21957 - DNA, 120 bp, synthetic construct
  source 1..120: mol_type = other DNA
gagtatcatgaaaaaggtgctgatgtagcttaagaagacttaatagacatagcaactggatataaaatgtactcctgcattagatcctagtttggacaaaccagttatagagtctttttg

SEQ ID NO: 21958 - DNA, 120 bp, synthetic construct
  source 1..120: mol_type = other DNA
gtttagctttgtaataatggccttgttctctttttcttgaatgtttactttgcttttttttcaattaagatttcattttgttattccctgtccacttttacaatctaagtacttttgtgt

SEQ ID NO: 21959 - DNA, 120 bp, synthetic construct
  source 1..120: mol_type = other DNA
gaggtctttcttttcttgttcccaatctagtgcaaaagccttcagcttttcaccattaagcataatgttagctgtaggatttttgtagatggtcttcatgaaggggagaaacttactctg

SEQ ID NO: 21960 - DNA, 120 bp, synthetic construct
  source 1..120: mol_type = other DNA
aatgaaattagctttgaactgaatgagaggcaaaaagacctaggggaagataaagagactaatccctaaggtctgaacgtggtcagagggtctcagtagtgggggatatcttcaatgaca

SEQ ID NO: 21961 - DNA, 120 bp, synthetic construct
  source 1..120: mol_type = other DNA
atgtgcgtgcgtgtgcacacacacacacacacacacagcatcaaaccaggatagttttgcataatggctctagaagtcattgtataccacagactgagaaagattggtattttaaaagtc

SEQ ID NO: 21962 - DNA, 120 bp, synthetic construct
  source 1..120: mol_type = other DNA
acacagagaaagtattgtaagagaattattttgcagtgagcctgataatagaattatgtgtgtacctatgtatggttttgagtggaagcctatgcaaatgtcagcaaaaggcgggggttc

SEQ ID NO: 21963 - DNA, 120 bp, synthetic construct
  source 1..120: mol_type = other DNA
tacctgaacctcccattgctgatgcatagatgacctcaacaacatgttaagcgtgtagtcatctacttttctaaaaacctgtggcaaagtcactcacctcttgcaatctcagagaagcct

SEQ ID NO: 21964 - DNA, 120 bp, synthetic construct
  source 1..120: mol_type = other DNA
gatagcagcctctagttcctttatactcagccaataagagagctcctttaataatctgaatagagaactgtaatccatctttatttttcagctttgcatctaactttgttcttgtcttac

SEQ ID NO: 21965 - DNA, 120 bp, synthetic construct
  source 1..120: mol_type = other DNA
tcactaaactcatttcacaaatcactaatgagctgtcatgcacagtttgaaaaaatacgctaatagagtttgagtcttttggcatgactgaattataggatagggtgctgattgtcttat

SEQ ID NO: 21966 - DNA, 120 bp, synthetic construct
  source 1..120: mol_type = other DNA
tcagtcacagccatgtaaattggcagctgctctgacttagagaacaagattcatgctttacatgacatttatcttagcccctgtggacagagttcacatgagtaagcctatattgaccat

SEQ ID NO: 21967 - DNA, 120 bp, synthetic construct
  source 1..120: mol_type = other DNA
ttgtcttcagtgattggccattgtccttgggatacagtttgaacctatatcagggctttcaaggcaaacaagaaaagtcttagacaatgaggtgaaggaccaactctcagacaaatcttc

SEQ ID NO: 21968 - DNA, 120 bp, synthetic construct
  source 1..120: mol_type = other DNA
ttaattgaggtcacttaaaagtaattgtagaattgcttagtctgtaggagtgaaaagagaagtcacaggtatggtgtcgaagttcccattgaggaccagaagacaataacctctaccaag

SEQ ID NO: 21969 - DNA, 120 bp, synthetic construct
  source 1..120: mol_type = other DNA
ttcttctcctgacagctctagaattccttaacttagtgaatatagccacaatcaatccagttgctcaagtcagagatcaggtagccatccatgtcaaatcccaaatcctgtcagatctcc

SEQ ID NO: 21970 - DNA, 120 bp, synthetic construct
  source 1..120: mol_type = other DNA
attagtgctcagtggctgttctgattattttatcattacaggttgagtatctcttatccaaaatgcttgggactggaagtatttcagatttctaactttttttttgggggggggggtgat

SEQ ID NO: 21971 - DNA, 120 bp, synthetic construct
  source 1..120: mol_type = other DNA
ggaagagcaatattcctaaaatgtgtaattttcaaccataggcagacttaccacaaagtttctaaaacagcttcagcttcagaacccctctattgtactggtacttcacaagaccctgta

SEQ ID NO: 21972 - DNA, 120 bp, synthetic construct
  source 1..120: mol_type = other DNA
acaattcagcagtgaagccattgtgtccagagctttcctttgctgggagcctttttattatggcatcaatcttgttattggtctgtttggcttttggatttcttcatgttacaatcttgg

SEQ ID NO: 21973 - DNA, 120 bp, synthetic construct
  source 1..120: mol_type = other DNA
gcctggtattgtgattactcacttgatttttggttcttatgaagttgcctttttgtgtgaatagttcttcagtttggtgttcctgcagggttaatgatcagaggtgtctattcagccatc

SEQ ID NO: 21974 - DNA, 120 bp, synthetic construct
  source 1..120: mol_type = other DNA
atgttcatccttctggcttatcttgagctgttgccagtgctgtttaaatcttctcatgaggagagtcagatgcaaacagaaatataatagagtgaccagaaactccagagacaaagttgg

SEQ ID NO: 21975 - DNA, 120 bp, synthetic construct
  source 1..120: mol_type = other DNA
atccagttctctacgacaacatacttgattcttttgggattagactttggagcaataagatgtgattttttttcttaaagtcattgtaatctaaaattgtccaggtctcacaaatcttgc

SEQ ID NO: 21976 - DNA, 120 bp, synthetic construct
  source 1..120: mol_type = other DNA
tgctcttaaccactatcggtacaccttcagaatggccatgttttatgccggaaactgccttgtttactctgcaactcccttggtatttcactttcacccattatcagttctttcatgttt

SEQ ID NO: 21977 - DNA, 120 bp, synthetic construct
  source 1..120: mol_type = other DNA
caaacaagtggttatggtaggttttaccacattttacagatgagaaactgaaggccagggaattcactgataaaagtatgagagggaactggcagtgggacattgactcctactctaact

SEQ ID NO: 21978 - DNA, 120 bp, synthetic construct
  source 1..120: mol_type = other DNA
atgccacagaagacttaacaccctggacaaaaaaatatatacgtatgaggaattttgcataattgtccatagtgaaaatttggcaacaaccaaaatctcacccccaaataaatgattaaa

SEQ ID NO: 21979 - DNA, 120 bp, synthetic construct
  source 1..120: mol_type = other DNA
gagctccgtgatagaactatatgctgtttgctctctaagagattccaatataatggaaagaaaagagaagcacatgtcctaaagttcttacacctccattgtactggaaacttgtgcaac

SEQ ID NO: 21980 - DNA, 120 bp, synthetic construct
  source 1..120: mol_type = other DNA
ttaattcaagatggattaaagacttaaacgttagaccaagatcattcttgatgtgggcttgtacttactttactttgtgcgagtgccctcactttctaccctcaaaccctcatacagcca

SEQ ID NO: 21981 - DNA, 120 bp, synthetic construct
  source 1..120: mol_type = other DNA
tttttgtttgcaataaacatgtatggcattgcctatagcatcatgaaagaaccagacttactgaaatcgcatgaaaactaagtgtaggccaggtgtggtggcctgtaatcccagcacttt

SEQ ID NO: 21982 - DNA, 120 bp, synthetic construct
  source 1..120: mol_type = other DNA
cccaacattatgttctccacaatcggaaccacaatagaaatcccaaaatgggacgaaaatatgactccattcaaaatgcaaaaagtatcagaccccccccccccattttttcataaccta

SEQ ID NO: 21983 - DNA, 120 bp, synthetic construct
  source 1..120: mol_type = other DNA
atgtaggaaactacactgtacacaagactattcaatattagaaatattgagccggataaaggctgaggtgagagttacagtttgagttagatagctgtacagtttgggttacataaagga

SEQ ID NO: 21984 - DNA, 120 bp, synthetic construct
  source 1..120: mol_type = other DNA
ggggatagatatcccattttaagtgatgtgattatattacacattgcatgcctgtatcaaaacatgtaccccataaatatatatatgtaccccataaatatatatacctactatgtaccc

SEQ ID NO: 21985 - DNA, 120 bp, synthetic construct
  source 1..120: mol_type = other DNA
catgagccactgcgcccagccataccactctgtttctttcagataaaattgaagggaagaaatcagcaaagtttgaaaaactgccatcaagtttagataccaccagttacactgaacact

SEQ ID NO: 21986 - DNA, 120 bp, synthetic construct
  source 1..120: mol_type = other DNA
cctgccccttctccagcattccatacacttgttcaaattagaaacttaaggagcatgttctaccttattccacacattcagtctaccaccaacatgaatcatgctgactctattgcctaa

SEQ ID NO: 21987 - DNA, 120 bp, synthetic construct
  source 1..120: mol_type = other DNA
tggccccctcccactgactctaccctgggttgttgcaaatgctttcccatatcccgagcttccactgcagatagaagctgttcctgtggggctctgctgcctgatgcctctcactggccc

SEQ ID NO: 21988 - DNA, 120 bp, synthetic construct
  source 1..120: mol_type = other DNA
cttaagttacacaaataccataaaaatagctctaaacagaacacattacttctcaatttatataactccacttcagctacattagttctctgcacaaaacacaagagtgaaaaagatatc

SEQ ID NO: 21989 - DNA, 120 bp, synthetic construct
  source 1..120: mol_type = other DNA
ggaaagactttagtgtctctttttcagttggccactgtcatatctagaattgtggcaatcattcgacaaccattaaaggaaacttcttagtgaggacaaatcccccaaactgaggatggc

SEQ ID NO: 21990 - DNA, 120 bp, synthetic construct
  source 1..120: mol_type = other DNA
aatgtacagtaaaagtttttatatctgaaatccctgctaagctatgggttcctaagaaacaggcattctttccactttatctctagcttgtacctctctcctaagctccagactttcata

SEQ ID NO: 21991 - DNA, 120 bp, synthetic construct
  source 1..120: mol_type = other DNA
cttctgtgacttcctctggtcttactttcagccctagctgagactttcatactactgtgagcaccgtgctatgaaggcatacctcacaccattctataatcagtgctttaacagactgtt

SEQ ID NO: 21992 - DNA, 120 bp, synthetic construct
  source 1..120: mol_type = other DNA
ggtagctgtaggaacccctgggggagtccgaggaagactgcatgactcaagactctaacctaatatacatcgttatgtttatcgtttgtaggacaaagattcaaattgtattccaatgtt

SEQ ID NO: 21993 - DNA, 120 bp, synthetic construct
  source 1..120: mol_type = other DNA
aatattgtgtactaaaaagtgtatgtttgaaaacaaacaaaagacattggttaaaaaataaaccttcggctaggagcagaggctcacacctatactctcgcactttgggatgccaagacg

SEQ ID NO: 21994 - DNA, 120 bp, synthetic construct
  source 1..120: mol_type = other DNA
caccatcatccacagtttggtacttcaccattttcaaatgctctgggattagagctgctcctacataccccctagaactgagcacatcagcgatgtacaattaaggcgtgcttactaatt

SEQ ID NO: 21995 - DNA, 120 bp, synthetic construct
  source 1..120: mol_type = other DNA
taaataacaaaaaataatagtatctaccgtataagttactgtgaggataaaataatccaattaatccatgttagtcacagtgtttggcatatactaagtgactgatacaggttagaatga

SEQ ID NO: 21996 - DNA, 120 bp, synthetic construct
  source 1..120: mol_type = other DNA
gttgtcactgggcatttaacatttttctcaacagtgagaagcagcagagtgaactgctcaaaatctttattatgtagggtcactgggtcaggtcgtggcctgatgctttcctcccaatct

SEQ ID NO: 21997 - DNA, 120 bp, synthetic construct
  source 1..120: mol_type = other DNA
aaacttaggcaggagtgtgttacccagagagactgagggcttctgctgtgcacctccaaaaccttttcctaacctcttcaccccttcctaactgctaatggttggagaaggtggaagttc

SEQ ID NO: 21998 - DNA, 120 bp, synthetic construct
  source 1..120: mol_type = other DNA
aaaacagagttaaaaatatgagggcagagaacagaatgtgagctcaggtcccctcccagccagcatgttgctaattagagcgagatggggaaatgaggacagctggagattcctatgaaa

SEQ ID NO: 21999 - DNA, 120 bp, synthetic construct
  source 1..120: mol_type = other DNA
gctctgctcctagaaagcaggtcctttttatcagttgtatttacagccgtatacccaatgctggcaaattctcatagaaggatggatgaatgggtggatggatagatgaatggagataca

SEQ ID NO: 22000 - DNA, 120 bp, synthetic construct
  source 1..120: mol_type = other DNA
acctttcaagaaagttacatcttaaatggaaatgtttaaaaacaaagccgggaggaggaaatgttggctcatcccctccctctaaaggaaaactcaaggcagggccctgttttcatttct

SEQ ID NO: 22001 - DNA, 120 bp, synthetic construct
  source 1..120: mol_type = other DNA
caactcccaagcagggttctagaccttttatataagctaacccttctgtttcttttagccactccctgctgttatccccattttacagaaaaggaaactgagggtcagaaataaggcaga

SEQ ID NO: 22002 - DNA, 120 bp, synthetic construct
  source 1..120: mol_type = other DNA
attagttttcttattttaggcacttaatcttcacacagtccttcggggtaagtcacagcattgccatgttatagatgaggaacctcatctgtgaaactcatgacttgcccaaggtcacag

SEQ ID NO: 22003 - DNA, 120 bp, synthetic construct
  source 1..120: mol_type = other DNA
acaccatgacatttggcaggattattcaggaagtagacactggcttttagaagacactaataaattctgttaaaaactaacactaaatagtgatgaatccatcgtcatgtatgttaaggg

SEQ ID NO: 22004 - DNA, 120 bp, synthetic construct
  source 1..120: mol_type = other DNA
gcattactgcaatgtgtagcatcacatccagaaaccaggtaaatgctttgggtgagtcacttgggggagatatacattgaatatggtcctaaacgttctctgaataataaaaggaagggc

SEQ ID NO: 22005 - DNA, 120 bp, synthetic construct
  source 1..120: mol_type = other DNA
atgggagggattgaggggatagagtggctaataggacaagcatgttttcacggaatttacagtctaggagattattaatcaagtaaacgagcatttgccatactgtggtgtgtgctgtga

SEQ ID NO: 22006 - DNA, 120 bp, synthetic construct
  source 1..120: mol_type = other DNA
acagacacctgttgatttggggaaggagtctctggagattcacagggatggaattggataggatggcacggaataggatgggatgagatgggacaggataagatgagatgagacaagatg

SEQ ID NO: 22007 - DNA, 120 bp, synthetic construct
  source 1..120: mol_type = other DNA
gcacaggcccctgggaaactcaggcctccaaggccgttcctcaaggataaagtagaagttgtttcattttagggtgtctttgcatcactctttggagaactcattttcagagagcctggt

SEQ ID NO: 22008 - DNA, 120 bp, synthetic construct
  source 1..120: mol_type = other DNA
agctttccatcttccggagctcctgaaagcaacgcacacggatccgcgctgagctcaatacattccccaagccctgccctgtcctccgcgcacctgggcctcctgcattcgtgaggctct

SEQ ID NO: 22009 - DNA, 120 bp, synthetic construct
  source 1..120: mol_type = other DNA
ggggggaggtggtcagcacagaccctggcaggtcacgtcttctctgtatctgttctctcacctatgaataggttaaaaataaaccctctctcccaggggtcatgaggatttaaacgaaat

SEQ ID NO: 22010 - DNA, 120 bp, synthetic construct
  source 1..120: mol_type = other DNA
tgtctgccaaggagtttggacttgtttctgagggccactgggagccactgaaggatttgaaatggggcagtgatggtcagttttgtgccttagaatagttagtctggcggagcgtggagg

SEQ ID NO: 22011 - DNA, 120 bp, synthetic construct
  source 1..120: mol_type = other DNA
ctcactccactctcatgcttctccattgctctgtcccctctctccacagtgagcctccagctagctggctgcagctgaccctggctgttcccctgcaggatctgagtggcatagagctgg

SEQ ID NO: 22012 - DNA, 120 bp, synthetic construct
  source 1..120: mol_type = other DNA
atccttctctgtcctcatgatttacaaggaggagagaacaaggggggggggagaaaaacagagaagagcagagtgaagaggttaggagttccccaggagagagtgacagagtagagaggg

SEQ ID NO: 22013 - DNA, 120 bp, synthetic construct
  source 1..120: mol_type = other DNA
cccattaaaagtactgggtcgtatacagtcagctctgcatagttttaaatagacctcaagtcaaccaagataagttttgtgtctagaaaaagtgaccaggtgctctttcagcagctctgg

SEQ ID NO: 22014 - DNA, 120 bp, synthetic construct
  source 1..120: mol_type = other DNA
ctcccacttattttttccagattccagtctggtaaacaaatccatgctctgaaatatgtttctcacagagggaaaaagggagtttccttttaattaaaaacaaaccctcccgtgcgccct

SEQ ID NO: 22015 - DNA, 120 bp, synthetic construct
  source 1..120: mol_type = other DNA
gtttggctcaattttggtaaccaagaagcctatatgaaggatttttctccccaaaattaaggcaatatcagtgcatattcatacacccaagaaaagaaaccacagggagggaggctgcag

SEQ ID NO: 22016 - DNA, 120 bp, synthetic construct
  source 1..120: mol_type = other DNA
tctgaaataatggtaactgcctgtctctttaccagaccgtgaggtccaggacaggtggggatggtgtatgtttggttcacgtggatcctctagcactgtgtttggcaaacagtaggcact

SEQ ID NO: 22017 - DNA, 120 bp, synthetic construct
  source 1..120: mol_type = other DNA
cctacatgttagttttgggtctgaccaaatttgcagtgggaattgtgttgatcctcttggttcgtcagcttgtacaaaatctctcactgcaagtattatactcatggttcaaggtggtca

SEQ ID NO: 22018 - DNA, 120 bp, synthetic construct
  source 1..120: mol_type = other DNA
cttagccaaattaatgatggtaggactcacctgttggtaaagcaaggtaaaatatagaatctgttaggtcaaaagacaggcactctctttgatctttaaggtactttatgcagaaagatt

SEQ ID NO: 22019 - DNA, 120 bp, synthetic construct
  source 1..120: mol_type = other DNA
cagataggttgtgaacttgcagatggcattgaatatcttcttcacctgcctggtactaatggataccagaaataaacctgttcagaagaacatacttgaagccctgctaatggagtccat

SEQ ID NO: 22020 - DNA, 120 bp, synthetic construct
  source 1..120: mol_type = other DNA
ccctctccacctttctttgttttgcagatcgtaaaaaggaccttgtaaaactacaggcaggggaatatgtttctcttgggaaagtagaggcagctttgaagaatcttccactagtagata

SEQ ID NO: 22021 - DNA, 120 bp, synthetic construct
  source 1..120: mol_type = other DNA
tatagcagaatggaactaattgattaacgttctcctataaacatgcaagcgggcacaacagactctctgacgccttcagatatttggcaaacattacagagtgtgcagcctatacaccat

SEQ ID NO: 22022 - DNA, 120 bp, synthetic construct
  source 1..120: mol_type = other DNA
tagctttaacaggtctggtgagcaggtttgtcactagcatttcatttgctttgtaaatgtcttacaatgaccttattcatatcacatatgtaaagagaaatgacaaataaaacagttggc

SEQ ID NO: 22023 - DNA, 120 bp, synthetic construct
  source 1..120: mol_type = other DNA
ttccctcaggtctcatgggcagaaaacagtgtttcttggattttgccatagagatttttccaggaaagcatttcctaactggtggttcccaaatcccttgaaattttgaaaggatttccc

SEQ ID NO: 22024 - DNA, 120 bp, synthetic construct
  source 1..120: mol_type = other DNA
ccatccgacatgagcgggttgtagtcagtctgtgttgtatctccttctggttgaaagtcagctgcagattttagaatttgaagttgcagagcttcacatgacaaaatcggaaatcaattt

SEQ ID NO: 22025 - DNA, 120 bp, synthetic construct
  source 1..120: mol_type = other DNA
ggtccttgtttttcatgcattcaaaacttatctataaatatcagtatctacagagtgcatcaaagggtatttagcagagagtagatcagaaatacttgttgaatgagtacgtggttgcac

SEQ ID NO: 22026 - DNA, 120 bp, synthetic construct
  source 1..120: mol_type = other DNA
cactgtatatcatcttaacacatcctgtggcgaggcacaaagggaatcttgaactcagaaggagggtctggtgtactggaataacacatttgaggcagtttctattttcagaagtttaca

SEQ ID NO: 22027 - DNA, 120 bp, synthetic construct
  source 1..120: mol_type = other DNA
aaaagagtggtataaccaagagcagggtcactcactggtacaggaaaaaaacaccatcaatttgccctcattgggctgcatctttcttgtgggatgggcttcattttgacttacctttta

SEQ ID NO: 22028 - DNA, 120 bp, synthetic construct
  source 1..120: mol_type = other DNA
acaatacctcacatctcaatattcatgttgagtgtaaatgctccacttcaaagatacgggatggcaaaatggacaaaaacaacacaatccaaatatctgctgtctttaagaggctaacac

SEQ ID NO: 22029 - DNA, 120 bp, synthetic construct
  source 1..120: mol_type = other DNA
ggatctaagaaagagagtggtattgagttggccacaatcaatgagggctgaggggtgaggggctgtgagggagggaccaggtgctcaaggtagccctgcagggagggagccaggaaagta

SEQ ID NO: 22030 - DNA, 120 bp, synthetic construct
  source 1..120: mol_type = other DNA
agcatgagaattttgtctaatgtcaattgctggattcccagctcccagaccagtaccagggcttaataaatattcattgactaacattcagcctagatagaacctgaggatgcagaagtg

SEQ ID NO: 22031 - DNA, 120 bp, synthetic construct
  source 1..120: mol_type = other DNA
ccatcagtgatgaataagttacagttgctccacatccttgccaacattttgtattgtcagtctttttaattttagctgtttgagtgggcgtgtagtgccatcttgcgatgttaattctat

SEQ ID NO: 22032 - DNA, 120 bp, synthetic construct
  source 1..120: mol_type = other DNA
taagtagaactttagtatcaccggaatttgaaataatgtagacaaaggtaaaagagaagagcaaagaggctttatcatatctttagcaatatgtcatgaaagctttccatatggaacatt

SEQ ID NO: 22033 - DNA, 120 bp, synthetic construct
  source 1..120: mol_type = other DNA
atttgcaagtccataatgacataatgttgaacatctttttatatgcttatatgctatccatacatgttctttggtgaagtgtctcttcaggccttttgatcatttttcttttatataaac

SEQ ID NO: 22034 - DNA, 120 bp, synthetic construct
  source 1..120: mol_type = other DNA
aaaagaaatatttaaatccacctagacactatgtaccaaatacactcaaccataaccacaccagtaatgatgtcctctaatggggagcactggtacctgaggatgaatcccttctccttc

SEQ ID NO: 22035 - DNA, 120 bp, synthetic construct
  source 1..120: mol_type = other DNA
gaattataccaggcatctaaagggcagcccttctaggacacagtgtccttggcaagatctttagaaaaagacaaaaaacaaaaacagaaagcaaaacttgaaaggagagactctatggag

SEQ ID NO: 22036 - DNA, 120 bp, synthetic construct
  source 1..120: mol_type = other DNA
gtacattgtctagaccctagagaacccctccaggttatctgattgtggttataagggagtattttacaactgctgcaattccataagctctaggtaaatgacagtaatgcagtgtgtgtg

SEQ ID NO: 22037 - DNA, 120 bp, synthetic construct
  source 1..120: mol_type = other DNA
cccagctagtgtatttcacttcctggaccgaaatgatttgtttggggctagacaagttacttaaacccatcaaatcaaagaaccatcagtgcttttgctggacagatgagacatacgaat

SEQ ID NO: 22038 - DNA, 120 bp, synthetic construct
  source 1..120: mol_type = other DNA
aaaaagcctcctaaatctgaatatcccagcactgagaaagtcacttttcctttctacaaagaaatcttgatctacgaatgtagagtctgccctagctaatgaaccatcttggctatcata

SEQ ID NO: 22039 - DNA, 120 bp, synthetic construct
  source 1..120: mol_type = other DNA
aacatccacaccaaggcacgtaaccataaaattaaagaggaccaaaaacaaaaagatctttaaagcttgcaaagtgttgagggatgatacggtttggctgtgtccccatccaaatctcat

SEQ ID NO: 22040 - DNA, 120 bp, synthetic construct
  source 1..120: mol_type = other DNA
tgtgttgggtgagactcacatttgaattggtagactgagtaaagcagattgcttctcctaatgtaggtgggattcatccaattagttgaaggcctaaataaaaccaatgggctgactctc

SEQ ID NO: 22041 - DNA, 120 bp, synthetic construct
  source 1..120: mol_type = other DNA
atatatatctatcccgtatatatctatcccgtatatatctatcccgtatatatatagcccgtatatatatatagcccgtatatatatagcccgtatatatatatcccgtatatatatata

SEQ ID NO: 22042 - DNA, 120 bp, synthetic construct
  source 1..120: mol_type = other DNA
atggaaagattacaccaggctctgccaccagatggcctgagttctcaccagctctgtgactttgagagagttagttatacccttcatgtcctggattccttctttctaaaataaaaataa

SEQ ID NO: 22043 - DNA, 120 bp, synthetic construct
  source 1..120: mol_type = other DNA
tcaccccatcaccatcatcatcatcctccttaccccatcaccattatcatcatcctcaccccatcaccatcatcatcctcatcccatcaccatcatcatcatcatcatcctcaccccatc

SEQ ID NO: 22044 - DNA, 120 bp, synthetic construct
  source 1..120: mol_type = other DNA
accccatcaccatcatcatcatcatcatcaccagcaacataagcaaccaacatgtatttaaaatggagtcctggcttattgagtttggtggctgtaatgaatgaccatagactgatggct

SEQ ID NO: 22045 - DNA, 120 bp, synthetic construct
  source 1..120: mol_type = other DNA
ccacagtgaggctggagagttggatggatctttaatagtatgttgcattgaaaccagtgtcaccaggacttagaggtggagaagaaaacaaaatcagacatgacagattttgaggaatgt

SEQ ID NO: 22046 - DNA, 120 bp, synthetic construct
  source 1..120: mol_type = other DNA
agcatcaccattaagacacaaacatttccattactctaaaaagatccttcctgatcccttgtaggtaattctctcttattctctctttctctctctctctcccccactccttccctccct

SEQ ID NO: 22047 - DNA, 120 bp, synthetic construct
  source 1..120: mol_type = other DNA
gcatcagatcctcagatcctctcccacacttgtacagctgggtaaccattcctctcctggttccagcaaaaaacaagacctttattctttaggaagtatagaatatagaaattcctgact

SEQ ID NO: 22048 - DNA, 120 bp, synthetic construct
  source 1..120: mol_type = other DNA
ttagagctgtaagtcctgagtcttcagaatgccccagatccagagaaagcaaaaccagttggtcaccctatcaaggaataaatcagaactaggaatggtgccagtattgaaagacagaat

SEQ ID NO: 22049 - DNA, 120 bp, synthetic construct
  source 1..120: mol_type = other DNA
ccctgggcaggaaaccccttactgcggtctaaagtctctctggcctctcccttctctgaccctcgcttcccacaactgttgtcactggagctgcttcctagtttccatttccgggccgtc

SEQ ID NO: 22050 - DNA, 120 bp, synthetic construct
  source 1..120: mol_type = other DNA
ttgatacagagatgatacacaatgaaaaaagtgatttatagaatagactatatagtatgagcttatatataaaaagaaaaatgtatgcatacttatacaaaaataaagtgggggaagcag

SEQ ID NO: 22051 - DNA, 120 bp, synthetic construct
  source 1..120: mol_type = other DNA
gggaggaatctttatacagaagtccatgtttaacagaatgggatttattgtttgaacatatgtgttcaggcagtctagtggtagtcaaaatatgccaaggcaaggcaatgtgttccctcc

SEQ ID NO: 22052 - DNA, 120 bp, synthetic construct
  source 1..120: mol_type = other DNA
ctcacaaaaacctcaagacttagatagggaaggtgctgttattgctgttttaaggagccagaaacacagaaatgcatgtgacacgggtgtttgataagacccaagaaaaaagaaagagca

SEQ ID NO: 22053 - DNA, 120 bp, synthetic construct
  source 1..120: mol_type = other DNA
cctttgcctacataccggcattgtcctttccttgaagttttgcagctgggtgggttggagacaagaaacaccagttgtttatattttgtgcttattcatacaagacaggaagcacgatct

SEQ ID NO: 22054 - DNA, 120 bp, synthetic construct
  source 1..120: mol_type = other DNA
gagagctccttttttgccaagattccatactattattatgtaagtaacaacagcaacccatgattacaggctgccatgacattacctgaccctgaaatgggccctcgtgagatttgtgat

SEQ ID NO: 22055 - DNA, 120 bp, synthetic construct
  source 1..120: mol_type = other DNA
tatacccttccactatctgaattgttgaaagaacctagattgcttttctaacccactgaaataagcaaccaaaggcaaagaagtaataatcccagctgtggaaatgatttcacttttctg

SEQ ID NO: 22056 - DNA, 120 bp, synthetic construct
  source 1..120: mol_type = other DNA
acatactggtattgtcctttccttgaagttttgcagtagggtctcctgtcccagggggttgaggaaaaaaaacaccagttgtttatattttgtgcttattcatacaagacaggaagcacg

SEQ ID NO: 22057 - DNA, 120 bp, synthetic construct
  source 1..120: mol_type = other DNA
aagcaaaattaaccttagtgttggaaacctcaatggtagttgtctttgagcaagttagtggaaacagttaatgggaagtgtcaccaggaggtgtctggggtattggtaatctgtttcttt

SEQ ID NO: 22058 - DNA, 120 bp, synthetic construct
  source 1..120: mol_type = other DNA
tcttctcagttgccttaaggacggaggagcactttactcaacttctataacatggtgttaacctttagtatttgggtaggaaatccaagaatagccacactacttcctgtggggtatttg

SEQ ID NO: 22059 - DNA, 120 bp, synthetic construct
  source 1..120: mol_type = other DNA
gtgcatgaaggaggaggcaagcagagaagacagacatcatctcctgccagactgccctgttgttatcctgctcaaatttacagacaaatttgtcatctaaaagagttttaacacctaaaa

SEQ ID NO: 22060 - DNA, 120 bp, synthetic construct
  source 1..120: mol_type = other DNA
gatgaggtaggtcatgacacacagctacctgctattctcctgaatgataaatcatctcactgggaaatcagtattttggccttagccatggatcgaaagcaagcacaatgcaaatcatga

SEQ ID NO: 22061 - DNA, 120 bp, synthetic construct
  source 1..120: mol_type = other DNA
aggagtgtgtcacataacgcaaaagcagtcagatctccaaagatgggcagtacctaacaggcttaacttaaatggtgtgggcttttattttcctaatgggtatcctgtatattctctagc

SEQ ID NO: 22062 - DNA, 120 bp, synthetic construct
  source 1..120: mol_type = other DNA
ggtaatttataaaaaacaaatttatttctcacagttctgaagactaagtcccagatcaggtgctggcattcagagtctgaggagggctgcatctcacatggtgaaaggtggaaggtcaaa

SEQ ID NO: 22063 - DNA, 120 bp, synthetic construct
  source 1..120: mol_type = other DNA
cccgagataacttcttccgctgtggtgtgctgtatgaggactccctgtcctcccaggtccggactcagatggagctggaagaggatgtgaaaatctacctcgacgagaactacgagcgca

SEQ ID NO: 22064 - DNA, 120 bp, synthetic construct
  source 1..120: mol_type = other DNA
ataatcatagcacagatctcattggattgttgggggcattgagtggaaaaaatgcatgtaaaacacttagcacagttcctggcacaggataagcactcaacatagctacatcaccactac

SEQ ID NO: 22065 - DNA, 120 bp, synthetic construct
  source 1..120: mol_type = other DNA
cctctatcaccaggccctgcacctggcaattctgcacatcccttcaattaatctttacaaccatcacccttggaggtagttgtcatcaacaccattatcatcatcatgataatcattacc

SEQ ID NO: 22066 - DNA, 120 bp, synthetic construct
  source 1..120: mol_type = other DNA
gcaagtgctcagtgaataattgatgggttactacattagttgttccactgttcttcacctgcatcctaaaaagggttgcgcctgcatttgacccagacatcttcagatgggagcatacca

SEQ ID NO: 22067 - DNA, 120 bp, synthetic construct
  source 1..120: mol_type = other DNA
attacggtactttgttagaacagcagtagaaaatgaagacagccatcctgtgtgcaagtacaggatgactctccagtcctttaggtcttgtttgatacatttccttgctaggagaaacct

SEQ ID NO: 22068 - DNA, 120 bp, synthetic construct
  source 1..120: mol_type = other DNA
ttattccagcagccagagagaattatgatcatcattttagtgtattacatttagtatagttttttcctacatatatttttagcaaatgagaaaccttttagtgtttgtgtatgtgtctac

SEQ ID NO: 22069 - DNA, 120 bp, synthetic construct
  source 1..120: mol_type = other DNA
tcctcttgtcaatgatgatctcaatgggcatgcaatccattccagccatgggatctaagattttccaacttttatgaagggcttgagaaactctgtactttcttttccccttttgggctt

SEQ ID NO: 22070 - DNA, 120 bp, synthetic construct
  source 1..120: mol_type = other DNA
cacacaccatatatagatatatagatttttttcccctcttcaccttgctcatggtgttacttctgctggaaaaccttccctcttctggcacctggcagaactgagttcaaaactcagaaa

SEQ ID NO: 22071 - DNA, 120 bp, synthetic construct
  source 1..120: mol_type = other DNA
aggcagtgggctggatagggctcctggggttggaggggcctttgacagtctttctctgcttaggatgacgatgtcgataccaagaagcagaagaccgacgaggatgactagacagcaaaa

SEQ ID NO: 22072 - DNA, 120 bp, synthetic construct
  source 1..120: mol_type = other DNA
gggcagtcagtgattgccccaagaagccttaactggggaggaggacttcatcactgggtgccacatggggaccctggtgccctgggggtgggggtttgcagtcctagacactggaaacgg

SEQ ID NO: 22073 - DNA, 120 bp, synthetic construct
  source 1..120: mol_type = other DNA
ttggctttgtttacctaccaaagaattctggttttcaaggtgacagaagagttcatgactaagtagacaggataggattctcttttctcttctcttcccttcccttccctcccctccctt

SEQ ID NO: 22074 - DNA, 120 bp, synthetic construct
  source 1..120: mol_type = other DNA
tctttcttttttttttttttttttttttttacacagccttcttaatctacacatatggcaagctaataattccaaaaaaataatttctttcctttgtagccatttaaaactaacagctag

SEQ ID NO: 22075 - DNA, 120 bp, synthetic construct
  source 1..120: mol_type = other DNA
tccttccttttgtcaaaggtgtttccctggcagaaaggtggaagcaagagcataaactctgtctgacaggcagaaaggtagactagaagatctagactagactaaaaagttagactttga

SEQ ID NO: 22076 - DNA, 120 bp, synthetic construct
  source 1..120: mol_type = other DNA
atgtggccatctagcctctggggacttccttcctttggagctagaaaaacaggtgcagaatgtgtctggctacagcaggggcccgcccactcacctatagaaaggccctgccatggactg

SEQ ID NO: 22077 - DNA, 120 bp, synthetic construct
  source 1..120: mol_type = other DNA
ttggctgggagcaattcttatcaaagccacgttagcagttttcagcaagagctaattgaacaagctctgtgagtggcctcattccattagcaggagcctcccacagagcgtgacaagggc

SEQ ID NO: 22078 - DNA, 120 bp, synthetic construct
  source 1..120: mol_type = other DNA
ggagcagtggatgctgatgggtcggctctgggtcccaccccggcccaggggcagagacaggctgtattttaggggctcggtcactcggcagattcaatctgttcacaagaactgatggct

SEQ ID NO: 22079 - DNA, 120 bp, synthetic construct
  source 1..120: mol_type = other DNA
ggcccttcatcaacctcacccaggtcatctggggaactgggccaccactgagaacaaagcccagacatgtctgggagtggaggctgtgcccacctcccccagagacttgcccccgactta

SEQ ID NO: 22080 - DNA, 120 bp, synthetic construct
  source 1..120: mol_type = other DNA
ctttctttcttcttccttcttcctgggcgagagtagcagccccggccccatgctggggaagggtaggccagagactcttccctcctggtggtgctcagcagtgactcagcagggactgga

SEQ ID NO: 22081 - DNA, 120 bp, synthetic construct
  source 1..120: mol_type = other DNA
catcccgcactggaggggcacaggctgtgatgggtcacactccacccctcgctcccccagccctagcacaaagcccacctgatgggccttgctgagacgcccagctctcccacctgggat

SEQ ID NO: 22082 - DNA, 120 bp, synthetic construct
  source 1..120: mol_type = other DNA
caccacttccagaaggtgggcaagaagccggaactcacgctggtctgggagcctgaggacatggagcaggagccagcacagcaggtcagaacccctctgtgtcccagccccctaagtcct

SEQ ID NO: 22083 - DNA, 120 bp, synthetic construct
  source 1..120: mol_type = other DNA
caggcttccctggacccgtctgtgacccatctcatgggtaatgacccccttcctgccctggcatccctcagatggcctcagatggcaccttctgagcctgtgtgcacatccgccagcacc

SEQ ID NO: 22084 - DNA, 120 bp, synthetic construct
  source 1..120: mol_type = other DNA
agagacccacgcaggcgaggacgtggcggtgttcgcgcgcggcccgcaggcgcacctggttcacggcgtgcaggagcagaccttcatagcgcacgtcatggccttcgccgcctgcctgga

SEQ ID NO: 22085 - DNA, 120 bp, synthetic construct
  source 1..120: mol_type = other DNA
gagtgtccgtttgcttcgggaccaagaatgtcttttctctcttaaattgttttctttcacctttgtcaaaatttagttaagcatatttgtgtgggtctatttctttgtgggtctgtttct

SEQ ID NO: 22086 - DNA, 120 bp, synthetic construct
  source 1..120: mol_type = other DNA
atagtattggtgggacttttgatcttcagaacacgttctgggacacatggctttactcattacttctgactgggagaacttatcttaccccaaatttttggtggctatgttgatttgccc

SEQ ID NO: 22087 - DNA, 120 bp, synthetic construct
  source 1..120: mol_type = other DNA
tctgtgcagacataattgagtcaaggagctcaagatgagatcatcctgggttaaggttggccccaaaccaataatgggtgtctttataaaagaggccaagggagatttaataatgtgaca

SEQ ID NO: 22088 - DNA, 120 bp, synthetic construct
  source 1..120: mol_type = other DNA
ccctgcctcactccttttagggccgccctccggtttctccactcatcagagccctgacccagggcccagggctttggcatgaaagcaggagctccagggttagaggcatttgttcccaga

SEQ ID NO: 22089 - DNA, 120 bp, synthetic construct
  source 1..120: mol_type = other DNA
gtgtaaatgcattgtgtgtgaatgtgtaaatgagtatgtatgaaggtgggtgtgaatgtgtgcatgtgtgtgaaagagtatgagagtgtgtgacagtgggtgaatgtgtatgaaggtgag

SEQ ID NO: 22090 - DNA, 120 bp, synthetic construct
  source 1..120: mol_type = other DNA
tcctcttttgtgatctcttgctgatgggtcaggggtctcctttggttttcacacacatgctctcacagtcactcatatacatgttcactcacattcacttacacacatgctctcacagtc

SEQ ID NO: 22091 - DNA, 120 bp, synthetic construct
  source 1..120: mol_type = other DNA
gtcccggagttagggccgcctacaccaccctgttcaagtcacacatttgaaaaacaaaagagacccatcagcaagaggtcacaaaagaggaaccaggacaccaagaaaagtctgcaggaa

SEQ ID NO: 22092 - DNA, 120 bp, synthetic construct
  source 1..120: mol_type = other DNA
tgcaatctgaagatcccggttttgtgtcggttaccagatattaacaaaagggaagcacatgaaggtctttaacataaaaagacgataaaaaatcagagtgacacactgaagcctgcgtgc

SEQ ID NO: 22093 - DNA, 120 bp, synthetic construct
  source 1..120: mol_type = other DNA
tcttgcagggaggacaaatgttatccaactcctgggactgatgtgaggttgcacactgctggcactcagtatgtgggagctgctttatttatgcattattatacaaattaacatagaaga

SEQ ID NO: 22094 - DNA, 120 bp, synthetic construct
  source 1..120: mol_type = other DNA
tatgtatatacacatataatacatacactataatacatatatggatatgtgtatatatcacttatccaacacagcataaatccaaaagaggacaaaagaaagaataaaagggtgtgagcg

SEQ ID NO: 22095 - DNA, 120 bp, synthetic construct
  source 1..120: mol_type = other DNA
gaggaagctgttgtttggcgagccaagaatatggggtgagtttaatcaagaaaggactttccattcagtcagaagctgctttcaggggcctgagagcagaggaagtcaccattaccacca

SEQ ID NO: 22096 - DNA, 120 bp, synthetic construct
  source 1..120: mol_type = other DNA
ataaaagagggttgttattgccagtttaccttgtctatcccacctaatggacatcttgctcatcattgcagcctgaggccctggagagggcttgtcatatagtattaatagatactgttt

SEQ ID NO: 22097 - DNA, 120 bp, synthetic construct
  source 1..120: mol_type = other DNA
agtggagtctggacttgagccatgtgaaaaaagtttaaagccacctacagggaaattctataaaaagccaacagccgatgaatttgaggattacagaggccaccagttaatctgttcttt

SEQ ID NO: 22098 - DNA, 120 bp, synthetic construct
  source 1..120: mol_type = other DNA
acatgaagaatgatagtggtaaatccactgagggaagcatgagcctgagagggtatgtgtgtctgtgtgttggtgtgtgtctgtgtgtttctttgtgtgtgtctgtgtgtttcttgtgca

SEQ ID NO: 22099 - DNA, 120 bp, synthetic construct
  source 1..120: mol_type = other DNA
tgctgttgaatagttttatttggtgaaattctcagatttgcaggtgtcagaaagttctactctggctgtagggtggagggtgaactggaaggggagggaggtttgtaggattgttaggag

SEQ ID NO: 22100 - DNA, 120 bp, synthetic construct
  source 1..120: mol_type = other DNA
gagccaccgcgcccggccaataggtaaaatattttttaaaagttttctgtttaacaaagtcattccctccagggaaagattttcctttgatcttctccattttctcttgggttttcacat

SEQ ID NO: 22101 - DNA, 120 bp, synthetic construct
  source 1..120: mol_type = other DNA
tggggctgttactgaatcacaggggctagaacagggagaggcctgagagactgactggccagccttctggttttaaagatgaggaggaaggggcttgataaagattgggcaactggagaa

SEQ ID NO: 22102 - DNA, 120 bp, synthetic construct
  source 1..120: mol_type = other DNA
gtttctggaaagtgagctccctgatcagagcagagcagagccctggagcggacctcacccccctgggcctcgcgctgatcagcagtgcacactctccatttctctctccctccctccgcc

SEQ ID NO: 22103 - DNA, 120 bp, synthetic construct
  source 1..120: mol_type = other DNA
ctagcctctatttttttttgtgtggggtggagaggtcggtattgttgcaaaaaaagtgctttaaatagacttctgggggaagctaatgtggatgttctgcaaatatttccttcaccagaa

SEQ ID NO: 22104 - DNA, 120 bp, synthetic construct
  source 1..120: mol_type = other DNA
gcatcgggtttatccttatcttcaaacaaaccaagctcttctgggccaagagaaaatagagcttctaaagaaaaaggtagaatcagagatgcaaatgacatcatttcattttaaaaaatt

SEQ ID NO: 22105 - DNA, 120 bp, synthetic construct
  source 1..120: mol_type = other DNA
gtcactcttctttctctccttcctccagcccctggcagccattaatcaactttctgtccttatgaatttgcctatttctatggattccattcacaaaatacatgaatagctttttccctt

SEQ ID NO: 22106 - DNA, 120 bp, synthetic construct
  source 1..120: mol_type = other DNA
atatcgaaatggtgcacactgcttccataaagtgacatccttcagacacttggtggctctttgtatatgcatacattgatggcctgggtagtttcacgaatgtcctttaagtgaacagga

SEQ ID NO: 22107 - DNA, 120 bp, synthetic construct
  source 1..120: mol_type = other DNA
ttgcttttagataatttaaatatcagtttttaaatttctcctttgatgcagtgactgtctataaggctgttacctaattctgatattgttaataattttgtagtcatctccctcttattt

SEQ ID NO: 22108 - DNA, 120 bp, synthetic construct
  source 1..120: mol_type = other DNA
gaggcagaggaggcagaggcagaggaggcagaggcagaggcagaggcagaggcagaggcagaggcagaggcagaggcgcctggtcaacaatcttaagtccaataagaatgtttcttatga

SEQ ID NO: 22109 - DNA, 120 bp, synthetic construct
  source 1..120: mol_type = other DNA
tctttggcatatggaaatcttgtttaaaaagtttagaaaacattttttaaaactccaatatgaaaagctgggtgcagtggcatgcgcctatggtcccaggtacttgggaggctcaggtgg

SEQ ID NO: 22110 - DNA, 120 bp, synthetic construct
  source 1..120: mol_type = other DNA
cagttctggggtgttgcttaggattttgatctcactggtgggttccatgggggctgactttgtgatctatcattgagctgtaagaacacgcacacacaaacaaatacgcaaaaacctgct

SEQ ID NO: 22111 - DNA, 120 bp, synthetic construct
  source 1..120: mol_type = other DNA
gcctggccgaggctgactctttcttgagcctgccactgtgacctcctgctggatgggtctcctctcctcagcccctgcgggtgaccccctcccagatgcaggcatccctatgggtagaac

SEQ ID NO: 22112 - DNA, 120 bp, synthetic construct
  source 1..120: mol_type = other DNA
gaggtcataatccttatctgtctcatagggcacttgtgatacacaaatgaattaacacattgaaagcttttagaatggtgcctgacacacacccagcagccaatgaatgttgcagggcat

SEQ ID NO: 22113 - DNA, 120 bp, synthetic construct
  source 1..120: mol_type = other DNA
aggacaccagtgattggagttagagcccatcctaattccgtatgacctcatcttaacttcgtcacatctgcaaagactgtatttccaaatatggtaaaatgtacaggtaccaggagttag

SEQ ID NO: 22114 - DNA, 120 bp, synthetic construct
  source 1..120: mol_type = other DNA
acacacatttggctgggattaagaagctcagattaaagcgatagttctgggagagttgcttccccacccagggatattaaataatgtctggagacatctttagatgtcacagcaaggggt

SEQ ID NO: 22115 - DNA, 120 bp, synthetic construct
  source 1..120: mol_type = other DNA
tagaaaagctgaaggaggactgtaacaacactgagaacaaagaacggaagtccttccagaaggagcttgtgatggtgagtgctcagcaggtgcctgggcgttcaggggtgctgctcagca

SEQ ID NO: 22116 - DNA, 120 bp, synthetic construct
  source 1..120: mol_type = other DNA
ctgtgttcattgtaatgtgagtttttcttgcctttgcttccttgaagcttctaacatctctgtattgtttccacttccccctctgtgttggtttgagttggggcgaggacagcatttgtt

SEQ ID NO: 22117 - DNA, 120 bp, synthetic construct
  source 1..120: mol_type = other DNA
tatataattaacttttatgtaaactgcctgctgttttccaaattggttgattttactctcccgccggcagtgtgagagtgtccactttgggcttaagttcagcaggcttctggcagtgat

SEQ ID NO: 22118 - DNA, 120 bp, synthetic construct
  source 1..120: mol_type = other DNA
agccagctcctggccctcaagtgttctaggaaaccggcttctctgtggggatgtgactctccctcactcctcccattgcctgagtaggcaaattccacctagctctttatgactaactgc

SEQ ID NO: 22119 - DNA, 120 bp, synthetic construct
  source 1..120: mol_type = other DNA
tgtatgtcggtgcctcttttgaaactggagatattgatatgatcttaagcaaatgtctccaatacgagaaaaagaggactgatttataaagtggaggactgacacataatgtggaggact

SEQ ID NO: 22120 - DNA, 120 bp, synthetic construct
  source 1..120: mol_type = other DNA
gatttataaagtagaggactgatttataaagtagaggactgatttataaagtagaggactgacacataatgtggaggactgatttataaagtagaggactgatttataaagtagaggact

SEQ ID NO: 22121 - DNA, 120 bp, synthetic construct
  source 1..120: mol_type = other DNA
aatgctctttgccattcaagccactcactttcattttctatagaaaagcctttctgccgcctttcacaaaacttgtattttcatgcctaataagtgagcgtgtgacatgcagtgggctca

SEQ ID NO: 22122 - DNA, 120 bp, synthetic construct
  source 1..120: mol_type = other DNA
ctgaaaacatgaggtctgcgaagacgtctttgagtctgtttggcatccccaagtgcagcggtgaaccagagagagagggagcattcacttgattcttcacgcgtcagtgtttttaatctc

SEQ ID NO: 22123 - DNA, 120 bp, synthetic construct
  source 1..120: mol_type = other DNA
ttaagaaagtgatcatcctgttcttggatagggtgattttggctgtctgggtaagttctaggaatttgctgtattctcttgattctaatgaactttgctatggcttgggaaggggcctct

SEQ ID NO: 22124 - DNA, 120 bp, synthetic construct
  source 1..120: mol_type = other DNA
gggaaggattttagttgctcaggccaaataaccgagactagctccctgcaaattccatggagccatctatacttctgagtatatcttcaagtgctactcctaaatttaaggttcttccac

SEQ ID NO: 22125 - DNA, 120 bp, synthetic construct
  source 1..120: mol_type = other DNA
ctgggattacaggtgtgtgtccctgcacccggctgctgctccatctttaaaattgtcttacccacacgtacttacattttttgttttttaaagcagcttgtttcattgagacttaccaaa

SEQ ID NO: 22126 - DNA, 120 bp, synthetic construct
  source 1..120: mol_type = other DNA
ggggtgtctccagctgtaaataactgtccagactgcttgtaaaggaaaacattgcaaccaccttactgcacaattgatactattattattttagggttacccaaaaatgtgcagcacgcc

SEQ ID NO: 22127 - DNA, 120 bp, synthetic construct
  source 1..120: mol_type = other DNA
taatgctgttcactgatggtattaagacacaattagttacccctgactgagcgcttgctgggtgtcaggcccacgctagtgcgttcctcgcatcatctgtccacgggtaatgtttgtctg

SEQ ID NO: 22128 - DNA, 120 bp, synthetic construct
  source 1..120: mol_type = other DNA
atgctcctcatttgtgtgacctgatgggttatgctcccccagtgtgtgacatggtaggacatgctccccagcatgtgacctggtgagatgcactccccagcctgtgacctggtgggttgt

SEQ ID NO: 22129 - DNA, 120 bp, synthetic construct
  source 1..120: mol_type = other DNA
ttattccatgtttgaaatatcaggatttcagaactcagtcactgacaggtcactgccacaacagctaaagaattaaaacccaaacatgtctccttatctctgctgcgtcctgagtcggct

SEQ ID NO: 22130 - DNA, 120 bp, synthetic construct
  source 1..120: mol_type = other DNA
gtgggaacatgtgcctgcactttttagtcgaacatgtaaattaatcagcagcagtccagcctaaaaagagaagctgaacactgttcgtttgggggctcatcggctcactgccgcgtggtc

SEQ ID NO: 22131 - DNA, 120 bp, synthetic construct
  source 1..120: mol_type = other DNA
cataaaagaagctaccactgcaataggtttgcattgtggcatttaaggaaaagacagtgaaagttctgggcagggatccatatgttggtcctcagtgggtttgacactgaacaaaatgat

SEQ ID NO: 22132 - DNA, 120 bp, synthetic construct
  source 1..120: mol_type = other DNA
tttatttggaagtgtctagtcagaggacagatgcatgatatgcagacaatcttagtgaataaaaattcgtgcagactgggattgtaacacccagctggaggggcactatccaccttattt

SEQ ID NO: 22133 - DNA, 120 bp, synthetic construct
  source 1..120: mol_type = other DNA
ctaatgttgtctcgatctttattaatggtgctcggcggctgctgacagttttgttgctactggcaactttcttcattaaaattaaagccagcatcaaattccattagccgtactctgggc

SEQ ID NO: 22134 - DNA, 120 bp, synthetic construct
  source 1..120: mol_type = other DNA
gatgattacattaggctaagctgcgaagtaaatgaaccatgtcttatttaggtgccactagcttcagagtagtcctgccccgcagggcacttgatagcattttatggctttaaaattagt

SEQ ID NO: 22135 - DNA, 120 bp, synthetic construct
  source 1..120: mol_type = other DNA
ctcaaaaaaaaaaacagatttctctcctatgagagtttctggtctttgatgctgcactttcctcttctgaaacatcaagtgcttttaaagagggatggtgctgactgcctggttctgagg

SEQ ID NO: 22136 - DNA, 120 bp, synthetic construct
  source 1..120: mol_type = other DNA
atacagtaatgggatgttatttgcagggcctgtgtggtatgagaggagcgtggctgtgctgtttctgcgcattctgctttgtaagtgctcactctgcatttttttttttttttttgcctt

SEQ ID NO: 22137 - DNA, 120 bp, synthetic construct
  source 1..120: mol_type = other DNA
tctgacaaggaaccatgagatatgtcttacattgctgatgaagccctaaccctgggcttataaacggattatttctttctcattcttcttaccaagtagacatgtggctactgcccagaa

SEQ ID NO: 22138 - DNA, 120 bp, synthetic construct
  source 1..120: mol_type = other DNA
gctcagagacacaatgagactttgtgagttaagggggtgtcactggcgatttttcctgtaaacgtcccgtgttttgttgtgttgttttacaacagattagaaaatggtggggaaatacta

SEQ ID NO: 22139 - DNA, 120 bp, synthetic construct
  source 1..120: mol_type = other DNA
gccttggtaagggcctcctttggaggaaagaaaaggcaaaagtaaggcatgagaaagtcctcaccatcttttctgcgttgggaacttttttgtagaaggttttttctgtgtcttcaatcc

SEQ ID NO: 22140 - DNA, 120 bp, synthetic construct
  source 1..120: mol_type = other DNA
aagcttgaggacaaacattctgctctaggacctcaacatcctctcagtttggcttgaaagaaacccacagttttctgctgaaaatgaatggagaactgggccacgagttttaattaccgc

SEQ ID NO: 22141 - DNA, 120 bp, synthetic construct
  source 1..120: mol_type = other DNA
tatgaactacagaaattggccaggcacctctgctgacacctggactagctgtctacaccaccacacaccacatctgggcaagagcccttggtgtgctgccataaggctgctggctgtgag

SEQ ID NO: 22142 - DNA, 120 bp, synthetic construct
  source 1..120: mol_type = other DNA
aaatatttgataaatatttgacaaatgatgaacatgcaataaacatttcacaggtgaaagaagttataaggcagggctgttgcctaccacccccgccaccccccaggtaccagtctcctt

SEQ ID NO: 22143 - DNA, 120 bp, synthetic construct
  source 1..120: mol_type = other DNA
caaaatggatttgaatttacagttgtgaaacaaatcggagactcattttccctgcgtgcttccacggtgctgtgagtgaggcgaatgccacctgcctgaagtgagaaatgacaagcattt

SEQ ID NO: 22144 - DNA, 120 bp, synthetic construct
  source 1..120: mol_type = other DNA
agtcagccacagcatctcgacctggaactgcttctcaaacaatgcagccttgagtggagaaacctgcagcccctccccctatggatgtcccgtgacagccatttctctagagagcagaaa

SEQ ID NO: 22145 - DNA, 120 bp, synthetic construct
  source 1..120: mol_type = other DNA
ctacgtactatttattttcagtgttaaagtactttcaggccacttcaagttaaaaatgaacacttgaattcattcgtcctgcactgaagctgggcccatgaagctctgagaaaggacacc

SEQ ID NO: 22146 - DNA, 120 bp, synthetic construct
  source 1..120: mol_type = other DNA
cctattgtctatctattctctatttcatggatttctgctctaatctttgttatttcctgtcttgtgctagctttgggtttaatattctcctcttgatctagttccttgaggtatgttggt

SEQ ID NO: 22147 - DNA, 120 bp, synthetic construct
  source 1..120: mol_type = other DNA
tccactgaaactttgcttttctcatgacacttttgcgcagggcacttttcaatcccttcaagaatttcatggacatttataaatgcaggaagctattcatggccctcaaagggcaacaac

SEQ ID NO: 22148 - DNA, 120 bp, synthetic construct
  source 1..120: mol_type = other DNA
tctcacttctcatggcagagggactcaggaggcagaaagaaaaccttccttttatccttccagaaattcccagttggaagactatataggaagttcatggtgctggatttcttcctgcct

SEQ ID NO: 22149 - DNA, 120 bp, synthetic construct
  source 1..120: mol_type = other DNA
catggttcacaattcaaaagttatgaaagagtaattatacataaatacagtgaaaggtttcctccccatactgttaactagccaagaagatccactttctctttttattttttattaggg

SEQ ID NO: 22150 - DNA, 120 bp, synthetic construct
  source 1..120: mol_type = other DNA
tccccatttatttggaatgtcatcagtatactactgaattctgatatatgtacctgactaagtttctgagcacactattttaaagtcagactccttgagtatgaacctcagctccacaac

SEQ ID NO: 22151 - DNA, 120 bp, synthetic construct
  source 1..120: mol_type = other DNA
aacagaaaaatcagggctggtaagtaaaatgttgttttgggagatctcacatggtgtatgtggagacaaagttaggcgaggggctgtgtcattttttgaggaaagagggacaagaacaaa

SEQ ID NO: 22152 - DNA, 120 bp, synthetic construct
  source 1..120: mol_type = other DNA
taacaagggaggaggaggtgaggggtagagtcttgaatagccctcctatttttcaggtgtcttgttcatccatcattgatgttatggatgatggaccctgaacctataaataatatagct

SEQ ID NO: 22153 - DNA, 120 bp, synthetic construct
  source 1..120: mol_type = other DNA
ctgggcttggaccttgaaacacctgctacaactatagtgctggagtggagtagaactgaaactggggttgggccttcaaacacctgctgcaactatagtgctggagcggagcagggctga

SEQ ID NO: 22154 - DNA, 120 bp, synthetic construct
  source 1..120: mol_type = other DNA
tgacccataaggaacaccccccccttctcaacaaccacagaagataaatgccaaggggaccaccaacatgggcatggggctgtgatgccaatcttaagggaaaacacaagtaaaattggc

SEQ ID NO: 22155 - DNA, 120 bp, synthetic construct
  source 1..120: mol_type = other DNA
acagtggtgagtgggcacagtagtgagtagggggacagtggtgaatgggggacagtggtgagtgggggacagtggtgagtgggggcacagtggtgagttgggggacagtggtgagtgggc

SEQ ID NO: 22156 - DNA, 120 bp, synthetic construct
  source 1..120: mol_type = other DNA
gggggacagtggtgagttggggggacagtggtgagtggggacagtggtgagtggggacagtaatgagtcgggggacagtggtgagtgggcacagtagtgagtggggggacagtggtgagt

SEQ ID NO: 22157 - DNA, 120 bp, synthetic construct
  source 1..120: mol_type = other DNA
cacctcccttcccgtgaacatccggcctgagtttcctcatagccagttagccagctgtgcctttgttggggttcatttttgtttattatttgttgtttctaccctaaaaaggctctttat

SEQ ID NO: 22158 - DNA, 120 bp, synthetic construct
  source 1..120: mol_type = other DNA
atttgtgtagatgcatttgttgaaaatccaagaaagcccagtaggggagcgggaaagtgagacgggaaaggaaggaggcaagcatctgacatgaagcaaacccacacaggctgactgtgg

SEQ ID NO: 22159 - DNA, 120 bp, synthetic construct
  source 1..120: mol_type = other DNA
taggggtaggatgagaggtaccatggccagcgccccaggaggaatgggctttagcttcaggccttacctgcagcccagcgcagcagggagcctcaaggaacatctagccactcctcttcc

SEQ ID NO: 22160 - DNA, 120 bp, synthetic construct
  source 1..120: mol_type = other DNA
tggtatcgagacacaatggagtactcttcagccttcaacatgaaggagatcctgtcattttcaacagcatggaggaatctggaagacactatgatatgtcaaataaaccaggcacagaaa

SEQ ID NO: 22161 - DNA, 120 bp, synthetic construct
  source 1..120: mol_type = other DNA
actcattgtcagccaaatgctatcatgaacgtaggaaacttgatttttttgttttgatcatggcctctacatgcacctttccagagtggtctcttctcaggccctttttagtccctttcc

SEQ ID NO: 22162 - DNA, 120 bp, synthetic construct
  source 1..120: mol_type = other DNA
gcccagccttttcctccattcttgacaacttatgttagtacagtacatttgtcacaattagtgaacccaaactagcacagtgttactaactagagcccacacttcattcagatgccctta

SEQ ID NO: 22163 - DNA, 120 bp, synthetic construct
  source 1..120: mol_type = other DNA
ccatatgataccgagtgtcccttttctgtcccaggatcccatttaggatgccatatgatatttaattatcaagtctcctcagatgcctcttggctctgacagctttttcccatttaaaaa

SEQ ID NO: 22164 - DNA, 120 bp, synthetic construct
  source 1..120: mol_type = other DNA
tttccccatttgtaaggacacggatcttgtctatcccactggtccccagcccttagaacgtgacagagctcaacaagtgtttgctgaatgaactaatgagcaaatggacagaaaagcagg

SEQ ID NO: 22165 - DNA, 120 bp, synthetic construct
  source 1..120: mol_type = other DNA
gaagaggtggatggaggagagtgaatggaggaggtggatggaaaagagtggatggtgggagatggaggagggtggatggagaagggtggatggaggaggaatggatggaagaggtggatg

SEQ ID NO: 22166 - DNA, 120 bp, synthetic construct
  source 1..120: mol_type = other DNA
gaggggagctggaggaggggaggcctggggcagttactgtgacaaatccctctaacctagctcggtttctgccacacctcttttactggtcatcccttcaggaaggtgttctgaaatcac

SEQ ID NO: 22167 - DNA, 120 bp, synthetic construct
  source 1..120: mol_type = other DNA
catttataggactttaccatttccacatttattgtcttgattttccaaagcattttctcatctcttgcctcagtttacctcttgtagctccgagaggcaggcctgacttgggcacattgc

SEQ ID NO: 22168 - DNA, 120 bp, synthetic construct
  source 1..120: mol_type = other DNA
aaattttagcaccaggaggcttacattttcaaaatggcacatgatgttgctgcaaacacaccaattaattaaccactgaacacactcacggtgcactgctgcaaacacaccaactaacct

SEQ ID NO: 22169 - DNA, 120 bp, synthetic construct
  source 1..120: mol_type = other DNA
agaagtcaaggctgcagtgagctgcgatgagcctcgagttttagaaagtcaacacaatccaagctataatttggggggatttaaaacatatttctataggtttggagcagatgtgcgagg

SEQ ID NO: 22170 - DNA, 120 bp, synthetic construct
  source 1..120: mol_type = other DNA
gttctgcctttggactgaggaggcgtgttcctcttcctatgtctccctgactgtaggagcgatctctctttgagtcggcatggaagaaggagaaggacatcgtttccaaggagatagaga

SEQ ID NO: 22171 - DNA, 120 bp, synthetic construct
  source 1..120: mol_type = other DNA
ggggggatccccaaagtcaatggggactttgctgcatacctccttgtcccagaggttgttctgtatgtaatttaaggacttcaagattatcattgaagaaatattaactgctgcttttat

SEQ ID NO: 22172 - DNA, 120 bp, synthetic construct
  source 1..120: mol_type = other DNA
aattggaatcattgggcactgctggtgggaatgtaaaccagtgctatagaagacagtacggagggtcctcaaaaaataaaatgcagaacaaacaaaacgacaaaacgtggtgtgtacaca

SEQ ID NO: 22173 - DNA, 120 bp, synthetic construct
  source 1..120: mol_type = other DNA
accccacacataccccccaaaccccacaccccacacacaccacatcctcccacacaccacacacacaccccactctgacacacaccacacacacagcacaccccactcacacacatcaca

SEQ ID NO: 22174 - DNA, 120 bp, synthetic construct
  source 1..120: mol_type = other DNA
aaaagagttctggagatgatggtggttaaggtcacacagcagcgtgaatgtccttaatgccacagaactctacgcttcaaaacgttaagacggtcaattttatgtcgtgtattttaccag

SEQ ID NO: 22175 - DNA, 120 bp, synthetic construct
  source 1..120: mol_type = other DNA
ggcagagagggaccttcacggggctctgggctgccaacattgtagggcgttatttagtgtgagtgttagtgttagtattagtgttggtgttagttttgatattagtgttagtatttattt

SEQ ID NO: 22176 - DNA, 120 bp, synthetic construct
  source 1..120: mol_type = other DNA
gtgttagtgttggtaatatttattagcattagtgttagtgttagtatttattagtattagttactatttattagtgtcagtgttagtgttagtgtcagcattagtattagtgtgttagta

SEQ ID NO: 22177 - DNA, 120 bp, synthetic construct
  source 1..120: mol_type = other DNA
gtttgtgtgaatcggagtatgtggtgtatgtatgtgtgtagtgtggggtttgtgttaatcagggtgtgtgtgtgatgtgataagtgtgtgatatgggatgtatgtgaattggggtatgtg

SEQ ID NO: 22178 - DNA, 120 bp, synthetic construct
  source 1..120: mol_type = other DNA
tgaggtgtgtgatgtgggatgtgtgatatagtgtgtgtgatgtgaggtatgtttgaggtagtgtgtgtgtaatgtgaggtgtgatttagtgtgtgcgtgatgtgaggtgtgtctaatgtg

SEQ ID NO: 22179 - DNA, 120 bp, synthetic construct
  source 1..120: mol_type = other DNA
tgtgttctagttgcttacaaacatgcttctgccctgctagatttctctgatccatctcagctttttcaacaactagcagcattcttggcacatgatagatgctcaattatgtcgcaggaa

SEQ ID NO: 22180 - DNA, 120 bp, synthetic construct
  source 1..120: mol_type = other DNA
gtgacgtgacgacaccactgtatgtgtggcatataatgtggtatataatataccatatggtatgttgtctgtgtggatatgtatgtggtatgtttgtgcagtgtgtggggtgtgtgtagt

SEQ ID NO: 22181 - DNA, 120 bp, synthetic construct
  source 1..120: mol_type = other DNA
cctctcttgtccccaggcagcctgttctgaggggctcacccacagccagaccgcattcatggctgcgctgagcacgggccagggagaggccccggggtggtgagtgtgagaaagggcact

SEQ ID NO: 22182 - DNA, 120 bp, synthetic construct
  source 1..120: mol_type = other DNA
gtcattagtaaaaaggtgcccttccttatctcgttattaaaaaggggacctgacacgcggaacacagcggatcatggacatgagcagaaccggctcctcagtcatatgcagaaccactta

SEQ ID NO: 22183 - DNA, 120 bp, synthetic construct
  source 1..120: mol_type = other DNA
agtcacggtgcaagccagcaagccccacgacacttgcttagtgagagtgagtcacggtgcaagccagcaagccccacgacacttgcttagtgagagtgagtcacggtgcaagccagcaag

SEQ ID NO: 22184 - DNA, 120 bp, synthetic construct
  source 1..120: mol_type = other DNA
tttggaatatccaacaactcaggttcaaattagaaaagaaacttcagagaaatgaaacaaacaggaagcctggtgcccaagtgactgttctgggatgtggagcaaacacgtggttttcag

SEQ ID NO: 22185 - DNA, 120 bp, synthetic construct
  source 1..120: mol_type = other DNA
cagggaggccctttcccgggcccctgcggttctgtcttgttctgactgcttcctggccacagcctgatagtgaacttgtatctgcacttgttcttgcgttgccatctgacaaactgctgc

SEQ ID NO: 22186 - DNA, 120 bp, synthetic construct
  source 1..120: mol_type = other DNA
cccttcctgggctggagctggagtgacatctcacatgctccagggagactggcttgatgtaacaggctcctttatccaacgtgggaccccactttctggcctcagctgggctgtaccccc

SEQ ID NO: 22187 - DNA, 120 bp, synthetic construct
  source 1..120: mol_type = other DNA
acagacagccacagccaggccctagtgtgaggcccgatgcacagagctgactcaggctcttctcactctgtggaggtcacagatctgcatcaaggccggaggcttgtagaatggccacgt

SEQ ID NO: 22188 - DNA, 120 bp, synthetic construct
  source 1..120: mol_type = other DNA
cacacacacagacacagacagatgcacaaatagacagacatgcagatacatatacacatgaagagacagatacacagatacacaaatacacataggcacaggcacacagagacaaggaga

SEQ ID NO: 22189 - DNA, 120 bp, synthetic construct
  source 1..120: mol_type = other DNA
tatcatttgttgtttttagtatatttacagagctgtgcagtcatcaccatatctaattttggaatattttcaccatccctaagaagaggcgctgttccccagaaatgctccccatctgcc

SEQ ID NO: 22190 - DNA, 120 bp, synthetic construct
  source 1..120: mol_type = other DNA
acctggcaggaggtggctggatcatgtgggtggatttggcatgaacggctgaacaccgtctgttggtgctgtcctcactgtaatgagtgggttctggtgaggtctggtcggttagaagtg

SEQ ID NO: 22191 - DNA, 120 bp, synthetic construct
  source 1..120: mol_type = other DNA
tagtctttaaaatgtttaaatcaaaccaaaagtcgggctgaatgccccttgctttgatgttaatattgaatcctgcagccctggatgaagataaatccatggactctggttcactggggg

SEQ ID NO: 22192 - DNA, 120 bp, synthetic construct
  source 1..120: mol_type = other DNA
aatacgcaagaagagttatgttatcttgcaagttggaaatgctattttgagaacgacacaaagacagtgaagagagcgtgaaatggtacaaccacttcagaaaactgctgggcacttcct

SEQ ID NO: 22193 - DNA, 120 bp, synthetic construct
  source 1..120: mol_type = other DNA
aaaagacatgccactaaaacagtgtgtaaatgatttttactcttcatgcattcgactgggaataggctgaagttagggaagaaaaggcacgccttacaccagtgcagggagagagggtaa

SEQ ID NO: 22194 - DNA, 120 bp, synthetic construct
  source 1..120: mol_type = other DNA
tgtcctatggtggggggtccctcagtgtctgccctggaggatgtgtcctatggggggggtcccttggtgtctatcatggagggctatccctcagtgtctgccctggagggctgtgcccta

SEQ ID NO: 22195 - DNA, 120 bp, synthetic construct
  source 1..120: mol_type = other DNA
tgaatatatctgatcacattccacagcgcagcacgggctgcctcgttgttattgttgttttttaaatgaaatcctcctctctgactgtttctgtttctttccccaaatcagtgaagtgca

SEQ ID NO: 22196 - DNA, 120 bp, synthetic construct
  source 1..120: mol_type = other DNA
cctgggcgacagagtgaggccccagctcaaaaaacaaaaacagataaacagaatataaaattggatgaaaattttaggagaaatatgtccattttatcaacattcataaataacacagag

SEQ ID NO: 22197 - DNA, 120 bp, synthetic construct
  source 1..120: mol_type = other DNA
ggaaaccgtggaacgtgcttctctttagtccagcatcccggtcttaacatcggcctctacttccccttttggccgatggaagggcatcgcattttctgaggatgtctttctccccagtag

SEQ ID NO: 22198 - DNA, 120 bp, synthetic construct
  source 1..120: mol_type = other DNA
gccagctcgacctccagccttggaacccaacacccaccactttagtgatttttttctacaataaacatacattgcttttataatcaggaaggggaggagttttagctacaatgaatctga

SEQ ID NO: 22199 - DNA, 120 bp, synthetic construct
  source 1..120: mol_type = other DNA
attttggctttttcctcctccagtacagctgacaatatcccaaacccaaaaaccaaaatccaaaatgcctccaaatccaaaactttttcacggtgacactcaaaggcaatgctcattggg

SEQ ID NO: 22200 - DNA, 120 bp, synthetic construct
  source 1..120: mol_type = other DNA
tgaaagcacattttgccccaaactccacttcacgttacatgcacgaagaacattagaggaatacagagctgtttctgggaagccagctccactgtatgaaacattgagtcagcatgactc

SEQ ID NO: 22201 - DNA, 120 bp, synthetic construct
  source 1..120: mol_type = other DNA
acacaccactctgcaaacaatgtacacaccactctacaatgaacacaccactctacacaccatgtacatgccactctacaatttacccaccactctacacacaatgtatacaccactcta

SEQ ID NO: 22202 - DNA, 120 bp, synthetic construct
  source 1..120: mol_type = other DNA
acaatgtacacaccactccacaaacaaaacatgtgatgttccaggattcgctcgcccacagtcagccacgcatgcaggagcaatgctgaggctgagggtgcagagggagcttgacagtca

SEQ ID NO: 22203 - DNA, 120 bp, synthetic construct
  source 1..120: mol_type = other DNA
tagctcccagaatgggtctggcacacagcagacatgcactaaatatttaatgaatacgttaacccagttccaatttgccccaagaatactgagatgggagcaagctgcactttttttttc

SEQ ID NO: 22204 - DNA, 120 bp, synthetic construct
  source 1..120: mol_type = other DNA
attcttgttctcacggctcagaccccatgaagccaaccctagtggcggctgagcttgtgcgtgagaagctcatcaggggcactgccaatcaacgaaagcagcaagcactgcaatataaaa

SEQ ID NO: 22205 - DNA, 120 bp, synthetic construct
  source 1..120: mol_type = other DNA
ggacatttagttgtcttagtgtgaagtttgacccaagcccaaggcctttttcaaggcgtccttaaattccttgttcctcaggcagtaaatcaaagggttaattattggcgtgacaacagt

SEQ ID NO: 22206 - DNA, 120 bp, synthetic construct
  source 1..120: mol_type = other DNA
gatgaggatgatggccaggttctccaccaggacaaagaggtaggtgagcaggaagaggaggaagagcaggtactgcagccctggggccgtggggaggcccaccaggatgaaggtgctgac

SEQ ID NO: 22207 - DNA, 120 bp, synthetic construct
  source 1..120: mol_type = other DNA
gcttttttcaaggcattcttaaattccttattcctcaggcagtatatcaaggggttcaagatgggggtgataactgtgtacaaaacagagatgagcttgttggagctccgggaatcaatg

SEQ ID NO: 22208 - DNA, 120 bp, synthetic construct
  source 1..120: mol_type = other DNA
ccacccagatacatgttaagcactaacctctgatgatatagattctaggtctcagcctgtaacactgggtctggaatgccctcctgagcctgtcaccaccagtctccctcatctctcaaa

SEQ ID NO: 22209 - DNA, 120 bp, synthetic construct
  source 1..120: mol_type = other DNA
cttgtggagcgtttcccatgactgtctggttaacacatcagacggaaggggtctttgtagacctgttttacaaatgagtaaaccgaagcctggtgaagcgctcctcttagggccagatct

SEQ ID NO: 22210 - DNA, 120 bp, synthetic construct
  source 1..120: mol_type = other DNA
agaagtttatgtttgtgtcgaggggaggttagtatgtttgtgttggggggggacatatgggagtggcttgtggctgtgtgcatgtgtaaggcatgggtggcagtgggtgagttggtgagg

SEQ ID NO: 22211 - DNA, 120 bp, synthetic construct
  source 1..120: mol_type = other DNA
atgaaagatgcatgaatagattgatagatggatagatgggtaggtgagtggatgactgggtaggtaggtgggtagatgaatggatggttggatgaatggatggttggatgaatggatgtt

SEQ ID NO: 22212 - DNA, 120 bp, synthetic construct
  source 1..120: mol_type = other DNA
attctttaaaacctgatagaacattggagaagtttggctaattaacattgctcaaagttaaaggtcttactcttggggggggaggagccaagatggctgaataggaacagctctggtcta

SEQ ID NO: 22213 - DNA, 120 bp, synthetic construct
  source 1..120: mol_type = other DNA
tctggttttgctgtctgtctctcacgctgtttccagaacaaatgtgtgccctcagcaaggatgctggctcttcagaggtgtcagcacaggcagccggcaccccacttccctcccagaaat

SEQ ID NO: 22214 - DNA, 120 bp, synthetic construct
  source 1..120: mol_type = other DNA
cggggtctcagagcggggtgaggctgtgatgggggtctcagagcggggtgaggctgtgatgggggtctcagagcggggtgaggctgtgatggggtctcagagcggggtgaggctgtgacg

SEQ ID NO: 22215 - DNA, 120 bp, synthetic construct
  source 1..120: mol_type = other DNA
gaggatgtgtgtgtgaaggggctttctcgcagggaggagggtgtgtgtgtgaaggggcagcttcaaagaggagagtgtgtgtgtgaaggggcagcctcagagaggagagtgtgtgtgtga

SEQ ID NO: 22216 - DNA, 120 bp, synthetic construct
  source 1..120: mol_type = other DNA
ttatctcctttgggtggaagtttccagaccggctctgttctttgggaaggaaatggctggaggtgccatgcctccaggtcccagttctgccaccaaggtctcagtgattgacctggcttt

SEQ ID NO: 22217 - DNA, 120 bp, synthetic construct
  source 1..120: mol_type = other DNA
ggtggggttccttgtacttctggaccaccctctgggatgagtgactggaattcccctccccccacattgtcctgagccactcccagagcttctgtggccattttcctccgggacctgatg

SEQ ID NO: 22218 - DNA, 120 bp, synthetic construct
  source 1..120: mol_type = other DNA
cctgaaacacggatcccagcctcctcctacttggctcctagaagccgcaaatgccctttgggcttctccacagaggcagttctacagtgagaggttgcagccgggtgaagagtatttccc

SEQ ID NO: 22219 - DNA, 120 bp, synthetic construct
  source 1..120: mol_type = other DNA
cacatcccaggagacagcccagggttgatacctgaactgaagagtctcggagaagccctgcaggcccagtgtgtggggacagagaggccaacacggagctgttcctagcagagggcagtg

SEQ ID NO: 22220 - DNA, 120 bp, synthetic construct
  source 1..120: mol_type = other DNA
gtcagatggaaacaaaaggcgcaggcggcctccacaagcgccccgtggggcacggatgtgcgcagggccgagctgcagctctgggccatgaggctctgcagcaggtgcaggtcactgagc

SEQ ID NO: 22221 - DNA, 120 bp, synthetic construct
  source 1..120: mol_type = other DNA
ctgaacctgcactgtgtgtccgcctgggaggcccctcatggcccctgcacctgttctttgacccagcctaggtgaagctccctcctgcctgcacctgtagatgtcttcccttgagtgagt

SEQ ID NO: 22222 - DNA, 120 bp, synthetic construct
  source 1..120: mol_type = other DNA
tcctgggggagaaggaaagggctgcgggcgggacatccagaaagtcccacatgctgtaccatatggccatggctggtgtcccagtgcttgggtgcagactcactggacaggatccatgct

SEQ ID NO: 22223 - DNA, 120 bp, synthetic construct
  source 1..120: mol_type = other DNA
atctgggagaccctgactcaagaggggccaggtgcagggagcaggtattggggtccggtacccaagagcgcaggtaggaggagcggagctcggatggaggctctgaagagctgggccagt

SEQ ID NO: 22224 - DNA, 120 bp, synthetic construct
  source 1..120: mol_type = other DNA
ggtttacacctgggcggccgcagactccatgtccctgtggtccctgccctccgctaggcccactccctgctcttccgtgcccagaggcaggtccccggtattggtggattctgttatttg

SEQ ID NO: 22225 - DNA, 120 bp, synthetic construct
  source 1..120: mol_type = other DNA
agctgggggtctctcaggcacctggccctgcgatggtgacactgacgtcatcgtgatttgtcgccatggttctgatgtggtcacagtctctcaggcatgtgcagggtcctaggaagcata

SEQ ID NO: 22226 - DNA, 120 bp, synthetic construct
  source 1..120: mol_type = other DNA
ttcactctactcaagtatgacgtcaccgtgatttcactgattttatgtcccaggccgtattctaacaagggcacatcctgtgttctgggaagggcgtgtcgctggggaaatactcttcac

SEQ ID NO: 22227 - DNA, 120 bp, synthetic construct
  source 1..120: mol_type = other DNA
ctcacacactgtgggttaaatccttagaggagtgagatcaaacttgaagaggatctactctccccttctgcccggaacacctgcccttcccaatgacctggaaggcaggcggggatttag

SEQ ID NO: 22228 - DNA, 120 bp, synthetic construct
  source 1..120: mol_type = other DNA
cagatgttgtaagttgtgtgcaatcgtgaattcaccttcagtctctcctatgagctccacaagcacaggaaacgtccgaggaaacataatcacgatagatttgcatctacaagcacactc

SEQ ID NO: 22229 - DNA, 120 bp, synthetic construct
  source 1..120: mol_type = other DNA
agttgtgccagctgggagacaaccagcatgtcactgctccccaccacctccaccagacagcgtggccctggaggtcgctgtcctcagaggaggagaatcctagaccagatctggcctcag

SEQ ID NO: 22230 - DNA, 120 bp, synthetic construct
  source 1..120: mol_type = other DNA
ggtgagggaattagggaatgcagggacgaggaggtaagggatgagggggtgaggggaggaaagggtgagaggaggaggaattgagtgaggaaatagggtaaaatgaggggatgagggaat

SEQ ID NO: 22231 - DNA, 120 bp, synthetic construct
  source 1..120: mol_type = other DNA
cccttgacagggtttctgctgcatccaggtccccagggagggctggtgcggcagccttcagaaaagatctgttcatggaaagaggtgtgtgtgcacgtgctcaagggaccatgccaatgg

SEQ ID NO: 22232 - DNA, 120 bp, synthetic construct
  source 1..120: mol_type = other DNA
aagcagagcttgtctccctggagaactcacctcagcgtgctaagggtctcatcgtagttgatgtctgcaggactcaaggctgccaccatagctgtccttgagttaccgcctgtgggaaga

SEQ ID NO: 22233 - DNA, 120 bp, synthetic construct
  source 1..120: mol_type = other DNA
cacattcagtttctcacaaatcctcccacagttccccacgcaattcctcacacggtttctcacatactttcccgtagctgcacagagagctctgcacggttccctcacatgattccacgt

SEQ ID NO: 22234 - DNA, 120 bp, synthetic construct
  source 1..120: mol_type = other DNA
cttgttccctgagtccatgaggtcctggatgtcattgtaggaggtgacagccagcttggagaggtcctccacgtagggccccagcagtgggtgctccctcacgcgaaggttgcccttgtt

SEQ ID NO: 22235 - DNA, 120 bp, synthetic construct
  source 1..120: mol_type = other DNA
aatttaaggccacaggcctgtcctcataaagtttgggtttcaaatttacaacacctgcatgatcagtgaaatccaaattcaagaagttagctcagagtagttctcaggagttaggcccca

SEQ ID NO: 22236 - DNA, 120 bp, synthetic construct
  source 1..120: mol_type = other DNA
catgacagggattttaacacacttctcactaattggtagatcaagcagatatataattaataagagcatagcatgaataacacaataatcataaattaatggacatatgtgcctctcgca

SEQ ID NO: 22237 - DNA, 120 bp, synthetic construct
  source 1..120: mol_type = other DNA
tcgggatctgccttcaccttggggatccaccttcacctggggatccaccttcacctcagacatctgccttcacctcgggatccacattcacctcagggatctgccttcacctcaggatct

SEQ ID NO: 22238 - DNA, 120 bp, synthetic construct
  source 1..120: mol_type = other DNA
ccatgaataaagctcacaaacataacctggccagcttcagcaacacccaggccatccccacctgcggccagcacgagatactttctgtgtctcttttttctttataagaaaacctggagg

SEQ ID NO: 22239 - DNA, 120 bp, synthetic construct
  source 1..120: mol_type = other DNA
gatcctgacaggcaggagaaggcaactggccaactcctggggtggaggtgggaggtgccctgccttccttgccagcctgaggctcagaaaccccatccagcctggggccaggccctccag

SEQ ID NO: 22240 - DNA, 120 bp, synthetic construct
  source 1..120: mol_type = other DNA
tactcatggttgcttgttaacccagctcttagcatctcaaaactatgccacggcaggctgacatggccctatccaaacaatacagatcacctgaaaagagaaatggccacagctggtgca

SEQ ID NO: 22241 - DNA, 120 bp, synthetic construct
  source 1..120: mol_type = other DNA
atgaggactaagggcaggatatttgaatcaggcgatgcaacaagacaaagaggtgccgtggggtgagctctacctcctccacctggggtgagctctacctcctccacctcgggtgacctc

SEQ ID NO: 22242 - DNA, 120 bp, synthetic construct
  source 1..120: mol_type = other DNA
gggtgttggctccatgagttctgagagcagggctggtgaatggaggctggagagccagcacactacgtttgcaggacacttgcagccctgtgaggattctcatcccctcggatgtcagga

SEQ ID NO: 22243 - DNA, 120 bp, synthetic construct
  source 1..120: mol_type = other DNA
cctccacagcccctcctccctgcagagctctggagctgcctccctgtaggagatttttaaaagaggctgtttatacaatttctagcaaagaaataattattataatcacattaagtgatt

SEQ ID NO: 22244 - DNA, 120 bp, synthetic construct
  source 1..120: mol_type = other DNA
ggccagtggggctgtgcattaagggagtaccactcaattattacggttcattcaaattccataaaagctgagtcattacaagaggtttgggacctcttaaaactgccatgaaatatttaa

SEQ ID NO: 22245 - DNA, 120 bp, synthetic construct
  source 1..120: mol_type = other DNA
tgatagggaaacagcccaataaagaggaaatggcattccaggaagcaggcagagcttctgggagcctgcaccccagccgtcactctgggcccaccgaggaggagcctgctatgtacaaca

SEQ ID NO: 22246 - DNA, 120 bp, synthetic construct
  source 1..120: mol_type = other DNA
cacacccaggcactcactccacacacacacccaggcactccacacacacacacccaggcactcactccacacacacacccaggcactcactccaccacacacacacacccaggcactcac

SEQ ID NO: 22247 - DNA, 120 bp, synthetic construct
  source 1..120: mol_type = other DNA
gtgggtccaaggtgcagggtggggtagtcctggtggcctgaggccagagtccccgcggaagctgtgcccacctccctctggaccggatgcttttggaggggctgcctccagctcggcatc

SEQ ID NO: 22248 - DNA, 120 bp, synthetic construct
  source 1..120: mol_type = other DNA
tatctttattaaaatttcatgtgcatgtgtctgtgtattctgcaatttgtcattttcagaaagaaggaacaggcaattcgcgaagtttcacctgtactcccgagctgttccccaggctcc

SEQ ID NO: 22249 - DNA, 120 bp, synthetic construct
  source 1..120: mol_type = other DNA
agtcaacaaattgaagacatttgacatgagccaagttagggtatctctgaagaggaaaccatcaccttgatgatattggcgtgctccaccctggatagaattgcgatctctaaagtaact

SEQ ID NO: 22250 - DNA, 120 bp, synthetic construct
  source 1..120: mol_type = other DNA
agcatcccattacaccagggccaccattggtccatgcggcagacacatcccctgcatttacctcccctaagtcccacggacatgaaagaagaaacaaagtgataaacgcctgcagcacaa

SEQ ID NO: 22251 - DNA, 120 bp, synthetic construct
  source 1..120: mol_type = other DNA
actgaaaaaactcttcttggtcaacaataaaatcagtaaaattgagaacttaagcaacttacatcaactacagatgctagagctgggatctaaccgcatccgggtaggtgcagacagccc

SEQ ID NO: 22252 - DNA, 120 bp, synthetic construct
  source 1..120: mol_type = other DNA
cagcaaagtggtcacttggagtgaactgatgtacataccgggggctttagaaaacctcttgatgctgacacactcccaaaggcagtgctgagttgggccttcctccctggacagctttat

SEQ ID NO: 22253 - DNA, 120 bp, synthetic construct
  source 1..120: mol_type = other DNA
tagtgatggccatttcattaggtttcagttgcattcctttaattacagatgagtctaaccctggcgcctctgttttcaaccactttgtccttttgttccctcttgatactttctgctagc

SEQ ID NO: 22254 - DNA, 120 bp, synthetic construct
  source 1..120: mol_type = other DNA
gacccctaggtgctaggtcctgtgcagacagctggtgcttgaggtgattgaggtgtgaggtgagcacatgcctgtcttcaggagtgtcacagagggccttgtggacatggctgaaaggct

SEQ ID NO: 22255 - DNA, 120 bp, synthetic construct
  source 1..120: mol_type = other DNA
aggtgggcaggagtgctcccagcctgacacaggtggacaggagtgctccaaggctgacaggtggacaggagtgctcccaggttgacacaagtggacaggagtgctcccagtctgacaggt

SEQ ID NO: 22256 - DNA, 120 bp, synthetic construct
  source 1..120: mol_type = other DNA
tgacagctgggcaggaatgctcccagcctgacacaggtgggcaggagtgctcccaggctgacacaggtggacaggagtgctcccaggctgacaggtggacaggagtgctcccaggctgac

SEQ ID NO: 22257 - DNA, 120 bp, synthetic construct
  source 1..120: mol_type = other DNA
tctgccctcctgaaacatatggcctacaaattatctatttttatgtttagtactttaaaaatgatatattaaaaaattaaactagagtgatgatacaactatctgatctttgacaaacct

SEQ ID NO: 22258 - DNA, 120 bp, synthetic construct
  source 1..120: mol_type = other DNA
ttccctagcaaaaccttcctgagactttcctcttatctctgggactccaggttccttcgtacaaaaacgagtttccttattcatttagcaaacggtccctggaacccacaggctccatgt

SEQ ID NO: 22259 - DNA, 120 bp, synthetic construct
  source 1..120: mol_type = other DNA
ccactctcctagcccaggggagtctgcctacagctacggttttgcagatggaccctaaaagaaaagactcagggtccagggagtttgtagactatattgggcctggagtccacagagaag

SEQ ID NO: 22260 - DNA, 120 bp, synthetic construct
  source 1..120: mol_type = other DNA
tctcatgggctctgctctgcttccagatcttaattaatgagatacagagcagcctttatcagctgggatggtccggtcagcagcattaccctgtttgctttggctggagaactggccggg

SEQ ID NO: 22261 - DNA, 120 bp, synthetic construct
  source 1..120: mol_type = other DNA
taggcttaggggctggctcgtcagaggggcgggactgggggcgccttcagtacttccttggtcttctggtccctaggggccaaggttgggggatggcccaagggaggtcagatggggtca

SEQ ID NO: 22262 - DNA, 120 bp, synthetic construct
  source 1..120: mol_type = other DNA
ctggtcattagctggacggcaagcaggacagcggctcagagaggcccagccccttccttaagtgctcccgtgggcgggattcaagtcctgatcttgaccatctctctccctgcaggcatc

SEQ ID NO: 22263 - DNA, 120 bp, synthetic construct
  source 1..120: mol_type = other DNA
tcctgggggagatgggtgaggcagggggtggggcaagggccgagacctacaggcaggccctggactctcctctgcccagatccagcactgacttacccccgatcctacccctgtgctaag

SEQ ID NO: 22264 - DNA, 120 bp, synthetic construct
  source 1..120: mol_type = other DNA
tccccgcttgtgtcccttctcctgtgatctctgtgttttcccttttctttctggggccaggaagtcagggtcaactcccaggcctcagatgcaggggcccagaacacctgctctcacctg

SEQ ID NO: 22265 - DNA, 120 bp, synthetic construct
  source 1..120: mol_type = other DNA
catggatgtggaacctacggccgagaaggaatgttgcatgagtcggatcccagtccattgtcagtggagggtgagggtgaccccatctgctatttttgtgctcatcctcatacaaccatt

SEQ ID NO: 22266 - DNA, 120 bp, synthetic construct
  source 1..120: mol_type = other DNA
aagagattggtgcttaccacagaacccagcagttccaatcccaggtatgcacccaagaggaaaaaaaacatgtgtccacacaaagttaggtctacacatgcttacagctttattcctaat

SEQ ID NO: 22267 - DNA, 120 bp, synthetic construct
  source 1..120: mol_type = other DNA
gatgataatgggcactaggacacgcagagctgctcggctgatgataatgggcactaggacactcagagctgctcggctgatgataatgggcactaggacacacagagctgctcggctgat

SEQ ID NO: 22268 - DNA, 120 bp, synthetic construct
  source 1..120: mol_type = other DNA
ctttctagggtgctgggactgttctcagtcttgactggcgcagcgttacaagattatatatgcttgtccaaatgtatcaaactgcacacttgaagtgtatgcatttattccatataaagt

SEQ ID NO: 22269 - DNA, 120 bp, synthetic construct
  source 1..120: mol_type = other DNA
ttcactcatgaagtgagaaatttttcagctccattacaatcttatggcctgaccatcataagtggggtctgtcagtccgtcactgaaggaaacttcttttttccccaagatggaatttcg

SEQ ID NO: 22270 - DNA, 120 bp, synthetic construct
  source 1..120: mol_type = other DNA
aacacatctaaacatagaaaacctacagtaaaaatatggcataagagacaaaaaatggttcacctgcataaggcacttaccagcactggagtgtgcagcatgggcagttgctctgggtga

SEQ ID NO: 22271 - DNA, 120 bp, synthetic construct
  source 1..120: mol_type = other DNA
gaggggtgaagggtgagtgagtcagtgagtgagggatgagtgaggggtgagtgagtcagtgagtgaggggtgagtgagtcggtgactgaggcagtgactgcggcggtgagtgaatgcaaa

SEQ ID NO: 22272 - DNA, 120 bp, synthetic construct
  source 1..120: mol_type = other DNA
tttgtgtgtctcagtgtttgttctgtggtttttcggtgctatctcaatgcatctgtggtgtgtaatcatttccccccatttggcaatgcccatgcccatttcttggcactgtctgtaaca

SEQ ID NO: 22273 - DNA, 120 bp, synthetic construct
  source 1..120: mol_type = other DNA
agatcatcctctccactgcccgcatgaaccgggtcctcagcttccacagcgtgtctggtaagcctgtgccacccgtcggggcccaggagtccctcctggtgctggtggagttcttccttg

SEQ ID NO: 22274 - DNA, 120 bp, synthetic construct
  source 1..120: mol_type = other DNA
ttggatgtttctgtgaagatattttttatgtgtgattaacatttaaatcagtagacgttgagtacaggagatctcccaccacagtgtgggtgggccttacccaatcagtcgaaggacttc

SEQ ID NO: 22275 - DNA, 120 bp, synthetic construct
  source 1..120: mol_type = other DNA
ctgggatctccagcctgctgacctggacttcagattttagacttagctccctcagtcacatgagtcagttcattaaaatcagtgtctgtcatctccctgtgtctcagtgtgtctctccat

SEQ ID NO: 22276 - DNA, 120 bp, synthetic construct
  source 1..120: mol_type = other DNA
catggcacagtttggggtggtgcgtcctggtttgcctctggagctcctcctcggtgtgcagctctgcgttaaaagccgctgtccttgtctgggcagcccttgagctggtttctggctccc

SEQ ID NO: 22277 - DNA, 120 bp, synthetic construct
  source 1..120: mol_type = other DNA
gaagttggggagatgggagccccgggctgagggagtaggaagaggggggagaagttggggagatgggagccccgggctgagggagtaggaagaggggggagaacttggggagagaagcag

SEQ ID NO: 22278 - DNA, 120 bp, synthetic construct
  source 1..120: mol_type = other DNA
cctgacccatgtgcccttgtccctccaggagatggtaacctgcacctcaatgtgacggcggaggccttcagcccctcgctcctggctgccctggagccccacgtgtacgagtggacggcc

SEQ ID NO: 22279 - DNA, 120 bp, synthetic construct
  source 1..120: mol_type = other DNA
aatgatccccttttgagcactctgtagggtttaaggcacatctacttgccagagtaaaatggaagtaagacagtctttgtgcacatttacattaaggaaaaaagagccctaacgtcgacc

SEQ ID NO: 22280 - DNA, 120 bp, synthetic construct
  source 1..120: mol_type = other DNA
gagccctacgaggacttctggatctgggtgtccatgaccgtgtgcgtcttctggctgatgtgcatgtgtcggctgaaccccgggatctacccgcagcaagtgtgacgccccgaagttcag

SEQ ID NO: 22281 - DNA, 120 bp, synthetic construct
  source 1..120: mol_type = other DNA
cctggatagtgatgtttgatctgagctcctggtctcacggttagcaacgtggtgtcttgtcatttcccacctactgttccaagcgtgatcactaaggtgagtgaatggctgtcagtttcc

SEQ ID NO: 22282 - DNA, 120 bp, synthetic construct
  source 1..120: mol_type = other DNA
ctgacagtcccactctaacaatttaatctatcttatgtaagctggacaggcatttcaagtacaagaaacagaattcaaaacgtgaaaacggagccatctatcacacacggtgtcggttgg

SEQ ID NO: 22283 - DNA, 120 bp, synthetic construct
  source 1..120: mol_type = other DNA
gcagtgatggggaagcagtgatgggaaaggagagcttcaaatcagacctgtattttaaaaattcagcactggactaggctttttaatagctgaaagttaccagaaagctttgagatctgc

SEQ ID NO: 22284 - DNA, 120 bp, synthetic construct
  source 1..120: mol_type = other DNA
ggaagagaagagactggactgcatcatagggatgttcagagatcagccagaaagatcacctttcacaacaggactatggggcccaggccccatccctgtcatgcccctgctcaggtgtct

SEQ ID NO: 22285 - DNA, 120 bp, synthetic construct
  source 1..120: mol_type = other DNA
aggcgcgacccggggtctcctcgcccgcacgcggaagaaaatgggcgctgtggcctcagtttccctctgtgagcacccggcccggaactctgaggagtcgtctgtggaggagcctttggc

SEQ ID NO: 22286 - DNA, 120 bp, synthetic construct
  source 1..120: mol_type = other DNA
ttgtcagggacccaggtttcctttgtcttctcaagatccaaaatggctaactacccaccaggtctgtactccaatcagtaacaaaatttcctttaagagtacaacccagaaattgtatca

SEQ ID NO: 22287 - DNA, 120 bp, synthetic construct
  source 1..120: mol_type = other DNA
tgagctggccaaggtgctgtgtggggctggagctcagagcaggcacgatgatcgctccttttttcttttctttcttttttttttttaatacagcagctttattgcaatgtaacttacata

SEQ ID NO: 22288 - DNA, 120 bp, synthetic construct
  source 1..120: mol_type = other DNA
attcccattagcaatcaccgccaatttctaatttcatcaatatttctatcacctcaaaataaaccccattcccattagcaatcaccgccagtttctctccaaccaccatagtccctggca

SEQ ID NO: 22289 - DNA, 120 bp, synthetic construct
  source 1..120: mol_type = other DNA
ggtttgagggataggatgcttggacaaagaggaaagagaatcatttttttcttaaaattggtataggggttcatgtgtattcaggaggcagtagagaacctcaacaaggctgggggagtt

SEQ ID NO: 22290 - DNA, 120 bp, synthetic construct
  source 1..120: mol_type = other DNA
gtaatacccttgaccatcccaactcctgcacactccctgggggttgggagccccatacagggttccctgagactcctgagtatcctgagggagccctgtcaccttctgtaaactccactg

SEQ ID NO: 22291 - DNA, 120 bp, synthetic construct
  source 1..120: mol_type = other DNA
gagacgttagtttttaatctttctaataatgtcgtgaaggcagtgtccttattctcattttacagatcaggacacaacagctcttagaggtgagaaccaggccatggtcagacagtgagt

SEQ ID NO: 22292 - DNA, 120 bp, synthetic construct
  source 1..120: mol_type = other DNA
acaaggatcactgagtactaagaaagccaaaggtggttagctttttcatcgttaattaattacaagagacaaagacccaggccacaccaacagacagaaacctattctgggccttgaaag

SEQ ID NO: 22293 - DNA, 120 bp, synthetic construct
  source 1..120: mol_type = other DNA
ctgttttgaagcacccatgacccaaaaagctgttctcaaagccccaaaacctggggcaccgcttttgctagggggctgtgtatgagaatcttctggagccattaagaactttagatatcc

SEQ ID NO: 22294 - DNA, 120 bp, synthetic construct
  source 1..120: mol_type = other DNA
aagtgttctaacttcttgagctccaacactgactgccacctcaattgtccctttgagattctagacttcatgcaatgttagggagaagcctccctcctgggtgcccaggcctggttaccc

SEQ ID NO: 22295 - DNA, 120 bp, synthetic construct
  source 1..120: mol_type = other DNA
aaaagctgttagtaaagctatgtgtcttctggaggttctgtttttttgcctttccaaattccagaggctgcccacattcctttctcacagttacatcttcccatcactctaacctcttgc

SEQ ID NO: 22296 - DNA, 120 bp, synthetic construct
  source 1..120: mol_type = other DNA
ctcttgcatcttcacctgcaaacatcctggaatacaaggatgtttcaatgtccttctccaagaattaatcttcctccttcttataagcacccttgtgatgtattagctccaccctgatac

SEQ ID NO: 22297 - DNA, 120 bp, synthetic construct
  source 1..120: mol_type = other DNA
aacgtgaggaacacatgatccccttgcctcctttcttcctcattcagcacacatttatgtcaaaaaatctgtcaggttgtacctcaaacttttaatagtgatgactcttggagggtgaga

SEQ ID NO: 22298 - DNA, 120 bp, synthetic construct
  source 1..120: mol_type = other DNA
aggtactcattaactgtgtttgctatcagtgaaataaatgaaacggctagcacagtccttggcacctggtgggtggtgtggtcacccagccactgccattaaaatgttagtaagtggctg

SEQ ID NO: 22299 - DNA, 120 bp, synthetic construct
  source 1..120: mol_type = other DNA
gaacaaaattactgattggtctccctccatgttattaactggtcctagctgtcctcccccggaaggctcactaacctcagagagggcatttatagaagccaatacagggatcaatggcaa

SEQ ID NO: 22300 - DNA, 120 bp, synthetic construct
  source 1..120: mol_type = other DNA
gttaccttgaaccttctgccgtcctcttagaaagcacatattatacgtttgactttgccaatattaacttgctccctgatatgcgtgaaataatgtgagagcacagtaaggagggtgtca

SEQ ID NO: 22301 - DNA, 120 bp, synthetic construct
  source 1..120: mol_type = other DNA
ggggctgtgtatgagaatcttctggagccattaagaactttagatatccaggcccaaattagatgcaattaaattggcattttaggggggttcctgggtccagctttgcaaacttttttt

SEQ ID NO: 22302 - DNA, 120 bp, synthetic construct
  source 1..120: mol_type = other DNA
cttcctgataataaaagcagttgaggtcttaagtggttgatcaggaaaaggaagtcgaaatggtaatatttacacccaaagcaggtggagtggtcttaggcactctgagactccactcac

SEQ ID NO: 22303 - DNA, 120 bp, synthetic construct
  source 1..120: mol_type = other DNA
tttcagaacaaagcagaggcctgggggctgttctacccatcctgtagataagaaaactgagactcaaaactgatggataaattaaggtcccacaagaacaaggggcgagccaggtttcaa

SEQ ID NO: 22304 - DNA, 120 bp, synthetic construct
  source 1..120: mol_type = other DNA
tcaaatgagatgatacatgcactatactgatctcacagcctgcttctggtgtgcatccagtcaatgaacgtcattgataaacacttgaggaaacacagaggatcacgtaaggatgaaaaa

SEQ ID NO: 22305 - DNA, 120 bp, synthetic construct
  source 1..120: mol_type = other DNA
atttcatcaccaaacaccaactgagaagattcctaaaaggcacagatttactgtttaatctgatggccctggtgagaggagaagccagagggttgggcattttctgtgggtcttttagaa

SEQ ID NO: 22306 - DNA, 120 bp, synthetic construct
  source 1..120: mol_type = other DNA
ctcaggttactaaatgggatctgtaaaatccctgtctttgctatgtgctttgacaacttttttcaagaaagcctaatgcttcactcatctacccagatgttgaccgccttttcctttccc

SEQ ID NO: 22307 - DNA, 120 bp, synthetic construct
  source 1..120: mol_type = other DNA
tggtagtcaaacaactcaccctggttccagaacagcctgaaagagactgacttgggccatcagctaaggaaaagccacagaggggttttttttgttgttgttttgttttgttttgttttg

SEQ ID NO: 22308 - DNA, 120 bp, synthetic construct
  source 1..120: mol_type = other DNA
attttgcaacacctggtacagtatacacctatagctttgccatagaaatgcccctaaatgcccttcagagagcagaggtgaatactttctcatgaagaaacgccaacttttctaagcgag

SEQ ID NO: 22309 - DNA, 120 bp, synthetic construct
  source 1..120: mol_type = other DNA
tgtatatatatgtaaataaatatatacatctgagccctccccacaacatcctgacatttgtctgctctctctctctgatactcataatgcacatcactggcctcagggaagctgtgccca

SEQ ID NO: 22310 - DNA, 120 bp, synthetic construct
  source 1..120: mol_type = other DNA
actttcgtgaagcaggaacccaactgcattttgttcccccaaacaggaatgactattccaagatcatatattattttaatcctctgatctggaatgacactttcagaatttgctaaactg

SEQ ID NO: 22311 - DNA, 120 bp, synthetic construct
  source 1..120: mol_type = other DNA
cgtctttacccacatgactgccatatatgtcttctgtccttatattgctcctgaacttctctgtcatccactgtttggtgggcatcttttattgtcacctcatactgaatcatgtataac

SEQ ID NO: 22312 - DNA, 120 bp, synthetic construct
  source 1..120: mol_type = other DNA
attggattggtgctctggattttggtgtggaaaagaggagatacaaaggtagaaacagagaagttgttgattaaggatattgggaccataaatttgagttggagatgtccgtatgaactc

SEQ ID NO: 22313 - DNA, 120 bp, synthetic construct
  source 1..120: mol_type = other DNA
gtttttgtgaggccaagtataaactgtttttggcaaaaagaaaagctagttttacctgactttttttttttttggaaggcctgcactgggttatgtgttcttttttcttttatatatata

SEQ ID NO: 22314 - DNA, 120 bp, synthetic construct
  source 1..120: mol_type = other DNA
tagttgggatacttttgattggaaacaacagaaaacccaaactcagatgcactttaataataaggaggagccaagggggatatgaagaaaatggcagcctgaatgaggcctgcttccttg

SEQ ID NO: 22315 - DNA, 120 bp, synthetic construct
  source 1..120: mol_type = other DNA
cacatggttgtatgattccatttatataaaatgtctggaataagcaaatccatagagatagaaggtagactaatgcttgctggcagggagtgactgctaacgtcccaaattagatagtgc

SEQ ID NO: 22316 - DNA, 120 bp, synthetic construct
  source 1..120: mol_type = other DNA
gattggctgtgttctcagggaacaggccattttgtcctctatggaaaggctcaagcttactgatctgaattctttctgcctttttttcaaacggaacttaaggaagaggttgagactctg

SEQ ID NO: 22317 - DNA, 120 bp, synthetic construct
  source 1..120: mol_type = other DNA
gcactttaatgcttattggccagaacatagacacatgactgcacctagctgctacagaggctgggcagtatcatttttattctggatggcaatggacccagttaaaaatcaggactttgt

SEQ ID NO: 22318 - DNA, 120 bp, synthetic construct
  source 1..120: mol_type = other DNA
ctagacaaaaacccacacttctccaaaaggatacgagagagaggaagagccagaataagaatcagtggctcatgtgcttaagactcacatgggaagcttatttaaaatatacacttctgg

SEQ ID NO: 22319 - DNA, 120 bp, synthetic construct
  source 1..120: mol_type = other DNA
ccatcatgttgaggattacatgcattctgtgaagtttgtgtattaacaatccgtgtatgtcttcccaggaaaatgttaactgcagagggtttccaactgtgttggcttgatccggtcctt

SEQ ID NO: 22320 - DNA, 120 bp, synthetic construct
  source 1..120: mol_type = other DNA
aatttttgaatattttttctgttcccttagggtttaccaagcacatttatcgacaagcctcctcaggaaattgcccaaaatagccacatgtggcaagcctcattgacaggccaaaagcct

SEQ ID NO: 22321 - DNA, 120 bp, synthetic construct
  source 1..120: mol_type = other DNA
cctcttatatgttgctagatttgatttcttgcgctatctttacctggctttgatgcaggtaaataccctgatgtcagggtaatacaggatgcatagagtgaattgagaagcgtttcctcc

SEQ ID NO: 22322 - DNA, 120 bp, synthetic construct
  source 1..120: mol_type = other DNA
aaagaagtacctgcaagttatgagttgaaatgagccaattgtggggtcttttgagaagtctgtggaggggagaggggactagctatgaggagagcagatgtcaaatgtgttttttttttt

SEQ ID NO: 22323 - DNA, 120 bp, synthetic construct
  source 1..120: mol_type = other DNA
aaatgcacatttgaaggggtgatatgccttatgttcttcgagcaatgtaatctgctgtgtgacataaattttggctctgatctcacactgaggttttcactccataggcacctgcttgca

SEQ ID NO: 22324 - DNA, 120 bp, synthetic construct
  source 1..120: mol_type = other DNA
aacaggtaacttgcttagcctgtgctacgtattcatactgcacgtggatgtcactgaatgtcctttctcttccaatacatatctgtatctaaaagcacacggtttgcttgcagattttct

SEQ ID NO: 22325 - DNA, 120 bp, synthetic construct
  source 1..120: mol_type = other DNA
atatcttcagggtgaaacctggagtcagtgttaatgtctcttcagagtctttagtttgttttcatccttttccagcagaagagccctacaaaagaagacatttatgcagccaaaaaacac

SEQ ID NO: 22326 - DNA, 120 bp, synthetic construct
  source 1..120: mol_type = other DNA
agcttgtttccattctaactttatgagatgctttgtttcttgtaaagtgaattttgagagtgctgtgtgctttagcatcactggaagctgaacctcaggtagtagcccttaccttggtgt

SEQ ID NO: 22327 - DNA, 120 bp, synthetic construct
  source 1..120: mol_type = other DNA
agagacctggaaaggaaaaaaggcaggaaggcagatggaaggagaggtacagaaggatgaatggaaggaggaaatgcaattttttttcttcctttttattttattttattttattattat

SEQ ID NO: 22328 - DNA, 120 bp, synthetic construct
  source 1..120: mol_type = other DNA
caatatgaactcagtgctttaagtgcattttataaatagcacagcagataaatcacctcttttagaaagaaaatatttaaccaagtgtaccttgtctccattagacactaagcacatctc

SEQ ID NO: 22329 - DNA, 120 bp, synthetic construct
  source 1..120: mol_type = other DNA
cggagctgttcctattcggccatcttggctcctccccctgtctatacaaaatataaggagcaaaagaagactgttaagaggctaaaaataacctaaacatgccaaagaagtagagagaaa

SEQ ID NO: 22330 - DNA, 120 bp, synthetic construct
  source 1..120: mol_type = other DNA
cttccccatcactctatgttccctgctcctccagttccatcttgaatgttactgtacacatgacagcgtattatcggtgccttaagtcaggaagcaaaaaaaagacaaatcaaacaaaag

SEQ ID NO: 22331 - DNA, 120 bp, synthetic construct
  source 1..120: mol_type = other DNA
gcattagataaatctgtaaccactcaactgggttcttcttgcctgctgcctagaaaaagccaatacactgagaacagcaggtgttacaacagagaaagtttacttattgcaaggcagtgg

SEQ ID NO: 22332 - DNA, 120 bp, synthetic construct
  source 1..120: mol_type = other DNA
ctgattaacagtaattacatataaaaagtggacattcaagtcattcagataaagccactaccccgctctgtgggtttgtcagaaggtgtcaagtcctaccttctcagtaggcgtctacac

SEQ ID NO: 22333 - DNA, 120 bp, synthetic construct
  source 1..120: mol_type = other DNA
acaaggcatctgggtcagtgagctttggctgcataacaaaccacttcaaaacttagtgacttgaaaacaaatcactgttgagacaataaccatgttactgctcacaagtctatgggtcag

SEQ ID NO: 22334 - DNA, 120 bp, synthetic construct
  source 1..120: mol_type = other DNA
tccaccctgatgactatgaacttcacagagtaattggccaggatatcccttcccttactgtcatacttgctgaggtgttagttctgcaaatagtatcctttgtggatctttgtgtttgtt

SEQ ID NO: 22335 - DNA, 120 bp, synthetic construct
  source 1..120: mol_type = other DNA
cttaatcctaatgaatacttgcaggccacaggtagttgtttagcattagcaaagtttatcttaaattatttcatataattatattttaagtatgattttaggctctagatttggcctttt

SEQ ID NO: 22336 - DNA, 120 bp, synthetic construct
  source 1..120: mol_type = other DNA
cagctcattatactactacctctacctatcgtgcatttttcttgctcagctgtcacttccctagaacagacttccgtggcttccctttctaaaataaccctttttggtcacattcttttc

SEQ ID NO: 22337 - DNA, 120 bp, synthetic construct
  source 1..120: mol_type = other DNA
tggatttttctagctagtgaaaatactatacagccctttgcagatatagtatctaaggggtttaaagaaagttaaaggctggtgtggtggctcaggagtccaaggctggaggattgctta

SEQ ID NO: 22338 - DNA, 120 bp, synthetic construct
  source 1..120: mol_type = other DNA
cacacatttcttcattcatttcagcaaagagtgactgttatgtgccaggtatataatatgaattgatcagacacaagtccctgctttcgtggagcttacattccagggagtggagacaga

SEQ ID NO: 22339 - DNA, 120 bp, synthetic construct
  source 1..120: mol_type = other DNA
gggctgtcatatagtgacattctgggttggttaattgttcactgtggagggctgtcatatagtgacattctgggttggttaattgttcattgtggagggctgtcatatagtgacattctg

SEQ ID NO: 22340 - DNA, 120 bp, synthetic construct
  source 1..120: mol_type = other DNA
ataaacctaaaggacggtacgttgagtatttgattccaagttggctttttcaatgttcccatcactgatggaatcctgagaaccctgttagcctagcactgactgtttctttcactcttg

SEQ ID NO: 22341 - DNA, 120 bp, synthetic construct
  source 1..120: mol_type = other DNA
tttcggtgctttgttcttgccctgccgtagtcagttctccaaaagacaaagtgttcctttaaaacttaggtcagaccaggcaactactgctcagaatgttctgattgcttcccatttaat

SEQ ID NO: 22342 - DNA, 120 bp, synthetic construct
  source 1..120: mol_type = other DNA
ctactgatgtctagagtttttagtatctctgttcccttcccaaaatggttttacttccctttgtctcatactttgttcctccaaccacttcactggccacaactcatatattgatataat

SEQ ID NO: 22343 - DNA, 120 bp, synthetic construct
  source 1..120: mol_type = other DNA
tctgaaatgtcttataattcccccaggtgattctaatgtaccacaggtgctgggaactaccagtctagtctctctaagtgctatccgcatagttcttttaacagtgtactagctggaaat

SEQ ID NO: 22344 - DNA, 120 bp, synthetic construct
  source 1..120: mol_type = other DNA
cctccattttatagataagaagactgaggcacagtgggtttaagtaggtcatgcaaagatcccaaagctaaaagaagggagaaatgggattcaaatccagacagagtcgcttcagtactt

SEQ ID NO: 22345 - DNA, 120 bp, synthetic construct
  source 1..120: mol_type = other DNA
atataataatcataatatgactccaaggtatggcattattacccctttataagaaggaagaaagtgaggctcagagaggccaaggaattttcccagtgtcactcagctagcaggtgggag

SEQ ID NO: 22346 - DNA, 120 bp, synthetic construct
  source 1..120: mol_type = other DNA
aaaattaaggttcatgttttctccttacctctctgtcttataatgtgctagtgttcccattatacccttgacaagtcacagcgatctcaaacacagctctgtgctttgtggaaaggccct

SEQ ID NO: 22347 - DNA, 120 bp, synthetic construct
  source 1..120: mol_type = other DNA
gagagataatcagcgaggaaggacaaaaaaaactagattttcctacagaggtaatcttgatatagccatatattatagattaattcagcttttgaaggcagcctaggaactaacgcatca

SEQ ID NO: 22348 - DNA, 120 bp, synthetic construct
  source 1..120: mol_type = other DNA
gaaaatttagagttccactttggatatgtcagttttgggttgccttttggacaaccaagtggagatgccaattaggcacctgtgtatattagggtctggatctcagcataaaggtttgtg

SEQ ID NO: 22349 - DNA, 120 bp, synthetic construct
  source 1..120: mol_type = other DNA
atgttgaagatactgcagtagcaatggaagtcttaagaactcccccaatgggtttgttattattacgtgacttgttggctggatctgtgtaacaatgtcccaggctttgaaactgaggat

SEQ ID NO: 22350 - DNA, 120 bp, synthetic construct
  source 1..120: mol_type = other DNA
tcataaaacctaggaaggagtttctgaccttcctctgaagcaaatcgtaagaccttatttgagaagtgccctctctatacccagaggaaaggaacatccttatctctgaatacaaagggt

SEQ ID NO: 22351 - DNA, 120 bp, synthetic construct
  source 1..120: mol_type = other DNA
tgcctttcactgtgattgtaaatttgttagagttttttttttttttttctaaagtgtttctgtgtaactatcagatacataaaagtccttggctctaatagttcttggtgaatttttcct

SEQ ID NO: 22352 - DNA, 120 bp, synthetic construct
  source 1..120: mol_type = other DNA
agattttttttttaattcctctggagatctttttgtgatgagttttctggcaatgcagtagccactgggctatcagcccaagaaagaagccaacaatgaagcaacggagcaagcaagaga

SEQ ID NO: 22353 - DNA, 120 bp, synthetic construct
  source 1..120: mol_type = other DNA
gttggctgtcttagatctcagaggccacaatctttcagcagcatttcctaaagcatgggatactattccaaaaagatgacttcagtgtaagggacaagggcatttaatagccttaacatg

SEQ ID NO: 22354 - DNA, 120 bp, synthetic construct
  source 1..120: mol_type = other DNA
tattggataataattctgcagttacataacatctttgggcttctttttcctataagctgcaagataatgaagatggcattttcaccctctctgggaagtgaggagcgtctctgcctggcc

SEQ ID NO: 22355 - DNA, 120 bp, synthetic construct
  source 1..120: mol_type = other DNA
cccatttttacccaaacctgtcaacccccatagcatcatgaaatgtttagatattgtaacttgtagggtgagtttttacacttgatcttagccaaaaggccgagaagcgacagggtgagt

SEQ ID NO: 22356 - DNA, 120 bp, synthetic construct
  source 1..120: mol_type = other DNA
cccaggtctgcaataatgcaaagcctggattcttaattattaggttggcttgaaatatggtatcctcaaaatttatgtaagtttttcaaatttatcaagtgttacagtttacttcacata

SEQ ID NO: 22357 - DNA, 120 bp, synthetic construct
  source 1..120: mol_type = other DNA
gttcaacaataactagcatctaagttgaggaggcagtacaagtttggcaaatgcctgtgactgtctgatgtttctactggcttctttacagaggtcagtgtttcttgactttgggtttct

SEQ ID NO: 22358 - DNA, 120 bp, synthetic construct
  source 1..120: mol_type = other DNA
tcttcatctcttactactttcccaatgagaatgtggcaatagggagggagaaggatacctaccaccctatcctgaaccaatataagtggactgtgttagaaaatgcttgaaagggttaca

SEQ ID NO: 22359 - DNA, 120 bp, synthetic construct
  source 1..120: mol_type = other DNA
ctaagcctttgatttggaaccaggttgaggattgccgatgaaataagtaagaaaatatcgtgccagggcaatgaaaacctatgaagatttttgagcaggagagctacagaaacttcaata

SEQ ID NO: 22360 - DNA, 120 bp, synthetic construct
  source 1..120: mol_type = other DNA
cctacgaaatactaaacatttccacgaaatagttttttaccagtgttgctaagaagttgcagtaaataattttgttctatccatattttagtgattatgctatagctagccctcttttct

SEQ ID NO: 22361 - DNA, 120 bp, synthetic construct
  source 1..120: mol_type = other DNA
tgagaccctaacatactaccaggtatggtctcattagaacattaagactattattttctgatatctgacatctgacatgttgtgctgttggtttttccattagtgcaggctaatggatga

SEQ ID NO: 22362 - DNA, 120 bp, synthetic construct
  source 1..120: mol_type = other DNA
cagaatctcagcgcttaaatcaacaacaaaaggttatttcttgttcgtgctatgattccactattgattagatgggagctctgtgctgcttcatgcttattcagccaatagagcctccac

SEQ ID NO: 22363 - DNA, 120 bp, synthetic construct
  source 1..120: mol_type = other DNA
tgctagggactttgcagcaacatgagaaatctatttattattttgtgtcagagcaagctgggcatcttcctctttgtagactgccagagttcattgttatttgggacagagaaggaaata

SEQ ID NO: 22364 - DNA, 120 bp, synthetic construct
  source 1..120: mol_type = other DNA
cttcccctctttccattccttgtccagagcaacccactcttaagagcagaatgtaaatccttccagactgtgttcttatatttctaccagaagcacggaaatagccataatccatataca

SEQ ID NO: 22365 - DNA, 120 bp, synthetic construct
  source 1..120: mol_type = other DNA
gtgaaacttctattaaagtggccacaagtatccctaacatagaagtagtccccctctccgcgccccgccccccccactttttttaagttggctaatttaatgagatatttacattgttat

SEQ ID NO: 22366 - DNA, 120 bp, synthetic construct
  source 1..120: mol_type = other DNA
aggctagtctcaaattcctagcctcaaaagatcctcctacctcggccttctaaagtattgggatgacagatgtgagtgcctgagcccagctgtgatttatattttaatgaacaaaagatt

SEQ ID NO: 22367 - DNA, 120 bp, synthetic construct
  source 1..120: mol_type = other DNA
ttctggatagtgctgccctacagagaacccatcttgttttgttcccattcacatttccaggacagagcactgcccagatacatgttaggtgcacaaatatatctcttgaattacattaag

SEQ ID NO: 22368 - DNA, 120 bp, synthetic construct
  source 1..120: mol_type = other DNA
tccagaacttgcatcattctccaaaataaaccttagacccattcatattcattcctcatttctcttcccccctgtcttctggcagactactttctgtctctctaaatttgcctatcctgg

SEQ ID NO: 22369 - DNA, 120 bp, synthetic construct
  source 1..120: mol_type = other DNA
tacagaagtgttaagtttttaaaaatatgcacatttagatagatttattgctacattaatcaatctttttctccccctttccagaaggaaacagaagtaaaattaaatagtgcctgcctt

SEQ ID NO: 22370 - DNA, 120 bp, synthetic construct
  source 1..120: mol_type = other DNA
tctgagtgcagcataatttatcactgaaaacttacttcattgctaaagcccaaacatatacacccaagacttttaaatcatgattttcctaatgcttattgtgcatttaaatggtaattt

SEQ ID NO: 22371 - DNA, 120 bp, synthetic construct
  source 1..120: mol_type = other DNA
tttctgttctccatgcattgtttgtaacagctgttttttcatacctatccacatttgctttaggtggtaaaggaaaaagataaattaatcaacaaatcaaatggctcattttacgatggc

SEQ ID NO: 22372 - DNA, 120 bp, synthetic construct
  source 1..120: mol_type = other DNA
ttagacaaaatattttgcaagttttagctacctatctgaaatgttggaagcaaaccaatcaacaaacttggcaccgtcactgaggaagagagaaaagtgaggtatattaagttactcaac

SEQ ID NO: 22373 - DNA, 120 bp, synthetic construct
  source 1..120: mol_type = other DNA
gatagtccagaagtagaacagcctcagaatagcttgttttagaagctgaagaatgtatctggaactggatctgtttctttctttctttgcttttttcttttctcctcccctccccttccc

SEQ ID NO: 22374 - DNA, 120 bp, synthetic construct
  source 1..120: mol_type = other DNA
tgtatgtgacctgccccttctctctagctgcctttaactgtttttcttttattccaacctcagagaatctaatgattggtgttttggggatagttctctcgtaccgtatcttgcaaggat

SEQ ID NO: 22375 - DNA, 120 bp, synthetic construct
  source 1..120: mol_type = other DNA
aggtttttttattttatattctctgatgcccttgggggtttgattgtggtataaggtgagttcagtcaactgggttgatttctggaagattttaaggggccaaggctcagctcagcattc

SEQ ID NO: 22376 - DNA, 120 bp, synthetic construct
  source 1..120: mol_type = other DNA
cacctagggtttcctaggaaatggagcaatggacatggcatcccagctccttgcacaagaatcaatattctttatcaaggtccgatgttcccttctattcctagtttaatgaagcctttt

SEQ ID NO: 22377 - DNA, 120 bp, synthetic construct
  source 1..120: mol_type = other DNA
agttttattcctctgcatagggatattcagttttcccaacaccatatattaaagaggatgtcctttccccaatgtatgttcttaatgcctttgttgaaaatcagttggctgagccacccc

SEQ ID NO: 22378 - DNA, 120 bp, synthetic construct
  source 1..120: mol_type = other DNA
catgaaatttggaaaggtcaagcatcaacctattgcatcccctttgcctggaactctctcttaaagcttaagaataatggaaaatacagggagagtcagtcttgtgggcacatctgagtt

SEQ ID NO: 22379 - DNA, 120 bp, synthetic construct
  source 1..120: mol_type = other DNA
gcaaggagcccagttcccagtactcactatggatctttgacctactgatacgtttgaatctacataaatgtttggcaacaagctcaatatagatgccattaggactcaacttcttcagca

SEQ ID NO: 22380 - DNA, 120 bp, synthetic construct
  source 1..120: mol_type = other DNA
tacatactgcagagatgctcctccacttatgatgggatcccaataaacccacggccagttgaaaatactctaagtcgaaagtgcatttaatacacctaacctaccaaacatcatggctta

SEQ ID NO: 22381 - DNA, 120 bp, synthetic construct
  source 1..120: mol_type = other DNA
agtgcattccccttagttcatgtttattagacgtctaagttccaggtatgctgctgtgcactgagtaaacaacaaactagattctatgtctgttttctggaagtgtacagtcgtggacag

SEQ ID NO: 22382 - DNA, 120 bp, synthetic construct
  source 1..120: mol_type = other DNA
tcatggcctaagatatcccttggaagaaaaaagaaagagaatatccctcctatcctacccgcaggcaatcactttttcccaatttggttgtgtaaacttacagttactctggtcatatgc

SEQ ID NO: 22383 - DNA, 120 bp, synthetic construct
  source 1..120: mol_type = other DNA
ctatttacagctgagccatttataccaataacatcccttcctctctcaaacagctttttgtttccctgtagttaataatggccctgtgatgccctctctcaccactcctattcaacatag

SEQ ID NO: 22384 - DNA, 120 bp, synthetic construct
  source 1..120: mol_type = other DNA
agaaaagaaagagagagagaaaagaaagaaagaaagtctaacaaaaagatgtggagacatgcccctcatgcagatggggacttgtgttgcatttaggacacacttaggaatggactccag

SEQ ID NO: 22385 - DNA, 120 bp, synthetic construct
  source 1..120: mol_type = other DNA
agaacctaaaacctggatgagcatgaatttcctccttatcatccagagctaatattcatgagcacaaaaagtggcattgatgagcaccgaagtttgtgggcagatgtagtatttactgga

SEQ ID NO: 22386 - DNA, 120 bp, synthetic construct
  source 1..120: mol_type = other DNA
tcacgctgagcctctgtcttggcttggtgcagttgcttgcaaaattaatactgtatctcattcaattaatgcatgcctcattcctcttgagcttaacaagattaaaagaatgtcgggtgc

SEQ ID NO: 22387 - DNA, 120 bp, synthetic construct
  source 1..120: mol_type = other DNA
agagtttttggtgaaataattgtctgatttttatgcaaattccaaatcagatatcctctcagcctaaaatatcctccaatggacaagcatgtgccctgggattcccatcctcccatgggc

SEQ ID NO: 22388 - DNA, 120 bp, synthetic construct
  source 1..120: mol_type = other DNA
tgagcatcctcattgtttactcactgaacccctagaaagtggcaccaagtggattactgccaagctgagtattttttttccatgaaacagtccatgatttaagaaggcctcactctaatc

SEQ ID NO: 22389 - DNA, 120 bp, synthetic construct
  source 1..120: mol_type = other DNA
aacatgaatgctgccttcctgaaggccacacagaaccttctgtgtcccaaatactgtacagtatcatactaaactgcttaaccagaccttacacaagtgagaaacattttggataagcca

SEQ ID NO: 22390 - DNA, 120 bp, synthetic construct
  source 1..120: mol_type = other DNA
ccttctaagttcataaagaaatcagttacttaccaggctcaccttttttctttgaaccagacttcttcttggcaggagcctcttgctttggtgcctctgggctctgggccacatctgtat

SEQ ID NO: 22391 - DNA, 120 bp, synthetic construct
  source 1..120: mol_type = other DNA
gcctttctgccctgggttggggccccctccacctttttcccctggtttggggttgtatctacctttttaccctggttctgggccccctccgcctttttgccttggtttggggttccttct

SEQ ID NO: 22392 - DNA, 120 bp, synthetic construct
  source 1..120: mol_type = other DNA
gttcacaccctcctccccaagctgcttgccttattctttcttaggtatataggcatctttggttcctccactatgatattcttgttctctaccacaaaaatggtaatatcaaaacccaac

SEQ ID NO: 22393 - DNA, 120 bp, synthetic construct
  source 1..120: mol_type = other DNA
cagtccggtgttggaaagagtggtgagtggggatatccttggcttatttctgctcttagtgggaaagcttctagtttcccactgttaagtatgacgtttgctgtaggttttttgaagata

SEQ ID NO: 22394 - DNA, 120 bp, synthetic construct
  source 1..120: mol_type = other DNA
catcacatgctttttctgtgtttatggatgtgaagatgtgatttttcttctttagcttgattgattaattgatttttgagttgaaccagctttgcatacctgggataaatcccacttgat

SEQ ID NO: 22395 - DNA, 120 bp, synthetic construct
  source 1..120: mol_type = other DNA
cttgttgttttcatttttagcattcatttgagcagggatgcaactgaggctttagtttgcccttggattagttatcctctgtctcagtaggcaggtttatttggacagtggcatatggag

SEQ ID NO: 22396 - DNA, 120 bp, synthetic construct
  source 1..120: mol_type = other DNA
gaaaatgagattgatactgaaggtctctcgttcaggtgcacatctgcctctggttgtaagaatttcgtttattggttggtaaataaaaccaggagaaagcaatgcaggtctctgggaatc

SEQ ID NO: 22397 - DNA, 120 bp, synthetic construct
  source 1..120: mol_type = other DNA
ttgcaagtgatggatttaatacttaatgactgatacagagcctctaagcaaaatttcctgaatctctgcccagaagaaatgttggaggtttaacccagctgtccatctgtcatgtggacc

SEQ ID NO: 22398 - DNA, 120 bp, synthetic construct
  source 1..120: mol_type = other DNA
gtaagcaaatgagacaggagagctaatattgttgcaggacttcttccttagttcagctaaagatgtggatccttatcacacgcccatgaaaatttaggcttgcagacgatttgaagagtg

SEQ ID NO: 22399 - DNA, 120 bp, synthetic construct
  source 1..120: mol_type = other DNA
ccaagccaatttagattttctcagagtcctgatttctagtcccttttgttcatttcattgttcttttctgagtcctctcattcctccacacagtcctctcaaaggagaaggataaacccg

SEQ ID NO: 22400 - DNA, 120 bp, synthetic construct
  source 1..120: mol_type = other DNA
ttgccccatccacaccctattcacttcccttttctcctataattttgaagtcccggacatcatactagttcatccacaaaaattccagtatacatctggacatctctagacacagctgga

SEQ ID NO: 22401 - DNA, 120 bp, synthetic construct
  source 1..120: mol_type = other DNA
acggagacggagaccgtggggagagggagagggagagggagactcactcttttaggattctaaaaggactattttctttaacataaccacattatcgtcatacgtaaaattaatactaat

SEQ ID NO: 22402 - DNA, 120 bp, synthetic construct
  source 1..120: mol_type = other DNA
gcaaccatattgctttcaacattagcctattgtaactcagaaaagtcttattgtcccaaaggaatgactactgcaggggacacaagctcaaaaactaggtagtcaagcaaatgggtgcat

SEQ ID NO: 22403 - DNA, 120 bp, synthetic construct
  source 1..120: mol_type = other DNA
tgactaaggtggtgtcttgaaccaacagggctaggatagacaattgaataaatgctgttgagctcatttgctgtccatttgcaatgaaaaatgaagggcagagttctgtttcaaacctcc

SEQ ID NO: 22404 - DNA, 120 bp, synthetic construct
  source 1..120: mol_type = other DNA
ttagccaatatcatcaaggactcttttttacagagaaaagccaccacctcttattagcaatgcccttttggcaggttaagtggggaagtgagttgttcctggaatgttctaggctttttc

SEQ ID NO: 22405 - DNA, 120 bp, synthetic construct
  source 1..120: mol_type = other DNA
ttcacaggtgttcttcaatgaacacgaagatttgaacctctcgatttgcctgagttcacatttccacagattgtcaggccacttaggggaacaggaagatgttacatttctaacaagctc

SEQ ID NO: 22406 - DNA, 120 bp, synthetic construct
  source 1..120: mol_type = other DNA
tcacattcttcactgtgtatatatctacatatattttaattctgaaatactgctgaatatcctgggccatcaggtaaagttgacaccaggggttattctgtgaggtcatgcgcccccacc

SEQ ID NO: 22407 - DNA, 120 bp, synthetic construct
  source 1..120: mol_type = other DNA
tgacccagtctcccaaccacagaaagtgaccgttaacattttgtgaaaatgttgatacaaaacaaatgaaatgatactgtgcatttttgtaaactacttctaaagcataaaatgtactgt

SEQ ID NO: 22408 - DNA, 120 bp, synthetic construct
  source 1..120: mol_type = other DNA
tatatattatatatgtaatatatatatatttaaaaacagaaccattatcttttagagatacatactgaagtgtctggagacatgcttcaagataacccaggagggagaatggtagaagga

SEQ ID NO: 22409 - DNA, 120 bp, synthetic construct
  source 1..120: mol_type = other DNA
ttcgattcatggcaaagaattgaaccctaggtcttctccttccttgcaaccgttaatgtcagaagctctgaagacacctgggacagagaagagagggagaaaagtttacgtggaagcata

SEQ ID NO: 22410 - DNA, 120 bp, synthetic construct
  source 1..120: mol_type = other DNA
gcctaatctgactcatcaaagaaaggcctgaaacccaaattccaaatgtcattcaggccaaagtagatgcgtccatatatcatacctggccttgggtatctgtttgctaccatgatattt

SEQ ID NO: 22411 - DNA, 120 bp, synthetic construct
  source 1..120: mol_type = other DNA
tacagaaaggtaaatactgcacgatctcacttacatgtggaatctaaagaagttgaattcataagggtaatgaggggaggaaggggtggtcatactgtgtgaagggagatagtcacactg

SEQ ID NO: 22412 - DNA, 120 bp, synthetic construct
  source 1..120: mol_type = other DNA
ctgaggggaggtagtgacactgtgagcagagatggtcacactgtgaggggagggggtcacactgtgagggggaaggtggtcacactgtgagaggggagaaggtcacactaaggggaggta

SEQ ID NO: 22413 - DNA, 120 bp, synthetic construct
  source 1..120: mol_type = other DNA
aggggaggtggtcacactgaggggaggtggtcacactgaggggaggtggtcatactgtgagtgaggaggtagtcacactgaggggagggggtcatactgcgagtggaggtagtcacactg

SEQ ID NO: 22414 - DNA, 120 bp, synthetic construct
  source 1..120: mol_type = other DNA
ttggtttgatacaattctccagaaaaattaaggaagaaagagccaacctcatacacattgcagaatatatccacgaggccttactggtggcacccaaagttttcagaacctcccagtact

SEQ ID NO: 22415 - DNA, 120 bp, synthetic construct
  source 1..120: mol_type = other DNA
agacaacaatctgctccagctggtctatgtcctctttgcaaagttttgtttccggctatgaaaccaagttatcaaaatacactgagcttagatggaccccttggaatcactgaatcacag

SEQ ID NO: 22416 - DNA, 120 bp, synthetic construct
  source 1..120: mol_type = other DNA
ccaagaagtaattctcagtttgcaattctgagcccagcactttttctctcttactcactttaaaaatccctgtaccttgggatctagatctagaaataccatttgacccagccatcccat

SEQ ID NO: 22417 - DNA, 120 bp, synthetic construct
  source 1..120: mol_type = other DNA
aaggtgtttctaaaattattgttaccatgctcatagttcaaggattgtatatctgcaccttctggaatcaagccttgcctgtgtcttgaagtcacatgcccaagtggctgtgccatctag

SEQ ID NO: 22418 - DNA, 120 bp, synthetic construct
  source 1..120: mol_type = other DNA
gccctgagggaggcctggaggggctgcggatggtgaaggctgctgtgtctagctgtttccttctggacccactccctctgggctgcgtccccggctggtccaagccctgatccctgggat

SEQ ID NO: 22419 - DNA, 120 bp, synthetic construct
  source 1..120: mol_type = other DNA
tccgaggcagctgcccagccaccagccatgcggacgatggcttgcaccacagcaatgaaggtggacgtgatctgggtgtgatggtgccgggtctccagggctgcagtcacttcctggggg

SEQ ID NO: 22420 - DNA, 120 bp, synthetic construct
  source 1..120: mol_type = other DNA
ggcagagaagaactcggaggtcatgtcgcggaccacctgccgagaccccagagctggcctagggaggtggggagggagggtggggagggggcacaggtctcagaaggcccctgactgtgg

SEQ ID NO: 22421 - DNA, 120 bp, synthetic construct
  source 1..120: mol_type = other DNA
ggggaatcaagaggcatgaggtatgggcagagtggttagggagagcttctcagaggaggcaatgtgtgaaaagagcctggaatgtggcctaaatggtcagtgcaaaggccctgaggcagg

SEQ ID NO: 22422 - DNA, 120 bp, synthetic construct
  source 1..120: mol_type = other DNA
cttcaactacttaaaaatgtgaaaaccattcttagcttgtgggctgtacaaacgcaggtgttagatgtatttgttctgtggccttgattttccaaatcctggcagtagtgtcagcagtgg

SEQ ID NO: 22423 - DNA, 120 bp, synthetic construct
  source 1..120: mol_type = other DNA
cttttctgtgtgtgctaaaggcaaattttaattgttttaatgagggtttgcaagcagctcttttctctatacacttgggccttggtgaattacacgtatcattcgcttagcagtagggaa

SEQ ID NO: 22424 - DNA, 120 bp, synthetic construct
  source 1..120: mol_type = other DNA
gatacccagattccatggggcaagccttccacactgcacagcctccatgttacatgccattcatactgcacatcctccccactgcatttcctccatgttgcatgtgctccatgttgcaca

SEQ ID NO: 22425 - DNA, 120 bp, synthetic construct
  source 1..120: mol_type = other DNA
atatgtcctcccttctgcatgtcctccccgctgcacatcctttaccctgcacatcctcaccccttcacatccttccccctgcacgtgcttccccctgcatgtcctcacccctgcacatcc

SEQ ID NO: 22426 - DNA, 120 bp, synthetic construct
  source 1..120: mol_type = other DNA
tgaagaaatcaacacaattaataaacctctagccaggctaaccaggagataaagacaacacaaattatcaatatcatgaaagaaagacgggccatcactccaaatgcctgggacattttt

SEQ ID NO: 22427 - DNA, 120 bp, synthetic construct
  source 1..120: mol_type = other DNA
caagggataacctgattgctctacttcaatgaaaacagtggttctcagtcttatctacctaaggaatctggaaaacttgaatgaaaaactgttgatgcctgggcccttctgctggtgaat

SEQ ID NO: 22428 - DNA, 120 bp, synthetic construct
  source 1..120: mol_type = other DNA
acaccgtcagtccttcaaaatgcttctcagcctccaaaccatttgtggaggcacaggccttgaggcatctaaatttgttctgctctcttgtttagaaaataggcaaaggctgctgggggt

SEQ ID NO: 22429 - DNA, 120 bp, synthetic construct
  source 1..120: mol_type = other DNA
actttccctacatcctaaggctacatcccgtactgaggatctcacctgtgggacatgttccgcttttaacacttacgttggaaataaccctgggttctgaaagtgggggacaggttcatt

SEQ ID NO: 22430 - DNA, 120 bp, synthetic construct
  source 1..120: mol_type = other DNA
gcatctcatccatcccttcccatacatcatgctgtacagaacaagacaagaccatggcattagagctacaactgccctgcaggtgctcactgcaggtgcttattgcaaggtgttcattgt

SEQ ID NO: 22431 - DNA, 120 bp, synthetic construct
  source 1..120: mol_type = other DNA
cactacaggtgcttattgcagggtgctcactacaggtgcttttgtgggtcattaactgtagggtgctcattgcaagtaccactgcaggtgttcactataggtgctcactgtaggtgctta

SEQ ID NO: 22432 - DNA, 120 bp, synthetic construct
  source 1..120: mol_type = other DNA
tttcagaattactgtctatgagaactaagctcaccttgagatgcataattgggaaaaaaaaaggccaaacaattgtccttggatatggctacagtagtgacagcagaaagccaccctccc

SEQ ID NO: 22433 - DNA, 120 bp, synthetic construct
  source 1..120: mol_type = other DNA
tcactggtgggtgccccactgccctgtccctcgactctcactggtgagtgtccccttgccctgtcccccgactctcactggtgggcgcccgcctgccctgtccccctgactctcattggt

SEQ ID NO: 22434 - DNA, 120 bp, synthetic construct
  source 1..120: mol_type = other DNA
ttagtcaccagagagtgacagcagtggttgctgggttcaggatttaactgttgcattttacctggtaatgagaccaagccttgctcggtttaacccgagtggaagactctagaagtagcg

SEQ ID NO: 22435 - DNA, 120 bp, synthetic construct
  source 1..120: mol_type = other DNA
agactgattgtgggtggagtcctcctttgcaactttgtaactttaccttagcctctgattggctgcaaaatgcaaccaattagatgttgcacaagagtgtaacatttgtaactccacttc

SEQ ID NO: 22436 - DNA, 120 bp, synthetic construct
  source 1..120: mol_type = other DNA
gtctgtatttttcacattacgattcctaaactcaactccctccttttctacccaaaagctaacagcattggcatgaaaaaagcagccacaaaaaggtttttcctctggcaggaaccaagc

SEQ ID NO: 22437 - DNA, 120 bp, synthetic construct
  source 1..120: mol_type = other DNA
agctccacaagagtcctgagggggaaatcagaggacaccaagcagcctggtcttggacagggtgttctgcagatggccattacctgagcgtgctggcctatgggctggccctgagcaccc

SEQ ID NO: 22438 - DNA, 120 bp, synthetic construct
  source 1..120: mol_type = other DNA
catggccacagctcccacacccagcctcacccagggctggccccggcacccatggccacagctcccacacccagcctcatccagaatccaagctcgtcccagacactgtctctctggccg

SEQ ID NO: 22439 - DNA, 120 bp, synthetic construct
  source 1..120: mol_type = other DNA
gaaagaaagacattctcagatgaaaaaaaacaagaaaatttgccaccaacagacctgctctaaaagaaatgctaaacaaagttcttcagctctccctctccctctccctctctctctccc

SEQ ID NO: 22440 - DNA, 120 bp, synthetic construct
  source 1..120: mol_type = other DNA
aacaaaaacaaagttcttcagacagaagggaagtaataccagagggaaaactggagtttcaggaataaaggaagagcaacagaaatgacaaagagcaggctgggcatgatggctcacacc

SEQ ID NO: 22441 - DNA, 120 bp, synthetic construct
  source 1..120: mol_type = other DNA
gtataaaattaacctgcaagcctgaccatctcgggcactttcacaggacctcttgaggctgaataacctgggccacagtcactcatactgactaggaataaacctttttaaatatatttt

SEQ ID NO: 22442 - DNA, 120 bp, synthetic construct
  source 1..120: mol_type = other DNA
aatcagcagatggaccaagcagtcgagggactaaaagacacagacagacagaccaccaagtggacctagcatccaagacacagacagaccaccgaacagatccagtatccaaagcacaga

SEQ ID NO: 22443 - DNA, 120 bp, synthetic construct
  source 1..120: mol_type = other DNA
cagacagaccaccaaacagatccaacatccaagacacagacagacagaccaccaaacagaccaagcatccaagacacagacagacagaccaccaaacggatccagtatccaaggcacaga

SEQ ID NO: 22444 - DNA, 120 bp, synthetic construct
  source 1..120: mol_type = other DNA
ccagtattaagacacagacagacagacagaccaccaaacagatccagcattcaagacacagagagacagatcaccaagtggacccagtatcaagacagacagaaaagcagacctcgtatt

SEQ ID NO: 22445 - DNA, 120 bp, synthetic construct
  source 1..120: mol_type = other DNA
aggggtggaagacttgggggaggggaacctgcaatccagagcatagcgaacaagaatgaactccttaggagacgtctcttgttgtgttgtgggctctgtgaaggatgaagttccacacac

SEQ ID NO: 22446 - DNA, 120 bp, synthetic construct
  source 1..120: mol_type = other DNA
aacttaggtgtgattggtgggagaggacagcagcggatgttaaggacagatgccaacctgatcctggagtgaggtgggccatgagaatcctagactatgcaaattagagggatgcttagc

SEQ ID NO: 22447 - DNA, 120 bp, synthetic construct
  source 1..120: mol_type = other DNA
ccttccttaggcccttgccctgtcactgcttttgctttcatcaaacaacaacaaaaaacataaccatatgagggatgatgtctctcatcagttttggatttccaacagctcatgatatcc

SEQ ID NO: 22448 - DNA, 120 bp, synthetic construct
  source 1..120: mol_type = other DNA
agctcttaacttctttttcagctttttcctgtggtgattcctttgtcctaagcaaatgccagccacaagacagacctgcaacatttgaccttatgtcagacagaatgaaaattgtgtggg

SEQ ID NO: 22449 - DNA, 120 bp, synthetic construct
  source 1..120: mol_type = other DNA
gagacttcctgtaactatttcaagacatggatttcaaacacaggaagcagtttcagaaagaaatacgagagagtaaagagtggttaatgttgaggctgggtagcagcgacttgatctgtg

SEQ ID NO: 22450 - DNA, 120 bp, synthetic construct
  source 1..120: mol_type = other DNA
cagaagaatgggagcctagggttggcaaaactgccctgggcttgaggaagccagtttggaaaagaagcttagcaggaggaggggcccctaagcaagaccatgtcaggcaggtttccacca

SEQ ID NO: 22451 - DNA, 120 bp, synthetic construct
  source 1..120: mol_type = other DNA
gctgctgggtggcagtggtggtggtcttttgggtggtggccgacaccattacaatgactacagacgcattgaattcccccgaggtgttggtgatattccctacaatgacttccatgtccg

SEQ ID NO: 22452 - DNA, 120 bp, synthetic construct
  source 1..120: mol_type = other DNA
tccaaggcaggtaacctcataggcctgagatgcatgcatgcacacacacatatacacacacacacgcacacctttatacacctatacacatacatacacacgcacatacaaacacataca

SEQ ID NO: 22453 - DNA, 120 bp, synthetic construct
  source 1..120: mol_type = other DNA
ttgtgaagtacaataaagtgaaacacagtaaaatgaggtgtgctgggcatcctgccatttatgcacatgcctctttaggtagaaaataatcctgtaaaagttgaggctgtggttgccttt

SEQ ID NO: 22454 - DNA, 120 bp, synthetic construct
  source 1..120: mol_type = other DNA
agtgatttttaaaaacaatctttgccccagagagcagcacatgcattgatttttgggaaccatgaaattacagatggaaaaactgagaggaaagtgaccttcccaaggtcacagagggac

SEQ ID NO: 22455 - DNA, 120 bp, synthetic construct
  source 1..120: mol_type = other DNA
catacagaaccacacctcttctcctactcctacctctacactgaatcacgccccttcccccactcctacctctatactgaaacaagccctcttccccaaccccctcctctacactgaacc

SEQ ID NO: 22456 - DNA, 120 bp, synthetic construct
  source 1..120: mol_type = other DNA
aaaggatccctcataaaggaggctgggcatatctcaggatgccaggtcaaggggtcagattttcaactggcttccttttctttccttatccctttagaacattatcttcattcattgtat

SEQ ID NO: 22457 - DNA, 120 bp, synthetic construct
  source 1..120: mol_type = other DNA
agtccttacgtagaggtcacagtagatggacagtcaaagaagacagaaaaatgcaacaacacaaacagtcccaagtggaagcaaccccttacagtgtaagcttggaagtatttttctgta

SEQ ID NO: 22458 - DNA, 120 bp, synthetic construct
  source 1..120: mol_type = other DNA
attagagccaaagcaagacctgaggaatctgtgtgtttacgaagcaccccaggagattcttatgatcagacaggtttagaaaattctgctttaggggatagattctaatcagaagaggct

SEQ ID NO: 22459 - DNA, 120 bp, synthetic construct
  source 1..120: mol_type = other DNA
catccaaaacaagaggacagagaaaacagaggtagaatttggaaaagttgttcaggaacaccctctagaactaaagacactagtttccatattgaaagggcctaccaagtgctcagcata

SEQ ID NO: 22460 - DNA, 120 bp, synthetic construct
  source 1..120: mol_type = other DNA
cataaaactgctcaatagctaccaagatactagaagacaatgaagcaatgccttcaaaattctaaaggaaaagttattcgagtctaaaattcttaatcctacccaactattaatttggtg

SEQ ID NO: 22461 - DNA, 120 bp, synthetic construct
  source 1..120: mol_type = other DNA
tttcgacagggcaatatgtgctttctaagtgtgtgccttctgacccagatatgatacttcttagggcagtttatcctatggaaataacctgacaagtacccaaagaggtatgttccttac

SEQ ID NO: 22462 - DNA, 120 bp, synthetic construct
  source 1..120: mol_type = other DNA
gttaagctttctacctcttctggtatcacatccagctgttaggctctactaactgctgactgaattctcgactgtttttgataatgccctggagtatacactgctccaaagtctaattca

SEQ ID NO: 22463 - DNA, 120 bp, synthetic construct
  source 1..120: mol_type = other DNA
gaagaagaaaagctgatggccccccactcccaatgagaaacctattccttgtttgggagctgagaattcctgggtttgtatattctgaacctgctggccagagtcaaatgctttaaggct

SEQ ID NO: 22464 - DNA, 120 bp, synthetic construct
  source 1..120: mol_type = other DNA
cccctttaacttcacctcaatctcctgagattttgcaagaagcaaataatgtgcaactctttgaaaagcatttttaaacaagtttaagaagctataattatttctatcagactgtgagat

SEQ ID NO: 22465 - DNA, 120 bp, synthetic construct
  source 1..120: mol_type = other DNA
ccagccgggcaacagtgcgagactccgtcccaaaaaaaaaaaaggtatacacaaggcaaaacaatttaaaaggatgcattatacctgacttcaccaccatgcgatacaccaatgtagcaa

SEQ ID NO: 22466 - DNA, 120 bp, synthetic construct
  source 1..120: mol_type = other DNA
gaaggaaacttaagaatctaggttagaaactgaatagactcttgggtctcttgaaggggtagagtggatcaagagaaagaagcactgggttctaacccaactctgagtaacttctatcac

SEQ ID NO: 22467 - DNA, 120 bp, synthetic construct
  source 1..120: mol_type = other DNA
ttcctctcctgccccctgaatccgttctcctgactaacttctgatccttcaagactgagcttcaacttcacctttgtgaagctttccctgaacatcttcctccaggtttaaatgacccct

SEQ ID NO: 22468 - DNA, 120 bp, synthetic construct
  source 1..120: mol_type = other DNA
tagttaacttcagagttgtctcgggtcagccactactgagtaagtggcctgagacaattccttaaaattgccaaaactgtctccccatttgcaaaatgagagaattggactagatctgta

SEQ ID NO: 22469 - DNA, 120 bp, synthetic construct
  source 1..120: mol_type = other DNA
caggaatagaccatgtctactatgaaaaacagtgtctttgacccagtttttgaagactcgctaaaactatacactctcccatccctccatgattaaaaactaagctctgtatcctaacgt

SEQ ID NO: 22470 - DNA, 120 bp, synthetic construct
  source 1..120: mol_type = other DNA
gactccatcaaaaaaaaaaaaaaaacaaaagcagcttgtttatacaaaggccctggaggtcggaactgcagggtgtttggatgtggcaggagtatgggtggtaagaacagtaataaccct

SEQ ID NO: 22471 - DNA, 120 bp, synthetic construct
  source 1..120: mol_type = other DNA
accatctcagtcctacatggagcttaataaaacctgctttgtcctgatgactaaatggagtaaggcagggaggatacactgtgcttggctcattaaagacatttaacaaaggttggcttc

SEQ ID NO: 22472 - DNA, 120 bp, synthetic construct
  source 1..120: mol_type = other DNA
tccttttctctctcctttcctgtttcctccttatcctcctttccttctccccacccccatatttctctgccttcacaataatatgctgtaaatgctggacccaagcctagtgctgagttg

SEQ ID NO: 22473 - DNA, 120 bp, synthetic construct
  source 1..120: mol_type = other DNA
agcaagagtcaggaggtgatgttggggttgccttacccttctctgagccccacctggtactgctggaattttctgagcttccccacctgacctacagctcctatcctcaaagtgagtgtg

SEQ ID NO: 22474 - DNA, 120 bp, synthetic construct
  source 1..120: mol_type = other DNA
tgtgtgtttgtgtgcgttgtgttacatcacctcccagatgaatataaactcacatgagtgacaggcactgtgacccaggagagctaagaggagaccgtagctgtcttggtgtccaggagc

SEQ ID NO: 22475 - DNA, 120 bp, synthetic construct
  source 1..120: mol_type = other DNA
acctcaggggtggagcggggactggatcacagcctcgtgactcacagtccagtgcctttcttgctgcccaactccttagggattcttgggagaacttcaaggagctaaagagaattctag

SEQ ID NO: 22476 - DNA, 120 bp, synthetic construct
  source 1..120: mol_type = other DNA
cattagtctctgtgctggatggtcacacatatttgatcgcttatggccctcaccatcaagtccatgagagagatgcagttattactcgtctcattttctggataaaggcatgaggcttta

SEQ ID NO: 22477 - DNA, 120 bp, synthetic construct
  source 1..120: mol_type = other DNA
ctccatccataaaacacgaaccataacgagccctgcctgccctctcagggcggttgcattcaaatgattcagaagagggagagtggtttttgagagctgtgcccttttaaagagtgacaa

SEQ ID NO: 22478 - DNA, 120 bp, synthetic construct
  source 1..120: mol_type = other DNA
ctcctcttgaaaagaggaatcaacttgggagattttagtaggcatttccactactctaatttctggtgctagctgtgtatacttctaagttctaagacatccctggactgcctctggttt

SEQ ID NO: 22479 - DNA, 120 bp, synthetic construct
  source 1..120: mol_type = other DNA
aagcagacaaaagatgcaccgagctgctgagagtagatgccgcactaagagtggttgggtggaaaaaaaagggactactgaaaagttaactgagatttattctagtcgtgctcaagtttt

SEQ ID NO: 22480 - DNA, 120 bp, synthetic construct
  source 1..120: mol_type = other DNA
gccttagatttctggtgctagctgtatgtatttgtaaattctgagacatccctggattgcctctggtttaagctatattgggtgggtttgcaccttatacccctaaaggatcttaaccaa

SEQ ID NO: 22481 - DNA, 120 bp, synthetic construct
  source 1..120: mol_type = other DNA
cagttcctccaagaatgaagacacagacatcctgtctgcctattggctatgaataataacaattcctcaggcgacttgggttcactgcttgcaaaatgttttcttgtctattcacacttc

SEQ ID NO: 22482 - DNA, 120 bp, synthetic construct
  source 1..120: mol_type = other DNA
aacaacctaataagggatggcttgaactaatcttttcaggtggtttaaaaattagatttaaggccaggtgtggtggcctgtaataccagcactttgggaggccaagatggttcaatcact

SEQ ID NO: 22483 - DNA, 120 bp, synthetic construct
  source 1..120: mol_type = other DNA
gtgactaatgctaaaaatgagctcatgttcaggaaatcaaaagtatttaagataagcagattggttaaaatatttgactccctctcccactccctctccccacggtctccctctccctct

SEQ ID NO: 22484 - DNA, 120 bp, synthetic construct
  source 1..120: mol_type = other DNA
actttcgttcccaggatcaccaggggaatacaggttattaattagtggtcatcacatagagtttactgctatggagggagcgagagcacctatctacttcctttattctctatattacct

SEQ ID NO: 22485 - DNA, 120 bp, synthetic construct
  source 1..120: mol_type = other DNA
agataataagtgtaaagtgcttagtgtagtgcctggcacatgatgagtgcatatagtagtaagtatatttgtttgtgggtcaggcactagttcattcctggggatagcagagaatgaggc

SEQ ID NO: 22486 - DNA, 120 bp, synthetic construct
  source 1..120: mol_type = other DNA
tcgatcgtttttatcatcttacgatcacccgtccccagcctgtctcggatgccctctcctccctctgatacctgccagagacccatttcatggatgagtaaaggcaggctgaccttcctg

SEQ ID NO: 22487 - DNA, 120 bp, synthetic construct
  source 1..120: mol_type = other DNA
ggttcagagtggactggtgtcaatggcaggtgacccagtgctcagtgtgggtttctccaagtgatatgaggcaggaatttcttttttcttttctttttttttttattgatcattcttggg

SEQ ID NO: 22488 - DNA, 120 bp, synthetic construct
  source 1..120: mol_type = other DNA
ggggggctgaccaccccacctcatgagggaggaatttcttactgaaatctccatttagacagatgacactagactcttctggatagcaaaattgcagataggcaaggaacaactgcagaa

SEQ ID NO: 22489 - DNA, 120 bp, synthetic construct
  source 1..120: mol_type = other DNA
cgcggcgaataagtgggtcatgtctaataagctatttgtgttcaggaggagaataccaatttgataaaagctgtgtgtgctgaaaaagctcagaaattgctgtttagcagattggggcct

SEQ ID NO: 22490 - DNA, 120 bp, synthetic construct
  source 1..120: mol_type = other DNA
gtatgtgtgtggtgtgtgtgcatatgtgtgtatgtgtggtgtgtgcatgtatgtgtgtgtatattgtgtggtgtgcatgtatatgtctatgtgtgtgtatatctgtgtatgtgtggtgtc

SEQ ID NO: 22491 - DNA, 120 bp, synthetic construct
  source 1..120: mol_type = other DNA
tttacatctctagtgttgacccttccaccttgaacttgagacccatatatccaacctcctactcagttttattagttggatatcttgataggcatttcaagcttactctgccccacactg

SEQ ID NO: 22492 - DNA, 120 bp, synthetic construct
  source 1..120: mol_type = other DNA
tgatggtaatggtaatgatgggatgatgatgatgatggtgattctgaggatgataatgatgatggcgatgatggtgatgatggtgatggtgaggttgatgatggtgatagtgaggttgat

SEQ ID NO: 22493 - DNA, 120 bp, synthetic construct
  source 1..120: mol_type = other DNA
tgatgataatggtgatggtaatggtggagatgatgatgatgatgatggtgatggtgatggtgagactgatgatggtgatggtgatggtgatggtggtaagtatacaccgatttaataggc

SEQ ID NO: 22494 - DNA, 120 bp, synthetic construct
  source 1..120: mol_type = other DNA
tgtattggtgggtggatggatggatggatggatagatggagttttatttcatgctgctccctcccttactcaccaccctccaaccagacacactggccttacacttcctcaaataggtta

SEQ ID NO: 22495 - DNA, 120 bp, synthetic construct
  source 1..120: mol_type = other DNA
ttcttggtggcttgactaagtccataactaatttctacttctgtagaaactagaaattttaagttcccaggattcataggaaggagggcactgcatttggtgaggccagggaataacagg

SEQ ID NO: 22496 - DNA, 120 bp, synthetic construct
  source 1..120: mol_type = other DNA
aattgagaacatgctttacatctggaaccattggagcaaaagaaaccacttccatgaccttgattgggctgccaagtattcacatatcacttgcgtccacctctcagcagttttcccaac

SEQ ID NO: 22497 - DNA, 120 bp, synthetic construct
  source 1..120: mol_type = other DNA
aactttcagttcctctaaacactcattcatcccaaaatcccgtttctgagatattagccaaatggtatctgtagcaatgactgtgggaagggagaaagtgatggaggaggaaagggaaaa

SEQ ID NO: 22498 - DNA, 120 bp, synthetic construct
  source 1..120: mol_type = other DNA
aggattctcgtatctggctagcagatggggaacagagagcaaggaaaattttgtgggagggttttatgtgtcaggccttgaagtaatataaatcactgttactcatattccattagccac

SEQ ID NO: 22499 - DNA, 120 bp, synthetic construct
  source 1..120: mol_type = other DNA
ttttatcttacatattattaacttcatttttactcacaaggagactgaggcccagagaggttaagtggcttgctcaaggtcaagggcaatgcttacagtgtgaacatcatggagctggat

SEQ ID NO: 22500 - DNA, 120 bp, synthetic construct
  source 1..120: mol_type = other DNA
ttccctccttttctgcttttcttccttcctctcttttctctttttttctctctctctgtcactctttctcagtctctcttggtgcttgtcactttctttctccccacatcctctcttcat

SEQ ID NO: 22501 - DNA, 120 bp, synthetic construct
  source 1..120: mol_type = other DNA
attgtaccatgttattacctttttcaggaacggtataataagagggccgatttcactgaatctttgccaacactgagtattagccttaaaaaaataaatccttgccaatgggatagatgg

SEQ ID NO: 22502 - DNA, 120 bp, synthetic construct
  source 1..120: mol_type = other DNA
tatgggaccatctgatgtcctagatttcatataatcagaggttactccttttcagcttgtgaaattagactgtaattaattgagctcataattacctacctgtcttgtttatctacatac

SEQ ID NO: 22503 - DNA, 120 bp, synthetic construct
  source 1..120: mol_type = other DNA
ttgggtactctactgttgaaggtgagccttttgtgtccaatttttccgtgcatgtgtaagaacagttgtcatggagatttactactgacttgtgcatgaggacagcttatatctcacctt

SEQ ID NO: 22504 - DNA, 120 bp, synthetic construct
  source 1..120: mol_type = other DNA
ctgaccttagaatagaatcttaatgccttgctatgccctgtaagttcttgagtgatatgggacctgctttgcgctccagtatcttctcatacacctctcctcctcttagtcttgtaccaa

SEQ ID NO: 22505 - DNA, 120 bp, synthetic construct
  source 1..120: mol_type = other DNA
aatatgctaccttttgtgtaagaataaagggaaaataaaaaagcatgtacacatctattaatacaaaaagaaacagaggaagggtaaacaaaaaaccccacaatgtctatctacctgcaa

SEQ ID NO: 22506 - DNA, 120 bp, synthetic construct
  source 1..120: mol_type = other DNA
aggtccaaaacaaaaacccatccaactgaagctacataacagctggctaacataccaaaggtcttaacatgaaccagtaaaatctcacaagaaaccagaattcattttggtggaatcact

SEQ ID NO: 22507 - DNA, 120 bp, synthetic construct
  source 1..120: mol_type = other DNA
agggacatcagaaagcacaatttctgattcactaccacaaactagcactggaataaaaacaagcagggcacctaacactgccaggaatgtgggaaaacaggtcctacttataattgctaa

SEQ ID NO: 22508 - DNA, 120 bp, synthetic construct
  source 1..120: mol_type = other DNA
gattccaaagctcatgttcttcacctggaaaacggaaatcataaatccaaaggaatgatgtcacacagattgaatgagatttacgtgtgaaaaggccagcaaacaagagccggaacgtaa

SEQ ID NO: 22509 - DNA, 120 bp, synthetic construct
  source 1..120: mol_type = other DNA
gttggacaaatagttaatgagcaagtacgttgaatctgtggctgttagaaggaaggagatgatgatatgaaaaacaagacaggaatcctgccctgtttggcttttgcaagtactcagctc

SEQ ID NO: 22510 - DNA, 120 bp, synthetic construct
  source 1..120: mol_type = other DNA
gccgggtgtgaaactgagttcttccagaagatggaaacagaagggtcaagatatctgaccacatgcaaagtgctaacaatgaacaataaagaggtaacacatctagggcttttactacaa

SEQ ID NO: 22511 - DNA, 120 bp, synthetic construct
  source 1..120: mol_type = other DNA
tgtaaaattaggctacaggttgtacctgctgtttcagactgatgtgtcttatttatttagcaaatatgtattgagcatccacttagagtaccatacccattcctggcgggaagtgtcttg

SEQ ID NO: 22512 - DNA, 120 bp, synthetic construct
  source 1..120: mol_type = other DNA
tgtgcacaagtcataagtgtacagttttttaaattttcaaacagcgtggtccatgtaaccagcacccagatcaagaatgaacacatctttgccatcccattactgggtatatacccaaag

SEQ ID NO: 22513 - DNA, 120 bp, synthetic construct
  source 1..120: mol_type = other DNA
atacttaggtgttcatgtctgctcatttgtacttagaagtagaattaatggttaagcatatacttagtttttgtagatcctgccatacgcttctggttttccaaagtggttgtaccaaga

SEQ ID NO: 22514 - DNA, 120 bp, synthetic construct
  source 1..120: mol_type = other DNA
accctgcaacagcttcccatttcatgcagagccaaagcctaagcccttacaatggcctttgagtcttgcaagttttttttttttgggggggggtcggtttttattatactttaagtttta

SEQ ID NO: 22515 - DNA, 120 bp, synthetic construct
  source 1..120: mol_type = other DNA
atttgcaaataccttggctatgatctaagttgcagatctaatttgaggagtagcagagtgatcactttagcacagacctggaggctaagattaccctttacagggaaatcctgaataggg

SEQ ID NO: 22516 - DNA, 120 bp, synthetic construct
  source 1..120: mol_type = other DNA
aacatataattcaggtccatagtaccttgtaccaatccaaccacaactttctttgaacctatgccccaatcagggtcctgagcactgctggagaaaactgtacaatctccaagtgatagc

SEQ ID NO: 22517 - DNA, 120 bp, synthetic construct
  source 1..120: mol_type = other DNA
ggcagtgcaccataaaagaagccaggttccctgaatgagcacaaccacacagaaggctactcacctattaggagcactcatcttggattttaagtaaaaagggaataaactattattcag

SEQ ID NO: 22518 - DNA, 120 bp, synthetic construct
  source 1..120: mol_type = other DNA
agacccaaactatacttaggaagtaaaatggcagaacaaagtgattgattggaaaagtgggtaagagagagaaaaaagagaaacatggccccccggtttctgaatcagtaccagtagggt

SEQ ID NO: 22519 - DNA, 120 bp, synthetic construct
  source 1..120: mol_type = other DNA
aaaaattaaaaaaaaaagaacatttgctctgatcacatgaagggccaaaacagatggagattctgaatccgagaaagaagggaagtccaaggttgatctaaggaagcgccataaggccac

SEQ ID NO: 22520 - DNA, 120 bp, synthetic construct
  source 1..120: mol_type = other DNA
ttcatctcttccattagagcctaaaacctcccaattacacattattagctcagaggaaagttggtaattgagatggtcccaggattccaggagtgccctgtgcagaatgtctgctttaat

SEQ ID NO: 22521 - DNA, 120 bp, synthetic construct
  source 1..120: mol_type = other DNA
tgagagagacccactttttcaaggtggcaactctgcctctgcagccttaatatagctcagtatttgcctggaaaatcaatatgcattgattaatgacaataatatgatgcaacctccacc

SEQ ID NO: 22522 - DNA, 120 bp, synthetic construct
  source 1..120: mol_type = other DNA
aaaaaggagaagtaaatctatctgagaggacacattcactggcagataaattatggatgatcctgccccctttgtaatctcagggatgacaactccagtgtgcaccaaaaacccttagaa

SEQ ID NO: 22523 - DNA, 120 bp, synthetic construct
  source 1..120: mol_type = other DNA
aactatcgatgcatgcaacaaccttgatgaatctccagggcattgtgctgagggaaaaaaggccaatctcaagggcctttctactgtctgattctacttatataacattcttgacatgac

SEQ ID NO: 22524 - DNA, 120 bp, synthetic construct
  source 1..120: mol_type = other DNA
ttttttaaaagaaaggagtcagtccctggagattttggagcagaggagtgatatgatctgagatgtactttcaggcaagaaccaagtaatgcttacaggaagggaagtcctcggatgact

SEQ ID NO: 22525 - DNA, 120 bp, synthetic construct
  source 1..120: mol_type = other DNA
aacgctttccacttagagatgataaatacaacatgccatggcagcatacactgtcagcaggctgcccctttaaaaatgtaaccatcaatctgttgttaagcccacaaccagttgcaatat

SEQ ID NO: 22526 - DNA, 120 bp, synthetic construct
  source 1..120: mol_type = other DNA
gtcttccttcctatccataaacatggtatatctctctgccttctttcataccctttagagtttctccaggcaaactgcatacaattttggttaggttaaatcctagatgtattacagtgg

SEQ ID NO: 22527 - DNA, 120 bp, synthetic construct
  source 1..120: mol_type = other DNA
ctttcaccctgtcacctgccattagtcatttctcccaccagcactgagaggtaaatcactattattatttttcagttttacagctgagaactaaagagtgtggaggttaagtgactcgtc

SEQ ID NO: 22528 - DNA, 120 bp, synthetic construct
  source 1..120: mol_type = other DNA
gaccctatttggctctttagattgaaaacttcccaccacctgacttcagacagggatgggatcatttgccttctcttcttaacagtatcagaacctgtaggctcacaggctcctttctta

SEQ ID NO: 22529 - DNA, 120 bp, synthetic construct
  source 1..120: mol_type = other DNA
actccagcctggcaacagagcgagaccctgggctctgactgtgccactgtactctagcctggcaacagatcaagaccctgagatatgattgcacagcagcacaatcatagctcactgcag

SEQ ID NO: 22530 - DNA, 120 bp, synthetic construct
  source 1..120: mol_type = other DNA
ctgagcagctgccatgttctatgtcatggacattgattgtgctttttgccttttgactgctaggaggtttggccaaatctgtaactccccccaccctttttttttttttttttttgagac

SEQ ID NO: 22531 - DNA, 120 bp, synthetic construct
  source 1..120: mol_type = other DNA
atgagtggatggcaagtacctttagaaggagagattactgctgcctgaagaggttaaggaaacttatgtggagaaagtgacctttgagctaaggatgaggatttggaaatttagcagtga

SEQ ID NO: 22532 - DNA, 120 bp, synthetic construct
  source 1..120: mol_type = other DNA
atgttgggcttagaagctgtaggattgttcagctctcaatgcagagccaggttagcttggtttttggattgttttttctaactctgaactggacaaagatggaaggtttttaatgcaggg

SEQ ID NO: 22533 - DNA, 120 bp, synthetic construct
  source 1..120: mol_type = other DNA
caaaatttacatacatgggacccgaatgtgatgccttttcctgtactttccagtgtgttctattggagcagttctaggacctgccaattttctgcaacagtgtatcatgtgtatacttcc

SEQ ID NO: 22534 - DNA, 120 bp, synthetic construct
  source 1..120: mol_type = other DNA
tttcagcctcagctttctcatctgtaaaaaatggtaaccatcatagcgcctgcctcagaggagggatgtgaggataaatgaggagccatttgtggagccttccaaactgtttacaggttg

SEQ ID NO: 22535 - DNA, 120 bp, synthetic construct
  source 1..120: mol_type = other DNA
gtcctaaatgccactgaattgttcactttagtataataataattttaaaaatccttcagcccaggaatcccatggtaggtttggatgatgggggcagataatcagggtccctggctcagg

SEQ ID NO: 22536 - DNA, 120 bp, synthetic construct
  source 1..120: mol_type = other DNA
acatatgagaattcaccgaatccccataacgaacctaggggaatatcacgttccccattttacaagtgaggaaacaaaagcatagagaagtaaacgaacacagtcaatgtcacacggcta

SEQ ID NO: 22537 - DNA, 120 bp, synthetic construct
  source 1..120: mol_type = other DNA
ttttcccgggggctgacccattgcatttgtcatcttcttcaaaggggtctatctttgctgaaagatttgctgacaaataaagggggttcagctgctgctatttttttaaatttggaaaca

SEQ ID NO: 22538 - DNA, 120 bp, synthetic construct
  source 1..120: mol_type = other DNA
aaaggctctgaacaggaatgcagttaaggaaactcacttgattatgcttagtggactacgtttctcaaactcatttgcctgctgtggagccctgttttatataacctctaatagcctgag

SEQ ID NO: 22539 - DNA, 120 bp, synthetic construct
  source 1..120: mol_type = other DNA
acatttaggttgtctgcagtggtttcactgttgaaactataaaactaaagcagccatgaacaagtacactattcttctgcacatgaatgagaattgttcccccttccatccatgcttaat

SEQ ID NO: 22540 - DNA, 120 bp, synthetic construct
  source 1..120: mol_type = other DNA
ggtgggctgtcaggatcatttgctcattttgcagttaggaaatcaaatgcccagagagaaaataatagccaccatctattggacaattactgtgtgtcaggcactgcactaagcaattaa

SEQ ID NO: 22541 - DNA, 120 bp, synthetic construct
  source 1..120: mol_type = other DNA
ctgcttctttaacttcatttcatctcacctcttttttattgactatactctggctgttctgaactcctttctgctcctccagcacaagcttaggccatttcacttgctgttcttagtacc

SEQ ID NO: 22542 - DNA, 120 bp, synthetic construct
  source 1..120: mol_type = other DNA
ccaatgccaaccacacaagatcttccactgtagtagtgagttcttactgagacctgctaactgtctgcagcccagagaaaaagcatggaaggtataaagtgatcccacacagatggcctg

SEQ ID NO: 22543 - DNA, 120 bp, synthetic construct
  source 1..120: mol_type = other DNA
agcttggcatccagtgccagattgtctgggttccaatcctggaagtctatagcttccagagcagatgacttaactttgttccttggttttctgtaaaatgagggtgatgataataatgat

SEQ ID NO: 22544 - DNA, 120 bp, synthetic construct
  source 1..120: mol_type = other DNA
gtgctttcttgtaggtgtctcctgtggcactggatccagatgggactgtggttgatgattatactaacaggacaactatgaacctactcagtctaccaagatttctctaattttacttca

SEQ ID NO: 22545 - DNA, 120 bp, synthetic construct
  source 1..120: mol_type = other DNA
cagagggagggggctccaaagccaaaagaggaggtccccccagtatacagatcttataaagcttctgtcagatttatcagtaagttccatatatatatattttttgagatggagtcttgc

SEQ ID NO: 22546 - DNA, 120 bp, synthetic construct
  source 1..120: mol_type = other DNA
taattctgtgtgcagtgttaagatggagtcattcaaatgcagtccatcagaaacgcatccacttcaggccttggccttcaataccagggccctggttttgctttttctcataggtgaaac

SEQ ID NO: 22547 - DNA, 120 bp, synthetic construct
  source 1..120: mol_type = other DNA
gctatgtcaccatactcaataggatgaaaaaggttttcagtcagaaggcctgattccaaatcttgatttctgccacttcctattaaccaggtaccttgtgcaaatgatttagccaccctg

SEQ ID NO: 22548 - DNA, 120 bp, synthetic construct
  source 1..120: mol_type = other DNA
caccccagacggcctgaattctaatcccggccccagacggcctgaattataatcctaactccagacggcctgagttctaatcctgccccagacggcctgaattataatcctggctccaga

SEQ ID NO: 22549 - DNA, 120 bp, synthetic construct
  source 1..120: mol_type = other DNA
ctacacgtggacgatttaaaaccacagttaactcaaacacaatctagatctgttctaaaatgaaacacaccatctagggcaggggcgtgggagggagaggtatattttctttcccattaa

SEQ ID NO: 22550 - DNA, 120 bp, synthetic construct
  source 1..120: mol_type = other DNA
gtagtctcctggtttttaaatgttggcagctaattcagaagttttaaaaagcagcacataggctaagcaatacatatgtacaggcagaggtacttgccagtcaccactctatagcctctg

SEQ ID NO: 22551 - DNA, 120 bp, synthetic construct
  source 1..120: mol_type = other DNA
aataaaaggttgttaattaatgtgttgcaactgccaggttaagtggcttactgttctgctggacttcaagctttctccaaaaggggaaaagtaaagtggccacttactctccaggagtgg

SEQ ID NO: 22552 - DNA, 120 bp, synthetic construct
  source 1..120: mol_type = other DNA
agcacttgctgggtacacaccctgttaaagcacattacatgtcccgtgtcactgaatcctctggcccgtgacaggtttagagaggctgagagtcccttgtcctcaccatgtctctgtatt

SEQ ID NO: 22553 - DNA, 120 bp, synthetic construct
  source 1..120: mol_type = other DNA
gggccattagaatagtcagctggtcgtggtgctgggccggctggatttccagggaagccagcccatgaagctgctgcctcttcactgtgtcctctcacactgtttgctgtcacccaggcc

SEQ ID NO: 22554 - DNA, 120 bp, synthetic construct
  source 1..120: mol_type = other DNA
cagtatggttttactaaaaaccacctgttgggggcctgaggaggggaggatgtcttgcggtggctgtgagggccgtgagaggggtactcccccaaggacagacatggtgtggggctggag

SEQ ID NO: 22555 - DNA, 120 bp, synthetic construct
  source 1..120: mol_type = other DNA
gtatgggcagccttcagctccattgctgtaaacagtggtgcagaaattttagaattttaatgagcttttgtgagagtactagggcagctatcaatgctcatcttaagatggaactggcca

SEQ ID NO: 22556 - DNA, 120 bp, synthetic construct
  source 1..120: mol_type = other DNA
actggaatgaactgcccccaaccctctgtcatctcggggacacagaccctgcccccctccgcagggctggacagcagagcagcttccctctacaaaacggtcaaaaaggcaaagaaagac

SEQ ID NO: 22557 - DNA, 120 bp, synthetic construct
  source 1..120: mol_type = other DNA
cctcactgtatccagctatacctaaagccaaaccgaatcccagacatctaaattttatgagccagtaaattcccttctttgcttaagccagtataaatcagggtcccatcccttgtaatg

SEQ ID NO: 22558 - DNA, 120 bp, synthetic construct
  source 1..120: mol_type = other DNA
cttgagagaatgggtggggattatctttgaaggtgaaaactatttctaatcagttgataagcattagaccactcccagggctctggaattccactgattatgtatctttgctttcctggg

SEQ ID NO: 22559 - DNA, 120 bp, synthetic construct
  source 1..120: mol_type = other DNA
gttagttgctgtttggatgtgcattcaaatatagagtgggtttttaaagtattgccatgtgacagaattttgttggattatcccctttggtagaaagattatgacagttgagttatacca

SEQ ID NO: 22560 - DNA, 120 bp, synthetic construct
  source 1..120: mol_type = other DNA
atcggaatgtcaccttcagggtcactcatcatagagaaactctgtccctcgcagctcctcgtatcataatgcaaaccccattcgcccttaagattgcggatccagttcctgtagcatttg

SEQ ID NO: 22561 - DNA, 120 bp, synthetic construct
  source 1..120: mol_type = other DNA
ggctagacgtttggcatgcaaagggggtgcaatctcatgggtctccctgcaaaaggagtacttctgtgtccaaaacaagctggtgccaagcacaacagaacaacaaggagcacaggagaa

SEQ ID NO: 22562 - DNA, 120 bp, synthetic construct
  source 1..120: mol_type = other DNA
aaacaaccttgatgtccagccagagggtaacgcttggataaattacagggatcccctctaatgctgaatattaagcagccactagaaagaatacagtaagtcagaactgcatttatggag

SEQ ID NO: 22563 - DNA, 120 bp, synthetic construct
  source 1..120: mol_type = other DNA
ttacactgaaagtcagaagagcagactaacttgggctggaaaaatgaagtttacaatcttgagattgaattgaaagcacagcagcctggcagctcatggagatggcgagggaaaagtgag

SEQ ID NO: 22564 - DNA, 120 bp, synthetic construct
  source 1..120: mol_type = other DNA
ctcacctggcaccacaggcaacacacatgtgcacacgcatgctttcaaaatgaggatcaaaactgtcccacataagaaattactcaagatggaaaaactagtctggtgattttcttagag

SEQ ID NO: 22565 - DNA, 120 bp, synthetic construct
  source 1..120: mol_type = other DNA
ttcttaaaaatagcatcctcattccagtaaaccagcattcatggtggagtgtggctctgctaaggtttcacttctagtaactcattcttgttggcccctttctaagttgtccaaaagcca

SEQ ID NO: 22566 - DNA, 120 bp, synthetic construct
  source 1..120: mol_type = other DNA
ccttaaagcctgcattttatcatcctgtcctcactgctctgacttctttacagttgtgctgtccaccttggcggcttctaccacatgtggctattttaagtttcaattaattaaaattaa

SEQ ID NO: 22567 - DNA, 120 bp, synthetic construct
  source 1..120: mol_type = other DNA
ctcactggtaggtccagggggtagaaataaataagacagaactccaatgtttagaaggtccatgtggtacaatatgcttttcctaaccaagaccaacatcatccttataacagggatgtg

SEQ ID NO: 22568 - DNA, 120 bp, synthetic construct
  source 1..120: mol_type = other DNA
gattttgtgtggattatgtatgttgtgggtattagtgtgtgttgtggggaaagagtgtgaaaagcttttctggtgcatgattttgcgtttgtggtggacctggcatgttcatgtgttctt

SEQ ID NO: 22569 - DNA, 120 bp, synthetic construct
  source 1..120: mol_type = other DNA
tggaggccattctctaattcctgtttgcagaaatacctgctttgcaaaaaaataagttaaaagctgaacacctgggtcctctgatgagtctcccatcaaatgcagcccatcattagagat

SEQ ID NO: 22570 - DNA, 120 bp, synthetic construct
  source 1..120: mol_type = other DNA
cttgaaagtggatggacttaccctcctctagtaaacagaatatggcaaacatattgggatgtcacttccaagattaggttataaaaagatggtggcttccatcttaagtgcacgcacgct

SEQ ID NO: 22571 - DNA, 120 bp, synthetic construct
  source 1..120: mol_type = other DNA
cttggtaattcgtttgttttaaaactgcatgtcccaaaccaaacccacctaaaaactgaaactgggttataaactctgccttgggaacttgatcccaagctctctagacctgcaatgttc

SEQ ID NO: 22572 - DNA, 120 bp, synthetic construct
  source 1..120: mol_type = other DNA
ctggaagtcgaccacataggactctccctttcaacgttgatgaaaaggcaccatgaatgagaaaactcatctccaactgactttttccagctaaagttgtttgaatggaacttcacaact

SEQ ID NO: 22573 - DNA, 120 bp, synthetic construct
  source 1..120: mol_type = other DNA
agctaacatacatagaaatctgagggccatggtgagaacattgactttttctttgagtgggaagaatgtcccttgggaggttttgagcagggaagtgacaggatctgatgtatctttcat

SEQ ID NO: 22574 - DNA, 120 bp, synthetic construct
  source 1..120: mol_type = other DNA
tagggaaggcaatctggggttgtggataagaacttagatgctagaattcgactacctagtttcaattattgtatgtctatggacaagagaagcagcctctctgttcttcagtttccccat

SEQ ID NO: 22575 - DNA, 120 bp, synthetic construct
  source 1..120: mol_type = other DNA
tgagccaagatggcgccactgcactccatccagtctgagtgacacagcaataccctgaaaaaaaaaaaaaaaacagagagagaatgctgagaaaatcctgccccaaatctctaaaaatta

SEQ ID NO: 22576 - DNA, 120 bp, synthetic construct
  source 1..120: mol_type = other DNA
atgtcttaagaaatgccagtgggagaaaaaaattaaatatgcaatgataaaatgatcagtacagatgattccagagaagcaggcactgtagctcctatcgctctgctctccactggggcc

SEQ ID NO: 22577 - DNA, 120 bp, synthetic construct
  source 1..120: mol_type = other DNA
aggccactgccatgctgggcaactacagcaaggattagagggagatgagagagaaaggctcacagtgggcagaacacagaccccagagggcgatttgggtgttaggtacaggtcttagcg

SEQ ID NO: 22578 - DNA, 120 bp, synthetic construct
  source 1..120: mol_type = other DNA
tcctatctgtcttgttccttggtgtgtcctctgtatcaaagcggtacccagtaatgggcctgaagcaaatgttttcccaatatttactgaaggaatctatgttcactggtaagtcaagag

SEQ ID NO: 22579 - DNA, 120 bp, synthetic construct
  source 1..120: mol_type = other DNA
agttatcagattaaaaaaaagaaagagctcgtggggagcagaggtcctccgcctttgcagactcactgttgacattttaggacaagcattttataacttccttttaccatcctgaaataa

SEQ ID NO: 22580 - DNA, 120 bp, synthetic construct
  source 1..120: mol_type = other DNA
ggaggtagccacagacaatatgtaacagatgggcatgatcatgttccaataaaactttattgatgatgatgcatgaaaagctagtttgctcatcccttacctaagccctctgctgcaaca

SEQ ID NO: 22581 - DNA, 120 bp, synthetic construct
  source 1..120: mol_type = other DNA
cacagcctctgtttcttctgattaacaggttatcttacattgttgatatggaatatgcatctaccataatacagctttgaataaggtattcaaagtcctcaaaaacacagaaaaattata

SEQ ID NO: 22582 - DNA, 120 bp, synthetic construct
  source 1..120: mol_type = other DNA
aatcaggcttccttcacccgaatttaagaaatttcctgccgtctttgtgtaatacattttttttttcttccatgtgcgtttaaattttaacacccctcccccccgcagaatctggagaag

SEQ ID NO: 22583 - DNA, 120 bp, synthetic construct
  source 1..120: mol_type = other DNA
ccataggtggatactgtagcagcttctacttgctccattcacttaatgatttccagacaatgttaggtagagaagataaatctggtttctatctgtggcatgtcctctttgctggaagag

SEQ ID NO: 22584 - DNA, 120 bp, synthetic construct
  source 1..120: mol_type = other DNA
caaactggaaatagagtgcactggactacacgtagtttacgtgcagaaatttgctgaataattgaatgcaagaatgaatgaatgaccatggaagactatggccttagtcctccatgctcg

SEQ ID NO: 22585 - DNA, 120 bp, synthetic construct
  source 1..120: mol_type = other DNA
agaacagtggtgtaggggaaccaaaaatggcttccctccatccttccaggtaccttattaggactaagagttaaattcacataagacgaattaacagattactgcagggtaaacaggatg

SEQ ID NO: 22586 - DNA, 120 bp, synthetic construct
  source 1..120: mol_type = other DNA
catagacctactatgttcatgtactacttcatatacttgaatacattgaatgattttattcagtgaactgatgcttacaaagtacttagcatgacggtatctggcatgcaggaagtgctt

SEQ ID NO: 22587 - DNA, 120 bp, synthetic construct
  source 1..120: mol_type = other DNA
taaatttgaacacggcagcaagcatgttagaaaacaatctaattgataagatggtactattctgatctcaactactgccttcagtcagggcttcttagcctcagcgctacagacgtttgg

SEQ ID NO: 22588 - DNA, 120 bp, synthetic construct
  source 1..120: mol_type = other DNA
tgctcttaggtttcctgacaagtttattcagccatttttttatgacattttcaacacctggaacctgacctcttcatgttgtgctggattgtgacggtctttgaccttcaaaccagaact

SEQ ID NO: 22589 - DNA, 120 bp, synthetic construct
  source 1..120: mol_type = other DNA
ccttgtaaaacagatcaattctagcccctcttactgtcttactcttacctcttattgccttaaacacaatttaaaatgacaaaaatccaagcacagtgggtcctgggggaaggtagagga

SEQ ID NO: 22590 - DNA, 120 bp, synthetic construct
  source 1..120: mol_type = other DNA
agcctgtgaaaggccaagaaatcccaagcatgtaaagacccaggattgtggagggagaaatctgggatgtttattttatcctgtttattattacaaatattgcttgtcttttaatagttt

SEQ ID NO: 22591 - DNA, 120 bp, synthetic construct
  source 1..120: mol_type = other DNA
aacattacgtatttgtttgtgaacacataagcgcacaccctttccccaccttcacttcctgtttccttgcaaatgcaaagacaagagtaaaggacttgcctagaggaaacacagaaatac

SEQ ID NO: 22592 - DNA, 120 bp, synthetic construct
  source 1..120: mol_type = other DNA
gtgatctgttaccattatgatgcaggtgaaagtgatccgtgatctgttaccattatgatgcaggcaaaagtgatttgtgatctcgtagcattatgatgcaggcaaaagtgatctgtgatc

SEQ ID NO: 22593 - DNA, 120 bp, synthetic construct
  source 1..120: mol_type = other DNA
cattttgagggtccagctgggaaatttgttccaatatattttttcttgcaaaaatcccaaaagacttccacacagcactgctgagtgagtttcatgccagacgagtggcacttagaagtt

SEQ ID NO: 22594 - DNA, 120 bp, synthetic construct
  source 1..120: mol_type = other DNA
tccagctgtcagcgtaggtacctgtgaggccttggaggtatggggactgtttttcaattgttggcagataactgctgtggacggattaagtaaatatgaaatttcaaacattatcgagtt

SEQ ID NO: 22595 - DNA, 120 bp, synthetic construct
  source 1..120: mol_type = other DNA
ctcatgcaacctcagaatggaatttttaaattttacttagctgtaattgatttaaatttaaatagccacctgtggctaatggcaaccacatcgggcagtgcagtgacaccacaccggctc

SEQ ID NO: 22596 - DNA, 120 bp, synthetic construct
  source 1..120: mol_type = other DNA
gcaagggcaagacgtcttctaacaggtggaaacaacttgtcaagacagcctgtggctgctgcgtttagagacccagagaccctgaatgtggactaacgcccccagaatgttcagaattaa

SEQ ID NO: 22597 - DNA, 120 bp, synthetic construct
  source 1..120: mol_type = other DNA
tcccagctaattgtattgaggctgtaccttgtgataggaactttgggtagctctcttagctcatatcacaccatccctggggaagggtaccccattgtacaggtgggtacacagaagagg

SEQ ID NO: 22598 - DNA, 120 bp, synthetic construct
  source 1..120: mol_type = other DNA
ttctagagttggagggaggattaaatgagtcagttatgtttaaagtcctggaacagtgccaatgcccaccacatagtaatttccatgtaaatgtgagctgccatgatgatggtgatgatc

SEQ ID NO: 22599 - DNA, 120 bp, synthetic construct
  source 1..120: mol_type = other DNA
gaagaaaagaagcaacaaatgaagagatggatgagtgaatggaaagcattctgtctgttaggtagcaatgatttctaagtgatttctggagcagcctggtttgaggagtgcatgtggatc

SEQ ID NO: 22600 - DNA, 120 bp, synthetic construct
  source 1..120: mol_type = other DNA
aaatacaaagaattccaaaataccccgtgtgaaaatttaccagttgtttatactttttgccccatttgctttattctagtcatcctgcgtgcacactgtctctctccctccccactccca

SEQ ID NO: 22601 - DNA, 120 bp, synthetic construct
  source 1..120: mol_type = other DNA
ctctgaactcctgcctttgcccacagccttttcagccttcaacaaacaaaagcaccctttatactagagcaatgagagattcaggagcaagcctgattcgacttgcttttaaaaatatgt

SEQ ID NO: 22602 - DNA, 120 bp, synthetic construct
  source 1..120: mol_type = other DNA
tcacatccacctctctctacatccttctcttccacttgtaagaatccctgtgattaccttgggcctccctgagtaacccaggataatctcccgttgcaagactcttaattcagtcacctc

SEQ ID NO: 22603 - DNA, 120 bp, synthetic construct
  source 1..120: mol_type = other DNA
cttacacatacagtggctccttcattcagtcctacacataactcagtggttccttcattcaatcttacacatacctcagtggctccttcattcaatcttactcatatctcagtggctcct

SEQ ID NO: 22604 - DNA, 120 bp, synthetic construct
  source 1..120: mol_type = other DNA
ctgctcctctctgccaggcagaaaattacattatttcctcattttgaaaggtgcttgttttgtcaggaagacatcccttccgtgcagttatctaggaattgtcttattgcatttctccct

SEQ ID NO: 22605 - DNA, 120 bp, synthetic construct
  source 1..120: mol_type = other DNA
agtaccacgtgcagtttgggggaggaccatgtgcagtttaggggagtaccgtgtgcagtttggaggagtaccgtgtgcagtttgggggaataccgagtgcagtttggggaagtaccatgg

SEQ ID NO: 22606 - DNA, 120 bp, synthetic construct
  source 1..120: mol_type = other DNA
actgcatgcagttgtttgggggagtaccgtgtgcagtttggggggagtactgtgtgcagtttgggggagtaccatgtgcagtttgggggagtactttgtgcagtttgggggaagaccatg

SEQ ID NO: 22607 - DNA, 120 bp, synthetic construct
  source 1..120: mol_type = other DNA
gtactgtgtgcagtttggggagtaccatgcacagtttgggggagtattgggggagtaccgtgtgcagtttgggggagtaccgtgcacagtttgggggagtatcatgtgcagtttggagta

SEQ ID NO: 22608 - DNA, 120 bp, synthetic construct
  source 1..120: mol_type = other DNA
cacgcatgtgctgtggtgtgtgtgatgtacgtgcatttgcacgcgtgtgctgtggcgtgtgtgatgtacgtgcatttgcacgcgtgtgctgtggcgtgtgatgtacgtgcgtttgcacgc

SEQ ID NO: 22609 - DNA, 120 bp, synthetic construct
  source 1..120: mol_type = other DNA
tctgtcatgtgggcattcctttggacgtgcttcccaagtggacaggtgtgaggtggccccaatcaatcccacatttactcaattagtggagaggctgagcacttaaaaatctgcttagct

SEQ ID NO: 22610 - DNA, 120 bp, synthetic construct
  source 1..120: mol_type = other DNA
gcctttggattaaagagccctttgaggcttgcttggtgatgtcatggaaaacagcatatgacaccaagatatccccatatccaacgagacttgctgggtttatccccgtatccaacgaga

SEQ ID NO: 22611 - DNA, 120 bp, synthetic construct
  source 1..120: mol_type = other DNA
ttcctagcctctgaggtttaggaatggaactgttacagaaaggagccttaataacccaaaccaataaaagtgggccatattcctgaaaaatctaagggtctgatgttagcttcaggcatg

SEQ ID NO: 22612 - DNA, 120 bp, synthetic construct
  source 1..120: mol_type = other DNA
cccattgtacagatgctccttaatttacagcccaataaacccattgcaagttgaaaagatagctagttgaaaatgcacttaatacacctcacatgctgagcatcatggcttagcctagcc

SEQ ID NO: 22613 - DNA, 120 bp, synthetic construct
  source 1..120: mol_type = other DNA
aggtggccattttggtggatgtcatcgaatgatcattcgagattctgcaatttcactcccactaacacctgtgcgagggtgcatttccacagccaccccacgtgtgggaggatctctgcc

SEQ ID NO: 22614 - DNA, 120 bp, synthetic construct
  source 1..120: mol_type = other DNA
acacagtaggcgtgtaaaaagcgtgtgttgagggcatgagtaaactcttccaagggaggtcgcctgtgcgccccacagggaagggagctgtgcctctgcccccttctctgccatggttct

SEQ ID NO: 22615 - DNA, 120 bp, synthetic construct
  source 1..120: mol_type = other DNA
cttgtgttataaagaatcacacagtccctcgtggagacggctctcaggggcagtcttgctgatccttctgcaaataagacccctctgaggccaaccatgtacgtggaaaggagcatgtgc

SEQ ID NO: 22616 - DNA, 120 bp, synthetic construct
  source 1..120: mol_type = other DNA
agtgctaactgcgccctcaagtggcctggggagaaaagttgtgttgtgagcggaaaattgccactcttatgggaaagatgatgctgtgttggaaactcaagcttcacttggaattatgat

SEQ ID NO: 22617 - DNA, 120 bp, synthetic construct
  source 1..120: mol_type = other DNA
caccaccgttatctaactctttaccttgtaagctgccttaatacactgagccttgcagaatataatcttcacagaaaaccgaatatattccacagcactgagagtggacatctctcagac

SEQ ID NO: 22618 - DNA, 120 bp, synthetic construct
  source 1..120: mol_type = other DNA
tggtgatggtgttgctgatgttggtgattgtgtgggtgtggtggtggtgccaatgccagtggtggcatttttgcattgatagtggtagtagtggtggtgatgtgctttgaaaggagcata

SEQ ID NO: 22619 - DNA, 120 bp, synthetic construct
  source 1..120: mol_type = other DNA
agcccaccctaagtccagaatgatctcatcccaggatccttaatgtcattacatctgcaaagacccatttttccaaataagctcacatttccaggtaactagggttaggatatagacatg

SEQ ID NO: 22620 - DNA, 120 bp, synthetic construct
  source 1..120: mol_type = other DNA
tgagatcgtatggtcatagggtgcccatagtgccatgtctaggaaaccccaattgggttcatgcggtcataaggtgcccatagtgccgtgtctgggaaaccccgattgagatcgtgcggt

SEQ ID NO: 22621 - DNA, 120 bp, synthetic construct
  source 1..120: mol_type = other DNA
cttcactaatacaagctggggaagaggaggcagtgccgcagtggggggtagcctgaccacagcacactgctcctgtctgcttctttttgtcctgcatggggaattttggggtgccaggtt

SEQ ID NO: 22622 - DNA, 120 bp, synthetic construct
  source 1..120: mol_type = other DNA
tctataattgatgaacttaatcacgtgagttcctctatagatcataactgtcacttgtcccataaacccagccccttggtgtggatcaaaatcttccacgtctttattgggagcaaagac

SEQ ID NO: 22623 - DNA, 120 bp, synthetic construct
  source 1..120: mol_type = other DNA
tgctctgcctggaccaccatctgctctgcccggaccaccatctgctctgcctggatacagcgtcaaataagacagatgtctctactgtccccaccaagcaaagatgtaccacttgcaagg

SEQ ID NO: 22624 - DNA, 120 bp, synthetic construct
  source 1..120: mol_type = other DNA
ccagctccaggtcgactttattcgtggagttccccagaagctttgggactgcatctctccggcctcatggacatcttgtttttccttcgaaccagtccaatgaaatggaatgttctagat

SEQ ID NO: 22625 - DNA, 120 bp, synthetic construct
  source 1..120: mol_type = other DNA
tctgtctgtgtgattctgtgtgtgattgtgtgtatctctatatgtgtctctgtatgtctgtgtgtgtatgtctgtatctatgtgtgtgtgtctttgtggatctctctatgtgggtgtctg

SEQ ID NO: 22626 - DNA, 120 bp, synthetic construct
  source 1..120: mol_type = other DNA
gagtgtttctctgtgtgtgtctgtgtatatttgtgtgtttctgcgtgtgtttttgtgtatccgtatgtatgtgtatctttgtgtgtctttgtgtacatctgtgtctgtgtgtatatctgt

SEQ ID NO: 22627 - DNA, 120 bp, synthetic construct
  source 1..120: mol_type = other DNA
attactctgagcactgtaccaaaaagcactaatagaaatgtggcgtctgttgacttcatatctggagaataaaatcagccaaaccacaggggtggaattaagaagtgaccccttctacca

SEQ ID NO: 22628 - DNA, 120 bp, synthetic construct
  source 1..120: mol_type = other DNA
ctttcttggaaaagctactgctgacgtggacttttttttcatgatcaccctacaaattcatttctctttttgtctttcactgtccagcactggagctgctggcagagccgtcaagagaac

SEQ ID NO: 22629 - DNA, 120 bp, synthetic construct
  source 1..120: mol_type = other DNA
acttccttaactcaactcctctgaagtccttaatgtttctcaggcagttttgtgcccagaaatcagggcagggaggggggtgtgtgtttccctctctgctacaatagacaagcagatatg

SEQ ID NO: 22630 - DNA, 120 bp, synthetic construct
  source 1..120: mol_type = other DNA
ctgcctgtttttacaaataaagttttattggaactcagccatgcctgtttgttggcatcctatcctgcttttgtgctatgaaggcagagttgcaaggggctaatttagccacaaaatgag

SEQ ID NO: 22631 - DNA, 120 bp, synthetic construct
  source 1..120: mol_type = other DNA
cactgttcagaccacctgtggttgaacagagcaatacaggagtctgttccagctgctcccaccttgccatgggaatggttctctgatttattattttaattaagggcttttaagctttaa

SEQ ID NO: 22632 - DNA, 120 bp, synthetic construct
  source 1..120: mol_type = other DNA
agcctctgaaatgtgaacatgttaccatttgttttcatgaggattaaaaaatatcacaggaaagcagccacctggtagacagcgggtacccaacacactgctgctggatttgtttctttg

SEQ ID NO: 22633 - DNA, 120 bp, synthetic construct
  source 1..120: mol_type = other DNA
aatctactttctgtctctgtcgacttccctgttctgggcactgcgcatgagagaattgtacagtgtgtggtcctactcttggttttccagatgttcttggtgtttgtggtggaggtcaga

SEQ ID NO: 22634 - DNA, 120 bp, synthetic construct
  source 1..120: mol_type = other DNA
gggattggggttttgtttgctgaagtctccccagtacacagtcgacattcagaacctggtgaacgcatggatgaaatgctgtgacgcatgaggaaatacagattcagaggtgggagagag

SEQ ID NO: 22635 - DNA, 120 bp, synthetic construct
  source 1..120: mol_type = other DNA
aaagcctcgatgtagctatgtgccagtgatttgggggagttttcagccctttccccatttcatgattgatgtctgctcagaggcttctagaaggttggcccttttcatccgctcagcaca

SEQ ID NO: 22636 - DNA, 120 bp, synthetic construct
  source 1..120: mol_type = other DNA
tgagtatggtctagcccaggttgtagtcatctttttaccaatacggtcatgaatgaaatataattcttaattttattgttctagaggaaggggccaccaaggcaaaagtgcctgaggccc

SEQ ID NO: 22637 - DNA, 120 bp, synthetic construct
  source 1..120: mol_type = other DNA
gtctgaggtcacgatgcatggacattgataatgcttctaataaatacttccatatcatcttcagaaaaacccgattccatacatccccaccattggcattagagaaaagccactcaaatt

SEQ ID NO: 22638 - DNA, 120 bp, synthetic construct
  source 1..120: mol_type = other DNA
tattttgtaaataaagttttattggcacacagccatacctattcctgtacgtattgtctgtggctgcctttgcctctgctgtggaccaggtgagcaattagaaagagacattgtggccca

SEQ ID NO: 22639 - DNA, 120 bp, synthetic construct
  source 1..120: mol_type = other DNA
tgtcacagataatgtaattgggcagtcggtggggggagcctcagcgaggaccgagtgtggggtccaaggtctgagacttaattccaggttctctgaatggggcctgccagttcgaatttg

SEQ ID NO: 22640 - DNA, 120 bp, synthetic construct
  source 1..120: mol_type = other DNA
tcatctcagctgcttagagagaggcaccgctagttaggtggtcctccttcaagatcttctcctttgtagaaagtgaaaaacacacatgtatcctgtattttattctttcaaaccgaaagc

SEQ ID NO: 22641 - DNA, 120 bp, synthetic construct
  source 1..120: mol_type = other DNA
ttggtgaggtgatgtggaattgagctgggacggtggttggtgaggtgatgtggaatcaggctgggacactggttggtgaggtgatgtggaatcaggctgggacggtggctggtgaggtga

SEQ ID NO: 22642 - DNA, 120 bp, synthetic construct
  source 1..120: mol_type = other DNA
gcggtgcagagagaagagaaaatctatttgcatttcctgagttacttcttatttactctagaaaacatagttggcagccaaccagagtgtgtttacagagggatctgggctgggaaaatt

SEQ ID NO: 22643 - DNA, 120 bp, synthetic construct
  source 1..120: mol_type = other DNA
ggttcagacactatgccacggtcttgtcgctcttcatatgtttttgaacaaggggccccaaattttcatttcaaactgggcactgcaaattctggaatctctcctacctcccgaagtttg

SEQ ID NO: 22644 - DNA, 120 bp, synthetic construct
  source 1..120: mol_type = other DNA
atgttttctagataaaaacattaaatacagctaaagtgacatcaaggtctccctcccttcctttcctccaatacgtgagagaaatgtaatcccagttccttgggacagttctcgaggccc

SEQ ID NO: 22645 - DNA, 120 bp, synthetic construct
  source 1..120: mol_type = other DNA
ttctcaaggccctccgatatcctgtgcccccaggagaatgtaagcccagttcctcggaacagttctccaggccctcagatgtcctgtgcccccggggcctcatcagacattaagcatgca

SEQ ID NO: 22646 - DNA, 120 bp, synthetic construct
  source 1..120: mol_type = other DNA
cctccgatggcttctctgccacgataggacccccaccctattcacacgcagccctggcccactccctggccatgcttcaccatctcctcacaccacgtggcatttcctcatggggagggt

SEQ ID NO: 22647 - DNA, 120 bp, synthetic construct
  source 1..120: mol_type = other DNA
atgtaactatgcgccttataggaagaacgtcaaactggcctaattcctgagccactcctgaagtggttccctctgtcctaatgtttgtcagagttttcttggtttcttaaatatcagtag

SEQ ID NO: 22648 - DNA, 120 bp, synthetic construct
  source 1..120: mol_type = other DNA
atgacatgcaggtagaaataggacaggctttgcggagtgaaataaaaatccttaaaatcctgttgtgtcctgggctccaggtacagtgctgggcctcagcatatcctgtagttctaggat

SEQ ID NO: 22649 - DNA, 120 bp, synthetic construct
  source 1..120: mol_type = other DNA
tccagctcaattttacaaccatttcccaggcacctggatggcctgggtaccatgtacccgagagagatggcaggagataagtgttacccagacattaatgagtaacacaccctgtggttc

SEQ ID NO: 22650 - DNA, 120 bp, synthetic construct
  source 1..120: mol_type = other DNA
gtttaaatggtgttggtgatggtgatgatgatgatgatagtggcgatggtgttgatggtaatggtggtgatgatggtgttgatggtaatggtgatgatcatggatagtgatgttggtgtt

SEQ ID NO: 22651 - DNA, 120 bp, synthetic construct
  source 1..120: mol_type = other DNA
aagcactttaaagtgtggcctaagcaccatttaggacggacttacactaagagagtaatccttgctgatctgaacttcgagtttaatggggtgtcctgtattttcaccagcaaccacacc

SEQ ID NO: 22652 - DNA, 120 bp, synthetic construct
  source 1..120: mol_type = other DNA
gctgcagtgtgaacagggtgaattgtgcccttagcctgccccagggctgtaatgtcaacagggtgaattgcgcctttggcccacccccaggggtgcagtgtgaacagggtgaattgcgcc

SEQ ID NO: 22653 - DNA, 120 bp, synthetic construct
  source 1..120: mol_type = other DNA
ctaaagacaaacagctaaagctttcccactgccgggtggagggctgggaggtctggggtactttgtagtttatattgtaggaaagaatatgtgatattttccaggctgaaaatatatcta

SEQ ID NO: 22654 - DNA, 120 bp, synthetic construct
  source 1..120: mol_type = other DNA
atagatgatggatgagtgagtggatgatggatggatgatggatggatggatgatggatgagtaagtggatggtggatgatggatgatggatgggtagatggatcgatgatgaatgagtta

SEQ ID NO: 22655 - DNA, 120 bp, synthetic construct
  source 1..120: mol_type = other DNA
aaacttagcagcctaaaacaaccaccatttatttctatttatttagctcacaattccacaaattggcaatttgggctaggctcagctggaaaacccttccatccttggctgggctcattc

SEQ ID NO: 22656 - DNA, 120 bp, synthetic construct
  source 1..120: mol_type = other DNA
ggtgagtggttggatagatggatggatgggtgaatagagggatagtggatgagtgggtgagtggatggatggatggatgggtgaatagagggatggtggatgggtgggtgagtggatgga

SEQ ID NO: 22657 - DNA, 120 bp, synthetic construct
  source 1..120: mol_type = other DNA
aagctgattgattcctccagcagataagttcctctctaagtggaaatgtcttacactgtttatcatgaaagtttccaggcattcctagaagtaggaggaacctgcataattgcgtggaag

SEQ ID NO: 22658 - DNA, 120 bp, synthetic construct
  source 1..120: mol_type = other DNA
gattgcatggaaatgtgtgattgcatggaagcgcagtgtcacggtgattgtgtggaagcgtgtcatggtgattatgtggaagtgtggtgtcgtgatgattgcatggaagcaccgtgtcat

SEQ ID NO: 22659 - DNA, 120 bp, synthetic construct
  source 1..120: mol_type = other DNA
tgtttgatgtttctatcttcaaaatagttcagcagctaaaaaagaggaccggggtgaaggagagacgctcatctcaggtgctcaatttaaaggctgccgagggtaagaaatcaagatatt

SEQ ID NO: 22660 - DNA, 120 bp, synthetic construct
  source 1..120: mol_type = other DNA
agcacgctgagaaactgatgccaggccctgcttctgcaccaagctctgaaggtgcactatgaatgaacaatataacttctccagattctgtgagttttatcaatacaaatttttcttcaa

SEQ ID NO: 22661 - DNA, 120 bp, synthetic construct
  source 1..120: mol_type = other DNA
ccatggccactccagagggactgcggcccgtgcaggcgccatggccactccagagggactgcggcccgtgcaggcgcgatggccactccagagggactgtggcccgtgcaggcgcggtgg

SEQ ID NO: 22662 - DNA, 120 bp, synthetic construct
  source 1..120: mol_type = other DNA
ctggacttaagaaagtaatggaaggaagagacaaaattatctcagaaatgaataaactgcaaacagtctgagggaggggaggcggtgaaaatgcagtaaggaacctacgaaaggcaggaa

SEQ ID NO: 22663 - DNA, 120 bp, synthetic construct
  source 1..120: mol_type = other DNA
tagaggagacaccaaacccatacccacccggaagagacaccaaaacccacacaacctacacccacccaagaggagacaccaaaacccacacccacccaagaggaaacaccaaacccacac

SEQ ID NO: 22664 - DNA, 120 bp, synthetic construct
  source 1..120: mol_type = other DNA
gttacacggaagaaaaaaacaaatacactgaatgatgggaaccaggttcctcactgtctgagaagggaccaatagacaaggatgggggcggctaaacggaagccctggcgtgctaggcaa

SEQ ID NO: 22665 - DNA, 120 bp, synthetic construct
  source 1..120: mol_type = other DNA
catctgtgtgaggtgggaacgtgtgaaatgctaacacggccatgggaatcggccacgacgctgtggagaaacacagcccacagcaagtgctatgctgggggtggtagcatcagtgctaag

SEQ ID NO: 22666 - DNA, 120 bp, synthetic construct
  source 1..120: mol_type = other DNA
aaacaattcccttgggagccacagaccttcttactgcagggccctcattctaaaacctaatgtcaaatttgatagacagaaaaaactgtttctggggtttcctgactattcggaaatggt

SEQ ID NO: 22667 - DNA, 120 bp, synthetic construct
  source 1..120: mol_type = other DNA
cggggggccaacctcagcaagacctcaggaaggacggacacaggcctacacaccaggccacagacaatggggctcggggggccaacctcagcaagacctcaggaaggacggacacaggcc

SEQ ID NO: 22668 - DNA, 120 bp, synthetic construct
  source 1..120: mol_type = other DNA
aaatcaaaagttttcactcaaaactttcatggtccaaccatggaaatattaagcaccccattttcgaacataacttgacagcacttattctacttcattattccacgcaagaattggaaa

SEQ ID NO: 22669 - DNA, 120 bp, synthetic construct
  source 1..120: mol_type = other DNA
gaacttgctgtctgaaggaacgcaagctaatttggctaggagtgtttgtaaggttaaagctgtccagtgactgaatggcttggggatgccgagcctcccttgcatgtggctgattgacag

SEQ ID NO: 22670 - DNA, 120 bp, synthetic construct
  source 1..120: mol_type = other DNA
gaagctgctctcccaactcctacccagcctggagggtgaggacgcatttggataaagacactgtgcctgcccactgccctttacccgtgacctttccaaggctggtgggtctccagagtc

SEQ ID NO: 22671 - DNA, 120 bp, synthetic construct
  source 1..120: mol_type = other DNA
cctagtccctggtgcagacgaggagcctgagaggcttagcagctcatgtgtgtgtcagctgggaacccacagcaagtggattccaaagcctgccatgtccctgttgccactagcacctcc

SEQ ID NO: 22672 - DNA, 120 bp, synthetic construct
  source 1..120: mol_type = other DNA
ccccactaagccatgcgccctgccgtccagggcctgggagcagacacctgagactcctttgccaactcggaaggccttaggggaaagccacatggagccatgttatgggaggcctcattt

SEQ ID NO: 22673 - DNA, 120 bp, synthetic construct
  source 1..120: mol_type = other DNA
gacattttgattgaaaaagagagtacactaaaaatcctgttcctggacaggagtattttggggtataagccattccatctcggaaatttcaggggccttgtagaaagacaaggaaggggc

SEQ ID NO: 22674 - DNA, 120 bp, synthetic construct
  source 1..120: mol_type = other DNA
gtgtgtgttgccaacgttaggccgagtgcgatatcgtgtttgtgtgtgtgtctgttgccgttaggccgagtgcgatgtcatgtttgtgtgtgtgtttgttgccaacgttaggccaagtgc

SEQ ID NO: 22675 - DNA, 120 bp, synthetic construct
  source 1..120: mol_type = other DNA
ttagggtggggagggctcagccagaggtcatgaggtcagcttagggacacaggacctgtggggaggtcccagagttctggcagagtcatagggtcaggtaggagtcagatgggagtgaag

SEQ ID NO: 22676 - DNA, 120 bp, synthetic construct
  source 1..120: mol_type = other DNA
gttggagttggacaggcatgggtctctcgggaaatggaaggcagctgggaccactctgggaggtcgacgttaacactggggtcaccaggctgtgtgggacttggattcctactccatcag

SEQ ID NO: 22677 - DNA, 120 bp, synthetic construct
  source 1..120: mol_type = other DNA
cggcaggcgcccgtcagggggtcgcagtcgctgaagagcaagttggggtcaccgttgccgctgcagtcgcatggctggcaggagctgcccagcaccagtgggttcccaaagaatccgggc

SEQ ID NO: 22678 - DNA, 120 bp, synthetic construct
  source 1..120: mol_type = other DNA
gccggtcacacagctcagacccaggaaactgcaaacccaggcgtccgaccgagccctgctctttccaagatgcccttgctcctcctccagctgcacaaaccccaaccgcagaccagcgtg

SEQ ID NO: 22679 - DNA, 120 bp, synthetic construct
  source 1..120: mol_type = other DNA
gatacacttgcaggtacagttccccaaggaacccctataccccaacactccctccagagcacactataggctccagccccccaaggaaatcccataccccaatactccctctagagcaca

SEQ ID NO: 22680 - DNA, 120 bp, synthetic construct
  source 1..120: mol_type = other DNA
ctttgttctctcccttataccgggagccatgaatgtgtgcctgagcaccaaggcattccaaaagcacagcttaggagataaggtcccatgccagttgatacaacgttgcagtattggaaa

SEQ ID NO: 22681 - DNA, 120 bp, synthetic construct
  source 1..120: mol_type = other DNA
tccaggctccaggccagcgccgtcctcagggtcccatgggccttcccccagcaggaccccggcttacacacaagacctggtgcactcaggccccctctctggtggagccggcctggagtc

SEQ ID NO: 22682 - DNA, 120 bp, synthetic construct
  source 1..120: mol_type = other DNA
atgttccactgagtttggggagaaatcttgaaaatgcaatttccttaaggctctgagatgtcctgcagtggggaaaccttcctggttcagtttatcctggagtttcccaaactcattctc

SEQ ID NO: 22683 - DNA, 120 bp, synthetic construct
  source 1..120: mol_type = other DNA
agcacaggcaggaccatagccgggtctataagccagaacgcagggagcctgcccgcccgccagtgtctgaccagacatgaccccagctcaccgtgaacgtattgttgatattctgatcat

SEQ ID NO: 22684 - DNA, 120 bp, synthetic construct
  source 1..120: mol_type = other DNA
ctcccctcaccagaggcagaagtaggcacggcctgtggggtaaacacagtgagaaatgacctctccctccctttgaggctttatctgctctccccaagctcctgtctttgattggcattg

SEQ ID NO: 22685 - DNA, 120 bp, synthetic construct
  source 1..120: mol_type = other DNA
aacaccagtccttatacaattccgaaaatgtgaagaggaaggaacactttctaactcatcttacaaggtcagcattaccctgataccaaagccagagaaggacgctatgagaaaagaacc

SEQ ID NO: 22686 - DNA, 120 bp, synthetic construct
  source 1..120: mol_type = other DNA
cttcatccctccctccatccatccatccttctctccctccttccctccattcactcctctacctctccctccatccatccctctctccctccttccctccattcattcctctacctctcc

SEQ ID NO: 22687 - DNA, 120 bp, synthetic construct
  source 1..120: mol_type = other DNA
ctccttccatccctccttccctcccttgttccattcctccctccctccatctatccatctctctgtccatctgtccacttgctcacgtgctcacttattcatttgctcagcagttggctg

SEQ ID NO: 22688 - DNA, 120 bp, synthetic construct
  source 1..120: mol_type = other DNA
agtggtggtgcccagaccttggcccttgccgggtcccctgccccatcggggcaccccaaggctggacacagtgagaacggggttgaggaggacacagaaggtcgaacggggcccaaagaa

SEQ ID NO: 22689 - DNA, 120 bp, synthetic construct
  source 1..120: mol_type = other DNA
agaagcctcctggcctggctgtgtcttccccacccagctctcccctgcgcccctgtctttgtaaattgacccttctggagtggggggcggcgggcagggctgcttttcttagtctgatac

SEQ ID NO: 22690 - DNA, 120 bp, synthetic construct
  source 1..120: mol_type = other DNA
ttgctttgtgcatatttctgcctttctggagtggctggcaggtgatgaggctgggacttggggacatgggttggaggagtggccacatcatctcattttctttcatctgtgctaacgatg

SEQ ID NO: 22691 - DNA, 120 bp, synthetic construct
  source 1..120: mol_type = other DNA
aagaatgaatcctcacttctccgaaacccggtttcattgagtgtcttgcggtttttctgcacccaggtggggagcagagacagggtcaagtgtgggctgggctgggcagggagagtgcta

SEQ ID NO: 22692 - DNA, 120 bp, synthetic construct
  source 1..120: mol_type = other DNA
actgaagacccagtagttctttaggaaccagcaattcacttcagtgagcagcacgtgcgcgtgatttgtgcgaacatgctttccccacagcactttactctaaggagtcgcttcctgcac

SEQ ID NO: 22693 - DNA, 120 bp, synthetic construct
  source 1..120: mol_type = other DNA
cacttctactgcggagtagctgtgtgattggtcctttgtgcctcagttttcctatctataaaatgggtgtaatggagttgtgaagattatgaggcttgatacctgtgaaatgcttaggat

SEQ ID NO: 22694 - DNA, 120 bp, synthetic construct
  source 1..120: mol_type = other DNA
ctgcaggtgcgcaggtgtgggttcctccctcccttcctccctccaggtgtgcaggtgctggctcctccctcccttcctccctccaggtgtgcacgtgtgggttcctccctcccttcctcc

SEQ ID NO: 22695 - DNA, 120 bp, synthetic construct
  source 1..120: mol_type = other DNA
gcaggcttctgagccccaagttgccttcacaccaagccaggatccgcgcactcctggtgggtcagagtggagagagagtaagtctccggggagggagtgacctttggtttcccacatttc

SEQ ID NO: 22696 - DNA, 120 bp, synthetic construct
  source 1..120: mol_type = other DNA
catgtgttcatgtgtgcaagagtgtgcacgtttgcgtgtgtgcatgtgtgtgtgtaggatgcagaattcagctgagctgatctccaatgaggccacaggtcactcatgacaataagaagg

SEQ ID NO: 22697 - DNA, 120 bp, synthetic construct
  source 1..120: mol_type = other DNA
ggaccctgtgcccctcctgccctgggcccctggctggaggagacttgatccctgagtgctcagtgccccgtgaggtggggcaagcgctccaactgtctccctggccccctgtgtgaacct

SEQ ID NO: 22698 - DNA, 120 bp, synthetic construct
  source 1..120: mol_type = other DNA
ggaaacaacagaacaaagaaaattagcacaagggctggttctgtccctgccctgggctgagagaggtcactttgcagaaacaagggcatggccgacattcccaggaaagacaagcagggc

SEQ ID NO: 22699 - DNA, 120 bp, synthetic construct
  source 1..120: mol_type = other DNA
ccacagggaaggccccacccgcagggaaggccccaccctcagggaaggccccatccacagggaaggctccaccctcagggaaggatccacccacagggaagactccacccacagggaagg

SEQ ID NO: 22700 - DNA, 120 bp, synthetic construct
  source 1..120: mol_type = other DNA
ttctcaacacacacacttcacatcctcgctccttccacagattcctgcagagggtgagcgctgtggcccatccacagacagggcaatgccaaagccccagcggcctccactcctcaacaa

SEQ ID NO: 22701 - DNA, 120 bp, synthetic construct
  source 1..120: mol_type = other DNA
caccgcggccacagagtggggctctattctcaccataaggcttagtaactctctgacatttaaaaatatacacaagcattactctgaaaaaacacccaatcgtaaagataagaaggctgt

SEQ ID NO: 22702 - DNA, 120 bp, synthetic construct
  source 1..120: mol_type = other DNA
gtatcagcagggaaagggaaaaccacaatgaccacaactcaccaggccccaccagagtgcatccgcgtaggtgtcaaagtggtcgttctcccccttctctgccaagtacaccaggaacga

SEQ ID NO: 22703 - DNA, 120 bp, synthetic construct
  source 1..120: mol_type = other DNA
caatcacacagaacggtttccgggcaaacttgagccgccccctccagccacggtaccggcagcagcagcctgcggcccagatccgcacgaagtactccacgccaaacaccacgatagtca

SEQ ID NO: 22704 - DNA, 120 bp, synthetic construct
  source 1..120: mol_type = other DNA
agaacagaggagcagggcgggcagtagagggaggtgcatttggatggggaccagtctccttgagggccccccaccccgttaccaacagcaacacaggaactgcactcccgttgccatggc

SEQ ID NO: 22705 - DNA, 120 bp, synthetic construct
  source 1..120: mol_type = other DNA
cagatcacaagagaggccatggcggggatcaggcaccccgaatgcagtcacagactgagcatggagcagcgggggatctcctcctgggacctgggacccaagtgcaaagaggagaagttg

SEQ ID NO: 22706 - DNA, 120 bp, synthetic construct
  source 1..120: mol_type = other DNA
ctctgcgactctggatcctccagtcaggccccttccccagaggctgactccaagttggccagggctgttcatctcatcttgcgtatttagttaaatgaaaacggaacacgtgaaggatgg

SEQ ID NO: 22707 - DNA, 120 bp, synthetic construct
  source 1..120: mol_type = other DNA
actttcttcacgtgatcttaactcagctcttggctaattaaatggcacccgtgggaagggatggtctcagataagctggctcagtgctaattgtaaaggagagaagccggtcgtgtacct

SEQ ID NO: 22708 - DNA, 120 bp, synthetic construct
  source 1..120: mol_type = other DNA
tctaccccagggagcagggaggaggcggcacctaccccaggcagcagggaggaaaatgcacctaccccagggagcagggaggaggtggcacctaccccaaggaacagggcatctgccccc

SEQ ID NO: 22709 - DNA, 120 bp, synthetic construct
  source 1..120: mol_type = other DNA
gcagcatcaagaccccacttcgcttctctcaggtctccccaaggctgacccgggtcattggtgggccagcttctttttcgggaagtccaccctcccgttcatggccacggtgttggagtc

SEQ ID NO: 22710 - DNA, 120 bp, synthetic construct
  source 1..120: mol_type = other DNA
gggcgggaagggaaattcaaagtctgcaaggggtggtaaggaaagtccctaaactgcgtatttcaacttttatttttattgcaaagagaaataatggcaccttccactcattgttttgag

SEQ ID NO: 22711 - DNA, 120 bp, synthetic construct
  source 1..120: mol_type = other DNA
ccttcctggttctgagacttcccagggacagcagaacttccttgcactggtcccaaggaagcccctcttggccaccctgagaggtgttcctgtccccagatgcccaggaggagcaagagt

SEQ ID NO: 22712 - DNA, 120 bp, synthetic construct
  source 1..120: mol_type = other DNA
ttcacttggttggggtccacaacgaagcccagaaacttcttgagccagctcttggtgggccgctggtccaggtcgctcttggcacaggtgcggacggtgctcaccagcacatagcgccac

SEQ ID NO: 22713 - DNA, 120 bp, synthetic construct
  source 1..120: mol_type = other DNA
tgtagggagcaggggctttattcgtcccacccactcctgtgctcccgggacaaggcctggctcaagcagttcccaaacatgaacctcccttatccgggtcctcagaggccacatggcttt

SEQ ID NO: 22714 - DNA, 120 bp, synthetic construct
  source 1..120: mol_type = other DNA
ctcctgggagcctctggctctgcctacggtgggctcctgccccactccaagctcctgggaacctctggctctgcctacggtgggctcctgccctgctccaagctcctgggagcctctggc

SEQ ID NO: 22715 - DNA, 120 bp, synthetic construct
  source 1..120: mol_type = other DNA
gaaagaacttggtggcaaaatgcttaaaacataaggacaacaaaccacttatttcctgatatgacataaagaggtcccaccattgcactccagaccaatgtcacaacacaacagggaaac

SEQ ID NO: 22716 - DNA, 120 bp, synthetic construct
  source 1..120: mol_type = other DNA
cttaaaaaattttttcagccctcctctgatttgaaaggacctttgaccagagtatgtaaaattctcccataactaagcaaacaacccacttaaccactgggaagggatctggacagacgt

SEQ ID NO: 22717 - DNA, 120 bp, synthetic construct
  source 1..120: mol_type = other DNA
ggcatgaggatgtggaacagctggatctcatccatcgctgtgaagttgtgtagccactccacaaacgtgtggcaaacagccgagccgggagaagggaagacgtgttcaaagattcatatg

SEQ ID NO: 22718 - DNA, 120 bp, synthetic construct
  source 1..120: mol_type = other DNA
gtgacagagtgacaccctgtctcaaaaatgaatagataaataaagataaaacacctgctcctcttggtgtctccagtttggatttggcctgtgtagcctcttccttcgcctgttggtgga

SEQ ID NO: 22719 - DNA, 120 bp, synthetic construct
  source 1..120: mol_type = other DNA
gtctctgttctctagagaaaaaggggcagatggggacagacgccccttcctctacaggcttctaccagtttgtgcggccccaccataagcagcagtttgaggaggtctgtatccagctga

SEQ ID NO: 22720 - DNA, 120 bp, synthetic construct
  source 1..120: mol_type = other DNA
cctgttgggacgaccccagatcccttctgggcttggtactcactgggatatcctcatgcctgcacccagcctacggctctgagctcctgagtggggctttggcctgcccgccactgttcc

SEQ ID NO: 22721 - DNA, 120 bp, synthetic construct
  source 1..120: mol_type = other DNA
cctcccttctcctatgacacagctccatcctcccttctcctatgacacagctccatcctcccttctcctatgacacagctccatcctcccttctcctatgacacagctccatcctccctt

SEQ ID NO: 22722 - DNA, 120 bp, synthetic construct
  source 1..120: mol_type = other DNA
cagcacagtcggtgcacacaccgtggcgcctggagccatgcctgatgcccacgctggcggcggacatgaagacgcggctgcacaccttgcacacatacttcttgtccttgctgtggacct

SEQ ID NO: 22723 - DNA, 120 bp, synthetic construct
  source 1..120: mol_type = other DNA
aaggaacaggcagccacactgaacctcaaacaggatcaaaacgtttactgagaggttaatacggatttgctgaagaaagacgttgcaatccatgttgttaaaacgtgttagcacctatca

SEQ ID NO: 22724 - DNA, 120 bp, synthetic construct
  source 1..120: mol_type = other DNA
agaagccttgatgtctgcatctgtcagtcctccagctttctccttcctttccaagatcaccttagccatgtgtaggaaccctggcttttatttccaggtttctgatgccctgacatctgg

SEQ ID NO: 22725 - DNA, 120 bp, synthetic construct
  source 1..120: mol_type = other DNA
ccttagatccctatcctagatcctttgcatctccaaatatatttagcagtcagtttactcacacacgcacgcgcacgggcactcacacacccctctgctgggatcttaaccagaattgtg

SEQ ID NO: 22726 - DNA, 120 bp, synthetic construct
  source 1..120: mol_type = other DNA
aaccatttctgctgacaagtacacttttgcatttgagaggggacggggccaacatcttggagcataaatcacaaacactctgcctgcaccgtgtttgatattttagaaacgctattttgt

SEQ ID NO: 22727 - DNA, 120 bp, synthetic construct
  source 1..120: mol_type = other DNA
tgggtgcaggtgcagtgggtgcaggtgcggtgggcacagatgcagtgggcacaggtgcagtgagcaaggcaaagggggtgcccagaggagggcccgagtcctgcttcggattgggaggca

SEQ ID NO: 22728 - DNA, 120 bp, synthetic construct
  source 1..120: mol_type = other DNA
cttcttcagccagtctgtcctccacccctaaaggagctgaataatctctacttctttcgaaaatacctaagctggctttgaacttgccaaataaaaggatactgccattcaccagattca

SEQ ID NO: 22729 - DNA, 120 bp, synthetic construct
  source 1..120: mol_type = other DNA
atctcattctgaaggccgggcacaggcggttgttttctctccaacttcggtttccccatccccactcttagggcacaaatgcaggtgtagcttccccatgcccactctttaggcacaaat

SEQ ID NO: 22730 - DNA, 120 bp, synthetic construct
  source 1..120: mol_type = other DNA
ggcctgctttctcctcttgtctccttatcactctgctgtcccagaagtgtccttggtcttccgtttgcttctctgagagatgtgcatgaagaactgcacagacttttcataacttcagta

SEQ ID NO: 22731 - DNA, 120 bp, synthetic construct
  source 1..120: mol_type = other DNA
ctgggatgacaggtttggccaccgtgcccggccggcagtcagtttttacatggttcatcacagattttaaattaagattccccagcaggataaaagaaatgccagttgtattttattttt

SEQ ID NO: 22732 - DNA, 120 bp, synthetic construct
  source 1..120: mol_type = other DNA
tacaaagttggccacagtttttccccaacagtagtttgagttcagcagcagctcttttataaaacgtttgctgcacacactgagattgcacctggaagtacagaaataagaacacacgta

SEQ ID NO: 22733 - DNA, 120 bp, synthetic construct
  source 1..120: mol_type = other DNA
tctgagtgagggctctccagccagcagggagcagggcagggtgttgaagagacggcaggtgcgtcaggggctgacgtgggacccggcactctgtgctctgtgtctgcccgggaacaggta

SEQ ID NO: 22734 - DNA, 120 bp, synthetic construct
  source 1..120: mol_type = other DNA
caggaaagggggtgatgcaggggcaggaagaggaaagcgacaggccacagaattgggtgtggcaggggaaggaaagaggcagggcacggaattgggtgtggcagggcagaaaagaggcgt

SEQ ID NO: 22735 - DNA, 120 bp, synthetic construct
  source 1..120: mol_type = other DNA
cacatatcccaacgtagcttcctctgcttgccaggtgaagagcatgttcagggagggaacaaggcaggaaacgggggtttacagagagaaggaagagaacaaagagaaggctgcttagtt

SEQ ID NO: 22736 - DNA, 120 bp, synthetic construct
  source 1..120: mol_type = other DNA
ttacgcccgaaaacgacacagaacacaggtgcggacagggaacggcatcctcagagcatggtcaggggagaaaagcaagctggaaggagagatgattccatctgtataaaatccaggaaa

SEQ ID NO: 22737 - DNA, 120 bp, synthetic construct
  source 1..120: mol_type = other DNA
tgccagatttttcttcttttccttcttgggcaccaatgagtcctggctcctgtgtttgggaggtgggtctgctgatgttcggaaccagttctggggagagaaaagcgctgatgaagacct

SEQ ID NO: 22738 - DNA, 120 bp, synthetic construct
  source 1..120: mol_type = other DNA
gggtgcaagcctcccagttctcccagggaagccagaccccactttgaggagaaactaccagatttctccacattggccactctcccaggcacaccccatgcaggccactgacctctctac

SEQ ID NO: 22739 - DNA, 120 bp, synthetic construct
  source 1..120: mol_type = other DNA
tttgggtgttttctgtttccttcctgactcggggagagaaaacgggggccaagattctggtgaaataaccgtcaggaggccgagcctgccccggccgccacccctggagctctcatctta

SEQ ID NO: 22740 - DNA, 120 bp, synthetic construct
  source 1..120: mol_type = other DNA
ttccctgacctgggacgagcccccataccttttctcaccactgttccctgacctgggacgagcccccataccttttctcaccactgttccccgacctgggacgagcccccataccttttc

SEQ ID NO: 22741 - DNA, 120 bp, synthetic construct
  source 1..120: mol_type = other DNA
ggcacgggtttcgtaactgtcacaagctttgttaccgtaatgggtttggtgacaggtacgggtttggtgaccggcacagacttggtgactgtgatgggtttggtgaccggcatggccttg

SEQ ID NO: 22742 - DNA, 120 bp, synthetic construct
  source 1..120: mol_type = other DNA
atggattcaggcctggagttcgtcttggggtgaacacttcagaagccctttcagtgtgtgcacacctgactgcatttctttgctagtagaaatgatacacctacgagaggaggacaggaa

SEQ ID NO: 22743 - DNA, 120 bp, synthetic construct
  source 1..120: mol_type = other DNA
tctcatggcttctttctttgctagtagaaatgatacacctacgagaggaggacaggaagtctcatggcttcttttactcttcccctctcccccacaccctttttttttttttttttttga

SEQ ID NO: 22744 - DNA, 120 bp, synthetic construct
  source 1..120: mol_type = other DNA
aaagtaatttattttgatgaaactcagaattgttaaaaattctttcacttttttaatagcacaaatgtgcggcctggtgactggcttccctgggggatggctgctctgtgaggggctgcc

SEQ ID NO: 22745 - DNA, 120 bp, synthetic construct
  source 1..120: mol_type = other DNA
ttgtttcgcctgcccagaacatgtgtgtttgaggttgtcttgctctctcatataacatgtgcctcttgctatctcttgtgtaacatatatgttctatataggaccctgattctaccttcc

SEQ ID NO: 22746 - DNA, 120 bp, synthetic construct
  source 1..120: mol_type = other DNA
agatctacgcacggggatagcatctatgtggggtgggggcacggtctgtgccaggttttgggggcactagatctttgcaggtgtggccaggatctgtgcaaggggtaggatctgtgcaga

SEQ ID NO: 22747 - DNA, 120 bp, synthetic construct
  source 1..120: mol_type = other DNA
ctggttttcctgcaaagctcgtgcaggaagtacaaccccatgaccgggagggagctggtgattcagctcaggggtcacccacacagccttgacctgtgacctttcatctcagtggatcag

SEQ ID NO: 22748 - DNA, 120 bp, synthetic construct
  source 1..120: mol_type = other DNA
gtggccgggtatggtgggggtgactgagctccaggagcacacagcaggtgctgggccagtgccgtgtcctggacccaagcatcttacccgcttgtttacgacgaagctttgatctgtcga

SEQ ID NO: 22749 - DNA, 120 bp, synthetic construct
  source 1..120: mol_type = other DNA
agtgtgggggcagtgtgtgcgcagtgtgggggcagtgtgtgggggcagtgtgggggcagtgtgtggggcagtgtgggggcagtgtgggggcagtgtgtgggtcagtgtgtgcgcagtgtg

SEQ ID NO: 22750 - DNA, 120 bp, synthetic construct
  source 1..120: mol_type = other DNA
tgtgcgggcagtgtgtggggggggacagtggggagcagccagggacataacgggggacagcgtggggggatagtgttagggacagtgggggcagccagaggaatagcagggggatagtgt

SEQ ID NO: 22751 - DNA, 120 bp, synthetic construct
  source 1..120: mol_type = other DNA
tggtgctttagcaggaaaatgactgacagctggaatgaggtttcttattggtccaggatgtttgcctggacccggaaaaaggtgattctgaagaaagtgcccagggatctaaagcaagtg

SEQ ID NO: 22752 - DNA, 120 bp, synthetic construct
  source 1..120: mol_type = other DNA
ttgtcattgttgttgtctcttcgtaattgcggcctctttgtgcttattcataatccctctctaacaggcagaatggagccccatatttcctcacggcagctacactgacacagaatagtg

SEQ ID NO: 22753 - DNA, 120 bp, synthetic construct
  source 1..120: mol_type = other DNA
ctggtagcctacatgccctgactcctctaaagtagacctgtgtttaaggcttggaatccttctgtgtgtgtcagagtcacttgaggagctggttaagacgtttgaccccaggccctaccc

SEQ ID NO: 22754 - DNA, 120 bp, synthetic construct
  source 1..120: mol_type = other DNA
tatgtaacgtggcccaggtcaagatcacagttcaggttccctcccctcccgaccactgtcattagggatcctgagtcccagagccttccaaggggcttgtccatctgtctgtctctcgtg

SEQ ID NO: 22755 - DNA, 120 bp, synthetic construct
  source 1..120: mol_type = other DNA
gaccaacgtgtagacacggctggccttgaaccagacctgctcgggccacgggaagctcagcccacagcttgggacctgcagctcgttgctgtagacgccagcgaaagagaagaagggcag

SEQ ID NO: 22756 - DNA, 120 bp, synthetic construct
  source 1..120: mol_type = other DNA
taccctcttaattcttatcttgcatctggaatacctgttggaccaggcctgtttccatcacagccccttcttattgcctttgtgttctctgtgttctaccccttcccataccccaggatt

SEQ ID NO: 22757 - DNA, 120 bp, synthetic construct
  source 1..120: mol_type = other DNA
gacaggccgcctggagagcccgtcctgtgatttggtttggaaagtcattattactgcagagcagtttagctgttgtttttacagcgttggtaaggttaaaagaaataatgataataatat

SEQ ID NO: 22758 - DNA, 120 bp, synthetic construct
  source 1..120: mol_type = other DNA
cagaggcctccactgaccactggttacttaaatcacagtcccccatcctcattattttcaaaaatacattttgaaacaatctcaaagccacagaaacgtttcaagtaaagggccaagctg

SEQ ID NO: 22759 - DNA, 120 bp, synthetic construct
  source 1..120: mol_type = other DNA
ttcagtgggatacccttcaacgtgggagcactgagccgttatttggtgagatacccttcaaggtgggagcactgagctgttattcagtgggatacccttcaacgtgggagcactgagccg

SEQ ID NO: 22760 - DNA, 120 bp, synthetic construct
  source 1..120: mol_type = other DNA
ttaactcactagaaactcaataacccaagagaacaggctcgtctggatgaaaacctccacttcacttcagattcctgacaagaaaggccatggtgatgacaacagcactgacgtcctcat

SEQ ID NO: 22761 - DNA, 120 bp, synthetic construct
  source 1..120: mol_type = other DNA
cgtttccgtggagagttttcctgtggcacgtggccccggcatgttgtttgggtgcatggggacttaatgtgctgctagagatgctgattgagcagagcctacagacaggagagctttgtc

SEQ ID NO: 22762 - DNA, 120 bp, synthetic construct
  source 1..120: mol_type = other DNA
tgggtgaccctgggctggccgtggtgggtgaccctgggctggccgtggtgggtgaccctgggctggctgtggtatgtgaccctgggctggccgtggtgggtgaccctgagctggctgagt

SEQ ID NO: 22763 - DNA, 120 bp, synthetic construct
  source 1..120: mol_type = other DNA
tatgtgaccccgggatggtcatggtgtgtgacccggggctggccgtggtatgtgaccccgggatggtcatggtgtgtgacccggggctggccatggtgggtgaccccgagctggctgtgg

SEQ ID NO: 22764 - DNA, 120 bp, synthetic construct
  source 1..120: mol_type = other DNA
tggtgaatgatatgtggcctctgcttccagtttgtcaggctgtcccagagcaacctttgctggaaagaagggaaaactgtcaggggatgaggtcctcagtccaaagttcaagactagcga

SEQ ID NO: 22765 - DNA, 120 bp, synthetic construct
  source 1..120: mol_type = other DNA
agctgttgaaattttccaggcgagagataaagataaaaactaagacactggctgctacagtggagaagattcagtgatacataaaatggtacagtccttctgaggaagggcacgtgaggt

SEQ ID NO: 22766 - DNA, 120 bp, synthetic construct
  source 1..120: mol_type = other DNA
tgtaaaaccaaggactagcagtcatactgagacggtgaaatggtggaaattggaaccttagggagcagcactgggctggatggaagaggaagagcctgcaagagaaaagagctgcggagg

SEQ ID NO: 22767 - DNA, 120 bp, synthetic construct
  source 1..120: mol_type = other DNA
ctttgtggaagaaaggttaaaattggaccctttgaaggttaaaaaggtgtatctggaagtagaatagaagccttcacttgagtgaacatgactgaacgcctctcccatcttgggacagtc

SEQ ID NO: 22768 - DNA, 120 bp, synthetic construct
  source 1..120: mol_type = other DNA
aatgttacctcatgtggcaaaggaaggactttgctgacgggattaaattgaggtggaaggcctccctggatcatccaggtgggttctacgtgtcatcccaaaggtcctcataagagaggg

SEQ ID NO: 22769 - DNA, 120 bp, synthetic construct
  source 1..120: mol_type = other DNA
gctgcacaaatacgattcctgcttggttcccagttggccctggacgctgccaaggggccctctctccacacccctagaacaaaagcctatcctgccggcccaagaaacagtcacggttga

SEQ ID NO: 22770 - DNA, 120 bp, synthetic construct
  source 1..120: mol_type = other DNA
tcaatcagggagggcctccgggaggaggtggcgctgcccgcagcccgcccggctcacctgcgccctcctcacctgcgccctcctcacctgcggggccatgcggtcccttaccagcagccg

SEQ ID NO: 22771 - DNA, 120 bp, synthetic construct
  source 1..120: mol_type = other DNA
tagaaggctaggggagcaaggctaggtgggggcgggctggggctggcccagagggtagagcccgcccactttccctccctccttccattcatgcatgcgttcattcagtcattcattcct

SEQ ID NO: 22772 - DNA, 120 bp, synthetic construct
  source 1..120: mol_type = other DNA
cctggcactgctgatttcctagaagaagggagaaggagggaggtgaccggccgagcgctctccaaggccagctggtgcccacggtctgcggacacgccctcccccacacacgtgggattc

SEQ ID NO: 22773 - DNA, 120 bp, synthetic construct
  source 1..120: mol_type = other DNA
gactcagatgacagccatcgtgggtggggcaggggtttctgtggctccagggctcagggacagcccactgggaggttcccacaagaccaacctttgacttacaaagcccccaagctttcc

SEQ ID NO: 22774 - DNA, 120 bp, synthetic construct
  source 1..120: mol_type = other DNA
agcctcaccaggctccttcttgcttctcaagtggtcctttggagacagttggaccctaaacctaggttgctgcacaggatagaagcgtttccttaaagggaaacacttctgcaaactccg

SEQ ID NO: 22775 - DNA, 120 bp, synthetic construct
  source 1..120: mol_type = other DNA
tttttcaagtttgactgcattcctacatgtgccttgttaataaattctgagccaccgttggtgtttgaggcttgaaacccaaagtctgccccatagagtagcttcatggcctgggcatca

SEQ ID NO: 22776 - DNA, 120 bp, synthetic construct
  source 1..120: mol_type = other DNA
tctctgggaacaggaatgggtgccgtgcccagtgcatattgctccattttcttcacctggagtcggttttcttaaacctactttacagatgagggctgaactctgaggctgggtaacact

SEQ ID NO: 22777 - DNA, 120 bp, synthetic construct
  source 1..120: mol_type = other DNA
ctctgggctggcacctggcatcgggacagtgtctaaaagcttcagaggttcaaggttgagcaccgtccaggtggtttctccaagtgtgtttggagacgcgccgggcattcagaacaagct

SEQ ID NO: 22778 - DNA, 120 bp, synthetic construct
  source 1..120: mol_type = other DNA
ggggagtgactgctcatggacacaaggttcccttttgggggttacaggtcctggaattaggtggtggttatgatggcactggcaccctgaattgttcactttaaaatggttcattttggg

SEQ ID NO: 22779 - DNA, 120 bp, synthetic construct
  source 1..120: mol_type = other DNA
ctatgcaggtagagacggccccatattgtggatgttagtgtttgtcctgttggtgtgaatgtttgcctgctttaacttccctcactgatactgatttagcttgaaactttattgtggtag

SEQ ID NO: 22780 - DNA, 120 bp, synthetic construct
  source 1..120: mol_type = other DNA
ctttcccatttgtggccaatctcagtcatcccagaaacatcttccacggccatgatgccactgctggctgggccgcagaagggccccagatccaggtcacagcattttaagtgcttccca

SEQ ID NO: 22781 - DNA, 120 bp, synthetic construct
  source 1..120: mol_type = other DNA
ccagcttctctctgtggcagccactcctgcagctctcgtttgcccctcagttccaggagcaacatagatgtggattcctgtccaatttgggaaaaatgtccacacacggtcacccacctg

SEQ ID NO: 22782 - DNA, 120 bp, synthetic construct
  source 1..120: mol_type = other DNA
aagggtgtttggtttaaaaagaagactgggcgtccgctcttccaggacggcctctgtgctgctggggtcacgcgaggctgtttgcaggggacacggtcacaggagctcttctgccctgaa

SEQ ID NO: 22783 - DNA, 120 bp, synthetic construct
  source 1..120: mol_type = other DNA
tgaggcctgcacttctcagacccagacttagaacaaaaggaggagtgaggactcaaggctacaatgaggttccagtacttgttacaagaaattggttttctgcaaaaaaagtccctacct

SEQ ID NO: 22784 - DNA, 120 bp, synthetic construct
  source 1..120: mol_type = other DNA
ctgttcctcggcttcagcgggtggaagcctcagatgctgttcaacatcttctggacacgggaggccccgacagagagaagcgtccacccgcaagtccacagtctgaggtctcccctcaga

SEQ ID NO: 22785 - DNA, 120 bp, synthetic construct
  source 1..120: mol_type = other DNA
tgccaatgggggctggactgtcctaccctcctcccttctacctccccactgtcttccctctccactgtcaccactgcctccctcttccactgtcctccatgcactgccctccctccacct

SEQ ID NO: 22786 - DNA, 120 bp, synthetic construct
  source 1..120: mol_type = other DNA
ggggcgttcacattcccaaaatgaatcccaacacacacattccacccctacagcaattcactcagaatgatcacagacctaaatgtgaaatgcaaaactatcaaactcctagaagataac

SEQ ID NO: 22787 - DNA, 120 bp, synthetic construct
  source 1..120: mol_type = other DNA
tcccaggagggagggatggaaggtgtcaggaccagatgtggggagtaggcatgaacccggtctaggcacaggagaggaagggggtggcttggacatatttggaggcaaaacccatagctg

SEQ ID NO: 22788 - DNA, 120 bp, synthetic construct
  source 1..120: mol_type = other DNA
gcatgtggagaccagagagggcttcaggagaggatagcccagactctgatggcaccaacaggaagcagcttggtgaggggccgcctgcccgtggtcagccccaaagacagttctgccacg

SEQ ID NO: 22789 - DNA, 120 bp, synthetic construct
  source 1..120: mol_type = other DNA
cacatgcctggggtgctcacaaccaccacgggaggcagtggcagcacctccgcttttcagatgaagaactggccgtgaaggagccggtcctcatggggcagggcaacaggcaacagggca

SEQ ID NO: 22790 - DNA, 120 bp, synthetic construct
  source 1..120: mol_type = other DNA
tgtgatctggcaatgccaccaaatctacaagtggacacaccttcccacgaacccacccctgggctctacgccaccctcacgcaccccagtcctctgccccagcattttccacatggcttt

SEQ ID NO: 22791 - DNA, 120 bp, synthetic construct
  source 1..120: mol_type = other DNA
atggaaagcggaagaccttggagctcaaatacgcacaggtttttagccgctccaaagcctcctggaaagatggcagcatcatggttggctgcactgaggttggccaggtctgtgattttg

SEQ ID NO: 22792 - DNA, 120 bp, synthetic construct
  source 1..120: mol_type = other DNA
actaagccctcactgccccttacgtggaggaggaaaccgaggcatgaagtgcagtgacttgccagagggagaggtcagcacctggccctggcacttgggttccgctacccataagaaatc

SEQ ID NO: 22793 - DNA, 120 bp, synthetic construct
  source 1..120: mol_type = other DNA
tttttttcctcttttccctgccccaacaatctggttctgccccatccagccctggggcagcaaaggccttcaaggacccaaggacccaactgtaacatcccatccctttggggtcatcct

SEQ ID NO: 22794 - DNA, 120 bp, synthetic construct
  source 1..120: mol_type = other DNA
acttcaaaggaggaagctaaaaactccagcactttctccacatacagttcaggaagggaggaggtgaccacttcaactgcaaaaggagaaaaaatcatgcttattctgccaccaactcaa

SEQ ID NO: 22795 - DNA, 120 bp, synthetic construct
  source 1..120: mol_type = other DNA
ctctgacactcagtctaggctggagcacgcttgccaatagccctgctcctggctcctctgtgtggggaccatgtgcaccgccaggctccacaggcctgtggcacagaccctcctccccac

SEQ ID NO: 22796 - DNA, 120 bp, synthetic construct
  source 1..120: mol_type = other DNA
gcatatggaagcactcagggtttctggctggcgagtgtcccatcaggatggtctacctgggacccagatcttctagagcacctggctctctgtgcggcgcacatggcctcacgccagaat

SEQ ID NO: 22797 - DNA, 120 bp, synthetic construct
  source 1..120: mol_type = other DNA
acactttcccccagaaacatttaggggacagtgggcttctgccccgatggggcgtggacaggtgaacccagcagccacacccctgcttagaggctaccagggcttcctcactctcattct

SEQ ID NO: 22798 - DNA, 120 bp, synthetic construct
  source 1..120: mol_type = other DNA
ctttcaacaccgccgctgaggcattgacagccacagaccatatgaacacaggaggccacggctgcctctagtacagccccgtcagaaagacaggcagtggcctgaggccagtctgcagat

SEQ ID NO: 22799 - DNA, 120 bp, synthetic construct
  source 1..120: mol_type = other DNA
tgcttacatcaaggagcctgcctgtctgcatggaccacacgaaaatctcaaaggagtcctgcgcccctgcagagacgatctcaccgctcgcatccaccgccacacaggagaactgggtgg

SEQ ID NO: 22800 - DNA, 120 bp, synthetic construct
  source 1..120: mol_type = other DNA
accaccgtgcaggagaccaagtcagaaaggggaaagagggacacccaaccctctccattcacatttttgtatgtttttaaacgcctactgagctcatgagcccgggtgaagctgtgaaca

SEQ ID NO: 22801 - DNA, 120 bp, synthetic construct
  source 1..120: mol_type = other DNA
cccgggctgaagccccagtgcccactcagggcagccccagacaccagattctatccctgtgtgcagagcttaccccacccactcaccagactcaacaattcacttcagttcaagtatcag

SEQ ID NO: 22802 - DNA, 120 bp, synthetic construct
  source 1..120: mol_type = other DNA
agtacttcacttttcctgtcttctcctcctcggccggagtggcttttccccggatggtggtctctctgtcgccctcctggtcctcctcctcctcctcttcctcctcccgctgcaacaggt

SEQ ID NO: 22803 - DNA, 120 bp, synthetic construct
  source 1..120: mol_type = other DNA
tgatgagaggattattccgcctcagtgtgacatcaaaataccagaagcaagctaagtgcccaacaggaattaaccaccatgacagtgcacccatgtaacactgttgctagaaaaatggaa

SEQ ID NO: 22804 - DNA, 120 bp, synthetic construct
  source 1..120: mol_type = other DNA
tggatatggtttctggtttggtgctgggcacacagcggtggctccaccagcacaggggacacaggagcagcactctgaggggccagtaccatgcccagtttcggacaggacaagtgtagt

SEQ ID NO: 22805 - DNA, 120 bp, synthetic construct
  source 1..120: mol_type = other DNA
ccttctccgggccccgcccacaccccggagccacactgcagggcgcctcttaggcgcgctccagcgctgggcgcgctccgcacggacgcccagcctggcacagcagcgtccacaacatga

SEQ ID NO: 22806 - DNA, 120 bp, synthetic construct
  source 1..120: mol_type = other DNA
aacctgcagtgtctgatttcattttaaaacttaattttaagcactaaagaaaatttgaatagaagcctgtgtgtattttctctgctaattctgtatgggatatctggcatctccactaag

SEQ ID NO: 22807 - DNA, 120 bp, synthetic construct
  source 1..120: mol_type = other DNA
aaagacaggaggaaaaaaaaatcacaccacctttatttattgaatgagctaaaagacaacacagagaatactggaaatgacggctgtcatatttccccggtctgtgcctccttcctccca

SEQ ID NO: 22808 - DNA, 120 bp, synthetic construct
  source 1..120: mol_type = other DNA
ctagaagggtgttattctagaaaagcacaatgagaggatctgcggtaaacggctgttttaccccttaggggacacaaatccaccccgatcaggaaactgggcagctgtgtgaccagaaag

SEQ ID NO: 22809 - DNA, 120 bp, synthetic construct
  source 1..120: mol_type = other DNA
gaaggtcctcgctcagtccacgcctggcaaatcccacggagaggcccggaagcagttccctccatggccactttcctgccagcattcttttcttactcatcatcttatgctgttactgtc

SEQ ID NO: 22810 - DNA, 120 bp, synthetic construct
  source 1..120: mol_type = other DNA
aaaggcctcttgggtcctcagccttgatatcggccacagccctgcttaaatgtcaagaaaacgcattggccacatgaataattcctcactaacggcagcgacagaaaccggaaccagaaa

SEQ ID NO: 22811 - DNA, 120 bp, synthetic construct
  source 1..120: mol_type = other DNA
agcattccttccattatgttcagtgaggagcttctccaatcatttgcttgtaccatccttacactcacaccatgtgttttatttttcctcgtgttaaaggcacggaagaccagaaaacag

SEQ ID NO: 22812 - DNA, 120 bp, synthetic construct
  source 1..120: mol_type = other DNA
ttagttctcctaggagcggattaacagggtgttgggacctccaaaaggaaaaaaggcagttgtacactgttcagctgaaaggaactaaaaatattcccccgtattcttggtatataaacc

SEQ ID NO: 22813 - DNA, 120 bp, synthetic construct
  source 1..120: mol_type = other DNA
tttctaacttgctgaacatttcagattttaacagcaaaagcggctgacgtccccgcgggcaagcggcctctcggggtctgcagcgccccagggcatccgcgccgccagccccacgcgcga

SEQ ID NO: 22814 - DNA, 120 bp, synthetic construct
  source 1..120: mol_type = other DNA
gggggctccgcgggcacggatggagccgaccgcgggcggcgggggcgctggtgggctctgagctctgtgcggccccgcaggtgcgcgcggagccatggttatcatgtcggagttcagcgc

SEQ ID NO: 22815 - DNA, 120 bp, synthetic construct
  source 1..120: mol_type = other DNA
aaaacacgattagattcaagcaatttggagaaaatctatcgtgaggttcagctgatgaagcttctgaaccatccacacatcataaagctttaccaggtaaggggtcagcttgcctttctc

SEQ ID NO: 22816 - DNA, 120 bp, synthetic construct
  source 1..120: mol_type = other DNA
tatgattcgaaattatcccccaaaagcctctgcactagattgaaaataaaagtagcagtattggtggagcttacgacagtttgctcagtgtctttaagcacagaattcatgccgtgtgcg

SEQ ID NO: 22817 - DNA, 120 bp, synthetic construct
  source 1..120: mol_type = other DNA
gggattacagggcgtgagccaccatgccccggcctaagcattctcaaattgtatgtgaggtgtcttgaattaaatatgaccacagaggggaattctaatatatttagaccttttgtgaga

SEQ ID NO: 22818 - DNA, 120 bp, synthetic construct
  source 1..120: mol_type = other DNA
gccgaaaccgcagccccttgccatttgccgtttaacctcatccatctgtttctttgccgctcagattttggatttgggaatttctacaagtcaggagagcctctgtccacgtggtgtggg

SEQ ID NO: 22819 - DNA, 120 bp, synthetic construct
  source 1..120: mol_type = other DNA
ccggtggatgcgggctgagccctgcttgccgggacccgcctgccccgccttctccgcacacagctacacctccaacctgggcgactacgatgagcaggcgctgggtatcatgcagaccct

SEQ ID NO: 22820 - DNA, 120 bp, synthetic construct
  source 1..120: mol_type = other DNA
gcagcttgcactccagacagaagccagcttgtttcttctcttgatggcgctggtggtccggagtcgctcccctgacagcgtctttcccgtctgccggccccaggtgcctcaggaaggtct

SEQ ID NO: 22821 - DNA, 120 bp, synthetic construct
  source 1..120: mol_type = other DNA
agcctattcctttgcactgcagcatcaaaagcgctgtcctccccccacaggtatagtcgtctccccctccaccacggcaagtcctgcagagggaaccagctctgacagttgtctgacctt

SEQ ID NO: 22822 - DNA, 120 bp, synthetic construct
  source 1..120: mol_type = other DNA
gcaggttatctcctcgaggaacctcatctgctaagtggttccctcctctctgtagcccagtgcacacccccgctcccagccagggagatgtgtggggcgtaggtcctaggtgctgagcca

SEQ ID NO: 22823 - DNA, 120 bp, synthetic construct
  source 1..120: mol_type = other DNA
tttgttttatttttttcttgcactgagtgacctcaactttgagtagggactggaaactttaggaagaaagataattgaggggcgtgtctgggggcgggggcaggaggggagcggggtgga

SEQ ID NO: 22824 - DNA, 120 bp, synthetic construct
  source 1..120: mol_type = other DNA
ctccccaccccccacctaggctttttgggttttgttcaaggaaggtaaagtgagaggtttaggtcagtgtttttaagtttttgttttttttttaaagcaaatcctgtatatgtatctaca

SEQ ID NO: 22825 - DNA, 120 bp, synthetic construct
  source 1..120: mol_type = other DNA
aggcctcagaaaccattgtgtgtttcctctttgaagcaatgacaagcactttactttcacggtggtttttgttttttcttattgctgtggaacctcttttggaggacgttaaaggcgtgt

SEQ ID NO: 22826 - DNA, 120 bp, synthetic construct
  source 1..120: mol_type = other DNA
taccagctcctcaaagattagaaccaccacctgatccggccgctcctcctaatggtatggaccctgaagaactgaaggcagggcccagagaggtttgtacacccatgttcacagcagcat

SEQ ID NO: 22827 - DNA, 120 bp, synthetic construct
  source 1..120: mol_type = other DNA
gatggtggcgaagacgatggcgatgatgatggtgatagaggcttagacttctcaggttgaaagttggagccccccttggggagcctcccacaggccttgtaggactccagaattctgccc

SEQ ID NO: 22828 - DNA, 120 bp, synthetic construct
  source 1..120: mol_type = other DNA
gcctctgtgcttttctgtcaccctgaacggctggcgctctcctcgctgggccgcgggataagaagaaggctttccggcagtccagaaatactggctcccaggagcaggactggcctctcg

SEQ ID NO: 22829 - DNA, 120 bp, synthetic construct
  source 1..120: mol_type = other DNA
aagaaagaaagaaacaagaaacaagaaaggacttagaaaaagtactcagggaacccaggtggccagaaatgctccattccccttttgtcctttgcagtgttctggtctggaatgaatggg

SEQ ID NO: 22830 - DNA, 120 bp, synthetic construct
  source 1..120: mol_type = other DNA
ttcgagtctgtttcccgagtgatggttcccaagctttaagcttgaataaaccctggacttcactgtattttatgaatctcattattcagggttgatggaaccatccctgccaacaccttg

SEQ ID NO: 22831 - DNA, 120 bp, synthetic construct
  source 1..120: mol_type = other DNA
tgagctgggcttttcatccttttttgggagtgttttagacttctcatgtcttgagtgacctcacatttcacagtgatgttcactgtgtagatctttcgcggtccattttgctgggcactg

SEQ ID NO: 22832 - DNA, 120 bp, synthetic construct
  source 1..120: mol_type = other DNA
tcatacacactagcatggctataataatttaaaacaagaaaatagcaagtgttgataaggacctggagaaactggaaccctcgggcactgttggtgagaatggaaatcggtgtgaccagt

SEQ ID NO: 22833 - DNA, 120 bp, synthetic construct
  source 1..120: mol_type = other DNA
ttcacggggtgatgacagaatgttccagaacgtgacagaggtggtgcctacacaactttctggatgtactaaatgccgctgattgttcactttcaagtgattgatttttaggttatttga

SEQ ID NO: 22834 - DNA, 120 bp, synthetic construct
  source 1..120: mol_type = other DNA
gattagcacaagagtcaagaggcagataacgtgtgctactgtggagggcctcacccaagcagttgaaggcctgaatagaaccaaaggtggaatttcctgccttggggcttgaactgctgg

SEQ ID NO: 22835 - DNA, 120 bp, synthetic construct
  source 1..120: mol_type = other DNA
agattaagagggggatccctcctacccaagcttgggggtgggtccaggaccctggaaggcctccatttgccatggggaggctgtgaatctgagcctgagagccattctgaggggtgggtg

SEQ ID NO: 22836 - DNA, 120 bp, synthetic construct
  source 1..120: mol_type = other DNA
cctgcaaagcccacccgggaggcagtggcagccgaacgtgggaaatacgtggattcgggtgacgtctcgggtgtgtgtgtgagatgggaaagaagtcgaattcactcctaggtttgggca

SEQ ID NO: 22837 - DNA, 120 bp, synthetic construct
  source 1..120: mol_type = other DNA
gtgaccgcgcacctgtttgagctgcgtgtaggtgaccgggcacctgtttgagctgcctgtaggtgactgcgcatctgtttgagctgcctgtaggtgactgggtacctgtttgaactgctt

SEQ ID NO: 22838 - DNA, 120 bp, synthetic construct
  source 1..120: mol_type = other DNA
gtcgaagcccttctcccggaggatctcgatggtgtgcccacaggtgatggtcgggagcacggtcagcggggctgacaggcccagctcctgaacacggaggtgccaccacctgagggaaga

SEQ ID NO: 22839 - DNA, 120 bp, synthetic construct
  source 1..120: mol_type = other DNA
aatctggagtttgggggaagcagcagagggagtcagggtggataggaggtggcacagggcccggcccaagaggacgtcagtccatgtggccagggctacccgttggagctcacggacccc

SEQ ID NO: 22840 - DNA, 120 bp, synthetic construct
  source 1..120: mol_type = other DNA
tataaacaagagaccaaggctcacagtgacaccagctgtccctaggagccctgaagtcagagtcagaggcgtcttctctgggcttagtttgagggtgcacacagcagtcgggaaggtcta

SEQ ID NO: 22841 - DNA, 120 bp, synthetic construct
  source 1..120: mol_type = other DNA
gggtgctcgcagcacccagtcccggccatgggccccgtcaatgcagagccaccgccccaggggccctggtggacttgattagaaacaataagtgccatgagagcttcagccttgttctag

SEQ ID NO: 22842 - DNA, 120 bp, synthetic construct
  source 1..120: mol_type = other DNA
catgcctcgatattctattatgggagtggccaataccgccgttaacaactgcctgttaatgatctgcctgtgggtggtggcctgttcccagcctcagaggcaggatgagaaacccaagaa

SEQ ID NO: 22843 - DNA, 120 bp, synthetic construct
  source 1..120: mol_type = other DNA
tcatagtaataatcattgaaaacacactcagcccaaaccacggtgggtaaccaaaaagttcaaaagaaaaacttcttctccagttggagcagccctcgttgctgcccttggtctgtgaaa

SEQ ID NO: 22844 - DNA, 120 bp, synthetic construct
  source 1..120: mol_type = other DNA
aggaaattgttctagagaaatgctctagaaaagcatttcacagagggaacatttgagctgggttctgaagggtgaataggagttcaccaaggagagggcaagagatgtgtacactcccag

SEQ ID NO: 22845 - DNA, 120 bp, synthetic construct
  source 1..120: mol_type = other DNA
gtcttgtgtgccaggcactgccaggtgccatcgccccgagagcatcggcactggccccgaatgctggtcaaaggaagctaggttgggacacaggccggcagcgggtgcaagatgccaggg

SEQ ID NO: 22846 - DNA, 120 bp, synthetic construct
  source 1..120: mol_type = other DNA
atgaaatgtgatttgagggacctgggaccagcctgcagcacctcaaaatttctgaaagcaaccaccagacaggtgttgcccctagaaccaggacgaggcgctgtgtgtggtggggaggac

SEQ ID NO: 22847 - DNA, 120 bp, synthetic construct
  source 1..120: mol_type = other DNA
cctccaaattcccattctctgtctcataaatgatgagctgaactatctgtccccacgaagctggcaagacagaggtaaccgctccctggacagcgggtggctcacagcacgtgctaggac

SEQ ID NO: 22848 - DNA, 120 bp, synthetic construct
  source 1..120: mol_type = other DNA
aaacaaaggtttaggtccaccttttcagaaaggctttactggagatgacatttcctttcatctctcagcatgtgaccataggaagcaaaaaagtgtcagggcagagactccttagaccag

SEQ ID NO: 22849 - DNA, 120 bp, synthetic construct
  source 1..120: mol_type = other DNA
ctgagaagtttgcagaggtgatcagggccaggcccagagcgcttagcaagaaaaaggatgtgacttgcagggatagccctggagccccttatctcaaggactcccacttccacagcccaa

SEQ ID NO: 22850 - DNA, 120 bp, synthetic construct
  source 1..120: mol_type = other DNA
ttgtcttttccactgatagatcttctgcgccttgagcagggcacgaaatgcacatggcgctgaggaaagacttgttggctaaatgaatgtgtcgtatcttctattgcagttatgtaaaat

SEQ ID NO: 22851 - DNA, 120 bp, synthetic construct
  source 1..120: mol_type = other DNA
caggtaacaaactcctgccctccaggttatggatcagccctcttgtgatcaaaagcaggacttacggggcagtgtggtgatgtggggactcggaggcaggccggcccagctgccaggtgc

SEQ ID NO: 22852 - DNA, 120 bp, synthetic construct
  source 1..120: mol_type = other DNA
atgatgaaaacgttctgggtggagatagtcacggtggttgcctcacacttagaaatggttacagtgatcagtgttacgtgtattttacccaggattaaaaacacacacacgcacctgaaa

SEQ ID NO: 22853 - DNA, 120 bp, synthetic construct
  source 1..120: mol_type = other DNA
caagacaacagcgccgggcggccggatgcacgtgcgtcccgggaaggcgggttcagctggcatcgcctggccggttccgttcgctccttaaaccacaagacccccttggggtcacgacgt

SEQ ID NO: 22854 - DNA, 120 bp, synthetic construct
  source 1..120: mol_type = other DNA
cggatctcacctggacggatacatggaaaagaggggcgagcggctgccccgactgcggcgaggcggagacggcgaccccggggtggcggcctcgcggggacccacggcgaggggagcagg

SEQ ID NO: 22855 - DNA, 120 bp, synthetic construct
  source 1..120: mol_type = other DNA
gtttcccaaacatcgtgctctggactttcagaggctgaacctgatccccccgccctatggctaaatgggggatcccaggcccccgagtctccccccggacctgcagcgaaagacacggac

SEQ ID NO: 22856 - DNA, 120 bp, synthetic construct
  source 1..120: mol_type = other DNA
ggttgctgaatagtggtttttctaagcccatcactcctccatgtaccatttggcattccattattagagttttccttctccctcatttatttattcacttagttatatcaatgtgagccg

SEQ ID NO: 22857 - DNA, 120 bp, synthetic construct
  source 1..120: mol_type = other DNA
cttctaatcacctctgtttcttcaaaggaataggcctgacagctggtcagcagcaagtggacagcgaggccgagctgatggagggttttgttgttgttacttttgttcagagtataacac

SEQ ID NO: 22858 - DNA, 120 bp, synthetic construct
  source 1..120: mol_type = other DNA
ggttcctgagcccaggcgtccaggaggagcttggatctttaatttctttcagtggtgttttgggatttggggtatgtaagtctcacacttctttggttacatttattccttttgacttga

SEQ ID NO: 22859 - DNA, 120 bp, synthetic construct
  source 1..120: mol_type = other DNA
acttagaacagatgaagtatttgatagcattcatccttgacttcctggattgaatcacacccactactggcagatttaccttaacacgctgctggactgtttgctaatattggatgtggg

SEQ ID NO: 22860 - DNA, 120 bp, synthetic construct
  source 1..120: mol_type = other DNA
ccacaactccccttgctggtgtctggattttcagggcaggtaaaatttaccttccatgcccccacaacctggttcagctttgctatttccaaagcccttgagattctaaccccgccatcc

SEQ ID NO: 22861 - DNA, 120 bp, synthetic construct
  source 1..120: mol_type = other DNA
aatcatggtttcagaaatatttaaaatgatccttatctacttacaagcacatgcatatggtaagcttgttagtcctcctgactcaacagcaagcaaaagaatgctgcagggaggccaggc

SEQ ID NO: 22862 - DNA, 120 bp, synthetic construct
  source 1..120: mol_type = other DNA
cctagagccaggaggtttttgaggatgaggtatgtggacacgtgggcatggtttgggatggcctcacttggaacgttttggtcttaggaatgaaatgctcagcccccagcactgacttgt

SEQ ID NO: 22863 - DNA, 120 bp, synthetic construct
  source 1..120: mol_type = other DNA
accaaggaaaataaagaaaaccgtgccatccaaaccacggcacgcagcacagaaccacacccactctctcaacacgcgcagctcctcaagccaacggcactgataaggaaaaacactgct

SEQ ID NO: 22864 - DNA, 120 bp, synthetic construct
  source 1..120: mol_type = other DNA
tgtgacccaagacaattcttcttccaatgtgtcccagggaagccatccctgatctaaaggaggttacaacatctattcttcttcttcgtaatatctgggagaataaactgcatgcccact

SEQ ID NO: 22865 - DNA, 120 bp, synthetic construct
  source 1..120: mol_type = other DNA
aacatgtgagtaaacctaacttttccttagtccacacagcttctaaaccaacaggtactaaatattctacactgaaataacgatggctgtggtgtacggtccgtccttcagttctgctgg

SEQ ID NO: 22866 - DNA, 120 bp, synthetic construct
  source 1..120: mol_type = other DNA
tgctttcgaacccaaattttattaagtgtaactactcggacagcctgccaatcatatcacaggatatcccaattggaaagctattgggaatgtaccttcctccccgagtagaaatcaagt

SEQ ID NO: 22867 - DNA, 120 bp, synthetic construct
  source 1..120: mol_type = other DNA
tctctactatcaggtcagtattagcactgaaaagcatttagtgtcttggcaggaaaagttgacaagaaaatctcatccacacatagaaatgtgcaccactgtgcaaggaagcacaatccc

SEQ ID NO: 22868 - DNA, 120 bp, synthetic construct
  source 1..120: mol_type = other DNA
aaagaacttaataaaggccaggggttcagtcactgtaaagaccaatgaatggctcaaaatgttgaaatccgtttcacatggacggacctgctctcatgacaaatgtcaatcaatggaggt

SEQ ID NO: 22869 - DNA, 120 bp, synthetic construct
  source 1..120: mol_type = other DNA
acatttgctcttttccgatccttcttttaaggaaaaaaaatccttttagcccttgtgctttaaactggatcaggcagacttgaaaccttacactgtaccgttcttcttaaaatcaagttg

SEQ ID NO: 22870 - DNA, 120 bp, synthetic construct
  source 1..120: mol_type = other DNA
acacttgggacaccccccaaaatcaaagaactgggtggtcacttaagatgcttggttataccacaatccatggccactggtttagttaggggagattcggttcataaatcaaaacattaa

SEQ ID NO: 22871 - DNA, 120 bp, synthetic construct
  source 1..120: mol_type = other DNA
gcagcaaatatcaggcacagccaacacacaaacatcaaaaactgatttttaaagtttctctaatgataaaaacaaggagtggtggtctcagaccttccactggaagtcgatcacctgcct

SEQ ID NO: 22872 - DNA, 120 bp, synthetic construct
  source 1..120: mol_type = other DNA
tcagacagaacgtatgtgtgcttcacatatggtgctcatgaagtgctatcattatctaaggaaaacagaaaacgaagttcagagtctctctaaacgcatgacaccagaccaacagggagt

SEQ ID NO: 22873 - DNA, 120 bp, synthetic construct
  source 1..120: mol_type = other DNA
cacatgcaaatatgaaaaggagaaattaatgatgccccgatcctacatgtgttagttcttcaccctaaactcagaagagtctcttgttccgatagagctggtctattcattcgccaagat

SEQ ID NO: 22874 - DNA, 120 bp, synthetic construct
  source 1..120: mol_type = other DNA
ctaagtggataaaacaccaacgcttaggaccctaagttagataagcgactgaatactggcgaggctggtaccagagcttgctcgacaggacattcacagccgaaagttggaacaaacgtg

SEQ ID NO: 22875 - DNA, 120 bp, synthetic construct
  source 1..120: mol_type = other DNA
tcgacctagaagaaaaaaaaagctgaggcaaacttgatataagtagagaggttatttgggccaagtttgaagattgcaacccgggagcatagcttcaagttgccctgaacataggatttg

SEQ ID NO: 22876 - DNA, 120 bp, synthetic construct
  source 1..120: mol_type = other DNA
catgtgcccagggagccatcctcaagctttgggctcaaataaactctatacttaatcatatttcctgaatttcattatttgaggttgacattttggcaacccagataggacctgaagcag

SEQ ID NO: 22877 - DNA, 120 bp, synthetic construct
  source 1..120: mol_type = other DNA
aatgcttatggtgccaccttctgtcagtatctagaaacatggtctcacttaacccgtgaagaccccagactataatagctaaaatggggcgcctttaaagtaactagtttatgcactcaa

SEQ ID NO: 22878 - DNA, 120 bp, synthetic construct
  source 1..120: mol_type = other DNA
agggagggaaattaaaaaaataaaatgctaacatccagggaattagttcagctgagatcagatctgaaacaagtcaaaaccctttaaatgctcaaactgcctgctctggagcccctgcag

SEQ ID NO: 22879 - DNA, 120 bp, synthetic construct
  source 1..120: mol_type = other DNA
gtagctgggatgacaggtgcatgccaccacacctggctaatttaccttggttaagtctcactggttttgtgagtaacttgaaaatgtccatttcgtttttttttttgagatggagtttcg

SEQ ID NO: 22880 - DNA, 120 bp, synthetic construct
  source 1..120: mol_type = other DNA
tgcgggcgactggagttttattattactcaaattagacatcccaagaatttgcagatcagagtttttaaagataatttggcggctcaggaagtaggagtgctgattgatctggctggaga

SEQ ID NO: 22881 - DNA, 120 bp, synthetic construct
  source 1..120: mol_type = other DNA
tggtttgccgcccacaactaggcttttacctacacccttcttccttggtttgaattcagctctgtgcttttgagatgtgaattttttctactttgtttcacctcagtcatccctttagaa

SEQ ID NO: 22882 - DNA, 120 bp, synthetic construct
  source 1..120: mol_type = other DNA
aattgtaagagttgggccgggcatggttgttcatccttgtaattctagcactttgaggccatgagattgagaccagcctgggtaggatagtgagaccctatcactgttattttaaaaatt

SEQ ID NO: 22883 - DNA, 120 bp, synthetic construct
  source 1..120: mol_type = other DNA
gggattacaggtgtgagccaccatgccaggccgtaaaccacttttcgaaaagaatcaaagtaaaacagtaattgtctacggatgacaaaagacttatagtagccatagttaaagatgcct

SEQ ID NO: 22884 - DNA, 120 bp, synthetic construct
  source 1..120: mol_type = other DNA
caagtaacttggtcccactaagatttatctttggtagaaatggggaatctgagagagaaaaattatgtttcagaagaaaacgattttatacctattgatagattccagccctgatgattg

SEQ ID NO: 22885 - DNA, 120 bp, synthetic construct
  source 1..120: mol_type = other DNA
tctaaatctcattatttaaagtcgagaattcattcctcccttcatctgttcattcatatgtctgtcctttcacccaccaatccgctcatctagccatccacccatttgtctgttagtccg

SEQ ID NO: 22886 - DNA, 120 bp, synthetic construct
  source 1..120: mol_type = other DNA
acctgcattatgaagttctctagactcagggtttccattggctaataggatcagccaacctgcctttgaggagtggacgaagcttggcacttagtaggtgcccatgaggcatcagaaact

SEQ ID NO: 22887 - DNA, 120 bp, synthetic construct
  source 1..120: mol_type = other DNA
ctggaatacagcaggaagaactgaactttaaaggtgagcatgaatattcaagaagtgtcatggtgtaaaacaatctgcatagctgtggtggaaaggcttctttcctgatcaggaaacagc

SEQ ID NO: 22888 - DNA, 120 bp, synthetic construct
  source 1..120: mol_type = other DNA
ctccctttcccaagacccccaagcagccagatgtagcctgattcattacatgtatgcatacaggtgtcaatctaaaatagtcaaaagggccagaatctagtttaaggagagtttattcaa

SEQ ID NO: 22889 - DNA, 120 bp, synthetic construct
  source 1..120: mol_type = other DNA
gagctcaggagttccaatccagcctgaacaacacagcaagaccctgtctcaaaaagaaagaaatatgacaatatgactttgcagcgtttcagaacatcaataactttgcagttcttcatg

SEQ ID NO: 22890 - DNA, 120 bp, synthetic construct
  source 1..120: mol_type = other DNA
tgaatgttttgtttgcgaaaatagccttaattttcccttcactgtttccatgcaccttagaaataggacttcgtagccggttgtggtcatacacacctacggtcccagctacttgcaagg

SEQ ID NO: 22891 - DNA, 120 bp, synthetic construct
  source 1..120: mol_type = other DNA
cacttcttctctcagctctgccagctgctgcactgtgtctgggccagcccgctggagcacagagttcagtgcattgggacagctacagcccattgcatcgggacagcccacagcaacaag

SEQ ID NO: 22892 - DNA, 120 bp, synthetic construct
  source 1..120: mol_type = other DNA
cagcctgagtgacggagtgagactctgtttcaaaaaaagaaaaaaaagtctgaaaagtcttacagacccaaggaagaatttgtcttcctctgtgagaggggagatgtgctctgatgatat

SEQ ID NO: 22893 - DNA, 120 bp, synthetic construct
  source 1..120: mol_type = other DNA
atggtgatctgtaccaccattacacctgcctgtatgcaggcaacccatattcatggctttccataaatggctttattctttccgaaaatggcatttttatttcgcttactgtgtgtgtga

SEQ ID NO: 22894 - DNA, 120 bp, synthetic construct
  source 1..120: mol_type = other DNA
taaaggtgaataatatttcactgcatgtacagaccacattgtgtttatctgttgacctgttggtggacgcctgggttgtttccacctcttggctgttgtgaatgacgctgctgtgaacat

SEQ ID NO: 22895 - DNA, 120 bp, synthetic construct
  source 1..120: mol_type = other DNA
taggctttataatttttatttgataatttatattcatgtattcattcattttccaacttgctttctccagttcagagtggcaggtgaccagggcccatcctggaggctcagtgccaaggt

SEQ ID NO: 22896 - DNA, 120 bp, synthetic construct
  source 1..120: mol_type = other DNA
ccaggaacaacagggctctcacctggcagggctcccaggcacgttgatggagggagggtttcctcagtcctctcccccagcccttactgggcagtacccccacccaccatactgtctctt

SEQ ID NO: 22897 - DNA, 120 bp, synthetic construct
  source 1..120: mol_type = other DNA
tctgcaaagaccccacttccaaataagatcacatccgtaggttttgaggttaggacttgaagacatcgctttgggggacacagttccacccaatgcaggtccttggtgagccaggtagaa

SEQ ID NO: 22898 - DNA, 120 bp, synthetic construct
  source 1..120: mol_type = other DNA
ttctattcctttttgtccaggtctcatggaacaaggaaatcaaaaaaacacccgcccgtgcacaaatggatttcctgaacccttctgtgcgccagtccttggggacgcaaatgtgaatga

SEQ ID NO: 22899 - DNA, 120 bp, synthetic construct
  source 1..120: mol_type = other DNA
ttcgaaaaatactttaaaaaaagcaccatgtcccttggatttagtgataccgacccctctttgtccctctgcttcccagtggtttcttcttgcccctgggatttgtagggatgggttgcc

SEQ ID NO: 22900 - DNA, 120 bp, synthetic construct
  source 1..120: mol_type = other DNA
gaatgtatggagcagcagcaggggtctcaacgagtgccgcgccgtttccagccgtgcgcacgtccctgtggctgccgcaaggaacagaacgacttggtcatcttgcagtggaagtcagaa

SEQ ID NO: 22901 - DNA, 120 bp, synthetic construct
  source 1..120: mol_type = other DNA
ctctcctatgggaatgtagccccctgaagtcaggaactgtcttttttatagctgtatccagtcagctagtgtggcacacagtaggtgcttaataaaaacatagctactttctaattgctc

SEQ ID NO: 22902 - DNA, 120 bp, synthetic construct
  source 1..120: mol_type = other DNA
gggacacacactctgcccatagcgagccatggcagagtcactcacaaggtgggcgctgtggttcgaatgcttctctcaagaagcatgtgttggaaacttattccccaaggccacagtgtt

SEQ ID NO: 22903 - DNA, 120 bp, synthetic construct
  source 1..120: mol_type = other DNA
tgacagaatttgctgataaatcagggatggggcgtgtctcagtccgcttgggctgccgtacaagataccacagactgagtgatttaaataacagaaatttattatctcagttctagaggc

SEQ ID NO: 22904 - DNA, 120 bp, synthetic construct
  source 1..120: mol_type = other DNA
gccaagagtgaagttctgatagctggggtaagaaaggccgtgggaacagccggtttcagacacgctgggtctaagacgctgcgtctggcgctgctcggcatccaatgggagccgtggaga

SEQ ID NO: 22905 - DNA, 120 bp, synthetic construct
  source 1..120: mol_type = other DNA
tcagggtggctctggacgccagggctgtactgtgttctttctcgacacgaatgagtttctggacagttttcccggctagtgcagacccacactgactgaaaaccgaaatctttgcacatg

SEQ ID NO: 22906 - DNA, 120 bp, synthetic construct
  source 1..120: mol_type = other DNA
attcggcccgcgtgagagctaggagtgccacagtcgacatcctcagtgggattggtaccagttgcctacaccagcaaccctctcatggaggagccttcggtggctttgctccttacccca

SEQ ID NO: 22907 - DNA, 120 bp, synthetic construct
  source 1..120: mol_type = other DNA
cactggcctaggaactgttcattcttctgaacacagcgaatgcccagggcttgagccccccttgcctgcctccagtcatttctgggtcaggtgggctaagaacaaacacacagtgagtgt

SEQ ID NO: 22908 - DNA, 120 bp, synthetic construct
  source 1..120: mol_type = other DNA
cctacgtaacaaccagagcagtgagcagattctttttaggtcatgatgcaaacacatcaactgtaaaagaacatatttgagacaatcagggttatctgatgagggactaggttttagatg

SEQ ID NO: 22909 - DNA, 120 bp, synthetic construct
  source 1..120: mol_type = other DNA
gggctcgatctgtagagatatttgagaaaaatgatctccgagacagtggcttacacacccccacgcatacacaccacggacacacaccacacacatcacacacacaccatacactataga

SEQ ID NO: 22910 - DNA, 120 bp, synthetic construct
  source 1..120: mol_type = other DNA
atatacaccacacccccacacacgctcccagaccagttggagccctgccctcgcaccccagatcccgcacatctgtccctctgttcccttggcctcccaccccttctccaccctcaggag

SEQ ID NO: 22911 - DNA, 120 bp, synthetic construct
  source 1..120: mol_type = other DNA
accaagagacatccaatgaggaagggctgcccatgcttaaagatgtccagtgaggaagggccacccgtgcccagggacatccagtgaggaagggctgcctgtgcccagggtgatcatgtt

SEQ ID NO: 22912 - DNA, 120 bp, synthetic construct
  source 1..120: mol_type = other DNA
ctaacatctcagcttcagcaccacatctccgttttcgctctggtttcacagtctcacatttgaaacacagaataaaaacaccaagaggtcatgcagaatgacagaactgaaatacttcca

SEQ ID NO: 22913 - DNA, 120 bp, synthetic construct
  source 1..120: mol_type = other DNA
ggatgccagtcacatgcattagggctcacccaaatgacctccttttaacttaatttcctgagagatcctatctccaaatacagtcacactctgaggtcctggggttagtacttcaacaca

SEQ ID NO: 22914 - DNA, 120 bp, synthetic construct
  source 1..120: mol_type = other DNA
tttggttactgtttggttactcttcagctttgtgcttgggggcattttaaacagcaaaatcacgaacaaaacacacaaaactgcaaaaggtaagcaagctgcagtgcatctcacagagga

SEQ ID NO: 22915 - DNA, 120 bp, synthetic construct
  source 1..120: mol_type = other DNA
aaaagggtcttgtttccccagaatccaggcgaatggcgcagggctctggcaggcggatgcactgacatcagcgtgcatttacttgtttgttgcttgtctctacccaagagaatatcagct

SEQ ID NO: 22916 - DNA, 120 bp, synthetic construct
  source 1..120: mol_type = other DNA
gaaggacagcacagctcctccctccctgccaagtgtcaggggcactaaaaacactgccatcaatgttctgatgtttaaatcatgttttgatgcaatgtttaaacaaatcaaaatgggtcg

SEQ ID NO: 22917 - DNA, 120 bp, synthetic construct
  source 1..120: mol_type = other DNA
ctatctgcaccttaatttggcaccccagggaatcgctcctctggaattgtaaccttgcagggcaaaagctatcatttcaagattttttgggatcctgtgtccccggacagtgctgtaaat

SEQ ID NO: 22918 - DNA, 120 bp, synthetic construct
  source 1..120: mol_type = other DNA
aacaaacaaaaccgggagtgcctggacacttagtgagaactggacaggggccatgggtcgaggagcaaaataatcaccaggacttgtggataacaggatcatgtgggtggtgggtccgca

SEQ ID NO: 22919 - DNA, 120 bp, synthetic construct
  source 1..120: mol_type = other DNA
tgtcccagccacgtttctgctgactgagcagccttcttcatgagctcacgcctttccagagaaatcccttaatgcctccattctgctggtggcatatatagggagggctcggccttggct

SEQ ID NO: 22920 - DNA, 120 bp, synthetic construct
  source 1..120: mol_type = other DNA
ggccgcttctatagacagcatgacaccaagggcagtgacctcattccacaggctgagtccagccagccagccaagcatcaccagccagacgattgaccctaacggaccaaccaacccgta

SEQ ID NO: 22921 - DNA, 120 bp, synthetic construct
  source 1..120: mol_type = other DNA
atcttcacatgaaccctacctgaggaagccagtccccgacggcatagctgcatccgcttggaatgctttacaggcattgacaccttcgcctcacagcagcactttggaaccagtgtcctc

SEQ ID NO: 22922 - DNA, 120 bp, synthetic construct
  source 1..120: mol_type = other DNA
agacaaccccccgcggggaatagcccggcaagtggccacgaggccaggctgaggtccagagaagcaggggcatgaatccataaatcccagggggcctggccatgggatgtgctggctgca

SEQ ID NO: 22923 - DNA, 120 bp, synthetic construct
  source 1..120: mol_type = other DNA
cctcggaacgatggggtcgcctgcgtcccttccttctcctgagctcaagcgcctccctccacactgggctggaaggagaggttttgggggcagagcctctgatgggaaagggactgggga

SEQ ID NO: 22924 - DNA, 120 bp, synthetic construct
  source 1..120: mol_type = other DNA
cacactccacacacaacacacactccacacacaccacacactccacacccaccacacacaccacacactccacacactccacacactccacacacaccacacactccacacacaacgcac

SEQ ID NO: 22925 - DNA, 120 bp, synthetic construct
  source 1..120: mol_type = other DNA
atttgtacagaagggggtgccctgtggttggcaacaacatgacccactgtgctttggggctgcggctggatgtttttgaaaatcggggtgtctggggctccctgctcctcctgggtctgt

SEQ ID NO: 22926 - DNA, 120 bp, synthetic construct
  source 1..120: mol_type = other DNA
ccatccttcctcggctctccaatcacaccccacccgggcggttcttaaactcaggggcctggggctgcttcacctctggcctggggtaggctagatacgcctgagagattgtccatacag

SEQ ID NO: 22927 - DNA, 120 bp, synthetic construct
  source 1..120: mol_type = other DNA
gccatcgtggaaagatgggattggccagtacttcccaagcctgccaggccgggagaaccacctgcagtgcattgcaaatacagactcctgggccccgctcacacccacttagagtctgga

SEQ ID NO: 22928 - DNA, 120 bp, synthetic construct
  source 1..120: mol_type = other DNA
gttcctttcaatcatcaccagcgtgcctcacacttaccaccaggtggcagcagaggacttgcctggccgccgagaccttggccgcaggagacttgccgaacctcagccttaaaggtcacc

SEQ ID NO: 22929 - DNA, 120 bp, synthetic construct
  source 1..120: mol_type = other DNA
actaagcatattgactgaagaaatctggaaacctagtaccgcggcaccatatcgttaccccaaaggaaaatgcatgcacgctgtcagagatgacgaacactgcgtctggaaacttcttaa

SEQ ID NO: 22930 - DNA, 120 bp, synthetic construct
  source 1..120: mol_type = other DNA
ttctcggtggatccctgaaatgttgagttgtggagtctgggcagctgagatcgggcagggctggtttcttgtaggcccaggcttccgtgtagagggccaagtgatgcccaaggttcacct

SEQ ID NO: 22931 - DNA, 120 bp, synthetic construct
  source 1..120: mol_type = other DNA
aattgttctttagattctgattttttaaatgacagcactttggtttggagggttaatgacttaccccaggtcatatgccacaccatgggtaacaccaagagtagagctcagatctccagt

SEQ ID NO: 22932 - DNA, 120 bp, synthetic construct
  source 1..120: mol_type = other DNA
caagcacattcagccaccatcattatagttaaacagatctatgatttaaattcctatcgctaccttatctgactttgaaaaagtcatggggaaaacttggctaccttgtgccaactgcta

SEQ ID NO: 22933 - DNA, 120 bp, synthetic construct
  source 1..120: mol_type = other DNA
catctgacaatttttctgccctgtcacttattcccttgctcccagataatcttcgaaaaaccaagatgagtttaattaacactcagaggacttgacaaagacactcactcccaaaccagc

SEQ ID NO: 22934 - DNA, 120 bp, synthetic construct
  source 1..120: mol_type = other DNA
aagttcatatgttgcaaccgtagtgcccagtgtgatgatatttggagttggagcttgtaagaggtaattaggtgatgaggctggagccctaatgtttggaatagtgagcttattaaaagg

SEQ ID NO: 22935 - DNA, 120 bp, synthetic construct
  source 1..120: mol_type = other DNA
ttttttcaattattataagcattttcttcaaaacatccagtggttttctattgcaaggagaaactggaaaggtctggaagcaggatcagggagccaggaaggtagctttcccatcttccc

SEQ ID NO: 22936 - DNA, 120 bp, synthetic construct
  source 1..120: mol_type = other DNA
taaaacaaagtgaacactgaagcctcccactagggtccattggctgatgcgtttccatttccatgggttttctaacttctggatgagagagtacattcctgcaattgctaaagctaagtt

SEQ ID NO: 22937 - DNA, 120 bp, synthetic construct
  source 1..120: mol_type = other DNA
agaggtagcgagtctagttgcctctggaaaattcagtagccaagccatagtgtatttgcatattgtaaatgtgaagtggatgggtgtgaggaatgaatcatatatagtacaggacagcgt

SEQ ID NO: 22938 - DNA, 120 bp, synthetic construct
  source 1..120: mol_type = other DNA
tcgtgttttattttaccagcaagtgccagtgctagtgagtctctagaaacaagagaaaatcccagagtactaaagctgcagtttccagaagcaaggtctgattcacccttactttgtaga

SEQ ID NO: 22939 - DNA, 120 bp, synthetic construct
  source 1..120: mol_type = other DNA
ggggagaagtttgcagatgtggggagtcacaggtcatttgaaattccaagattaagaaaccctgttacctttaagataaagtctgactccatggtatgacaaataaatcccttcccagtc

SEQ ID NO: 22940 - DNA, 120 bp, synthetic construct
  source 1..120: mol_type = other DNA
cagcccagagagattccataatggctctggttaggtttgggtgttggtttttgttgttgtttttaagataggggatcctactctgtcatctaggctagagcggtgcagtggcacaatctc

SEQ ID NO: 22941 - DNA, 120 bp, synthetic construct
  source 1..120: mol_type = other DNA
tcctgacaatcccattttgtgtgctaaactgatcaaaggaagaaaagatgagatggaagatcataaaggctttgttcctcccacaaacatcagcagagacctgcatttaagtcaggcctg

SEQ ID NO: 22942 - DNA, 120 bp, synthetic construct
  source 1..120: mol_type = other DNA
taaattgcactgtgcttgctggatgctcttcaggacaatttaggaagcaggaaagaatttacaaagttctgaggacagacagaccctgctcctacaagctgcagtgctcaccatagtcaa

SEQ ID NO: 22943 - DNA, 120 bp, synthetic construct
  source 1..120: mol_type = other DNA
ttttgtttgtttgtttgtttgtttcaataaagaaagagtttaattgcagtaaggcaggccgcgcaggagatggcgttcttattcaaatcggtctctctgaaggctcagaggttaggggtt

SEQ ID NO: 22944 - DNA, 120 bp, synthetic construct
  source 1..120: mol_type = other DNA
ggaaacgtagctgtcaatgtctcattcccgaagacttccagatgcctggatctttagagttctccacctcaccccgagttgattacacaaatgttcctggggctttgcttagtgccctgc

SEQ ID NO: 22945 - DNA, 120 bp, synthetic construct
  source 1..120: mol_type = other DNA
gtaaagtaaagcgagtttttgtacttcgaagtctgggacataaaatcttcaagacgtcagcatcagtgacacgatggtgacagaggccagcattgcttgttgtatctttttccatcctgt

SEQ ID NO: 22946 - DNA, 120 bp, synthetic construct
  source 1..120: mol_type = other DNA
caagaccattagctgccttcctcagtgttccttctccccttctccctagtaatagaaccctgacttttacctggccgtatggtcactcaaaataaaggactacatttcccaccttctctc

SEQ ID NO: 22947 - DNA, 120 bp, synthetic construct
  source 1..120: mol_type = other DNA
aaaaaggaacaaaaatttttctcaaagagtgaaaaggaaatgagatcagtgatggcaggtctaattgtggacatgtttgcttcgaccttaccatggaccactcactcagtgggtgccaga

SEQ ID NO: 22948 - DNA, 120 bp, synthetic construct
  source 1..120: mol_type = other DNA
aaggatattctgtctcctctttaattttatgttgaaataaaattttttggtgtccaggggagttggccattttagcggctggtgtctcatctgaggtcagaggtgagtcttgcgacatag

SEQ ID NO: 22949 - DNA, 120 bp, synthetic construct
  source 1..120: mol_type = other DNA
ctggaacctatgaatgtcgctttagatggaaaaagttctgcctatgtgaccaagttaaggattttgagatgtgaagatggttttagattactcaggtgggccctgaatgcaatctcaggt

SEQ ID NO: 22950 - DNA, 120 bp, synthetic construct
  source 1..120: mol_type = other DNA
atccctgtggattactttggtgggtggaaacttggcacactatttaatttgggctttttgggggatgactgcacactggttctctttttttctcagacctaaatttcgaccactcaactt

SEQ ID NO: 22951 - DNA, 120 bp, synthetic construct
  source 1..120: mol_type = other DNA
tgactacccgcagcatgcacaatacaccaagttggggtttgtatgaaatatccatcactaatatcttccccagttacgagactttctgggatattggtttccccaaaatatacggtctta

SEQ ID NO: 22952 - DNA, 120 bp, synthetic construct
  source 1..120: mol_type = other DNA
aagggaccctgtggcctggaaccgcagtgtgaaatgctatatagtgcaatgaagtcaattcgaagacaagagttctttgcctttctcatctaatttttagttatggatatgagacgcttg

SEQ ID NO: 22953 - DNA, 120 bp, synthetic construct
  source 1..120: mol_type = other DNA
aggattagggtgagggatgagaaattatttaatgagtacgatgtacactactacactcaaagcccagacatcaccactgagcaatcaatccatttgacaaaactgcacacctgcacttgt

SEQ ID NO: 22954 - DNA, 120 bp, synthetic construct
  source 1..120: mol_type = other DNA
atctggcaatatattatgaaaacaatgacaagaagaacttgatataaaatgcacaattcagacgtccttgaagatcattttagaggcagcatgaagtggggggtggcactggtgatgggg

SEQ ID NO: 22955 - DNA, 120 bp, synthetic construct
  source 1..120: mol_type = other DNA
aattgatttcatataattgggagataaagattgttcagttgcaagacaaagtcttaacttgaactctcaggacacgggtgggtccctaaactcaatacgtgagtgttgctgccgggctgt

SEQ ID NO: 22956 - DNA, 120 bp, synthetic construct
  source 1..120: mol_type = other DNA
aaacccacagaaaacaaacccacagacaacaaacccacagaaaacaaacccgcagagaacagacccagagacaacaaactcacagacaacaaacccacagagaacaaacccacagagaac

SEQ ID NO: 22957 - DNA, 120 bp, synthetic construct
  source 1..120: mol_type = other DNA
gaagtcattcctggatgacttcctcatcgattttaaataatttccatttcagaggaaggcctttatctgacctgatcccctaaatattgggggaaacctacatagggacaaagacagcag

SEQ ID NO: 22958 - DNA, 120 bp, synthetic construct
  source 1..120: mol_type = other DNA
tttttgccttcaagttggctttcttcatggtggcaaaatggatccagcaattctgtcagaggttttcgaagcagagtgactccatcttgattaaaggctgtgtaaaatgaggatgagact

SEQ ID NO: 22959 - DNA, 120 bp, synthetic construct
  source 1..120: mol_type = other DNA
ttttcatttgaaacttattccaattcttgaactgggggtagtttcaactttcctagagctgtatgggtcctcaaatgaaaattcggggcagctggattagagaagggggaaatgcatgct

SEQ ID NO: 22960 - DNA, 120 bp, synthetic construct
  source 1..120: mol_type = other DNA
tcatcaactgacatgcagacggaattctcttgtggaacaagacaatacagccattgcttagagactaattgtcaaggaattagtcatttcctgtttcagaatagcatcatcaccaccacc

SEQ ID NO: 22961 - DNA, 120 bp, synthetic construct
  source 1..120: mol_type = other DNA
gttcagaggtcagatttgagtaataaacatcttctaaggacttgtcattctttctgaggatgttgctggccagccggaagacgaaaatcaccgcgtagatgccgatgatggtgagtatat

SEQ ID NO: 22962 - DNA, 120 bp, synthetic construct
  source 1..120: mol_type = other DNA
acaagtgcacttacctttgacccagcaattctatctctaggaatctatcctaaagatgctccagaacatctagagacaacatatgctgaaggttagtcattgcagtcctccttgtgatga

SEQ ID NO: 22963 - DNA, 120 bp, synthetic construct
  source 1..120: mol_type = other DNA
ctcgcaagaaacaacaccacaagcataaatttacaccattgtttggtagaatggtttgagacattaaagtaaggaaggtgaaaaattcccgtaattattgcaacaaacaaacagacagca

SEQ ID NO: 22964 - DNA, 120 bp, synthetic construct
  source 1..120: mol_type = other DNA
tcaatcaaaacaaatttttaaaacgtgctggtattaaggaatctccatctctcaggtcccatcatgaactgaggtggccagaagctccccctgaggctggctctccgcttagagcttgga

SEQ ID NO: 22965 - DNA, 120 bp, synthetic construct
  source 1..120: mol_type = other DNA
aaaatagattagtggttcactagcgggagggattgggggtgataactaagggtatatagcatttttggaggggtaataaaacttctaaaattgtggtgctcactgtacacaatctgtgaa

SEQ ID NO: 22966 - DNA, 120 bp, synthetic construct
  source 1..120: mol_type = other DNA
gtatgtgtattacctattcaataataaatgcacccatttgttagatatctttgttgaagattcatttggctcctgctgtctcttgctatgggatggaccatggcatcccccctctgccac

SEQ ID NO: 22967 - DNA, 120 bp, synthetic construct
  source 1..120: mol_type = other DNA
tgtctcgatcacttccctaaaggttaaatcataaactcttactgccaaggcatatccacgaccttaaactctccctgttgggcaaaaacaatctctgatgttaaaaggcaggatagtgga

SEQ ID NO: 22968 - DNA, 120 bp, synthetic construct
  source 1..120: mol_type = other DNA
cactgagaagccagtcagcttcgaagaaaggtgtctaaattgggagcaaaggtggcaatgatgtggacttgactccaaaagaaattttaaaaagaaaagaagtgcctttgcatttcaggg

SEQ ID NO: 22969 - DNA, 120 bp, synthetic construct
  source 1..120: mol_type = other DNA
ttggccatatgatgcttcagggtcttctgagacttcaagaatgtgctcacagggaaggtattagctctaaacacttgcctctgctagtttacatcacagaacagacagacaagactgttt

SEQ ID NO: 22970 - DNA, 120 bp, synthetic construct
  source 1..120: mol_type = other DNA
caagcagcaacttctctcattcctcctctctatgacaagacaggaactgggacactcaccttactaccctaattcgctgagcctcggaagaaaagcagcttagatttttaatcccatcca

SEQ ID NO: 22971 - DNA, 120 bp, synthetic construct
  source 1..120: mol_type = other DNA
cctgcagatcaacaaattccagtattttgggggaatatctgtgataacttggctactgctttactgacctcaggtaaatagacagaccaatgtgcttgaggagccaattgctttaaatct

SEQ ID NO: 22972 - DNA, 120 bp, synthetic construct
  source 1..120: mol_type = other DNA
ttcttttgtcttcaagcactggtatcctttacttatctctcctcacctgatctagtgtttacatctcatttgcgcccatagagaagtcatacactgatgtggattttagatagggcacgc

SEQ ID NO: 22973 - DNA, 120 bp, synthetic construct
  source 1..120: mol_type = other DNA
gtttgacccactcaagttttaaaaagtaaattagttgccaatgtgcaaacattagaagagttcacagcttctccaacaatacctagaagttcatccgatggtgcccgcattccctgctct

SEQ ID NO: 22974 - DNA, 120 bp, synthetic construct
  source 1..120: mol_type = other DNA
ctgttctgacacgctgtgtgttgatggcagagtttaattatccacatgcaatcttactttccttattcccaagtccgtggggctgcctcatcaaagcattgtaagaactgataaccatct

SEQ ID NO: 22975 - DNA, 120 bp, synthetic construct
  source 1..120: mol_type = other DNA
caagtctgtccatttgaggatggcccaagatgcacacgggctgcttttatcttatgcgcaggttttaaaaaaatatgtttcatttaaatattccatactcttcaggaatgcccaggcagc

SEQ ID NO: 22976 - DNA, 120 bp, synthetic construct
  source 1..120: mol_type = other DNA
tgtgcttgtgacaagtatggaaatgtcatgcctttaggttcagtcctataaggtaggtgtatcagtaagggcattgattctgcgaccttaacagagatcagaataacagtggcttaagga

SEQ ID NO: 22977 - DNA, 120 bp, synthetic construct
  source 1..120: mol_type = other DNA
gaaagggcgtcaccgctgtggtgttagacaggatcatcctgggcattaaggttccactgctgcagctcaaacttcccaggcacacctcttaaaggaaaaatgcaaccccaaatcaaaaag

SEQ ID NO: 22978 - DNA, 120 bp, synthetic construct
  source 1..120: mol_type = other DNA
ctactctctggctatgcagaaagtgacattttccctatcgtttaatcttgatatcactgtccctgtatactcagagtgggcctgggaattggaaaaattgtctccaagtagctgtaagat

SEQ ID NO: 22979 - DNA, 120 bp, synthetic construct
  source 1..120: mol_type = other DNA
catcatcttgtgtaggacaaataacctcagaaacctagctcctctccagcttagacccagagctatttcttcattgaattggtttaattgtaaaacataccctgaacccagcaccagctg

SEQ ID NO: 22980 - DNA, 120 bp, synthetic construct
  source 1..120: mol_type = other DNA
tgaatgtttatcgaatagatgccaccagaacttaataccttttgaccagtggggcttgactctttataacctgcttactccaatgaacagatgccaatgagctgtctccgaagctctaac

SEQ ID NO: 22981 - DNA, 120 bp, synthetic construct
  source 1..120: mol_type = other DNA
gagaaggcttgttacttagatccagatggactttcttatgtccaaagaagcaaccaaaaacatctgctttgaaaacctcccaagcccaaaccatcctcagccttgttctttagaatgctt

SEQ ID NO: 22982 - DNA, 120 bp, synthetic construct
  source 1..120: mol_type = other DNA
tttaaaacttcacatgtaatttattgcattgcttttgctaaatgtcctccacacccccaatgcctgctaggctgggtcgccatggtatttttgtgtaacgagtctcaaaatgagtttggc

SEQ ID NO: 22983 - DNA, 120 bp, synthetic construct
  source 1..120: mol_type = other DNA
cgtttctgcttctgcctgggtgtgagatgtgaatgctgcccctactgaagggtagtgcaattttttttttttcttaaaagcttagacccagagctgctaatctactggaaatcactcagg

SEQ ID NO: 22984 - DNA, 120 bp, synthetic construct
  source 1..120: mol_type = other DNA
aatcctagataaactagagggctccttaacttacttccctaggttgactctgggtttttttatcacgctcgacaggactccttatgcatttcttcgaaagagcatccagtcttaacatca

SEQ ID NO: 22985 - DNA, 120 bp, synthetic construct
  source 1..120: mol_type = other DNA
aataaagttttcttaactgtgatgttgattgttcaacgtttgtctttcccaccaaaatgtaagctattgcgggcagggatctttgcatgggttgttcttcattgcatcccaggccactag

SEQ ID NO: 22986 - DNA, 120 bp, synthetic construct
  source 1..120: mol_type = other DNA
acttaataatggaggaatgttttcgttgttctgtgttggtgagatgctttcctatgcgtttgttgtataagtaagtgagaatggcagaaggaaaggaggggagaggctgatcatcctatc

SEQ ID NO: 22987 - DNA, 120 bp, synthetic construct
  source 1..120: mol_type = other DNA
agagagcaaaccatgcaatgatgcaggtgacttcccagcaaatttcatagcgttgctcaccagcttggcaggcaagaggagaaggggcagtccccaaaagacaatcccatgaaccttcta

SEQ ID NO: 22988 - DNA, 120 bp, synthetic construct
  source 1..120: mol_type = other DNA
actttatctgaaaattccctggattcttctcctcaaggtcatgctgtacatatgcaggatcctcctgcctacatctccaaatggataatggattgaagcaaaatgtttgtcccaccaaac

SEQ ID NO: 22989 - DNA, 120 bp, synthetic construct
  source 1..120: mol_type = other DNA
tgggtttatcttcattttccatgagctcccacctcactgcatgtgacatcaaagccaaagctccagccacttctcatcctttcttaggaaaatctcaagtcttaacttgaaagttgaatg

SEQ ID NO: 22990 - DNA, 120 bp, synthetic construct
  source 1..120: mol_type = other DNA
taacacattcatgtcttctgagagccatttgttgctccccagtctcttctgtcctccttctttgaccaacatttccctgtctgatttgcttggtcacaggtagcctgtgtcagtttcctc

SEQ ID NO: 22991 - DNA, 120 bp, synthetic construct
  source 1..120: mol_type = other DNA
agttatgcccccaagtcctatcaaccttgtctattttagtgaaatttaatattgtttagaaaacactaagcaaacatagttattcagagagcataactgagccctctggttattctctgt

SEQ ID NO: 22992 - DNA, 120 bp, synthetic construct
  source 1..120: mol_type = other DNA
ttttactagatatggtgtgattcccaattttgtacattttgcctatgagcaaatagtattgatagcaaaagcaaacatattttgctgactaaagacctctttatgctcattgggatttta

SEQ ID NO: 22993 - DNA, 120 bp, synthetic construct
  source 1..120: mol_type = other DNA
gaccgattaagcaaggcaagcatttccttctttccccactccaaacaaaataaagcaggttttcattttattttatttttaaattacaaagtctcattacatagatataggaggaatttg

SEQ ID NO: 22994 - DNA, 120 bp, synthetic construct
  source 1..120: mol_type = other DNA
tctattgatcctttttctattttatgtaatataagcaatttctcccaggttgtcttgcttttcactatataaaagcatttaatcctcatgtaatcaaatgtatctgtacttttctttgtg

SEQ ID NO: 22995 - DNA, 120 bp, synthetic construct
  source 1..120: mol_type = other DNA
gttcgtttgcaacctcatatgtgactcatctgttcactaggtgtctagttcgaggagatgacaagagcatcatttactccctatgctcattcctgaaacaccttattttattgcagtgga

SEQ ID NO: 22996 - DNA, 120 bp, synthetic construct
  source 1..120: mol_type = other DNA
ggaaggactgcatcttgtggtttgagtgacagctcagccatagcacaataaaacactaggtagacttttacagtttttgatctaggccctgattcccagacagcacctgtggatccacct

SEQ ID NO: 22997 - DNA, 120 bp, synthetic construct
  source 1..120: mol_type = other DNA
tctttttctttcctttcctataatattattgttatttttttcttctttccctttcccttctccctagagggtgtgactgtagagcatgctgggtagggtcttttggctttgcttctgcag

SEQ ID NO: 22998 - DNA, 120 bp, synthetic construct
  source 1..120: mol_type = other DNA
ttgattgccagcccttagatgttcttcactttttcttttccatcaccaatttgggggacttcatccctttcccatctctcctgttctcattgctcctctggtctcaacccaggcggactt

SEQ ID NO: 22999 - DNA, 120 bp, synthetic construct
  source 1..120: mol_type = other DNA
acagcatatgagatgaacaaagataatacactagtttattaaaatatttgttttaattctctacctttagttttgtgaacatttaaattaaaatcaatgtagagttgagaggaaagcaat

SEQ ID NO: 23000 - DNA, 120 bp, synthetic construct
  source 1..120: mol_type = other DNA
ctggtggggtaaagtccccagaaaggatctcatcgtcatgctcagggacactgacatgaacaagagggacaaggaaaagaggtaaccgggcctgggatgggaggaggcaggacatggggg

SEQ ID NO: 23001 - DNA, 120 bp, synthetic construct
  source 1..120: mol_type = other DNA
aagcttttcctccctcctttcaaacaaaagcatttctgaaggtgacaaatagtaaaagataacccttaactgcccttttgaaaatttataaggcttgggtaaagactgttttagctgttt

SEQ ID NO: 23002 - DNA, 120 bp, synthetic construct
  source 1..120: mol_type = other DNA
tcagtgcgtagcacatgcttattggcagcattaactgaaactcctgtgactactattcttaccattattattaatattactgctttcagcatgcagagagctcttatttttcttaccccc

SEQ ID NO: 23003 - DNA, 120 bp, synthetic construct
  source 1..120: mol_type = other DNA
atatcctaggatcccacttgtccctctttcagctgtgctgttggcagtgttttattcatgtctcctttcatggttggctaatcctcagcagctccaaacatcttgttctcacaacacaac

SEQ ID NO: 23004 - DNA, 120 bp, synthetic construct
  source 1..120: mol_type = other DNA
cttacagaagcagaacaaaggcagttaatcatatagtgacagttttgcaaccactgcatagcttgtgaccttgcagctgcattgaaggaaaacaagaatttgcaaaatatatgcatttgt

SEQ ID NO: 23005 - DNA, 120 bp, synthetic construct
  source 1..120: mol_type = other DNA
tgttcttttattttaacaacaccctaacatgataaagtaacatcaattattggattatattattaagcaaaagaactatgaacaatgtaacactgaaggtccctgagctggattcatggt

SEQ ID NO: 23006 - DNA, 120 bp, synthetic construct
  source 1..120: mol_type = other DNA
cgtaccttgttagcaacaagattgctagttattaaatttttgttgtcagtgcctgagtgccgaaatattggaccttcaatctgaatattgccaagggattgtacatggggatctatattt

SEQ ID NO: 23007 - DNA, 120 bp, synthetic construct
  source 1..120: mol_type = other DNA
aaatatgtaattgttatataaaatttgaaaactacacctgttatgtaaaatttgaaactatttgtctactacttttccatgactgtggaagaaaattacaacattctcagccatgactcc

SEQ ID NO: 23008 - DNA, 120 bp, synthetic construct
  source 1..120: mol_type = other DNA
tgtttgacgtggttcattctaacagttttgcccagtaattacatgcatttttaaaattgttttggctttttataataagctacattctttatattaatttttttatttagagagaaaagc

SEQ ID NO: 23009 - DNA, 120 bp, synthetic construct
  source 1..120: mol_type = other DNA
ttcagccactggaaaatacgaggcaattggcgactggagtggacccccagcataccacggcagccccacagaaaagtggccagactgttatgtgggtgcccatttccatatctcctcgat

SEQ ID NO: 23010 - DNA, 120 bp, synthetic construct
  source 1..120: mol_type = other DNA
ctgtccaaacgtcagcaacctcaaagattgaagatggataagcccataaagatgagaaaaagactctgtgcaagaacactaaaaactcaaaaattcagcatgccttcttttctccaaatg

SEQ ID NO: 23011 - DNA, 120 bp, synthetic construct
  source 1..120: mol_type = other DNA
gctgaggttagggagcttctcccccgcagataatccctgatctcccaaaatttggttgacatctaaggttgattgccatacaactccttttctgaagttttacttatttccaacaaggca

SEQ ID NO: 23012 - DNA, 120 bp, synthetic construct
  source 1..120: mol_type = other DNA
actcaggcttctgtgaccctggccagacttagaatttggtcccaggcatgacacgctcactcagagcagcgtgtcagtacctggggcctgtgcatgccaggcaaagccaagctggctaaa

SEQ ID NO: 23013 - DNA, 120 bp, synthetic construct
  source 1..120: mol_type = other DNA
gtaaggagggaagaagggaggtcccaaggccaaataaattcaggaaatgatgatttaagttaaaatagatcacgacattccctttctatgtgtatacactctggaaggcggttggaggat

SEQ ID NO: 23014 - DNA, 120 bp, synthetic construct
  source 1..120: mol_type = other DNA
ctcggaggatcaccacattccctttctatgtgtgtacactctggaaggcactcagaggatcaccacattccctttctatgtgtgtacactctggaaggtgttcagaggttcaccacattc

SEQ ID NO: 23015 - DNA, 120 bp, synthetic construct
  source 1..120: mol_type = other DNA
ttggccaacccagggacttatgagatgtagtaaaactgcagaaagctgcttttctgaggtttaggtatttcaggtgaggtgcagttggcagcagatgagttaaattctgtgataattttg

SEQ ID NO: 23016 - DNA, 120 bp, synthetic construct
  source 1..120: mol_type = other DNA
gtactgcctctgagctatgcctggaaattggaatgcaaagtctagttgccgcttatattccatctcttgacattcttaaagctggaaattggagcctggaatactgtggaacaacttaaa

SEQ ID NO: 23017 - DNA, 120 bp, synthetic construct
  source 1..120: mol_type = other DNA
attacccgccgccccctttttttttctttgtagttgatctatacagcttaaagtgtatgcatgtttctcagtgagtgtaatacttcccaaaaaggggcttaggtgagctatgaagtggga

SEQ ID NO: 23018 - DNA, 120 bp, synthetic construct
  source 1..120: mol_type = other DNA
gcgtatcagttcaccagcaccattcgttccctactgagataataaatgatgggaaagtattttttggttcatttcatgctgcttccctagatctgcttactgcaaaggcaaacttacctg

SEQ ID NO: 23019 - DNA, 120 bp, synthetic construct
  source 1..120: mol_type = other DNA
acctaaggccacttaagagacactggagtcagaatctctggagaaaggatctgatacagtgctatcttaaagagatcttcagataattctgaggttaagcagcatggctctaggctgtat

SEQ ID NO: 23020 - DNA, 120 bp, synthetic construct
  source 1..120: mol_type = other DNA
accaaattatagatcctttctgctcagaaagaaaaagcaaactaccctgacttcatgagtttggccccactttatatcattgccaagagcatttaaacctctgccaatagttagctctat

SEQ ID NO: 23021 - DNA, 120 bp, synthetic construct
  source 1..120: mol_type = other DNA
caaatgcagaggctaaagtcataaaagtattttcctaaaaataagacataccacaatctgcttcatctgagccatcctcacagtgcagatgaccgtcacagagattcaccagtggaacac

SEQ ID NO: 23022 - DNA, 120 bp, synthetic construct
  source 1..120: mol_type = other DNA
aaatagtttccaagctgatgtgtatgtagctttagaagagtgtggatgaaacctcagacatctcttttgcagcaaaactcagggaatttctaagaggtggctgagaggttgtcaactcac

SEQ ID NO: 23023 - DNA, 120 bp, synthetic construct
  source 1..120: mol_type = other DNA
gagtatttttctaaaaaatatattgaatagagtatttgagggggggtgtttttatgggggtaaggggagggtggtgctatccagcaaaccaagtgtgggatgccctaagagaatcaattc

SEQ ID NO: 23024 - DNA, 120 bp, synthetic construct
  source 1..120: mol_type = other DNA
tattgtctatagtgcaatattccagggctggtggaacaatgctctgaagagctcacaagtctgtttcacaacagagctggcatttggccagaagctggtgtttgccaaatgaaaactaca

SEQ ID NO: 23025 - DNA, 120 bp, synthetic construct
  source 1..120: mol_type = other DNA
ttttcttctttttttagctcctcaattagaaatcggaccttgccactggattttacaatctaacaatgtctagagagagttcctgaagtcagggtgtgcttgaacggtgcaaagaatgcg

SEQ ID NO: 23026 - DNA, 120 bp, synthetic construct
  source 1..120: mol_type = other DNA
attatacgtttttggtaaacatcacgtgggtttttcactgggaaacaaagaggtaaggcaaccacaggctttcccttctgcacgtgaattgaatacatgctcagcagccaatcaaaaaca

SEQ ID NO: 23027 - DNA, 120 bp, synthetic construct
  source 1..120: mol_type = other DNA
ggcgaaatacaatgaaaagaatttagctagtcgaatatctctttcagataggcacatctgagaatttagttttatgaagttgaatgtactacacatatatatggaatttagttttacaaa

SEQ ID NO: 23028 - DNA, 120 bp, synthetic construct
  source 1..120: mol_type = other DNA
acatgtctgcatatgatagaaatactatgtaactccgtattactgtgcattttttgaataccacattcagtaatgtcacattagtggctggtgtgccatttttgtgtgagaactatcatg

SEQ ID NO: 23029 - DNA, 120 bp, synthetic construct
  source 1..120: mol_type = other DNA
ccactatatatatacacacacgtatatatattccactttatatacacacatgcacacgcacacacgtgtgtgtgtgttcatagtgggatatatatatgtgtgtgtatatatatacacata

SEQ ID NO: 23030 - DNA, 120 bp, synthetic construct
  source 1..120: mol_type = other DNA
cacatattctcacttataagtgggagctaagcaacggatacacatggatatataggtggacattggggacttcaaaatggggaaaaaggagagggggaaatgtgttgaataatgacctac

SEQ ID NO: 23031 - DNA, 120 bp, synthetic construct
  source 1..120: mol_type = other DNA
tgtttctggggactcagccaaaaattatttgcgaaattggatgtctagaagggtatttcttaggttttcttttaggatttttatagtttggggtctttttttttttctattttttttttt

SEQ ID NO: 23032 - DNA, 120 bp, synthetic construct
  source 1..120: mol_type = other DNA
ttaaaccatcttgagttaatttttgtatctgatgaaaggtaagggtccagtttcaatcttctgcgtatgaccagccagttatcccagcactatttaatgaatagggagttctttccccag

SEQ ID NO: 23033 - DNA, 120 bp, synthetic construct
  source 1..120: mol_type = other DNA
cccagtagctgggactatagacatgcgccacaatgcccaattaactttttaattactatttagagaagtggtttcagtgtgttgccagggttgaacttcaaatcctggcttcaagaaatc

SEQ ID NO: 23034 - DNA, 120 bp, synthetic construct
  source 1..120: mol_type = other DNA
gagggctaaaaatttgtcttcaatgttgatgttttcattgattccatgtggtatagcttttttttcttttcagtctggcaggtataaatgctatctgttggctagatttttacaattcta

SEQ ID NO: 23035 - DNA, 120 bp, synthetic construct
  source 1..120: mol_type = other DNA
aaggtagatcccagttttcagcctttgggaaccggggagtataaaatacattattactgggcttcatttaggctcacatgaaatctcaacattccagtaggtttatgattgcctgccata

SEQ ID NO: 23036 - DNA, 120 bp, synthetic construct
  source 1..120: mol_type = other DNA
aatggttacacagctagttagtgttagatttgaagaatgggttagtctcactgtcttggctccagagcctccttctcctaatcactttgtgatctggcccttcaaggagaatctaaaata

SEQ ID NO: 23037 - DNA, 120 bp, synthetic construct
  source 1..120: mol_type = other DNA
aaagtccctagatttcagcaccacagactatgaagatacatattgatttcaggtgtctcacattcctatgaccactggaatctagtagacaacattctctgctctgggacaacatctctt

SEQ ID NO: 23038 - DNA, 120 bp, synthetic construct
  source 1..120: mol_type = other DNA
aggaagcctctgaaagcttcataaagaagggagataggatgtaaattcaaatgaggacatttcagtggcaataagtatgattcatagtcctccaatgctttccgaacagtgcctgtgtct

SEQ ID NO: 23039 - DNA, 120 bp, synthetic construct
  source 1..120: mol_type = other DNA
ataaagtcaatcctgagtagaattataactctacctcccatgtatatcccatttttattggaagtgaaacaacagcccaattctctctctgggtttgtgccctgcccttgctagactgac

SEQ ID NO: 23040 - DNA, 120 bp, synthetic construct
  source 1..120: mol_type = other DNA
actttattgcatctactgaaagagcaacgtgtatagggaagtaaaacaatagttagtccccatttgtattgacattgtggatcccatcaactatagccagcagtggtctctgctcccaga

SEQ ID NO: 23041 - DNA, 120 bp, synthetic construct
  source 1..120: mol_type = other DNA
aacacagatggctttgtacttctttgacttctatttcctaagagattttaacatccactagggttagctggtctgtgtgtgctcatcatccattccacatggcctagcaaaatggcttgt

SEQ ID NO: 23042 - DNA, 120 bp, synthetic construct
  source 1..120: mol_type = other DNA
aaaatgtagtccattataaaaagtggggtggtggatatcaaaactgagtttgccgtattatgggaattacttctcatagtgcacatacaagagccgcaacgcattgcacggtagcggata

SEQ ID NO: 23043 - DNA, 120 bp, synthetic construct
  source 1..120: mol_type = other DNA
ccatgcatcagtagcttaggatccttagcactgaataatccaaccctccaaataactcttacaaatgaatcctacagtatttctcattcagcaatatcctgttactggggcaacctgtgc

SEQ ID NO: 23044 - DNA, 120 bp, synthetic construct
  source 1..120: mol_type = other DNA
gcctgagctcatcaggtaaggctatgaatgtttcaacatcactagctaagtggaagacggcatgtgcataatttattacatgattgaatgacaagttttcactaactacaaatcatgtat

SEQ ID NO: 23045 - DNA, 120 bp, synthetic construct
  source 1..120: mol_type = other DNA
tgcaatagggaaattatcacatttttattgctgtgttcccaaagtactgcatcatctttcaagatggtttaaaaaaagtctgcatagtcccagctacttgggatgttgaggcatgaggat

SEQ ID NO: 23046 - DNA, 120 bp, synthetic construct
  source 1..120: mol_type = other DNA
ctgtgaagatgcgaggaggtggaacaatgaatttatagcggcatgccatcctgcaatggcaatttcaacagttcgtcactgcacgctgcctcttaaagggagagcttcccccaccactcc

SEQ ID NO: 23047 - DNA, 120 bp, synthetic construct
  source 1..120: mol_type = other DNA
tattatataataaaacatgtttggagacctaattgaatgagatggtcaggctgttttctagctctggattattgaaacattacaggttgtgttttgatgagcaacccccccctccccccg

SEQ ID NO: 23048 - DNA, 120 bp, synthetic construct
  source 1..120: mol_type = other DNA
aaatactaataccaacaagcaaatcaaacctacctggggtccttaacgatatggcttgactgttagctatgatttctggacttgcccagtagtctagacagtccctgattcttctccttt

SEQ ID NO: 23049 - DNA, 120 bp, synthetic construct
  source 1..120: mol_type = other DNA
tttggtgaatttccttctattcttttcctacacatacctgaattttctctgaaatagttaagatgactctatccggctttctttctttctttcccttcctccctccctccctccctccct

SEQ ID NO: 23050 - DNA, 120 bp, synthetic construct
  source 1..120: mol_type = other DNA
ccttcctcagtgtgttggcattttttttccttaggcttgttatctcatgcagctgttccagaaatcatatctatgttcacagcaggagaaggggaatgtggaagaaatttccagtatgct

SEQ ID NO: 23051 - DNA, 120 bp, synthetic construct
  source 1..120: mol_type = other DNA
caaaaatgaggaatataaacccagtctcaggaaacacatttaggcgaaaagagagacacaagcaagtaagaatcgcatgatctaatgagggcccatatggaagtcaaatttgcagggttg

SEQ ID NO: 23052 - DNA, 120 bp, synthetic construct
  source 1..120: mol_type = other DNA
gcattataaagctgcccatgggtgacaggtggatctgtagcaaaacagctctatgagaaaataaagttccctgcgcctttgaaatttcaacaggaaatgcagggccagtcatcagcccat

SEQ ID NO: 23053 - DNA, 120 bp, synthetic construct
  source 1..120: mol_type = other DNA
cagctcagctttatggctcttatttcttccacaaactcatttcaagtttcaagcagggaattcctacaacaagcacatctgccatgagaactttacagttcaaagcaatggtgaagcccc

SEQ ID NO: 23054 - DNA, 120 bp, synthetic construct
  source 1..120: mol_type = other DNA
cccacaaagaacgctacccaagtccaggggtttcagatagataataattggtccagacagagaaaaacctatgccgttaaagaagtatctcctaaaagctgggaagagactaaggttaag

SEQ ID NO: 23055 - DNA, 120 bp, synthetic construct
  source 1..120: mol_type = other DNA
ttattctcttgtctccgtcttcactttgctttcttctctgcttgtccatctgatcccctccgtcttttaaagacatttttgatggcatttaggactcacccagttaatccaggacagcct

SEQ ID NO: 23056 - DNA, 120 bp, synthetic construct
  source 1..120: mol_type = other DNA
gtgactccatgtctttcctctttgggatggcaggtgataccacaacttttcctccagggagtatttttttttgtgtaccagactaaatatcaggatggccatttggcttttgacttaact

SEQ ID NO: 23057 - DNA, 120 bp, synthetic construct
  source 1..120: mol_type = other DNA
tatatctcacactcgtgacttttttttttcttttttaaaagagattgggtcttgctaggttgccaaggctggagtgcaatggtgcaatggctattcataggcgcaatcccactactgatc

SEQ ID NO: 23058 - DNA, 120 bp, synthetic construct
  source 1..120: mol_type = other DNA
agcacctgaatgtcatgaggctctctgtgcaagaccatgaaatatagatactacatctttttaacaattaaacgtgctctttcttctgccagtaaggttcctgtccctgtcccatcctac

SEQ ID NO: 23059 - DNA, 120 bp, synthetic construct
  source 1..120: mol_type = other DNA
ccgtgggactttaatgacagcaagcactgtccaacagggtccaatgaggaagatggtaaaaatcaggaaacttgctgggatgatgtgaggcatgtcaactttctgattttctttaatgaa

SEQ ID NO: 23060 - DNA, 120 bp, synthetic construct
  source 1..120: mol_type = other DNA
taaacctcactgaggaagtgacctttatagtgagacaggaaggctagccaaataaacggtggagataaaaatgtttcaggcgacatacgtatatactgtgatccagcaattccattccta

SEQ ID NO: 23061 - DNA, 120 bp, synthetic construct
  source 1..120: mol_type = other DNA
cacttaaaactattccatgatgtaagaggtctgaatagtgattatctttgcagatcataataaagataactgggaaggagcatgaggggattattctctggaaagctctctggtatgcta

SEQ ID NO: 23062 - DNA, 120 bp, synthetic construct
  source 1..120: mol_type = other DNA
atgtcatagctgctcatacaggagtttctccttacaaattgcaatgttggcttctcttccccctccggcccagagtgattacagccatcaatgttgtgagctacaggttctataccctcc

SEQ ID NO: 23063 - DNA, 120 bp, synthetic construct
  source 1..120: mol_type = other DNA
tatacagggccagagaagaaccactttagactttgtgggccacatatggtctctgtgacatattcctgtctgtttttgttttttgcacagtgtcttttgaaccaccagagtttgagattg

SEQ ID NO: 23064 - DNA, 120 bp, synthetic construct
  source 1..120: mol_type = other DNA
agtgtgtattcttgagggacattcatctgatttcttgtaatgtctttggtttgggtatagggtaatgctggcttcacagaacaaattgagatgtgtcttccttttttctcggtgaatttg

SEQ ID NO: 23065 - DNA, 120 bp, synthetic construct
  source 1..120: mol_type = other DNA
tcttttttgaaagacagacaaatttgggggcactcagaagaattacaattatttacctcctgtgagataaagggctgtctaacaggctgatgtgtggccaggacaaaacagagcagaaac

SEQ ID NO: 23066 - DNA, 120 bp, synthetic construct
  source 1..120: mol_type = other DNA
aattaataccaacttccagaagtttctcccttcatgcctaagcttctgctcctggaacagtcagacaaacattgaaaggatgctcagatgacagcttttctggcaggcataggtattaca

SEQ ID NO: 23067 - DNA, 120 bp, synthetic construct
  source 1..120: mol_type = other DNA
agggagccccccctgtcactgatggaggtgtgttcttccccttgggagaatagggccaaaaaaattaaatcccatgggtgcatagattttatgccttctatagtcacatttttaatcttt

SEQ ID NO: 23068 - DNA, 120 bp, synthetic construct
  source 1..120: mol_type = other DNA
cttatgtgagccctataccagggaaaagatccccatgtcttccataggattgcaagcctaagaatgtcatttcagtgctccaggtgtacctacctcctggtagctgtttgcagaggacaa

SEQ ID NO: 23069 - DNA, 120 bp, synthetic construct
  source 1..120: mol_type = other DNA
tatcagtggtcagagcagaagtagcaggtggaaccatgtgaaatccctaacattcaaccgtttagacctgcaaaaatggctctttccttcgatttaccctgatgatgacaagaaaaggag

SEQ ID NO: 23070 - DNA, 120 bp, synthetic construct
  source 1..120: mol_type = other DNA
acctctcccactgcaagacaggagcaagagctacacttaccctggggctgcaacaggatgattatttgcttaccaggacagtgaaaatcctgagggaatttttttttattatactttaag

SEQ ID NO: 23071 - DNA, 120 bp, synthetic construct
  source 1..120: mol_type = other DNA
aatggcagtactaaaagagctgtaagacaaaccagggctgaaacatgtccccgtactcactacattgcaggcaacaagaaggagagaagaactgtggccctttaagaagccaagatctag

SEQ ID NO: 23072 - DNA, 120 bp, synthetic construct
  source 1..120: mol_type = other DNA
gtaaccattaccactgtctaattccagaaaacttttatcaccccaaaaaagaaaccccatatttattaatcagtcactccctatctgcccaggacatatggtcttaaggtgctttaatga

SEQ ID NO: 23073 - DNA, 120 bp, synthetic construct
  source 1..120: mol_type = other DNA
gtggggcgtttctgcagcatcctcttcttgaggcccttctgtctgccatcacttccagggcctctcttgtgcaactggtttgtttttatgttttatattgaattgtacagttcattatat

SEQ ID NO: 23074 - DNA, 120 bp, synthetic construct
  source 1..120: mol_type = other DNA
aaaagagtcttcagacaggaactctctccactttgtaacattgaatacatgatcctgcctatgtgtgcactgtccacttctcctctaccccttttttgttagaagcagtgtgtttctttc

SEQ ID NO: 23075 - DNA, 120 bp, synthetic construct
  source 1..120: mol_type = other DNA
atcattttcacttccttcccaacgcttctacttttgccattctttgtaaaaatggccctaaatttacccatttgctcaagttgtaaatttgggggcactcctctctccctctttccccac

SEQ ID NO: 23076 - DNA, 120 bp, synthetic construct
  source 1..120: mol_type = other DNA
gggggaggggtggatctcacagaggagagaactggagaagaggatttccagattctgtgtatgaattgatataatcgtgagctttgcatgcacaggacggaaaacaataagaaaagatga

SEQ ID NO: 23077 - DNA, 120 bp, synthetic construct
  source 1..120: mol_type = other DNA
accaggtcttatgtgggtttttatataggctgtgcacttgtgtgtgtgtgtatgtatttgagaaggtaggacataggaaggtagaatggacaaggggaatgatgtgaaaattctttgcaa

SEQ ID NO: 23078 - DNA, 120 bp, synthetic construct
  source 1..120: mol_type = other DNA
ctttgtaggagggcaatttggcaatatctttaaaagcaaaatatgcatatcctcttttatcccatcaatctcacttctaagaatctatcctggccgggtgcagtgggtcacgcctgtaat

SEQ ID NO: 23079 - DNA, 120 bp, synthetic construct
  source 1..120: mol_type = other DNA
agccagagaagttaatttggaaaaagaagcttactaagtaattaatataacaaacaaggttataagtgggtgggtgtgccactgtggagcaagggcatgattgactgaagcagcagcacc

SEQ ID NO: 23080 - DNA, 120 bp, synthetic construct
  source 1..120: mol_type = other DNA
gactccttgtcttctaaagtatgggaaatgtttagtggagttataatgctaggtttcttacagtagcctgccttttggaaggagtggtagaaaagttaagactctatgtgtgcaccatag

SEQ ID NO: 23081 - DNA, 120 bp, synthetic construct
  source 1..120: mol_type = other DNA
attcatttattttacagagattgggctctggtttgagggaacacaaagcttaactcccacaatttaaagctcagactagcatcagtaaccagagggtacgtctccagtggtttttgcttc

SEQ ID NO: 23082 - DNA, 120 bp, synthetic construct
  source 1..120: mol_type = other DNA
agaaatttgtgagaggttgtgaccttgcctgttgggtacagggaggtagaaacatgggacccatggcttttccctaaaagggatcacaggattaagttacttgtcacaggttgatgaaga

SEQ ID NO: 23083 - DNA, 120 bp, synthetic construct
  source 1..120: mol_type = other DNA
tgcaaataaaagaaataataccacagatgaccattcattccatgtcagaaacaaatgcctggatattcctttatgataaacctggagagcaggaaccacccattgaagacagtgtgggcc

SEQ ID NO: 23084 - DNA, 120 bp, synthetic construct
  source 1..120: mol_type = other DNA
actgattccagcccggagtgagcactccctcacagtgtgatgattccagcctggagtgtgctctccctcacagtgtgatgattccagcccagagtgagcactctctcacagtgtgatgat

SEQ ID NO: 23085 - DNA, 120 bp, synthetic construct
  source 1..120: mol_type = other DNA
aggctaagggatggggagatgttggtcaaagaacacaaagtttcagtcagacagcagaagttctggatgcttaccatacggtatggtgactgtggttaattattatgcattgtatacttg

SEQ ID NO: 23086 - DNA, 120 bp, synthetic construct
  source 1..120: mol_type = other DNA
ttattatagcctgtcactgcattagtacattagactatctccttaattctcacaaggaccctgtgaaatggtactgtcttctctactttgaggatggggaaactgaggcacagagaggtt

SEQ ID NO: 23087 - DNA, 120 bp, synthetic construct
  source 1..120: mol_type = other DNA
ttaataaatccttcattttacatttctttacaaataatcctcagtaatactgaggtacattgtatcaagggtacattttcccttacacaatcaaatgctcaaaagaccatacataaaaat

SEQ ID NO: 23088 - DNA, 120 bp, synthetic construct
  source 1..120: mol_type = other DNA
acactacatgttcaaatctgtaatctttcacagcacagtaacaaagttattaggaaaacaggactaccacaaagatgttacagagtgcacacaattctggcagagagagccatgatcaaa

SEQ ID NO: 23089 - DNA, 120 bp, synthetic construct
  source 1..120: mol_type = other DNA
tgtgcctgggcttctcttgcatgctgcagacctcctattgttttctaatgccacgccgaagaaatgctcatctatatttgtttttgttagatcagccaaagacatagcaaacaacctaat

SEQ ID NO: 23090 - DNA, 120 bp, synthetic construct
  source 1..120: mol_type = other DNA
agaacaggtcatactccatggagtttgtaggtgaggtgccacctctcttcttttaggtcacctgactttgcctagcatgaaagataagttgtaacatgttccagaattgtgattctgttt

SEQ ID NO: 23091 - DNA, 120 bp, synthetic construct
  source 1..120: mol_type = other DNA
cttctgctcagcctggcctgggggctttgggatggcagcattctagagggtccccaggctcctttctttttttttttttcctttaacttataagattatttatttagctatcagaaatac

SEQ ID NO: 23092 - DNA, 120 bp, synthetic construct
  source 1..120: mol_type = other DNA
ctataatttctattaattgaaatattttaaccaatttaaccagttggttttgttgtcacaagcatgatatattcattcatacagtaaggtttatgaagcatctactaatgtgccagacac

SEQ ID NO: 23093 - DNA, 120 bp, synthetic construct
  source 1..120: mol_type = other DNA
ctcacattcacaccaacgcccttgattttcaaactgacattcttctttttaactgcaaatgaaacaataaaagagaggaccagaacactctggaaggtccagctgtccctctcattatgc

SEQ ID NO: 23094 - DNA, 120 bp, synthetic construct
  source 1..120: mol_type = other DNA
atttgggccacaccagacattatcactgtgaagtattgctgttttctgctcattctcttctaaaagccatattgagcagcagggaatacttaagttgccaaatatctgtccctcagatca

SEQ ID NO: 23095 - DNA, 120 bp, synthetic construct
  source 1..120: mol_type = other DNA
aatataagagagtggacttggtatgaagaagtgctgttagaggctaaagaccagaatgagtgaaggtgactgaaagttctggaggtgaattacatgaaaggtttaacaatggagaggtag

SEQ ID NO: 23096 - DNA, 120 bp, synthetic construct
  source 1..120: mol_type = other DNA
gagaaaccgtggacggggggggttaccagagaaaccgtggacaggagaggcaacaagagaacctgcggacaggagatggcccccacaggaacagactctgaagggcaggctgccttccaa

SEQ ID NO: 23097 - DNA, 120 bp, synthetic construct
  source 1..120: mol_type = other DNA
tatggaatcaacctgagtcctcatcaatccatgaatggataaagaaaatgtggttcatacacaacttacccatgtaaaaaacctgtacgtgtaccctctgagcctaaaataacagttgga

SEQ ID NO: 23098 - DNA, 120 bp, synthetic construct
  source 1..120: mol_type = other DNA
tgcttaaaagcatcgcatattcccatggccctttggtataatccagactcttgggatattttaaaggatttttatgacttgagcccttggtctccagttgcattctgtgacattctcctc

SEQ ID NO: 23099 - DNA, 120 bp, synthetic construct
  source 1..120: mol_type = other DNA
gatggtggctttcagtggctctggaggttttagtaagagagagagaaaaaagataaaaacatcactagatagcatttcgacaacaggctggactttcaacaaagcaagtgcatcacgcaa

SEQ ID NO: 23100 - DNA, 120 bp, synthetic construct
  source 1..120: mol_type = other DNA
aagcttttctcagctgcgcctgccgtcgccaattgatggccacactgtgtcatgaaactcagctttcttcaaagccgtttcaataacagtttctgaaatattagaggaacataagaatta

SEQ ID NO: 23101 - DNA, 120 bp, synthetic construct
  source 1..120: mol_type = other DNA
tgccagtatatttcaagtgtgagacttgcatacttttcaatccctcttgcaacgtcaaagattatcctatggaaaaactcagaagtgcacactttgacgttcacccccaaatgcacggat

SEQ ID NO: 23102 - DNA, 120 bp, synthetic construct
  source 1..120: mol_type = other DNA
ttgggtgtgaatatagccaaaccatatcaccttctggaccccttcccaatgctctgtgcctcagtccaaatcagggaggatcaatgtcctcaacaatttacagtatttacaaaaaagtat

SEQ ID NO: 23103 - DNA, 120 bp, synthetic construct
  source 1..120: mol_type = other DNA
ctagtcctattattaatacagttatcatcaatgttattagaatggaccacctggagctttgaggacactctcttaatggacttcaggcaagtttggggtctgcactggatgcaggctatg

SEQ ID NO: 23104 - DNA, 120 bp, synthetic construct
  source 1..120: mol_type = other DNA
ttccctttctgctgtagatgggtgttttagagacaacttccctaggattggaagaaaggtggtagaaactgacttctgtataaaccagcaagattataaaaacagctgcctggcattgtt

SEQ ID NO: 23105 - DNA, 120 bp, synthetic construct
  source 1..120: mol_type = other DNA
aaaattagtattgctgttgttgttatcatcattattattatttaaagatagagtcttgccctgtcgaccagactggaatgcagcggtgcagtcatcgctctcagtagcctcaaactcctg

SEQ ID NO: 23106 - DNA, 120 bp, synthetic construct
  source 1..120: mol_type = other DNA
tggatgggattggacttttagattgacatacatttctgagaggggaagatgcaaactgaaggaaagagatagcaccgaaatattcagagagaagatcaaccaggcagtgtagttggatac

SEQ ID NO: 23107 - DNA, 120 bp, synthetic construct
  source 1..120: mol_type = other DNA
attaccatttctacggatggtgccacctgtgacattcaggatctttgagaggtagaacccgcagtagtttaacattgccagtttagtcagttatgatcattgatacatggctcaccattt

SEQ ID NO: 23108 - DNA, 120 bp, synthetic construct
  source 1..120: mol_type = other DNA
gatgcattcacctgtctgttcctgccagggctttccagctgccttctttaataagctcctctaccaaagcagttccagatagaattgaacaatctttttaaagcataaatatcagcttcc

SEQ ID NO: 23109 - DNA, 120 bp, synthetic construct
  source 1..120: mol_type = other DNA
cagaggaattgtggaaccctgctcttgccatcaccagagcctccccacatggggaaagacagaattggatgttcaccaaatatttgtacttggggcctacccaaaggaaatatgtctgta

SEQ ID NO: 23110 - DNA, 120 bp, synthetic construct
  source 1..120: mol_type = other DNA
ctattaggccctaggctgagaagatacaagataagatgtgggtcactcagtgctcaggactcccctgtgaggcatactttgtaaggtcatattctccccattttctttttctttttactt

SEQ ID NO: 23111 - DNA, 120 bp, synthetic construct
  source 1..120: mol_type = other DNA
gtaagtgttttaagttaacataaatcctgcaatggctttgaagactccagtgtaactctcattgacactgagcacagatctatactgtgacactcgcaaaggaccctgagcaaaagcaac

SEQ ID NO: 23112 - DNA, 120 bp, synthetic construct
  source 1..120: mol_type = other DNA
caacctctcaattctgatgtctcaattttctctccacaagcacaaaaacactcgcccatacagaagggttttatgagaatggccttgtattggcattgcgcagggtgctttagtgtttta

SEQ ID NO: 23113 - DNA, 120 bp, synthetic construct
  source 1..120: mol_type = other DNA
atgagaacgacttgtgttagtgattgcgcagggtgctctagtgttttatgagaatgcctcatgttagtgattgcgcagcgtgctctagtgttttatgagaatggctgtgtgttagtgatt

SEQ ID NO: 23114 - DNA, 120 bp, synthetic construct
  source 1..120: mol_type = other DNA
ttctaaaactacaaaacctcttcaatagcccttccaacacttcctacaccaactcacaaaaggcagcttcacatcccttgagatcagagaggaaatgagacaaatggacaccgtttgcct

SEQ ID NO: 23115 - DNA, 120 bp, synthetic construct
  source 1..120: mol_type = other DNA
ccctcacagggacacacagcccctcccccctcacagggacacacacagcccctcccccctcgcagggacacacagcccctccccctcacagggacacacagcccctccccctcacaggga

SEQ ID NO: 23116 - DNA, 120 bp, synthetic construct
  source 1..120: mol_type = other DNA
ccttccttccttctttcttttgtaaacaaatcaagtgcctttccttcttcccccctttttgctgaaatctgccttacaagctcagctttccaaaggacttccaaaaacccaagcttgttg

SEQ ID NO: 23117 - DNA, 120 bp, synthetic construct
  source 1..120: mol_type = other DNA
aggtcgcattcaatcacctatggccaatgatgtaatccatcatgcctagcgaatgaatcctccataaaaaccctgaaaggatgggtttggggagcttccaaggtggtgaatacatcaagg

SEQ ID NO: 23118 - DNA, 120 bp, synthetic construct
  source 1..120: mol_type = other DNA
tggaaacaagcctaaaaacagggttagtaaaaacaaggttgggcattacaagaccaggacaacagcagaatggagcgtggactccgcaaaccagggtgtctgcctcctccagaaaccaag

SEQ ID NO: 23119 - DNA, 120 bp, synthetic construct
  source 1..120: mol_type = other DNA
agagcaatggcccttctgtactctcattggttccctagagggccactggcaggacaagcctatgccttggccatgctgctcaggtgctggtctaaggagacccttcctgtcctgatgcct

SEQ ID NO: 23120 - DNA, 120 bp, synthetic construct
  source 1..120: mol_type = other DNA
ggggagggacactcttttccctttttggaaactgaggcctgagaggcagttccattacagaaccatcctccagggtacaaaattgatctctattgggaaatgcaataggaacttgcagct

SEQ ID NO: 23121 - DNA, 120 bp, synthetic construct
  source 1..120: mol_type = other DNA
aacagaaaaaaacccacaaaacgagcctcagagcactcagcagcagggttttctttgcccagaactgaactggtcctgcatcgtggcttaaattccacctgaattggaacttctctggca

SEQ ID NO: 23122 - DNA, 120 bp, synthetic construct
  source 1..120: mol_type = other DNA
aacagaataaagaagagagggctacatgcacacccatgggtgctaatatttaaggaatgaacatttcctaatctttgcccccaaataagccaaccaatgtgaaggtgggcacaggcaggc

SEQ ID NO: 23123 - DNA, 120 bp, synthetic construct
  source 1..120: mol_type = other DNA
tcccggactgactcccacttttatgacagaaggaaagaaacttccatgtcctttaagccactgctattttgatttttttctcttgcttgctgctgagcctaatcctagttggttttcctt

SEQ ID NO: 23124 - DNA, 120 bp, synthetic construct
  source 1..120: mol_type = other DNA
tctcccaacctcgccaccgaacctgctgtgaaatgatctattttcacaatcaaattcagttcgattttgattctgagaatttcatgaggccctggagaaatactctgaggctatggtaca

SEQ ID NO: 23125 - DNA, 120 bp, synthetic construct
  source 1..120: mol_type = other DNA
ccttctcttgggcctgcacagtaacagcccacagtgtctataagatacttcaggaaaagagaccacaatgaacccttgaatagcatcttgcaggctgaatgccctgagatgggtgggctc

SEQ ID NO: 23126 - DNA, 120 bp, synthetic construct
  source 1..120: mol_type = other DNA
agttgtgaagtccctccctgcccagatgagtggggacccccccccagtcctggactctggcagcaaggctcgctggggtccctccgttcttaccaggaataaaatgcaacatgcaaagcc

SEQ ID NO: 23127 - DNA, 120 bp, synthetic construct
  source 1..120: mol_type = other DNA
tacacactacacaccacacactacacacataccacactacacacacaccacactacacaccacacacactacacaccacacacggtgcacaccacacactacacaccacactacacacta

SEQ ID NO: 23128 - DNA, 120 bp, synthetic construct
  source 1..120: mol_type = other DNA
cacacactacacacacaccacactacacagtacacaccacaccacacactacacacacatcacactacacactacccaccacacatactacacaccacgcactacacacataccacacta

SEQ ID NO: 23129 - DNA, 120 bp, synthetic construct
  source 1..120: mol_type = other DNA
ctagactaaccaacttgggctagctccagactaaccaacctaggctactagccccagactaatcaacctgtgctagctccaaactaactaacctgggctagccctagactaactagccta

SEQ ID NO: 23130 - DNA, 120 bp, synthetic construct
  source 1..120: mol_type = other DNA
ttttttctcatcgactttataacaaaattacattgcaagcaaggacgttgctggagggcctgtgcgcactgtttctcctaaagctgcagtttctaagatcccatcaaccgtattaagtga

SEQ ID NO: 23131 - DNA, 120 bp, synthetic construct
  source 1..120: mol_type = other DNA
acatgatcaacctgcttatcagatggtgtctgagatgctaaggtgctcaactttgtttaaattcaatgtcagagaatgtccacatgaaccatttcacagccaagtccacaaaacactggc

SEQ ID NO: 23132 - DNA, 120 bp, synthetic construct
  source 1..120: mol_type = other DNA
cgggagtgtcctccaatcccaaaggctctccctaataacatcccgcacactcaactgacccagcatctgattttcagagagtccaaccacacctggcctgaaaacaggatgtccacaact

SEQ ID NO: 23133 - DNA, 120 bp, synthetic construct
  source 1..120: mol_type = other DNA
ccagtctttgttcatatggttggggttggctctaccagtctttgttcatatggttggggttagctctaccagtctttattgatatggttgaggttagctctaccagtctttgtcgatatg

SEQ ID NO: 23134 - DNA, 120 bp, synthetic construct
  source 1..120: mol_type = other DNA
tttttcacaattctaaaactttatgcatttttggcatttaaaaagccctggcaagtctactgccttatttctcctgctcccttggcctgtgggtctgttcctgtatggttacccactttg

SEQ ID NO: 23135 - DNA, 120 bp, synthetic construct
  source 1..120: mol_type = other DNA
aagtgatccacccacattggcttcccaaaatgctagtattacaggcacgtgccactgtacctgactgttttaaccagttttgttagagagaaggactaccaatctatacattttgaaatt

SEQ ID NO: 23136 - DNA, 120 bp, synthetic construct
  source 1..120: mol_type = other DNA
tactgactccaaaacaaaggtttaggtccaccttttcagaaaggctttactggagatgacatttcctttcatctctcagcatgtgaccataggaagcaaaaaagtgtcagggcagagact

SEQ ID NO: 23137 - DNA, 120 bp, synthetic construct
  source 1..120: mol_type = other DNA
cctgagaagtttgcagaggtgatcagggccaggcccagagcgcttagcaagaaaaaggatgtgacttgcagggatagccctggagccccttatctcaaggactcccacttccacagccca

SEQ ID NO: 23138 - DNA, 120 bp, synthetic construct
  source 1..120: mol_type = other DNA
ccttctaatcacctctgtttcttcaaaggaataggcctgacagctggtcagcagcaagtggacagcgaggccgagctgatggagggttttgttgttgttacttttgttcagagtataaca

SEQ ID NO: 23139 - DNA, 120 bp, synthetic construct
  source 1..120: mol_type = other DNA
gggttcctgagcccaggcgtccaggaggagcttggatctttaatttctttcagtggtgttttgggatttggggtatgtaagtctcacacttctttggttacatttattccttttgacttg

SEQ ID NO: 23140 - DNA, 120 bp, synthetic construct
  source 1..120: mol_type = other DNA
tcccctgcgttaggcatgcaaacttgggtgcgcagggtaaagcatgtgggctttattactgcattccctactgtcatgtatgtttagatatttccaaaatagaacttttatttcatgaaa

SEQ ID NO: 23141 - DNA, 120 bp, synthetic construct
  source 1..120: mol_type = other DNA
tccagcctaggcgacagagcaagactccgtctcttaaaaaaaaattgctgcagggagcacacagtaacttagataattcaacaccactgttgaatcagatgtgctgataccgtatttaaa

SEQ ID NO: 23142 - DNA, 120 bp, synthetic construct
  source 1..120: mol_type = other DNA
atcagtgcagtctacagcgtgtctactgattatagctaagcacttcttcactaaccagttagaaaagaaaccccaaaaggctttccatgacagcctcgagaaattccggattatttagca

SEQ ID NO: 23143 - DNA, 120 bp, synthetic construct
  source 1..120: mol_type = other DNA
tatgcttcttgaatgctgacaataaaacaatcgccacccatctatttactagtccatgtttaacagaagagggatgagaacctctccagactcagaactcaatcggttcgattctgacgt

SEQ ID NO: 23144 - DNA, 120 bp, synthetic construct
  source 1..120: mol_type = other DNA
aatgggcttcaaatgcatgaagttgcagaagccgcctcgtgtgcattctctgtgggtgggttggaaggagacatttactacctcgtgtgcacacggccccgaactgtgctcagtcacgtc

SEQ ID NO: 23145 - DNA, 120 bp, synthetic construct
  source 1..120: mol_type = other DNA
attttaaatccttccaaacagatacagaagatcaacaggtctatcagtcacagagttcagttctctcacctcaaaaaactcatcatagtgttcctgcatctccacatcgctcacggcacc

SEQ ID NO: 23146 - DNA, 120 bp, synthetic construct
  source 1..120: mol_type = other DNA
tttccagattgggccggctgccttagcctgtgcacccaacgtgggcatctgactgctggcacacgggtctttgagcttgctcaaaactctttttatcttttttttttttttttttgagac

SEQ ID NO: 23147 - DNA, 120 bp, synthetic construct
  source 1..120: mol_type = other DNA
acaaaagtgctgtgaactgcaaataaagacacaatgaaaactaatacaacattctattgtcagtcaagaaagcatatacagtccccaaataaacgatcagggcaaagaattaattactgt

SEQ ID NO: 23148 - DNA, 120 bp, synthetic construct
  source 1..120: mol_type = other DNA
agtatttcccagtacaggaagatattggtaccatctactgaatgcccagttttgatctatttctaaatggagcaaaccaattccatctcctagagctggagactgtatccaggcagtgtg

SEQ ID NO: 23149 - DNA, 120 bp, synthetic construct
  source 1..120: mol_type = other DNA
accggggaaggaacttgtatgaacttacagcgcaaaccgtcagcagactgggaagagttttgagggttacggtaaatgttcaagagggcaatggtctgaaatacaaaacgcaacaacttt

SEQ ID NO: 23150 - DNA, 120 bp, synthetic construct
  source 1..120: mol_type = other DNA
tgcgccaaggagttccagcaccttgtcctgtttgcaacagctctatgtcagcagctcagaagccaacattatttgtctcaattaagagtgggctctttaacaccattgttttaaaaaaat

SEQ ID NO: 23151 - DNA, 120 bp, synthetic construct
  source 1..120: mol_type = other DNA
gtctcaacaatatccacgtgaagcagttttgtaagtggtggttttataaaaccagccagctccatttctagctctgtttaaaggggagtggttgtatgaagagttcctcagtcaaaggtg

SEQ ID NO: 23152 - DNA, 120 bp, synthetic construct
  source 1..120: mol_type = other DNA
tccatgggcttcaaccggaaaaaacccatgtttccttctcccagctcacttacacaaagtggtagattttcttaaatgcttacaggaaaacgtatacagacagatgtgagctcaaaggca

SEQ ID NO: 23153 - DNA, 120 bp, synthetic construct
  source 1..120: mol_type = other DNA
caggcacagccaacacacaaacatcaaaaactgatttttaaagtttctctaatgataaaaacaaggagtggtggtctcagaccttccactggaagtcgatcacctgcctcactattattt

SEQ ID NO: 23154 - DNA, 120 bp, synthetic construct
  source 1..120: mol_type = other DNA
ttctgagagtcagacagaacgtatgtgtgcttcacatatggtgctcatgaagtgctatcattatctaaggaaaacagaaaacgaagttcagagtctctctaaacgcatgacaccagacca

SEQ ID NO: 23155 - DNA, 120 bp, synthetic construct
  source 1..120: mol_type = other DNA
tacaagacagaagtcatgccacatgcaaatatgaaaaggagaaattaatgatgccccgatcctacatgtgttagttcttcaccctaaactcagaagagtctcttgttccgatagagctgg

SEQ ID NO: 23156 - DNA, 120 bp, synthetic construct
  source 1..120: mol_type = other DNA
taagtggataaaacaccaacgcttaggaccctaagttagataagcgactgaatactggcgaggctggtaccagagcttgctcgacaggacattcacagccgaaagttggaacaaacgtgt

SEQ ID NO: 23157 - DNA, 120 bp, synthetic construct
  source 1..120: mol_type = other DNA
gaaaaaaaaagctgaggcaaacttgatataagtagagaggttatttgggccaagtttgaagattgcaacccgggagcatagcttcaagttgccctgaacataggatttgcaacagtgaca

SEQ ID NO: 23158 - DNA, 120 bp, synthetic construct
  source 1..120: mol_type = other DNA
atgtgcccagggagccatcctcaagctttgggctcaaataaactctatacttaatcatatttcctgaatttcattatttgaggttgacattttggcaacccagataggacctgaagcagg

SEQ ID NO: 23159 - DNA, 120 bp, synthetic construct
  source 1..120: mol_type = other DNA
aataataattagaaaaaagtgagtcagactgagaccccagcagttcccctgaggaaagaaactgaacattccctacctcctccctccctccctcctatctccctcctccctccctcgtct

SEQ ID NO: 23160 - DNA, 120 bp, synthetic construct
  source 1..120: mol_type = other DNA
cccggagcacgcgtggccgtcacaaagggctgcaaagctgcagcaccagaacgcaaactcaggcgtgcggcaacggaggccacgttctcagccaccgtgccactctgcatgtcagctggc

SEQ ID NO: 23161 - DNA, 120 bp, synthetic construct
  source 1..120: mol_type = other DNA
tggtttggcctccctgtcagacagcctcaagccactaagccagcggcagccacagccaggacctcggaggctactgctttgttcttagagacagcaaaaccgcagagatgactcagaaga

SEQ ID NO: 23162 - DNA, 120 bp, synthetic construct
  source 1..120: mol_type = other DNA
gggtccatcctcgctggcagccatgctgggctttccttttgtacggctgaggcctattccactgtcggcatggactacatcttctttgtttgtttttttgagacagagtttcgctcttgt

SEQ ID NO: 23163 - DNA, 120 bp, synthetic construct
  source 1..120: mol_type = other DNA
ccattagttccctgcagtgaggtggaatgcaggagttggctccctgccctcctctttaagatttgaaacttctacaagcctggaggatgtggcctctcagggaagccgcttggaaggaaa

SEQ ID NO: 23164 - DNA, 120 bp, synthetic construct
  source 1..120: mol_type = other DNA
cctccctaccctcaagtaactgggtcaatctttggcttttaaaaatacccgcctttcccctttctcaatgcctctgtttaacactgcagggtttaagaagccgaagtagctgaaggcacc

SEQ ID NO: 23165 - DNA, 120 bp, synthetic construct
  source 1..120: mol_type = other DNA
gggagagaattcctagaatctgtagatgatctttgcctgggctgctttaaaactgatacatgaagcagaaagttcacagttttccttaaagcagaaatcaggaagtggagagcgttgact

SEQ ID NO: 23166 - DNA, 120 bp, synthetic construct
  source 1..120: mol_type = other DNA
tgggagcagccgggtgcagcggccgggtggtgctgtaactggagcagcctgtgggaacagaggacaggtggtcactgcgccggctcgcagggttctcgggtttccgagtgcccgtgtggc

SEQ ID NO: 23167 - DNA, 120 bp, synthetic construct
  source 1..120: mol_type = other DNA
cctccaagtcgggaggtgctgcccagcacagagtcgtctcctgtgctttcagaaccagccatggaggccgcgtgctcagggacccatgtgtgtctatcccagcaggccgtgacgccccga

SEQ ID NO: 23168 - DNA, 120 bp, synthetic construct
  source 1..120: mol_type = other DNA
aaacatcaactgtgtggtctcagggattaaaacaaatggcaaatcctgagaagtccaacctgagaggctgccgggcaaaacgtccattctaaattagcccaccctcacgtcgaccgtaag

SEQ ID NO: 23169 - DNA, 120 bp, synthetic construct
  source 1..120: mol_type = other DNA
cactgggcattccgatactccttgagccgctcaaggaggaggtaataaatggcagcaaagtggttatagctgctgttttgcagtgactgggaacaagaggagcagagatcagcatgggga

SEQ ID NO: 23170 - DNA, 120 bp, synthetic construct
  source 1..120: mol_type = other DNA
acccgtccaccctcgaaatagggcactgagaaggcatccatgggctgggtttctcccgcagcccacagtaacctgggcctgattcccagactcaacaaggactcagaagccagccacgaa

SEQ ID NO: 23171 - DNA, 120 bp, synthetic construct
  source 1..120: mol_type = other DNA
gcgcaaatccagacgcgttcgtgccattggttttcaacagatactgaaaacgagtgtggcttaccaaacatttctccatttttagcaaattcagtgacgatgtaaagcatgtcctttgtt

SEQ ID NO: 23172 - DNA, 120 bp, synthetic construct
  source 1..120: mol_type = other DNA
gaggctgtgagaatccagcctcattcactcagcatgtagccattcactcagcatgtagccacacaacagccatgccaacatagccctttgaagttcattcactaatcaataactttattt

SEQ ID NO: 23173 - DNA, 120 bp, synthetic construct
  source 1..120: mol_type = other DNA
cagagagacagggcaagccatgttcctagcatggattaaatgacaagctccttgctcttactatggaaaagtattttcatctctccgtttttcatggaagagtttaaatagggaaaacaa

SEQ ID NO: 23174 - DNA, 120 bp, synthetic construct
  source 1..120: mol_type = other DNA
ttgcaggctcactttacagggtttagctctgagtccatgaaccactgcaatcttaggttggtccttttttttgctattatcctctctgctttctcccaatatatgtccaaattatgcagc

SEQ ID NO: 23175 - DNA, 120 bp, synthetic construct
  source 1..120: mol_type = other DNA
ccccaccctcgacccctttagcacctctgggcgcggacccgctcccacacctggccctgccacccgaggtcggctcgatccggatcccaggaccgtcccctgccccgctcccacaccctg

SEQ ID NO: 23176 - DNA, 120 bp, synthetic construct
  source 1..120: mol_type = other DNA
accaagaatacgggggaatatttttagttcctttcagctgaacagtgtacaactgccttttttccttttggaggtcccaacaccctgttaatccgctcctaggagaactaaacaaaaaca

SEQ ID NO: 23177 - DNA, 120 bp, synthetic construct
  source 1..120: mol_type = other DNA
ccccgaggctgtatttcctctcagaagctttgatttcttttctgttttctggtcttccgtgcctttaacacgaggaaaaataaaacacatggtgtgagtgtaaggatggtacaagcaaat

SEQ ID NO: 23178 - DNA, 120 bp, synthetic construct
  source 1..120: mol_type = other DNA
gtttctggttccggtttctgtcgctgccgttagtgaggaattattcatgtggccaatgcgttttcttgacatttaagcagggctgtggccgatatcaaggctgaggacccaagaggcctt

SEQ ID NO: 23179 - DNA, 120 bp, synthetic construct
  source 1..120: mol_type = other DNA
ctctcgaggaccgttggttccagttgcggagacagtaacagcataagatgatgagtaagaaaagaatgctggcaggaaagtggccatggagggaactgcttccgggcctctccgtgggat

SEQ ID NO: 23180 - DNA, 120 bp, synthetic construct
  source 1..120: mol_type = other DNA
tttcttattcactttttattaaaacaggatgaggcgtcctgccttttccagccttatctaggaagtgtcttgccaggtcaccaaatggcaagcagaaccgtaagctgaagttgtctgcct

SEQ ID NO: 23181 - DNA, 120 bp, synthetic construct
  source 1..120: mol_type = other DNA
ttcagcaagtagtggtgggaaaactgaaatatccacatgtaaaagaatgatgccggacccttagctgaacgatatgaaaaaaattgactcaaaatggatcaaagatctaaactgaagaga

SEQ ID NO: 23182 - DNA, 120 bp, synthetic construct
  source 1..120: mol_type = other DNA
aaagatcatatgactgtacttctatgagatgcgtggagtagtcaaatgcatggagacaaagaagagcagatattaggggccaggggagaaaggtttagggaatgtgttgttatataacgg

SEQ ID NO: 23183 - DNA, 120 bp, synthetic construct
  source 1..120: mol_type = other DNA
tcattatgtcatgatgggacgtggaggtcagacatgcctcattatgccctcctccctttggaattcaggtacaactgactggtataaacattaaaacagagatcttgagactttttgttg

SEQ ID NO: 23184 - DNA, 120 bp, synthetic construct
  source 1..120: mol_type = other DNA
aaggagggagtcaagtctgacgtcgggcctgccaggtttcacacctttacatacaaactgatggtaccaaggagaaaaatagttccttaacttaataaatgtaagaggaattctgttaaa

SEQ ID NO: 23185 - DNA, 120 bp, synthetic construct
  source 1..120: mol_type = other DNA
cctcaaaatcaggagaaaagaaatgatccttcttaaacacatccatccactaattagctaaactacacaacatccaagagtctggccaacgctcactcctctctatacactgttgacccc

SEQ ID NO: 23186 - DNA, 120 bp, synthetic construct
  source 1..120: mol_type = other DNA
tttcatggcctctcctttggcaagcttaaccaaccacctacaagcactctcacttccaagacaaagttatgtgggatacatatcaattcatgtccatctctagtcaatcacattttgcca

SEQ ID NO: 23187 - DNA, 120 bp, synthetic construct
  source 1..120: mol_type = other DNA
gttgtttattttccatgggaatggccccaggacttatagaatctggtagccttgcatacattgtagcaaccactaaaaaatagctagacaaacccactggaagcttcaatccatcaccag

SEQ ID NO: 23188 - DNA, 120 bp, synthetic construct
  source 1..120: mol_type = other DNA
aaacccctgggctcaagcaatccttccacctcagtctcccaaagggccagaattagaggcatgaaccattgcagcctgccaggttttacattttttaagggtaattttttaaaagtaaaa

SEQ ID NO: 23189 - DNA, 120 bp, synthetic construct
  source 1..120: mol_type = other DNA
attcagcaatatataaaaaggataatacttcacagccaatagacacttattctaggaatggaaggctggctcattatttgcaaatcagtcaacatcacctaccgtaacaacagactaaag

SEQ ID NO: 23190 - DNA, 120 bp, synthetic construct
  source 1..120: mol_type = other DNA
ggaactagaccagacaaaacaatttagagaaagagaaatgttggggaattgcagtactagatttcaacatttatggccataaagagtgtggtactggtcaagtgacagagcgacagacaa

SEQ ID NO: 23191 - DNA, 120 bp, synthetic construct
  source 1..120: mol_type = other DNA
caattgaggatggaggttctgtctggaaaacatgtggattagataaacacatacctacaagctctaagacattccctctatctctactttgtttccggagtttataggccttcatccctc

SEQ ID NO: 23192 - DNA, 120 bp, synthetic construct
  source 1..120: mol_type = other DNA
tacttctcctttagatgctagcccagggctctgtcctaggcttccttctctttctactctccttaggtgacttcgtctactccatgacttcaaatcccatgtatctaccagtgactctaa

SEQ ID NO: 23193 - DNA, 120 bp, synthetic construct
  source 1..120: mol_type = other DNA
cagaatgttcctgccccaatcttcacatgtcttgctcctttcaaatctcactcagtagagcaattccagctccaacatgctgagaactaagctccgattttttaaatcttgcccaaattc

SEQ ID NO: 23194 - DNA, 120 bp, synthetic construct
  source 1..120: mol_type = other DNA
tgacttttcttggacccatcaaagaattaaggccaccatgaaatctggagagtcacaacaagatctgcttccctggaggaaaagctgctgtagccataccggtgggaacatttaaatgac

SEQ ID NO: 23195 - DNA, 120 bp, synthetic construct
  source 1..120: mol_type = other DNA
tttgtattagtttgcccagcctgccataacaaaataccacaaactgggtggcttaacaacatgaatttattttctcacagtctctagaggctggaagtctgagatcaagttctcagcagg

SEQ ID NO: 23196 - DNA, 120 bp, synthetic construct
  source 1..120: mol_type = other DNA
ggggaacacagacgaaaagaatgtgaatggctgataacgcaccaaaactctgctcacaacataggtagaagaataacacagagctcaggtctaatcatgaaaagcctcattacttgagac

SEQ ID NO: 23197 - DNA, 120 bp, synthetic construct
  source 1..120: mol_type = other DNA
gccctcttggaactggaactactgctggagtgtatcttgttcctggggtagcagccccagctccccttcacccctgaagctaagccgctgcccaaccaccccagcccagtggccccacat

SEQ ID NO: 23198 - DNA, 120 bp, synthetic construct
  source 1..120: mol_type = other DNA
gcaaccattacaagcacctacacctggaacccagcaccatggcagctgcttgtaggccatgtcagagcagacatcaaaggaattcccctcagctaagtctccccattgcaaggaaaatga

SEQ ID NO: 23199 - DNA, 120 bp, synthetic construct
  source 1..120: mol_type = other DNA
agccaaaaacttcaaaagtctgggaagacatatggacatccaggtccaggaagtttaaaggtccttaaatagattcaaccaaaaaaaattattccccaggcacactgtagccaaattgtc

SEQ ID NO: 23200 - DNA, 120 bp, synthetic construct
  source 1..120: mol_type = other DNA
tcataatgaacagggaaaagctgaaagcttttcttctaagatctggaataagacaaagattcccaccatcaccactcctattcaagatagtactgtaagtcccagctagagcaattaggc

SEQ ID NO: 23201 - DNA, 120 bp, synthetic construct
  source 1..120: mol_type = other DNA
gaaagcagattagtcattgccagggatggagtcactgctaataggtatgggggtttctattggtggcaatgaaaatattctaaaattagacaatggtaatgcttgcacaactctgtgaac

SEQ ID NO: 23202 - DNA, 120 bp, synthetic construct
  source 1..120: mol_type = other DNA
aagttctatcaagagcttggatggacatgaaaaccctgcctgtatctcaccacgtttcctcccaacagtagacagattttttttgttaatgtgctcgctcattaaaccatttgtgagtgg

SEQ ID NO: 23203 - DNA, 120 bp, synthetic construct
  source 1..120: mol_type = other DNA
gagggaaaaacaaaatggcactcagagttaagtcacagctaactgagaacaaggagatggcactgagacaccctagctccacatgcccttgtgatagctcttgtcgcaggcattgatttc

SEQ ID NO: 23204 - DNA, 120 bp, synthetic construct
  source 1..120: mol_type = other DNA
gcattgataccaggctcaacaaagctgtctggaccaaaggaataaggaatatcccataccgcatccgtgtgcggttgtccagaaaatgtaaagagaatgaagattcaccaaataaactct

SEQ ID NO: 23205 - DNA, 120 bp, synthetic construct
  source 1..120: mol_type = other DNA
ctggggaacgcttaacttgacccctatcacagagcatgcccaaagataaatgcaaaaggcaaaaagagaaaccgaggagaaaatataggcagatatattcatgaccttgaggtaagcaga

SEQ ID NO: 23206 - DNA, 120 bp, synthetic construct
  source 1..120: mol_type = other DNA
tgacacaagtgaaaaattccacacctgacttcacacgacaggttacaatcaaaaggcaggcacacaacacacagtttattcagagtcaccaagggaaaagagaccgttcaggtccctttg

SEQ ID NO: 23207 - DNA, 120 bp, synthetic construct
  source 1..120: mol_type = other DNA
aagaagcacacgcatttcctgggtgcaggcaacatgccatttctcaccctgggtggtggtgaacaaatgttcctttgtaattattctctgagcttcacttttatgtttctgtacttttct

SEQ ID NO: 23208 - DNA, 120 bp, synthetic construct
  source 1..120: mol_type = other DNA
ccacaccatccctgcagatgggtagccatgtattttcatgagctccaaggtcaaagtcgactacctgcaactgctaccactatgagctgctgcaggcctgaggtgaggtgcaatcaaagc

SEQ ID NO: 23209 - DNA, 120 bp, synthetic construct
  source 1..120: mol_type = other DNA
ttaatgctgtttacagccaaagaaatcatacagagactacactactgcacacacccagattcaaaaccaaagtgccctacctaccaataccacagatacatcttcgggaaaatgtcctct

SEQ ID NO: 23210 - DNA, 120 bp, synthetic construct
  source 1..120: mol_type = other DNA
tttttggtgtcccagaaggtaaagaaaaagcaaacagaaacttatttaacaatagatgaaaacttcccaagtctagaaagagatttagacatctagatacaagagtctcaatgatcccca

SEQ ID NO: 23211 - DNA, 120 bp, synthetic construct
  source 1..120: mol_type = other DNA
attcagcaaaaggatataacaattccaaacatatatgcacccaacgccagagcacccaacaccagagcactagataaagcaagtactattagatctaaagggagagacagaatgcaatac

SEQ ID NO: 23212 - DNA, 120 bp, synthetic construct
  source 1..120: mol_type = other DNA
aaagggattctccctaaatcactctatgaagtcagcattatcctgatagtaaaaccagacacggatgcaacaaaaaaagaaaagtatatgctaggccaggtgcagtggctcacacctgta

SEQ ID NO: 23213 - DNA, 120 bp, synthetic construct
  source 1..120: mol_type = other DNA
agcaaaattggaaaagaagaagtcaaactgtccttctttgctaaagatatgatcttctacctagaaaaatctagagtccaccaaaaaactgttagaactgataaatccagtgaagctgca

SEQ ID NO: 23214 - DNA, 120 bp, synthetic construct
  source 1..120: mol_type = other DNA
aaaaagcctgagaacagaatgaagggaagaataaaggaagagaaggatgatggaaggggaggacagagagaagaaaagagaaagaaaaagaaacatttgccaaagtccttcccatatctc

SEQ ID NO: 23215 - DNA, 120 bp, synthetic construct
  source 1..120: mol_type = other DNA
catgtcatctgccgcagcacactcagccaagcaataaaatctacttggttttcctctgctctttgcagatccttttcctttaagctaaagaaataggtgccttgagcatcaaactgtaat

SEQ ID NO: 23216 - DNA, 120 bp, synthetic construct
  source 1..120: mol_type = other DNA
tacatttagtgctatcatataagaacaatactttcataggtgatgtttacttctgccctttttatgagtgaccctcacccaagtgcagtggtcttactgctgccatctgcaatgagggga

SEQ ID NO: 23217 - DNA, 120 bp, synthetic construct
  source 1..120: mol_type = other DNA
tcattgttcagaacatttttggaactcctcctagaattaccttcaatctgtgagccacacacaaacatcagtgttaccatctgagattctgacgccacctcccaatcaggattctaagac

SEQ ID NO: 23218 - DNA, 120 bp, synthetic construct
  source 1..120: mol_type = other DNA
cttcaggtatccactcaaatacccaaaagagcagctccgcccaacactctctagcctgctcctcatgccactccatttttatttgcattactatatgatatatgccattatatttgttta

SEQ ID NO: 23219 - DNA, 120 bp, synthetic construct
  source 1..120: mol_type = other DNA
atgatcagacttgaggacgtgaaatctggaaaggccctctggaaggtggtttcaagctggattttgaaggtataggaacataaagtatctacccatttaaatgattatgagatggagtca

SEQ ID NO: 23220 - DNA, 120 bp, synthetic construct
  source 1..120: mol_type = other DNA
gggctctcattggctactctgcttcctttggccatgcagattatcacatacttatggcctgaaagaattaccttttcaagaattaccttttggtttggttttctgggaagttcagtttat

SEQ ID NO: 23221 - DNA, 120 bp, synthetic construct
  source 1..120: mol_type = other DNA
agcgactaggtccaaagccgagggaaccaccaacagatcccctggtgacccaacaagaaatgctcacagtctggacccaatcagagtctgcaggacacagcagacattctggaagttaca

SEQ ID NO: 23222 - DNA, 120 bp, synthetic construct
  source 1..120: mol_type = other DNA
gaaagaaaagaaagaaggataaaaggagtcacttatgaaagatgctgggataactcaaaatctgaggaaaagctatacagcccacctggacagggataaagctgactgcaagccataggg

SEQ ID NO: 23223 - DNA, 120 bp, synthetic construct
  source 1..120: mol_type = other DNA
ggcctgctgcaggagatgagggcctgttgcgggagatgagtacctgttgagggagatgagggccggctgagggagatgaagggcctgctgagggagatgaagggcctgctgagggagatg

SEQ ID NO: 23224 - DNA, 120 bp, synthetic construct
  source 1..120: mol_type = other DNA
gatgaagatctgctgtgggggatgagggcctggtgagggggatgagggcctgctgcgggagatgagtacctgttgagggagatgagggccagctgagggagatgaagggcctgctgaggg

SEQ ID NO: 23225 - DNA, 120 bp, synthetic construct
  source 1..120: mol_type = other DNA
gacccaagagctggtgtttcagtttgagttcaaaggcaggaaaaggcccacatcccagctcaaacagtcaaggcagagatcccttttattcagcctttttattctgttggggctccaact

SEQ ID NO: 23226 - DNA, 120 bp, synthetic construct
  source 1..120: mol_type = other DNA
aaaaagaacacaccatgagccagctctgcattctgggaaaatgcaacatgtcatggtaaacgcaggctggctagtggtttgaaagggcagccgtggcctgggaagacaaaaggctaaaca

SEQ ID NO: 23227 - DNA, 120 bp, synthetic construct
  source 1..120: mol_type = other DNA
atacacaccatacactacacaccacacacatcacacacacaccacaaagacacatcacataccacagacatcacacaccatacaccacacacacactacacaccacacacacatcacaca

SEQ ID NO: 23228 - DNA, 120 bp, synthetic construct
  source 1..120: mol_type = other DNA
catatatacacacacaccacacacattccctcacactcacaccataaacatgccccacacaaacgcatacacaccatacaccccaaaaaatacccacatacacatacaccacacccaaat

SEQ ID NO: 23229 - DNA, 120 bp, synthetic construct
  source 1..120: mol_type = other DNA
attctgctcttatcctatcacttttattgaaaaacccttagggaaaatccagtcttcccacctacagaatgaatcaccaacctggtattcaaggtcccaaagtcacatcccaacctacgt

SEQ ID NO: 23230 - DNA, 120 bp, synthetic construct
  source 1..120: mol_type = other DNA
tttagacagcaatgccaacccaaccactcctcttcctcctcctcttcagcctactcaatttgaagatgatgagggggaagaccttcatgatgatctaacatacaaaaaatgtgttaatca

SEQ ID NO: 23231 - DNA, 120 bp, synthetic construct
  source 1..120: mol_type = other DNA
gaaattatcttcttacctttttaatgctttctgcctttcagactttgtctggaattaatatagcggcaccagctgccttttgtttactgtttgctttgcatgtctcttttatttttttat

SEQ ID NO: 23232 - DNA, 120 bp, synthetic construct
  source 1..120: mol_type = other DNA
agtccaattaacaagagcacgtcgggtataaagaaagtgactttattccaaagctagcttaggggaagaggtaaagtgagggtaccactttgcttttggagcagaaagtgggaactttta

SEQ ID NO: 23233 - DNA, 120 bp, synthetic construct
  source 1..120: mol_type = other DNA
cagtgtccagtgaatggaagggaaaagggtataattgcatttctaaagggctatgtaggaagtggggaacagggggaaatggagacaagagaagagaagagataaaaataatttagaaac

SEQ ID NO: 23234 - DNA, 120 bp, synthetic construct
  source 1..120: mol_type = other DNA
tatgtgtggtttgtagtgtgtgtatgtggcgtgtatgtggtttgtggtgtggtgtggtatatgtagcatgtgtatggtttgtggtgtgtggtgtgtatgtggcatatgtgtggtttgtga

SEQ ID NO: 23235 - DNA, 120 bp, synthetic construct
  source 1..120: mol_type = other DNA
tggtttgcagtgtggtgtgtgtggcatgtgtgtggtttgtatgtgtgtggcacgtgtgtggggtttgcagtgtgctgtgcagcatgtgtgtataagcgtgaggcatgtgcggggtgtgca

SEQ ID NO: 23236 - DNA, 120 bp, synthetic construct
  source 1..120: mol_type = other DNA
agtcaccagacaagtccacgcctgaagacgaatgttgtaatgttcagcttttgaagaacctgaggaagtgtctttcccttaactcacacagacgttcaccattcacgaaggtggcgctta

SEQ ID NO: 23237 - DNA, 120 bp, synthetic construct
  source 1..120: mol_type = other DNA
ttttatttttggtttacactggcctgggatggaactgggcagttctaatgtgactgggtgtgtactggtggcttcactcacccagggcaggcaggcacctggaaccacgactcagaaaga

SEQ ID NO: 23238 - DNA, 120 bp, synthetic construct
  source 1..120: mol_type = other DNA
tcaggagggtgcctgagtggcttacaacaagaactttgcctatccctttactgttcgcaaaacaccatctcaaaaatcagtcaacatggattccaagttttgccttaggccacactggat

SEQ ID NO: 23239 - DNA, 120 bp, synthetic construct
  source 1..120: mol_type = other DNA
gaatgagaggggaagtgcctccaggccgggatgccagctatagcagcgccctccagcaacgtcctggaggaagcacctcattcgtgccaaactcactgattctaattcgtcatcgtgatt

SEQ ID NO: 23240 - DNA, 120 bp, synthetic construct
  source 1..120: mol_type = other DNA
agaatgctgggagcaggcaggttacagaagcctctgagtgcggcagctctatgggaactggggtgcttcacttacaagtatttgaggtattacaatgtatccaatttttttttttttttt

SEQ ID NO: 23241 - DNA, 120 bp, synthetic construct
  source 1..120: mol_type = other DNA
gccccgcctttgtgtgccccagggcctgggcctgcctggttaagagtctgcacactcctagagctggagcttctcaatgtcgctcttggaaggtgaccccacactccgctggggataatg

SEQ ID NO: 23242 - DNA, 120 bp, synthetic construct
  source 1..120: mol_type = other DNA
cttctctctgtcggggcctcccgtgtccagaagatgttgaacagcatctgaggcttccacccgctgaagccgaggaacagcccccagctgtgacaacccaaaatgcctccagacctggcc

SEQ ID NO: 23243 - DNA, 120 bp, synthetic construct
  source 1..120: mol_type = other DNA
aggtagggactttttttgcagaaaaccaatttcttgtaacaagtactggaacctcattgtagccttgagtcctcactcctccttttgttctaagtctgggtctgagaagtgcaggcctca

SEQ ID NO: 23244 - DNA, 120 bp, synthetic construct
  source 1..120: mol_type = other DNA
agtcttctttttaaaccaaacacccttcggtctcaggatcccgcatcccacgggaagacccacagtgggtctggggtactgggaagagcctggtgctgaatcccgcacgctccgggtaga

SEQ ID NO: 23245 - DNA, 120 bp, synthetic construct
  source 1..120: mol_type = other DNA
aattggacaggaatccacatctatgttgctcctggaactgaggggcaaacgagagctgcaggagtggctgccacagagagaagctggcggtgcccggacccactccggacaccccacagg

SEQ ID NO: 23246 - DNA, 120 bp, synthetic construct
  source 1..120: mol_type = other DNA
tgctgctgtgtcttacatggctgaaacacagacctccgggctctgtcgcggagctggccagagtcacagacccacagggcaggagtgctcaaggcagcctcagcggcttccctggaaatg

SEQ ID NO: 23247 - DNA, 120 bp, synthetic construct
  source 1..120: mol_type = other DNA
accacaataaagtttcaagctaaatcagtatcagtgagggaagttaaagcaggcaaacattcacaccaacaggacaaacactaacatccacaatatggggccgtctctacctgcatagct

SEQ ID NO: 23248 - DNA, 120 bp, synthetic construct
  source 1..120: mol_type = other DNA
caaaatgaaccattttaaagtgaacaattcagggtgccagtgccatcataaccaccacctaattccaggacctgtaacccccaaaagggaaccttgtgtccatgagcagtcactccccac

SEQ ID NO: 23249 - DNA, 120 bp, synthetic construct
  source 1..120: mol_type = other DNA
cacggacaggcatttgtttgagtccctgttctgaatcctctggcctatatcgctaggagagaactgctgggtcctgcagtgcttccacgctgagcttttcgaggaactgccacaacgttc

SEQ ID NO: 23250 - DNA, 120 bp, synthetic construct
  source 1..120: mol_type = other DNA
tgtgggcttctgttctgggctgctgctgcctagtgctgcggcttctgaagtgttacccagcctcagagttcagccctcatctgtaaagtaggtttaagaaaaccgactccaggtgaagaa

SEQ ID NO: 23251 - DNA, 120 bp, synthetic construct
  source 1..120: mol_type = other DNA
ctgtccacgttttccaaggagctgttctgtgggatgtggtaggtcaccacggttttcgactcactggtttgccaatatacgtaaacatcatttaaatcaaaacggcttccttcagggcaa

SEQ ID NO: 23252 - DNA, 120 bp, synthetic construct
  source 1..120: mol_type = other DNA
aaagtcctgggattacaggagtgagccactgcacctggcacctgcaggaaaatctgtgtgtgtcccctgcccccaaagccctctgggctggaaggcttggcaaggtttcaggtttgtgct

SEQ ID NO: 23253 - DNA, 120 bp, synthetic construct
  source 1..120: mol_type = other DNA
cacatatagtaggagtgtcacttaaaatgctggggagacggagaacatcaggcgtgcccgtgacagggtcaggtgagtgacgggacagccctgtgcggaacgcggatcattttgaaacca

SEQ ID NO: 23254 - DNA, 120 bp, synthetic construct
  source 1..120: mol_type = other DNA
gagccaccatctaaacgacagctgtgagaactcctctgtgcccccatttgtctcccacagtgcccatattcatcaccagcccacaaggcccctcctgtctatggaggcctcctcaggaca

SEQ ID NO: 23255 - DNA, 120 bp, synthetic construct
  source 1..120: mol_type = other DNA
gctccggaaagttcggctctgcccaggcgtgtgcccgtcggccggaggcgggacagaggcaggtcggcctgtccgcctggacgcggacctgggcgccgtaggtgccctgggaagcgcagg

SEQ ID NO: 23256 - DNA, 120 bp, synthetic construct
  source 1..120: mol_type = other DNA
ttccttcaaccaagatgtagagaacgccgtggacaaaagctttaaaaaaattctgaaacctctgcccgtgggaagtcaacatttttgcggagcagagagcccaggcacaaaataagaagg

SEQ ID NO: 23257 - DNA, 120 bp, synthetic construct
  source 1..120: mol_type = other DNA
ggataccgcgtgggggctttgggaggatggggaatgggtcctgggggagcagagcctcccaaattaaggcctcccaagagcgcggccggtcatccgcggcggcgaagggaaggtgccctg

SEQ ID NO: 23258 - DNA, 120 bp, synthetic construct
  source 1..120: mol_type = other DNA
tgagagctcaacttctggtccaaggaagatcttttctcttcggggaacagtcatacattgtttaacgaaaaggatacattccttctgagaaatgcgtccttaggtgattttgtccttgtg

SEQ ID NO: 23259 - DNA, 120 bp, synthetic construct
  source 1..120: mol_type = other DNA
cgtctgttcagcaggtccctcctttgtctgccaaggctgaggtcctgtacttttgcaaaggtccaggctgtttggtgcagctacaatcagggtgcgtggtttctctatgaacgcaaacag

SEQ ID NO: 23260 - DNA, 120 bp, synthetic construct
  source 1..120: mol_type = other DNA
tagaggatgtcaccatccctgggcagcacccccgcagaggaaaggacaggactctgggcaaaagttggccaaaccctcgcagagtcagcgagcattcccagggaattctatcacaaaggc

SEQ ID NO: 23261 - DNA, 120 bp, synthetic construct
  source 1..120: mol_type = other DNA
tgtgcgaaggctggcatgcaggtgagagggcttctgaagagaaagcatgctggaaaagtgcttcggctcagccccacccaaactcaaatccaggggaagccaggccagcaagacctgcag

SEQ ID NO: 23262 - DNA, 120 bp, synthetic construct
  source 1..120: mol_type = other DNA
ttggctctgctagacagaccccatttcctcagtgaaccccgcttctgggtccatgttccccttgaccctgaacgctttcagctgcccaggaaatacctccttatggctgggatgttgctc

SEQ ID NO: 23263 - DNA, 120 bp, synthetic construct
  source 1..120: mol_type = other DNA
tgtgcccctttacagaaacaaagtctcctgttctaaaagcacagactttgtgattttcagctcatggcgtttgctccccttctgaatagctggatttgcattccagccactccacgagat

SEQ ID NO: 23264 - DNA, 120 bp, synthetic construct
  source 1..120: mol_type = other DNA
cgagatgcgacgtccaggtcttccttgttcagcaccagattgtccacgaacatccagaagaagggcctggggctgcctggcttgggccgtgcgtactgcaggagccggtggaactggaac

SEQ ID NO: 23265 - DNA, 120 bp, synthetic construct
  source 1..120: mol_type = other DNA
tttattttttcttgctcaaattcctttctaaggagcgtaggggaatcacgccttacaaaccacaaaagcttgtggaatgggtgtttttgacctggtatattgtgactctgccatggcacc

SEQ ID NO: 23266 - DNA, 120 bp, synthetic construct
  source 1..120: mol_type = other DNA
ttgtaactgaccgcctcaggtgcacttcctcgggatctcttaagactgtatttcccaggccatggtcactcttattggctcagaataaacctatttaaaaactttggcagaatttggttt

SEQ ID NO: 23267 - DNA, 120 bp, synthetic construct
  source 1..120: mol_type = other DNA
acaaaaaagccccccaaaacttaagatagtcaagtatcagaaccccgtctcctgatagcaccagtcaacaatggactccacttccctggaccccctcaaatcacataacagcccgaatcc

SEQ ID NO: 23268 - DNA, 120 bp, synthetic construct
  source 1..120: mol_type = other DNA
tctttctgggggagcttgtctgtctgtctggggggcttggctttctgggtgtgtgtgggatgcttgctgggttcccgccccagtttcagctgtagcagccgtgctcccatctatgtgggg

SEQ ID NO: 23269 - DNA, 120 bp, synthetic construct
  source 1..120: mol_type = other DNA
ccaggtctcatgcagctcctagctatgaggccgccccattttaccaagagcaaaactccggctgtgggactctttccaggatggggtctgcctcaggcacaggcagcagcgtgatgtacc

SEQ ID NO: 23270 - DNA, 120 bp, synthetic construct
  source 1..120: mol_type = other DNA
tctgccccggcttccaggccccaggctgagcatgacagcaggagcgaggtacctgagcgtgatcacctccaggctgggcatctcctggcaaatggagatctaggaggaaaagaacatgac

SEQ ID NO: 23271 - DNA, 120 bp, synthetic construct
  source 1..120: mol_type = other DNA
ctcggttccttacacctgatgctggtttgaaagcccctgagtgaggagctctgcgttgttgggggcggggcatcgctgagcctagaagggctcaggcgtcaggctcctgggtgtcaggtg

SEQ ID NO: 23272 - DNA, 120 bp, synthetic construct
  source 1..120: mol_type = other DNA
gcacactcaggagattgggtgcaactcccggcccacccctgacccaggtgaccccggacaaacggctaacttggctggactctggtatctccctcaaggttgtaagaggggtccacgtga

SEQ ID NO: 23273 - DNA, 120 bp, synthetic construct
  source 1..120: mol_type = other DNA
caagagttccgtaagaacactcgtgatggcgtgtaggtcccactagggtcatctagggtgatgccttcatatccagatctttaactgacatctgcaaagatgcttttccaaacaaggaaa

SEQ ID NO: 23274 - DNA, 120 bp, synthetic construct
  source 1..120: mol_type = other DNA
gcgtttcactttctagatgtctccagaacagtgttttaaaaaacttcagtgtgcataagaatgatctagggtgttgctgaaaatgcaggttgtagttctccagggacagtgagatcctga

SEQ ID NO: 23275 - DNA, 120 bp, synthetic construct
  source 1..120: mol_type = other DNA
gtggaggggtgtggagggctgtggaggatgtggaggggtgtggagggctgtggaggggtgtggagactgtggaggggtgtggaggctgtggaggggtgtggaagctgtggaggggtgtgg

SEQ ID NO: 23276 - DNA, 120 bp, synthetic construct
  source 1..120: mol_type = other DNA
tcttcagatcagaaccaatgttcggatttgctgaccgtgatgatagtgatgatagtgatagtgatgatagtgacagtgatgatagtgacggtgatagtgatgatagtgacagtgactgtg

SEQ ID NO: 23277 - DNA, 120 bp, synthetic construct
  source 1..120: mol_type = other DNA
aaccctggattgtcatctgtccaatgggtgtccaggcaacagcgccccacctacccttgggattgttgagggagcacagaaggggcatgagagctcctggcagagctgagattgtccatg

SEQ ID NO: 23278 - DNA, 120 bp, synthetic construct
  source 1..120: mol_type = other DNA
tttgttgacaagactgttgtttccccagtgaagcatcttggcatccttgttgaaaatcagtggaccattaacataagggcttatttctagagtctcagtttgactccactgatgtctgtc

SEQ ID NO: 23279 - DNA, 120 bp, synthetic construct
  source 1..120: mol_type = other DNA
gtcttggtgtagccttgtagtgagttttgaccacactgtcttggttggcgtagacttgtagtaagttttgaccacactgtcttggtgtagccttgtagtaagttttgactgcactctctt

SEQ ID NO: 23280 - DNA, 120 bp, synthetic construct
  source 1..120: mol_type = other DNA
cctaatttgttcttttccaggattgctttggcctctgggtcccttggcttcacaagaatttttggatcagctcatcaatttctccaaaaagggcatctgtgattttgattgtgaacatgg

SEQ ID NO: 23281 - DNA, 120 bp, synthetic construct
  source 1..120: mol_type = other DNA
acagtgtctgtctcctgataaacacccacttcgtgttattagccagtgaggcttataatatcgaaagtctgtgtgcttctccttttttcttgctttggttcccaggaagcctggaattgt

SEQ ID NO: 23282 - DNA, 120 bp, synthetic construct
  source 1..120: mol_type = other DNA
gctctctggcatcacagtgggcacgtgggcgtggctctgctatctgtggcatcacagtgggcacgtgggcgtggctctgctctctggcatcacagtgggcacaagggcgtggctctgctc

SEQ ID NO: 23283 - DNA, 120 bp, synthetic construct
  source 1..120: mol_type = other DNA
gcttgttggtgcacagccttattatagcttctgcaggacctcggcagcccagccctcggggtcagccatgctcagcaccgtcctccctctcagctcctcccatcttgcttctttccaagg

SEQ ID NO: 23284 - DNA, 120 bp, synthetic construct
  source 1..120: mol_type = other DNA
tgatagtgatgatggtgattatgatggcaatagtaatgacgatggtgacaatgtgaggaccttaatgaactagctgatgtcaaagccccttctagctcccattctgagtgaactagatac

SEQ ID NO: 23285 - DNA, 120 bp, synthetic construct
  source 1..120: mol_type = other DNA
aggagatgcccaggcctggagcgaaatcactttcttccctctccctagataactgtttaaagtgggtcatatccccagaaagtttctgtgttactaaaatagttgctcagtgtattataa

SEQ ID NO: 23286 - DNA, 120 bp, synthetic construct
  source 1..120: mol_type = other DNA
tgctgagacatcttcccctctggggccctgggcagtttggttctatgggagaaatgcatgttagaaatagtttcatattaagaggaagcaaaggctgacacagggccttggtggctgcat

SEQ ID NO: 23287 - DNA, 120 bp, synthetic construct
  source 1..120: mol_type = other DNA
ttgtactgtcttactttggttttggtatgaggttataccagtctcaatgaatgagctggtcagctttccttcttttctcttctttacaaagaagagaatgtttgtatgaggtggagataa

SEQ ID NO: 23288 - DNA, 120 bp, synthetic construct
  source 1..120: mol_type = other DNA
gcggctttgatgcttggcacttggtgcctactggggggatgcgggaggcgtctgtggataaacgtgaatatgcccgaaatggggcaggaatgtccatgctgcccatcctggaggaagatc

SEQ ID NO: 23289 - DNA, 120 bp, synthetic construct
  source 1..120: mol_type = other DNA
ggcccaggcccagctgctgtgccctgtgctctctggggcctctgcctccacagctgggacctccccccagcggaggggcctttggcctcagggtcctcttgctgcccagccactctcacc

SEQ ID NO: 23290 - DNA, 120 bp, synthetic construct
  source 1..120: mol_type = other DNA
cgaggttgcaccactgcgctcaaaaaaaaaaaaaaaaaaaaaaaaagtgatcaatgccatggtgtggagcacttcacaacattgtgcagccaccacctctatccggttccagaacgttcc

SEQ ID NO: 23291 - DNA, 120 bp, synthetic construct
  source 1..120: mol_type = other DNA
aaaactcctggaaataaatgagaacaccacagtgtctatgagagaaaaattaaatatcaacaactcccatgttaggatgtccacacgccgcatccctgacagaatccaaaggcagaagca

SEQ ID NO: 23292 - DNA, 120 bp, synthetic construct
  source 1..120: mol_type = other DNA
caatgtgctgggaggaagctggcctcggtgagccctcagggggaagcaaggcgctgggaggaggccggccttggtgagcccttggggggaagccggccttggtgagcccacagcggggaa

SEQ ID NO: 23293 - DNA, 120 bp, synthetic construct
  source 1..120: mol_type = other DNA
gcccacagtggggaagcaaggctctgggaggaggccggcctcggtgagcccacagtggggaagcaagtctcttggaggaggccggcctcggtgagcccacagtggggaagcaagtctctt

SEQ ID NO: 23294 - DNA, 120 bp, synthetic construct
  source 1..120: mol_type = other DNA
ttctgtctctatgaatttgaccactctagggacctcatatgaatggaatcgcacggtatttgtcctttgtgtctgccttagctgagactccagtgactcaaggttcatccgtgtcgcact

SEQ ID NO: 23295 - DNA, 120 bp, synthetic construct
  source 1..120: mol_type = other DNA
taaaacccaaaggcacccccacacactaggatggctaatgcccaaagaacagaatgtgttatgctggcgacactgtggagaaactggaactcttgcgcactgttggtgggaatgtaaaat

SEQ ID NO: 23296 - DNA, 120 bp, synthetic construct
  source 1..120: mol_type = other DNA
aactgcccctcagctcttcctcctgagtctaaaacacgcacatgcgccccaggccaattccaagttttgtaaactgagcaacagctcttgggaaacaaaaacacagctactgtttattct

SEQ ID NO: 23297 - DNA, 120 bp, synthetic construct
  source 1..120: mol_type = other DNA
tgctgcaagactgtctgctgcaagcctgtgtgctctgaggattcctcttcatgctgccagcagtctagctgccagccggcttgctgcacctcctctccctgccagcaggcttgctgtgtg

SEQ ID NO: 23298 - DNA, 120 bp, synthetic construct
  source 1..120: mol_type = other DNA
tggcagctagactgctggcagcatgaagaggaatcctcagagcaggtgggcacacagcacacaggcacgcagcagacgggcacgcagcaggcctgctggcagggggaggaggtgcagcaa

SEQ ID NO: 23299 - DNA, 120 bp, synthetic construct
  source 1..120: mol_type = other DNA
ttccccttccgtgttgccgagagctggagtctgccgggattaggggtgtttgttcgcccgtgatgtgggccagctcataaatctcccatcacatctgggctgtgtcccatcccatgtgga

SEQ ID NO: 23300 - DNA, 120 bp, synthetic construct
  source 1..120: mol_type = other DNA
aggtgagggtgcgtcaacggaaccaaatatagactcaggactttacaaactgaacggcatctcataggactaaacatgaaactcgcactaataagcgttctctaggttttaaacacaaac

SEQ ID NO: 23301 - DNA, 120 bp, synthetic construct
  source 1..120: mol_type = other DNA
cagcttgctgcacctcctcccaaagccagcagggctgctgcgtgcccgtctgctgtaagcctgtgtgctgtgtgcccgtctgctctggggcttccacttcatgctgccagcagtctagct

SEQ ID NO: 23302 - DNA, 120 bp, synthetic construct
  source 1..120: mol_type = other DNA
ccagctactcccccagacccaagttctgcagaactaacccccagcaggcctggttccaccctgggcagcaccccctctagttctaataaagccgcctctgtctcacaccaacctctgtcc

SEQ ID NO: 23303 - DNA, 120 bp, synthetic construct
  source 1..120: mol_type = other DNA
atggccctagcagggctgatctgcgggcaacagtcagaagagaacaaagcagtgattgcttcatggagacaagatttttcaatctaaaagacaaattttgattctgaaaactgtctttgc

SEQ ID NO: 23304 - DNA, 120 bp, synthetic construct
  source 1..120: mol_type = other DNA
tactcaaagcgctgctactaaggaaggggtcaaactccacgcagccaacagctctggaactcaagccagtcagaagcaagagcgactgcatgagtaacttccaacatgcaaccaagctga

SEQ ID NO: 23305 - DNA, 120 bp, synthetic construct
  source 1..120: mol_type = other DNA
gcaaaattataatcagaatacaaaaatgtcaaaagggaacccttgatccttcccgtcctggggtcaaaaacagaacctgcaccctgctgtaacttcctggaggaggtggttttggttcac

SEQ ID NO: 23306 - DNA, 120 bp, synthetic construct
  source 1..120: mol_type = other DNA
caagatatggacctggtgcccagttaccccgggcactcccacctgcccacagggagagggggtgcaccttgattccagcaggattggctcagagaccacggcaccccaaccttgaccaca

SEQ ID NO: 23307 - DNA, 120 bp, synthetic construct
  source 1..120: mol_type = other DNA
tgagttcaagttacacggttgactatagagacagctggagtgcgcacaattggccagaccacccctcctgtttcacagatggggaaactgagtcacgggggaccaaatagcctgctcacc

SEQ ID NO: 23308 - DNA, 120 bp, synthetic construct
  source 1..120: mol_type = other DNA
gctgggtgccaggctggcagggaccctggggattctgctgtgagctggatggggaaggagttccttcctaaaatgtggagtctggaggccactcttggtaaagtgctggcccccggggat

SEQ ID NO: 23309 - DNA, 120 bp, synthetic construct
  source 1..120: mol_type = other DNA
ttggaacttgtggttctgcagtggtttggtcacctctggccaccacgacgtctgctctaagaagggaggagccagcctctgcccacgggaaggtgtttaggggatgctggatgctgactc

SEQ ID NO: 23310 - DNA, 120 bp, synthetic construct
  source 1..120: mol_type = other DNA
gttgaaatctggatgatacgtttggttctgtgactgggcactgcggcccccagttagcagggctaggacactgatttgcagaaatttgtactcagttgtcctcttgggtacaaaaatctc

SEQ ID NO: 23311 - DNA, 120 bp, synthetic construct
  source 1..120: mol_type = other DNA
cccacccaggaaaatctcccttttgatgaactcagtcagctgatgagatgccttaattgcatctgtaaaatcccttcacctttgccttatgtaacactatatcccatcatgttcacagtt

SEQ ID NO: 23312 - DNA, 120 bp, synthetic construct
  source 1..120: mol_type = other DNA
cctgacagaggcgtggcttagtgttcagggtccatagtacatgaagaatcctacagatccctatggacaaggcagtacagtagaatttggggcaaaagacttgcacagattttttttttt

SEQ ID NO: 23313 - DNA, 120 bp, synthetic construct
  source 1..120: mol_type = other DNA
gagaggggtctgttgtcgctggctttcccccaagcaggctcttgcacactctagaaaaaacaccttgtaagtctgtgcatttttattgtcttgataaattgtatttttttctaatgggga

SEQ ID NO: 23314 - DNA, 120 bp, synthetic construct
  source 1..120: mol_type = other DNA
cggtgtgcacttttagactatagctgtttcattgacgtgtcactctccatccagtgtccttgatgtggcttttagagacttagcagaaaattcgacacaagcaggaacttgattttttaa

SEQ ID NO: 23315 - DNA, 120 bp, synthetic construct
  source 1..120: mol_type = other DNA
cacaactcagctttaccctcccaggaattacagttgaagatcatgcagatcttcatggatctgggtagttccaggtctacccagaacagaaccagggatcaagaagaaaggaaagaaacg

SEQ ID NO: 23316 - DNA, 120 bp, synthetic construct
  source 1..120: mol_type = other DNA
ggatcagatggaacagaacacgtagaccacctcgcccgcccttagtcagctgggccattgaaaatcaagtccgtagaaagacctagaaataagtcccggggtgcccttgcctgttgacgg

SEQ ID NO: 23317 - DNA, 120 bp, synthetic construct
  source 1..120: mol_type = other DNA
tctgaccctgcatggtttcctgagggacgtgctcagtgggatttgtccctggagcaccaagggctgaaggaaagccactgtcctgctttctcgcagccctggtccccattcttctgtggg

SEQ ID NO: 23318 - DNA, 120 bp, synthetic construct
  source 1..120: mol_type = other DNA
ctgtctgcatccgttcctgtacatagtgaaggtgggttctattgccaaggttctgcaggtgagggtgtgtgctgttcacaccacagcatcacacaggcactctcctgcacacacactcac

SEQ ID NO: 23319 - DNA, 120 bp, synthetic construct
  source 1..120: mol_type = other DNA
tgcacacacacacactcactcacacacagacacacaggcactctcctgcacacactcacactcagacaagcactctcctgcacacactcacactcacactcagacacacaggcactctcc

SEQ ID NO: 23320 - DNA, 120 bp, synthetic construct
  source 1..120: mol_type = other DNA
tgaggaaaccctgcccgttctgtgcccgtgccttgctttttctcctttaaatcccacctgtgagttttatttttgtaactgcagagcatgatgaaaaccgtgaagccacagaggcacacg

SEQ ID NO: 23321 - DNA, 120 bp, synthetic construct
  source 1..120: mol_type = other DNA
ggtggattcctggaggacagctgggtcttgcatccagcacaggtcctggtgcctgggaggtgcttaccccatggccccaaccggcacaagtgtggctgtcacagctggggtctgggtagg

SEQ ID NO: 23322 - DNA, 120 bp, synthetic construct
  source 1..120: mol_type = other DNA
gtggtgagagcacttggagaggctgagaggacatgggctgggagtgaatgcatgtgcacatacacacacacacctctccagcatatgtacacatgcacacacacacctctccagcatatg

SEQ ID NO: 23323 - DNA, 120 bp, synthetic construct
  source 1..120: mol_type = other DNA
acgtgggatgaatagaaactagggaataaacagtagatttaggtcccgatacatctacaggtgctgtaagtatgacgagggtagatacatccattgaaggacagacattgtcaatgggat

SEQ ID NO: 23324 - DNA, 120 bp, synthetic construct
  source 1..120: mol_type = other DNA
agtgtgggggtgtggtttggtgtgtgttgggtgtgtagggtgtggtttggtgtgtgttgggtgtgtagtgtgggggtgtggtttggtgtgttgggtgtgtagtgtgggggtgtggtttgg

SEQ ID NO: 23325 - DNA, 120 bp, synthetic construct
  source 1..120: mol_type = other DNA
actgcagccgcaggggccttgccctgcacaatccccggtctcccaggtggtggggcctccacagccggtcacctccctctgcagaaggacccccaggggctccacagccggtcacctccc

SEQ ID NO: 23326 - DNA, 120 bp, synthetic construct
  source 1..120: mol_type = other DNA
caagtggatctgcaggtgaactctcaggatgagtaagtcaatgtaccgaagtcaccagatggaagggcagtctagaaaaaccaccaccgagtcctaagcaattaaaaatgaagttttaaa

SEQ ID NO: 23327 - DNA, 120 bp, synthetic construct
  source 1..120: mol_type = other DNA
aaaataaaaaggcaccattaacaaaaacatcagaaagtatcggttaactaggaagaacctaattaaatacgcgatctctaccgcgaaatggctagaagggcctcaggcaaacccaccagt

SEQ ID NO: 23328 - DNA, 120 bp, synthetic construct
  source 1..120: mol_type = other DNA
gtgggacacagcccgtgacgcgcccctctccccgcagctccacctggttgcgctcaacagccccctgtcaggcggcatgcggggcatccgcggggccgacttccagtgcttccagcaggc

SEQ ID NO: 23329 - DNA, 120 bp, synthetic construct
  source 1..120: mol_type = other DNA
caccacacacacatacacacggtttctcttccaggacgagctgctgtttcccagctgggaggctctgttctcaggctctgagggtccgctgaagcccggggcacgcatcttctcctttga

SEQ ID NO: 23330 - DNA, 120 bp, synthetic construct
  source 1..120: mol_type = other DNA
tgtgtctggcagaagcagcatggggggcagtctgggagatgcagccccctccacaggcagccagcagggaggccatgtggccctccaggttgtgggagcctctgcagccccctggtaacc

SEQ ID NO: 23331 - DNA, 120 bp, synthetic construct
  source 1..120: mol_type = other DNA
gcactccctgcccatacatgctggcagccactgctgtctggggacagaggtaactcggggctccaagaatggggaggacctcctcccgggtgctggagcccctccaaagccagctggact

SEQ ID NO: 23332 - DNA, 120 bp, synthetic construct
  source 1..120: mol_type = other DNA
ctcacctgccctgagtgttcacacctgggcctcggaggctcacccaccctaagcgttcacccctgggccttggagactcacccgccctgagtgttcacacctgggtcgggggtgttgtac

SEQ ID NO: 23333 - DNA, 120 bp, synthetic construct
  source 1..120: mol_type = other DNA
tgctcagctctccttcctgaagaggacaaaggtcacgtggcctccagccagggctcaaggacaccaagttccggcagccacaggcagagagcggagacaaggacagctccgccgtggcga

SEQ ID NO: 23334 - DNA, 120 bp, synthetic construct
  source 1..120: mol_type = other DNA
tgctgaacctatacaatgggtgtcacaaaacacaaactcgagaagatacctggaagggctcccatgagctctgggacagaccaggtcacgggcgtctcaaaacattcagaaaatcatcat

SEQ ID NO: 23335 - DNA, 120 bp, synthetic construct
  source 1..120: mol_type = other DNA
aggcaccacattcctgacatggagaggtgacacgccaggcttctggtgctctgcaaagaaactagtcttccgatgcagttccaattaaaatctgcaaagtgcttaaaaaaaaaaaaaaaa

SEQ ID NO: 23336 - DNA, 120 bp, synthetic construct
  source 1..120: mol_type = other DNA
tttggaaacaaaaatgtaggtagaagggcattcatctcagtgttttcctcgtgtaagaaaaatggaaatggtgactttacccatagactggggatgggttgtaaggcccaccactcatga

SEQ ID NO: 23337 - DNA, 120 bp, synthetic construct
  source 1..120: mol_type = other DNA
tgtgatatatccatgtgtgaacatggtgtgtgtccgtgtgtgtggtgtgttcatgtgcgatatatccatgtgtgagtgtggtgtgtttgtccatgtgtgcacgtgtggtatgtgttcatg

SEQ ID NO: 23338 - DNA, 120 bp, synthetic construct
  source 1..120: mol_type = other DNA
agcctctgcgggaagaagcctcggggaccagggcatgcgtacccagcagcgtggaggcagcatctgccgcgccgttgtagacccgcgcactgttggtggtggggtccacctcgttccaca

SEQ ID NO: 23339 - DNA, 120 bp, synthetic construct
  source 1..120: mol_type = other DNA
tgggctctttttggttccatatgaattgtatgattgttttccctaactctatgaaaaatgacattagtgttctgataggaattgcattgaatctgtggattgctttgggcagtatgttca

SEQ ID NO: 23340 - DNA, 120 bp, synthetic construct
  source 1..120: mol_type = other DNA
gcgatagtttactgagaatgatgatttccaatttcatccgtgatgtttttcatatggttgtgtcatctacagtttctttcatcagcattttgcagttgtccttgtagaaatctttcacct

SEQ ID NO: 23341 - DNA, 120 bp, synthetic construct
  source 1..120: mol_type = other DNA
ccgcggtcctctgggtggcccccccatcttcatcagcccaccccttcctgtccattgtcctctgggtggccctcccccatcttcatcagcccaccccttcctgcccattgtcctctgggt

SEQ ID NO: 23342 - DNA, 120 bp, synthetic construct
  source 1..120: mol_type = other DNA
gaagaattgcttttgcctgagtccattctgttctgtctgcttccccttcctcagatctctgatctaatcagatgtgagtctcagctggcgtctatgcctcagagttaaggagaagagagt

SEQ ID NO: 23343 - DNA, 120 bp, synthetic construct
  source 1..120: mol_type = other DNA
ccattctcgatgtgtggtttctgtctcttgctatgttgtcatgactgcagagttggaaggaacccagatgcacctcgtgtgttctagcctgtggatgcaacaggggacaacttcatttta

SEQ ID NO: 23344 - DNA, 120 bp, synthetic construct
  source 1..120: mol_type = other DNA
tcagcatcgccgtgtcagtccattgacgtagcgcacacggtgttgtcagcatcgccgtgtcagtccattgacgtagcgcacacggtgttgtcagcatcgccgtgtcagtccattgacgta

SEQ ID NO: 23345 - DNA, 120 bp, synthetic construct
  source 1..120: mol_type = other DNA
agccccttgtctaccttgacagggatgtaatttgcagagtccagtgtggagaagattctggctaacacctctgaaataaaaaatgtacaatatttcactttttgtgccaaggtagctctg

SEQ ID NO: 23346 - DNA, 120 bp, synthetic construct
  source 1..120: mol_type = other DNA
tttaaatacgagggcttaatcaatgaatttgtaatgtgtctggggacaggccatggagaatcagccgagaattaggtggtaatactggctcagtgctcatgttctgattttgatcattgc

SEQ ID NO: 23347 - DNA, 120 bp, synthetic construct
  source 1..120: mol_type = other DNA
tggatgtgcatgtggatgaatgcatggatccttagagagagtgaatacgtggatggacagatgcatgtatccatagagagtgaatgcatggatggacgaatgcatggatccatagagaga

SEQ ID NO: 23348 - DNA, 120 bp, synthetic construct
  source 1..120: mol_type = other DNA
gagagggtgaatgcgtacatggatgaatgcatggatccatagagagagtgaatggatgtgtacatggttgaatgcgtggatctgtagagagagtgaaagtgtgcatggacgaattcatga

SEQ ID NO: 23349 - DNA, 120 bp, synthetic construct
  source 1..120: mol_type = other DNA
tacagcctattggtcttaggctacaaagctgtgtagtgcatgactgtgctgaatactgtacgcagttgtgacacagtggcaattgtgtgtttaaacacttcgaaacatagaaaaggtgaa

SEQ ID NO: 23350 - DNA, 120 bp, synthetic construct
  source 1..120: mol_type = other DNA
tggtgagtggtgagtgagtggtgaatgatgagtgagtggtgagtgatgagtggtgactggtgagtgagtggtgagtgatgagtggtgagtgagtggtgagtgatgagtgagtggtgagta

SEQ ID NO: 23351 - DNA, 120 bp, synthetic construct
  source 1..120: mol_type = other DNA
tgagtggtgagtgagtggtgagtggtgagtgagtggtgagtggtgagtgagtggtgagtagtgagtggtgagtggtgagtgagtggtgagtggtgagtgagtgatgagtgagtggtgagt

SEQ ID NO: 23352 - DNA, 120 bp, synthetic construct
  source 1..120: mol_type = other DNA
atacacaaaccagtaacaccatcgtttattatcatcgtcaggtattactattgtaagtaattgtacgagttacgctctgatgtgactggcagggcagcaggtgagtttacaccagtatca

SEQ ID NO: 23353 - DNA, 120 bp, synthetic construct
  source 1..120: mol_type = other DNA
tggcatttttcagttgcttttccagtgccctgtctgaaatatagaggaggaagcacaaacaaaacgaacaaacaaataagaaacccaaagaatagcgaactcaccgctgtgtcattctcc

SEQ ID NO: 23354 - DNA, 120 bp, synthetic construct
  source 1..120: mol_type = other DNA
acaactattatgcgtcaattataaataaagcttaaaaaaagctgacggcttcgaaggtcgaggcaaggaacgtggcctggaaaagacaagggaaaatttccccaaagccttcagaaggaa

SEQ ID NO: 23355 - DNA, 120 bp, synthetic construct
  source 1..120: mol_type = other DNA
tgttatggttctttctagttctgtcgttccctttcagttgcctgcatctcccattagcttggtgggaactggcttctctgtggaggtattctattctgttttctcatttgtttaaagagt

SEQ ID NO: 23356 - DNA, 120 bp, synthetic construct
  source 1..120: mol_type = other DNA
gaaacctccctgctcagaggagggggctccctcattactgaccccgcattgcctccactgacaccagggggcaaggactcaccacctgtggagatgagagcctctgtccctgctcagcct

SEQ ID NO: 23357 - DNA, 120 bp, synthetic construct
  source 1..120: mol_type = other DNA
cacaatttggcagaaggatggagtccaaggtctcagaaggtggcctgaatgtgaccctcaccatccgcctgctgatgcatggaaaggtaagaggagccgccattgtctctgtaggaaagg

SEQ ID NO: 23358 - DNA, 120 bp, synthetic construct
  source 1..120: mol_type = other DNA
aatcttattttaagcaatctcaaacttacaaggcagttataggtacagcccctttgagacagtgccaacctgatatcttctgcgtgtttcctacaaacagggaccttctccagcacaacc

SEQ ID NO: 23359 - DNA, 120 bp, synthetic construct
  source 1..120: mol_type = other DNA
acccagagcattcattcctgcagtggagacagagggacctgcctctccaactgtgggtgtcaggagccaaggcgcatggtaaatggggctctctgtgaggccaggtgcacggccccatct

SEQ ID NO: 23360 - DNA, 120 bp, synthetic construct
  source 1..120: mol_type = other DNA
cagggagatactgggccactcagcccagcggggaacgtgtgtcccgaaactgccttgggctcgccatcagaactgtggcagcatcttccagcgttccttttaacaggctgccgttggaat

SEQ ID NO: 23361 - DNA, 120 bp, synthetic construct
  source 1..120: mol_type = other DNA
tgagtgtgggaagtcaggacacaccccctgccctcctgctttctcactgcacgacgcctgaagtgctgccaacacacgtgtctctcccctaggatatcatcaactccatgagcaacagcc

SEQ ID NO: 23362 - DNA, 120 bp, synthetic construct
  source 1..120: mol_type = other DNA
tgtatctactccctgtgaggggcctccagggcacctggagacagccctgagccatcggcctgtcccagtgggcagagtttgcagatgtgaacttcacatccacacgtttgtcccatttca

SEQ ID NO: 23363 - DNA, 120 bp, synthetic construct
  source 1..120: mol_type = other DNA
actttctctgcgcctaagaagttgggtgacattatcaaacaggccacaaagataccttggcaagcacatttgagggcctggtgaaattaactccccctttcagagtccacatgaaaacat

SEQ ID NO: 23364 - DNA, 120 bp, synthetic construct
  source 1..120: mol_type = other DNA
gaagttactctcagataaaccgtcggtgtaattccagtgctggaggaagaagatactctcagatcatccatcggaggggaaccctgggcggctctgggctgtgcggctcagaccccttag

SEQ ID NO: 23365 - DNA, 120 bp, synthetic construct
  source 1..120: mol_type = other DNA
ccagttggaagcccaggggagacatggaatggagagagaaaattccaagagacacacagagaaccttccaaaattagagaaaccatcaacaattcccaaacaggataaacaaataataca

SEQ ID NO: 23366 - DNA, 120 bp, synthetic construct
  source 1..120: mol_type = other DNA
gaaacagcacacgtaagatcgggtgtgcgtgaggagatgcgaacaccgggaacagtcgagtggatagaaacagcacacgtaagatcgggtgtgcacgaggagatgtgaacaccgggaacg

SEQ ID NO: 23367 - DNA, 120 bp, synthetic construct
  source 1..120: mol_type = other DNA
aggggacgatttcttaaaacgtaagcacagactgtaaaggaaaatactggtgagttcaactttgtgaaatgttggaatactgtttctcataagacaccatgggagagcggggagaagatc

SEQ ID NO: 23368 - DNA, 120 bp, synthetic construct
  source 1..120: mol_type = other DNA
aacacgtcggccatgccgtcctgagatgaacaaacacgtcggccatgctgtcctgagatgaacaaacacgtcggccgtgccgtcctgaaatgaatgaacacatcagccatgctgtcctga

SEQ ID NO: 23369 - DNA, 120 bp, synthetic construct
  source 1..120: mol_type = other DNA
aatgaacacatcggccatgctgtcctgagatgaacgaacacctgggccttgccgtcctgagatggatggacacctggtccatgccgtcatgagatgaataaacacatcagccaagctatc

SEQ ID NO: 23370 - DNA, 120 bp, synthetic construct
  source 1..120: mol_type = other DNA
cgtctgcccatgtgcctgggtcgcatgtcaccctgtgtcccagccgtatgtccgtggctttcccactgactcgtctccatgctttccccccacagtgctgctccttcgaatgccaggtga

SEQ ID NO: 23371 - DNA, 120 bp, synthetic construct
  source 1..120: mol_type = other DNA
ggggtccagatggaggggatgtcggggtccagatggaagggacggcggggtccagcaggcaggctccggccgtgcagggtgtggactgtcccgggggcgctgggggcttctgagggtgtc

SEQ ID NO: 23372 - DNA, 120 bp, synthetic construct
  source 1..120: mol_type = other DNA
agcatgtctgacctgcatctgactcctgccttcgttttcccgcctcacagggagagaagggcaagcgtggcatcgacggggtggacggcgtgaaggtgactggggggagataggatggac

SEQ ID NO: 23373 - DNA, 120 bp, synthetic construct
  source 1..120: mol_type = other DNA
atgcgagattttggacatcatcatgaaaatgtgctgtgagtatctctgagaagccgtcctcgttagggagagcagggccgccagcctggcctgttccactcctagaagggtgtctccact

SEQ ID NO: 23374 - DNA, 120 bp, synthetic construct
  source 1..120: mol_type = other DNA
ttcccttccatgccgacgcgcccagctacccactccacccagccctggaggacatggaagggcctcaaccatccaaatcccacccaaaactgagcccagaggcacccactaaacatctgt

SEQ ID NO: 23375 - DNA, 120 bp, synthetic construct
  source 1..120: mol_type = other DNA
tacttcgtgctggacacctcggagagcgtcaccatgcagtcccccacggacatcctgctcttccacatgaagcagttcgtgccgcagttcatcagccagctgcagaacgagttctacctg

SEQ ID NO: 23376 - DNA, 120 bp, synthetic construct
  source 1..120: mol_type = other DNA
cttttcaaccaaagttcaggctttgcaaaaaaaccacatagatgctcccgtttaaaggaccccaaaatgccagatcgatttttccacataaaaatctcactggtgtccctggtagagaca

SEQ ID NO: 23377 - DNA, 120 bp, synthetic construct
  source 1..120: mol_type = other DNA
attacttatgtatttggtgcaaggtacagatatctccttatgtttttcaaaagtcgacctttgcattgctcagagggagcataaaccaatccagcactccccgtccaccttcacattgct

SEQ ID NO: 23378 - DNA, 120 bp, synthetic construct
  source 1..120: mol_type = other DNA
gatgcctagcacagtctcactgtccccgctcatggttctctaaaccacacgtcttgtttccttcctgtcccttgattacattttcatctatgtacttttcctacttgttttttaattatt

SEQ ID NO: 23379 - DNA, 120 bp, synthetic construct
  source 1..120: mol_type = other DNA
ggtagcaccctacacattttattctgcaactgaactttttgctgctgcattatctctttgagatttatccaccctgagccatctggtagctacctggttcatttaactgtttcctggcaa

SEQ ID NO: 23380 - DNA, 120 bp, synthetic construct
  source 1..120: mol_type = other DNA
ggaggagcccctgctctgtgagcatcctctgtggatggggaggagccccctgctctgtgagcatcctctgtggatggggaggagcccctgctctgtgagcatcctctgtggatggggagg

SEQ ID NO: 23381 - DNA, 120 bp, synthetic construct
  source 1..120: mol_type = other DNA
catcctctgtggatggggaggagcttccctgctctgtgaacatcctctgtggatggggaggagcctccctgctctgtgaacatcctctgtggatggggaggagcctcctgctctgtgagc

SEQ ID NO: 23382 - DNA, 120 bp, synthetic construct
  source 1..120: mol_type = other DNA
tgaggcagtgaagctggaggcccgtggcgtgcacaggcagccactcccacattatgaccagggcccgagaatgccaaggacattaggcagctacgggatgtagcgactgtactccaagag

SEQ ID NO: 23383 - DNA, 120 bp, synthetic construct
  source 1..120: mol_type = other DNA
gccccacgatggcccccacatgctttggagcactgggtggccctgagggctgggctggaggccacctactgacctcactccctgatgagaagggtccagcagtgcatgtccacccctcag

SEQ ID NO: 23384 - DNA, 120 bp, synthetic construct
  source 1..120: mol_type = other DNA
caaatggccacaaacctaatagggcagcacagacgggatgttgcgggtgcatctgtatgtatgtgtgcacaggtgcctgtgcatgtgtacatgtgtgcatagacctgtatgtacatctgt

SEQ ID NO: 23385 - DNA, 120 bp, synthetic construct
  source 1..120: mol_type = other DNA
agatgggatgctgtgggtgtatctgcatgtgtgtacacaggtgcctgtgcatgcgtatgtatgtgtgtgcacagacctgtgtgtgcatctgtctccatgtacctacgtctgtgtgtggca

SEQ ID NO: 23386 - DNA, 120 bp, synthetic construct
  source 1..120: mol_type = other DNA
cattctgacttacacttgcacaaaagaatacacctgctaagaaatactcaggcagttaggggtacacatcctatctgcaaattcctttccaatggttcaagaaagaatgggcctggatca

SEQ ID NO: 23387 - DNA, 120 bp, synthetic construct
  source 1..120: mol_type = other DNA
acttacttaaaagggtgtttttttttctcacattttgggttacacttccagcatttcgcagctggagtggttcaggtctgtggtcctcctttcacctcccaacccaccctccaagcaact

SEQ ID NO: 23388 - DNA, 120 bp, synthetic construct
  source 1..120: mol_type = other DNA
ggtcacataaaatgagccatcccaaaacaagcccgtctctttcctaacagttataatgttgttaggacggggaaatgtgcagagaggagcagagccagcatcttcctgattttacaggca

SEQ ID NO: 23389 - DNA, 120 bp, synthetic construct
  source 1..120: mol_type = other DNA
tcatcctaatcttgtggcccttcacaagcttcacagaggtggcttcggtcttgagcaaggaggggattcgttttagggagggatgattactattcttgatttaaagttaaactctagatt

SEQ ID NO: 23390 - DNA, 120 bp, synthetic construct
  source 1..120: mol_type = other DNA
gattaaattcctcccgcggttagcctgacccgtgcccgggactcagtggagtcagccacgcaagttagactctagattaaattcctcccgcggttagcctgacccatgcccgggactcag

SEQ ID NO: 23391 - DNA, 120 bp, synthetic construct
  source 1..120: mol_type = other DNA
cctctgtctttggccctgagtgccgcctgcacctccttaattcactgccacggggttctattcacttccatggggttctattcattcactgccatgggggttctattcattcactgccat

SEQ ID NO: 23392 - DNA, 120 bp, synthetic construct
  source 1..120: mol_type = other DNA
ttcactgccgtggggttctattcattcactgccttggggttctattcactcactgccttggggttctattcactgccatgaggttctattcattcactgccatggggttcaattcactgc

SEQ ID NO: 23393 - DNA, 120 bp, synthetic construct
  source 1..120: mol_type = other DNA
atagtgttgtacattcagtggcggaagcgcattcacagtgttgtagattcagtggcggaagcgcattcacggtgttgtgcattcaatggcggaagcgcattcaccatgttgtatattcag

SEQ ID NO: 23394 - DNA, 120 bp, synthetic construct
  source 1..120: mol_type = other DNA
tgcattcacagtgttgtatattcagtgacggaagcgcattcacagtgctgtgcattcagtggcggaagcccattcacggtgttgtgcattcagtggcggaagcccattcacagtgctgcg

SEQ ID NO: 23395 - DNA, 120 bp, synthetic construct
  source 1..120: mol_type = other DNA
cgcattcacagtgttgtatattcagtggcggaagcgcattcacagtgttgtatattcagtgatggaagcacattcacagtgctgtgcattcagcagcggaagcgcattcacggtgttgtg

SEQ ID NO: 23396 - DNA, 120 bp, synthetic construct
  source 1..120: mol_type = other DNA
agctggtgaaatgtcagttaacatgtatgaatttaatattttagtttttgggtggcttaaagacttcaggattcaggccgggagtggtagctcacagctgtaatcccagaaccagactcc

SEQ ID NO: 23397 - DNA, 120 bp, synthetic construct
  source 1..120: mol_type = other DNA
ttaatgaattggctatacagaaagagtcggcagatagacaagtgttaatgcaggaagaagaaattaaacgtctggaggagatgaacatcaacatcaggaaaaaagtggcccagctccagg

SEQ ID NO: 23398 - DNA, 120 bp, synthetic construct
  source 1..120: mol_type = other DNA
cctgtttatagtagagatgatattcaaaattgcagagcattcataacttcacagatgcccttgaaagaccttgtgtagaatcgtgtgtgtggtgcccacacaacacgtgctcagtgaatg

SEQ ID NO: 23399 - DNA, 120 bp, synthetic construct
  source 1..120: mol_type = other DNA
tgaatgaacatagcgtgggagaattgtgtgtgtgtggtgcccacgtggcgcgtgctcggtgaatgaacacagcgtgggaatgctccctgagtgaacacagcgtgggagagtctcaaaaaa

SEQ ID NO: 23400 - DNA, 120 bp, synthetic construct
  source 1..120: mol_type = other DNA
ggagcacagtccgtgcctgcagtgacatgttctctgaatcctttctgttctgtaacgagctgtccataactgttgtgaaatttcgtacgtgcttcatttaagccactctgtagaaacaat

SEQ ID NO: 23401 - DNA, 120 bp, synthetic construct
  source 1..120: mol_type = other DNA
ctttgcacttaacgctctagtcctctttctgagactttgctgagggattccggattggcaagatggcatgttcatattctaatgtcagagaaaaaaatcctgtgattcaaaatacgcctg

SEQ ID NO: 23402 - DNA, 120 bp, synthetic construct
  source 1..120: mol_type = other DNA
tgtcaaaacttttggtaacattttgtatcttatttctcctcagactgtgtcttccagaagattttctggaatccatctggtgggcaagctctttgtaaataatgatgccttagaatagtt

SEQ ID NO: 23403 - DNA, 120 bp, synthetic construct
  source 1..120: mol_type = other DNA
tttttgtcttagaacagtttatcgggaaagagatcattattcagttcaaaaggtaagaatgcatttgtgaattggggcccggacattccaggtagaacaattatttgctcctttcatgta

SEQ ID NO: 23404 - DNA, 120 bp, synthetic construct
  source 1..120: mol_type = other DNA
aaaaggtaacttgcctagttggagatggcgtctgatctcaggcaggctaacaatggagcccacagtttttactactatcgggggaaatgaccgacactatagaatgaaatagattggatc

SEQ ID NO: 23405 - DNA, 120 bp, synthetic construct
  source 1..120: mol_type = other DNA
ggccagaagccccacagatgttggccctggcttggacaggcagggggcaccggggcaggagctggctgcgatcctgtggccccaaatgccccctcgctgatggcctcgtgttctgggtgt

SEQ ID NO: 23406 - DNA, 120 bp, synthetic construct
  source 1..120: mol_type = other DNA
gcttgtaacggcttgcacgtgcatgccgcgcgcgcacgccacacgcgtggcagtggcttggctggcttgtaagggcttgcacgtgcatgccgtgcgcgcacgccggacgcgtataacggt

SEQ ID NO: 23407 - DNA, 120 bp, synthetic construct
  source 1..120: mol_type = other DNA
ttaccatccaataataccatatcaaatgctgggttagaagcaaagagccttggaagcagtaaatgtttaaagtgagtttttgagatgagtagagttactgtggtgaggcagagaaggggt

SEQ ID NO: 23408 - DNA, 120 bp, synthetic construct
  source 1..120: mol_type = other DNA
aacaagacaagttagaagtaccagtgggtgcaggattctttatctcaggacttttaagacctttatccatagagatcccaacattgttcatttgatccaagtgtagcacctatgcatggg

SEQ ID NO: 23409 - DNA, 120 bp, synthetic construct
  source 1..120: mol_type = other DNA
agaatctcaggtaggttagttggactcaacagagccaagccttgtccatgaagcatcactaggcatgtgtaaaagtagggctttgtgcttgcttcggcggcacatatcctaaaattagaa

SEQ ID NO: 23410 - DNA, 120 bp, synthetic construct
  source 1..120: mol_type = other DNA
agagagaaatctcagatgatgtacaggtttccaggttgtacactagtatttaacctagacgtgaggaaggagtaggaaattttctggtgaatacagaagagcaaagaacagcaggtcagc

SEQ ID NO: 23411 - DNA, 120 bp, synthetic construct
  source 1..120: mol_type = other DNA
ttgtgtccacatgaattatcagtcaccttgtcttaatgaataatggttcactacaaatattggttttggcatttaaagtgatctatatctaaatgcagataggaccagggaccactcttg

SEQ ID NO: 23412 - DNA, 120 bp, synthetic construct
  source 1..120: mol_type = other DNA
tatttttacaacatcctaacatgatgaagaatgtaacatcaattattggattatattattaagcaatagaattatgaacaatgtaacactgatggtccctgagctggattcatggttaaa

SEQ ID NO: 23413 - DNA, 120 bp, synthetic construct
  source 1..120: mol_type = other DNA
tggtaatagttctgtgtatatgatccaatttaagagtgaaatgtttttaatgactaaaataatgataaactggtcaagtgataaaatcaattaaaaatattctttctattcagtaaaggg

SEQ ID NO: 23414 - DNA, 120 bp, synthetic construct
  source 1..120: mol_type = other DNA
atgtgtcagagttcctcctaataactaaaaggcagtcaaccatctggcatgttatctctcctgcttaaacttctgtttcttatctcttttgctctgtttcagccacactgaacttcttgc

SEQ ID NO: 23415 - DNA, 120 bp, synthetic construct
  source 1..120: mol_type = other DNA
cattagatcgtcctaagagtgtgacctgaaccctgttgtaagttgctcatgcaggggatataggttgttcactccttatgtgaatcaaatgcctttatgatctgtcaccatctcccatca

SEQ ID NO: 23416 - DNA, 120 bp, synthetic construct
  source 1..120: mol_type = other DNA
gaggaatttacactctgctaggtttggagttttgtccagttttttccagttaaatatccactatggggattctttcattatacaaatacagatgttattttttaatttcagaagaaatca

SEQ ID NO: 23417 - DNA, 120 bp, synthetic construct
  source 1..120: mol_type = other DNA
ccattagcaacgagcggttccgctgccccgaggtgctcttccagccttgcttcctgggcatggaatcctgtggcatccacgaaactaccttcaactctatcatgaagtctgatgtggaca

SEQ ID NO: 23418 - DNA, 120 bp, synthetic construct
  source 1..120: mol_type = other DNA
ccagccaacactcttctttacaggagctatgctgctggggccaagttggaaaggacttttaaaattttgttcacatcttttgtccactgagtttggctctttgagtttgagaatttacaa

SEQ ID NO: 23419 - DNA, 120 bp, synthetic construct
  source 1..120: mol_type = other DNA
tgttgccccaattcccagcagccaaagcaaagagagacttaccagttactacacgtacttaaggatttacaataaaccagcttccatgcagaaacggagtttttttctggaatagaaacc

SEQ ID NO: 23420 - DNA, 120 bp, synthetic construct
  source 1..120: mol_type = other DNA
tgtggctggagtggggagcgtgcacaggtggagagagtggtgtggctgggagtggggagcgtgcacaggtggagagagtggtgtggctgggagtggggagcgtgcacaggtggagagtgt

SEQ ID NO: 23421 - DNA, 120 bp, synthetic construct
  source 1..120: mol_type = other DNA
caattccaacttgcaatcttaactggacatggtttgattactctcaaaatgaatttccccaaaatcctgattctatcagattgccccatcagcaataaagcgtgccctgctttccactgc

SEQ ID NO: 23422 - DNA, 120 bp, synthetic construct
  source 1..120: mol_type = other DNA
acgccccacacctgtggcacactcctgtgagcttaccggccttcgatcacacgccatcgcacacgccccacacctgtggcgccctcctgtgagcttaccggccttcaatcacacgccatc

SEQ ID NO: 23423 - DNA, 120 bp, synthetic construct
  source 1..120: mol_type = other DNA
acagaaccactaagagaggtgttttgttttttaaaaaatacagattcctgagttttacccgagacctagtgaattaaggctccagcgcagataccctgggatctgtattttaagctcccc

SEQ ID NO: 23424 - DNA, 120 bp, synthetic construct
  source 1..120: mol_type = other DNA
tactgtggccctttgtgcctggctttttcacttagcagaatgtttttatggtttatttatgttgtggcaggcattagtacttcattcctttattgccagataccattccactgtgtgggt

SEQ ID NO: 23425 - DNA, 120 bp, synthetic construct
  source 1..120: mol_type = other DNA
ccatcaacatctttgcctttcctccaacccaaaatcaattgccactttcttcctgaaacctttccatgtctccaaaactccaagaaaccttccttaactcaagcagcattgagttcacaa

SEQ ID NO: 23426 - DNA, 120 bp, synthetic construct
  source 1..120: mol_type = other DNA
tgacctggaagcctgagggagaccattccatcctattagcattttaggacacgggaatttcatgtatgttctgcctaatggtggaaagccacaaattctttttgtgtctagaaatcacct

SEQ ID NO: 23427 - DNA, 120 bp, synthetic construct
  source 1..120: mol_type = other DNA
ctcttgggaagtgttctcagcattgggatagctcctgagatactgtagaccttaggaagacgtcctcagagccaaaaattaacattctaaaattaggacattcttctggatgccagctga

SEQ ID NO: 23428 - DNA, 120 bp, synthetic construct
  source 1..120: mol_type = other DNA
tttgtttatagtagaagttggaaaacgtatatttcctcttcagagagacttgcaggtctagaatggcaggttatggtacacgttatgttgcacataaagagtgttctggccgggcatggt

SEQ ID NO: 23429 - DNA, 120 bp, synthetic construct
  source 1..120: mol_type = other DNA
ctgagaaaagtgaaaccagtgcaacaaaaatataaaaatatatccttagtctccaggagcttagagttataaggcagatccacactatttcctgtatgttttatagcaaggagtaacaga

SEQ ID NO: 23430 - DNA, 120 bp, synthetic construct
  source 1..120: mol_type = other DNA
tgaggctccagatctcaaaagggtgattttccctccaattaacgaatattactaagtgctctaagaatgacacaagagcagaaacagaaaagaaacctaattctggcattgccgtcgtcc

SEQ ID NO: 23431 - DNA, 120 bp, synthetic construct
  source 1..120: mol_type = other DNA
ccagagattgaggcagtgaccgaaagctttggcaaccaataactgcttcatttcccaccaggttcagaatgaactatttacaggtgggaaggacagcattaagtcatgatgctagaaagc

SEQ ID NO: 23432 - DNA, 120 bp, synthetic construct
  source 1..120: mol_type = other DNA
aggttatggaggtgagggaggttatggaggttagggaggttagggaagttatggaggttagggaggttatggaggatggcagcagagtccaagaaaagaacttaagtagtgtcctcaaaa

SEQ ID NO: 23433 - DNA, 120 bp, synthetic construct
  source 1..120: mol_type = other DNA
ttctacacgaagggactggtttggaaccaacttaatcttctgtagaaaagctaagaagatccatggattgggatgtcttagagctcgaagacatcattctaggttctggggtttatttct

SEQ ID NO: 23434 - DNA, 120 bp, synthetic construct
  source 1..120: mol_type = other DNA
agaactaaaacaagtaaacttgcccttgtcattggttccttttgcagtgaggaggggaagtctttctagtcctaccttcctccactgctcagacatgttgctattaaagataaaagcagt

SEQ ID NO: 23435 - DNA, 120 bp, synthetic construct
  source 1..120: mol_type = other DNA
ttctatagaggagggggtatttgagaggtccctcaaaagaatggtaggatttcatggggagatgaaaaaggtattctaagaagtgagcttccccttttcttttcttagctcccactggca

SEQ ID NO: 23436 - DNA, 120 bp, synthetic construct
  source 1..120: mol_type = other DNA
tctctctatcactccttttctgccctgtgctctctcctttttcccatccgaaaaatgcctgtgattaaatgaatcattgccaaaccacacggacagcctttcatgttgcctttcttccca

SEQ ID NO: 23437 - DNA, 120 bp, synthetic construct
  source 1..120: mol_type = other DNA
gacccctcagattatagagacatttgtgtaagaggcacacatctttggaggtgcagaattgatattatttatggacattttacttccatacctaacctttctctgcctctcagtagagta

SEQ ID NO: 23438 - DNA, 120 bp, synthetic construct
  source 1..120: mol_type = other DNA
ctgttatttcttttgaacttttttctgtctctttgctgaaattcttactttgttcatgcattgctgtcctagacatggtaagcatcttcatgatcattattctgaattgtctgtaaggta

SEQ ID NO: 23439 - DNA, 120 bp, synthetic construct
  source 1..120: mol_type = other DNA
aaaagaaaaaaaaaaagaaaaaagaaaaaaagaaaaatacctctcccagtcttgtcccacgggccttgtataagagacgaacttaccaattagccctgccggacactcggagcacctgtt

SEQ ID NO: 23440 - DNA, 120 bp, synthetic construct
  source 1..120: mol_type = other DNA
cctgtccagactcctggaaatctattgtttacctgcctcattggctccaggtgcaggccagttattaatagaagcccatccctcgggcaacagctaggagagcccgcagacatatccttc

SEQ ID NO: 23441 - DNA, 120 bp, synthetic construct
  source 1..120: mol_type = other DNA
tcctgttagccctttagaaatgcaaatatcacctttcgcctacccctctccagacattccctgctgggcaaaaggaagaatctgtaaatggaggtaggctgatggaggtttgattgagaa

SEQ ID NO: 23442 - DNA, 120 bp, synthetic construct
  source 1..120: mol_type = other DNA
aatgaacattttagataatgtaaggtggcaacactggacatcagagatccccacagcagggtttgttgttgttgctgttttatcgtttctgggcagttcatgattctgtattcgccttca

SEQ ID NO: 23443 - DNA, 120 bp, synthetic construct
  source 1..120: mol_type = other DNA
tcggaagcttaagatgctgctcatttcactcattcagctgttgttcccgtagtgtgtagaggaataaaagagttaatcccctgtaatcccagcactttgggaggctgaggcaggcggatc

SEQ ID NO: 23444 - DNA, 120 bp, synthetic construct
  source 1..120: mol_type = other DNA
ggaagaagacccgtgggaaacaggtactcattccctaaatcagactcagctgtccctcggtgcatatgggggatttgttccaggacccctgcttttaccaaaatccacacacactcaagt

SEQ ID NO: 23445 - DNA, 120 bp, synthetic construct
  source 1..120: mol_type = other DNA
gattttgatttttcaggtcttgaagctgacccatttgccccagaccctgacaatccacctcatgcgattctccatcaggaattcacagacgagaaagatctgccactccctgtacttccc

SEQ ID NO: 23446 - DNA, 120 bp, synthetic construct
  source 1..120: mol_type = other DNA
ttcctgtatgtacgggtctatttttggagtgtctcttctgttttattggtctgtttggctatttatgctctagaaccatgacatttagaaaattaagacctgataatatgttacaatagc

SEQ ID NO: 23447 - DNA, 120 bp, synthetic construct
  source 1..120: mol_type = other DNA
caggtcttgcttttcctataacccaccctcttgtttcacccaaccctgtactggatttttttgaagcaaatcccagacatcatactatttcatttataaacacttcattatgtatcccta

SEQ ID NO: 23448 - DNA, 120 bp, synthetic construct
  source 1..120: mol_type = other DNA
cgcacgtgggaatggcagactccggtcattactgtgtctacatccggaatgctgtggatggaaaatggttctgcttcaatgactccaatatttgcttggtaagaaacatcatccacaatt

SEQ ID NO: 23449 - DNA, 120 bp, synthetic construct
  source 1..120: mol_type = other DNA
aaaagcagccgtagacagtacatgggcagatgagcatggctggggtccagttacatttacttgcaaaaagagggttggagactgggtgcgatctcccacctttaatcccggcaatttggg

SEQ ID NO: 23450 - DNA, 120 bp, synthetic construct
  source 1..120: mol_type = other DNA
gtgcccgctgaatctaaaataaaagttgaaagtagatttaaaaaaccccaagagggctgggtttggcttgtgtgtccatagcttgttaacctccgctttagatattaactaatagaaaca

SEQ ID NO: 23451 - DNA, 120 bp, synthetic construct
  source 1..120: mol_type = other DNA
atttattgatcatctcttctccataagatagtgtgataaacacagtcatgaataaagttattttccacaaaaggactttgcagttttaacggggggcagtagggattgtgctatagaaat

SEQ ID NO: 23452 - DNA, 120 bp, synthetic construct
  source 1..120: mol_type = other DNA
atgctaattttgtttgttttgtcttggagaggaggtcaaagtgggagtaaaaatagggagtttggtgtaaggtgggaaaagcaaaggaaccccgcatggatgggctgaagggtgtgatgg

SEQ ID NO: 23453 - DNA, 120 bp, synthetic construct
  source 1..120: mol_type = other DNA
gaaattcccaggttattggaattttaatatagataggtacttccaaattgacctcttacaaattatatgaattcgtaagcttccaactgttatggagttacccattttgagaaatctgtg

SEQ ID NO: 23454 - DNA, 120 bp, synthetic construct
  source 1..120: mol_type = other DNA
aaaacagcagaatttacttgcctctccataagaggttaccacttctgtgtgttcccccgaaacaggtggtggctgggtgagaaggtggacagcactagggcaggagatgggggctccagt

SEQ ID NO: 23455 - DNA, 120 bp, synthetic construct
  source 1..120: mol_type = other DNA
aagcctgggcgcccagtctatcctgtccaatgagcgagctgtggagaaggggggattccgggttaaggggagactagcagggctcctgcttttatgttgccctgttgggaaggctattaa

SEQ ID NO: 23456 - DNA, 120 bp, synthetic construct
  source 1..120: mol_type = other DNA
cttttatgatatttagagtttctaaatgtgaatacgtaatacatttagaaatcttagttaataagaaaagcctctgttcctggcctcttgctggcacatgtcaggtggaaatggggctgt

SEQ ID NO: 23457 - DNA, 120 bp, synthetic construct
  source 1..120: mol_type = other DNA
gcccaagacctgcaggtgctgaagcccacacacacggctcctgcttcctgggccagtgcacgtgcacacacacacacgtgcacacacacacacacacccacaaatatacccacacacaat

SEQ ID NO: 23458 - DNA, 120 bp, synthetic construct
  source 1..120: mol_type = other DNA
tgggtgaatggacagatggctggcagctgtggcgagctgctgccctcaccaagtgcacactacggagtggccaaactcatgcctcaacttctagttttcagctcctgcttgttcctggca

SEQ ID NO: 23459 - DNA, 120 bp, synthetic construct
  source 1..120: mol_type = other DNA
actgaacactgcctgctccagatgtgtacacctggagtctgggcccctccatctgggcagcagagaaactgaggcacagagacagactgtgtccttacagggcacacagcctgccaggcc

SEQ ID NO: 23460 - DNA, 120 bp, synthetic construct
  source 1..120: mol_type = other DNA
attggtttaaattttttttaaaaaaattaaataaataaaataaggattgaagagtgacttgtacaccagttgagcccacctccatctcacccttgcagagccccagagacacagccctcc

SEQ ID NO: 23461 - DNA, 120 bp, synthetic construct
  source 1..120: mol_type = other DNA
agcatcggctggccaccctctgcctaagaaagcgccagggtcgtgacaccccctggtggctgatcctaggtagtgtcactgcccagccccagtaagggagggcctggccccaaagtctga

SEQ ID NO: 23462 - DNA, 120 bp, synthetic construct
  source 1..120: mol_type = other DNA
gcttgttgtgcagccggggctcctccacggccctcttcacgtcatagccgaaccagaggttgtagatgatggcctggggcatgggagtgtgatcagcgtggcttgggggctgtgcagagt

SEQ ID NO: 23463 - DNA, 120 bp, synthetic construct
  source 1..120: mol_type = other DNA
ggcgtgtagaactcgggcttgtagtaggagatcgggtgagtggtgtggtcagagatctgggaccggagctgggcagcgaagaactcagaggtcatgttgcggaccacctgctgagacccc

SEQ ID NO: 23464 - DNA, 120 bp, synthetic construct
  source 1..120: mol_type = other DNA
atgaaaacctgagcatcacaagccgctctctgcgtttgtggtgtgatcagggccttctaccacaagccatgtgcccaggctgatcctctctaatgtggagaggcggctgcgctggaaagg

SEQ ID NO: 23465 - DNA, 120 bp, synthetic construct
  source 1..120: mol_type = other DNA
aggactccaatatgaattcggggggacccaatttaacctgtaatatgtatatcccaaatgcaattttctccttttttcttttagacagttgctctgtcacccaggctggagtgtagctct

SEQ ID NO: 23466 - DNA, 120 bp, synthetic construct
  source 1..120: mol_type = other DNA
tatgtaaatggaagccttcagtgccagctcctttaggttgtaaggactgaacacgctcacagaagtcgtgtgcacagtgaggtgggggctgaaatgcagcagctcctctccctgtgttct

SEQ ID NO: 23467 - DNA, 120 bp, synthetic construct
  source 1..120: mol_type = other DNA
agctctaggcataccacataatacccaagcacattttaatcattaaaattgtttcctttttttgtggctactgtaaccacttcagcgaaccatttagtgtgtagtgggtttaaattattt

SEQ ID NO: 23468 - DNA, 120 bp, synthetic construct
  source 1..120: mol_type = other DNA
gcgccaacctcagtttccctctgcagcctgctgcggaggcgaagccaggcagcgcagcctctgcaaggggaggcgcgcgaggcggcgcgggagcgcgcggagcgggtgcgcagaagactg

SEQ ID NO: 23469 - DNA, 120 bp, synthetic construct
  source 1..120: mol_type = other DNA
tcctgacattccctgggtccttctcaagaatgaactggagctggcggagaccaaatgcgccttgcaggaggagaagctgcagcaggtgagggcagaagcgggttctgttggaggagggta

SEQ ID NO: 23470 - DNA, 120 bp, synthetic construct
  source 1..120: mol_type = other DNA
agagtgtagaccaaggttgcctaataaactcaagggatgaagctcgtgggttcgtcgtctgtctcccatgtcatgtaggagcttgactggcttttcagcctccaaagattccttccttcc

SEQ ID NO: 23471 - DNA, 120 bp, synthetic construct
  source 1..120: mol_type = other DNA
ctctctaggggcaaatccaggaactgccctttggctgaaggtggacttaggacttgacacaaaacctcacagattccaacacagcactattttgggtttttattttgttgatgttggtta

SEQ ID NO: 23472 - DNA, 120 bp, synthetic construct
  source 1..120: mol_type = other DNA
taccaaccccacatgtttaagtgctgcccccttcggggatggctcacttgctgggatcgccatcctccctttgttcaggccggacccctcaaagccacctctgactcccacagcagggag

SEQ ID NO: 23473 - DNA, 120 bp, synthetic construct
  source 1..120: mol_type = other DNA
tttttgggccttgctcctcagtcctggctcttagtaggaccctctgcagccaaactagcatatcctgagccaggctgaccttaaaaagtaagcattcagggcctagggaccttgggcaaa

SEQ ID NO: 23474 - DNA, 120 bp, synthetic construct
  source 1..120: mol_type = other DNA
acacacattggccacagaaaaaggcgcttctccgtatacctgccatagttatcagcaactttgaaatggcttctcagactctcaggggttggcttgttgtgtttgcttttgcaaataact

SEQ ID NO: 23475 - DNA, 120 bp, synthetic construct
  source 1..120: mol_type = other DNA
ccctgggcatcttgatgactttggcggatggagctggacacagtgccgagctgggctcatggagctggcaccctctcttcacccccagagcttgtccttgcctgctgtggggctcaggct

SEQ ID NO: 23476 - DNA, 120 bp, synthetic construct
  source 1..120: mol_type = other DNA
catcggcgacctcacaaaccttaagcccatctgcatacacagcataaccggtgacctggactccattggaggacccagctgagtcaatggtcacagggagccagctgaccaccaggacac

SEQ ID NO: 23477 - DNA, 120 bp, synthetic construct
  source 1..120: mol_type = other DNA
tcagggtgatcattgggcccctcaaatgggttgtagttatactgagccatgaagatcttgagcttgggggcagcaggagccgccgagccccccatttccagggccagggacacgctgtca

SEQ ID NO: 23478 - DNA, 120 bp, synthetic construct
  source 1..120: mol_type = other DNA
ctgctgaagcatcaactgcctctgcaggcgcagcacttcccgctgggactcgcgctgcaggcggtctaagtctctgacgttgagccactgggtgcaggggccgccccttccagtatgcag

SEQ ID NO: 23479 - DNA, 120 bp, synthetic construct
  source 1..120: mol_type = other DNA
gcaagagccgctggaggtctggggcagcggttcttccaaggaatgcacagcttgggggtccggtgatcccgacaaagccgggtgcccgcggaagtgcgccaggatgtacttgaggaagag

SEQ ID NO: 23480 - DNA, 120 bp, synthetic construct
  source 1..120: mol_type = other DNA
ggctggaaaatgcagcaggataggcctcaacttggctagacctggactccccaggacccttcagccccctaacagccctgatcacccaactggtcatccaccttttgaggaaaggatgtg

SEQ ID NO: 23481 - DNA, 120 bp, synthetic construct
  source 1..120: mol_type = other DNA
tgttttacggaagagaacctgaggctcagtgagagccactggcttgccagggcacatgggcaactgaggcagagctggtgggtggggtttcacagcctggatgccctgctgcagtctcca

SEQ ID NO: 23482 - DNA, 120 bp, synthetic construct
  source 1..120: mol_type = other DNA
aactgctcatgtctttcatgtactatcacacatggaatgactgagataatcctgtgttccacacatagtcctcctcccatcccccaccacttaggcaagagctgtgcccaggaaatgtca

SEQ ID NO: 23483 - DNA, 120 bp, synthetic construct
  source 1..120: mol_type = other DNA
catgcaaaagaaaagaactttttatctgaggaatgcgagacccctttaattatctggcccagagagtcactggactgaaacagcagtcacatgtcactcccacttgagctaacgacctct

SEQ ID NO: 23484 - DNA, 120 bp, synthetic construct
  source 1..120: mol_type = other DNA
tgtcattattcactttattcactcctggtttctgtctggaagggatcacaaagacatggcttgcaggggagccaatcctgccagggactgaggaaacagatcctggagaaaaccagagac

SEQ ID NO: 23485 - DNA, 120 bp, synthetic construct
  source 1..120: mol_type = other DNA
ttgactactgctagctagaaggcagagccaggtgtacaggatgactaggcataataaaggcagactaggagcgggaccactgaagcacagcatcacagggagatggttaggcctccggat

SEQ ID NO: 23486 - DNA, 120 bp, synthetic construct
  source 1..120: mol_type = other DNA
ccgcaatgactcagcaagggccggtgggattctacatggtcctgcgatatccaggcgacggagtctcgcctctaaagtggcccggggagcaggaaggtatgagcctcagctgagcgaaac

SEQ ID NO: 23487 - DNA, 120 bp, synthetic construct
  source 1..120: mol_type = other DNA
gagcagcgcccttgggtagttggaggtctgttgacagctgtgcgcgcccttcagggtcagttccctctcaggcctgcagggcctcattctagttgcacatcaaattcctaagcactgtct

SEQ ID NO: 23488 - DNA, 120 bp, synthetic construct
  source 1..120: mol_type = other DNA
gcagctcttgagatgatcacgtggtgaatcattttctattactacagtgaattacagtcacttgaattccatcctactgggtcgtgctgtagtatcctttttatgtatgctggatttgat

SEQ ID NO: 23489 - DNA, 120 bp, synthetic construct
  source 1..120: mol_type = other DNA
tcctggggaactgtagccatttggcacttaatgcactggcgccagctgcggggtgctccatgttccattttgccatgatggtttatgtcccatgatcgcttcctctgtacactcccttca

SEQ ID NO: 23490 - DNA, 120 bp, synthetic construct
  source 1..120: mol_type = other DNA
ggtgtgggtggctaccctgggcctgagtgggacactggaggcctagtgagtcccaccaggtggctcctcgctgagggtgccaggtgtgctgggactgggtggagggtgagaacccaccag

SEQ ID NO: 23491 - DNA, 120 bp, synthetic construct
  source 1..120: mol_type = other DNA
gaggctcagattccgagtggccctgctgggggcagaagctcagattccaccctgtcgtagcaggccatgaccaggcttcacaggatggtcgccccgtgggctcactgcctggcacctttg

SEQ ID NO: 23492 - DNA, 120 bp, synthetic construct
  source 1..120: mol_type = other DNA
actgggaccctccagcctttcctgccccagccctggtcccaggatgctgtcactgccatctgtacaggggcccccatccaagccccagggcatgaggaccacatccagcctgctttgtgg

SEQ ID NO: 23493 - DNA, 120 bp, synthetic construct
  source 1..120: mol_type = other DNA
gatgggtgcccttcatgaggctgctgttctccagggcacggcgggacaagtagggcagcacctccatcacggggccatagggcacgtacttgtacacggggtagccggcctggcctgcat

SEQ ID NO: 23494 - DNA, 120 bp, synthetic construct
  source 1..120: mol_type = other DNA
aaaattattcttgaaattcattttatctttttcctttaacgtagctactaaattttaaattacagatgtggcttgcattatatatctattagcactgctcagatactggggtggggcctc

SEQ ID NO: 23495 - DNA, 120 bp, synthetic construct
  source 1..120: mol_type = other DNA
ctccgattgtttgagggtgggtggtgtggcagtctgggcccagcacaggacagagcagctgccatagtctagaaccacttacccatgggaggggaccccagctccccagagctccccaac

SEQ ID NO: 23496 - DNA, 120 bp, synthetic construct
  source 1..120: mol_type = other DNA
atgtttaaagagaaaacaaaccgttacattccagatgtagttaaaatgttaagggcgtattaatgaggtggcactgtggaggcctcctgagggactggcctccaacactgcatttgtacc

SEQ ID NO: 23497 - DNA, 120 bp, synthetic construct
  source 1..120: mol_type = other DNA
gaccagacaattcacgcagaaccagctgtgggggcagagtccctgcatcaaacgtgctgtgactctggggaccagcccaaacatgcccatgagcctcatgacagacacagctttgcttct

SEQ ID NO: 23498 - DNA, 120 bp, synthetic construct
  source 1..120: mol_type = other DNA
ataaaagaataaccttaatgcttttgaaaaagtaacacatgacataaaagctgaggaaataccagttctgacctggggacacatgtggctgacaagttcagtctccaagcctctccctca

SEQ ID NO: 23499 - DNA, 120 bp, synthetic construct
  source 1..120: mol_type = other DNA
cttcctcctgctccttagacactcttggctggttctgagaaccaggggagaggttgcgggcagcgggtctttcttgctactctgaggcagtcaccctggcctcagcctcctctgcaggcc

SEQ ID NO: 23500 - DNA, 120 bp, synthetic construct
  source 1..120: mol_type = other DNA
ctgcactccgaagtgtgtactccccagttcccacagaggccccaccgttgtgggagagccccctgcaactcccatgtgacattgaacaagtgaacactgatcacccaatcgtcaaacaga

SEQ ID NO: 23501 - DNA, 120 bp, synthetic construct
  source 1..120: mol_type = other DNA
ggcttgtcttcttccccctggaccacagggggtctgtggggccatagtgtgcagtgattttggtcatgttaagttcccagggtaggcaacaagagacacacgtggcaggctgaattccct

SEQ ID NO: 23502 - DNA, 120 bp, synthetic construct
  source 1..120: mol_type = other DNA
gggctctgatccttcacctgccggcgtggactccagggagggctgagagtgccacctttgctctggacccagataattctataaagagccctctatggggtctgtgctggccctgtgtct

SEQ ID NO: 23503 - DNA, 120 bp, synthetic construct
  source 1..120: mol_type = other DNA
tgccctgagatctcgcacagcaccagactctgcaggtggaaggttctagcacttaccagaaactggggtctccccagtgctgtgagcttaatggctatgaagccgtcatcgctgactcta

SEQ ID NO: 23504 - DNA, 120 bp, synthetic construct
  source 1..120: mol_type = other DNA
ccgctcaggctgggacatggcaggggtatagccagcaaagagggggccccacctgaggcttcgatgcagcgcaagaatgtctccatgtggctgtcgcacttggcctcattggcgtagaag

SEQ ID NO: 23505 - DNA, 120 bp, synthetic construct
  source 1..120: mol_type = other DNA
gctccttgtgggtggagaaatcagaacgatattcctgagctctcagaacagcccagggcttgcagcaggttctcaaataaaggtagttacctggttccaagacagagccagtcagggctg

SEQ ID NO: 23506 - DNA, 120 bp, synthetic construct
  source 1..120: mol_type = other DNA
ctgagggtcacctgactttatattcaaacctgatcaagtcagtgaccacggagagagctcagctgcatgaccaacagcacccagagccttcctgaagctccccagaggcgctcggaccct

SEQ ID NO: 23507 - DNA, 120 bp, synthetic construct
  source 1..120: mol_type = other DNA
tgtctgcctgtgaggcagctcaccttcatgaaacaggatcattatctgacaggtccccaggcagatgagttcccgctcagcattcccacagctgctgtgttcatcctctgaggtgggcct

SEQ ID NO: 23508 - DNA, 120 bp, synthetic construct
  source 1..120: mol_type = other DNA
tgggtggctgtccctggggacgtgatgcctattgaaacaagcagagcatgggggtccacaccccgcccttgtccaactctctcctggagggaagcctggcaagccgcttcctacctgtac

SEQ ID NO: 23509 - DNA, 120 bp, synthetic construct
  source 1..120: mol_type = other DNA
tccagacactcagcctgcagggcagggaggaagccaggcaggaccaccctgggaaaggagtcttttcataccagaggcgcctgagaggaaaatcccattgtgaaaccaagtccccaccca

SEQ ID NO: 23510 - DNA, 120 bp, synthetic construct
  source 1..120: mol_type = other DNA
taagctgatacaaggccccttccctgggcagtgagtgtagagggcagttggtaccaccctgacccgccctcctgggcagggcatcaggacagaacaacaagaccacgtttccctccactt

SEQ ID NO: 23511 - DNA, 120 bp, synthetic construct
  source 1..120: mol_type = other DNA
tctgtatccacaccttggtagttctgctgcggaagaggaggatctaacttgactttctagtacttgagtgcccagatttttcaatgttttgttccctcttatcccaagtcccttaaacag

SEQ ID NO: 23512 - DNA, 120 bp, synthetic construct
  source 1..120: mol_type = other DNA
tccttttatgtggggagcatctcttgagaccgtagtttcaggaacaacttctagtctaagcaaaaccattagcgagtcaaacacttacacccaagccagccctgagcacccacacgcctg

SEQ ID NO: 23513 - DNA, 120 bp, synthetic construct
  source 1..120: mol_type = other DNA
aggttctagtgagcagctcacaagcccaggacctggcctctgccttcttccagtgctgaggctgccgacacccatgggaccactagcaagacaacagtacagaccccactgagggacttc

SEQ ID NO: 23514 - DNA, 120 bp, synthetic construct
  source 1..120: mol_type = other DNA
tccatctgtccagttcagctccttcttcctccaccatcctccgcactcccgccaccacgggtcctaggctgaccttggcgctccccatgggattcgggccaacagcatctgactctgagt

SEQ ID NO: 23515 - DNA, 120 bp, synthetic construct
  source 1..120: mol_type = other DNA
cacaagcgcagcaccagcaggctccgcgccagctcccaggttcgccggctgcggtacgcctcctgcgcgttgccgaagtccacggcgggcaccggcggccgcactgccgtggccgaccca

SEQ ID NO: 23516 - DNA, 120 bp, synthetic construct
  source 1..120: mol_type = other DNA
agaagcgaggggtgcagggatcacagagatcaccactcacgtccagaccatagcagagcaggcctagcgctgggtgcccaggcccacgggagagcccacctgtgagggcacctgtgggaa

SEQ ID NO: 23517 - DNA, 120 bp, synthetic construct
  source 1..120: mol_type = other DNA
atacgggcaaggcaagtgctccctcctcattcctcttcttcacaacgacctctcaatactacgacttaattcttctcaacattttagaatcgacttatcgcatttcacataaaactcacg

SEQ ID NO: 23518 - DNA, 120 bp, synthetic construct
  source 1..120: mol_type = other DNA
tgtgagcaaaagtaaagtgggctaactccccatctaattcccacagtcattgtcaagagtcaggaagctactactgccatctataggttaggaaactgcaaaaatctgctgccaatactg

SEQ ID NO: 23519 - DNA, 120 bp, synthetic construct
  source 1..120: mol_type = other DNA
aatcttgtgtcaggtatcactcaccagccctagttcctgatgccatttacaaatctttctcattctctggcaatttatttgacttcctatgagctggggaccttgttcttctcacaagaa

SEQ ID NO: 23520 - DNA, 120 bp, synthetic construct
  source 1..120: mol_type = other DNA
ctccttccatcacccatggcatctctcatgttaactctttcatatctccttctcttctcaaagctctaacgattcctcaagctgagtatttggcttcccttttcctgagaaaacaaacta

SEQ ID NO: 23521 - DNA, 120 bp, synthetic construct
  source 1..120: mol_type = other DNA
aagtatgtctcctgacatttgtgcatgacaggctctttcttcttgtgactgtggattttatgatcatctaaacagtgctttatcagtggtaatgctgtacaccctggcccaaggaatgtc

SEQ ID NO: 23522 - DNA, 120 bp, synthetic construct
  source 1..120: mol_type = other DNA
gggtcaggtctagtgcctctccagcgtgctctcacagcacaaagtaggtacacgttacactatgttatgatgctttcttacagcaacaagcaaagctaaaacatgatgccattaaaaaga

SEQ ID NO: 23523 - DNA, 120 bp, synthetic construct
  source 1..120: mol_type = other DNA
acagctcggacaggaagaagtgagcagcttccactcgtcctgggactggagggtcgggggtgttggggttatcagcttattagccctgctgagtagagtggtatttgcctctagtgtctg

SEQ ID NO: 23524 - DNA, 120 bp, synthetic construct
  source 1..120: mol_type = other DNA
aaagtgattggtgtgacaacagaaaaacttaaaatttctgcatgaaatactatcaccaagtccaaagacaaaccacgatcagtgggtccaatggaaggcagcaggcagtcgatggaaacc

SEQ ID NO: 23525 - DNA, 120 bp, synthetic construct
  source 1..120: mol_type = other DNA
tcaggagagtgtgggcgccgtgggtagcagtgactgctctcaggagagtgtgggcgccatgggtagcagtgaccactgcccaggccaggggtatgggaggagaggctcctttctgttttg

SEQ ID NO: 23526 - DNA, 120 bp, synthetic construct
  source 1..120: mol_type = other DNA
gttttcactgcagcattgataatgatgaagaagagaaactactgagatgctcattaacaagagaaaggtcaaaggaactataccacatccattcaagggaatccagtcctgaccccacac

SEQ ID NO: 23527 - DNA, 120 bp, synthetic construct
  source 1..120: mol_type = other DNA
cacttgcacgctgctagcctcccttccacaatcaagatgttgtttctgaggcctttggagtctttgctagatttcagggaaacccaatgtacaaatcagaagacagtgagggtgttagat

SEQ ID NO: 23528 - DNA, 120 bp, synthetic construct
  source 1..120: mol_type = other DNA
cccaccgggtgcctgggacgtgggaagagcacatttgaatttatgttcaggtgactgctggaggcttccctgttcttctagagtgtttggaattccttaaagttgctttgtaactctaac

SEQ ID NO: 23529 - DNA, 120 bp, synthetic construct
  source 1..120: mol_type = other DNA
tgggaagattcagggctgattgggaactggggagcgtgttatttcatggagtgcaagtttgtggtgtgtttgttgaatttaaaaccagaaatacgtttttcagacgtgcctctgaactca

SEQ ID NO: 23530 - DNA, 120 bp, synthetic construct
  source 1..120: mol_type = other DNA
tgtgtgagagagattgggggtgttcgggcagtgtaagagcagatgtgtgaggtgcccaggcaccagcctccccagttatggtgtgttctaccctcaccaggatcttcctggggaggaaac

SEQ ID NO: 23531 - DNA, 120 bp, synthetic construct
  source 1..120: mol_type = other DNA
tcagctcaggatcctctcggacaccagccatgtccccgtcaggcggtcacgtcacagaccacagttatgaggcagaacaggaggccacagctcagtgcaccaaggccagaaatagctcca

SEQ ID NO: 23532 - DNA, 120 bp, synthetic construct
  source 1..120: mol_type = other DNA
tgtgaaggaaaagtaggctgtggaggcattttctgtccttgttatcatcattgtaaacatactcatcatcaccatcaccatcctcatcaccatcaccaccactatcaccaccataatcat

SEQ ID NO: 23533 - DNA, 120 bp, synthetic construct
  source 1..120: mol_type = other DNA
ctgggacagcccaaggtgcagcctttcctcattcctggaggtttcaggatatccctgtgctgcatcctcccattgtacggtgagggggtgactgccaacccactcctcagatgaggcact

SEQ ID NO: 23534 - DNA, 120 bp, synthetic construct
  source 1..120: mol_type = other DNA
gcccaggccagcacggaggggactcatgcagatgcagaagccaagctccccaggtggccctggcatgcctccccgcagggctcctcctcaggccattcctgccaccctgagtcctctatc

SEQ ID NO: 23535 - DNA, 120 bp, synthetic construct
  source 1..120: mol_type = other DNA
aagcagacagcagcaggctggcccagcctcccctttatgagactatcctagggtttgacagcaagtcccagatgaagggtgacaggcagctggggtccacctggtctctcctcagcaggg

SEQ ID NO: 23536 - DNA, 120 bp, synthetic construct
  source 1..120: mol_type = other DNA
tctctaggggcaaatccaggaactgccctttggctgaaggtggacttaggacttgacacaaaacctcacagattccaacacagcactattttgggtttttattttgttgatgttggttaa

SEQ ID NO: 23537 - DNA, 120 bp, synthetic construct
  source 1..120: mol_type = other DNA
ggccttaccaaccccacatgtttaagtgctgcccccttcggggatggctcacttgctgggatcgccatcctccctttgttcaggccggacccctcaaagccacctctgactcccacagca

SEQ ID NO: 23538 - DNA, 120 bp, synthetic construct
  source 1..120: mol_type = other DNA
tctaggggcagagcctcacccaagaaccctgtctgctctgaggttccaaggagatgacaaccacagtgacaattacatgaaaggtacctatcttggatggagcctcagctaatggacaac

SEQ ID NO: 23539 - DNA, 120 bp, synthetic construct
  source 1..120: mol_type = other DNA
ccatgatcatcaccatctcatccgtcagcttgatgtcgggttcccagccgagattgccgcccggcgagctttcaaacatgaagccaaagtctgcaaaaccccaaagagctgcctgtgact

SEQ ID NO: 23540 - DNA, 120 bp, synthetic construct
  source 1..120: mol_type = other DNA
actggctccactcagggaacttaccccaggggcagtggccaccacgcggtagggaaaaacaaagaggtccaggccgaccagctggaagatgttcttgaagaggtcgatgatctgcagggc

SEQ ID NO: 23541 - DNA, 120 bp, synthetic construct
  source 1..120: mol_type = other DNA
cccaaggaaagccttggaacagcaggtggaatccagggttggagtctaagaacatttaggcttaaatggaactaaaaacagagccccatttcatctgcagtgaagacccaggtgtgcctg

SEQ ID NO: 23542 - DNA, 120 bp, synthetic construct
  source 1..120: mol_type = other DNA
tctgcatcggggtcccagacttgtagtcgatgtccagcacaatggcctcagggttgctgggcaggtagcagcctgtgcagggacagaggcagtcacagggagtgcatgtgtcaccacagg

SEQ ID NO: 23543 - DNA, 120 bp, synthetic construct
  source 1..120: mol_type = other DNA
tgtgtgaaataagaggacaagggaaagcctgtttctggccaaggaactgccagtccccaagggggatgtgtgctccttgagccctgagaggtgggctttgaggggagccaagcttggcct

SEQ ID NO: 23544 - DNA, 120 bp, synthetic construct
  source 1..120: mol_type = other DNA
gagcagctcccgctcactagcggcagattctggggaggggctggggtcctggggcaccaggcaccgtgggcccaagcaggtgtggggctggccaagccactgtgtccacatcctgcagtg

SEQ ID NO: 23545 - DNA, 120 bp, synthetic construct
  source 1..120: mol_type = other DNA
cccgtgtcatttatgaatgtcacaggtgaagcaatgaaaactaattcttattaaactctaccctgaatacatgtctttttttttttttaatagaggcacacagtgggcggggctctatat

SEQ ID NO: 23546 - DNA, 120 bp, synthetic construct
  source 1..120: mol_type = other DNA
tgattcctcaactctggatgggccaagtgcctgtccccgaggagtgctcccatagttccctcatattgaaatcacctgtccatttgactgcctcctacaagacaacaacagaccataccc

SEQ ID NO: 23547 - DNA, 120 bp, synthetic construct
  source 1..120: mol_type = other DNA
gtgtttgcaattcttcgtgcaataagccttcacattaacagggaaattaaatggacgcacttaatctcctaaatcagttgaactgagggaaaatttgcctacatctcgctgggaggctag

SEQ ID NO: 23548 - DNA, 120 bp, synthetic construct
  source 1..120: mol_type = other DNA
cgatccagatgtagtggggggtcacttcggggggacagggtttgggttgacttgcttccgaggcagccagggggtctgcttcctttatctcagcagaaaacaggccaaatttctgctcca

SEQ ID NO: 23549 - DNA, 120 bp, synthetic construct
  source 1..120: mol_type = other DNA
ctgcagagagtaagaggtgcagctcacacatggaaagcccccatgatttctgggtgtttttacaaggagaccaacaaacagcatttggcatctggccaaagaggattctatccctctgtt

SEQ ID NO: 23550 - DNA, 120 bp, synthetic construct
  source 1..120: mol_type = other DNA
gggaagagagaggatggaagtcaggtgggaagggggcttgcaggtcacagaaacaagcccaccttcgagtctgtaggggggctctgattcccccctggcttgcgccaaccgcatgtggag

SEQ ID NO: 23551 - DNA, 120 bp, synthetic construct
  source 1..120: mol_type = other DNA
aaaagcagttaggctcccagaacagctgctttcaagacccagaactctgaaggaggctgtgagcagctttccctaggctgatctgtcctcctaccatctggggcctgctagtgatatctg

SEQ ID NO: 23552 - DNA, 120 bp, synthetic construct
  source 1..120: mol_type = other DNA
gagagggtctggagatacctcttctagccgtacatgctgggatgaaagccatgtttttgctctgtttgggtctggcttgttttgttttggctgttttttctttgaaaatacattgtttag

SEQ ID NO: 23553 - DNA, 120 bp, synthetic construct
  source 1..120: mol_type = other DNA
gctgtgagggcttctgaagtgggtggtgatatcactgccagatgcagccatcgacggtatagctgccccccaccacagcagtctctacagtaccaggaggtaggcggttttaaccacttg

SEQ ID NO: 23554 - DNA, 120 bp, synthetic construct
  source 1..120: mol_type = other DNA
aagaacagggaccccctactttaaagaggtggctggggaggcctctgtgaggtgacatttaagctgaaatgtgcagggtgggaaggagtcagccatggcaagatcagagggagagcattg

SEQ ID NO: 23555 - DNA, 120 bp, synthetic construct
  source 1..120: mol_type = other DNA
gaactgctggatttctcagtaagagcattttataaacctcgtttctgatcctcccagcagccctgtgaggtatcataattttagaagaagaaagtgagggttacagaaatcaagagccct

SEQ ID NO: 23556 - DNA, 120 bp, synthetic construct
  source 1..120: mol_type = other DNA
attcttccagaactctgcataaagactggcgcttgcagagtggagtataaaaaggagttgctgccagtcttcagatcagccctgccagcgtctgtccctaagtgaccttggagtgtggct

SEQ ID NO: 23557 - DNA, 120 bp, synthetic construct
  source 1..120: mol_type = other DNA
gatgtggatttctttggggggtgataaaagtgttctaaaattgattgtggtgatgtgcgactctatgaatacgctaaaaaccgctcgattgtacattttaaatgggtgatttatgcggta

SEQ ID NO: 23558 - DNA, 120 bp, synthetic construct
  source 1..120: mol_type = other DNA
gaattttgaggtgatttatgtgcttccaaaagtatatgagagtgattacctatcagaccttgtgtttgaaggttatcacttgaaactgatttttaatttgtttaggagaaaacccagctt

SEQ ID NO: 23559 - DNA, 120 bp, synthetic construct
  source 1..120: mol_type = other DNA
tgttgttaggatgacattaaacctatacatccattaggaaagaaaggttgcatcatcagcttggcgaagggttattgaaactggtttttgatcttgactggagctggggcacaacttccc

SEQ ID NO: 23560 - DNA, 120 bp, synthetic construct
  source 1..120: mol_type = other DNA
attcagatgtgggtcaggggtgagcgggcggcgccgacgtcacaagcttccaagatggcgctgggcgggcggctgtgagcggcgctcggggcgcgctaggcggggagccgagccgggctg

SEQ ID NO: 23561 - DNA, 120 bp, synthetic construct
  source 1..120: mol_type = other DNA
gactgcctgtgtaagggagcccagtgctgagccggatgggttggagcggtgttaaagttatttatccatgtcttctcctgtcccccgcacccctagtcttttctagtaggagttgccaag

SEQ ID NO: 23562 - DNA, 120 bp, synthetic construct
  source 1..120: mol_type = other DNA
tccctgcggtgtttttctgccagttgttggaacttgtagattagtcactgagtttttacgaccgattcctgaaaagaaaaatctccctctggttgctgcctctgtgtagaggaagaagca

SEQ ID NO: 23563 - DNA, 120 bp, synthetic construct
  source 1..120: mol_type = other DNA
caatgggaacagaactggagtttacattcatgtatcgctgttttctggagctcagcctagggaaggcagacactcaacaaatgattataagatggggtgataagggctggcatctagcgg

SEQ ID NO: 23564 - DNA, 120 bp, synthetic construct
  source 1..120: mol_type = other DNA
tttggggagcccctccttctaactattcaatttattttttatggtaatgttagtgggtggagagtgggagtgcagcctcggtgttagaacagggggacttgggggtccttctaatggtga

SEQ ID NO: 23565 - DNA, 120 bp, synthetic construct
  source 1..120: mol_type = other DNA
ttttcctgaagcttttgaagtgaacctgatgtgcagccaagtttgagaaccgctcttctagcaggtgatgcatctttgttgataatagaatccacaggcggagggatgagtagcccgcgc

SEQ ID NO: 23566 - DNA, 120 bp, synthetic construct
  source 1..120: mol_type = other DNA
cttcccctttatggaagcagctgctattatagtttctgtctggcttgtaccagggtacttggcttagaagatgggaagaggatggtccccacggagttctgacagaaggctaggaaggta

SEQ ID NO: 23567 - DNA, 120 bp, synthetic construct
  source 1..120: mol_type = other DNA
tgctggccgaagggagagggttgttgccaaagtcccacattccaggcatgtgttgatgctgataaggcagcctagggctggcctagccactttgggcaggaggggactttgacttcatgc

SEQ ID NO: 23568 - DNA, 120 bp, synthetic construct
  source 1..120: mol_type = other DNA
ccagcactgggggctgagacccaccagttctacacatgtccaggggaggcagtacagatgactgagtattaaatctagacctttaattacacatatttttacttttctgtgtgatgaaat

SEQ ID NO: 23569 - DNA, 120 bp, synthetic construct
  source 1..120: mol_type = other DNA
caaatgatcctcctgcataagcctcccgagtagttaggaccacagtcatgcgccaccacagccagctatttttttttttttttttttccagagatgggatcttcctggtcttgaactcct

SEQ ID NO: 23570 - DNA, 120 bp, synthetic construct
  source 1..120: mol_type = other DNA
tcagcattgggtctgaccagcatttgctcacctaatgaatgtttatgagtgcctgctgcatgcctgctgctgtggctgcttgggacacagggtctaactttgggtactggtctatggggt

SEQ ID NO: 23571 - DNA, 120 bp, synthetic construct
  source 1..120: mol_type = other DNA
tttgtatgattaggacagggtgatattttctgggttatctcttgtgggaactgagccctccaaagccctcatttgtgcattgttgtcatagctgcccaagtgtgtggccttgctgagttt

SEQ ID NO: 23572 - DNA, 120 bp, synthetic construct
  source 1..120: mol_type = other DNA
attcccacttccctctagaagccaacagtcttctgaattgcgggtcagccattcgctggcttttgtcggtttcccacctttgtctggatcctgaaactgcgaatgattttggctcagttc

SEQ ID NO: 23573 - DNA, 120 bp, synthetic construct
  source 1..120: mol_type = other DNA
ttttttttctttcttggagtaaaataacttgatccttgatctttggctgtagctcctgagccatttgaggcactggggggtttgtgtgttgattacctatgaaggagcaagtgggctgtt

SEQ ID NO: 23574 - DNA, 120 bp, synthetic construct
  source 1..120: mol_type = other DNA
ttgatctctgcttcccttctgaaggtttctgtgcacgtattgaattcaaggacagcctacgtaagaagtgtgcacagctccaagagttcttcacaaatgattatgcccttgtaactagca

SEQ ID NO: 23575 - DNA, 120 bp, synthetic construct
  source 1..120: mol_type = other DNA
ctaggtctaccgtttgtattcaccagcctgtgagcttgtgtacatgggacatgtatcttcgttttgggggctttctccttccacttgatgcccatcccttgagcgtttactacttgtgga

SEQ ID NO: 23576 - DNA, 120 bp, synthetic construct
  source 1..120: mol_type = other DNA
aacccggaagtgatgaggagagggaggggactgaggctgtaccttctgggggaagcacagtttggaggcactttcggtccagctctcctctcagcagcccattccagccttttccttgtg

SEQ ID NO: 23577 - DNA, 120 bp, synthetic construct
  source 1..120: mol_type = other DNA
gctacctacatgctcttgtgaccctgggcaagttgcttaacccccaagaacctttaatttcttatctgaaactgcagagataacgccccgctcactgggcctgtgggaagattgaggaga

SEQ ID NO: 23578 - DNA, 120 bp, synthetic construct
  source 1..120: mol_type = other DNA
tttcttggtagtaaaggatagcttccagggaggaaggtggatgagaaggatcctaggagggctaggcgggatggcctgcttggggtggcgccctttcctggtcttcacccttctccccag

SEQ ID NO: 23579 - DNA, 120 bp, synthetic construct
  source 1..120: mol_type = other DNA
cagtgggaagggttgcctttgcccaaggctaaagatgacatgtccctgcacactttcagccccaggttttcctaccttgtggggaggtgagaggtcagggtgagtgctgggtttgaggct

SEQ ID NO: 23580 - DNA, 120 bp, synthetic construct
  source 1..120: mol_type = other DNA
gtgtttctagttacctggcactccccaggcggagccctccaggataggcacttgctgtttcatgtccagcggtgagcgggtagggcagagctctgtggctgagaaggaaggagcagtgct

SEQ ID NO: 23581 - DNA, 120 bp, synthetic construct
  source 1..120: mol_type = other DNA
gaacccctcgtttcctggcggcagctgcccaaggctttggtgggccggtattgaaagcccaggcctgcagcttgggtgagcccttaggcagtgaaacctctggagagggaaggccatgtg

SEQ ID NO: 23582 - DNA, 120 bp, synthetic construct
  source 1..120: mol_type = other DNA
ggtgcttgctgcctcttgctgttaggctctgagtgccagcggtgttccaggctgtgttgcacccttgcgtgttcacattgagctctggcaccttcaggggcctgtgaatgttagggtttt

SEQ ID NO: 23583 - DNA, 120 bp, synthetic construct
  source 1..120: mol_type = other DNA
ggggaaacaggctccacctactggtggtgagaactgtagacaatctgtggtcgttttgagtccactataagtaaccaaaataccttcagtcttgcttgcatttctcaacattagtgaaag

SEQ ID NO: 23584 - DNA, 120 bp, synthetic construct
  source 1..120: mol_type = other DNA
atcatagctctaggcataccacataatacccaagcacattttaatcattaaaattgtttcctttttttgtggctactgtaaccacttcagcgaaccatttagtgtgtagtgggtttaaat

SEQ ID NO: 23585 - DNA, 120 bp, synthetic construct
  source 1..120: mol_type = other DNA
tagcgccaacctcagtttccctctgcagcctgctgcggaggcgaagccaggcagcgcagcctctgcaaggggaggcgcgcgaggcggcgcgggagcgcgcggagcgggtgcgcagaagac

SEQ ID NO: 23586 - DNA, 120 bp, synthetic construct
  source 1..120: mol_type = other DNA
acattccctgggtccttctcaagaatgaactggagctggcggagaccaaatgcgccttgcaggaggagaagctgcagcaggtgagggcagaagcgggttctgttggaggagggtaggctt

SEQ ID NO: 23587 - DNA, 120 bp, synthetic construct
  source 1..120: mol_type = other DNA
gccgctcctcttcctggggctgtcgctgctctggacggtgctgttggaccccggcgccgtctccgcgtggctctggagcctcacctcggagacgacgctgcgccgcctgcgctacacgct

SEQ ID NO: 23588 - DNA, 120 bp, synthetic construct
  source 1..120: mol_type = other DNA
gattacaggcatgagccaccgtgcctggccaacattttctccagatatcttactgagtcctaatttccactgtggccagagaatacactctgcatgattttaattctatctcatttactg

SEQ ID NO: 23589 - DNA, 120 bp, synthetic construct
  source 1..120: mol_type = other DNA
ccacagggagccctacctgtccaatcagccccttatggctgcccagcacctgaaggtacaaatgtcccaggcgtgccctcccccacccagtgaccacatctgctccaacccgggggactc

SEQ ID NO: 23590 - DNA, 120 bp, synthetic construct
  source 1..120: mol_type = other DNA
caccgaggcagtgggagaaggcaggggggcggggcactcacctgttgctgaggaagcagctctggatgaccttcatgatgaaatttgcagcctcgcgctcagtcatgttggggctaaacc

SEQ ID NO: 23591 - DNA, 120 bp, synthetic construct
  source 1..120: mol_type = other DNA
gatgagcctgcagtattttccttacatgatctggtcctactgtgggcagcgctgctgcccagagcctgagaggattatgaaaacatggcaacggaagtgaggccaggggacacagcatgg

SEQ ID NO: 23592 - DNA, 120 bp, synthetic construct
  source 1..120: mol_type = other DNA
ttctccgtatacctgccatagttatcagcaactttgaaatggcttctcagactctcaggggttggcttgttgtgtttgcttttgcaaataactcaggcttaagtcctgctactttcagag

SEQ ID NO: 23593 - DNA, 120 bp, synthetic construct
  source 1..120: mol_type = other DNA
catcttgatgactttggcggatggagctggacacagtgccgagctgggctcatggagctggcaccctctcttcacccccagagcttgtccttgcctgctgtggggctcaggctccctcct

SEQ ID NO: 23594 - DNA, 120 bp, synthetic construct
  source 1..120: mol_type = other DNA
tggcatcggcgacctcacaaaccttaagcccatctgcatacacagcataaccggtgacctggactccattggaggacccagctgagtcaatggtcacagggagccagctgaccaccagga

SEQ ID NO: 23595 - DNA, 120 bp, synthetic construct
  source 1..120: mol_type = other DNA
acatcgacccctcagaggaggagtttgactgggagctggttttcttggacagaggttggctggcagggactgtctctgaaacttgggggacactggctgactccccaagggcaactgggc

SEQ ID NO: 23596 - DNA, 120 bp, synthetic construct
  source 1..120: mol_type = other DNA
ttccagtatgcaggtcgctgcagggacccgaggcgacacgcgcctgcaggaggtggcactcctgccgcagctcttcgatctgcttgtccttggccagcggcgcgctcgcctgctccgaca

SEQ ID NO: 23597 - DNA, 120 bp, synthetic construct
  source 1..120: mol_type = other DNA
tctggggcagcggttcttccaaggaatgcacagcttgggggtccggtgatcccgacaaagccgggtgcccgcggaagtgcgccaggatgtacttgaggaagagctggcgctccacctcca

SEQ ID NO: 23598 - DNA, 120 bp, synthetic construct
  source 1..120: mol_type = other DNA
ggtggctggaaaatgcagcaggataggcctcaacttggctagacctggactccccaggacccttcagccccctaacagccctgatcacccaactggtcatccaccttttgaggaaaggat

SEQ ID NO: 23599 - DNA, 120 bp, synthetic construct
  source 1..120: mol_type = other DNA
gacagcaaatatttattgagtgcctgccatgtgcagagagcacaacaggctgtgtctctcctgaatgagaggagcatgcattctggtgggggagaacaccagagagcagctcagcagggt

SEQ ID NO: 23600 - DNA, 120 bp, synthetic construct
  source 1..120: mol_type = other DNA
ccaccatgcagtgggcctcactgtgtgtcaagcgctgtgccgaaatccctgcagccggagccagttcttcctgttgtacagacaggttcaggggcttgcctgaccgaacccagcggcaat

SEQ ID NO: 23601 - DNA, 120 bp, synthetic construct
  source 1..120: mol_type = other DNA
tcagtttcttgatgagaaaaaatcgggacaatagcaaccaacctatctcagagggctgctgtgagaccctgagccactgtttctcaaactgcccctgagatcacctacaacagaatggct

SEQ ID NO: 23602 - DNA, 120 bp, synthetic construct
  source 1..120: mol_type = other DNA
acaactgcagaggaaaataaaggaacactttgtgattagccctgcctgtggctgaaagcgcagtgcagaagcatagtaaggaaggactgggtggtctgggtttaagacctaggaaccgtc

SEQ ID NO: 23603 - DNA, 120 bp, synthetic construct
  source 1..120: mol_type = other DNA
cagctgtcaaggccgccttccttaaggcatcagggccactgcttgtgcacacagctaccatcagcagcacggattgagatggggtgtgagtgcaaactgggtctattccccagggcttca

SEQ ID NO: 23604 - DNA, 120 bp, synthetic construct
  source 1..120: mol_type = other DNA
cgtcccagcagaaggaactcttcttggccttgctcttggggacagccttgctcatgtttcggctcctggctgccattacccctgttttctgcttacctgaaacctcctcaactttcaagg

SEQ ID NO: 23605 - DNA, 120 bp, synthetic construct
  source 1..120: mol_type = other DNA
cccacccccactcctctcataatacaaagtatgtaatctgtcatgcagaacctgtgacacactgccaggcaaggagcatgagtctctggctcttgctccacgcgtgcagaaaaggcagtt

SEQ ID NO: 23606 - DNA, 120 bp, synthetic construct
  source 1..120: mol_type = other DNA
ttctgagtgttcagcacctaaggatgacagcactgtctgtccctaccctccgggtcctgtttgaaaatcaaacccatgctcacaggccaatttttttttcttttagagacagggtctcac

SEQ ID NO: 23607 - DNA, 120 bp, synthetic construct
  source 1..120: mol_type = other DNA
ctggcccctcttccactttcgttccgggaggcctcccgtagagctgtaggggctcgagatggcatttcatttggggcacgagctggtccgggaggtctgcgatctctggttctgacctct

SEQ ID NO: 23608 - DNA, 120 bp, synthetic construct
  source 1..120: mol_type = other DNA
tctgacctggctgggcggtagctttggctccaaggtccgctccccggtcagcgagatcctgttcaatgatgaaatggatgacttcagctctcccaacatcaccaacgagtttggggtgcc

SEQ ID NO: 23609 - DNA, 120 bp, synthetic construct
  source 1..120: mol_type = other DNA
tggctgggcagctgcctcggactccaggaaaggcggggagcctgccggctactgagtgctccaggaggacaaggctgacaagcaatccagggacaagatactcaccaggaccaggaaggg

SEQ ID NO: 23610 - DNA, 120 bp, synthetic construct
  source 1..120: mol_type = other DNA
accagtaggacctagaaggggaggtgagaaggggtcaacccccaggtgtgcctgtggtgagccttcgtgctgagcaggtgcagggagggaggcccaggtgcacacacctgtgaagtaggg

SEQ ID NO: 23611 - DNA, 120 bp, synthetic construct
  source 1..120: mol_type = other DNA
tgtctggatagtgccgggtgggggtagaagttagaggggtcacagaggggcttcctcccggccccctcatcagctgcttgatttagggcttgtttctgggtccttctgggcctgattctg

SEQ ID NO: 23612 - DNA, 120 bp, synthetic construct
  source 1..120: mol_type = other DNA
caagagcagaatcaccatgcacgggaatcgtcattcattggctggaatgcagttgccagccaggccctgagcatccctcctcaaacaaaggtctcatggcaccaccaggacaggtggggc

SEQ ID NO: 23613 - DNA, 120 bp, synthetic construct
  source 1..120: mol_type = other DNA
tcctgttgaatggccgtaacccctgcccctttgtcacgagtcagttgccaagagaagcctgtttggtttgagagcagttcatgcagacatagaccacttcctctgagaattcatttgctt

SEQ ID NO: 23614 - DNA, 120 bp, synthetic construct
  source 1..120: mol_type = other DNA
ggtgccctacatcgtgcgccagtgcgtggaggagatcgagcgccgaggcatggaggaggtgggcatctaccgcgtgtccggtgtggccacggacatccaggcactgaaggcagccttcga

SEQ ID NO: 23615 - DNA, 120 bp, synthetic construct
  source 1..120: mol_type = other DNA
gaggagtcagatgagctgctcaaagcccaggagggacccgcacagtggtcagcatggcagggacagtgctttagccaaggcagggatggtgggagactcactcgggatcctcaaggaggc

SEQ ID NO: 23616 - DNA, 120 bp, synthetic construct
  source 1..120: mol_type = other DNA
aaaaggcgttcaggtggttcacaccccacacaggtgcccctcacagggtcctcaatgggggccagagctgtgagactgaggatgatgacgagcctgggctgtgcagggacacaagcccca

SEQ ID NO: 23617 - DNA, 120 bp, synthetic construct
  source 1..120: mol_type = other DNA
tcttggctttctttttctttccagaaggatttttgtgcagaaatgggtcttttgttgccatgttagtcctccttggaaggcagctcagaaggcctgtgaaatgtcaggggacaggacccc

SEQ ID NO: 23618 - DNA, 120 bp, synthetic construct
  source 1..120: mol_type = other DNA
ccaaggtgggaggagtgggtgtcccctgtgtgtcagtgggcagctcctgctgaacccgcagctcactagggagcctgacagtggggccatgcgcctgacactcctctctgcttgtggacc

SEQ ID NO: 23619 - DNA, 120 bp, synthetic construct
  source 1..120: mol_type = other DNA
tacacaccaccgtggccgacactttcattaaaaagtttcctgagacgacttgcgtgcatgttgacttcatgatcagcgccgctgggaagaacccctgagccggtggggtggggctggaag

SEQ ID NO: 23620 - DNA, 120 bp, synthetic construct
  source 1..120: mol_type = other DNA
caccgccaccatgatcatttccctgacactgcgagggtggggggacgtcctgggtagagacagggcccgtggcagcagcaggctcaggggagccctgcactggtggactggggacctggt

SEQ ID NO: 23621 - DNA, 120 bp, synthetic construct
  source 1..120: mol_type = other DNA
gtcagggtctcagagctgatccatgagcggaggctgagatcctgggatcttgtcccccagcctccctgcaagcttactccctttcttctagaagagatggggccagacctcgaccagcag

SEQ ID NO: 23622 - DNA, 120 bp, synthetic construct
  source 1..120: mol_type = other DNA
cagggaagttgcagaaggaaattgtgtacatatggagggcactttaattctgcacatgtcagctgggaatcttttatggggcgataaaacagtttcttggtgatcatgtcgtgaggaaca

SEQ ID NO: 23623 - DNA, 120 bp, synthetic construct
  source 1..120: mol_type = other DNA
attcagtggcagtatattcacatccatggctgtgtaattatcaccaccatccatctccagaattctatcatcatgtaaaactgaaactgtccatcaaacactaactccccattccccctc

SEQ ID NO: 23624 - DNA, 120 bp, synthetic construct
  source 1..120: mol_type = other DNA
aattgggtttgataatgtgctgcaatagtcatgtcctgtctgatatgtccgcagaaccctgcgtttctttctaaagccttttttcatccatggtggcaacaccgcaacagccctgagaaa

SEQ ID NO: 23625 - DNA, 120 bp, synthetic construct
  source 1..120: mol_type = other DNA
gtgttaatctggattctctctgtcttcggagttctctaatgcctggttaccaattctttatatcaagttctctccgttaaaatcattgtggtggggtccatcccatggatatacatggag

SEQ ID NO: 23626 - DNA, 120 bp, synthetic construct
  source 1..120: mol_type = other DNA
tcaaacagttcatagccgagagccaccggctgtagggacaaggatgaaaaagttgtgggcatacaactttcccagttgtcactgccgacccgaatgctggaaccatgggcagaagtatca

SEQ ID NO: 23627 - DNA, 120 bp, synthetic construct
  source 1..120: mol_type = other DNA
tctgctttgcattttgagaacctcatctctgtgatatgccagcagccgccctgtgaggtagacactcctgttagccttttagcacaagagaaaactcaaggtcagaatggtcaagtgact

SEQ ID NO: 23628 - DNA, 120 bp, synthetic construct
  source 1..120: mol_type = other DNA
gcccacctttgaccaaatccacggtgcgcagctctaaggggatgccattcttcttggcgaagatgtagacggcgcggctgggctgggacaccaggtcaagaaacagctctaggcccatgg

SEQ ID NO: 23629 - DNA, 120 bp, synthetic construct
  source 1..120: mol_type = other DNA
gtgtgtttgaggacagaatggagagaagttgagtagagcaagtgtagactcttcctatccaaagtgtggtcaatggactgggagtatcagcatcaccagggagcttgttggaaatgcaga

SEQ ID NO: 23630 - DNA, 120 bp, synthetic construct
  source 1..120: mol_type = other DNA
gaatcttttccccagggaccactccccactcctttcctcacgccaagctctgactttccgtgctccacgatcccgcggctccccctccgcacgtctttcccttgtcgccctccccagtca

SEQ ID NO: 23631 - DNA, 120 bp, synthetic construct
  source 1..120: mol_type = other DNA
catgaggtagataatctccattatgccaattttatgatgagaagactaaggctcttcatactcccccgccctcagccaggctgtcccaagctgtggcgctcctcactgaaaactgctgtc

SEQ ID NO: 23632 - DNA, 120 bp, synthetic construct
  source 1..120: mol_type = other DNA
gtaacagcaagtttccagtgaggaaaaccagaacttgggacagcctggttggggcgggcgggagtatgaacagcctgtcttctcatcataaaattggcataatggagattatctacctca

SEQ ID NO: 23633 - DNA, 120 bp, synthetic construct
  source 1..120: mol_type = other DNA
acagtgtcctttcaagcttctcatgcccttacttcctcctagacatggatgtggctcaagaatatcttttacccaagaggaaactttaactcggtcacagaacgccaggtttgggttgca

SEQ ID NO: 23634 - DNA, 120 bp, synthetic construct
  source 1..120: mol_type = other DNA
ctaggctcacgacaatacctgtccctgcctggtccccattgacatctgcctgtgtagcctcttgtgccggtggtgagccactgtccaccagggggtggcaaaatatgttctttaaaacat

SEQ ID NO: 23635 - DNA, 120 bp, synthetic construct
  source 1..120: mol_type = other DNA
gagtctctgtctgtcatgatcttgtcctattagcagtttgtttattagatgactcagatatcagaaggtctgagacacacgacaggtaaatatgacagtcctaaggggagagggcaggga

SEQ ID NO: 23636 - DNA, 120 bp, synthetic construct
  source 1..120: mol_type = other DNA
taaggcagcatgacctgctttaggggttctctgattggattttccctcctccaccatgtgtgtgatgggctaggatgtccccctccctggggacacttggaagcctcttaatatagctgc

SEQ ID NO: 23637 - DNA, 120 bp, synthetic construct
  source 1..120: mol_type = other DNA
cctttaaggaaggtggctcagattgctaagccagccaggccctgcgggacaggctgcgcctagggtcacctgctcttcttcagcaactcagaaatattctccttgaccattgaatccaat

SEQ ID NO: 23638 - DNA, 120 bp, synthetic construct
  source 1..120: mol_type = other DNA
tcgggcatatctctggctgatatgcaaattagtctctttggtcagtgtgcagtgccctagctggtgtgcaggatggccagttgagaccctggccagtgtcttgacaagcagaactggtca

SEQ ID NO: 23639 - DNA, 120 bp, synthetic construct
  source 1..120: mol_type = other DNA
tgcactccagggccacctgccctgccaggtctctgtactcttgtctgctggatagatattgaacacttcccaggatataaagcagtttcacctcttttagcagttctgattggtggaagt

SEQ ID NO: 23640 - DNA, 120 bp, synthetic construct
  source 1..120: mol_type = other DNA
aactgctggggcttccagagcaaagaggagcccaaacggccccgagaaagaccttcaccagagctgtctgtctgacagtcagtaagggctgggaaggagccctgcggggtgagtaggagt

SEQ ID NO: 23641 - DNA, 120 bp, synthetic construct
  source 1..120: mol_type = other DNA
tagagggaacctcattttaaatacatttaggcatctcctcagtggggctttagggggaaattccattttgaaagatggctagctctccatctcctgttaaacctgttttacttagcagac

SEQ ID NO: 23642 - DNA, 120 bp, synthetic construct
  source 1..120: mol_type = other DNA
caacccttccttcatgccagcccctggaaatatggccttgcccaccggtcttatggcccataggagaagttttgggcccggcgcccacagccccttgtggtgtgcacccccacttccctt

SEQ ID NO: 23643 - DNA, 120 bp, synthetic construct
  source 1..120: mol_type = other DNA
cgggccatgttcctgccacccgacgtgctctggccttggcacctgctgcttggatttccgggacttctgcctggagatattgccctactcaggatccatgatgggcggcaaggactttgt

SEQ ID NO: 23644 - DNA, 120 bp, synthetic construct
  source 1..120: mol_type = other DNA
agactgactgactgctctcagccacttctgagttctctattttcaaagaataatttggtattccataaaggaaatctgtaaataagagaagagagtgaatatcttttaacagtgtttttc

SEQ ID NO: 23645 - DNA, 120 bp, synthetic construct
  source 1..120: mol_type = other DNA
tttgacacagatcacttcccttttttctcttgtacacctttcaccttttttttttttttttgagtttgatgtgtttggacagtaagggtttaagagattaagattaaatttcaactttgt

SEQ ID NO: 23646 - DNA, 120 bp, synthetic construct
  source 1..120: mol_type = other DNA
tgtttttctcgcccttctgcattttctgcaaattctgttgaatcattgcagttacttaggtttgcttcgtctcccccattacaaactacttactgggtttttcaaccctagttccctcat

SEQ ID NO: 23647 - DNA, 120 bp, synthetic construct
  source 1..120: mol_type = other DNA
gctatgttaaacactttgagaaactgctataatgttctccagagctgtaccattttaaattctgtgtatgaggattccacgttctccacttcctcaccagtgtatggatttgggggtata

SEQ ID NO: 23648 - DNA, 120 bp, synthetic construct
  source 1..120: mol_type = other DNA
cgaaggatgcaaccgagagtacttcgggggacgtggcaaaacttccaggcccattcaagagtcttgttttctccctgagcttttatgtatttattatattgccctattaattattgagat

SEQ ID NO: 23649 - DNA, 120 bp, synthetic construct
  source 1..120: mol_type = other DNA
tgtacatgtagggaccgcatctccaatgccttgctttacataatgacgaatggtgttttgcttacctacttccacacaaactgctgatatggttaggatttgggaaaggggaagaaggga

SEQ ID NO: 23650 - DNA, 120 bp, synthetic construct
  source 1..120: mol_type = other DNA
cgtcttgaccgtttaaaaatgtctctgaagatttagcacaccaaggccccctatagtcccagggtataggccacccttgagattagaaagaaacccctgggagctgtggtggggtggatg

SEQ ID NO: 23651 - DNA, 120 bp, synthetic construct
  source 1..120: mol_type = other DNA
atcccctagggtacaaaattgtcccctacccctcattaagtaccactgctttatactcactagacacagggaaaaagaacttcttagcattttttattaatttctttttaacctaaccag

SEQ ID NO: 23652 - DNA, 120 bp, synthetic construct
  source 1..120: mol_type = other DNA
gtatatttctgaaacttgattggtgtgtttttcatgggtggatggttggtgagggtggggtttctgaaccactgaaataagttgctgtccctaaccttggactgttacaccatttttcct

SEQ ID NO: 23653 - DNA, 120 bp, synthetic construct
  source 1..120: mol_type = other DNA
actggtcttctggcccttgccgacaagtcctcattttgacatttctgtattctagccatactgtattctagccaagtcattagagttcttcagttgaacctgtgtttactctcatacctt

SEQ ID NO: 23654 - DNA, 120 bp, synthetic construct
  source 1..120: mol_type = other DNA
attatatgatctccttgtagaagtaaaggaaactctggagcttcctgtgtggctgtgaatgtgtaattagctttgggcagggctcccagagctgtgaaccctgtcctgaggagcactggg

SEQ ID NO: 23655 - DNA, 120 bp, synthetic construct
  source 1..120: mol_type = other DNA
cattgagatcaaaagctggcattcctaacttgtgttatatgtatattggaggccatatggagtggcagaagtgaagtgaggtttgaattcagaccgttgttcctcaagaatgaattgacc

SEQ ID NO: 23656 - DNA, 120 bp, synthetic construct
  source 1..120: mol_type = other DNA
atcacagtgcttgtaacccttagttcacttaataatggacccacagtgcaggagtagtgatgctagcatattgtattattgcttactttattattagttattgttgttaatctcctactg

SEQ ID NO: 23657 - DNA, 120 bp, synthetic construct
  source 1..120: mol_type = other DNA
gtgcgggcacagttcagcctataacaacatccttattcttcagttcatctgctctacctttacctcctccagtgactttcctaagactgtttgatttccatgtatcaattcacttgtctt

SEQ ID NO: 23658 - DNA, 120 bp, synthetic construct
  source 1..120: mol_type = other DNA
tttttataaggatttttgatttagataaggatgtggtaccacttgcagaactagggaaaggaattaatgttggggaaaaaagttaccccagccaggtgcgatggtgcacgcctgtaatcc

SEQ ID NO: 23659 - DNA, 120 bp, synthetic construct
  source 1..120: mol_type = other DNA
ttagtgtctgcatccagggctgggagggggtcaaatgaatcacactatcggccccaggcccaccaagcctggggaggtggccacccttccatgatggcatttggatgttccctgtgtgtg

SEQ ID NO: 23660 - DNA, 120 bp, synthetic construct
  source 1..120: mol_type = other DNA
ttcagcagagtgtgagggagaccccggttatttcctcagctatttccaccaaatcctcctgtctttcgtggccaacaccccaggcaaggcttggggcccccgtctgctgctggacggtaa

SEQ ID NO: 23661 - DNA, 120 bp, synthetic construct
  source 1..120: mol_type = other DNA
ctctctcagtagcctttgggaaggggacagtgactccgagagcagggtgtgggtctctagagccaaacagggccccttttctcagttctaagagtctctgtctctttggaataaactgca

SEQ ID NO: 23662 - DNA, 120 bp, synthetic construct
  source 1..120: mol_type = other DNA
gagtgcctcgggagaggagagggagaggggcagggggtgtgggttgggccgaggcacagctgggcggtccccaggctcacgtggcataaagggtttgggtgggcgggcctgcctacctgc

SEQ ID NO: 23663 - DNA, 120 bp, synthetic construct
  source 1..120: mol_type = other DNA
ggatctggcctatggaccccgtgggttgctgtgtaaggggcagggagcatgtggggacctgtctggaggtcactgcagtaattcgtggagagggtgctgggaagtggctgacgctggaca

SEQ ID NO: 23664 - DNA, 120 bp, synthetic construct
  source 1..120: mol_type = other DNA
ccctgctgtgccctcctcagacatccctggtccatgtacactcctacctgctgagcccctcctaaaaaaaaaaattaaacatcccctcctaaaaaaaaacaattaaaattaaaaaataaa

SEQ ID NO: 23665 - DNA, 120 bp, synthetic construct
  source 1..120: mol_type = other DNA
agggacactaggaagacgagcgctgagtgacagggccacccacctgtgacaggcgctgcccctgttctgctccgttctcctgtgtggacgggtgtgaggggtggtctagctgagtccacc

SEQ ID NO: 23666 - DNA, 120 bp, synthetic construct
  source 1..120: mol_type = other DNA
tgaggctggaaattggcatgccaataccctgtctgtctggagctgactccaggagaattaagagcctccctcctctattcattcatcatgaggagaagaggccaagcggcagggagactg

SEQ ID NO: 23667 - DNA, 120 bp, synthetic construct
  source 1..120: mol_type = other DNA
cagcacccatttgagctgctgtcccattgcagggggcattgtgacagctgaggacctgaacaactaccgtgctgagctgatcgagcacccgctgaacatcagcctgggagacgtggtgct

SEQ ID NO: 23668 - DNA, 120 bp, synthetic construct
  source 1..120: mol_type = other DNA
gcctcacatatgctttatgaatccattcctgccacagacttcgattgcgggcctactgtgtgctcggatggactcgtgggtgacccccagtcttggcttctgccgcacagaactgacagt

SEQ ID NO: 23669 - DNA, 120 bp, synthetic construct
  source 1..120: mol_type = other DNA
attttgcaaattttcgcacctacaaaaatgtaaaaaaaccccaaaactgcccaagcatcaatgctcccttttcctggagtctgcagtgtggatgtttctgtcggatttcctaactctctc

SEQ ID NO: 23670 - DNA, 120 bp, synthetic construct
  source 1..120: mol_type = other DNA
gcaaggtcgggcactgtctgacctggctgggcggtagctttggctccaaggtccgctccccggtcagcgggatcctgttcaataatgaaatggacgacttcagctctcccagcatcacca

SEQ ID NO: 23671 - DNA, 120 bp, synthetic construct
  source 1..120: mol_type = other DNA
actctgcagcgtttggacttgagacagtgtgtgaatactgtcatgggggcaacaggaaatagatggctcccccaaacccagtacgttaaggcaaatttaataaaggggctattgactaag

SEQ ID NO: 23672 - DNA, 120 bp, synthetic construct
  source 1..120: mol_type = other DNA
aggaaaggaggaagggatcactttaattacaagcacacccttttgggggtacataagcagaatagctgtgaagaaaccctcacccaaataagccactttgtttttaacacacacacacaa

SEQ ID NO: 23673 - DNA, 120 bp, synthetic construct
  source 1..120: mol_type = other DNA
acagctgagcagtaggcatggagagaagagttaaggctttggggtgcaacggaacagggttcaaatctacctctttgacttcaaatttagaatccatgacaacaaaaatcacttatgtga

SEQ ID NO: 23674 - DNA, 120 bp, synthetic construct
  source 1..120: mol_type = other DNA
taaagcatcgttcttgttttcgaagaaagcgaaccatcaactcagaccttcttgagagaggagtttttctgtcaaagctccaaacagggcattttctgttgccttcttgagacttgggat

SEQ ID NO: 23675 - DNA, 120 bp, synthetic construct
  source 1..120: mol_type = other DNA
ccttcttatttcttaactgtgttccaggtgggtaaaggcagcatagcactgagttctagataactgaggggattttgcacttggatttgctgtgctaaggtttgggtggggctattacat

SEQ ID NO: 23676 - DNA, 120 bp, synthetic construct
  source 1..120: mol_type = other DNA
ttcctcatctgctaaatggcataagaggattttatgtctgagggataagggttttatgtgtaaaggatgagatgagataactaaggaaaatgtcatagggacaggaggatgggaagagat

SEQ ID NO: 23677 - DNA, 120 bp, synthetic construct
  source 1..120: mol_type = other DNA
actggaaagtaaatgggaattctctgcccataggtggcttacagccgctgaatttctttctagagctgcctttggggaaatggtatgcctttggagtggagaaaccttggccttaacctc

SEQ ID NO: 23678 - DNA, 120 bp, synthetic construct
  source 1..120: mol_type = other DNA
aatcagcaagtgctgctaattaaggctctttccccacaacagaaccaatttagccaaacatactggcttcttggggtttgtgaaactcctaaaatagtgtgcaaagttctgtgctcctat

SEQ ID NO: 23679 - DNA, 120 bp, synthetic construct
  source 1..120: mol_type = other DNA
tctatctctctcccctcgcctctctctctgtctgcttctcttcctgtccccctcgttcaccctcccatcacctctggccctgcaggtgggttggctaccagtaccccggctaccgtgggc

SEQ ID NO: 23680 - DNA, 120 bp, synthetic construct
  source 1..120: mol_type = other DNA
cataaaggttatagcaacttcaagggtgtagaatctgaaaaaagttaaggttaaataggaatatcatttctggtagggcatgacattttctagagcccccttttaattatcttgctatat

SEQ ID NO: 23681 - DNA, 120 bp, synthetic construct
  source 1..120: mol_type = other DNA
cctgaactgggtcatggaggatgagtaggagattttcatgtgaaaaggaaagggcattagagggaatggtatttacagagtgatggagctgtggaagagcctgtgtctttcatgaaaaat

SEQ ID NO: 23682 - DNA, 120 bp, synthetic construct
  source 1..120: mol_type = other DNA
ttttaatttattttttgtggatttattgaggtatatttcacatagcatacaatccacacattgaaagtaaacagttgagtgactttttgtgtattcaccgtcatacaaccatctgcactg

SEQ ID NO: 23683 - DNA, 120 bp, synthetic construct
  source 1..120: mol_type = other DNA
tggtgggagtaaatgtgtctgacactccaggtcttccttttccaggttccgtttgcgccttccatcactgactccatgcgttcctgccctactctttcccttctccatctttccttccct

SEQ ID NO: 23684 - DNA, 120 bp, synthetic construct
  source 1..120: mol_type = other DNA
aagatggatgtagatagaccacagatgcttattttaaaaatttggtaattattaaaaaaaaccccaaaatactaaaaaacaaactaaaacattttaggatcacttttttgtcagtttcaa

SEQ ID NO: 23685 - DNA, 120 bp, synthetic construct
  source 1..120: mol_type = other DNA
tccttcttaaaattatcattcaagttcaaagaccagccataattatcatcgccccacccaaaaaaaaattcagaaaagctacattttactggaaaagcacaatcctttaatatctactaa

SEQ ID NO: 23686 - DNA, 120 bp, synthetic construct
  source 1..120: mol_type = other DNA
gctgtgcacaaagatctctctgtagctggtctactttatgtgctttgctgaaggggacattcaatcaaatatatttgagtccttcactgggaatgtctctttaaacaaaaaggcacatgg

SEQ ID NO: 23687 - DNA, 120 bp, synthetic construct
  source 1..120: mol_type = other DNA
gaatcccttagggaacaaaagcagaaatccacacccttatggagttaactcctccttctcgggggagaaagatccacaaatacatactgtccacaagggggtaaatctcaaggagggtag

SEQ ID NO: 23688 - DNA, 120 bp, synthetic construct
  source 1..120: mol_type = other DNA
aatccgtgcccatgacccagtcaccttccaccaggcccctccttcaacattggggattataattcaacatgggatttgggcatggacatacatccaaaacatttcagagacctcttagaa

SEQ ID NO: 23689 - DNA, 120 bp, synthetic construct
  source 1..120: mol_type = other DNA
taagatcctttcgagagctaatgtttgtgaacaagataaaaagaaatttctgatccgcactacctttcagcaaatcaggcagcatttattaagtgcctactgggtgaagagcccagggct

SEQ ID NO: 23690 - DNA, 120 bp, synthetic construct
  source 1..120: mol_type = other DNA
tttagagagtccagccagcatccattaaccactcttcttttcagaaatatcaattgccaatttcctttatgacttctcccagctcgttgaggccagaaacagttgcaagtgtttagagag

SEQ ID NO: 23691 - DNA, 120 bp, synthetic construct
  source 1..120: mol_type = other DNA
ggatgtcagtaagcaatatctatttgtaatgcccttagtgattggggccagacctcttccttgggtagggtcaaagtcctagataaagtccttttccaaatttctagttttgccataagc

SEQ ID NO: 23692 - DNA, 120 bp, synthetic construct
  source 1..120: mol_type = other DNA
gtactgtgctacctgtttggcatatgttatcctcaaaacaactctctgaggctcctaccattattcttcccagtttgcagatgaagaaactgagaagtcaagaaagttgccccaatccat

SEQ ID NO: 23693 - DNA, 120 bp, synthetic construct
  source 1..120: mol_type = other DNA
cccagccctattacttcctagtgtgtgtcctgggctgctattcaacatttctgagtcccagctttttcatctgtacagtgtttgttgcaacagtatgtgtcctcattggtgtttttgttt

SEQ ID NO: 23694 - DNA, 120 bp, synthetic construct
  source 1..120: mol_type = other DNA
tgcatttttctgtatacacgttagacttgaataaaaatagtcttaacgaatcacactttcagcaagcttggtggctcacaccaacactttgggaggctgaggcaagaggatcacttcaag

SEQ ID NO: 23695 - DNA, 120 bp, synthetic construct
  source 1..120: mol_type = other DNA
cacactcaataaatgagcagccaggccacggtggcttttgatcagatgccaaggaggttatgtctgcttgtcttcctctttctctacagccccatgaaaacgtttacagggtttttcctt

SEQ ID NO: 23696 - DNA, 120 bp, synthetic construct
  source 1..120: mol_type = other DNA
ctccctagtattctgttttgtgaataagtccatttgttcatttattctgcaaacagtctagatattgtgctaatatagggacccgtggcgggctgcaacagaaacaatccctcattccca

SEQ ID NO: 23697 - DNA, 120 bp, synthetic construct
  source 1..120: mol_type = other DNA
catctgactgtgatgatgacacaaacaaaacatttctttggtgacatttcttcattcacagcctgcatcttcatctctaaaggaaggactggaaaggggatggggagagacaacttctaa

SEQ ID NO: 23698 - DNA, 120 bp, synthetic construct
  source 1..120: mol_type = other DNA
gggaaacgaaggcagaggaggaaagaactgtaaaagagggcaagaattgcactggggggggacacattttcaaaaacaaggttaaaatgccagccactggttccatggtgatagtctgtc

SEQ ID NO: 23699 - DNA, 120 bp, synthetic construct
  source 1..120: mol_type = other DNA
taaaagcaggaatcatctagtaaggccaccagaaaatgatgtgttatctcctgacatctctaactggcaagaggcacacacaaaaattaagaaaaacacccagccatcccattactgggt

SEQ ID NO: 23700 - DNA, 120 bp, synthetic construct
  source 1..120: mol_type = other DNA
gatctggattaagtctacctctttgatcgtcccagatgatactatatgttcatggcacttcacaggagtggaagtggataggaaaaggctagagaaatgtaagaaataactatgaaatgc

SEQ ID NO: 23701 - DNA, 120 bp, synthetic construct
  source 1..120: mol_type = other DNA
tagaaattacacagttcttcaaaaaccagatggacaaaaaaagacaaacataaaaactagaagcaaatgtaagtgattacttcatctctaaaatggggaaggacttttaaagcctaaaaa

SEQ ID NO: 23702 - DNA, 120 bp, synthetic construct
  source 1..120: mol_type = other DNA
tatccactcaaaacctgatccattcagctatatatctcacattgcaacagcagagaaagcatttcaagcaatcaggtaagaacgtccctttgctctatgatgccagggagtaacttccat

SEQ ID NO: 23703 - DNA, 120 bp, synthetic construct
  source 1..120: mol_type = other DNA
atttatatcaacagaaagtaaaaaagaggttatcaggggctgggggaggaagaatggggagtcagtatttaatgactagagagtttctgtctggggtgataaaacagttccagagctgca

SEQ ID NO: 23704 - DNA, 120 bp, synthetic construct
  source 1..120: mol_type = other DNA
actaaatatccccatgcactagcccatatgcaatctttacccacaactctactcactatgtctgatcacattcagcattttcctacttctgttctttgctccacctctgccaaaaacact

SEQ ID NO: 23705 - DNA, 120 bp, synthetic construct
  source 1..120: mol_type = other DNA
tgacagggatccaagacaactcaaaacaaaaatattacacacagaacagaagcaactgtgcagtatcaggaaatgcaatacactttttctagtgataagaaacttccaccgggcgcggtg

SEQ ID NO: 23706 - DNA, 120 bp, synthetic construct
  source 1..120: mol_type = other DNA
tacatttctttcgtgttcaaaccacggagttcacaacacagcagcacacacagctgggcgctttgtggtctcggcaccctcggcttccccttcacggggccgctttcgactagtagaagg

SEQ ID NO: 23707 - DNA, 120 bp, synthetic construct
  source 1..120: mol_type = other DNA
tgacccaaattttaatttgttcaacaaatttatatttgagcctctaatagagtctttcgaaattgccttgcaggtgaccttttggatgacaatccctagctgtgcttatcggtctattat

SEQ ID NO: 23708 - DNA, 120 bp, synthetic construct
  source 1..120: mol_type = other DNA
aaataaaataaaaattaaattgtaatatcccttgaaagtaaacagaagaaatcctctatttcaggcagtaaatatgaggcagagagtagatgtaagggatgctcccaaaactgggcactc

SEQ ID NO: 23709 - DNA, 120 bp, synthetic construct
  source 1..120: mol_type = other DNA
tgttgttctcaacctgagctggcctgagcaaaactgttaggtgtagaggattggaacagagaacagggacagtcttcccagagtcccagaagtacgggtcggaggctggactgcccaagg

SEQ ID NO: 23710 - DNA, 120 bp, synthetic construct
  source 1..120: mol_type = other DNA
attagatgttatttgtgaagaaatggatcagacaactggagaaccacagtgtgaagttgcccgaaggaagcttcaggagattgaggacaggtaaatgggcagtgtatatagctggttttt

SEQ ID NO: 23711 - DNA, 120 bp, synthetic construct
  source 1..120: mol_type = other DNA
acaagagccaagatctgaaataagacccttctgcttcatcaatgttggtttcttctctttgcctccttttgtcttcgccagtttttctagataaaaatcagatgctcacctgggcacggt

SEQ ID NO: 23712 - DNA, 120 bp, synthetic construct
  source 1..120: mol_type = other DNA
gagaccaagtgtcacgggggtatgcaaacattgagtgcatagcagaatcattgaggtacatctttgaaagctgtctaccagagttggtacatatatttagctttctttgttctcagctac

SEQ ID NO: 23713 - DNA, 120 bp, synthetic construct
  source 1..120: mol_type = other DNA
ggcaaggaatggattctccccttgagcctctaggaggaacttggctccactaacaccttgagtttagacccataagccccacttagtactcctgacctccagaactgaaagataataaat

SEQ ID NO: 23714 - DNA, 120 bp, synthetic construct
  source 1..120: mol_type = other DNA
caattcttatgtgtttataggaaaggacgtgtcaacatagagacttaggaggtcaaagtgaacttcctgatccccaacaggcaggagtcctgccaaagccaaaatttatgtgtcaccttg

SEQ ID NO: 23715 - DNA, 120 bp, synthetic construct
  source 1..120: mol_type = other DNA
gctttcctaaacctgtttccttgtctctttggctggagcattgaacccaggcatgtctgtccacacatctctcttcccaaaagaaatccactaaaaaaccccaaccccaaaataaaaaaa

SEQ ID NO: 23716 - DNA, 120 bp, synthetic construct
  source 1..120: mol_type = other DNA
aggaataaagggctggccagaaagatgcttacagggttaaagcacatttgtcagccacgacgacatcctccatttccttaaaagcagaaacaaccaaaatacccaatgatataagcctag

SEQ ID NO: 23717 - DNA, 120 bp, synthetic construct
  source 1..120: mol_type = other DNA
ccattattaaacaagtaatacctttcttggtcgtggtgaaatattttgagtcagtcattttggtcccttatctgtagccaggcttctgcaagagagagaagagaggggtgactttcagtt

SEQ ID NO: 23718 - DNA, 120 bp, synthetic construct
  source 1..120: mol_type = other DNA
gccgtcatggaaacttggagaaagctacttaacttctccatctagattgattctgtaaaatccataaaatggaatggtttctgggggttaaattagtataccacagctggaacactgtca

SEQ ID NO: 23719 - DNA, 120 bp, synthetic construct
  source 1..120: mol_type = other DNA
gggcttccagagaggaatttcttctttggaattcctgaaatgggaacaaacttgttttgggaaaaggacagaaagacacaaaggtggctgcagcagagtgaaatgaatatgatgggctaa

SEQ ID NO: 23720 - DNA, 120 bp, synthetic construct
  source 1..120: mol_type = other DNA
caacgctggggaattcttgatgctgacctgtgactgttttctccttaacttcagtgggtagccaaagtgcgtgttttctcaaaatgttattttgctatgggttttccaaaggatgttaac

SEQ ID NO: 23721 - DNA, 120 bp, synthetic construct
  source 1..120: mol_type = other DNA
ccaaatctaattcaggtagagttgaaaagcagacggtgcaaaccgggatcaaaactttcatctgtgaataagtttttactaatttctctgctatcctctgccagcaacatgtcaagcact

SEQ ID NO: 23722 - DNA, 120 bp, synthetic construct
  source 1..120: mol_type = other DNA
aacagttagcccatttcatctactgtatccaattgtgagcacagatgtgttcaggatattcctttattatttactattttttgatttgactcttcttaaacagatattattagtatactg

SEQ ID NO: 23723 - DNA, 120 bp, synthetic construct
  source 1..120: mol_type = other DNA
acttactttggagatggtttaacatcttcagtatcaaacttggggtcttcccacagatggatagaggaaccctggccatgggtgtttgctgccagggcagtgactgtctcttcctcattt

SEQ ID NO: 23724 - DNA, 120 bp, synthetic construct
  source 1..120: mol_type = other DNA
gtgtgcagggccatgctcttccactgggtgcaagagcgccccctgctggaatccctctggacctggatattgtcctcatggtcatatccccagccccacacagtgactggcccttatgca

SEQ ID NO: 23725 - DNA, 120 bp, synthetic construct
  source 1..120: mol_type = other DNA
cccctctcaattcttatgtatttacagtcaaggacgtgtcaacatagagacttaggaggacaaagtgaacttcctgatccccaacaggcagatccccaaaagccaaaatgtatgtgtcac

SEQ ID NO: 23726 - DNA, 120 bp, synthetic construct
  source 1..120: mol_type = other DNA
tgacatctttgcccacggtcatcgatgcaatcactttcttcactgcctccttcttcttctccttcttgtcactgttgagctctgccttcagctcgaagatctcccctaaggaaaggaggc

SEQ ID NO: 23727 - DNA, 120 bp, synthetic construct
  source 1..120: mol_type = other DNA
cttcctatcccccatcgatctggccagctccacccagagctctcccacagtcccccctggacccagtacacttcagtgtggttactactctacagactgtcttccctgctcaaccttgag

SEQ ID NO: 23728 - DNA, 120 bp, synthetic construct
  source 1..120: mol_type = other DNA
cactctctctctgctgtggggatgctgataggattgtgtgtcttctttcccctggaaacaaaaacataattattttagcacttggagctaatgttcttccctttctgagctctaaaagga

SEQ ID NO: 23729 - DNA, 120 bp, synthetic construct
  source 1..120: mol_type = other DNA
gagacttctccccatgacttctctaagctgctaaaacagtaacatgtatgattcatctgtggaaagggctagaatctatagcagttcccaaatctacctggccaaatttcttacaggctc

SEQ ID NO: 23730 - DNA, 120 bp, synthetic construct
  source 1..120: mol_type = other DNA
caagtccccagtgaaggaagaagcaaaatctccagctgaggtcaagtccccggaaaaggccaagtctccaacgaaggaggaagcaaagtcccctgagaaggccaagtccccagagaagga

SEQ ID NO: 23731 - DNA, 120 bp, synthetic construct
  source 1..120: mol_type = other DNA
ttccgagtcccagtcctgtgccaggactttatatgaattacttctgcttcatcatgagctagaaggtattactttcaccatttctgtctttagaaaataggggtcaggcacaatggctca

SEQ ID NO: 23732 - DNA, 120 bp, synthetic construct
  source 1..120: mol_type = other DNA
aaaatgaatttatggtctccaattttagccaaacatggcctttaggtcagaaaggcccaggtcctcactccaaactcatttgcaaacaagctgccttgtgtgtggacactacactacacc

SEQ ID NO: 23733 - DNA, 120 bp, synthetic construct
  source 1..120: mol_type = other DNA
gacaccacctctctttgaagggcttccatctcaaaggctacattttctttccatggatttttgggccacaaattcaaaggccacctgtagaaaaaaattacttttcagtgaaccagcaga

SEQ ID NO: 23734 - DNA, 120 bp, synthetic construct
  source 1..120: mol_type = other DNA
gaggcgtgagctgagccactgtgcctagcctgaattttaagaattctattgtatggctatcccattgcttttgcatccatccctttattgatggcatttgagtatctgtaggtttttcac

SEQ ID NO: 23735 - DNA, 120 bp, synthetic construct
  source 1..120: mol_type = other DNA
tcttcctccccaaaggcaaccagtctcctgatttttaattccagattggcgttgcccatcttaaactttgcattctgttttttgtgtctccttttactcagcatcatgttgtcagattgg

SEQ ID NO: 23736 - DNA, 120 bp, synthetic construct
  source 1..120: mol_type = other DNA
tacaacccagataactcttgccctaacctccaacaatactcaggaagcttgcagagagagctgtttcatttccagaaccttccaggtaaagaaagtacacaaaggaaaagcaagaactta

SEQ ID NO: 23737 - DNA, 120 bp, synthetic construct
  source 1..120: mol_type = other DNA
ttacaaagggatgcatgcgatttgccaaagcatttcactacggactccaaactgcagatgagtagatgttaaaacaatgaggcgggtccacctttattttcatagtcatgctttgctttc

SEQ ID NO: 23738 - DNA, 120 bp, synthetic construct
  source 1..120: mol_type = other DNA
gaaatctcaccattaactaaggaagatgtatgcttaaaacagtttaaaaggggctgcttgagtcctcacctctctctctgtttaatctctaggagtgttggagtcataatggtaggaggc

SEQ ID NO: 23739 - DNA, 120 bp, synthetic construct
  source 1..120: mol_type = other DNA
tctcatatgtgaatggtaatgccataagaggcctgggttgaattacaggagattattattatttttttcaatgtgaaatgtttgtgatttgtccatggagaggtggtggggaccttcccc

SEQ ID NO: 23740 - DNA, 120 bp, synthetic construct
  source 1..120: mol_type = other DNA
tcctttttcattgaggaaactgagactcagagagggccaaagacatccagattaccaatgagttaacagcaaaatttgaataaaagtcattcttggccaggcacagtggttcatgcctgt

SEQ ID NO: 23741 - DNA, 120 bp, synthetic construct
  source 1..120: mol_type = other DNA
atggagctagtgccaagcaacaagcatttctcaggcctctgagcctgttggggacctgatccctgaatgcacagacactggctacaccatttcagcctctcatttctaccaggaacggtg

SEQ ID NO: 23742 - DNA, 120 bp, synthetic construct
  source 1..120: mol_type = other DNA
ctaagtctatgcttcaacacttgttcatttactcttgatcagagacaccgtttgattcacctcggtgtctttgcgcatattatctggctattaccttattttcccccaatgcctgggaaa

SEQ ID NO: 23743 - DNA, 120 bp, synthetic construct
  source 1..120: mol_type = other DNA
ttctttttcttacgttattccattggctggaacctccagtacaatgttaaatagaagtgatgacagcagaaatccttgccatggtcctagtcctgggggagaacattcagtctttcacca

SEQ ID NO: 23744 - DNA, 120 bp, synthetic construct
  source 1..120: mol_type = other DNA
agacaaaatataaagtattgagtaggtggttcatatgccgaatccacttggtaggaagaaaccaccagctttatagtgtgcctgatagattttaaacattcctgggcacccactcaagag

SEQ ID NO: 23745 - DNA, 120 bp, synthetic construct
  source 1..120: mol_type = other DNA
tcccatatccctcactttatgggtgaggaaactgaggcccaggaagagtgactttcctgtggctgcactacagattatgcaggtacttcaagagttgtttgtattcttattttattttat

SEQ ID NO: 23746 - DNA, 120 bp, synthetic construct
  source 1..120: mol_type = other DNA
tttgccaataaacacatctgcaacatggttttacaggacaatgcaatgtaacattcccatatatggatacaccgaagtttacgcgacccatttctactgttggatatttaggttccttct

SEQ ID NO: 23747 - DNA, 120 bp, synthetic construct
  source 1..120: mol_type = other DNA
aagggtgtgaccctgagaggtcatgtttaaaaaaaaaaaagttaagtacaaaggttattcattcttttactttagctgctacaggccagagcggatggtcatttccagcagagagccctg

SEQ ID NO: 23748 - DNA, 120 bp, synthetic construct
  source 1..120: mol_type = other DNA
ggccaaggtactcaaatgaccaattctctagttttctcatctctgcagtgggggagtaatagtgcttacctcaaagggttattcagattttggtaattggctgttgagctattcagattt

SEQ ID NO: 23749 - DNA, 120 bp, synthetic construct
  source 1..120: mol_type = other DNA
actcagaacgtggcctttatttgttaaatctgcttttttccttcactgcatcctcctcctgatccccctcagtccagatcctggtctatcttcccaggaactattgtactttcctcctca

SEQ ID NO: 23750 - DNA, 120 bp, synthetic construct
  source 1..120: mol_type = other DNA
gctttttcctatttgtgtttccttctataatgcctagcaaggtgcctgcctagagtagtttcatatgtagcttttgcatagggtggagctttaagtgcaactgtggctctaaatgacaca

SEQ ID NO: 23751 - DNA, 120 bp, synthetic construct
  source 1..120: mol_type = other DNA
ggcaaaggagaagggtagaaagaaatgaaagagccttggctttccagctagggcaacctcatgaatgtgaaatagtcaccctaagaaccggttaacacagaaaggcgctgtactatagaa

SEQ ID NO: 23752 - DNA, 120 bp, synthetic construct
  source 1..120: mol_type = other DNA
tgtcaccttaagaacagtttaatacagaaaggcactgtatggttcagcgacagcatctcatcacacctcctccccatttgaaggtccaggcaaatccccaattttatgaaatgttacaag

SEQ ID NO: 23753 - DNA, 120 bp, synthetic construct
  source 1..120: mol_type = other DNA
agtcttaccatacaagcaagtaatcataatcctaagtatttcctcagttacattttaaaaattgtgtttccaaacaagacacaggaaggtttataatagctgtattcataattgaccaaa

SEQ ID NO: 23754 - DNA, 120 bp, synthetic construct
  source 1..120: mol_type = other DNA
gaacccctctgtgcctcagttccctattctgagatgtgggaatgttagtagatctctgctatagacctactaagatctatagggctaaaaaggatgagatacagataaaggcttaagaag

SEQ ID NO: 23755 - DNA, 120 bp, synthetic construct
  source 1..120: mol_type = other DNA
tatctaatgttactgttttaatcctgaggcttaactactttaataaactaaaggaaattttttttaaaagaggtagtatccaaagcagctcatatgtaccttttaataaattctagtttt

SEQ ID NO: 23756 - DNA, 120 bp, synthetic construct
  source 1..120: mol_type = other DNA
atttatcactttattacctacttttaggatcacttgactctagagattctcaagtcagcctatttcaggtcatgatcgtctgtctgttcactgttgactctcacctgcacttcgccacca

SEQ ID NO: 23757 - DNA, 120 bp, synthetic construct
  source 1..120: mol_type = other DNA
ccctaggacacatcacactttcccttccttgtctacaatatagggactacactgtagtagggctgaagagacactcatgtcaaattgggaattttaaagtaatcagagctccatgactaa

SEQ ID NO: 23758 - DNA, 120 bp, synthetic construct
  source 1..120: mol_type = other DNA
catacattatctcatccacccatacaacaaccctatggaggggtgttctgttttgctaatgaggaaactgatacttaacgaggttaagtaacttgcttaaggtcactaggtagcaagtgg

SEQ ID NO: 23759 - DNA, 120 bp, synthetic construct
  source 1..120: mol_type = other DNA
caaaggcagtatactgtggtaagtaaatactcactgctttgaaagcggactcacccaggttcaagttctggctcagccattcaatagctctgtgaccttcagtaagttatttaatctcta

SEQ ID NO: 23760 - DNA, 120 bp, synthetic construct
  source 1..120: mol_type = other DNA
gtacttaagttgggtcttgaagtatgattctcaaggggaaggtaggctatgacgtgatctgaggtgtataaagtacaggtaggtttgggagagcttggcttaaagaggagttaccatttc

SEQ ID NO: 23761 - DNA, 120 bp, synthetic construct
  source 1..120: mol_type = other DNA
ggctgtgttaatccacttgggtagctgtaacacattaccaaagactgaggcactcataaacacagtttctcacacttttacaggctaggaagtccaatattaaggtgttggcaaatttgg

SEQ ID NO: 23762 - DNA, 120 bp, synthetic construct
  source 1..120: mol_type = other DNA
tattagttgaccatgaaaatcgtggtcctgctaccatcaggctgggatgaaattctcaatcatggcacagctaacagaagagtgttttcaaatcagcctgtgactagactacttgacatt

SEQ ID NO: 23763 - DNA, 120 bp, synthetic construct
  source 1..120: mol_type = other DNA
ttggagctttattcttccccaagttatgctgctaaatctcgttctcgaagtgggatgaaggggagtgacatcccacacatgaggaaacggggctcagagatggtaagtaatgtcatgtgc

SEQ ID NO: 23764 - DNA, 120 bp, synthetic construct
  source 1..120: mol_type = other DNA
tgacatgggttcagatattttcctatgttcatgtctggcatccaggggtacacaaagtattgattctagctaaagggacttactaaatactgtttgacaggaggcccacaggtgtctatg

SEQ ID NO: 23765 - DNA, 120 bp, synthetic construct
  source 1..120: mol_type = other DNA
tatattatgtaccacgtggtaacttcattggcaattaagtgaaatacttcatggaatgtttagcactaaatattccttagtgttgaaaaggctgggaaccactgagacagttgaaagggc

SEQ ID NO: 23766 - DNA, 120 bp, synthetic construct
  source 1..120: mol_type = other DNA
acatataataaggcctggagttaaaatgctgggttcttgtcctggccctgaaactcactagccagaaaccctgaacaagtcaatttccctcttttgagccttcgttcttttacagttaaa

SEQ ID NO: 23767 - DNA, 120 bp, synthetic construct
  source 1..120: mol_type = other DNA
gcagcagatcctcttcatcttttcagccctgaaggaatcccttacatccgggtcactgcaaagttccgggcaaatttcctgacaaacttctgttcattttttaaaacccattgtaaatgt

SEQ ID NO: 23768 - DNA, 120 bp, synthetic construct
  source 1..120: mol_type = other DNA
taaagctcccctcaaacttaggaagttgccgatattattttcatctttctttttgaaagatgaggaagctgaggctctaagaggcctggtggcatgtccaaggcagcacaattaatacaa

SEQ ID NO: 23769 - DNA, 120 bp, synthetic construct
  source 1..120: mol_type = other DNA
ggggcaagagatggggatgtttatgtgccagctacagacctacctttggattttgtgagttcatcttttgggttgcctatttgtttaaatgagctttcatggatttctgttgcttacaac

SEQ ID NO: 23770 - DNA, 120 bp, synthetic construct
  source 1..120: mol_type = other DNA
cctaatgacccactgtatgccagaatcttacatagtctgatcagagggggaaactgaggcacagagaggggcaggctcatttgccccaggtcaaggagctaatatttggcagcactaggt

SEQ ID NO: 23771 - DNA, 120 bp, synthetic construct
  source 1..120: mol_type = other DNA
actctcgtctccctccactctggggccctaggaaactgcatgtgtgccatggatgaatgtgagaaggttggataaactgatgtttctaaaacctgggtgcctgtcagaccctactgggag

SEQ ID NO: 23772 - DNA, 120 bp, synthetic construct
  source 1..120: mol_type = other DNA
tccactcataaacctacacacacagccctacacacaccacacacacatatctacacccaccacacacacctacacacacacattcatacacctacacacacccctacacacatcacacct

SEQ ID NO: 23773 - DNA, 120 bp, synthetic construct
  source 1..120: mol_type = other DNA
caatctggctatcctccagagaaatatctcaaatcctccacacactttcccctcagagtccctaagacaatgtttgaaaaaactcatggctgactgctcattctcttgagtaaatgactt

SEQ ID NO: 23774 - DNA, 120 bp, synthetic construct
  source 1..120: mol_type = other DNA
ctgctcctctgctctctcctggtcctcctgtgtcctcatggctcatgagatggtgttgagatggctcccctggcctaggggatcacacagtgaacaaagcaggaagaaggcgaagggatg

SEQ ID NO: 23775 - DNA, 120 bp, synthetic construct
  source 1..120: mol_type = other DNA
agccagtaagactgaaagaaagggcatcttcatatactgctagtttgagtgtgaattggtacaatttgcctgcagtgtggctctaggtataaagccttttgagttgttgatagcctctga

SEQ ID NO: 23776 - DNA, 120 bp, synthetic construct
  source 1..120: mol_type = other DNA
ctgctctcagatcttttggaataaggaagtgatatgaatgcataaataaatcgtttaaaagacagtcaaaccgcaggagtttgagaccagcctgggcgatatggtgagatccctgtcact

SEQ ID NO: 23777 - DNA, 120 bp, synthetic construct
  source 1..120: mol_type = other DNA
ttagagaaaatctgaaaaatgtaaaaaatcagaaaggaaaagtcactcctcaacccatcgcatgaagacgccctcttccgctggccttctccctgggaccctcaacaagccagagcctga

SEQ ID NO: 23778 - DNA, 120 bp, synthetic construct
  source 1..120: mol_type = other DNA
tattgttgttgttatcacaggaaggcctggcattatcaaatctagaaaaagaatgaataaaatgtgactctcagtgtttccaggtgacctctcacctgcagagcctctggtttttctcag

SEQ ID NO: 23779 - DNA, 120 bp, synthetic construct
  source 1..120: mol_type = other DNA
aggacgaatcagttccccagagtttgatcgagcaggaatcagccccgcaaaccatgacagggaggaatcagcccccagagcatgatcaggcaggaaatcaaccccccagaatatgatcag

SEQ ID NO: 23780 - DNA, 120 bp, synthetic construct
  source 1..120: mol_type = other DNA
atcaccactttcatcaccaccatctttatcacagtcattattaccaccatcaatcatcaccaccttcatgatcactgccacctgcatcatggttacaattactaccaccaccatcagcac

SEQ ID NO: 23781 - DNA, 120 bp, synthetic construct
  source 1..120: mol_type = other DNA
tctgcagaatgaggaagagaagcctaaaacagattttgcatggtggttgtggggataaaataaaacctttggtatacaggagggtgctcaataggtagtgtttttcttcccttcctttcc

SEQ ID NO: 23782 - DNA, 120 bp, synthetic construct
  source 1..120: mol_type = other DNA
gagatcagaggaagacagggttgtttttcatctggagtcattagcggcatcttagaaagaagatgtgaaatctgttcgcaatttctccagattgggcagaaaacacagatcaagtggtta

SEQ ID NO: 23783 - DNA, 120 bp, synthetic construct
  source 1..120: mol_type = other DNA
tgggatgtagggtgagcagagtccttgccctcatggagattttagggctgtgtttgttacagatgggactgcatgaccacccggagacataagtacttctcctgtccccattttacagag

SEQ ID NO: 23784 - DNA, 120 bp, synthetic construct
  source 1..120: mol_type = other DNA
aacattgctgacatcgaggagaagagaggcttcaccagccactttgtaagacagactcctagtccttcacccaacaacctctgaacttccacccagctgacctctgaaccttgccctctg

SEQ ID NO: 23785 - DNA, 120 bp, synthetic construct
  source 1..120: mol_type = other DNA
caatctgtttatgcaccatgtagaaattgcttcattgagtcgcgagctaatttcacataataatccagattcctgctcctttagaaggagaagaggaagaggaagaggaagaggaaggag

SEQ ID NO: 23786 - DNA, 120 bp, synthetic construct
  source 1..120: mol_type = other DNA
aagtggtttatttggaggtgattctgggaaacagtagttgggagggagagactggaaagtgggcaaccaacacagggccatgaatgcgcagtgtagagctgagagcatctgagctcagcc

SEQ ID NO: 23787 - DNA, 120 bp, synthetic construct
  source 1..120: mol_type = other DNA
ctttcccaaggtcatgctccacccctggtaagaggcatgatcaggatctaatccgagtgctattgacccaaacatccactaactttcccatgaccctcaacctcatctgcttccatggtg

SEQ ID NO: 23788 - DNA, 120 bp, synthetic construct
  source 1..120: mol_type = other DNA
tctggaagatgagctccagagagtgagactggcccaggcagatgacaagtaggctgcggaaactgaggcaacctccatacccaccttctttctgtcctggcctaaatgccactcacagtg

SEQ ID NO: 23789 - DNA, 120 bp, synthetic construct
  source 1..120: mol_type = other DNA
ccatacacccctcccacaccatacactcctcccatgcctcccatgccatacaagccctcccacgccatacaccccctcccacgccatacatccctcccacgcctcccatgccatacaccc

SEQ ID NO: 23790 - DNA, 120 bp, synthetic construct
  source 1..120: mol_type = other DNA
gctggcgctttcagtccctgggaatcctaaggttggcacagagcgatgggcagagtttctttggagccaagggctgcatttgacttgtttaaggaggggacctgacaatggtgaaaactt

SEQ ID NO: 23791 - DNA, 120 bp, synthetic construct
  source 1..120: mol_type = other DNA
agagttaatcccaagtacgagggcagaaatcagggcagggtgcccctccccaggagggcctggcctctgccagccatcctctccccctccttttggtcttccaggaggtctcgactatct

SEQ ID NO: 23792 - DNA, 120 bp, synthetic construct
  source 1..120: mol_type = other DNA
aagacagacagagagacagggagagagggacagacaaagggggaagagtcagagagagaagatggacaaccaaagagagacagatggcagatggagatggagagagagagacagagaagg

SEQ ID NO: 23793 - DNA, 120 bp, synthetic construct
  source 1..120: mol_type = other DNA
atcaaattaaagctggggccctttccccagaaaaatgctcacactcaaaatcaggggggcagttttagggagtttgaggaccttctggaggctgctcacacaccctagaccagacaacca

SEQ ID NO: 23794 - DNA, 120 bp, synthetic construct
  source 1..120: mol_type = other DNA
aggccctcctgcaactcccgcagtgacgccgtcagccgctggttctcagcacgcagctcagagacaaggtccacattgtctggctccttctccttctccttctccttctccttctcctct

SEQ ID NO: 23795 - DNA, 120 bp, synthetic construct
  source 1..120: mol_type = other DNA
cacaagtcaatcatggctgaatagatgaggcagcaatgagaacagcagcagcattacagcagtgacctgtttttttgatgttccaggccttgtgctaaataaatgtcttgcacagaatca

SEQ ID NO: 23796 - DNA, 120 bp, synthetic construct
  source 1..120: mol_type = other DNA
catctacacagtggaacacccccagagcttcctctccctcacgaagcacccaactggataaccccagaacctcttctacccagcaggacaacccccaaacttcttttcctacttgtactc

SEQ ID NO: 23797 - DNA, 120 bp, synthetic construct
  source 1..120: mol_type = other DNA
cagcgggacaatcccagagcctcctctcctaacagaaccatccaacaagagaacctcagaacatcctgtacccgacaggacaatcccaggacctcctctcccaatagagccacacgagac

SEQ ID NO: 23798 - DNA, 120 bp, synthetic construct
  source 1..120: mol_type = other DNA
tcttgccatttcgttctatcatatatgtgggtttgagcatactctgtatttgttgtatccaacctccaggagatccaaagcaggaccttgcttatgaacgtcagtatgaacagcaaacct

SEQ ID NO: 23799 - DNA, 120 bp, synthetic construct
  source 1..120: mol_type = other DNA
acttgggtctcggttcaaatcccagcagcacctcttcctccctccgtgaccttgaatgagctgtttaacctctttggtctcagttttctcatctatcaagcagggtggtcattttccacc

SEQ ID NO: 23800 - DNA, 120 bp, synthetic construct
  source 1..120: mol_type = other DNA
gggctgaaagctctacatccatgacctcatctgatcctcacaaccatctctagagaggagtatcattacactcattttacagtggaggaaactaaagctcagagagggtaagccaattat

SEQ ID NO: 23801 - DNA, 120 bp, synthetic construct
  source 1..120: mol_type = other DNA
cgtgtgtctttaatgccaaaaccctcctgccccctagctgcagctgatgagaagttttcaaatggaggttctagaatccccacgcacttcttctgattttcacacacactgagacttggt

SEQ ID NO: 23802 - DNA, 120 bp, synthetic construct
  source 1..120: mol_type = other DNA
atgggagcaggtgatgtctccactccacatccagaaccaagtccccggaaggaatcgagtcttcttcctgggtggcacagtagggcacccactcgtgggacaaagccctcagaattaaga

SEQ ID NO: 23803 - DNA, 120 bp, synthetic construct
  source 1..120: mol_type = other DNA
cccatcctcaccctcatagcagtcgcggacggtgccgaagtacacgtagtactggtcgttggtgaagaagaggaggctgagccaggagtcaaaggcgtagatgggcacgatgaagaggat

SEQ ID NO: 23804 - DNA, 120 bp, synthetic construct
  source 1..120: mol_type = other DNA
taacacctcctctcactttattttccacaatctatgtggtaggtagtacagttatcctactgtatagaagaggaaagtaaggactgaaaggtcagcattcttgcctgagcttacatgggc

SEQ ID NO: 23805 - DNA, 120 bp, synthetic construct
  source 1..120: mol_type = other DNA
tgctttgtctttctcacttttcctcgtgtttcttcagactggcagtctagtggagtgattaagagcacagacttgggtgccagactgcctggattcaaatccagctctttcacttattgg

SEQ ID NO: 23806 - DNA, 120 bp, synthetic construct
  source 1..120: mol_type = other DNA
caagatgtccctgagtagtggacaaataaaccatggtacgttcagacaatggaatatttggcactaaaaagaaatgaactatcaagccatgaaaagatgggttgttcccagagggaactg

SEQ ID NO: 23807 - DNA, 120 bp, synthetic construct
  source 1..120: mol_type = other DNA
tcctattgtaaactctgaatgtcgagtgatgatgatgtaacaatgtaggtccgttaattctaactaatgtgccactatcttatggaatgtcaacagtgggggagattgtgcatgcgcagg

SEQ ID NO: 23808 - DNA, 120 bp, synthetic construct
  source 1..120: mol_type = other DNA
ccctgttcaccacacatcacctcacactctgtttccttttctaggctaagaatcttctctgtggcttttacggccgccatgcggagctgcgcttcttggacctggttccttctttgcagt

SEQ ID NO: 23809 - DNA, 120 bp, synthetic construct
  source 1..120: mol_type = other DNA
cgtccctccctttccttctcacagcctccttctctttcccacctcccgcatccctccctcctctcccgtcattgtcactgtccccaggccacctccctgtgccctctttccactctctca

SEQ ID NO: 23810 - DNA, 120 bp, synthetic construct
  source 1..120: mol_type = other DNA
gaggaaaggagcttcaatggcaagatcccctgggctcctgtcctggcccctcctctccctgccccacccctgcactcctcctgctccccctctcagagcatcccctgccccctgctcctc

SEQ ID NO: 23811 - DNA, 120 bp, synthetic construct
  source 1..120: mol_type = other DNA
ctcgttctccctaatatttagaaaagggtgttgcttgtaggaccactttgctatgaagaagccttgtttccttttcttgagaacacaaagcaagtgagtggtagagcccagattcatacc

SEQ ID NO: 23812 - DNA, 120 bp, synthetic construct
  source 1..120: mol_type = other DNA
ctaggctggccaggagccctgagcccaagggactttcttccctggcccctacccagcacagcctctgtctggagaggccaagttctgcttggctctgttgctggaaactgggggcttctc

SEQ ID NO: 23813 - DNA, 120 bp, synthetic construct
  source 1..120: mol_type = other DNA
acctcattgctcctgatctgtttgtatttaaatgggcaacattttgcttatcttgggatttttgcataacatctgatatttttaatattgcatagaaaatcatgcatcctaataaccggg

SEQ ID NO: 23814 - DNA, 120 bp, synthetic construct
  source 1..120: mol_type = other DNA
taaataggagctaagcagctgggaacgcagaaaacacaatacgtgacgtgccccgcgtgggctctgctatgtgtactttcctcttacatttctttcttttttttttttttaagacagagt

SEQ ID NO: 23815 - DNA, 120 bp, synthetic construct
  source 1..120: mol_type = other DNA
tgagagagttaaagtttgtctattctcacaatgagattttgaaatgcgctgtgtattttacacgtgccaacgtttctaatcagagccccatttcaagtgctcagtagcccctttggccaa

SEQ ID NO: 23816 - DNA, 120 bp, synthetic construct
  source 1..120: mol_type = other DNA
ctcatgagagagttaaagtttgtctattctcacaatgagattttgaaatgcgctgtgtattttacacgtgccaacgtttctaatcagagccccatttcaagtgctcagtagcccctttgg

SEQ ID NO: 23817 - DNA, 120 bp, synthetic construct
  source 1..120: mol_type = other DNA
tgaccacttttaaagctacatcattccctgaaacccctgagtctccatgtctttgtttgaacatggagcttacaactccgcccaatgtctaagggctgctgggcaacttgaggaaaaaaa

SEQ ID NO: 23818 - DNA, 120 bp, synthetic construct
  source 1..120: mol_type = other DNA
agagctgaatcccacgcctttggaccaactgccgtgtgacctcggctggtcactgcccctatggtcctggctctcatctgtgaatcgaggggcttgaagaacattcgattcaattctaat

SEQ ID NO: 23819 - DNA, 120 bp, synthetic construct
  source 1..120: mol_type = other DNA
ttctagtgggtaaaggccaagtacactacagtgcacaggatagaggatagagtcccacagcaaagaattatccagccccagtgacaaagaattattcagtggcactcagtctgaaaaacc

SEQ ID NO: 23820 - DNA, 120 bp, synthetic construct
  source 1..120: mol_type = other DNA
gaatctcttattgtaccgcactcatacctaattttgggccacagtggaccatgggtaactgacacggcagataatgagggacaactgtatttattcatccgacagatgttcattgaacac

SEQ ID NO: 23821 - DNA, 120 bp, synthetic construct
  source 1..120: mol_type = other DNA
gaagaccgcagagccagtcagtgctgggacgagttcaaatgcaggtctcctggcttcgtggtcttgtttgctgcttttactgcatgagagcccctttctgtctcctgacactcagtttct

SEQ ID NO: 23822 - DNA, 120 bp, synthetic construct
  source 1..120: mol_type = other DNA
aatcccatcaggtatctgctaaattccacagatgtgttctgaagtgaggtgattcgtttcactagggttttaaaaaagttacacctcttctaagcttgcttgctctctcgctttctctcc

SEQ ID NO: 23823 - DNA, 120 bp, synthetic construct
  source 1..120: mol_type = other DNA
atattattactgtcctatattttaaatctagaggaaaagccattgtaggttgggttccctaggaaacagactctcagactcagatttgcatgtgggagagccattagggagcgctcttag

SEQ ID NO: 23824 - DNA, 120 bp, synthetic construct
  source 1..120: mol_type = other DNA
agccagaaactgaagaacacatacggtatgcttccatttatataaattttaagaacaaatgcaacaaatctatacagttaaagaaattcggtcggtcgcagcccgctcgggcccgttcgc

SEQ ID NO: 23825 - DNA, 120 bp, synthetic construct
  source 1..120: mol_type = other DNA
accagtgacgatatggtgattgttggttagagacttggactcaagtcataggcttctttcagtctttatgtcacctcaggagacttatttgagaggaagccttctgtacttgaagttgat

SEQ ID NO: 23826 - DNA, 120 bp, synthetic construct
  source 1..120: mol_type = other DNA
agattttatctaggcttgatcacatttcttttcatcttcatagaaccatgaagtagcctcattttacaggtggaattcagagggcttaagtaacttgcacaaggcctcacagcctgcgtg

SEQ ID NO: 23827 - DNA, 120 bp, synthetic construct
  source 1..120: mol_type = other DNA
attcagcatatgggtgtagacacccggtatggctgggtgaacggttcatcttgtgggttcttccttaattgggctgcccttcccctctattagttcaagttttgacctttctggaagtgt

SEQ ID NO: 23828 - DNA, 120 bp, synthetic construct
  source 1..120: mol_type = other DNA
agctagattgcttgggttcaaattttggctctaccacttagcagctgctgtgaccttgagatatttaacatctctatgcctccatttcctcatctgtcaaatgaaagtaacagtttcacc

SEQ ID NO: 23829 - DNA, 120 bp, synthetic construct
  source 1..120: mol_type = other DNA
atcaagtaccaggtgttgtggacacagaaaggtgaaacacctgcccaaatggagttgacactacaggctgttcaagaaacggagacagccttgtaactatttatacaatccctcagcatg

SEQ ID NO: 23830 - DNA, 120 bp, synthetic construct
  source 1..120: mol_type = other DNA
acctgctgaataacactaagagatgacacttaacactgtatggatccaggttaataccatatggagcaggcagaataatccctaagctaagccctgtccaaaatcctcacccacaaaatt

SEQ ID NO: 23831 - DNA, 120 bp, synthetic construct
  source 1..120: mol_type = other DNA
ctttcattgttattcctctattcattgccctcccctttacccagctccaatctttaatagaccaaagttatgtaacacggtgattgattctcaaagcaggccaaaatgttcaggatactg

SEQ ID NO: 23832 - DNA, 120 bp, synthetic construct
  source 1..120: mol_type = other DNA
acaaaaaaaaacaaaaaaacaaacaaaaaaaccaaaacccaaactgtggggcccatatatctgcatcattgaatgtccttgtcgccgttgatgacctgctctctgctcccgtccccctcc

SEQ ID NO: 23833 - DNA, 120 bp, synthetic construct
  source 1..120: mol_type = other DNA
cctcaaaaaaaaaaaaaaagcctagcccctggcgatctggcctcaactgacctctagctgctcaaacaccctgtgcctactccaccacatgccatcttctaaccccaaattctcttatcc

SEQ ID NO: 23834 - DNA, 120 bp, synthetic construct
  source 1..120: mol_type = other DNA
tgctgggattacaggcatgggctactgtgcccagcctccaccataactggaagctatctcttcagttcaaaattaaagttggacaggaaggaaaaaatagtacgtttctaaagatgactt

SEQ ID NO: 23835 - DNA, 120 bp, synthetic construct
  source 1..120: mol_type = other DNA
gggagaggagggggtggcaagctgccagtacactagcaggcactcctggtgatgctctgggctctgctccctttctgctggtagtagtaggcatgttttctggcagctgcagcagactga

SEQ ID NO: 23836 - DNA, 120 bp, synthetic construct
  source 1..120: mol_type = other DNA
ttcactctgtacacctgggaagtcattactttcctgctttagccttcagtttccccgtctgcaaaatgtactgtatgtcggtcaatttgaaaaaggtcagttttttgactctattcttgg

SEQ ID NO: 23837 - DNA, 120 bp, synthetic construct
  source 1..120: mol_type = other DNA
ctgaggtatgaagtaatagcatggaaggtaggggtggaagggattcagacaatgggtgaagttctagaggcaacacttgatttctgatactctgctgtatggcaaagaggactttggctg

SEQ ID NO: 23838 - DNA, 120 bp, synthetic construct
  source 1..120: mol_type = other DNA
ggttaaactttgttgacatgatggaattttttagagtagcagaatcccagagcctgtgccttaaggtaaggctccctggggaactttgtttagaaatgaatcctaaactatcgaagggct

SEQ ID NO: 23839 - DNA, 120 bp, synthetic construct
  source 1..120: mol_type = other DNA
acttccttcaggtctttatttatttagaagtcctgtttgcaggggcgttccctggttaccctgcctaactcttgcctgtttaccaccacctgacacgccacgcctccactttccagcacg

SEQ ID NO: 23840 - DNA, 120 bp, synthetic construct
  source 1..120: mol_type = other DNA
aactcacaaggttaccacagctcaactgaaaaggaagaacttcccaggactgtgacaccccagtgtgagaacaggaggatgaggtgctctgaaggcctttctgcccagtctgccctctta

SEQ ID NO: 23841 - DNA, 120 bp, synthetic construct
  source 1..120: mol_type = other DNA
ggtctacgtgcccatgacagagctctggctggactggttctgagcctctaacacccccaagactcagaaccgtgaagaaaatctttccaataaatccaagagttgctgctgctataggcc

SEQ ID NO: 23842 - DNA, 120 bp, synthetic construct
  source 1..120: mol_type = other DNA
tacagcagcatccctgagggcccagagaggtagccagtcctgtggtgaggtgacgaggctgagggtggtggctcagtcctgggcttccatggggccttcccagggaacgttctggcacct

SEQ ID NO: 23843 - DNA, 120 bp, synthetic construct
  source 1..120: mol_type = other DNA
caaacacacgggggacacacactgcctggcacacagctggactctgtcaactagtcctgcgcccgagaagctccacagtaccctctccgaccccacagcagggcgcagtcacacctctca

SEQ ID NO: 23844 - DNA, 120 bp, synthetic construct
  source 1..120: mol_type = other DNA
aacggggtagcccccaaatgacctccaattctgcacctgtcagcccagatgcggctcgccgggtgatgcactggtccaaccttttgcccagcctcccctcattcctcctgggacgctcaa

SEQ ID NO: 23845 - DNA, 120 bp, synthetic construct
  source 1..120: mol_type = other DNA
caggaacacccctgggggtgggacgggcacgtgcgcgtggccatgaaggcattagccccaccatccaccacccactccaaccctatgctccccctggtctcccgcagtccctggctctgt

SEQ ID NO: 23846 - DNA, 120 bp, synthetic construct
  source 1..120: mol_type = other DNA
tcacaccttctgtgatggaggaactcagtttggatgcgtcacccaggtatgaccttgcaagagtcaccaaaattgccgagaggccccagttagcatcccattcccagatgatggtccatg

SEQ ID NO: 23847 - DNA, 120 bp, synthetic construct
  source 1..120: mol_type = other DNA
aggaatcatggcgattgctgccttctcaagagagagacctctcctggtactcaaagcgcctcagacccacaccggtccctctgtgccttcttttttttttttttttttttttgagatgga

SEQ ID NO: 23848 - DNA, 120 bp, synthetic construct
  source 1..120: mol_type = other DNA
aacttcttgcgcagctgcgctagatctgggggtgagaggaggcgcggggcagggtcagacagcgcgccccggggaagctggcttgctcatgccccacccctcctcccagttactgtgggg

SEQ ID NO: 23849 - DNA, 120 bp, synthetic construct
  source 1..120: mol_type = other DNA
ctttccacagagtctggtgcgagccccgtgcttagggacgccctccctcctcgaccaccaagtccagcgcccgccctcaggagcactggccacaggcctcatccgtggctggggccaagg

SEQ ID NO: 23850 - DNA, 120 bp, synthetic construct
  source 1..120: mol_type = other DNA
cagtatgcctgtgccgctctgtgccaggggctcaggctaatgactccctggggacccagacacagccccatggtcctcctgcccaggcctccacatgctgctctcagggagcatggactt

SEQ ID NO: 23851 - DNA, 120 bp, synthetic construct
  source 1..120: mol_type = other DNA
ggagccggggaaggccctgcaggtggccagcagagacggtccgtgagctttaacacgggacagaaaaagccaggcaggaagtgcaaggatgtggcaaatctggcaaagaatcgcaggctt

SEQ ID NO: 23852 - DNA, 120 bp, synthetic construct
  source 1..120: mol_type = other DNA
gagattctttggttaatcgctggcacacccatgactgtaatcctcataaagctaggaactgcttctatttttctcacacctccgtcacagtaccggttggcgtagagctgcggtccctga

SEQ ID NO: 23853 - DNA, 120 bp, synthetic construct
  source 1..120: mol_type = other DNA
ccaacccccaaacacctcccggcgatgcctgaccgcccccggtctcgcgtcccggagcccctcacctgcgtagcccagtgggctggggatacggtcctccgggtcccgcgcggcgcactt

SEQ ID NO: 23854 - DNA, 120 bp, synthetic construct
  source 1..120: mol_type = other DNA
aggtgaggggggaggtctgcaggggaatgaggagggcggggagacagctggcatagacacctcttcctaccctccaacccgcttctctctgtttcagacttttattacgttgccatggat

SEQ ID NO: 23855 - DNA, 120 bp, synthetic construct
  source 1..120: mol_type = other DNA
aactggtgggaagaagctttagggtatgcagctggggagggagtgagggaatgtcacccacagctcttttgtcccccaggtggcgtcgtgggcggaatggtgagtagatggctttgtctg

SEQ ID NO: 23856 - DNA, 120 bp, synthetic construct
  source 1..120: mol_type = other DNA
atgcctttgcactgtgtccacattgcaccaccacacatgacagccctaaatgtgaactgaaggaacaaggactgacccctctgaccaccactacccataaccagtactgtctctgcgtct

SEQ ID NO: 23857 - DNA, 120 bp, synthetic construct
  source 1..120: mol_type = other DNA
tcacagagtgagccacacatcatgggggagcttggaagccccagaaatgcgccctttctgccagtccctttctgccactgagaatgatggcattcgttgaaccagatgaaactgccaacc

SEQ ID NO: 23858 - DNA, 120 bp, synthetic construct
  source 1..120: mol_type = other DNA
aggtaaccacactgtccaataagagcctattgattcctctgtttcccgaggcatgtgaactccgcaacccccactatggctgatttggtcatctttgtgcctcctgcatctggcagtggg

SEQ ID NO: 23859 - DNA, 120 bp, synthetic construct
  source 1..120: mol_type = other DNA
taatagaaacttggccatctctgccagtgaggggctgtaggaccttgggcaaggtgcttaccctctctgagccttggttgtctcacgtgcaaaaagaaagtgctttcattcgctcagctg

SEQ ID NO: 23860 - DNA, 120 bp, synthetic construct
  source 1..120: mol_type = other DNA
acagacttggagagggcaggagtctctggccaccaggggctaaagagccttcgatgaggcagtgatgtggggtcctgggctcagacccagggtgggtggctaaggtgccctcgccaggac

SEQ ID NO: 23861 - DNA, 120 bp, synthetic construct
  source 1..120: mol_type = other DNA
gaggttcgcgatttctttgggggcgatgaaaatgtcctgtaattgtgacgatggtctcacaactcaatgtattaaaaaccacagaattgtagactatcaacgggaggattgtgaagacat

SEQ ID NO: 23862 - DNA, 120 bp, synthetic construct
  source 1..120: mol_type = other DNA
cgttcgctagaaactcagtgtgtcaactgcttctgctgttgtgaggaaatgggctcgatgtcccgagagtgggaaaaatggaaaaaactaaaggcggccaagctgcgcgacagcaaaaag

SEQ ID NO: 23863 - DNA, 120 bp, synthetic construct
  source 1..120: mol_type = other DNA
catatacctccctgattgtagttctcccagcaaatgtgcatgtgtgttctcttatcattaccctacaagttcccttttcactttgagtgccaggaagctgagaaacaagttccttgcatg

SEQ ID NO: 23864 - DNA, 120 bp, synthetic construct
  source 1..120: mol_type = other DNA
cccaggtgtttcactcatcccaggcctcctttaaggccccagttggcagctgtggacttgggtcagagagaccagggtttgagtcccagctaaggatggcaggagagtcgcttcacttcc

SEQ ID NO: 23865 - DNA, 120 bp, synthetic construct
  source 1..120: mol_type = other DNA
agcacttactttatttctggctaatcatgaaaatagctctttgggggtaagcattgttatcttcatttcccagatgagaggttatgcaacttgctaagtgtcccacagctggcgcaagga

SEQ ID NO: 23866 - DNA, 120 bp, synthetic construct
  source 1..120: mol_type = other DNA
agaagtgcaaataaataaaatgagggacatctcgtgctggttctccaagagtgtgcaaccagcctactcaaaccatgtggattaaggcggaagaaaattcagaaacagagagtccaccaa

SEQ ID NO: 23867 - DNA, 120 bp, synthetic construct
  source 1..120: mol_type = other DNA
cagcaagactctgtcagaaaagaaaaggaaggaaaaacaaaagagaagagaagagaagaaaaggaaacagactcaagggagtccgggtgccctgattcaaagccgggatgatactactct

SEQ ID NO: 23868 - DNA, 120 bp, synthetic construct
  source 1..120: mol_type = other DNA
catgttgtacttaaagcaagcatcttagtgggtgacctcacaccagccactgacatctacctggaggtgacagaagagtagtgactggagaccaggaaggctgtgcgcgattctcacaca

SEQ ID NO: 23869 - DNA, 120 bp, synthetic construct
  source 1..120: mol_type = other DNA
tagtctttcttaacagaaccaattccccctggataccccaccctcaccctaccctctcccaggccactcgatggccaggttcgctgtggatttttccagacctgtgggctgtttcactgg

SEQ ID NO: 23870 - DNA, 120 bp, synthetic construct
  source 1..120: mol_type = other DNA
agagaggtcacgatgcctcttcccggggctgcgaggaaaatgatctgcactggcgtgagcagagaacctctcctcagcggtgctcagtacaggtttgctgcagggatctaggcagcaaac

SEQ ID NO: 23871 - DNA, 120 bp, synthetic construct
  source 1..120: mol_type = other DNA
atcacacaccctatatacataccacacacccactcaccacacactcacccccacacacaccacacaccctcacctccatcgaccatacacacccccatacacaccacacatccaccacac

SEQ ID NO: 23872 - DNA, 120 bp, synthetic construct
  source 1..120: mol_type = other DNA
tatcatttcttctcctccggcttcccagtttacacccctggccaaccctattgtttgaggcttcggacttgtggctgcaactgcccatccaacatctccatgtggatgacttgtgagcgt

SEQ ID NO: 23873 - DNA, 120 bp, synthetic construct
  source 1..120: mol_type = other DNA
gtccccagtcccctagggagatctgaaactccacaagtgtcccaagctcctaagcctcaatgaagccttgaatactgagcttttcctcactcaagccaatcaagtccctgcaattgatta

SEQ ID NO: 23874 - DNA, 120 bp, synthetic construct
  source 1..120: mol_type = other DNA
tcctgtcatctcctcctcagctaccctgtcacctccctcagccatcctcctgtcacctccctctttggccaccctcctgtcacctcctcctcagtcaccctgtcacctcccttggccacc

SEQ ID NO: 23875 - DNA, 120 bp, synthetic construct
  source 1..120: mol_type = other DNA
atgttgcaccataactatcacctcccaggtatgcagaactgagcaattttcaaaggtcttcaccattcatagtctcatttgagcctgaaactactttgacagctagtgagaacaggtgat

SEQ ID NO: 23876 - DNA, 120 bp, synthetic construct
  source 1..120: mol_type = other DNA
ctctgtctcattgcacagggtcaagatgacaccagggccagaacgagcccttccacagaccccacactccgcactcccctctgtggatatcttacaggttgctcatctaatgtgaagtcc

SEQ ID NO: 23877 - DNA, 120 bp, synthetic construct
  source 1..120: mol_type = other DNA
tctgtggcagggacaatgctatcaatacgcttggccttatttattgtcgcaaccatcccattgagctattgttctgctaaaaagatgagaaaactgaggcttaaggagacagtgaggaag

SEQ ID NO: 23878 - DNA, 120 bp, synthetic construct
  source 1..120: mol_type = other DNA
aacacatatacactttcagtctggaacagctgttggggcaaattgtgcaaaatagattctgtgtatccattccatctatacaccccaagcctctctccttgtctcttttacacacacaca

SEQ ID NO: 23879 - DNA, 120 bp, synthetic construct
  source 1..120: mol_type = other DNA
tgaaatcattactgttgttattatttcaaagttgagcatttgttgcaatccaaatagctgggggactgtgtcgggaaatgagagtctatttctttctctggggatgactaggtctgcctc

SEQ ID NO: 23880 - DNA, 120 bp, synthetic construct
  source 1..120: mol_type = other DNA
aaagggaggagagagagagaaagggaggagagagagagaaagggaggagagagagagaaggggaggagagagagagaaagggaggagagagagaaagggaggagagggaaagagaaaggg

SEQ ID NO: 23881 - DNA, 120 bp, synthetic construct
  source 1..120: mol_type = other DNA
gggcctgttttcccacatctcactgaaaatagtattatcagctgtaacctgtgttatgctatgctgtactagctcacttacaggcaggtactattatctccattttacaggtgaggaaac

SEQ ID NO: 23882 - DNA, 120 bp, synthetic construct
  source 1..120: mol_type = other DNA
ggtggtgatggaggtggtggtggtggaggaggaggtactagtaatggaggtggtggtggaagtgctggtgatggtggaggtggtggtggaggtagtggtggtggaggtggtggtggtggt

SEQ ID NO: 23883 - DNA, 120 bp, synthetic construct
  source 1..120: mol_type = other DNA
gtggtggtggaggtagtggtggtggagatggtggtggtggaggtggtggtggaggtagtggtggcggagatggtggtgatggaggtggtgatggacgtggtggtggtggaggaggtacta

SEQ ID NO: 23884 - DNA, 120 bp, synthetic construct
  source 1..120: mol_type = other DNA
aggtggtgatgctggttactttattgacataaagggcccattcttgtggaatcatgtatgggtgaaacctacgggatgattctgatgcttttgttgcaaatgactgaaaacccagttcaa

SEQ ID NO: 23885 - DNA, 120 bp, synthetic construct
  source 1..120: mol_type = other DNA
tcttatttcctgagtgcccactgagagcagggggcttgacttgttatcttgtgggctcctcacaacagcacaggaggccagaatcacctgcccatttgacaggtgggaccctggagcttc

SEQ ID NO: 23886 - DNA, 120 bp, synthetic construct
  source 1..120: mol_type = other DNA
tgatgtgggaggtggtggtggtgggaggtagtgatggtgatggaggtggtggtggtggttatgggggtggtgatggtggtaatggaggtgatggtggtggtgatggaggtggtggtgatg

SEQ ID NO: 23887 - DNA, 120 bp, synthetic construct
  source 1..120: mol_type = other DNA
gaaggtcttgccccttccagtccactcgctttacatcagcaggagggagttttctgtatccttatgtgtgccatgccacccctctgtgaccctctgtggttccctcagtcctctgaatga

SEQ ID NO: 23888 - DNA, 120 bp, synthetic construct
  source 1..120: mol_type = other DNA
gcccctttgtgactacaccgtaatattggcaaaatacatgaaagaaataatgtcccaatacatgaagtatacagtcatcaaagaggctactcacaccccactttgatggggtgcttctca

SEQ ID NO: 23889 - DNA, 120 bp, synthetic construct
  source 1..120: mol_type = other DNA
ccaaccttacttagtgcctgactctaggccttcagcacagactgatggtttgctaatagcaatcacaaagtcgaaaaatgttcatgttttcttttcttctttgctgctggcatgatcatg

SEQ ID NO: 23890 - DNA, 120 bp, synthetic construct
  source 1..120: mol_type = other DNA
ttgttatttagagagttggaccactactgtgtgttgctaatcattgactgtagtcccaaaaaagccttgtgaaaatgttatgccctatgtaacagcagagtaacataaaataaaagtaca

SEQ ID NO: 23891 - DNA, 120 bp, synthetic construct
  source 1..120: mol_type = other DNA
aggatagaccttggtgaaaatcaaattacaggtatagataaaagatctaagacaatcactgtgaatatgtgctggtcatggcggcatacgcctgtaatcccagctctttgggactgtgta

SEQ ID NO: 23892 - DNA, 120 bp, synthetic construct
  source 1..120: mol_type = other DNA
tgtttacttccatctcttccttgtcgcactggcacctgcctcacgtggtcgtggggaatatgaagaggcgacgcaggaacacgctttgcacagctcctggcacaggaggcttcgaaaact

SEQ ID NO: 23893 - DNA, 120 bp, synthetic construct
  source 1..120: mol_type = other DNA
aaacaaaaattgagagaatgtgttgccagcagacttacttccaagaaatgttaaaaggaattcttcagaaaggcaaggcaaggtgcagtggctcatgcctgcaatctcagtgctttgaga

SEQ ID NO: 23894 - DNA, 120 bp, synthetic construct
  source 1..120: mol_type = other DNA
gaactgtagtgtatgaaagtagaattgatttacagcatttctgttaaggccacccatttaggaacacatattaaattaggccaaggcgggcggatggatcacttgaggtcaggagtttga

SEQ ID NO: 23895 - DNA, 120 bp, synthetic construct
  source 1..120: mol_type = other DNA
agcctctgagaaggtggtccctgtggtacctggcagtggaccgcaacagtgcccgttactttatccgcttaacaagtggtcaccaggaagccctggaacaaagcccagaagaactgggac

SEQ ID NO: 23896 - DNA, 120 bp, synthetic construct
  source 1..120: mol_type = other DNA
accgcagccctgagcttcccgcgcccccaccgcagccctgagcttcctgcgtggcctgcgctgcctcagagcccttggtgtggggtggggcacacaggcagggaccaactcatggagtct

SEQ ID NO: 23897 - DNA, 120 bp, synthetic construct
  source 1..120: mol_type = other DNA
gaatcatccatctggaatatgaaggaagaataacaaaacctcactgtccaccccagagaagacacggtcacagaggctgcatgccacactgcgggtgccacagggagcctgtctacacag

SEQ ID NO: 23898 - DNA, 120 bp, synthetic construct
  source 1..120: mol_type = other DNA
aggctcacgcgtggttgtttatgcaggaccctcctgctgttgccctgtgctgtggcctctgatcctggcctgtctggacatggtgtgctttcagggttcccgtgcatattagtttccacc

SEQ ID NO: 23899 - DNA, 120 bp, synthetic construct
  source 1..120: mol_type = other DNA
gggcgtttttgttccaaggctttcttgctgataagtttctctttctctctctctcttttttttttgtcctgcgtgtctcaacctgacaaaaatgctcagtttagaagcgtgtcgttccat

SEQ ID NO: 23900 - DNA, 120 bp, synthetic construct
  source 1..120: mol_type = other DNA
acctcccaggctcaagcgatcctcctgccagcgagcttgttacaattcctgcaccaacacggatacattgttactaactaaggccctacaccagcaaagatacattgttactaagtaagg

SEQ ID NO: 23901 - DNA, 120 bp, synthetic construct
  source 1..120: mol_type = other DNA
tgcaccagcacagatatattgttactaaggccctgcaccaacacagatacattgttactaactaaggccctgcaccaacacagatatgttgttactaaggccctgcaccaacacagatac

SEQ ID NO: 23902 - DNA, 120 bp, synthetic construct
  source 1..120: mol_type = other DNA
gagtttgtagactgtccctctgttggggtttgtctgatgctttcttcatgattcgatcaggttgtcactttggggaggaagtctgtgaggtcaagtgccattttcatcgcatatcggggc

SEQ ID NO: 23903 - DNA, 120 bp, synthetic construct
  source 1..120: mol_type = other DNA
tttactcatctgctacatgtgaggacatgagacagtacatgtaacaacgcttggcacacagaaagcactcaagaaatgtatatcctattgagtcgggagaaaacatattcaaagcagggc

SEQ ID NO: 23904 - DNA, 120 bp, synthetic construct
  source 1..120: mol_type = other DNA
aatgtatattttgccacaataaaaaaaaatttttaatgttacgagggaaaataaaacaaggcgtgtctggggagtggtgccgagaatggtgatgggggagctgctttagaagggtggtaa

SEQ ID NO: 23905 - DNA, 120 bp, synthetic construct
  source 1..120: mol_type = other DNA
cagggccatgagttcaatagcactgatgttcacaaggccaaagtcatcaccttgggtccctccgtgggatgtgcagagggggaactgagctcaaggagctctgacgacgatggcgtgtgt

SEQ ID NO: 23906 - DNA, 120 bp, synthetic construct
  source 1..120: mol_type = other DNA
acctgggcttaggaagctgtgatgacgatggcgtgtgtggaggggacctgggatctgggagctctgataatgatggcgtgttacaccactggacaacatcccctgaggggccccacaaat

SEQ ID NO: 23907 - DNA, 120 bp, synthetic construct
  source 1..120: mol_type = other DNA
gtttggctccctccccactgctgcctgtacccctttgtgccctgttttcacccttggcacatgtgcctcaggctgttcttacctgtgtccttgtgtgtttaattgtaatgaagaagctgt

SEQ ID NO: 23908 - DNA, 120 bp, synthetic construct
  source 1..120: mol_type = other DNA
cagtcccagctctcaaggggtacccctccccgcagctgtccatatgtggggggcacccctccccgcagctgtccatgtgtggggggcgcccctccccgcagctgtccatgtgtggggggc

SEQ ID NO: 23909 - DNA, 120 bp, synthetic construct
  source 1..120: mol_type = other DNA
acagatgtgtcaagagactgttgtagcacatggtgacccgggccataatggacggcagggctgagcatctgcattcctgagagggctcctgtacccccgacatgaggtcatgcccaggag

SEQ ID NO: 23910 - DNA, 120 bp, synthetic construct
  source 1..120: mol_type = other DNA
aaaatcaaggttgttgttagtttgccataccaacaagcatcaggagcattcagaaggggaggtctcaggcagtttcccaaactaacttgggcaaggaaccttttactgcattgaacagaa

SEQ ID NO: 23911 - DNA, 120 bp, synthetic construct
  source 1..120: mol_type = other DNA
atatttgcataagcctttatagctgatacagatattatttccattttgcaggtgggaaaagggaagtttggggagattccatgcccaagtattcaaggcatgtactctgaggaactggag

SEQ ID NO: 23912 - DNA, 120 bp, synthetic construct
  source 1..120: mol_type = other DNA
aacgtgaccgttggtgacttcttacttctccaaccctctggtggagacattagttaatgagtaggaaaattgccaaaaagaatccgtacagagacctggtttctgcacagtaaagaatta

SEQ ID NO: 23913 - DNA, 120 bp, synthetic construct
  source 1..120: mol_type = other DNA
aattaagaggtatgttcccattaaaagggattcttatttttcacaaaatagttaaaatcctgcaggtactcccttctggcatccccccccccccccattaagtgtgcattttagtctgtc

SEQ ID NO: 23914 - DNA, 120 bp, synthetic construct
  source 1..120: mol_type = other DNA
ctttttacaagtggcttggtttcaagtggttaagagtgtggaccagtgaaatgtgtcccagaaccttggctgtgagcagtgaccaggccaaccttcttctccctaattcataaaaggaaa

SEQ ID NO: 23915 - DNA, 120 bp, synthetic construct
  source 1..120: mol_type = other DNA
ccactcacttgagagatccctctccacccccgccatcaccactcacctgaaagatccctctccacatccccaccaccactcaccggaaagatccctctccactcccccatcaccaaacgc

SEQ ID NO: 23916 - DNA, 120 bp, synthetic construct
  source 1..120: mol_type = other DNA
tgaagccagattttctttgttttcagccgctgtatctctggcacccagaaaatggcctgcttaggtgctcagtagttgttaagagctgatgttttggtaactgtcgttccacctttttgt

SEQ ID NO: 23917 - DNA, 120 bp, synthetic construct
  source 1..120: mol_type = other DNA
cctcacatgatccttgaattgtagacagtctattgaaaatgaaaagcagaaacttactttgcctatgttagtattgtctagggctgcatccacttcatctaaaacaaagaatggggcagg

SEQ ID NO: 23918 - DNA, 120 bp, synthetic construct
  source 1..120: mol_type = other DNA
tatcatgcatggagaattttctagaaccttaaggttgggtcaccgagggctttgagaccagcatggctttgtcgggttttctttgctcttttcttcaaattccctcctcctgctgctgta

SEQ ID NO: 23919 - DNA, 120 bp, synthetic construct
  source 1..120: mol_type = other DNA
atttagctcacgggagacctgcggaaggagcacatttataaccatcaagaaatacggatgatgagttttgctgagacatgttgactgacacttagtattttaaatatgcagcccagacac

SEQ ID NO: 23920 - DNA, 120 bp, synthetic construct
  source 1..120: mol_type = other DNA
ttacaatcagcttggagctctggtcttcagccattgtagagaccaaacctcgtgaagtactctggtgcaatgtatttagggacaatcattttctatatgttcagggctttcctctctcat

SEQ ID NO: 23921 - DNA, 120 bp, synthetic construct
  source 1..120: mol_type = other DNA
gggctgccgggtgtggccatcccgagtgtttgtggaatagataaatgagtaaatgaacaagtcagtacttaagaaccacatctgaaagaactacaactcaacaacaaaaagacaaacaac

SEQ ID NO: 23922 - DNA, 120 bp, synthetic construct
  source 1..120: mol_type = other DNA
tttcagaacgtacgagtggatgcgatttttgaagtttagctcagctgaggccagataggaagagtgacttgaatagtatggcaaattaggagcggagctgggattaaaccccagaattag

SEQ ID NO: 23923 - DNA, 120 bp, synthetic construct
  source 1..120: mol_type = other DNA
tgggctcagtatcatccgtcagggaacaggaggtgctggaaagttctctggaagattctctgcccctaccccttctgtgttcccaacaacagcacagacaaaacagcctcccgagtatgt

SEQ ID NO: 23924 - DNA, 120 bp, synthetic construct
  source 1..120: mol_type = other DNA
cctccctacggccactgcttctggtcaggatcctcggtggtcctgaccctctctttctaaggcctggaagagcagggttaggatgcgacccaggccccatctggccgattctgtcacttt

SEQ ID NO: 23925 - DNA, 120 bp, synthetic construct
  source 1..120: mol_type = other DNA
cacactcatgcactcactcgctcttccctccatccctcccatgtgtagacgtggaacttttgtctgttaagtgctgcagaaataaccctgaacagacctggacccagctctcaatgagct

SEQ ID NO: 23926 - DNA, 120 bp, synthetic construct
  source 1..120: mol_type = other DNA
accagccaaatgggagaatggggagatgggggagaagggggagatgggggagatgggggagaagggggagatgggggagatgggggagatgggagcaatgggagcaataggagcaatggg

SEQ ID NO: 23927 - DNA, 120 bp, synthetic construct
  source 1..120: mol_type = other DNA
cagaatcgcagaagggctagaatttatttttaagattttcccatgagcacacaggtgattatgtttttacaccagaagtttctctgtccttgaacctacacagattgtccttggccccag

SEQ ID NO: 23928 - DNA, 120 bp, synthetic construct
  source 1..120: mol_type = other DNA
ctgtaagttgggcgtgtgctgggtaatagtgtcctcccccaaaattcatgtccacctcgtacctgtggacccgaccttacttggaaatggctctttgcagatgtcactgagatgaagtca

SEQ ID NO: 23929 - DNA, 120 bp, synthetic construct
  source 1..120: mol_type = other DNA
tcacgattctccgatggtggtctgtgtgctgagcatgtggtgggtgtctcgggaacaaaaatctccctcccgacacatacatggttcaacagggaggggtgacggggattccacgcaaag

SEQ ID NO: 23930 - DNA, 120 bp, synthetic construct
  source 1..120: mol_type = other DNA
gcacacatgtaggcttcattctttttatttgttgtggtaaaatacacagagcattgaatgtaccattttcattttcactgtcagtgtgcagttcaggggcacggagcacatgccctctgt

SEQ ID NO: 23931 - DNA, 120 bp, synthetic construct
  source 1..120: mol_type = other DNA
gtgtgtcttttcatctctggccgctgtcaccaagcaccatgtcctccaggtgtgctccgcttcattcctgcttcctttcgttgtgggctgtttgtgtcctgggacaaagtggctgagagt

SEQ ID NO: 23932 - DNA, 120 bp, synthetic construct
  source 1..120: mol_type = other DNA
tcaccatctcaaaaaaaaaaaaaagaaatcataatagaaaacattcaaaatgtccagcacgcttttgaactagagagcagcgggctgggagcccaagtgtccttcgtccctttgtggttg

SEQ ID NO: 23933 - DNA, 120 bp, synthetic construct
  source 1..120: mol_type = other DNA
tcattctgtctgaaacacgccagggtccatatctgaaagaagaggactggagagaaacagcccagggcagtgcaggggtccagctgcaggctttgcagtgtgcctcctcctggctgcgtg

SEQ ID NO: 23934 - DNA, 120 bp, synthetic construct
  source 1..120: mol_type = other DNA
cttgtcccactagaaaggtacagattatggtgtttgacagtcactggcaagacttttttcttcctttgaggctgtgttatcaagtcagtacagagttgggtgcatttgtttcttttcacc

SEQ ID NO: 23935 - DNA, 120 bp, synthetic construct
  source 1..120: mol_type = other DNA
tggacatgtgggtggatagatggatggatgattggatagatggatgcatcaatgagaaggcaaacgaatgggtagatttggtaatgggtgggtaaatgattgatggatggatgcatggat

SEQ ID NO: 23936 - DNA, 120 bp, synthetic construct
  source 1..120: mol_type = other DNA
tggcgtcgcggtgtgactgacagcccaggagcgggggctgttgtaattgctgtttctccttcacacagaaccttttcgggaagatggctgacatcctggagaagatcaagaagtaagtcc

SEQ ID NO: 23937 - DNA, 120 bp, synthetic construct
  source 1..120: mol_type = other DNA
agtgagaacaggtgatgtttggttttccattcctgagttactttacccagaattgttgtctccaatctcatcgaggtctctgcgaatgccagtaattcattcctttttatggctaagtag

SEQ ID NO: 23938 - DNA, 120 bp, synthetic construct
  source 1..120: mol_type = other DNA
atgagtgttaaaactagcaaattcaaacaaaacaaaaatgatgagaaaaaaaagtcccacatgcccacgcgcagaccagaatccttttcgatagaggtctgtgtagtgctgtgccccttc

SEQ ID NO: 23939 - DNA, 120 bp, synthetic construct
  source 1..120: mol_type = other DNA
tccgcgcagtgctgtgccccttcccgggaccagaatccttttccatagaggtccgtgcagtgctgtgccccttcccgggaccagaatccttttttgatagaggtccgcgcagtgccgtgc

SEQ ID NO: 23940 - DNA, 120 bp, synthetic construct
  source 1..120: mol_type = other DNA
ttacacgagtgtttcctgtggtgttgagtgggggttacagggtgtgggacagagggagaaggtgcacatcagcttccacttcctttgggggaggctctgctcattctgagaagctctttt

SEQ ID NO: 23941 - DNA, 120 bp, synthetic construct
  source 1..120: mol_type = other DNA
gcctctggccagcgcctccctactcgtgatttttttctacttgtaggtatttataaagcctcattgacttgtattagactaccttgaagactttgttgtctgtgtagaatatggccacat

SEQ ID NO: 23942 - DNA, 120 bp, synthetic construct
  source 1..120: mol_type = other DNA
cttttgcaaatcttgtttttccttgtctcttttttcatcaacagaggaattacggaggttgagctggtccggaatccctaagccagtgcgtccaatgacgtggaagctcctctcagtaag

SEQ ID NO: 23943 - DNA, 120 bp, synthetic construct
  source 1..120: mol_type = other DNA
atcagcgaattcgcagactgtgcaccttcagtggaagatagcttagatgaattttcttaaaatcaagcatcaacgagtgaatagtattctaaggatatgaagggaatatggtttctcatc

SEQ ID NO: 23944 - DNA, 120 bp, synthetic construct
  source 1..120: mol_type = other DNA
tatacacacatacacagtccacccttgaacagcatggaggctggggcactagcacacatatatatgtatatacatagtccacccttgaacagcatggggactggggcactagcatacaca

SEQ ID NO: 23945 - DNA, 120 bp, synthetic construct
  source 1..120: mol_type = other DNA
tatatacggaatatatatacgcggaatatatatacggaatatatatacgcggattatatatgcggaatatatatacgcggaatgtatatacggaatatatatatgcggaatatatatata

SEQ ID NO: 23946 - DNA, 120 bp, synthetic construct
  source 1..120: mol_type = other DNA
tctaggttaccctttgctccccgaggttacagatgacaagaatgtggccttaaatgtaatgtgttatttgaaattaaagtatacgcacacacaccctacacacacatgcctgtacacaca

SEQ ID NO: 23947 - DNA, 120 bp, synthetic construct
  source 1..120: mol_type = other DNA
atatacacatacacactcctatacacacacccctgcacacatgcctatatatatactcctcatacatacacacacccctacacacacccctatatacacgcatctgccatatacacatat

SEQ ID NO: 23948 - DNA, 120 bp, synthetic construct
  source 1..120: mol_type = other DNA
tgccatgggtcatcacctgccttggtgtcatcccctctcctggagttcagttagagtctgaacttaattctaatcgatggaacatgggattgtaggatatcaatcctgtaattatataat

SEQ ID NO: 23949 - DNA, 120 bp, synthetic construct
  source 1..120: mol_type = other DNA
tagcagaaccccacctgtagcctgggcccatagagactgtgacccatacagactcataaatatatgttgttttaagctgctaagtttatggtaattggttacagagcaacagaaaactaa

SEQ ID NO: 23950 - DNA, 120 bp, synthetic construct
  source 1..120: mol_type = other DNA
agcaaagaatctgcaggttcacatatatttttgttgcaaacatgatccaaacaatctcaaaacccaacttcgttttagtgtgagtggtgcagatggaacgtcgtacctcccagagttcag

SEQ ID NO: 23951 - DNA, 120 bp, synthetic construct
  source 1..120: mol_type = other DNA
atctgaattgcatgtctctgtccttgctggagcaaaaccctgttgtttggatggagcggagctgacctgacggttccaggctgttccctgttgtttggttggacgctgttccctgtttgg

SEQ ID NO: 23952 - DNA, 120 bp, synthetic construct
  source 1..120: mol_type = other DNA
taattttagtaaccaacctcccatacctttggagaacaaataaaaccacagtaatttccacgtattaagagcccacatgcgcctatcactgtcatccacagtctgcacctgttagcttgt

SEQ ID NO: 23953 - DNA, 120 bp, synthetic construct
  source 1..120: mol_type = other DNA
tactgccactctgccccgtgttccagcagccgagtaacttcgggaaatcccagtcagtgctgtcagaaacgcaacatgcatgccctttactgtcctgtttagaaaatgagcacctgtgtc

SEQ ID NO: 23954 - DNA, 120 bp, synthetic construct
  source 1..120: mol_type = other DNA
tcatctttggtggggagtggcctcgcagaggttgtggctgcttgttgatagagacaggcacgagaagtcgtctttgggtggctgcgtgttgatagagacaggcactagaagtcgtctttg

SEQ ID NO: 23955 - DNA, 120 bp, synthetic construct
  source 1..120: mol_type = other DNA
ctagaatataagcagccatgagcaatatgaaaagacgagcagggacggggcaggatggcgcatggaggaagcaggaaaaattgtgtcctcggatttcaagaagaaaacactgggtagagc

SEQ ID NO: 23956 - DNA, 120 bp, synthetic construct
  source 1..120: mol_type = other DNA
atcagtaacagtgctagttggacataagcaacatcagcctcctgtgtgctgggcccactagtaggcactgagaattcttcccacatctgccacagctctggcccctgtggctctttgcca

SEQ ID NO: 23957 - DNA, 120 bp, synthetic construct
  source 1..120: mol_type = other DNA
tcatgcacaggccttgaaggtgactgcctggtggagacattaagaaccacccaactccccagaggaaggtactgggaagagagtgccccacctaagccttggcctcaaaaggaccttttc

SEQ ID NO: 23958 - DNA, 120 bp, synthetic construct
  source 1..120: mol_type = other DNA
aggtgcctgctggctgagatcctgggtcttggggtctggaggcggctgagccgtttggtgccgctggaccagagccatgtagatgttgactgtaatcggaactaccttggtaatggtggc

SEQ ID NO: 23959 - DNA, 120 bp, synthetic construct
  source 1..120: mol_type = other DNA
gtgtgcagtagagtcggtgagttaccgtaatgggagggtactgcttctcaccttgcaaggagcgaggtcatgataatatgaagcgaagtggattaaaaataaaaccaaaggtatttattt

SEQ ID NO: 23960 - DNA, 120 bp, synthetic construct
  source 1..120: mol_type = other DNA
tgtggcttggagagccaggcccactgcccaagaccacctggacaggaagacaggatgtgaacttcagagcccagctaccccccattcccctccatgccagtcttgctgggctgcgttttc

SEQ ID NO: 23961 - DNA, 120 bp, synthetic construct
  source 1..120: mol_type = other DNA
ccctgtttctgcactcgtagaacagctctagaaaagacggcatttccgcctcagcgcagccaagaagcttgaaagacaagactggagtgtccagtggccaggggtcatcagtctgggttt

SEQ ID NO: 23962 - DNA, 120 bp, synthetic construct
  source 1..120: mol_type = other DNA
caggggctggagggctgctgtcctcttgcaaactaagtctcctggattccaaagatatctttggttctaacagtttgattaataataataatatgtggaatacctgggaagagctcagaa

SEQ ID NO: 23963 - DNA, 120 bp, synthetic construct
  source 1..120: mol_type = other DNA
tgactgcttaaaccaccttcacatttgagaactcgctctggcgctgcatgcctaggacctgggtagaggcagaaaaatcaaggtggaggctgttgagggtgtccaggcaggagatgaggg

SEQ ID NO: 23964 - DNA, 120 bp, synthetic construct
  source 1..120: mol_type = other DNA
ccacacactacactcaaaatacaccacacacaaaatacagtacacaccacacacaaaatacaccacacacaccacacacaaaatacaccacacatgaaatacaccacacaccacacacaa

SEQ ID NO: 23965 - DNA, 120 bp, synthetic construct
  source 1..120: mol_type = other DNA
cacacaaaatgtgccacacagacaccacacacacagtacacgccacagaaaatataccatgcaaacataccacacagcacacaacacaccacatacaaaatacactacatatatacacac

SEQ ID NO: 23966 - DNA, 120 bp, synthetic construct
  source 1..120: mol_type = other DNA
cagagtgcattttccttttagattctggggaggaggagatggatattacagtagtaatggtggtgtgggagatgatgatactgtgaatatgatgagggtaatgaggatataggtggtgat

SEQ ID NO: 23967 - DNA, 120 bp, synthetic construct
  source 1..120: mol_type = other DNA
gccatttcccacacccgcagaaactctccttgaggcctttctccttccggtttatgaataggtcttctcctgtgtaaagccttgaaaacagagccgagcacagatttgggacctgggatc

SEQ ID NO: 23968 - DNA, 120 bp, synthetic construct
  source 1..120: mol_type = other DNA
acactaagccctgggacaccgcacacaggcgggaccccgacactaagccctgggacaccgcacacaggcgggacccccccccatcccccgacactaagccctgggtcaccgcacacgggg

SEQ ID NO: 23969 - DNA, 120 bp, synthetic construct
  source 1..120: mol_type = other DNA
cacagatggtgcccggctcacacctggctctgcctgtcaggggtcttctctgtatggcaaggagctaggctgcgtccctgtttcagaggccaggggactctgaattaggaagtgagtggt

SEQ ID NO: 23970 - DNA, 120 bp, synthetic construct
  source 1..120: mol_type = other DNA
aaaattccatttcctgaaatagccgtaactgtgatatcaatatatcaatatttgcagtcttatcggttctgacatgggtattgcgtgttagtgaacgtcttccacgtgagtgcccctccc

SEQ ID NO: 23971 - DNA, 120 bp, synthetic construct
  source 1..120: mol_type = other DNA
ggccgcatcttcactgggagtgttaatcccccagcactcagggccgcgtcttcaccgggagctgtaatcccccagcactcggggccgcgttttcactggaaactgtagtcccccagcact

SEQ ID NO: 23972 - DNA, 120 bp, synthetic construct
  source 1..120: mol_type = other DNA
cacaggacggaagccctgcgctcaaggaaggatgctggagatagacgtcacaggaaaacgcatgatggaaacttctaaaaagaaaacggaaaaacaaagttaaaaaaaaaaaatgctggt

SEQ ID NO: 23973 - DNA, 120 bp, synthetic construct
  source 1..120: mol_type = other DNA
catccctctcccggctccctgtccatccctctcccggctccccgtccatccctctcctggctccccagctccccgtccatccctctcccggctccccatccatccctcttccggctcccc

SEQ ID NO: 23974 - DNA, 120 bp, synthetic construct
  source 1..120: mol_type = other DNA
gggttctacccatgatgggagggatgccagtgccatgcagggaggctgacctgagtggggcacattcctcaggtgtcgtcttgaacagaggctcccacctgttcataggagcatcccagg

SEQ ID NO: 23975 - DNA, 120 bp, synthetic construct
  source 1..120: mol_type = other DNA
tcgcatgaaggcgtcttaataatcacgtggctttgtttgttgtcatcacgccttatatttaacccagagctctcctggaaggcacttttatgagcgggttcctgataacttgcctaagat

SEQ ID NO: 23976 - DNA, 120 bp, synthetic construct
  source 1..120: mol_type = other DNA
aaaaatgacagagacagtcactgtcaagaagggcgaccaaaacacccacacagaggccactcaggttcatttgttttctttttatctgatctccttttgagctgacttaaaggatgctaa

SEQ ID NO: 23977 - DNA, 120 bp, synthetic construct
  source 1..120: mol_type = other DNA
tcttagcagcaccgttcccaacagccagaaagtggaaagagcccaagtgtccgtcagcggtcccacggaaaaacaaccttcatatacagccatgactggaatattattcagccttaaaaa

SEQ ID NO: 23978 - DNA, 120 bp, synthetic construct
  source 1..120: mol_type = other DNA
ggtccccggagtctaaggcctctcaactcaccaacttctcttattatcaaaaaagagaacgaggaacagcttctcatcagacttggtctgcatgtgctccccaatcttcagcacgtccag

SEQ ID NO: 23979 - DNA, 120 bp, synthetic construct
  source 1..120: mol_type = other DNA
gagagcccactatctcctgttttcagtttcacttttaccatcgttaaaagaagagcagttttggtgcatttttcaacctctcaacaaaaacacacacggaagaagattccaacagcaccc

SEQ ID NO: 23980 - DNA, 120 bp, synthetic construct
  source 1..120: mol_type = other DNA
acccactccgcgacaatgcagctgggatggtcagagacagacccaaggcccaggccagatgcctgcacaagacttgctctgtgacaatgccgctggggacagtcagagacagacccaagg

SEQ ID NO: 23981 - DNA, 120 bp, synthetic construct
  source 1..120: mol_type = other DNA
cacatccatgcccactttccatggaatctgcccttcaacagctcctctgtgacttacctggagttctgtccagccccgagataagacccaagatctgaaccctcaacttcctcccaaaaa

SEQ ID NO: 23982 - DNA, 120 bp, synthetic construct
  source 1..120: mol_type = other DNA
tggaatattccacagccaagacgcaccaaggccgtcagaaaactttggaccccaccacaccaaatcagacccacaaaccaccacctgccagaccagagcaccagactctgtagttccctg

SEQ ID NO: 23983 - DNA, 120 bp, synthetic construct
  source 1..120: mol_type = other DNA
ccactatatccgctcttacaatagctgttttcatgtccttgtccactaattttattatttgtcttatgtccgggcctgtttttattggttggtttttctcctggtcagtgtctgggcgtg

SEQ ID NO: 23984 - DNA, 120 bp, synthetic construct
  source 1..120: mol_type = other DNA
gtgcacgtgtgcactgtgtgtggtgtgtattcatggtgtgtgcacgtgtgcactgtgtgtatgcatggtaatgtgcacgcatgcactgtgtgtatgcacggtaatgtgcacgtgtgcact

SEQ ID NO: 23985 - DNA, 120 bp, synthetic construct
  source 1..120: mol_type = other DNA
agcacctggtcccatctccagtgcccagcagcatcacacgcactttggtgctttataaatgcatggtcagtgaggctgacagcaccaagctgtccctttaccataacacctggaatagtc

SEQ ID NO: 23986 - DNA, 120 bp, synthetic construct
  source 1..120: mol_type = other DNA
aaattccttggagtcctggtttgctgagaattttaaattcatgggcactgaaaatcccgtgttgcttttccctcttaaattcctcacttttaaacgagccttgtccccaagctggtacct

SEQ ID NO: 23987 - DNA, 120 bp, synthetic construct
  source 1..120: mol_type = other DNA
ctccggggcctgccgggtttcgttgctgcctttgtcaacattcatttatggcttcttagtgtcacttccatacatcctgcctgccctgagaacacttagtgtggcaaagtaagtcatagg

SEQ ID NO: 23988 - DNA, 120 bp, synthetic construct
  source 1..120: mol_type = other DNA
tatttacaaaaattgatgaccaaaagcaactgacaatcatctaatgactcacaatcctccatctgacatgtactcctccatctgacatgcactcctccatctgacgtgcactcctccatc

SEQ ID NO: 23989 - DNA, 120 bp, synthetic construct
  source 1..120: mol_type = other DNA
catctgacctgcactcctccatctgatgatgtgcactcctccatctgatgtgcactcttccatctgacattcactcctccatctgatgatgtgtactcctccatctgatgtgcactcctc

SEQ ID NO: 23990 - DNA, 120 bp, synthetic construct
  source 1..120: mol_type = other DNA
ttcatctgacatgcactcctccatctgatgatgtgtactcctccatctgacgacatgcactcctccatctgacgtgcactcctccatctgacgatgtgcactcctccatctgacatgcac

SEQ ID NO: 23991 - DNA, 120 bp, synthetic construct
  source 1..120: mol_type = other DNA
agaggagatctttcctcttcagcatggtaatttggcactgggctaagcctccagctgcctcccgctggtgacctggtaaaggggaacataaactcctttggtcggcaacattgcttacgg

SEQ ID NO: 23992 - DNA, 120 bp, synthetic construct
  source 1..120: mol_type = other DNA
gtaaagaccccatcacaccatcctgaagaccccacacaccctcgtaaagaccccatcacaccgtcctgaagaccccacacacactcgtaaagaccccatcacaccatcctgaagacccca

SEQ ID NO: 23993 - DNA, 120 bp, synthetic construct
  source 1..120: mol_type = other DNA
aaaaaaaaaaaagaaaagaaagacattttacttcttcggggtttttctggggtgtttttaaaaatacaaagtggcacaatgaatcttcgagggccacgtcgtgtggccctcggaggccct

SEQ ID NO: 23994 - DNA, 120 bp, synthetic construct
  source 1..120: mol_type = other DNA
atgaagtaggagatatattaaatgtcacaggaaacaaaataattggagtaggagtgggtgaagcaaacacaagagaagtgaagaaaaaaccctgggccgggtgttgtagctcactcctgt

SEQ ID NO: 23995 - DNA, 120 bp, synthetic construct
  source 1..120: mol_type = other DNA
tcaggcagtgactccattccccatcagcacacgcatgttgacctggagcaaacagcttaatacaggtcttctaatgatttgggtgcaaaaccacttatactggaaaaaaaaaaacaaaaa

SEQ ID NO: 23996 - DNA, 120 bp, synthetic construct
  source 1..120: mol_type = other DNA
gtagaacgtgattgatgagacactttacattttttttggttcaagtcttcaaaatccaccatgtattttacacttagagcatgtcaggtttcagactagccactgtgcggtgcccgagag

SEQ ID NO: 23997 - DNA, 120 bp, synthetic construct
  source 1..120: mol_type = other DNA
ataatgttaatttttttcaacagaaatagggacatgagatggggaaatggcagtttgctgatttccacatctttcactgggaggggttcacggtgtcacttgtgaaatccgtgtcttgag

SEQ ID NO: 23998 - DNA, 120 bp, synthetic construct
  source 1..120: mol_type = other DNA
aagttgggccttttgcaggcgggttacagcagcttctcaacactcgctagctcccaaagcaggcagttgtgactgtgaggatgtgagggccgggcagcagcctctgccttctcagtatta

SEQ ID NO: 23999 - DNA, 120 bp, synthetic construct
  source 1..120: mol_type = other DNA
agatggtgattcactcataaagtattcttctgttagaaacaaaacaagatttgtacacccatgtacacaacagcatctacaccctgtccatggcagcatccacacccaggtccatggcag

SEQ ID NO: 24000 - DNA, 120 bp, synthetic construct
  source 1..120: mol_type = other DNA
ctggcagcatcacccacacacacccatggcagcatcatccacacccctgtccacagcagcatccacacccaggtccacggcagcatcgcccacactcccgtccatggcagcatccacacc

SEQ ID NO: 24001 - DNA, 120 bp, synthetic construct
  source 1..120: mol_type = other DNA
tcagattaccatgccagctgacccctcggccactcctgagcccaaacacctgtgtctgcagaagcctctgaacgtcctctgtgggtttcccacggccacctccaccactcatccacacct

SEQ ID NO: 24002 - DNA, 120 bp, synthetic construct
  source 1..120: mol_type = other DNA
gcaccttcacggtgtccaggttcttgccctggaagttcacatctgtctcgtggttcatggggatcaccagggggctgggtcccaggaactggggacagctgtcctcctgggagagtaagg

SEQ ID NO: 24003 - DNA, 120 bp, synthetic construct
  source 1..120: mol_type = other DNA
aattgtcactatagtcaggatagtaaacatattcattgtccccagaatttcctcatgcgccattgggattctttccttccactctatcctttccctccttctctaagcaactgctgatct

SEQ ID NO: 24004 - DNA, 120 bp, synthetic construct
  source 1..120: mol_type = other DNA
ctgtcctcaccagccttgtcatctctgagcttttctctgaggagtgtgacttgggatgggggcaggggggcctgtcctcaccagccctgtcatctgaggttttaaagcacgtgcacatat

SEQ ID NO: 24005 - DNA, 120 bp, synthetic construct
  source 1..120: mol_type = other DNA
tctgtctaccagttacaaaagagggagcaaagtaccttattcacaggtgttggtatttcttagtcataacgttcttgcgtagtgcctcatccctcacatggttcctgagcggctgatggg

SEQ ID NO: 24006 - DNA, 120 bp, synthetic construct
  source 1..120: mol_type = other DNA
tgagaggcctggagagaggtgagaggcctggagagaggcgagaggcctggagagaagtgagagacctgcagagaggtgagaggcctggagagaggtgagagacctggcaggcgagtgtga

SEQ ID NO: 24007 - DNA, 120 bp, synthetic construct
  source 1..120: mol_type = other DNA
ctgcctgtcccttgagggggctttcttacaatcttgtctgggtctttccgttatttctgcttaatataattactagttcaactttcccatgagagtttttggaggaggtgtctcagggtt

SEQ ID NO: 24008 - DNA, 120 bp, synthetic construct
  source 1..120: mol_type = other DNA
ccaccagcgggacttaggccacgccacggcctttctgcctccatttccctgtctgtaaaatggagtgagagcagtgtctgtttcctcatctgtctcagtggcacttttggtagtgaggtt

SEQ ID NO: 24009 - DNA, 120 bp, synthetic construct
  source 1..120: mol_type = other DNA
tgctgggcaggggccgggcatttgctctggaggtgaacctggaggagggccgggggcgcggacactgggcaggggccgggcacttgctctccgaagtgaacctggaggcctctgccactt

SEQ ID NO: 24010 - DNA, 120 bp, synthetic construct
  source 1..120: mol_type = other DNA
atggtgcctgttgctttcagggcagcgggtggcatgagacgtgggaacatgggccacctcacacggatcgccaacgcggtggtgcagaacctggagcggggccctgtgcagacgcacatc

SEQ ID NO: 24011 - DNA, 120 bp, synthetic construct
  source 1..120: mol_type = other DNA
gtctctccgggtgaagggagtaacagcctctgacctccccacctggggcaaggaccaggagatgggagaacagtccccaccatcatgagtgagtgacaacatgacacagtgacatgagca

SEQ ID NO: 24012 - DNA, 120 bp, synthetic construct
  source 1..120: mol_type = other DNA
tggtttgtggtctgagtgtcttgcctggtacgaagagtttctaacagagtctgggatccctctgagaacaaggaatgtgaggggataagagggatgcttggtgcagagatgtgctctttt

SEQ ID NO: 24013 - DNA, 120 bp, synthetic construct
  source 1..120: mol_type = other DNA
gacgtgagcgatgaggggtgaagggtgaggcggggtgaggggcgtcgggggaggggcatggggtgtggagtgagtggagtcgggtgagtggagttgggtcgaagtcaagggtctggcttg

SEQ ID NO: 24014 - DNA, 120 bp, synthetic construct
  source 1..120: mol_type = other DNA
gtgtcccagcaccctagaggaaggagatctgggaggaaccagagaggcagagccagccagaggctggaaaggacttgcggggagttggaggaagcaggctcacagacaggcaagacacag

SEQ ID NO: 24015 - DNA, 120 bp, synthetic construct
  source 1..120: mol_type = other DNA
aatttcgtgagaggaaggtggtcagtcgagtttggggtttggagtcaagatgtggcaggggtgtgggaggaggtggaggagctgctgccctggcccagaccttcctaatatttgtcaccc

SEQ ID NO: 24016 - DNA, 120 bp, synthetic construct
  source 1..120: mol_type = other DNA
tcctgcacatgcctgcaccagcgagtgtgcatatacttgcctcttctgggggtgtatgtgtgtgtgggcacacaggtgaccctgtacggtgattgcatgtgtgcaccgagtgtggatata

SEQ ID NO: 24017 - DNA, 120 bp, synthetic construct
  source 1..120: mol_type = other DNA
ttccaggtacaccggtggtttacaggagctcaaggctgccccagaggtgtctgtctctgtgtccatgtgacttgacttctctgaaccttggttcttccctggaaggccctaagggagcac

SEQ ID NO: 24018 - DNA, 120 bp, synthetic construct
  source 1..120: mol_type = other DNA
atgagtcttggtggtccgtagcaagctctcagcatggaaagatcatgtaaacgacacataaggaaaacaacagtgatgggaaagcagaatggggctgggaatagtgccatagccatcctc

SEQ ID NO: 24019 - DNA, 120 bp, synthetic construct
  source 1..120: mol_type = other DNA
aggatacccgagcctcttggaggtctctggtgggtgtggggccaggctgggaccgtcctgttgtagctgccggagtcccctctgggagagttgtagctgccggagtcccctctgggagag

SEQ ID NO: 24020 - DNA, 120 bp, synthetic construct
  source 1..120: mol_type = other DNA
catgagtgtttactcgtgggtgtccccattttttgtttttgttttaatttgaagtgacagcgggcagcaaacgtctggagcagatgttagggttggactctcacttggttctaatgtgag

SEQ ID NO: 24021 - DNA, 120 bp, synthetic construct
  source 1..120: mol_type = other DNA
aaccttccatgtcttaccacctccttcaactcatctgctttggggctggaagggtattgcttgggtattgcttctttcccattgggttttgagtccctgcagacttttaagcatttgtta

SEQ ID NO: 24022 - DNA, 120 bp, synthetic construct
  source 1..120: mol_type = other DNA
ttaaaaaacggaaagccagcgagcactcgttcagcagccgcttaccagacgcctgctgtgtgccgagccctatgcacgtcactcgtgtgtcccctgtctcccgtcctggcctgtgcagct

SEQ ID NO: 24023 - DNA, 120 bp, synthetic construct
  source 1..120: mol_type = other DNA
ttctggtgtataaggaggggtcggggcatcgactggatgggtctgaggtttaactggagcatcacagaggatggggttcggtggggcaaggaggcagggcttttgtccgtgtctcccgtg

SEQ ID NO: 24024 - DNA, 120 bp, synthetic construct
  source 1..120: mol_type = other DNA
atctacacggccacctggccctatctgaactggatcgcctccaagattggttctaacgctttgcgtatgattcaatcggccacccctccacctcccaccactcgaccgcccccgattcga

SEQ ID NO: 24025 - DNA, 120 bp, synthetic construct
  source 1..120: mol_type = other DNA
ccaaaacaagtgtctactaccaaacacaattttgcttgtggcttgttagtgtccagttgacaccaacaagcctgttcattacttgcctgtagttaaatcttattagttcctggatttgag

SEQ ID NO: 24026 - DNA, 120 bp, synthetic construct
  source 1..120: mol_type = other DNA
tctggcatagctgaagctttgcacccaatgagcaatgccctagcccttggcaaccaccattctactctctgcttctcagtttgaatattttagattccttatgtacgtgagatcatgtag

SEQ ID NO: 24027 - DNA, 120 bp, synthetic construct
  source 1..120: mol_type = other DNA
cttgagtggattcagacttgggcaaaacagacaaatgcctcattttagtctctcagatcgtttctgaccggttagaatagacaaacaaagtcatttgtgaataaggtctgccttgctccc

SEQ ID NO: 24028 - DNA, 120 bp, synthetic construct
  source 1..120: mol_type = other DNA
cctgtgtggtggcgggagggtcagcaactgtcacatctcaagaggtggcaggaagtctatgtagattctctttcacaggcaaatttcaatgaatcaccaggttgtcttgaattcccgatg

SEQ ID NO: 24029 - DNA, 120 bp, synthetic construct
  source 1..120: mol_type = other DNA
cattgaagcagggcctgaaaaatgagcagagtttcaaataaaggggtgtgagctggggagaggctgagggaagagcatgaaggaaggtgtgcagaggagcaggtgacaatgagcagaaca

SEQ ID NO: 24030 - DNA, 120 bp, synthetic construct
  source 1..120: mol_type = other DNA
cttgctgttccaccttttctccacccatccccgcctacagagagctcacctggcaccttctcactaagaagctctggggagcaggtgtggtttgaaacatccccgggtgaccctaagccc

SEQ ID NO: 24031 - DNA, 120 bp, synthetic construct
  source 1..120: mol_type = other DNA
gcccctgcatgcccccttccaccctcctggctcctggctctctgggttctctctagcaccccttgtccctgcctggggtctcattttctccctctggactctctccttatgaaccttccc

SEQ ID NO: 24032 - DNA, 120 bp, synthetic construct
  source 1..120: mol_type = other DNA
gaagctgtttaaaaatctcccagttgcggggaggaactcactccaaacctatgtaatataacaattcatgggagaaaggtggggctggcagctcctattttacaaagttcattcatatca

SEQ ID NO: 24033 - DNA, 120 bp, synthetic construct
  source 1..120: mol_type = other DNA
aaaccatccagtggttccccatttctttcagttcaaactctcccatttcttttctctccctctgttctagccactggccatttcctccttttgttgttgaaatgctcctgccaaatatct

SEQ ID NO: 24034 - DNA, 120 bp, synthetic construct
  source 1..120: mol_type = other DNA
ttttgcctgagatactgctagtggatgaagactgccttgttttctaattgttgtgtctgtggaggccaatgttatggtaatctttgacgtcaagttaactacttggattcttattttttg

SEQ ID NO: 24035 - DNA, 120 bp, synthetic construct
  source 1..120: mol_type = other DNA
gacttgattataaaaatgaaggtagaaaccaaggtgggcctggagtacttgggagataaacgtgaccacttctctgggcaggggcaagtgtaccgtcatgctatgaaggcagaaatggac

SEQ ID NO: 24036 - DNA, 120 bp, synthetic construct
  source 1..120: mol_type = other DNA
atatgttatacacaaatagttaagtcctgcgcaccccaaatgctgctcctcacgttacccatttgcacaagacattcaccaggcatccagtgccaaaggctgtgtgcaacattatgtcta

SEQ ID NO: 24037 - DNA, 120 bp, synthetic construct
  source 1..120: mol_type = other DNA
ggacgccctctcgcccacaccgctagggaggcctcggaggggctgtccccgcgtgctaagccagccaccggggcggatttgccctcacgtgcggttccgagtgagggctggagagaccag

SEQ ID NO: 24038 - DNA, 120 bp, synthetic construct
  source 1..120: mol_type = other DNA
caatatatgttcttaataacttcctttagtcaataatcgagtttgggaatttttagcagcttgagtatatttaagcccagatctacacagtactcacagggcaggattcacacgtttaag

SEQ ID NO: 24039 - DNA, 120 bp, synthetic construct
  source 1..120: mol_type = other DNA
ctgtgcaaactaatcaaaacacacctgtgagtttggccccactagggtttctggagtttccttcctcccattcaactatcaggtgaactacaattaggtattaatccttaatgacagctt

SEQ ID NO: 24040 - DNA, 120 bp, synthetic construct
  source 1..120: mol_type = other DNA
cttgccaatgccaatattgatgttgtgggtgagtgtgcctgggagctgacttaacatgctattttcctaaggaaagtggtcaaggtcatgttcagaagtgtattaactcttgacacataa

SEQ ID NO: 24041 - DNA, 120 bp, synthetic construct
  source 1..120: mol_type = other DNA
gctattgtttaaagctactattacctccgttcttatcaagttgtttatttacttcttagggctagctaggtgcctgaattacccttgaaactccacctttcccttccatatgtggggtgg

SEQ ID NO: 24042 - DNA, 120 bp, synthetic construct
  source 1..120: mol_type = other DNA
gacaaaaacgagcaggagaaccagagttctagaagtgaatttgaaatgagagctgagggcaggcaaggaaacaagcaaggagattaggaagagttacttcctttgcttaaagcaaaacaa

SEQ ID NO: 24043 - DNA, 120 bp, synthetic construct
  source 1..120: mol_type = other DNA
aagtactgctgaattaattggtgccgaacatcgttccggtctatggtgggagtaatagttcttattttcttgccttttaatgtttggacacaggaaaaggaatatcacacaccagggcct

SEQ ID NO: 24044 - DNA, 120 bp, synthetic construct
  source 1..120: mol_type = other DNA
aaggcacaatataaccaagtccattttcaacatgaggaacttgaggctcagtgggattcaatgccgtgttcatgatcatgtagcttttcagaggcacggcttcaaaatttgttacctact

SEQ ID NO: 24045 - DNA, 120 bp, synthetic construct
  source 1..120: mol_type = other DNA
tctgacagggtagatataatcagccccatattataagcaaagaacctgaggctcgaagaagctaacttgcctgttgttacatggcaagagtatggccagaattcaagtctaggttgttta

SEQ ID NO: 24046 - DNA, 120 bp, synthetic construct
  source 1..120: mol_type = other DNA
gtaacccaatacagagggggagaaaaaaaaaaaagctaatgaggctagctaggctcagtgtttctaggaatgatgtaactagaaccatgtgacttttatcatatatttcatcaatgaaga

SEQ ID NO: 24047 - DNA, 120 bp, synthetic construct
  source 1..120: mol_type = other DNA
cagtttgccagctattttgggtattagaataacgggtttcatgtccttggggggtttaatttgcttccagagtcttgtttttgtagaatagcttaagtcttcatagtcatggtttatgat

SEQ ID NO: 24048 - DNA, 120 bp, synthetic construct
  source 1..120: mol_type = other DNA
ttatagcaaagttagctagactgtaagtcatcagacacccagggttgattctgtttctcacagtttgaggagatcctcttgatgcttctcaaactctgaaatggctgatgaaaagggtca

SEQ ID NO: 24049 - DNA, 120 bp, synthetic construct
  source 1..120: mol_type = other DNA
gccatacctaatcctacttgttggcagagaaagatgagagatcttgaaatggctcccgtgctcaaagtatttgtcagttttcatagagcccgaagtgccgatattgaagatgtatttctt

SEQ ID NO: 24050 - DNA, 120 bp, synthetic construct
  source 1..120: mol_type = other DNA
gctacaggtatccacaggttccatactctcaaatgtggatcaaaaatattcaggaaaaaaaacacacaaaaaaatacaatgaaaatgacacagattttaaaaacaatacagtataacaac

SEQ ID NO: 24051 - DNA, 120 bp, synthetic construct
  source 1..120: mol_type = other DNA
tttctgtgtatgcccttcacagcccccaatttttcaacttcaattgcaagaggcctcttggaagaaggagtagtaattaactcttgatggcctaactcaggtcattctgcattttttgga

SEQ ID NO: 24052 - DNA, 120 bp, synthetic construct
  source 1..120: mol_type = other DNA
aaacgagaatatagtgccccgtttccccccgtcccccttgccaaaaaaaaaaaaaaaaaggtgtgggagagcgatagttgggaaggcaggccagatagaaacaggcaaaaaaaggcagtg

SEQ ID NO: 24053 - DNA, 120 bp, synthetic construct
  source 1..120: mol_type = other DNA
ggatccaggagaaggggacctcgcttgccgtgtccaccgccgcggccccagcgccaagaacagagcctggccgtgagtgaacgactggccggggtacaaatggttctgaagcacttgaag

SEQ ID NO: 24054 - DNA, 120 bp, synthetic construct
  source 1..120: mol_type = other DNA
aatcctcagaacagttcaatattgttgaatcttactattactccattttatagacaaggaaacagaagcaaaggatttcaccccctggccccaagatagcagagctgggatgtggaccta

SEQ ID NO: 24055 - DNA, 120 bp, synthetic construct
  source 1..120: mol_type = other DNA
tactcaatggggaaaaatggaaacctttgcctgttagattcagaacaagccaaggatgcatactcttgccacttctattccatgtaataccggacatactagacagagcaattaggcaag

SEQ ID NO: 24056 - DNA, 120 bp, synthetic construct
  source 1..120: mol_type = other DNA
gggaaatttcatttgcctttaatgaggtactgagaggtactgaggatgtagagttctcctcagcaaagggtttaacccgaagtccatggttactgtttgttactcacagatctaacttag

SEQ ID NO: 24057 - DNA, 120 bp, synthetic construct
  source 1..120: mol_type = other DNA
agccttaaggatcttctccttgtcccattagtctgaaattttgcaatgacatgtatgggtctgtattttcttatgctggggaattactgggttctttcaacctggggagtcatctccagt

SEQ ID NO: 24058 - DNA, 120 bp, synthetic construct
  source 1..120: mol_type = other DNA
tagctcattttcctccgatatgagccaagtgcttaatgtcttgacagtctgtaagacaagctggttccatcaccttcctcctgagcaggtttttaaatgacaaatcaaggaactacttac

SEQ ID NO: 24059 - DNA, 120 bp, synthetic construct
  source 1..120: mol_type = other DNA
tttttcttttaaaatggctacatttgcagtgccagggatgagagataggggccagagatcatctaaatgcgtggcctcaggaaacacttggttacaacctctccactttaaaaacaaaca

SEQ ID NO: 24060 - DNA, 120 bp, synthetic construct
  source 1..120: mol_type = other DNA
gggtagagtttattttatttcaaagagcttgcactgagtgccttacagaattcagtagtaccagggatagcataaaatctatagaagagaaaataggataaagaaatgttatacataaaa

SEQ ID NO: 24061 - DNA, 120 bp, synthetic construct
  source 1..120: mol_type = other DNA
tacaggcatcaagaaatgacctttttggcagtgtctactcccttttggattttcactcccttccagagtcccattatctcattaaatcatttatgtgcaggaggagagatgctgtagtga

SEQ ID NO: 24062 - DNA, 120 bp, synthetic construct
  source 1..120: mol_type = other DNA
tgtgcttgagcttgtttcaggcataatgttctttaactgttatgattgaatcaatgattgaatgaatgcacaagaaatgaaggaaaacattaggcccaaagaagttcgcaggtttaattg

SEQ ID NO: 24063 - DNA, 120 bp, synthetic construct
  source 1..120: mol_type = other DNA
ccccacagaagatcgtaggcactgactcacctcttaaatcttcgaagtagatttgaaagtgcaatagaaaaatggcacagaaacaaagaacctaacttttataacatgttgacttcatga

SEQ ID NO: 24064 - DNA, 120 bp, synthetic construct
  source 1..120: mol_type = other DNA
gacccagacttcttaattgcccaaactggagcaggttaagggagctatctttccaatccatggagaaacattatggcagaaaagagcacaggaacctcaataaactatcataaagttgct

SEQ ID NO: 24065 - DNA, 120 bp, synthetic construct
  source 1..120: mol_type = other DNA
ttgcaacagttcttccaaaggtaaggaagtgaacaggatgatttcctagccatgtatctatgacactgtggccttaactctgacaatagcaatcccaatcattgcccattttcaagagct

SEQ ID NO: 24066 - DNA, 120 bp, synthetic construct
  source 1..120: mol_type = other DNA
aagttcctacagtgtcacttatataccatttgcaatatctcactatattaaaagaaagaagagattgagaaaactatgtgagagctggctgtatgaattctgaatcacagcaactaggat

SEQ ID NO: 24067 - DNA, 120 bp, synthetic construct
  source 1..120: mol_type = other DNA
acagagggctgaactgttcttggtatagtagtcccttaatctcctagcctataccatcagggactacatctgttcttgattcccatcgtatctctaacatcaaatttagcgcttagcaca

SEQ ID NO: 24068 - DNA, 120 bp, synthetic construct
  source 1..120: mol_type = other DNA
cctggaaaatactgacgatcaagctttagtaaatgggtgaaccatttcatgtattactcggaagaccatgtggagggtgatttcaagcttggctaactcacagctcagttgcattttcac

SEQ ID NO: 24069 - DNA, 120 bp, synthetic construct
  source 1..120: mol_type = other DNA
gcaaaagtagacttgagcaaacgaagatacagataggaagattcaacttcagcaaggcttctgttctaggtgagtttatttttaaatacaacagaaacccaataaatggaccaccaagtt

SEQ ID NO: 24070 - DNA, 120 bp, synthetic construct
  source 1..120: mol_type = other DNA
tctcaacatagttttctgggttttgttgttaatgctttttcaaggtaataagctccaaaaagcatcaaaaagcccctcttctatcttgctcctagagagatcacggaggctaggagggtg

SEQ ID NO: 24071 - DNA, 120 bp, synthetic construct
  source 1..120: mol_type = other DNA
attcaaatgtgcaaacaaattaggaattactgcttcaattcaaagttgagcctcagaaaccttagggaagtctcatccatctaggatcccctggggctttgcagtgaaatacagttctgg

SEQ ID NO: 24072 - DNA, 120 bp, synthetic construct
  source 1..120: mol_type = other DNA
tgcaataaaagcaccagccagcttggtctatggagtaagctttggaaatatgcaaatggaatttcaccaagaaaaatatccctgaagtgataaaattttcttttagatagagtgtgtctg

SEQ ID NO: 24073 - DNA, 120 bp, synthetic construct
  source 1..120: mol_type = other DNA
caacagaggaagatcagcaaacataagagccagtattaacaagaggaaagagaaggctgggatgaatccgatcatcaaaacctgtcaaagttcatcagaaagccattgtcgatggctttg

SEQ ID NO: 24074 - DNA, 120 bp, synthetic construct
  source 1..120: mol_type = other DNA
tttaacagttactttccagcatttaagcaaatacagcaatatatagtggactaaaacaggcaggagtcagaaagagaaagccaatgttcagtgaacgtcgatgggactgagtgctgtgga

SEQ ID NO: 24075 - DNA, 120 bp, synthetic construct
  source 1..120: mol_type = other DNA
acttacaagcagatctcatcctctttagctacacctgctctgctaggaataaaccagacatggtcatgtcttgcttctcccttcctccttctactaacagaagatgagatgttggtggaa

SEQ ID NO: 24076 - DNA, 120 bp, synthetic construct
  source 1..120: mol_type = other DNA
agagttcacattagcagcacagccagcaatcctcatctggtttctctgatctcctaccccacacttcataatgaatgggaaataagatgtttatgaaggttttatatcctagactggcct

SEQ ID NO: 24077 - DNA, 120 bp, synthetic construct
  source 1..120: mol_type = other DNA
cctgcatcacctcaagtgtgtaggtaagtggggccctagctaggtctgggaagatggtcaggggcctgggcttggtcctttattctctcaacacaagcctgggctagactagcctagtct

SEQ ID NO: 24078 - DNA, 120 bp, synthetic construct
  source 1..120: mol_type = other DNA
atctcaaaactcattcaagtggaaatgatagctgatggttgccagatggacacattggctcttagatgagataacagggcatgctgaataaggtgtaacgtgtttcgctgatgtgtcata

SEQ ID NO: 24079 - DNA, 120 bp, synthetic construct
  source 1..120: mol_type = other DNA
gtgagccactgtgcctggcctgctctgtattcttaaggggtatcaatggttaacagttgtggcactttatttatctgaaaaatatttctgagttttgtgaaaagtgtagatactcccagg

SEQ ID NO: 24080 - DNA, 120 bp, synthetic construct
  source 1..120: mol_type = other DNA
gttctttctgtgtttatttctgccaattatacatgttttgggctgtaattttctagatgcagaaaccacatgtaatttttcattgcattttccccaataaagcattatacccagcttagt

SEQ ID NO: 24081 - DNA, 120 bp, synthetic construct
  source 1..120: mol_type = other DNA
gcttttagctccttgagtgccatctttttgaggaatttcaactgatcttgtacaacctcaacctaaagggtaaaatttaacccatatgggaaaaagaaagaggaaaactacgccaaggag

SEQ ID NO: 24082 - DNA, 120 bp, synthetic construct
  source 1..120: mol_type = other DNA
atgggaatgactgacaagagaaagtatgggaagtgcgttctaggcagagaagagtttgagcagaagcaaactggtgcccaagtcaatggtgtgactgaggaatgagaagcaaacaagcat

SEQ ID NO: 24083 - DNA, 120 bp, synthetic construct
  source 1..120: mol_type = other DNA
tcttgaaatttgctagaaaaaaaaaaacaagcaaatgatagatttcctagtgtgtagtagtggaaatggagtacatagccatagtactagcatttttttttcttaccacaaacattaagt

SEQ ID NO: 24084 - DNA, 120 bp, synthetic construct
  source 1..120: mol_type = other DNA
ttagaaatgagggaactgagacttagaaaggttaagagtaatttatctagggctgtacagcaagtacactctgcactgccctttttgtttgtttgcttcctgaaggaatgggttgggcat

SEQ ID NO: 24085 - DNA, 120 bp, synthetic construct
  source 1..120: mol_type = other DNA
cttgcgtattcctgagctgcaacatcagattctggtttttctccgcagtgactttccatttcctgtgaaagcactgtacggactggaagaatacgacactcaggatgggattgccataaa

SEQ ID NO: 24086 - DNA, 120 bp, synthetic construct
  source 1..120: mol_type = other DNA
tcacgaagaaagtttactgagaggtagtttcaaccaggttaccaaaggaccttagaaataatcagcatttaattctaaccactctcacccaccagtcagggttgatgaaccacacttctg

SEQ ID NO: 24087 - DNA, 120 bp, synthetic construct
  source 1..120: mol_type = other DNA
atgtcccttgagtctgctgtgtcacttgagtaagttgctgctgtgagacagtttatgactcctatatagacatcccaggggtgagccaacaggagagagcgtggcccatgtggatgccct

SEQ ID NO: 24088 - DNA, 120 bp, synthetic construct
  source 1..120: mol_type = other DNA
aaattggggtttgtgcgggaaggtgtttggactagatcagtcactcaaacctcaagtcatgccctgttagtgacgtgaaatttgtttagtgggtggtgaccaacattttaaaaaagaaac

SEQ ID NO: 24089 - DNA, 120 bp, synthetic construct
  source 1..120: mol_type = other DNA
caggtgtgttgtgcgctgtatgtgtatggtacgtactgtgtatagtgtatgtgttgtatgtgctgtgtgtgtgttgtatgtgcatgatgggtggtgtatgtgtggtgtgtgtgtatgtgt

SEQ ID NO: 24090 - DNA, 120 bp, synthetic construct
  source 1..120: mol_type = other DNA
catccgttcgtccatccttccatctgtctgcttgaccattagctgtctgtccatctgtcaatccatcaatctctccatccatctgttcatccacctacccaataaaactaatgagctgca

SEQ ID NO: 24091 - DNA, 120 bp, synthetic construct
  source 1..120: mol_type = other DNA
ctagcagaaatggacatcccagttgcaggtcaagtcgtgcttggctggaggccgaaggaaggagaaatgccctagaatcaggaaggcatgacctgaccggaattcaccttctatctgtga

SEQ ID NO: 24092 - DNA, 120 bp, synthetic construct
  source 1..120: mol_type = other DNA
tgagttatacttacttacctatttcatctctcagattcactcatagatacagtcaccatgcaaggaaccaggggaggagccattgaggagctggggagagccctgggttataaggtgatg

SEQ ID NO: 24093 - DNA, 120 bp, synthetic construct
  source 1..120: mol_type = other DNA
ttttgtaaaatagacatgaccctcctaggcaaagattattcaaagaattaagaattccacaggcaccaccacatctgcacatcttagtggagctgaagctgctgctcacttgctctgaat

SEQ ID NO: 24094 - DNA, 120 bp, synthetic construct
  source 1..120: mol_type = other DNA
tacataacaacatgagtgagtgctaaaatatgtgaattattaccccatgaagcgttgaaaaagaaagacaagaaggggagaaacgctcttcccaagttccccggtccatgcacataccaa

SEQ ID NO: 24095 - DNA, 120 bp, synthetic construct
  source 1..120: mol_type = other DNA
ggcccgtgacatctgctgtcccctggcctctccaggcccgtgacatctgctgtcccctgcattctccaggcccgtgacatctgctgtcccctggcttctccaggcctgtgatatctgtag

SEQ ID NO: 24096 - DNA, 120 bp, synthetic construct
  source 1..120: mol_type = other DNA
ggctttaaaggacacttaaatatatgtttagaggttagagctagaagtacagtcctgagattcattggcatacagacagaacttgttgtagaaagtgaatgatttggccgggtgtggtgg

SEQ ID NO: 24097 - DNA, 120 bp, synthetic construct
  source 1..120: mol_type = other DNA
ctcggcctcccaaagtgctgggattacaggcgtgatcctgggtttacttttgatccctcttgaagcttcctaaaatggtagtaaacatatatacacacatacacacatatgtttatatat

SEQ ID NO: 24098 - DNA, 120 bp, synthetic construct
  source 1..120: mol_type = other DNA
cctgggtgacagggcaagactccgtctcaagaaagaaagacagacagacagacagaaagaaagaaaagaagagagagagagaaagacagacagaaagaaaagaaatagagaaagaaagaa

SEQ ID NO: 24099 - DNA, 120 bp, synthetic construct
  source 1..120: mol_type = other DNA
cacaagaaggatgctttgcttccagggaagggagtaaaaggtgtgaacaagacagggtagggagtaacattaaaagcacactttttagtacagttttaactttggggagcatgttcatat

SEQ ID NO: 24100 - DNA, 120 bp, synthetic construct
  source 1..120: mol_type = other DNA
gggggagtcacctggctggtgtaagggagtctgagagaggaggttactcctgtttctattttcctaaaactttgcataataatgtcaattgtgatttgcacataaaatttggcgattcta

SEQ ID NO: 24101 - DNA, 120 bp, synthetic construct
  source 1..120: mol_type = other DNA
aaaaaacaagggtgaccctggggtcaaataaatttggaaaccgtgagattgaacaacttttacaggagtttaactacaggcctttctgtcttctaatgcatctcagtctctgagatggaa

SEQ ID NO: 24102 - DNA, 120 bp, synthetic construct
  source 1..120: mol_type = other DNA
ccccagatatccagtgactgcagacttcttctgcattcgaaaccccaactgcctttctcatttttattcctagtattcctctttatgagccctgaaaatttcagcccagtaagttaaact

SEQ ID NO: 24103 - DNA, 120 bp, synthetic construct
  source 1..120: mol_type = other DNA
agatacctttagaaagctggtattcaaactagtccaccatgtaccagatgagtgaccttagacagggaaccattctgggcctcagttttctcatctgtaaaatggggcaatgatacagca

SEQ ID NO: 24104 - DNA, 120 bp, synthetic construct
  source 1..120: mol_type = other DNA
ctgtgcggctaagctcctttctgatctctgcattagtcaattgatgatgcttttgcttagaagcaccagggatagataaaaaaattgcttaagatggcaagagcctgtatggtttgtgac

SEQ ID NO: 24105 - DNA, 120 bp, synthetic construct
  source 1..120: mol_type = other DNA
catgcctctgagagcagaatgattgtgctattaatatttcatggcccagtggaaaaaagtttagagggaggaccttaggcatcaatgtcaggaaaggggctttggagaatcaacatttaa

SEQ ID NO: 24106 - DNA, 120 bp, synthetic construct
  source 1..120: mol_type = other DNA
taaccaccaccacttatttcagaacatcttaatcaccccaaaaaccatatacatgttagcagtatttcccattcctcccttaagcagccccaggcaaccactaatttaccttctgtttcc

SEQ ID NO: 24107 - DNA, 120 bp, synthetic construct
  source 1..120: mol_type = other DNA
caaaggaagaaaacatttcaagacagaatcatctacacatgatgtcactttgttctcaccttccacttactcttcagctcactacagtctggcttccgtaccattcccctcaattacact

SEQ ID NO: 24108 - DNA, 120 bp, synthetic construct
  source 1..120: mol_type = other DNA
gcctcttattagctatgtgatctcaaaactcaatttctttatctgtaaaatggtgataataaatgacttcgcagggttgagggcctcaagtcagtggcgagtactgcagtagaggcagaa

SEQ ID NO: 24109 - DNA, 120 bp, synthetic construct
  source 1..120: mol_type = other DNA
actgaaccatctactattaatggactgatgaatcttaccggaaaataaacataaaatatactctgtgttgcctgtggtttaattgccatcaaaattaagtttattatgtactgatttcac

SEQ ID NO: 24110 - DNA, 120 bp, synthetic construct
  source 1..120: mol_type = other DNA
ttaggcaccttttttccatgaggtgggcacttgtgcttagtaatttcacaggttatgtcagcaagcctcataagaacaatgcaaggaaggtaatatcccctttattcagatgcatgaacg

SEQ ID NO: 24111 - DNA, 120 bp, synthetic construct
  source 1..120: mol_type = other DNA
aatagcaaatattttttgagcagtttctgagtggcaggagtgttaacacttcacaggtattaactcattgagctatgcaacagaggtacggtcacaccctacatgctgtggtacatgggt

SEQ ID NO: 24112 - DNA, 120 bp, synthetic construct
  source 1..120: mol_type = other DNA
ctatctcattgaatcctcccaatggctttaggaggtaggtgctattaatatctccgttttatggatgatgaaattgaggcctggaaagatgaagtagctttccccagcttacagacagaa

SEQ ID NO: 24113 - DNA, 120 bp, synthetic construct
  source 1..120: mol_type = other DNA
atttccagtattagggtctgcagtgaaactgccctttgcattattaaatggttaccttttaaatcgatttcttccaaaacggaaattgaacccagccatttttatcttccttaacaaata

SEQ ID NO: 24114 - DNA, 120 bp, synthetic construct
  source 1..120: mol_type = other DNA
gaactgggaattcagatttaagcactctgtcaaagaagtgttattgtttctcagaccgtatatgaatccattcatcacactctgctcggccctgcttgcagcgcatccctccagtattta

SEQ ID NO: 24115 - DNA, 120 bp, synthetic construct
  source 1..120: mol_type = other DNA
aaggaatagctgagaatgggagagataaggtggcagatgataattggtaaccaaagcagtgagagcttgaatcatgtctaacactggaattaattttgcttttcatatattaaaggaatg

SEQ ID NO: 24116 - DNA, 120 bp, synthetic construct
  source 1..120: mol_type = other DNA
aaaaaaaaagaaagttaataatggcaggaaccttgagttgagcaactgctgtatatgccagacactttgctaggcacctgactctccaaccccagaaggtggggttttacaatttaagga

SEQ ID NO: 24117 - DNA, 120 bp, synthetic construct
  source 1..120: mol_type = other DNA
atgaacacatgatttgaacctgttgtggtaaagatcttgtacaggatgcaaactaaaaacctaatccctgccatcaaatttattagaagagacctatatatgaacaacttaaaggcactg

SEQ ID NO: 24118 - DNA, 120 bp, synthetic construct
  source 1..120: mol_type = other DNA
attcaggaagcgtatcataccaaagatgcaaaatcttttggcaaagatgcaaaagtctgataatacccaccatctaacacaacacaggaaaataggcacttctataaactgctggtgaga

SEQ ID NO: 24119 - DNA, 120 bp, synthetic construct
  source 1..120: mol_type = other DNA
acatacagacacacgtatacacacacgtgtatacatgtagacacacgtatacacacacgtatgcatgtagacacacgtatacatacacacacgtatacatacacacacgtatacatacac

SEQ ID NO: 24120 - DNA, 120 bp, synthetic construct
  source 1..120: mol_type = other DNA
atggcctgcatatggatagtttttaccttgtaactctacttcagctcataatcaggaagagagggggcactaaattaaatgcacacaagataacctgggaaaatgctgagtgctctctca

SEQ ID NO: 24121 - DNA, 120 bp, synthetic construct
  source 1..120: mol_type = other DNA
tgtaatgcagtcctccctgctcgatcagatacgtttacattactcagaagaggtaccaaagcttcagcacactttacagctttattagcagcagctatatgtaaaggggtttgccaattt

SEQ ID NO: 24122 - DNA, 120 bp, synthetic construct
  source 1..120: mol_type = other DNA
gttaaggcaatttaagagtctactgtccaagggatttatctcccagaagcgcatggaaaacatcacaacactacctctataaattggactcatggcaggattccaaggaattcagtatgc

SEQ ID NO: 24123 - DNA, 120 bp, synthetic construct
  source 1..120: mol_type = other DNA
tttttttttttagcaattcttaccattgatttgaaggaaagcacaggaaaaacaagggcttaacatatttgcaggtactgctgccatctcagctcactgcagcctccctgcctgattctc

SEQ ID NO: 24124 - DNA, 120 bp, synthetic construct
  source 1..120: mol_type = other DNA
ggcctgggctctggagctgagctagagtttgaatcctaactgcctagcttgcaggttgtgtgatatttgtcacctgttgtattactttgcaaaggctcaatttataaaagcagtataatt

SEQ ID NO: 24125 - DNA, 120 bp, synthetic construct
  source 1..120: mol_type = other DNA
tgatgtgacttacgtattataggccacatgtattttgtggttaaaagcctcaattaaatctatggcatgaactgtcagtttcttttaattctcatggctatgttcccttcatcccccagg

SEQ ID NO: 24126 - DNA, 120 bp, synthetic construct
  source 1..120: mol_type = other DNA
tgagtatagagaagaaaagaagtgtggggttggggctgttccaatatttggagtaagaagaggatttagcagaccatggcaagagacagaatggccacttaggatcttgtgtttcttttt

SEQ ID NO: 24127 - DNA, 120 bp, synthetic construct
  source 1..120: mol_type = other DNA
cttattccaaaagcaatctgtatatgtctcaggaaagctagcaaacaaaagcataagcaaaaggaagaaaaaaagatacccctaatctcattgcccagaaattattttggattatgcttt

SEQ ID NO: 24128 - DNA, 120 bp, synthetic construct
  source 1..120: mol_type = other DNA
actatttgttaattctaattttgttaagtacatctattagcaaaatgcagcaagtgtacatacttagggcacatctcccacctcaggagatattaacatatattctcttggaaaaactgg

SEQ ID NO: 24129 - DNA, 120 bp, synthetic construct
  source 1..120: mol_type = other DNA
ctaaaatgatgaaaaaattcccagtatcactgcctgtttggtgtggctatcagaggtttattttccccctttcttgtttgctatttctttaagtcaatctggcccccatggcctctgact

SEQ ID NO: 24130 - DNA, 120 bp, synthetic construct
  source 1..120: mol_type = other DNA
tcattttccagcaatagtaatagactgcattgagctatgccaacttcacacattatcctaatatgaccagtactatgtgctctttattaggggagggtgcaggctccagatgttaagcac

SEQ ID NO: 24131 - DNA, 120 bp, synthetic construct
  source 1..120: mol_type = other DNA
ggttttaggtctaacgtttcagtctttaatccatcttttaaaagtctcttcacagtacatgagtagtagtgacaccaataatgtcagagcagggaactcccaggttctgcccatccacaa

SEQ ID NO: 24132 - DNA, 120 bp, synthetic construct
  source 1..120: mol_type = other DNA
ctttgccaagtgattactgctgtgcattaactcaataattcttaatcatcataacttgacatttatttgccagaaaactctctgcccatttggttttatgcaaattctgagatgggtcat

SEQ ID NO: 24133 - DNA, 120 bp, synthetic construct
  source 1..120: mol_type = other DNA
ttttcatctctaagatgactccagctagttagcccagagtagggtttatagtacttcagacaccatttttatactttagccagatatctagatatcttcagcagaagaaacccatctttt

SEQ ID NO: 24134 - DNA, 120 bp, synthetic construct
  source 1..120: mol_type = other DNA
cccccccaaaaaatcagttattcagcccaaaacgtcaacagtgctagaaggaccagtatgagcgaaaaagaagagatagcatttaatcagtataaaaggatatgaataaaagaattgttg

SEQ ID NO: 24135 - DNA, 120 bp, synthetic construct
  source 1..120: mol_type = other DNA
agtctcttggatttacatatatagttttaattgtccaataatattgtaaaagttaatatcctttcaatgtatctgatttaaaattaccacagagtattgtgggattaaaggagtactgtg

SEQ ID NO: 24136 - DNA, 120 bp, synthetic construct
  source 1..120: mol_type = other DNA
acagtgagcttcaagaaactctagaacttatgcttctgtgctttgctgctttgtttattatagggaaagaaaagaagataggaaggaaggaaagaagttaaatattctttcatgaatgga

SEQ ID NO: 24137 - DNA, 120 bp, synthetic construct
  source 1..120: mol_type = other DNA
tacagcaatcactaggtccttgctgtgtgtgttgttttcagggcctctttatctccagttctcattggactgtactcagttgttccatttcctactataaaactatcgctgctgaatttg

SEQ ID NO: 24138 - DNA, 120 bp, synthetic construct
  source 1..120: mol_type = other DNA
ttacaatccaccattgtggattttatgtttattctgccagtgttttttcaactcaatatagtatgcgtattctacccatctgtttttaacgcaaaaagaagtttaaaacacagtgtgttt

SEQ ID NO: 24139 - DNA, 120 bp, synthetic construct
  source 1..120: mol_type = other DNA
tatttaatgattaatgatttaatggctgaatggatgggggttagaaaaaatgttcagagagaggaagtggagcaagacggcagaatagaaagctccactgatcatgtcccagtcccgtgt

SEQ ID NO: 24140 - DNA, 120 bp, synthetic construct
  source 1..120: mol_type = other DNA
ataatgtcagtcttagagccttagacgtttgcagatctctcctcagatggaaatgctgtttagactctaaatcagcactgtccagtagatatataatatgagccaaaaatgcaagccaga

SEQ ID NO: 24141 - DNA, 120 bp, synthetic construct
  source 1..120: mol_type = other DNA
catcactgagaagaggaaagagaagaccctcaaattgaaggtaatgttcagtcccttgacatctgaacattgatgacccaaccagagaattctttaaactctgtgactcttcatgacctg

SEQ ID NO: 24142 - DNA, 120 bp, synthetic construct
  source 1..120: mol_type = other DNA
aaacattagagagacacttatgttattatgaagggcaagctctactaaatactggagccgacttgagaagacaacttgaattgtcctaaactgccagctggtggtggcaaatgcccatta

SEQ ID NO: 24143 - DNA, 120 bp, synthetic construct
  source 1..120: mol_type = other DNA
tcacatcagtcatatcacagcctccatcctgattacaaagtgcatactgtccatttctctgaataggatgccatgttatcaaaagatgataaatgtgcttgcaaacaggtagggctaaaa

SEQ ID NO: 24144 - DNA, 120 bp, synthetic construct
  source 1..120: mol_type = other DNA
ctaggtttaattcccacctcacgtgctcttcttacaatacaatgtgactgtcactctatcatcatcagatggaatctatcccctacccctttatgcctgtctcaaccaatagagtatgat

SEQ ID NO: 24145 - DNA, 120 bp, synthetic construct
  source 1..120: mol_type = other DNA
ccaagtttgagttggtttgtctgcatacacagataactggaacaatcataaatagcttaatatttggaggtatctaaattagagatttacaaactatggccaaagtaggcttgctgcctg

SEQ ID NO: 24146 - DNA, 120 bp, synthetic construct
  source 1..120: mol_type = other DNA
ggggttcttgggtcagataaggtgtagaaagtcgaggtactacagcctagacattaacagcacacaacagaatattacaatctctgagatgctgtacaagaaaaatatgttttaaatgca

SEQ ID NO: 24147 - DNA, 120 bp, synthetic construct
  source 1..120: mol_type = other DNA
cttcagccttggatcatgctaacatcgccattttttgaacacaggtcccacggagaggcataaagctcagttgtgcatgtacatcttctactttcataaatattcatggctccttttata

SEQ ID NO: 24148 - DNA, 120 bp, synthetic construct
  source 1..120: mol_type = other DNA
caaatgtcacaggaataaaagctttcaccattttaccagaatctgtaggatttagatgatggtcattttattctgttgacagtatggagcactttgcagatggatatcaggttaattgtt

SEQ ID NO: 24149 - DNA, 120 bp, synthetic construct
  source 1..120: mol_type = other DNA
ttcttctgaaccacagctcttctgtgtgggtcttcatctttcaggagactccaaacctgaactgtaatggtttcatgttatcatctaaatggaatggatgtaatgacacccagagcacat

SEQ ID NO: 24150 - DNA, 120 bp, synthetic construct
  source 1..120: mol_type = other DNA
tactgcagtgtggaaaagctgttggagaagaatggggaatgaaaaggaaagagacaagattctttggacaaggcagaaggaagaagttgaaggattcaagttaaaggataaccttgagcc

SEQ ID NO: 24151 - DNA, 120 bp, synthetic construct
  source 1..120: mol_type = other DNA
aaaccttctgtagtactgagccagatgaagcttcagttttggcattttcctaaccttacaggaaagggcttttatggaaccagatcaagacatggaacagacaccctgtgttgattgtct

SEQ ID NO: 24152 - DNA, 120 bp, synthetic construct
  source 1..120: mol_type = other DNA
ccgtaaggtagcagcctcttagagatttgttcaaggagatctaaagaaaatgagacagagagaaatgaatgttcctagtttgcagctgtccaagagaagagtcagtacatgatcatggct

SEQ ID NO: 24153 - DNA, 120 bp, synthetic construct
  source 1..120: mol_type = other DNA
aaattcaagctacaatgaaattcacctcagccctgccagaatagccattacttacaagttaaaaacagtagatattggtgtggatgtggtgtgaagggaatgcttgtacactgctggtgg

SEQ ID NO: 24154 - DNA, 120 bp, synthetic construct
  source 1..120: mol_type = other DNA
aagtacatactggacctaatttgcaagtaaaaatatacctcatgcacatagtgggtgtgctctttagaggccaagaggctgttcagtatctgtcttaagatgtacctcccactctgtatc

SEQ ID NO: 24155 - DNA, 120 bp, synthetic construct
  source 1..120: mol_type = other DNA
gaagtcacacttatatcactttagacttaaatatcaccagcccatattcagagggaggggaattagactctgcctctttgagcagtttcaaacaatctgtggacggtgttgtaaaactgc

SEQ ID NO: 24156 - DNA, 120 bp, synthetic construct
  source 1..120: mol_type = other DNA
gaaaagagaaaaaaaagtcaactttttactttgctgcaacctcagccacagagcagaaagcacaacaaataacctgtctgccaattctcctccatctgattccaaacttactgccttctt

SEQ ID NO: 24157 - DNA, 120 bp, synthetic construct
  source 1..120: mol_type = other DNA
tgctatggaagcgttataggttataggacctcacagtgttggtgtgaaagtacttcacaatgttgatgtgaagaatacatgagccaacacatggacaaggtctagccttgtgcagaaata

SEQ ID NO: 24158 - DNA, 120 bp, synthetic construct
  source 1..120: mol_type = other DNA
cagcagtggcagaggtggaatgggccttaaaacaaacaaacaaagccccctgcaaatctaaaagcatcaaccacatctaatttattgtcacattgagtgaaacatggagcacttttaagc

SEQ ID NO: 24159 - DNA, 120 bp, synthetic construct
  source 1..120: mol_type = other DNA
gttaatagggtccagcgcacaaaaatggttacaaacacttggctgccttagctcaaagataattatttattatctttccttcataagctatagaaccgggggaggagccaagatggccaa

SEQ ID NO: 24160 - DNA, 120 bp, synthetic construct
  source 1..120: mol_type = other DNA
gttagctttcgctacataacaagtatttacaaattcagtggcatttattattgctcacaaatccgtgagtagcttggtggttcttctagtcttggctccttagcctatggtcagctgcag

SEQ ID NO: 24161 - DNA, 120 bp, synthetic construct
  source 1..120: mol_type = other DNA
cagttaagcattttcatatttagtgtttttcagttcaataatacggaaatgggggaattggggctgagacttccgcagggctctgcggttctaaatgtacaaaaagtattccctgccatc

SEQ ID NO: 24162 - DNA, 120 bp, synthetic construct
  source 1..120: mol_type = other DNA
aagataaattttcaatgtctcttttataagggcactaatcccattggtgagggcagagccctcatgacctaatcacctaccacaggccacattttctaataccatcacgttgcagattag

SEQ ID NO: 24163 - DNA, 120 bp, synthetic construct
  source 1..120: mol_type = other DNA
ctgctgtaactgtactggcaggatagtagatggggaagaagaagaaagaaaactaaattctcacccattacaatagaaaatcaaataccataagaaaaagaataaaaagtggagacgtgg

SEQ ID NO: 24164 - DNA, 120 bp, synthetic construct
  source 1..120: mol_type = other DNA
ttgagcacctatcatgtgccagacgctgttttaggcactgggatgaaataggcaaaatggcttttttaaagtacaaggaggtaaaacgtattagagaagccagtcacattgacaaagagc

SEQ ID NO: 24165 - DNA, 120 bp, synthetic construct
  source 1..120: mol_type = other DNA
caaatacttgtggacatatactagtgccacaataaaaggaattatgatagaatgaaaagcctatggtgagatttcccgtgttgagtggtgaggcagagcagatcaagggaaggtcaagtg

SEQ ID NO: 24166 - DNA, 120 bp, synthetic construct
  source 1..120: mol_type = other DNA
tccagggtaacttgagcaggcgattcgagagttgtttcctgagactgggtgggaaacaatcaatactttatatagtgatggacaagggctatctggggatgctaatgttcctagaataat

SEQ ID NO: 24167 - DNA, 120 bp, synthetic construct
  source 1..120: mol_type = other DNA
tctttctgagcagtgaattaaactctgagatttgtttacaatattgagtagttctctatagttttgtttcctgttctcatttttgaccatcaggaccacgagtacaaaacaatatatatt

SEQ ID NO: 24168 - DNA, 120 bp, synthetic construct
  source 1..120: mol_type = other DNA
cagtgcttcctaaaaacttgttagaaatgcaaatttcctgcccccaatctaccgaattaacagtctggtggtgagggtgttcagcagtctgtaatctgtgtactaacaagcactttagat

SEQ ID NO: 24169 - DNA, 120 bp, synthetic construct
  source 1..120: mol_type = other DNA
tggcctaatttcaatattgttgtatctcaggaaatggtgaggcctgaggacaaagaaagagatggggaacatctggccaggaaaagagtcagaacatacgtttatcaattcagtttgctg

SEQ ID NO: 24170 - DNA, 120 bp, synthetic construct
  source 1..120: mol_type = other DNA
aaggcatgagttaggatgttttactaagaaagtactgatgcctgataaaactatgatgtgctgtacagagcttcaaaattggtatctcttttggcttaggattgacttggcgatgcgggc

SEQ ID NO: 24171 - DNA, 120 bp, synthetic construct
  source 1..120: mol_type = other DNA
acatgagagcactttccagctgccagacattcctgggagctccacatgaactatcttcttcagctcacaacagccctatttggcaatgattatcgttttaataagaatgaggaaacaaac

SEQ ID NO: 24172 - DNA, 120 bp, synthetic construct
  source 1..120: mol_type = other DNA
gtaaacaattctcctacccagcctcaagtaaatatcagagttaagctggtttcatacaccatgttgacagtaaacatcttagaggacactttcaatccacccacactgcagctcagtcca

SEQ ID NO: 24173 - DNA, 120 bp, synthetic construct
  source 1..120: mol_type = other DNA
tgtgtgtgcaaatgaaaaatcgtggttcttccagagacgaagtctctagcctgcttctaaacacactgtcctgaatctatgagtatgcacgcaaatgccagatttctgaaaaattgtcac

SEQ ID NO: 24174 - DNA, 120 bp, synthetic construct
  source 1..120: mol_type = other DNA
aaagtacaacaataagcaaaacaaatattcctgtcctcacagaaatggcatcctggtgagagaaagagttcctccccacccaccaccccctaaaaagacaaataggtgaaatatgaagca

SEQ ID NO: 24175 - DNA, 120 bp, synthetic construct
  source 1..120: mol_type = other DNA
cttaaaatcaataactaatctctgacagagcactcctgtctactaagagatcattatctccttcccaaatgctcaggcacaaaaatgccaagctcaaaagggcacgcctacttgtgtttc

SEQ ID NO: 24176 - DNA, 120 bp, synthetic construct
  source 1..120: mol_type = other DNA
gacattagatgttaagactttcaagtgaagaatataatgagaagcaggttcatcagtgactgcctgatggagagcatctccctgaagataaaacgaccaactcaatagtgacccacgaga

SEQ ID NO: 24177 - DNA, 120 bp, synthetic construct
  source 1..120: mol_type = other DNA
ttaaatttctcttttattgcagaagctcagttttttatcagaaataccccatttcatttcacaagctgtgcctttccagtcttgggcagtcaggtactgcttgtttcgcagggcccaact

SEQ ID NO: 24178 - DNA, 120 bp, synthetic construct
  source 1..120: mol_type = other DNA
tatctaacagtgaaatagtgtattagtcacagcctgtacagctgtagatgatggaaacgtggctaaattggcttccatgacaacaaaaaggaggagcacttactggctcgtgtatctgac

SEQ ID NO: 24179 - DNA, 120 bp, synthetic construct
  source 1..120: mol_type = other DNA
taaaataaacctctgaattctaccactgaaatggtgcatcatgaagcttcaaggaagattttgattggatctctttagtaggtcacctgccaatccctggaccaatcatgggcattgagc

SEQ ID NO: 24180 - DNA, 120 bp, synthetic construct
  source 1..120: mol_type = other DNA
aactaatgtttacagagttaattcaaacgctccagtttaaaaacttgccacctctgcccttcagagcaagagagaaccttgctgctttgtaagtctgcctcaaaatgtctttcccaaggc

SEQ ID NO: 24181 - DNA, 120 bp, synthetic construct
  source 1..120: mol_type = other DNA
aaggcgtttgctgtgctgcccagggcattgttcttatctgggttttcatcttccttaagagagtcattgctgggggaaaatgattttcttccaggatgaactcattttcacacttttaat

SEQ ID NO: 24182 - DNA, 120 bp, synthetic construct
  source 1..120: mol_type = other DNA
gtttctggtcaacactaggctattagtagttatgttttggggagttaaaaattatatacagatttttctattgcacaggcgtctgtgtccctctctaacctcctcattgttcaagggtca

SEQ ID NO: 24183 - DNA, 120 bp, synthetic construct
  source 1..120: mol_type = other DNA
cgtggggcttgctgcctgaaaaaaaaaaattattcctattttataaaataaaaaatttatctaaagtttaaaaacaaaaactatgattaatagctaagggctccaaagaatgaggcagat

SEQ ID NO: 24184 - DNA, 120 bp, synthetic construct
  source 1..120: mol_type = other DNA
aaaacagagcatttttagtatttggatgggcagcatttcttttcagttttgcagcatcaccttaagtgtggcatcttggtgagcctagtggattgccagtagagcaaatagccaatgtag

SEQ ID NO: 24185 - DNA, 120 bp, synthetic construct
  source 1..120: mol_type = other DNA
accaccaccaccaccaccctacacatactggatcattttaaagcaaattccagacatgaaataacttcacccgtaaatatgctatcaggttacatctctcaaggataagggttattttca

SEQ ID NO: 24186 - DNA, 120 bp, synthetic construct
  source 1..120: mol_type = other DNA
catgtctctgttccattgtcactggttagagaagccttccttgtcaccttctaatgcccagctctagccttattttcctttgtacctcctctccctgtccaaatttatattatttaccac

SEQ ID NO: 24187 - DNA, 120 bp, synthetic construct
  source 1..120: mol_type = other DNA
ttttaatttcatcctcagtcattaggctagtaaagtcttctctctgtcctccttgcacctttgatggaatatattggagccgggctttgaatccaggaatgtgtggctctaaaatccatc

SEQ ID NO: 24188 - DNA, 120 bp, synthetic construct
  source 1..120: mol_type = other DNA
gagaaagtacatggagagttaatcactgaatagacagttgtttatcagaacaactgagcaaagagcagtcagttaacagcacagcaacaactcctgagagcaggcaggtttggataactt

SEQ ID NO: 24189 - DNA, 120 bp, synthetic construct
  source 1..120: mol_type = other DNA
cagaccacttggaatggtctgtataagaccaagagagttcaatataccaagataaaaatgtgcaagtatacttaacaaagagaacttgagttcagcattaaaaaaagacattaatctatt

SEQ ID NO: 24190 - DNA, 120 bp, synthetic construct
  source 1..120: mol_type = other DNA
ttgaagtacagaagggttaagtaacttgccttccccagacaagcaaatactggagctgagatctacatcctaagaatcttacttcagttcacactcttaaccacattgccaccaacttac

SEQ ID NO: 24191 - DNA, 120 bp, synthetic construct
  source 1..120: mol_type = other DNA
aaaatgagaaatttttgaagttttggggattaccagtaagaaggcatgtacatctctagtgtggtaccttgcacgtagtaggtgctaactaagttattagggacaggcttggaagagggg

SEQ ID NO: 24192 - DNA, 120 bp, synthetic construct
  source 1..120: mol_type = other DNA
tacagacatgaaatacaaaaatagagtacgaagtaggatatcaaatcttaaagatgcaaaaaatccaaatttaaggaaaaatgtcctctgtgggaatattcctcctgacttatttgctag

SEQ ID NO: 24193 - DNA, 120 bp, synthetic construct
  source 1..120: mol_type = other DNA
actttattgagatcagtttggttttcctgttaatttacctgtttgactttataatgtgttttagttttgcagaagaacactgttgtagtttagaaggcttttcataaatcccctcatagg

SEQ ID NO: 24194 - DNA, 120 bp, synthetic construct
  source 1..120: mol_type = other DNA
tttcaacgcagttgactgtcttcatcatttaaaccctctcccctcatctctatgtatttttcatgctattaggttgatttagcaccctctgaaaatgtaccatacatctttacctcagcc

SEQ ID NO: 24195 - DNA, 120 bp, synthetic construct
  source 1..120: mol_type = other DNA
tcctctacctctctccctcaaactccctgggtcagctgccaacaaactccaacagtaaaagaaaaggcttgttcatgtccatcaacccaggggccttttattagaaaacatttattttaa

SEQ ID NO: 24196 - DNA, 120 bp, synthetic construct
  source 1..120: mol_type = other DNA
gggttccaaaagagtgagtagaagttccaaggctttttgaaatctaggcctggaacagacagcatcatttctgctgcattctgttggtgagagcaagtcatgatttcagctcaaattcaa

SEQ ID NO: 24197 - DNA, 120 bp, synthetic construct
  source 1..120: mol_type = other DNA
tcccatcccagcaccacttaatatgtgttgtaccttgggcaagttcaatgatgtctctgccttggccttagttttcttcttcttttttttaatgctgcctcaattacagaacagatgcct

SEQ ID NO: 24198 - DNA, 120 bp, synthetic construct
  source 1..120: mol_type = other DNA
caaaacaaaaaaacaaacaaacaaacaaaaacaaaaacaagggtttgaagtttgtgttggtggcagctgcgtgatctggaaaagctcacactgaggagctctcctgcctccatgagggca

SEQ ID NO: 24199 - DNA, 120 bp, synthetic construct
  source 1..120: mol_type = other DNA
tttactatggaaacttcccaaaacaaacaaaagtacataggatggcataatgaatccccatgtacccctcagccagcttcgacagttaccaacatgtggccaagcctatttcatttctac

SEQ ID NO: 24200 - DNA, 120 bp, synthetic construct
  source 1..120: mol_type = other DNA
ctactttagtgtcacagtatttgtcttaagaacaactctgatcatgtcaccccgttcagaaatctcaaaagtttctctgctatccaccaaagaaattctaagccatagggccaggcatgg

SEQ ID NO: 24201 - DNA, 120 bp, synthetic construct
  source 1..120: mol_type = other DNA
aaaaaaaaaaaaatggagattttatataaagttctacatttccagtcctttgaaaaactggaagatatgaaggccagggccaggattcactgtgagcctgttggccagggctgggggcag

SEQ ID NO: 24202 - DNA, 120 bp, synthetic construct
  source 1..120: mol_type = other DNA
cctatgttaagggaacaactaggaagttgtagaaaccacttttgttcgcatcacagtggctagaactttagtcacatggttatatctagcctgcatggaaggctgtgaaatgttgccttt

SEQ ID NO: 24203 - DNA, 120 bp, synthetic construct
  source 1..120: mol_type = other DNA
atttttaattcttagtttgacttaaaccttgcttttagtgtgatggcgacaaaagctgagctgaaagggctttggagagatgttcacagcagcacatgcctgaggctctctcttctttgg

SEQ ID NO: 24204 - DNA, 120 bp, synthetic construct
  source 1..120: mol_type = other DNA
acaggcgtgagccaccgcatccttgcttaacatttattattgactgtctttttaattacagacggcagccatcctagtggatgtgaaatgcaatctcactgtgcttttgatttgcattta

SEQ ID NO: 24205 - DNA, 120 bp, synthetic construct
  source 1..120: mol_type = other DNA
tagctaatccccgacccccatggctggatatcccacagatgcctcagacttagcatgtcccagactgagttctgtctcccttcagacctcctcctttctgggttctctttctcagggaat

SEQ ID NO: 24206 - DNA, 120 bp, synthetic construct
  source 1..120: mol_type = other DNA
atcactgggcttaacaggaatctaaaaaatgtatttttagcaattgttatgttatatccacaacatgatctatatattttgtcagggaggtttattttttgactcagaactagtttgttc

SEQ ID NO: 24207 - DNA, 120 bp, synthetic construct
  source 1..120: mol_type = other DNA
ttttttttgtttaatcaggggttggatcagtactagttagttttagttcaccagtagttgcagtgtcttgggatcaggatcagcaggatcaggcccctccctccatcaagtctttgggac

SEQ ID NO: 24208 - DNA, 120 bp, synthetic construct
  source 1..120: mol_type = other DNA
ccaaaatctcttccagaaagatttccttgattttcctagctgaatgggaacagtaccatggtctcctccttaatggttctgatcactctgactagtctgagagttatttcaggcctgttt

SEQ ID NO: 24209 - DNA, 120 bp, synthetic construct
  source 1..120: mol_type = other DNA
tctgattgctggagtggtgaacagatagattggtgtgttcattggtgggtgggtgattgataagtggatgatcaatagatagatggctgtatgagcatataggtgcaagaataaatgggt

SEQ ID NO: 24210 - DNA, 120 bp, synthetic construct
  source 1..120: mol_type = other DNA
ctgctgccacagtccaatccaccatcagctcttgattggactgctattatatcttcttaacttatctcactgctagcattctctcaaccacttgaagcctatagtttctgtagcaatcag

SEQ ID NO: 24211 - DNA, 120 bp, synthetic construct
  source 1..120: mol_type = other DNA
ttatgtggtcatatgttttcttagaagcttcgagagtcagatcctgatagggaccaggtacctctagaattctctccccaacaagattacttcaagaacagaacctacttcaggctgtag

SEQ ID NO: 24212 - DNA, 120 bp, synthetic construct
  source 1..120: mol_type = other DNA
gaagaagctggatgagtgagtctggaatcgggtttgcaatctccactaaccaaacacatagcagcacttctatgatgcttttatgtctagtgggctttgtaagctcttataaggtagaat

SEQ ID NO: 24213 - DNA, 120 bp, synthetic construct
  source 1..120: mol_type = other DNA
cattgcaactatagacgaattcttaggacaggaagttgaatcaagactcattttggtgtgctttttttctaaaaaacaaaattgtaaggtggcaaaatatggcatccatcatttctcatt

SEQ ID NO: 24214 - DNA, 120 bp, synthetic construct
  source 1..120: mol_type = other DNA
aagttgcaaacaatacagaaaatttcaggtgcagccaaattacccagatgttcctgttttaccatatttcctttatcattctctttctctctctctgtatccatacatatgggtgtatat

SEQ ID NO: 24215 - DNA, 120 bp, synthetic construct
  source 1..120: mol_type = other DNA
aaatactgtttttaaatctagagatatctagatttcatcaattgtccaaggagcgaattgagaaccatgcatgaccttttgttgtcctgtcccctcagcctcctttagtctggaaccaca

SEQ ID NO: 24216 - DNA, 120 bp, synthetic construct
  source 1..120: mol_type = other DNA
tggatgggcccccatccagttagttgaaggacttaatataaaacactgacctcacacaagcaagaagttctgccagatgactgcttttgaactcaaactgcaaggtgtatgtatataata

SEQ ID NO: 24217 - DNA, 120 bp, synthetic construct
  source 1..120: mol_type = other DNA
acactgggggttagttttcaacctaagaattttcacaatcattcagaccacagcagggtaaaagtgaaagaaggaatttaaaaccagagtggtctgtctaatccagtgggaaacagggct

SEQ ID NO: 24218 - DNA, 120 bp, synthetic construct
  source 1..120: mol_type = other DNA
accgcaaaaccccaagcctccaccacaacaaggtattgaaaactaaaattgtataagtcacgtagtaatggattccccaagatgagaaacagatgtgaagctgttctagaattgaggact

SEQ ID NO: 24219 - DNA, 120 bp, synthetic construct
  source 1..120: mol_type = other DNA
ggattgtagccacagcactccaatctctgcctttgtcttcacattgccttctctgtgtgtctcttaaaggacagttgtcattggatttagagctcactcatataatgcaggataactaca

SEQ ID NO: 24220 - DNA, 120 bp, synthetic construct
  source 1..120: mol_type = other DNA
agaagagaatgtcctgttcttagggaaatgcatactgttttgggcataatggggtatctgtgcaaattattctcaaatgattaagaaaatgcaacatgaaatatagataaggcaaatggg

SEQ ID NO: 24221 - DNA, 120 bp, synthetic construct
  source 1..120: mol_type = other DNA
cacatctatgtattacatatcgatagataatatctatgtattacatatcgatagataatatgtatctatgtattacatgtcgatagataatatgtatctatgtgttacatgtcgatagat

SEQ ID NO: 24222 - DNA, 120 bp, synthetic construct
  source 1..120: mol_type = other DNA
atatttttaaagagtggctaaagaacttcctcagggaggaaatggtaaaagaaggcatcctggagcagagcagccccagcaagggagtacttaggaattagtgggtaaggaaagaatcga

SEQ ID NO: 24223 - DNA, 120 bp, synthetic construct
  source 1..120: mol_type = other DNA
gctgtgtccatgtgttgtcactgttcagctgccatttatgagaacagagaacacaatatgacatttttaacagttatcctaaaagaagcactacatgaaaaaggtaaaagttgccattat

SEQ ID NO: 24224 - DNA, 120 bp, synthetic construct
  source 1..120: mol_type = other DNA
cccttcaattctccaccctgattttcaaatctttttaggcatagaggattcccttaaatgaaatctaaagggaaggcagcagagtgcactttcacttgtaccaaaggttgtatctcccac

SEQ ID NO: 24225 - DNA, 120 bp, synthetic construct
  source 1..120: mol_type = other DNA
attgtagcaatagttaaattatttggggccttcttttaggtagatattaaatagcagggctaactatcaactatggcttttacttgtatgtagcaataaaaccatgtcaattccatgaaa

SEQ ID NO: 24226 - DNA, 120 bp, synthetic construct
  source 1..120: mol_type = other DNA
accagctggtgaacgagtataagtgcaccaatgtcaatgaatcttaacagcattatgctgcgggaaaaaagactcaaaaggttacatacttcccacttacatgacattctggagaaggca

SEQ ID NO: 24227 - DNA, 120 bp, synthetic construct
  source 1..120: mol_type = other DNA
aaaatacttctgaaggtttcagagctacataagataaagaaacatcagcatttacatatccaatctcctgttttcacaaactgccttaacccccttaattagcagatggcatgggtattt

SEQ ID NO: 24228 - DNA, 120 bp, synthetic construct
  source 1..120: mol_type = other DNA
atttaaagacagtaccaaaggcatacattttagtgtttggaggaccaagggtcatttgatgtttgatgcttattgactattcgaggatgacaagacaccttgagaacacacacacccaca

SEQ ID NO: 24229 - DNA, 120 bp, synthetic construct
  source 1..120: mol_type = other DNA
ataaattaagaccaagaaaatgatttcaacagaggggtgaagggggagctcctattcttccttcttactgaagtgcttcatccaaacagcctcctttacttccatggtcccttaaaacca

SEQ ID NO: 24230 - DNA, 120 bp, synthetic construct
  source 1..120: mol_type = other DNA
cctcctgagaattcagtggtacaggcagatgggattttttttgtttttgtttttgtttttggttcgcggtgatccttgcaagtcccgactccttgaaaagttgcagaagcttctgatttt

SEQ ID NO: 24231 - DNA, 120 bp, synthetic construct
  source 1..120: mol_type = other DNA
gtggggaacattctcctaatatagagaagggtgcacacactgggccaccaaaatgatacatgctctgcagaaaaaagttactatctggttatgttgcttaaatggtggagagaaaagaga

SEQ ID NO: 24232 - DNA, 120 bp, synthetic construct
  source 1..120: mol_type = other DNA
aaaaaataaataaattaaaaaaaaaaaaaactggaataggacagtgagtgaaggtgcagcagcagaaaaatactgggaaaaggccacacccatgcggctactcggcctgattccatgtgc

SEQ ID NO: 24233 - DNA, 120 bp, synthetic construct
  source 1..120: mol_type = other DNA
gtatcttttaacaaatctctccctatccttcctcccatcccccttcccttcccttcacagcctctagaactctctgttttactttttacttctatgagagcaactttttttagcttccac

SEQ ID NO: 24234 - DNA, 120 bp, synthetic construct
  source 1..120: mol_type = other DNA
ttccatacccaataatctaccttagtccaagctcctttgccttatcgctttttcacaactataagttgacccttgaacaacacagggttaggagcattaaccctctgttcctaacacagt

SEQ ID NO: 24235 - DNA, 120 bp, synthetic construct
  source 1..120: mol_type = other DNA
atagaactctaaattcttcggtgggcggggggaaattagaacagtgacttggtaattttattcagtgacagattttatcccaagtcatatttctgtgaagaactccacttgatagcttct

SEQ ID NO: 24236 - DNA, 120 bp, synthetic construct
  source 1..120: mol_type = other DNA
gtcacccttattcccttcgagttctaccgagctctatgtgcccatcagtgagctactccactgcctatttctacttcagatattctcatgtgcagtatattactggaataacatgtaaat

SEQ ID NO: 24237 - DNA, 120 bp, synthetic construct
  source 1..120: mol_type = other DNA
gtacagtcacactacaaagtactaatttcaaaaaagatgaacatttctataaacagatacaaaatgatctctgaggtaagtttaaaaaggtacaaaatgaaatacgtcccatcaatacct

SEQ ID NO: 24238 - DNA, 120 bp, synthetic construct
  source 1..120: mol_type = other DNA
cttaacctatagtgctcctaaggaagtctctcttaattcacaagttcacctaagaagcatctaagaagccagaaggcagagcaaatcacatacaggtgcaaatgaggcatttaagagtcg

SEQ ID NO: 24239 - DNA, 120 bp, synthetic construct
  source 1..120: mol_type = other DNA
ttatcttctcctaactggttttagttctgcacttgaaacaaatttttttctctcctgtcctcttttctctcccctctcttctctcttctcttttttctccccttcccttcccttccctcc

SEQ ID NO: 24240 - DNA, 120 bp, synthetic construct
  source 1..120: mol_type = other DNA
atttaaccattaaaaaaattaattttctcaaaagcattgttattctactctactctctactctctactctactcctactcctacgcctacgcctacgcctacccctacccctacccctac

SEQ ID NO: 24241 - DNA, 120 bp, synthetic construct
  source 1..120: mol_type = other DNA
taatgactcacatctactgagtgcttaccacttgccagcgttgtgctaaatgctttacctttacgagcactgcaggacatagacactagatttgttgtagtgcataatcctctttttgtt

SEQ ID NO: 24242 - DNA, 120 bp, synthetic construct
  source 1..120: mol_type = other DNA
aaaatatatgatcctagaagttatcttagggactaagcattataacatgcccagaagaggaagggttctgtgccactgcagagataagaactggtactggctcctcttgtccctttcatt

SEQ ID NO: 24243 - DNA, 120 bp, synthetic construct
  source 1..120: mol_type = other DNA
agttcaagctcatgcaagtaaaatattaaaaagtaaaattcagaagtacggggtagagctgatttgcatttctcagtttgtggcccgtgaccatcagcagtctacaggcctctcttcagt

SEQ ID NO: 24244 - DNA, 120 bp, synthetic construct
  source 1..120: mol_type = other DNA
catatttcagtcttaggtgactgagtagttggtggagtcattcagttagataggcctaggaaagaagaaaggggctggtggggagatgatgaactcagttctgggcaaagcaataattta

SEQ ID NO: 24245 - DNA, 120 bp, synthetic construct
  source 1..120: mol_type = other DNA
acgtgccggtcatctgaccagttttcttgtcatgatctttaaaatgtcatagataggtgtttttttaatctagtgttgtagacactagtgggattgcatttcttctctgtgttcccatag

SEQ ID NO: 24246 - DNA, 120 bp, synthetic construct
  source 1..120: mol_type = other DNA
aatctcttccttctaggtgtcccattctgtctgtctggacttcccttttagggttcagaatgccgttgatctttctttttggtgaatgtagagttgaggtaggattcttagaaacttgtt

SEQ ID NO: 24247 - DNA, 120 bp, synthetic construct
  source 1..120: mol_type = other DNA
acttacaggaagtggctctgttaagccacaggaaggggcagtgtgaagccacaggaaggcacagtgtgaagtcacatgaaaggggctgtgtgaagtcacaggaagggaagtggaaagtca

SEQ ID NO: 24248 - DNA, 120 bp, synthetic construct
  source 1..120: mol_type = other DNA
tttgtggattaatatagagagcatttacaccctgaaatacagtcactctagccgagaacaggttatgcctctccatctgttcacgttcctcagaagcattttgatgttttcttcagctgg

SEQ ID NO: 24249 - DNA, 120 bp, synthetic construct
  source 1..120: mol_type = other DNA
cagttgctcagtttatcctcttgggcttcccctgcataccatcatttcatctgtaacaaatggggttctgtcttttcatttcctctttcttactcttacctcattacatttgctggtgtc

SEQ ID NO: 24250 - DNA, 120 bp, synthetic construct
  source 1..120: mol_type = other DNA
ggcctctagctatgaggcttcatgtacataacaaggccacttttgctagtcaagcctcctttattctctcccctataacctgtcttgccattaaaatctgtttttggttccatatgaact

SEQ ID NO: 24251 - DNA, 120 bp, synthetic construct
  source 1..120: mol_type = other DNA
gctcaggaacaggcttaaggaggaatagccaaagaggtaggaagaaaaccaggaaacgaatccctcatagaaggaatgactttctagaataactgagtcatttgcttcaaacaagcattg

SEQ ID NO: 24252 - DNA, 120 bp, synthetic construct
  source 1..120: mol_type = other DNA
aaaagataagtgttaagcactgctttagagtactttactacaactgtaatgcagcatttaaaaatgtaatgggagcggggaggagccaagagggccgaataggaacagctccagtctaca

SEQ ID NO: 24253 - DNA, 120 bp, synthetic construct
  source 1..120: mol_type = other DNA
aagaaaaatgtaatgggagacttccagtctaaatgaaatggtaaagacttgtttctccccatgtctccttattaaataaacaaactctggaaataacaaacaaggcaaccaaaggagaac

SEQ ID NO: 24254 - DNA, 120 bp, synthetic construct
  source 1..120: mol_type = other DNA
tataaaagggtccctgagaccataacatttgaggaccatgggcatgagggcttttttacttgctaaaaaattagccaaaactccagcaaacagaaacattaactaatgacattgtttttc

SEQ ID NO: 24255 - DNA, 120 bp, synthetic construct
  source 1..120: mol_type = other DNA
aaaaagaaaaggaatataaaaaagagaatggcagcatgcagactctaagtgactaggaaacagaatcattacccaaagaagccatgctacggtcattttccagcatcatgttccagtgca

SEQ ID NO: 24256 - DNA, 120 bp, synthetic construct
  source 1..120: mol_type = other DNA
acattgcacttgggtgtcctgcaacacctcaagttcagtgtctaaaatgcatgttcttactaccttcctctctggatttcccaagttatgtcaatgaattcacacactggccaaaacatt

SEQ ID NO: 24257 - DNA, 120 bp, synthetic construct
  source 1..120: mol_type = other DNA
tggtcttgaattcctagcctcaagccagcctcccaccttagcctagaacatccatccattctagacactgaacttaaagtgttgcaggacacccaagtgaaatgtcccataggcaatagg

SEQ ID NO: 24258 - DNA, 120 bp, synthetic construct
  source 1..120: mol_type = other DNA
cttgtcattccaggatactgtggcatatgaggacctatctgtagactacactcagaagaaatggaaaagtctcacactcagtcagagagccctgcagtggaacatgatgccagaaaatca

SEQ ID NO: 24259 - DNA, 120 bp, synthetic construct
  source 1..120: mol_type = other DNA
tgtgttccaggattgtatgagagttctaaaattctgatatgtcttaatatatgttgtaatgattatgttaaattgttgtaagccacagaaatagccacatttgtcaactgtgtctttatg

SEQ ID NO: 24260 - DNA, 120 bp, synthetic construct
  source 1..120: mol_type = other DNA
cacctgaaaactagctgactgggcctctaaaatatgacaacagctggggcacctaaagggcactaagttgggtttcatggctccctcccttggccagcccattattaatgattatatttg

SEQ ID NO: 24261 - DNA, 120 bp, synthetic construct
  source 1..120: mol_type = other DNA
ctctgagtctttttactaacatgacccaaagcacatggctgccttccttatgcctaaaagtggctctggtactcaggttttatctctgcactccaagtaggatgaaaagataagagcaaa

SEQ ID NO: 24262 - DNA, 120 bp, synthetic construct
  source 1..120: mol_type = other DNA
ggttttcgatatatgattcttccatcggctggagttggttcttcatctgagcaaaaacagaatttttaagaactttcttctcctcattattttgcctttaccttagaagcaaataataag

SEQ ID NO: 24263 - DNA, 120 bp, synthetic construct
  source 1..120: mol_type = other DNA
agtatcaaatgcaaaccctggaactttggtcaggtaatgatttgtcgtcttgtggctgcaccaggccccatctgctagaccacccttttagctgggtagtagtcagtaaaggttctggag

SEQ ID NO: 24264 - DNA, 120 bp, synthetic construct
  source 1..120: mol_type = other DNA
ccaagatttgacaacaaaaaactcctgggaaatgccaggcatttcacagctgcttgagtttctcctcctccccctgggtctggacgcctaggacaggatggaagtagggacaagggagga

SEQ ID NO: 24265 - DNA, 120 bp, synthetic construct
  source 1..120: mol_type = other DNA
acccgtgctgtacatttctggacttccgacctacagaactgtgagctaacaggtgttgttttatgacaccaagtttctggcaatttgtatgcagcaatagaaaaccaatacagaactctt

SEQ ID NO: 24266 - DNA, 120 bp, synthetic construct
  source 1..120: mol_type = other DNA
cactaattgtctaccatctctcatctcttcttccactgggactttacttaggtcattatgcttccagctctccatatagtcacatatatgcacgtatggcttgtctccttgttacagtag

SEQ ID NO: 24267 - DNA, 120 bp, synthetic construct
  source 1..120: mol_type = other DNA
ttctctgtttaactgagttaagtaattaagaattgtacctgtgaggcagagaggagtggcccatagtgttttatagcatctcatgtgaggtcatgcttatcacccagtccttccatgtca

SEQ ID NO: 24268 - DNA, 120 bp, synthetic construct
  source 1..120: mol_type = other DNA
tgcaattatgaacaaaactgctatgaaccttcttgcacgtggttcctgacatatgcgtcaccatttctttaaaatgtgtacctaagagtagaattgctcgattgtaggatacgcacgtgt

SEQ ID NO: 24269 - DNA, 120 bp, synthetic construct
  source 1..120: mol_type = other DNA
cggtagctttgggtttagtttgctcttctttttcttgttccttaaagtgtaaaattaggttattgctttgaggttttcttttttaatgtgtgcatttacagcgacaaattttcctcagca

SEQ ID NO: 24270 - DNA, 120 bp, synthetic construct
  source 1..120: mol_type = other DNA
cgaggcaagggaacagcttgccctatttgtggaatggagaaaccaccatttttatatattgctcgtgtattctccaaagtccctactgcagtgctgaacatataataagaagtgctcaag

SEQ ID NO: 24271 - DNA, 120 bp, synthetic construct
  source 1..120: mol_type = other DNA
taggaatgtgtgcgctttattcgggtcctgattcaaccaacctaacgttcaacattaaaagacaatcagaattgtgaaccaatggaatatttatttgatgatatcaagtacctctggtta

SEQ ID NO: 24272 - DNA, 120 bp, synthetic construct
  source 1..120: mol_type = other DNA
acaatgtgacggaagataaactgtgtggggaagagaaactgaggcccaacaggaataaagctgccccaagacccagctcctgcctctcttggtcccacactagaaccactgtttaaataa

SEQ ID NO: 24273 - DNA, 120 bp, synthetic construct
  source 1..120: mol_type = other DNA
tgtttacggacctgggggaagaagggctggatggtcgaactacaggttgcctttcttctcagagaaccagaagggacttctcgtgtctgtccttatttagtaatcagtgcacaacatctc

SEQ ID NO: 24274 - DNA, 120 bp, synthetic construct
  source 1..120: mol_type = other DNA
tccctagacagccaggagcagggttgtctcccctcagacctgggcagaactatgtcccctagacacccaggagaagggctgtgtcctctcagacctggggctgggccatgtcccttagat

SEQ ID NO: 24275 - DNA, 120 bp, synthetic construct
  source 1..120: mol_type = other DNA
cattctcctgtgtgggccaaaggtcatgaccacttttagcacaaaggtgttcttcccatgccttctaatgataaccatcccagacatatgattctacctttatttccccacatgagattt

SEQ ID NO: 24276 - DNA, 120 bp, synthetic construct
  source 1..120: mol_type = other DNA
ggccagatacagaaaactacatactgtttaattccatttatataaggttcaaaaggaaggaaggcaacttctcgtgttacaagtccagagtggttccccttgaagagtgagcacctgaga

SEQ ID NO: 24277 - DNA, 120 bp, synthetic construct
  source 1..120: mol_type = other DNA
tgctaatttaagggtagaattccaaagaggttttaatttgtatttcccttgttaatggtgatgctgagcactccctctgattggccagctgtttactgggacgaaagagattctgtagtg

SEQ ID NO: 24278 - DNA, 120 bp, synthetic construct
  source 1..120: mol_type = other DNA
gccaagttatgatagggccaacccttccacagcgcttgctgtggccaggctctgttctaagtgtagaagtgtggttgctcatttaatcctcgcaacttcctgtaaggtagacgtatcatc

SEQ ID NO: 24279 - DNA, 120 bp, synthetic construct
  source 1..120: mol_type = other DNA
ctcactaaatatcacatacttttctcactagaatctgccatctacctttcaagagcttaacagggatgtaaatgacaagagtgttcacatatgcaaccctcagtaacaggcatgtcgcgg

SEQ ID NO: 24280 - DNA, 120 bp, synthetic construct
  source 1..120: mol_type = other DNA
cagaaggcctcatccactttgtcttctgtatcacgctcagccactagaagctgctgggaggcacagaggcacctggatggagctggctgccacaggctatgaccagaacagaagctcaca

SEQ ID NO: 24281 - DNA, 120 bp, synthetic construct
  source 1..120: mol_type = other DNA
gcagtcaactgtgattgcgccactgcagtctgggcaacagagcaagaagaccccgtctcaagaaaaagaaaaagaaaaaaaaacccaaacaacaacaaaaaagaagatatacaaatggcc

SEQ ID NO: 24282 - DNA, 120 bp, synthetic construct
  source 1..120: mol_type = other DNA
aaacatatccaagagtaactcgttattgctggaaatacaagagactcaggaaagagcctattcagtgaaaaaaagacacagaagtcctttccttagtggcaggcaaccaatgcaccctgt

SEQ ID NO: 24283 - DNA, 120 bp, synthetic construct
  source 1..120: mol_type = other DNA
agcagttgaacattagcaggtgatctaaagcaccatgaagaatttcctggctgaatagctatggaaaatgatggaaccaggagtcaaaaatgagccgaggttgcaggtttgaagactgag

SEQ ID NO: 24284 - DNA, 120 bp, synthetic construct
  source 1..120: mol_type = other DNA
ctgtggttgatgatgatgtgttaaagtaggtttatcaactataacaaatgtaccaccctggtattgatcgtggggaaaactgtgcatgtaggggtagtcaggcagtatacagaaactctg

SEQ ID NO: 24285 - DNA, 120 bp, synthetic construct
  source 1..120: mol_type = other DNA
ggcgactccggccctgtgattccagaggtcccctttgaaccatcgaagcccccagtcattgaggggcttagccccactgtttacaggaatccagagagtttcaaggaaaagttccttcac

SEQ ID NO: 24286 - DNA, 120 bp, synthetic construct
  source 1..120: mol_type = other DNA
ctgtttcagtagagcgggaggtacttgtgaggaaaagagacggaagagatagaaaactttaactttttcgaagagagttagtcatatcaaccaaaggcaatgtctgcactgcaccttgtt

SEQ ID NO: 24287 - DNA, 120 bp, synthetic construct
  source 1..120: mol_type = other DNA
atgctaccttcatttttttgttggtatgctgaagaaactttttaaagtatctcactttttaaaaaattggtcagaccctctccctctccctcctctccctcctctccctctccccacggt

SEQ ID NO: 24288 - DNA, 120 bp, synthetic construct
  source 1..120: mol_type = other DNA
gaccacacttgaggtggtggagttttctatgctgctgcttgtgggcagaactgccaggagagaaggaggagcttctgtcagtgacctttgacccaaagcacccaccaacccagctctgaa

SEQ ID NO: 24289 - DNA, 120 bp, synthetic construct
  source 1..120: mol_type = other DNA
tctgacactggggaggtctagaaaggggaaaattggcaggagggcaacatagtatctggttggggggacagagagacaggacttggcccaggggtcccctaggggctctcaccttcagat

SEQ ID NO: 24290 - DNA, 120 bp, synthetic construct
  source 1..120: mol_type = other DNA
ttcaaataaggttggtagagacttaagaagagcttagagggtggctgaacacaggctagtgaaagacactgaagtaccaaagcttgggtgttacataggggatggaggtgtctatggctc

SEQ ID NO: 24291 - DNA, 120 bp, synthetic construct
  source 1..120: mol_type = other DNA
ctggcctcaagtgatccttccgccttagtctctccaagtgctaggattacaaggcatgagtcaactggccaaattttcttacaaatagctgaatgtattctatacacataccaggaattt

SEQ ID NO: 24292 - DNA, 120 bp, synthetic construct
  source 1..120: mol_type = other DNA
gcctggccaagcagaaccattttgaaatgttccctgtgagtggatcagcagcggacatagcacttctgttacaatataaagtacctggagaaaatgagtcattgcaaattagattgtata

SEQ ID NO: 24293 - DNA, 120 bp, synthetic construct
  source 1..120: mol_type = other DNA
caaatttgtccctggaagattgttgtcactgtcctcaacttaaagataagaaaatctgagatcaaacaggtttgagaatttgtccaagaccacaaagcaaacctgtggcagagtttagaa

SEQ ID NO: 24294 - DNA, 120 bp, synthetic construct
  source 1..120: mol_type = other DNA
gtgtctccagctattgctagatgtctcctgtggggaaagttgccccctgtggagaaccactggattagactttctcattttacatcttttattttctttttgcattgtcaaaatccttct

SEQ ID NO: 24295 - DNA, 120 bp, synthetic construct
  source 1..120: mol_type = other DNA
ttgtcaaccatagagctcctctatagacccacttctcatttcaactacatgttctccctggtgagtctcacccacttttccagtttggatatccatatttgtcaaagtgaccactatgta

SEQ ID NO: 24296 - DNA, 120 bp, synthetic construct
  source 1..120: mol_type = other DNA
tgtcagttaacattcccaagcatcttccaaaaattcttccaaacgtgtccaaatgtctatcagtgggtggaggaggcaataatgcaacccaggttgaaagctactcatacagagtattgt

SEQ ID NO: 24297 - DNA, 120 bp, synthetic construct
  source 1..120: mol_type = other DNA
agatcccatcttaatcccaaaatgcaacgaaaggaatgcctcataacaacactaaaccactctccccaaagtgggaaaaaggaagtacgggagagtatcccttatccaaaaatctgaaat

SEQ ID NO: 24298 - DNA, 120 bp, synthetic construct
  source 1..120: mol_type = other DNA
ccctgcgccgtggtagcagtctgtggcgggtgcgggcagccatcaggccgagacctcgccccggccctccggttccaggcttccagcccggctctgtagcccccaagcttgggcctcacc

SEQ ID NO: 24299 - DNA, 120 bp, synthetic construct
  source 1..120: mol_type = other DNA
gacaaagagccagtgggttcgtggatggacgtgggcttgtccctccactctcccagcttgacccggcgccgcttaccctcccggcaggatttgatgccgcagctctggaagcgcacagca

SEQ ID NO: 24300 - DNA, 120 bp, synthetic construct
  source 1..120: mol_type = other DNA
gaataaggaggctgcagttgtagggaaagggagcctgggctctggacagataggcttaggctctgttctcactgtgctcctggctgcgagatctctggccagagagtctgccttccgtac

SEQ ID NO: 24301 - DNA, 120 bp, synthetic construct
  source 1..120: mol_type = other DNA
tctgcctgagtcctgctggttaccaccacctcactccctgctattcttagcagctgagctcaggacagcactgactggcattagacagtacccttttccctctaggcctgtgtgttgaga

SEQ ID NO: 24302 - DNA, 120 bp, synthetic construct
  source 1..120: mol_type = other DNA
acatcacatcacaacataacataaattttcaaggcagaaatcttgtagtcagccttactgtttgttgacaaggacacggccctgagcacagaaatctcggcagttgataaagccaagaag

SEQ ID NO: 24303 - DNA, 120 bp, synthetic construct
  source 1..120: mol_type = other DNA
ttcagaaccaagaggagttggggagggagaggggatatcactaacaggcaagggagtgacatcatctgtgcgtggggtgagaagctgcagctgagcacccctttagcagacaggatcatt

SEQ ID NO: 24304 - DNA, 120 bp, synthetic construct
  source 1..120: mol_type = other DNA
tttttgtcatcaaagccctgctgcctctcccagatggcctgtctggatcaaccctgttccactgggcacctataatcagtctgtggccttcccttcagcttggcagttcagccgctgcgc

SEQ ID NO: 24305 - DNA, 120 bp, synthetic construct
  source 1..120: mol_type = other DNA
aactggaaaaaggaggcaggtgaaaggtgtgctcggactcaggtcccccacacccagccggacaagtgcacatacatgtgcatacatgtgtgcaaacatgtagcctcctccttgtttgaa

SEQ ID NO: 24306 - DNA, 120 bp, synthetic construct
  source 1..120: mol_type = other DNA
agactaaagagtggcgaattcaacaacgacaagatgccacctccctcggcatgtttaaaaagttgagtacgctgagggttggccaacactaggcaagtcggaagcctagcaagccatact

SEQ ID NO: 24307 - DNA, 120 bp, synthetic construct
  source 1..120: mol_type = other DNA
gattatctgtatgaacattttatgatagtgccagccgtaccacctttgtgaacttgataatgtttggggttaggatgggctccttagccttagttcatggctatggtgttttaacaaggg

SEQ ID NO: 24308 - DNA, 120 bp, synthetic construct
  source 1..120: mol_type = other DNA
attcacagtgtgtagccatcaccactatctagttcccgaacttttttattacaccaaacaaaaagtcaacacccatgagacaataactctttgttctcccctcccccaagtctaggtacc

SEQ ID NO: 24309 - DNA, 120 bp, synthetic construct
  source 1..120: mol_type = other DNA
cctttgtaccattttggatttccatcaagagtgaatgagagttccttttgctttacatcttcatcagcatttggttcgggacagtgttctggattttggccattgtgataaggcatgcag

SEQ ID NO: 24310 - DNA, 120 bp, synthetic construct
  source 1..120: mol_type = other DNA
gtagtgtagtatactgtatgggagattgaatgagactgcgaaacagaaagtctgggctgtactccctatctgccatgaaaaaagtgatacaattttagcatttctctgccccaacacctt

SEQ ID NO: 24311 - DNA, 120 bp, synthetic construct
  source 1..120: mol_type = other DNA
gatgcagaaaaggtctccaataaaattctacacccctttaggctaaaaacactcaataaactataccgattgaacgtatctcaaaataataagagctatttatgaacccacagccaatgt

SEQ ID NO: 24312 - DNA, 120 bp, synthetic construct
  source 1..120: mol_type = other DNA
aaagaaacaatggctgaaaacttcccaaatctggggagggaaatgaacattgatccttgaagtccaaacaacccctttaagatgttcatgtcctttgtagggacatggatgaagctggaa

SEQ ID NO: 24313 - DNA, 120 bp, synthetic construct
  source 1..120: mol_type = other DNA
ctgaatctgtaggttttgggggaagtatggtcattttaacaatattcttacaatccgtggcattcagtgtgtttcttttttttttttttttttttttttgcagttccaaccttttatttt

SEQ ID NO: 24314 - DNA, 120 bp, synthetic construct
  source 1..120: mol_type = other DNA
gggctaccattcaacccattacaacttgtgattaacatgaacccttaattagaaagacctttaaaatcagtgtcaatgtggagccttgtggtggagagattgtgtgctctctgcaaggag

SEQ ID NO: 24315 - DNA, 120 bp, synthetic construct
  source 1..120: mol_type = other DNA
tgagaaagttatggaggaaaacaagtgataaccacaaaattcaggatagtgattacctctgaggagttcctgagagagaaggatgcgggattgaagaggaacttcagaggtgatagaatg

SEQ ID NO: 24316 - DNA, 120 bp, synthetic construct
  source 1..120: mol_type = other DNA
aaaaagaaggtccacatctatcaccacagtatgaggtttaaggatttagaaagcacttttacctaaatatgcctttaataactacatcaggtataacacgaggatgctgctaaaagaatg

SEQ ID NO: 24317 - DNA, 120 bp, synthetic construct
  source 1..120: mol_type = other DNA
ttatttccatatcttgggctgacattaatttatataattaatcctcatccagcatttccacaaggaggggtgggggaggtagggcacaagaacagagtcaagttggtaccctgcaatatt

SEQ ID NO: 24318 - DNA, 120 bp, synthetic construct
  source 1..120: mol_type = other DNA
atcattcgtttaatcattcagtcaatgttgcttgatacctaccatgcttcagacactgttctaaccactggagattcagcaggggcccaaacaaaaatggctagggcttcatagtacttt

SEQ ID NO: 24319 - DNA, 120 bp, synthetic construct
  source 1..120: mol_type = other DNA
gttaaattaagacaagccctatgaatggagtttttccaggaagctgccaagcaggtcaaataataacaattctggggggtcaggactttttgtaggagttccaaaaccattctgtccctt

SEQ ID NO: 24320 - DNA, 120 bp, synthetic construct
  source 1..120: mol_type = other DNA
tgagtaaacatttcttggattgtcacaagcctttggttaaccagtattagccaccccattgctttcatggacaagcagattttcagaggtctttactctgccattcctaaagtacctctc

SEQ ID NO: 24321 - DNA, 120 bp, synthetic construct
  source 1..120: mol_type = other DNA
tggtctcgaactcctgacctcaggtgagccactgcgcctggcccaaatctatactttgaaatgaggtattttgggatttgttaagtgtttaaatctttggagaactagggaaagaaattt

SEQ ID NO: 24322 - DNA, 120 bp, synthetic construct
  source 1..120: mol_type = other DNA
tttggtacaataagtcaggccattgtttcctccttgatactgacctttgtatgttgagtagtgggatagtagtgcaagaactggttattatagaacacggaggtttggctgttggagaac

SEQ ID NO: 24323 - DNA, 120 bp, synthetic construct
  source 1..120: mol_type = other DNA
tagactcttacttaatggttgatggctctgtcaactgtccgtgatagggagcccagaccaagagagatgtccaagggtctttcagtctgtacaaatggcaaaaatcctaatattatttct

SEQ ID NO: 24324 - DNA, 120 bp, synthetic construct
  source 1..120: mol_type = other DNA
aaactagaagcttccttgcagtagcttttacagaagctaagaaagtgccctggtcacataatggtggtcgatttttagagactgtgcaagagaacatcttactctcattactcccacaca

SEQ ID NO: 24325 - DNA, 120 bp, synthetic construct
  source 1..120: mol_type = other DNA
tttgagagagaaaatccaggctccttccaggaagatcctagaagttggtggcaggaagttttctgactgatcgctcttgtctctgcctaggaaaaacttagaataagaacaaaagcagct

SEQ ID NO: 24326 - DNA, 120 bp, synthetic construct
  source 1..120: mol_type = other DNA
catgctaatgattaggtggtgaccctaaggactagtggaaaacagaagtttacagaagttcatcttttctctacaatttcctcactagaactcgtctccccaagggccaggtgacaaaca

SEQ ID NO: 24327 - DNA, 120 bp, synthetic construct
  source 1..120: mol_type = other DNA
ctccaaatgtttgttatttcggttggaataaatggtgtcagaaatgaaacctgaaaaagaacactattggaagggattggcaattcttggaactggtgtgcaggacccactagagccctt

SEQ ID NO: 24328 - DNA, 120 bp, synthetic construct
  source 1..120: mol_type = other DNA
ttgatgtatttgtctttattccagtactgttctaaagtataattttgaatttttgtatggagaaggggccacaaaggtcataatgcagccctggccagggcccttcctgacttcctgccc

SEQ ID NO: 24329 - DNA, 120 bp, synthetic construct
  source 1..120: mol_type = other DNA
tgacattcccagcagaccttcaaaagccctcaagatctgctccaaatgcccctggtagaggtacctggggcgtggtcacggattgtcctgggggtcagggcagggtgtcaggtcggggga

SEQ ID NO: 24330 - DNA, 120 bp, synthetic construct
  source 1..120: mol_type = other DNA
tacagctgaccaggcacccaagagcccaagccacccaaacagggcacacgcacacaaacagggcacacgcacccaaacagggcacacgcacacaaacatggcacacgcacacaaactcgg

SEQ ID NO: 24331 - DNA, 120 bp, synthetic construct
  source 1..120: mol_type = other DNA
tgctgagaccttctcccaattcatctcaccaccccaagccctctcaaatatctcccaatccatttccactgtccctgccttggcccaggccaccttcaggtaatgatggcctctttccca

SEQ ID NO: 24332 - DNA, 120 bp, synthetic construct
  source 1..120: mol_type = other DNA
aatcaaaatgtgtgctactggtataaaaacagacacagggaccaatggaatagaatggagcctagaaacgaccctcacatacacggtcaagcaaattttgacaaaggcgccaaaaccatt

SEQ ID NO: 24333 - DNA, 120 bp, synthetic construct
  source 1..120: mol_type = other DNA
aaaccctatggaccaaataggtgttttcaagctccttttatctctgagctttggtttcctcgtctgaagtgagggtaattcccaccaaagtccctccctgaattaagattgtatggtaat

SEQ ID NO: 24334 - DNA, 120 bp, synthetic construct
  source 1..120: mol_type = other DNA
gctctttctctaccacaggggccctctcctcccctcaacacaggcaactgtgatcttttcaagacagtgagacgttaaaaagaacactgaacttgggataaattacccagcaaacagaac

SEQ ID NO: 24335 - DNA, 120 bp, synthetic construct
  source 1..120: mol_type = other DNA
gtgctagtttatccatcttgcaaacgtgattgtcttgatgattctcttaagtccccgtttcttagatctaggaaggggacctccctctagctgttatcctcttccacaaggctgccaaca

SEQ ID NO: 24336 - DNA, 120 bp, synthetic construct
  source 1..120: mol_type = other DNA
tgttccctcctcctcctccctcattttctctcatcttccctcatcttcctcctccttcgtcttctagcatcttcctttatcttcctcctccctcatctaccctcctcctccttcttttcc

SEQ ID NO: 24337 - DNA, 120 bp, synthetic construct
  source 1..120: mol_type = other DNA
cggccttagctgcttggttgtgccccagaatcacagatcctggtgtgtaggcaatctgcctgcaaccctgccttggagagtgaacattttttttttttttattattatactctaagtttt

SEQ ID NO: 24338 - DNA, 120 bp, synthetic construct
  source 1..120: mol_type = other DNA
agccctctttgtatctgcagtttcagttatctgaggtgaaccatggtctgaaaatattacatggcaaattccagaaataattcataagtttaaaactgcagccaggcgcagtggctcaca

SEQ ID NO: 24339 - DNA, 120 bp, synthetic construct
  source 1..120: mol_type = other DNA
ttggcctcagccacccgactcattgtttttgtgcctggtattcttgataacctgattccagaaatgctctctgcttatcctgacacattttattctagagttttgggtttcttttcctct

SEQ ID NO: 24340 - DNA, 120 bp, synthetic construct
  source 1..120: mol_type = other DNA
cttggcttgggctcagaggcctgacattcccaaagagaatacgaagctaagtgagggaagagatttttttatgtttcattcctagtgctgtgtgggcacttagcaaataattttagaaca

SEQ ID NO: 24341 - DNA, 120 bp, synthetic construct
  source 1..120: mol_type = other DNA
ataaaaaatagtaagaaaaattcagttcactccagatgccccaatagcttatactgagctgaaagccattagaagctaggtctcatggatgtggggtcagaagacaccatgggtgctgag

SEQ ID NO: 24342 - DNA, 120 bp, synthetic construct
  source 1..120: mol_type = other DNA
gaaactcaaaatgtttctttgtagcatactgcttctctcctacaaatcttttcttttttcttttctttctcctcttctgttctctctctctctctccgtctccctcctctcctcccctcc

SEQ ID NO: 24343 - DNA, 120 bp, synthetic construct
  source 1..120: mol_type = other DNA
cacacacacacacacacacattatataaagggattgcttttttcaaacaagcaaagccttccatgagcaggcaaaatccctagaccctactgtgtcctgctgtcttttagaaagtaaggg

SEQ ID NO: 24344 - DNA, 120 bp, synthetic construct
  source 1..120: mol_type = other DNA
aaaagaaccagctgttagtttgatttctctattgttttctattctcaattctaatattctcttcttcattgttttctttgtcctccttgctttgaattttactcttctttttctagtttc

SEQ ID NO: 24345 - DNA, 120 bp, synthetic construct
  source 1..120: mol_type = other DNA
agggggtaggggatcaataaggtaaaagctcgggctgccccatccttaacacgcaccaggccctgggcccagcttgaggggaagccaagcaagatcccccaaaacacacagaagcaacaa

SEQ ID NO: 24346 - DNA, 120 bp, synthetic construct
  source 1..120: mol_type = other DNA
tttggcttccttttctttaatcacctagcaggattcttttggatatccaaactcaatatttcaacggctcttcagagccaaaaagctttctgcaaaggattaaagaagtagcaaaatgtc

SEQ ID NO: 24347 - DNA, 120 bp, synthetic construct
  source 1..120: mol_type = other DNA
aaggggaggggagaggagggaagggcaggaaatccaaataatctaaaataagtctcaaaggggagaaagaggaacaaaattaaaggaggcaggggaaaacacataataaaatggtaaacc

SEQ ID NO: 24348 - DNA, 120 bp, synthetic construct
  source 1..120: mol_type = other DNA
tgaaaaaaaaacattattttactttggactttaacacttctctctcaataagcaacagaataagtagaaagaaaatcaacaacgggatagaagatctgtgcattattaaccactttgact

SEQ ID NO: 24349 - DNA, 120 bp, synthetic construct
  source 1..120: mol_type = other DNA
gaagctgtcccaaggaggctctcctctctctctctccattctgatctcatagcacttaaaatctaaagtaatggcttcgagaatttgagtgtcagaaaactaaatatcccccaaaaggaa

SEQ ID NO: 24350 - DNA, 120 bp, synthetic construct
  source 1..120: mol_type = other DNA
aattttccaacacactagtatctacaaacatttgcaaaaagctgtatgtacatgtgcaagcatttattctctccacagacaatggggattggcgaccattcgcagagcctcacagccctt

SEQ ID NO: 24351 - DNA, 120 bp, synthetic construct
  source 1..120: mol_type = other DNA
ctgactcatgtaatttctatgttcttcaggtcttgaccaggtaacatcacacaaaacatgctgacctcagagatccccaaacttacagaaggcttaggacatgttagtagctataaagcc

SEQ ID NO: 24352 - DNA, 120 bp, synthetic construct
  source 1..120: mol_type = other DNA
ttaaaaaaaaaaaaaaaagaaaaatgcctgatttcccctgaggaagaggaccttttgccagcaaactgcctttggacttgagctgcaacatcaactcctccttgagtttccagcctgcca

SEQ ID NO: 24353 - DNA, 120 bp, synthetic construct
  source 1..120: mol_type = other DNA
tatatcaggggatggagtgctgcagattcatggaacatagggagaagttacttaaattaatgctcatggtcacctagaatggagtgcctcttaaaggctttgtcaaactaagtagctgct

SEQ ID NO: 24354 - DNA, 120 bp, synthetic construct
  source 1..120: mol_type = other DNA
tgcttccagcatgactgaaattgttgcccagttggttttcctgtctcttgttttgccctactccaattcacctaccacacagcttccaactgctttggttttttcctaaatgcagattat

SEQ ID NO: 24355 - DNA, 120 bp, synthetic construct
  source 1..120: mol_type = other DNA
ggcatggcgatcagaaagttatatgcagagtcctggggtgctgacaatatcctatttcttggcctaggtggtggcaatataaccgctcaatttacagctatttgtgtaactatatatttt

SEQ ID NO: 24356 - DNA, 120 bp, synthetic construct
  source 1..120: mol_type = other DNA
tccctagaaaccagcagaatcggctgtctaggaaattctcagtaactgtctaattgaactgaaccaacctcatcacagcctttggcagcaggtacccaaattagttttaatttccactaa

SEQ ID NO: 24357 - DNA, 120 bp, synthetic construct
  source 1..120: mol_type = other DNA
cagcccaggaaaagtttttgaccatttatatgaatattctatctaggaaatcgctgaaatggttcccacagatgtgcatatctcatcagggggtcgttcagtagttgcacatacctctgg

SEQ ID NO: 24358 - DNA, 120 bp, synthetic construct
  source 1..120: mol_type = other DNA
atgatgattgtgtgtcattaaagcattggtggtaactgggatactgtatccaatgtaatcgtttcttgatgatccccaacatcatatgagccctaccgccaatttaatgtccccctgccc

SEQ ID NO: 24359 - DNA, 120 bp, synthetic construct
  source 1..120: mol_type = other DNA
attagcaagcaaagggcctaacaggttctctggacaaactcacactggtatagaaatactcccaataacaaattcattggtattcgtccagtatttcagctgtactcaggtctccagtga

SEQ ID NO: 24360 - DNA, 120 bp, synthetic construct
  source 1..120: mol_type = other DNA
caagagtgaaccctgataatgtgacaatgatgtgtcaatggaggttcattaattgtaacaaattaccactctggtgggggacactgataatagggttcgtctcaattttgctgtgaaccc

SEQ ID NO: 24361 - DNA, 120 bp, synthetic construct
  source 1..120: mol_type = other DNA
aaaacattgcaaagaacaagtttacccagcacttagcaaatcattttcagtaagcattccttaagaattaccagtactcggaggagccaagatggccgaataggaacagctccggtctac

SEQ ID NO: 24362 - DNA, 120 bp, synthetic construct
  source 1..120: mol_type = other DNA
tcagcgaaagctttggctaactttctcaaaccactcttataataagcagatgttcttgttctttcaccctccagaaagtcaacagcaaaatgccttgaccaatgcccaaaaccattgcca

SEQ ID NO: 24363 - DNA, 120 bp, synthetic construct
  source 1..120: mol_type = other DNA
aataaagtagagattttccagttaaaaatataatactgaaatagctaaaggagtaaattaaaataatcaataatactaaaaaaaaacccctctcctaacaaatagtgtacctccagtaca

SEQ ID NO: 24364 - DNA, 120 bp, synthetic construct
  source 1..120: mol_type = other DNA
attgtcagtgaaacttcaaagacagtcaggaggaagctgacctagctccacaacccccatgcaaacagaactgagaggaatcattacctctatttaccaaaccataagtatgctcattcg

SEQ ID NO: 24365 - DNA, 120 bp, synthetic construct
  source 1..120: mol_type = other DNA
ttaagcatatgcagatgaagagggtctgaacagaaaaaggagagccaaagtggggggaaagaatttgaagaaaaatattctgatcatgggccattaggataatgatggtacttgagacag

SEQ ID NO: 24366 - DNA, 120 bp, synthetic construct
  source 1..120: mol_type = other DNA
tctcaccggcaatcgcattcttgcttccaaatccggctgataatttaggaaggttttatgtcaccgctgctcggcttctttttgtgctttgattacctattctcatacaacacttaaagg

SEQ ID NO: 24367 - DNA, 120 bp, synthetic construct
  source 1..120: mol_type = other DNA
cttagcaaagtatgtaagaacagacaagttttttttgagcccatgagaagaactctgacaagctggcaaaggccaaagagtaagtgtccttcatgtgcttgtgacaagagactatgtcag

SEQ ID NO: 24368 - DNA, 120 bp, synthetic construct
  source 1..120: mol_type = other DNA
ggattttctttcaccttcacaacctctgagacagcaacaccaacccctcctcttcctcctcctttacagcctacttaatgtgaagacgataaggatgaaaagtctttacaatgatccatt

SEQ ID NO: 24369 - DNA, 120 bp, synthetic construct
  source 1..120: mol_type = other DNA
aggtacaggaaaatgtgtcttaagaaggaaaattcattctacagccccgagatgattctccacttggaagcaaaattgaaaacattcaatcctgtcttcagatcaccactggtttggggg

SEQ ID NO: 24370 - DNA, 120 bp, synthetic construct
  source 1..120: mol_type = other DNA
ccagcagcccacactggccaaaacatcaccatcattgctatcatcatcatcataggatattgatagtctagtctctcatgttccccttgaaatcactgcaaaaggactcaaagttccaaa

SEQ ID NO: 24371 - DNA, 120 bp, synthetic construct
  source 1..120: mol_type = other DNA
acgcaatcgattctctatacaacattgaaatggaagggagaaagaagcaaaggaaaacacgctgaatagaatataaaaaagaaaatattttaactaagtccagctgtgtcaggaatcagg

SEQ ID NO: 24372 - DNA, 120 bp, synthetic construct
  source 1..120: mol_type = other DNA
tgggcgcgagttttcacaacacggggaatttgtcatggttgagtctgctgtcgtttgaaatactgcttagttctttaagatataattaagtagaatcgcagaaaagagaccttcgttggc

SEQ ID NO: 24373 - DNA, 120 bp, synthetic construct
  source 1..120: mol_type = other DNA
agatgcatttaggaggtagaatcttccagaattttgggcgtcaagaaaggaagtgaatgggttaggaaaggggtggaatcaaaataattcctaggtttggggatttagtctgctggatgg

SEQ ID NO: 24374 - DNA, 120 bp, synthetic construct
  source 1..120: mol_type = other DNA
ttacccccttctgtgatcttattatttcatgtaaaccactgagatttcacgctgaaataattatcattagtccaaggtgcacacacaagaacaagggaaaaagctactttcagggtatgt

SEQ ID NO: 24375 - DNA, 120 bp, synthetic construct
  source 1..120: mol_type = other DNA
tattgattgtgattaaactattatcatagtaatgagggtagtaatgcctcctacagcccatcccaccatactcctcaaagtccctaccttttattaaacaaagggctgctggcactgctg

SEQ ID NO: 24376 - DNA, 120 bp, synthetic construct
  source 1..120: mol_type = other DNA
aagagagatggatggttttataagtagagggagaaaataaaacaaaacaaaacccccaacttgaatcaactgtatttctttggaaggacggtgtcatacacggctcctcaagctggcacc

SEQ ID NO: 24377 - DNA, 120 bp, synthetic construct
  source 1..120: mol_type = other DNA
caaaaccgttggcgatttccactgagacatgtgtaagcctatataagcaaatgtgatcattaaatgatacacacactgaataatgatcaaggaattagaagatcttagagatggcagccc

SEQ ID NO: 24378 - DNA, 120 bp, synthetic construct
  source 1..120: mol_type = other DNA
ggcactgcagaactcaatgggtgccattcatatttttgtgtatgtgcaaggtgtttcctgtattacacagtctccatagctgattgtagtggcttgttcttttagaacctggtagatgta

SEQ ID NO: 24379 - DNA, 120 bp, synthetic construct
  source 1..120: mol_type = other DNA
agaaaaatctatgggtaaaacaaccttgttctctgtgtttggggagcatctgcttgatcacagtcgcatctctgtttactatttaaagcctcttatttgcggaagcctcctcagaccata

SEQ ID NO: 24380 - DNA, 120 bp, synthetic construct
  source 1..120: mol_type = other DNA
cagagatgaaggctttggtttgcctccttgacatttccactggaacgtctcctctccaggagtctgagatcaaatgtgtccaaacctcagcttgatctcttctccctcacatctgttcct

SEQ ID NO: 24381 - DNA, 120 bp, synthetic construct
  source 1..120: mol_type = other DNA
gaaaggaattggaatgtccagttgtgttggggcttggcaaagatactggacatactaaggccatctttctattgaatgattcacgggcatctttagaaaactagctagcatggttcctta

SEQ ID NO: 24382 - DNA, 120 bp, synthetic construct
  source 1..120: mol_type = other DNA
gtattgagaattatttatataccaggcccgtaagttcctggcttgcacagtaactcagaaagattctaagttcctttcagcagggaccatgtttacctgtttcaccactgtatccacaga

SEQ ID NO: 24383 - DNA, 120 bp, synthetic construct
  source 1..120: mol_type = other DNA
tagttcacgacttagttccagttcacaccctgagctactatattggatataacacatcttccttaggtgttacttactgagctgaaagtattgcccaaagcatcttattttgtctgtatc

SEQ ID NO: 24384 - DNA, 120 bp, synthetic construct
  source 1..120: mol_type = other DNA
ccgaggaaaagatgacaaaaaaactgaggatacaataaaatcagaaaataaaggcaggtgaatatgggaatgctgaattaaaagggcaagggagaaactaagttaagtggatggttagga

SEQ ID NO: 24385 - DNA, 120 bp, synthetic construct
  source 1..120: mol_type = other DNA
tgttatgaagatatgcttatctaaacaaaactggcctttggccctgagaagaaggtgccttgtcattcattcattcatttacccctttaccccacaactacatattgttgtgggtgctgg

SEQ ID NO: 24386 - DNA, 120 bp, synthetic construct
  source 1..120: mol_type = other DNA
acactgaaattgtttcagtgttgaaggttttaggtagaggagccatgtgctccagtttgcaatttaagacaccttgtgtgatattatgtacctaatgcttcccaaacaggattttaagtg

SEQ ID NO: 24387 - DNA, 120 bp, synthetic construct
  source 1..120: mol_type = other DNA
ttcttggtttgtagttactcattacagtttataagcataacagtccaatataaacacagaagacatggtgtgccgattcttcaacgcaccgtctttgagagagacatgatccccacggaa

SEQ ID NO: 24388 - DNA, 120 bp, synthetic construct
  source 1..120: mol_type = other DNA
tttttctctttggatactgtcctgggactaagtgtagatttctgcttcaagcacttctggcattgtgtgtttttgtatgcactccccttcatgccacttcagatgtttatttggatgtgg

SEQ ID NO: 24389 - DNA, 120 bp, synthetic construct
  source 1..120: mol_type = other DNA
ttgccatggtcacacaatgagaattattctgaaaggcaagagactcccaatctgtaaaatgtcaggttgtgggatggggacctcagctgtctcacctgtaatacaactagattgattaaa

SEQ ID NO: 24390 - DNA, 120 bp, synthetic construct
  source 1..120: mol_type = other DNA
acacaggtatttaaatgaagcagtagggaaatccagagagctcctaatctcaacacataacatatgttacatttgggttttgtttttggggaggagccaagatggccgaataggaacagc

SEQ ID NO: 24391 - DNA, 120 bp, synthetic construct
  source 1..120: mol_type = other DNA
ggccccatcccacctctttaagggggctgaactgggattaaaacccaggttttcctactctggaagctaagctctaaaattttacactacctggcttcatatctcattctgcatcaagca

SEQ ID NO: 24392 - DNA, 120 bp, synthetic construct
  source 1..120: mol_type = other DNA
actcaacagtaagctaagaagttacaaaattcccctacagcatccttgactcaagtggattggaatggggtatctaattctgaagcaatgcaagacactgaatgcccacctttcaatagc

SEQ ID NO: 24393 - DNA, 120 bp, synthetic construct
  source 1..120: mol_type = other DNA
acaagaataggggaaaagccaaacccttacaaattttccctaaaggagtggttctcataatgtgatccctggactcagcatcagaagcccagaacacttgctagaaatgcaaattagaga

SEQ ID NO: 24394 - DNA, 120 bp, synthetic construct
  source 1..120: mol_type = other DNA
gtaagaagtcatttactgagcacctattacaaatctggtaatatgccaggcgctaccacccatcactgaccaatcactgaactaggacttaggtaagcaccatcaataaaacccttaaag

SEQ ID NO: 24395 - DNA, 120 bp, synthetic construct
  source 1..120: mol_type = other DNA
tatatttcatcaggaaggtgggtacattttaatatgttagttatagaagagggcaatctccaaagtaccttacaccttcaaagtctcgtgcggggtgtgtgtgtatctgtgtggtgtgtg

SEQ ID NO: 24396 - DNA, 120 bp, synthetic construct
  source 1..120: mol_type = other DNA
aatggttttctgccagataaactgtctgtacttccattgagattaattttcttatcatatttactgctgtctacatatagctcttattttaattttgtcttttctagttacagttactcc

SEQ ID NO: 24397 - DNA, 120 bp, synthetic construct
  source 1..120: mol_type = other DNA
tggagtacaaacatgggtagtaaaatgataagaaaataccacaattaaggatagtaccaactctgggaagaaggatgaacttttgctgaggaagagcctagtaggggtcttctggtgctg

SEQ ID NO: 24398 - DNA, 120 bp, synthetic construct
  source 1..120: mol_type = other DNA
tggcatccttgcatctttttatcgtgaagtatctgttcagtctttttctcatttttaattgtacggtttctttgggagtttcgaaagttctttatatatttggaatgctcatcctttgcc

SEQ ID NO: 24399 - DNA, 120 bp, synthetic construct
  source 1..120: mol_type = other DNA
aggcatgcatcactacacctgagagatcactgtactttttactaccacatactcacagtaagaaaaaaaaaattggggaaggcagccaagatggccgaaatggaacagctccggtctaca

SEQ ID NO: 24400 - DNA, 120 bp, synthetic construct
  source 1..120: mol_type = other DNA
gaaaggcaaagacctgaacccagtgtttttacttgtggtgtagtggtctttgaagatgagagtctgataaaagagaattctaaagtagcccacacagaagtcaacaagccataaggggtt

SEQ ID NO: 24401 - DNA, 120 bp, synthetic construct
  source 1..120: mol_type = other DNA
ggttataatgttgtataatacattgagtaggtcttgaagattttggctaatgggtttgggtgaaacatggcacggctgctgctgttgtggacaaaggtgacagtgatcatgatggtagtg

SEQ ID NO: 24402 - DNA, 120 bp, synthetic construct
  source 1..120: mol_type = other DNA
agtggtggtgatgatgctaatggaagtggtgatggtggtggtgatgatgatggtattggtaataataatgataactagtgtttattatggttcggaagctctacctctccctgagtcctc

SEQ ID NO: 24403 - DNA, 120 bp, synthetic construct
  source 1..120: mol_type = other DNA
ctgacactcttaatttccaaaagctcccaggtgccactgtgggtctttgggactgcattttgaatggaaaggtgctagggtatttttaatgacatcctaacgaaattatgccattaggga

SEQ ID NO: 24404 - DNA, 120 bp, synthetic construct
  source 1..120: mol_type = other DNA
tttggagcctgaagttaaccagagtgaaatagctcaacttttactgcaaaaactcaaaatgaattgttaactatttaagaaatgttacaagtaggatgatggagttccttttctaagtgt

SEQ ID NO: 24405 - DNA, 120 bp, synthetic construct
  source 1..120: mol_type = other DNA
gattacaggcctgatccaccatacccagcctgtggagtattttttaaagcaagctccatcggttacaaatcccagtatgctgaagttttattctaccaaaggtctgatgtatttgaaagg

SEQ ID NO: 24406 - DNA, 120 bp, synthetic construct
  source 1..120: mol_type = other DNA
caaggtggtaccaaatgatgtagtgtacaaatacccacggacttagtagtatggaaatgcattctgtaaatcattttagtcactaatgtgctgtgtgttttaacagccaatactcccagg

SEQ ID NO: 24407 - DNA, 120 bp, synthetic construct
  source 1..120: mol_type = other DNA
ttatgaccaaagtatctgggcagaccgcttctcagaaacttgatcacgatgaagataggaataaacggagacagagaaagtttgtcatatgtgaattaatgctcagccgtgggaggataa

SEQ ID NO: 24408 - DNA, 120 bp, synthetic construct
  source 1..120: mol_type = other DNA
tcttcagaaataccagtgtaatacaagccaaaggaagactggcctgctcttgattataaaggagactttagagttatacccactaaatgcaatgtgtgaccctgaattggctctaggacc

SEQ ID NO: 24409 - DNA, 120 bp, synthetic construct
  source 1..120: mol_type = other DNA
ttacctctcttgcctcacacactggagaaatgagagggtttgaaatgtgcttaacatagcaggtggcatgtagtttagcagccaatgagtggcggtgactattagaatattattatctct

SEQ ID NO: 24410 - DNA, 120 bp, synthetic construct
  source 1..120: mol_type = other DNA
ctctttgatgtaggcactataattgtccacattttacagcagaaaaaaatagagctttagagaactcacataaccagtaaaaggtgagttacgatttgaattcaggcggtttgagttcat

SEQ ID NO: 24411 - DNA, 120 bp, synthetic construct
  source 1..120: mol_type = other DNA
tgactgtgtgctgggtaagcgctgtgctaagtgctttatttgcattgttctgtttattcatcacagcaaccctgtgaaggagatgctgtcattatctctgttttgaagatgagaaaactg

SEQ ID NO: 24412 - DNA, 120 bp, synthetic construct
  source 1..120: mol_type = other DNA
ctttcccttcttttttcttttccttttcctttcccccttcctttcacttcctttcctttccctttttccttttccttcctttctgcttttctttctccattcccttccctttgcccttcc

SEQ ID NO: 24413 - DNA, 120 bp, synthetic construct
  source 1..120: mol_type = other DNA
ggtcaagagatcagtagctatcatgttatgtctcaccttccagaatatgagagttggccctaactatcggcaagtattttaactgagtaaatgccaaaggaacacgagtggaactctcaa

SEQ ID NO: 24414 - DNA, 120 bp, synthetic construct
  source 1..120: mol_type = other DNA
tcggttcaagatacccaggtgactatgaaaggacactcctgattcaaaaaagttggaagaaggatttgcttaaaaataaaaatctctaaaccgaaaacatttggcatgtcatacacttga

SEQ ID NO: 24415 - DNA, 120 bp, synthetic construct
  source 1..120: mol_type = other DNA
tctctgttaacagtggcacagtattgacagatgggatttttatcctgaagaaccaagcttggcctctgtaacagttacagcttattaatctggagctgcagaagaccagaaagctgttac

SEQ ID NO: 24416 - DNA, 120 bp, synthetic construct
  source 1..120: mol_type = other DNA
catcctgaaacgtatttacctgctattcatcggcaagattttaataagcagtaagtaaagaggaaggaggagtgccttctgggctagtccaaaactgttgccagattaattcattacagc

SEQ ID NO: 24417 - DNA, 120 bp, synthetic construct
  source 1..120: mol_type = other DNA
aactagtcccaattcatatagctaatacatggcaaagcttaaagttgaactgcactgcccattctagaatccaaggtcttaaccaccatgttacacggtctccctaagattgagaccaca

SEQ ID NO: 24418 - DNA, 120 bp, synthetic construct
  source 1..120: mol_type = other DNA
cttgaggcaacattccatcactttttattggctgactgcattcatttcctgattccgatatggtgcaaattcagtgaggcctccaatcaattaggactccatatgctatatctgtaagcg

SEQ ID NO: 24419 - DNA, 120 bp, synthetic construct
  source 1..120: mol_type = other DNA
aggtcttgtgagattgggcatgtctcacacccacgaatacagccctgattctaagtgttttatttctccgaaactttactccctgtacttcaactgtattcatctccgtataaggttcaa

SEQ ID NO: 24420 - DNA, 120 bp, synthetic construct
  source 1..120: mol_type = other DNA
taatgtgccgcctgtgcacatatgcagtaagagtttaaaaaaaggaggaatttcagtaggtgctttgtcttctgatgtacaggaatgactgcccaaattcatacacagggcttcgtcttt

SEQ ID NO: 24421 - DNA, 120 bp, synthetic construct
  source 1..120: mol_type = other DNA
actgaaggaaaactatgggagggtctgggttctgtctgtcttcaccctttttggtgaagtgtggggaggaagaacagcaggaaaagaaattattctttaaggaaaaaaacttcttggaca

SEQ ID NO: 24422 - DNA, 120 bp, synthetic construct
  source 1..120: mol_type = other DNA
cttttgcattctgtaagccttgggtcaaccacatctctacttgatggggctcgattagcttgcaattcctgaaagcagtgaaacaaatagtgcacttccggaaagaatctccttatttaa

SEQ ID NO: 24423 - DNA, 120 bp, synthetic construct
  source 1..120: mol_type = other DNA
agaaagaaagaaagaaagaaagaaagaaagaaaagtcgtcacaaaacgcatgaatatctatacaacacattgggggagaataaatgacaaattatcttctctatatatttgtagacaagt

SEQ ID NO: 24424 - DNA, 120 bp, synthetic construct
  source 1..120: mol_type = other DNA
gcctgggcaacagagtgagactccatctcaaaaagagcctgaattggttttattgcgagcaacctagcatcctgagagtaacacaaagtaactaaaacatggtgaggagttgtttttttt

SEQ ID NO: 24425 - DNA, 120 bp, synthetic construct
  source 1..120: mol_type = other DNA
cagggttgacagcgggatttaagtatgtgcagattttggtatacacaggagtcttggaaccagttcctaaagtataccaagggatgactctgctgtcatagtcgttatgttatgttatgt

SEQ ID NO: 24426 - DNA, 120 bp, synthetic construct
  source 1..120: mol_type = other DNA
tgtatttcccagtttctcttgcagttaaatgtggccagggaatgaatttctgattagtatggtataaggaagagtgttgtatgggacttctgggaagactcttaaagggaaggaagtgta

SEQ ID NO: 24427 - DNA, 120 bp, synthetic construct
  source 1..120: mol_type = other DNA
gtccaggtagccttgactgtcagccttcacagtgaccaaccaaccaatgaacggccaaccaacaaacaaaaaaattctttttcagccacttttactttcaaaattttatttataacatga

SEQ ID NO: 24428 - DNA, 120 bp, synthetic construct
  source 1..120: mol_type = other DNA
ttctatgactctccctataaaggtctatgtacaaagatcttctctgcagtgctatttacaaaagaaaaaggctgcaaacaacctaaatgattcttgaaagaatatggtttatctgaagcc

SEQ ID NO: 24429 - DNA, 120 bp, synthetic construct
  source 1..120: mol_type = other DNA
aaaattctgcctgcaagagccacatgttccagtttgtgtctttccctttgaccctctgacttcttcaccacatccagatcccagtggctgcctttttgttcttcatatgcgtcaagttta

SEQ ID NO: 24430 - DNA, 120 bp, synthetic construct
  source 1..120: mol_type = other DNA
cctttttacgtcattacaagactggaagcacacatcaaaattgtgattccatcaacttgggtctctgtgtaactacaatgggcagattccatctgccacttatggtggatatgcagtatg

SEQ ID NO: 24431 - DNA, 120 bp, synthetic construct
  source 1..120: mol_type = other DNA
aaaccaaaaactccaggacctcactccactcagttacatctatcctgaacttttcaataaagaaagtcaatacatttggaagggagtggaggatagaggcttgagccaatttgacttggg

SEQ ID NO: 24432 - DNA, 120 bp, synthetic construct
  source 1..120: mol_type = other DNA
tgtttgctaatggacaattccaccagtctctagcactattaaacacatagtactagggttagatatccaaaactgtatttctttttttctttttttttttttttttactttttttttaat

SEQ ID NO: 24433 - DNA, 120 bp, synthetic construct
  source 1..120: mol_type = other DNA
atttggggatgggaaatggcttagtgcccttaggggactttgagaaatgtgttcactcatgacactggcagaagagcttcacatgaaagactgattctcaaaaatgcatgagagatagac

SEQ ID NO: 24434 - DNA, 120 bp, synthetic construct
  source 1..120: mol_type = other DNA
gtgaaatccaggagacctgtgatgcccaccataggggaagttccagggcttgcactgggcgcagcaagcggcataggtctcgggccctagaagtccaaacaccgtcacttcgaaaaagct

SEQ ID NO: 24435 - DNA, 120 bp, synthetic construct
  source 1..120: mol_type = other DNA
gtggggttacaggcatgagccgctttaccaagaaattgcttctcttttaattcggaaaaggttgtaggctcttccagcctgaacccatggagtactaacatccacaaaccattaatagca

SEQ ID NO: 24436 - DNA, 120 bp, synthetic construct
  source 1..120: mol_type = other DNA
agaaagggaggaatggagcgagaaaaggacagatggacagagggatattggaaaggagaaagtagggagggggaggaagggaggtggggggggagggaggaagggaaggacagagagaga

SEQ ID NO: 24437 - DNA, 120 bp, synthetic construct
  source 1..120: mol_type = other DNA
ggaagatagcaaacgtgatggaaaaatgttgtgtttgactgcttcattgactagtcatttccctgtctctgtttctctcttctagctccccattccccaagatacaacaatgaaattagg

SEQ ID NO: 24438 - DNA, 120 bp, synthetic construct
  source 1..120: mol_type = other DNA
tgacttctgggagaaagttttcctacattcattacatctaaagggtttttcccctgtgtgagttctgtgatgtacaaagagttttgacttctgggagaaggttttcctacattctttaca

SEQ ID NO: 24439 - DNA, 120 bp, synthetic construct
  source 1..120: mol_type = other DNA
catgcctagatgaatgatcctggacagtgatgaaagctaaatgcaatatttaaggaactgattatgcagtgattctgcatttaaatatttgacccaatttcaaaaattcttatgcaccta

SEQ ID NO: 24440 - DNA, 120 bp, synthetic construct
  source 1..120: mol_type = other DNA
ttgttcctcacataggattccagaaaactgctatgagggtccgaatgtttgcccttcaaatagtattccagaacactgctgctggtgtctgaatgtttatttctcacaaaggattccaga

SEQ ID NO: 24441 - DNA, 120 bp, synthetic construct
  source 1..120: mol_type = other DNA
tttgtccttcacatatgattccagaacactcctactgtgatcttaatgtatgttcctcacatgggattccagaacactcctgctgtggtctgactaaccctcacataggactctagaaca

SEQ ID NO: 24442 - DNA, 120 bp, synthetic construct
  source 1..120: mol_type = other DNA
catccttaatgtgaacagcttttaccaagatcacagttcgaggcttctctactatcatgagactcttaagtatctgtgcagctgctaacacttatggcatatggagaaaacatggggtat

SEQ ID NO: 24443 - DNA, 120 bp, synthetic construct
  source 1..120: mol_type = other DNA
aatgcgagtgacatgctaaaactggaaaccaaaacaatgggagtgacgtgctaaaaccggaaaccaaaaaaaatgggagtgacttgctaaaaccggaaaccaaaaacaatgggagtgatg

SEQ ID NO: 24444 - DNA, 120 bp, synthetic construct
  source 1..120: mol_type = other DNA
ccgggatcccccgggcccacgggttcctcttcgccctcgcaccgacccgcagggacatagaaccaagccccaggctggcccagctacaagaccgcctctgggtgccgcacttccggagga

SEQ ID NO: 24445 - DNA, 120 bp, synthetic construct
  source 1..120: mol_type = other DNA
tttataagccttcaatttacacagttacaaaaaatgctctagtgcatatactgggataaaataacagggtcataagacaggtgcactccataatctttgtgacaacttacacttccagtg

SEQ ID NO: 24446 - DNA, 120 bp, synthetic construct
  source 1..120: mol_type = other DNA
actctttttattattactttagcattagtgacattccatatttatcatttgcacatttaaatagtagggccaggctggtataaagcctttttaccgtccgggagggaggtggggggtcag

SEQ ID NO: 24447 - DNA, 120 bp, synthetic construct
  source 1..120: mol_type = other DNA
atgaatttttgcaaactgaacacatctgtatcaccagcacctggattgtgaaatagaccatgaaaagcaccacagaagccctctcatgccgtatctcaatctttaccaagagaacctatc

SEQ ID NO: 24448 - DNA, 120 bp, synthetic construct
  source 1..120: mol_type = other DNA
ttaaacgggtaagctgagactagatcaccccagacataaagtaaaattgacgtttaaacggggacactgaggctagatcaccccagaaattaagtaaaattgatggttaaatgggaagtt

SEQ ID NO: 24449 - DNA, 120 bp, synthetic construct
  source 1..120: mol_type = other DNA
tcaccaaagacataaagtaaaattgacggctaaaccgtcaaactgaggctagggcacgaagtcacacactgctgcacattggacttgcctcagatgttggttttttgtttgtcttgtttt

SEQ ID NO: 24450 - DNA, 120 bp, synthetic construct
  source 1..120: mol_type = other DNA
tcagtgttggctgagcctgagcttgtaaactccgatccatcctcagatttcgttttcaaatcaagctttattaagccaatccatagcccttggtgaagacatccctagcagatttgccaa

SEQ ID NO: 24451 - DNA, 120 bp, synthetic construct
  source 1..120: mol_type = other DNA
aggcgtgagccaccacgcccagctagtaatgtagttttatgactgatcaccttatgtactcttccaattctcaacttctattaataaaaaataaaagaatatagataatgcattagaaac

SEQ ID NO: 24452 - DNA, 120 bp, synthetic construct
  source 1..120: mol_type = other DNA
tatagctaattttcttcgcctgtattgcttctagtatgggctgactcacagagatgctgcattacacacaacaaagtgttccataatttgcaatatcctctcctcctccttccccttctc

SEQ ID NO: 24453 - DNA, 120 bp, synthetic construct
  source 1..120: mol_type = other DNA
ggtacacctggagatttgcaaggtttttcttccattttcccttaattttcatgatgtgaaatatctcatagatgaacagcaaggccaagacaacgtttttgtagagttgactgtatccct

SEQ ID NO: 24454 - DNA, 120 bp, synthetic construct
  source 1..120: mol_type = other DNA
aaaactttttaaaacttcatacccttaagggacagctttgcatacaggaacaacactaagaaagggaaccagatgccatctttattgagatctcaaagaacagcatcctatgggaagaca

SEQ ID NO: 24455 - DNA, 120 bp, synthetic construct
  source 1..120: mol_type = other DNA
tgcagtactgttggttcatatccacatgcacacacattctttgcttgggtctacagtgcaacatactacaaccaaacatagaacttagatatttccaagccatttgatgtaagagccagc

SEQ ID NO: 24456 - DNA, 120 bp, synthetic construct
  source 1..120: mol_type = other DNA
ttgtaaggctatatagctgccataatgattcctccaatggagctaggcaaagtaaatagaaaacgttctggaaaggattcaccattttaggtgacattttgtgactcatgggaggaggcc

SEQ ID NO: 24457 - DNA, 120 bp, synthetic construct
  source 1..120: mol_type = other DNA
tatatggcacctaagcacacgaaataatactctacattgcccataataaagggaatgtacattaaaagtatattgatatatcaggtaggcaaaaaaaataacttttggttagtttttttt

SEQ ID NO: 24458 - DNA, 120 bp, synthetic construct
  source 1..120: mol_type = other DNA
attaaattaaaaaaaaaaacaaaacatcaagaaacagtcaaacctgttgactctgttgtgctttccccatgcacagaatatccatctgcaaatgatttcatagttacttcactcagtaga

SEQ ID NO: 24459 - DNA, 120 bp, synthetic construct
  source 1..120: mol_type = other DNA
caccccagagggtatttgctaacttggaagtaaaaaatacactttgataattgatagatcagacagtcatatctgtaactcagtaatcaaacttactatcaccaatagcaggcaactaag

SEQ ID NO: 24460 - DNA, 120 bp, synthetic construct
  source 1..120: mol_type = other DNA
tagcaggggagaaatatttcctataaaaaaagtctgctctgtccagtgttctcataatagagacggtaatagctacaatgcattgactgtctgtgatgtcccagccacttaaccctcact

SEQ ID NO: 24461 - DNA, 120 bp, synthetic construct
  source 1..120: mol_type = other DNA
aaggagctcagtgcagatgaattgagtggtatctctccaagtatactgcccatgccaaaagaaaacaaagcaaagcaaagcaataaaaaagagaaccatgtgacatggaccgctgagtta

SEQ ID NO: 24462 - DNA, 120 bp, synthetic construct
  source 1..120: mol_type = other DNA
caagtatattttggaggaggaacaaatagttttttcatttagctacactgctttatttgaaggttaaactcagctttaaaactactattttatagggttaacattgttttgtctactggt

SEQ ID NO: 24463 - DNA, 120 bp, synthetic construct
  source 1..120: mol_type = other DNA
actggttattgcagctaatgaactaatgctaaaacagtattactatctgtagttttactcagaaaacatacaaacaaaggaatattctttaatacatgggaaggtagccttgtatttgtt

SEQ ID NO: 24464 - DNA, 120 bp, synthetic construct
  source 1..120: mol_type = other DNA
ttaactcatactgtatgggtagacaacatcacaggccatatacattctgagtacagttgtcatctgatttaataactcttgtgtgttttattgacatatagggagaatgggagccactta

SEQ ID NO: 24465 - DNA, 120 bp, synthetic construct
  source 1..120: mol_type = other DNA
tcacttatgcctgagtcatatttgagaggtaaaaacaagccaaaataattacttacatgtgtttactggctgacaaattggtgattttactggtagttgtataaaacaattcttggcaac

SEQ ID NO: 24466 - DNA, 120 bp, synthetic construct
  source 1..120: mol_type = other DNA
aacccaaagctaaatttcatgtaagtacaactaaatctgtgtgctaataatgtcatactgatacttaatttagtagcctattcaacatcagtaaaatggaaactttaaattcacctaagc

SEQ ID NO: 24467 - DNA, 120 bp, synthetic construct
  source 1..120: mol_type = other DNA
aagcctgttagtttcactacactcctattactagtaagcacaacttaaaccacaaaaataacactgccaatcaaaatggtcaagaggatggaagactccaaggtgtaggcaaaaagcaaa

SEQ ID NO: 24468 - DNA, 120 bp, synthetic construct
  source 1..120: mol_type = other DNA
ctgaagtgactgaatcaccttaagacagagcagtgaaaagtctctgtatacccccggccctccgccaaaaaaaaagaacccagaaaaacaaagatcaggtctagcaaagtaaaatccata

SEQ ID NO: 24469 - DNA, 120 bp, synthetic construct
  source 1..120: mol_type = other DNA
ctggtacagagagagctaagatggtgtgattttgaaatctaacaggcatgacctgtgttctttctttgctgcgtgactttaaataactgatgctacctctctgagcttaaggtgtttcac

SEQ ID NO: 24470 - DNA, 120 bp, synthetic construct
  source 1..120: mol_type = other DNA
gccagagaaaggaggggcacagaagacagaaaagggaggaatctgaattgtacgttactatttataaatctatacatgagtatggagagagaagtggccataaaatcctgaacagcaatt

SEQ ID NO: 24471 - DNA, 120 bp, synthetic construct
  source 1..120: mol_type = other DNA
gactattgaaggctgagggggaggggtattgattagttatggtttattgggtacagagtttctattggggatgatggaataagttctgaaaatggatagtggtgatggtttcacaacagg

SEQ ID NO: 24472 - DNA, 120 bp, synthetic construct
  source 1..120: mol_type = other DNA
cttacacctgtaatcacagcaccgtgggatgccaggaaagtaggatagcttgcagtgagaaatttgagaccagactgggaatctttggagacatggtctctacaaaatatttaaaaatga

SEQ ID NO: 24473 - DNA, 120 bp, synthetic construct
  source 1..120: mol_type = other DNA
gaaaaaaagctgacctggcagtcagaaaccctagcttctgctgtcaactacaaaactaccccactccgtgtcttattctgtcacagattctctagctttaatataggaaaggaatttgtg

SEQ ID NO: 24474 - DNA, 120 bp, synthetic construct
  source 1..120: mol_type = other DNA
aactgttttagcctgtggctttgcctaaggataaatgtgtgccaccctggccaacatgaaggagaaatttgcagtagtaagagctcgacagtctaattaattatttagaggtttcaaggg

SEQ ID NO: 24475 - DNA, 120 bp, synthetic construct
  source 1..120: mol_type = other DNA
cacattgaggaaggatctttcttactaagtccactgagtcaaatgccagtctcttcccaaaacaccctcaaaggtatcctcagcagtaatgtcttaccagctatctatgtatcccttaat

SEQ ID NO: 24476 - DNA, 120 bp, synthetic construct
  source 1..120: mol_type = other DNA
atgtttccccaaaatatattttcttcttttacactcctctcttttagagaaaatcttctctttgaagccagagcagtggattttacaacctgtatatttcacttctttctatcttttgtg

SEQ ID NO: 24477 - DNA, 120 bp, synthetic construct
  source 1..120: mol_type = other DNA
cactttataattatgtcagatgtttatatcatacatgttgttttgaagtaacttgagagcaaacataaatttcttgccatagataccacataaacctaccactggcccttcaccatcctg

SEQ ID NO: 24478 - DNA, 120 bp, synthetic construct
  source 1..120: mol_type = other DNA
agttgttggaattccttgtacattttggatattccatgcggaacaagtaatttgcaaattttttccccttcaagaggttgtctcttcactctattgtttcatttgctgtgcagaagcttt

SEQ ID NO: 24479 - DNA, 120 bp, synthetic construct
  source 1..120: mol_type = other DNA
tccactaaaacctcaaaacctggaccatggcccttctctagagtacttggaataagtttcccaaagacttaatttgggaaggtcctaatcttggtagtcacaacaacctttgtagtgcta

SEQ ID NO: 24480 - DNA, 120 bp, synthetic construct
  source 1..120: mol_type = other DNA
ggagactaactagcccactttgtagcttaggcagcactgtgacctgttgccttgactgactccagtgttctttctgctaaatcaaattttatatttatttctttgtatgcaaacctgtgc

SEQ ID NO: 24481 - DNA, 120 bp, synthetic construct
  source 1..120: mol_type = other DNA
ttaagggatataatcaagtaacttgaccttaggaggagagtacagaaagttttcctgtgaaaatgcaaggtgttgaagtctgaagccggaacaagcattgactaggttagcgaggagtga

SEQ ID NO: 24482 - DNA, 120 bp, synthetic construct
  source 1..120: mol_type = other DNA
tggtccaatggctattaaccaataccacagttcatgtccaaacatgattctccaatctagtcttcacctagaaggtttccagcatttccagcatgagtcttggcactttggtcattgcat

SEQ ID NO: 24483 - DNA, 120 bp, synthetic construct
  source 1..120: mol_type = other DNA
atgctgcaattgaaaacagctgtggcttttttaacatgaagactaactttcaacaaagagaaagtatatgctatgagatgaaggaatacctgaatttattgtgcaccaggaacatgtaaa

SEQ ID NO: 24484 - DNA, 120 bp, synthetic construct
  source 1..120: mol_type = other DNA
aaaattaccatgtaaacgtgacttagaatatcaatagcccagtgtgtagggagacagggatgaagtgaggaagacaatatgattagatgcatgtagttgttatcaagtgtacattctgca

SEQ ID NO: 24485 - DNA, 120 bp, synthetic construct
  source 1..120: mol_type = other DNA
gagttgggttatctttagaataacactgggaatactagtagctcttcgatggggctgccaaaaggaccaaatgtgaaagcctacttcaggcaggtagtatatcttctgtgaataccaaat

SEQ ID NO: 24486 - DNA, 120 bp, synthetic construct
  source 1..120: mol_type = other DNA
aatttattccacgtgctttatccgtcccacccccatctctctttctatgtaaatgttacttatttctgaaccacttgcagatattatgaccttttcctcctgaacacttcagtgacaatt

SEQ ID NO: 24487 - DNA, 120 bp, synthetic construct
  source 1..120: mol_type = other DNA
tagattgttgtgaggagtaaataaaatgagagagcatttgtgactgggaaagggcttgaataagttgtgctctgtctccataatgatcatgcagatcttcccgtgtctgggggaaataga

SEQ ID NO: 24488 - DNA, 120 bp, synthetic construct
  source 1..120: mol_type = other DNA
aatctgacagctgtgcccacattcttagtcatcgttttctctgctattgaagcgtgtcatggaagggaagaagaatatgaattagcaactcaatgacaagagagactgggtttcttgaga

SEQ ID NO: 24489 - DNA, 120 bp, synthetic construct
  source 1..120: mol_type = other DNA
ttgaagagatgtatgtgtgtgcatatgtgtgtaaaatgaaatagagaaataatttcttcttaagttcacagaatttccactagccaggtattgaattcttctatactgttgtaaattgat

SEQ ID NO: 24490 - DNA, 120 bp, synthetic construct
  source 1..120: mol_type = other DNA
ggagctggaataatttgatactaactttgggcagaatcagttgtggaaaaaagactaaatggttgtgaaaattgaactgtgttcttgttcatcgttagtcttaagtacaggtagaaagtg

SEQ ID NO: 24491 - DNA, 120 bp, synthetic construct
  source 1..120: mol_type = other DNA
taaaggccatgtttgggaggataaaatgaaatttgtcctcttaatttagagagtttgatttaataatgtgattaattaaacaaattataggcttaccttaaatgcaatgctttctggtgc

SEQ ID NO: 24492 - DNA, 120 bp, synthetic construct
  source 1..120: mol_type = other DNA
ccgattacctgtgtgtattttgtacttctatatttcttggtttatatcggttctgattagagaatacatatattttttcacttcagacccttctctcattctgaacatctccgcaactga

SEQ ID NO: 24493 - DNA, 120 bp, synthetic construct
  source 1..120: mol_type = other DNA
caaacgtatcgattcaaagtttttaataaagtctgtggtagctcagcccttgaattagtttgtcaacctttgctactcaaaacatttctcagtgaaaagagacaaaaagcagttggttct

SEQ ID NO: 24494 - DNA, 120 bp, synthetic construct
  source 1..120: mol_type = other DNA
ggattttgtccaagttttccccacactctctgccttctgatcaatcctggtgcttcctcgtgtgacccttttgtttctaaagatctgtgaatatgaaaacttccttcatgactgtcattt

SEQ ID NO: 24495 - DNA, 120 bp, synthetic construct
  source 1..120: mol_type = other DNA
gtacactaagctaaggaaaattggcataaactcaatatgccaaggaaagtcaacagtggaaaagtatatgcattttaaatatgatcaaattgcacttcagaaaaatcaaagtagatcatt

SEQ ID NO: 24496 - DNA, 120 bp, synthetic construct
  source 1..120: mol_type = other DNA
ctgaagatacaagtcaattcaagcaaaccctgtataataaaatacagaggaagaatggtcatttatatgaaaagggtgggggaggagccaagatggctgaataggaatagctccggtcta

SEQ ID NO: 24497 - DNA, 120 bp, synthetic construct
  source 1..120: mol_type = other DNA
tataatctgtgtcaggaaggatttggaggaaagagaggctgcgagggcttaaaaataagaagacatgatagataaaggttgggttttgtggggcagttgttggggagaggtttgtaatct

SEQ ID NO: 24498 - DNA, 120 bp, synthetic construct
  source 1..120: mol_type = other DNA
acctttcttcaaaattctcctctctataaactttgacatgcctcctatttgctatatttcaagcacattgtcaattttgatggaattatatcagctataaagatgttatagatatcagat

SEQ ID NO: 24499 - DNA, 120 bp, synthetic construct
  source 1..120: mol_type = other DNA
gcttttaagcagggaaggacacaatccaatttacatttttgaaagctcaccctggttattgtgtgaagaatgcactgtagaaaagagtggaagtcagagagactagtgaggaagcttctc

SEQ ID NO: 24500 - DNA, 120 bp, synthetic construct
  source 1..120: mol_type = other DNA
tttctgttctgccattgacctattttctagtgattatttgtactgcttccttcctaaaacacaactagagaaacaatatcctatttattccagtctcccagtttttgtttgatgcttaat

SEQ ID NO: 24501 - DNA, 120 bp, synthetic construct
  source 1..120: mol_type = other DNA
ggggaggctcctctggccctgtgtcgttcctgagtgggtggttgtcctgctttgcttttttccattctctgtgagtagagttgttttcttttttttttttttttttgttttaaatttttt

SEQ ID NO: 24502 - DNA, 120 bp, synthetic construct
  source 1..120: mol_type = other DNA
attttaaatagccacttgcatcttaaggaaattaagaggacaaaagaaaagctgctgttttgtatgtatccacatatttaccagctgcttccctgccggcaggtgctctggttctgcact

SEQ ID NO: 24503 - DNA, 120 bp, synthetic construct
  source 1..120: mol_type = other DNA
gaaataagcaaggcatagaaagacaaatactacatgatcccactcacatgtagaatctaaaaaagacaaactcacagaagcagagagtagaacgggttgaagggggagttggagggatga

SEQ ID NO: 24504 - DNA, 120 bp, synthetic construct
  source 1..120: mol_type = other DNA
cctggatcatatcccaaacacacacagcacatatttttctccttcctgcttcctcctaccatggtctagattatggttgttctgcagggcaagtgactaccaaaatacacttgaaatttt

SEQ ID NO: 24505 - DNA, 120 bp, synthetic construct
  source 1..120: mol_type = other DNA
attctgaaaattttgacaagctcatgcaatcatgtaaccaccattatagtcaagacataaagcagttccatcacccgagatgttcctgctcacccttttgtagtcagttcctcccctcag

SEQ ID NO: 24506 - DNA, 120 bp, synthetic construct
  source 1..120: mol_type = other DNA
ttcttaaaatagcttcatttagagatgttaggggcagctgaaacaaggagctggtgtccctagtcacaacctgtcagtttaatatcatggctcagaagcagctgcctctgtatttttttg

SEQ ID NO: 24507 - DNA, 120 bp, synthetic construct
  source 1..120: mol_type = other DNA
aagataggagcacattggtttaatctcaaaggaggaagagtgggcagttttagatttagggccactcagcatctgcttttccctcttgagtctagagccattataaatccttaagagtgt

SEQ ID NO: 24508 - DNA, 120 bp, synthetic construct
  source 1..120: mol_type = other DNA
taatgataggtccagtttcttatgattaagaaacaccataaggtgatcttaatagctacttaagaaacattcgatacaatttaaactgatttgtttacctcttagaaaacaagaatgaag

SEQ ID NO: 24509 - DNA, 120 bp, synthetic construct
  source 1..120: mol_type = other DNA
gatactatgacacataaactacaaattagtttggcatttaattcttggcaatgacctttattcattgacattctatagacgaacggaaattttatgttgtgaaaataaagcctgagaagg

SEQ ID NO: 24510 - DNA, 120 bp, synthetic construct
  source 1..120: mol_type = other DNA
aactgaccaccattgcagtgcaaaccatggcgagcacaaagccagccagccttgcccctggaagtacctcacccttgcaccaacactgacaggaagtgaagccagacacaaagaacagca

SEQ ID NO: 24511 - DNA, 120 bp, synthetic construct
  source 1..120: mol_type = other DNA
caactcttatgagagacatacacattaagatacagtaaactcaaattttaccaaatagattcaatccaagacactaaacttctcccagacattatgctcaaactgtcaaaaatcaaaggc

SEQ ID NO: 24512 - DNA, 120 bp, synthetic construct
  source 1..120: mol_type = other DNA
acttgttcatatgaggcagtgtatcatgggtggttaagaacacaggtcttaattcagacagcttggcttctaatcctctgctgcttctaacctacatggccttgagcaaattattaagct

SEQ ID NO: 24513 - DNA, 120 bp, synthetic construct
  source 1..120: mol_type = other DNA
cattctttttaaatgacaatactaatggttgctattgagtacaagatgcagagattttgctggaggctggtaaattttctctgcaaaacagatatccccccaccccccacccccaaattt

SEQ ID NO: 24514 - DNA, 120 bp, synthetic construct
  source 1..120: mol_type = other DNA
attctcttcaattatccctcatgtccaatgaatatgagaagaaaatccatagtctaagattcagtcacctcccagatatggtcccacttatctccagagccaaattttgtacccaccccc

SEQ ID NO: 24515 - DNA, 120 bp, synthetic construct
  source 1..120: mol_type = other DNA
tacaaggaccctgaatcccagaatctggaacacgtttatgtgtgaaatagccgcgatcatttctgctaaatgaggaaggtaaaacgaaacgatgcaaaaagctaagacacaacatgtacg

SEQ ID NO: 24516 - DNA, 120 bp, synthetic construct
  source 1..120: mol_type = other DNA
ccctggggggcagcggaggcagaggcagtggcggcgggatcttcgccggggcccgcgggaggaggaggaggagagggagaaggaggaggggaagaaggaggaagaggaggagagggaggc

SEQ ID NO: 24517 - DNA, 120 bp, synthetic construct
  source 1..120: mol_type = other DNA
ttttgtttgtttgtttgtttgttttgacctcacctctttttctgctttatccatttcttaaaaaacaaaaacaatccttcccatagtgggggggtctgtggttggggggcagtgaggtgg

SEQ ID NO: 24518 - DNA, 120 bp, synthetic construct
  source 1..120: mol_type = other DNA
tgcgcaccaaaaaaaaaaaaaaaccacaaacatctaaaatgcttgtaaaaacaaagttacatctagtgaataaaagagttcagtgatggccaggggcggtggctcacgcctgtaatccca

SEQ ID NO: 24519 - DNA, 120 bp, synthetic construct
  source 1..120: mol_type = other DNA
cccggacaagtggtgagcactacattcgtgagggtgttcactgtaatgtccccttattcatgctcaccaataaatcatactcccttgtccaaaaaaagaatcaatctaacaatctacaac

SEQ ID NO: 24520 - DNA, 120 bp, synthetic construct
  source 1..120: mol_type = other DNA
gtggttatagcagtttaccaagcagtcatccttggtaaaggtaaggaataggaaggggtaggtactgactaaaagggagcacaagaagagttctagaatactggtaacattctacatcct

SEQ ID NO: 24521 - DNA, 120 bp, synthetic construct
  source 1..120: mol_type = other DNA
taagaatggtagcattttactaaggagaaggctgtcactccgcaggaatgatactactaaataagtgatcattttctcttctatgggccttggcagggggaaaaagtaaccagccttgat

SEQ ID NO: 24522 - DNA, 120 bp, synthetic construct
  source 1..120: mol_type = other DNA
gaatggtggttgtcagaggatggaaaagcggggaattgggagctattgtttcatgggtatagcattttagttgtgcaagatgaaaagagttttagagatggatggtagtgacagttgtac

SEQ ID NO: 24523 - DNA, 120 bp, synthetic construct
  source 1..120: mol_type = other DNA
ccccttactctttcacttctttttctactactcctgtttcatgtatgttaccatacttgatactgtcctatatggctctgaagctgttttcatttctttcaatcctttttctcccttgag

SEQ ID NO: 24524 - DNA, 120 bp, synthetic construct
  source 1..120: mol_type = other DNA
tatatatgttgcaactctatattatgtcttatttaggttcattttgtttcattttagtaacttatctgtgcttaaattgaatgtctcctttgcaatgcaaggccattgatctctcttctc

SEQ ID NO: 24525 - DNA, 120 bp, synthetic construct
  source 1..120: mol_type = other DNA
tgccatgctcttagacttctcagcctccagaaccatgagccaaaataaatctgttttctttataaatgttggagcctgtggtattccattatagcgacagaaacctgctaagactaagac

SEQ ID NO: 24526 - DNA, 120 bp, synthetic construct
  source 1..120: mol_type = other DNA
tttgacagcacaggagtagattgacgatgctacccactccctaaattagcaatctattctctaagtaaacagcactatttcttttttttttttttggatttatttttatttatttattta

SEQ ID NO: 24527 - DNA, 120 bp, synthetic construct
  source 1..120: mol_type = other DNA
gttatctgtcatcagatcaccttgggtcattagagaataaagcaaggactttctctctacaaattgctggtttgcgtgtgtgtgtgtgtgtgtatgtatgtatgtgtgggtctgtatgtg

SEQ ID NO: 24528 - DNA, 120 bp, synthetic construct
  source 1..120: mol_type = other DNA
agctactcttcctcttttggtttctgtttgcatggaatattttatactatcctctcattttcagtgtacatgtatttttataggcaaagagttcttctcataggcagcatatagttgggt

SEQ ID NO: 24529 - DNA, 120 bp, synthetic construct
  source 1..120: mol_type = other DNA
agcactcacatcaatttacacttctactctaatgttcccgttgttccaccctgttgtctacacttggtattgtcaatttaaaaaaaatggtatgctggtggttgtgtattggtatttcat

SEQ ID NO: 24530 - DNA, 120 bp, synthetic construct
  source 1..120: mol_type = other DNA
atatcacaggggtattgaggacaatccacatatataaatccttaggtcagggcttctgaaaaaagtcgtgtaaaaaaaaaataataaaaggtctcagctccaggtcatcggcctgcgatg

SEQ ID NO: 24531 - DNA, 120 bp, synthetic construct
  source 1..120: mol_type = other DNA
atcttccgctgcacagtgcactttcaaatcttttgcccattaaaaaatgaactttctgtcttgttcttactgatttgtatattctggatatgagttcttcattggaaatatttgtcttgc

SEQ ID NO: 24532 - DNA, 120 bp, synthetic construct
  source 1..120: mol_type = other DNA
aaggcagaataggatctttacagaatgtctagcccacaaccgttattttatagatgaggaaacatgaagcctcggcagggatagtttaactgatttcctcattaggagaaattaccgtcc

SEQ ID NO: 24533 - DNA, 120 bp, synthetic construct
  source 1..120: mol_type = other DNA
gaaaaattgatgaatgtcagaagcataaaacaacattggaaagaaactgagatgtttggaggaaattctggaacctcagggagatgccagtgaatttggctccatgacctaacacagggg

SEQ ID NO: 24534 - DNA, 120 bp, synthetic construct
  source 1..120: mol_type = other DNA
ctagaagtccttccacctatttcttcaccattaactaagccatcaatcaagaatgcccttcttgctttactgtgtagcttatgagctctctgagtgggtagtgtttctatctgtctcctc

SEQ ID NO: 24535 - DNA, 120 bp, synthetic construct
  source 1..120: mol_type = other DNA
tctgccgaaaaaaaagcattaaaaaaaaatttaactgacatacctgacaatgacatgtaaaaaaaagaaaacaagattaagggctctataaaaggtatatatgcaaaggtaaccaccaga

SEQ ID NO: 24536 - DNA, 120 bp, synthetic construct
  source 1..120: mol_type = other DNA
acatggaccaaaaaacacaagaatcacttttataagaaaggaagtatttaactctgaacaattaaatatacttaaacaaaatgcaaagagaaatagaaacatactagtagtaggagactt

SEQ ID NO: 24537 - DNA, 120 bp, synthetic construct
  source 1..120: mol_type = other DNA
tccacatcctctccagcacctgttgtttcctgactttttagacaattcttaagtaaacatgaaaatataaactgaaattacctcattcctaaagtaacaaaacactacataccagaatgt

SEQ ID NO: 24538 - DNA, 120 bp, synthetic construct
  source 1..120: mol_type = other DNA
tcatacagtttctagtttgacttcttttgaaggtgataattttcctgcatgattgcctgaattttgaaaaaaattggtaaagttggctgggcacagcagctcacgcctgtaatcccagca

SEQ ID NO: 24539 - DNA, 120 bp, synthetic construct
  source 1..120: mol_type = other DNA
gcctatccaaaagccagtcattgcagtgctaatacaccatgaaggttcaggattcaggaagagagtttgctgatgacagtccttggcactacgaacttggaattgtagactatttaacat

SEQ ID NO: 24540 - DNA, 120 bp, synthetic construct
  source 1..120: mol_type = other DNA
atgtggattaagatcccagaggcaaggcagacaaagatctgcaacatatgcatttatttagtgcaaattcttttagcgatatagagtaagcaactattgggagtagaaaatagcctttga

SEQ ID NO: 24541 - DNA, 120 bp, synthetic construct
  source 1..120: mol_type = other DNA
gcggctggccggacggggggctgaacccccaactccctccctagagcccctccagctagttaatattaaatattcttttgtgctttgataattcattaagatctttaaaaatatttgtca

SEQ ID NO: 24542 - DNA, 120 bp, synthetic construct
  source 1..120: mol_type = other DNA
agtttacaatttatttttgctgaatggaactaactttggtgcaactaatggtctagggaagttggcaaaggctggaatgtcaggaagaaagctacattctacacccaggcccctaagtga

SEQ ID NO: 24543 - DNA, 120 bp, synthetic construct
  source 1..120: mol_type = other DNA
ataaaaactgttgttaagcgtagtcaccctactgtgctattagacactagaacttgttccttctatttaattgtatgtttgtacccctgaatccacctctctttctcgccccctccccca

SEQ ID NO: 24544 - DNA, 120 bp, synthetic construct
  source 1..120: mol_type = other DNA
aaactaataaaaatagaaaaacatatatcagacattaagctcactccccccccccccacccttccctttgtaaagaactctttgttctctagtgaaaatgctgaaaaatccccgggcagc

SEQ ID NO: 24545 - DNA, 120 bp, synthetic construct
  source 1..120: mol_type = other DNA
caagcatggtggtgatggataaaagcatagaaaaaaaactcagaaaattattttgactgaagacttttcattacttttcttatgtgtccttgagtagcttataaggactaggctgaaggc

SEQ ID NO: 24546 - DNA, 120 bp, synthetic construct
  source 1..120: mol_type = other DNA
tctttctgggtggcatcagtttacaatgcatagcattgttgagggtcaaagttattttattttggtattactattggatttttcccccagtgcctcaaaggggaatgttgagtcatggag

SEQ ID NO: 24547 - DNA, 120 bp, synthetic construct
  source 1..120: mol_type = other DNA
gcaagacacatcataaaataagccaaaaaaaatctctctcttccagctcattgtatattggagagttagttgacttttctactgtaaatgtaaagaaaacaaaagtttcattcatcctcc

SEQ ID NO: 24548 - DNA, 120 bp, synthetic construct
  source 1..120: mol_type = other DNA
aacatgtcatttgctcttagcactgttgttctccttcacccattttggcttcttatcctcaaatccctgattccttattaaagtggattgttaatgcagccattctttagcaccacagca

SEQ ID NO: 24549 - DNA, 120 bp, synthetic construct
  source 1..120: mol_type = other DNA
gtggggaggcttctacatacttagctactaagcacattaccattccgtttgtggaatggactaaacgtgacaatgcgagctgtagggttagcattcccaacattctgttttaaagttttt

SEQ ID NO: 24550 - DNA, 120 bp, synthetic construct
  source 1..120: mol_type = other DNA
taaacctgttgtggcaaagttactaactagtctacactaactctcagtccttgctcaaagcaaaataatggagtttggggtgcaatctggtgaactcaatggtccaactgcataaaggca

SEQ ID NO: 24551 - DNA, 120 bp, synthetic construct
  source 1..120: mol_type = other DNA
aaaatcctgaaacatcacatacattgcttaaagatgtaagtctgaggatggagaatgtgatggaactccgtcaccttgttgtataagtgtgtccggaattggtgggttcttggtctcact

SEQ ID NO: 24552 - DNA, 120 bp, synthetic construct
  source 1..120: mol_type = other DNA
caggtgtgagccaccgtgcctggcaaaagaactagatgtcttgatgagcggattctaccaagctttaaaaaattaatgcccatccctctcaaacagttccaaaatgtttacaagaatgac

SEQ ID NO: 24553 - DNA, 120 bp, synthetic construct
  source 1..120: mol_type = other DNA
catatatagtaactgaagccagaaaattgggtaagatcaatcagaatatggtatcatcgaagtcaagagaaaagaatgaggatagtggagggaaaaggaggggaaaggaggggaggttgg

SEQ ID NO: 24554 - DNA, 120 bp, synthetic construct
  source 1..120: mol_type = other DNA
tactactgcagtttccaatatgagatattttgttttcttatacagtttcattgcttctctgcgcactctgctccccattcccctcataccctaggtatgaggtcttcaaaccagactgca

SEQ ID NO: 24555 - DNA, 120 bp, synthetic construct
  source 1..120: mol_type = other DNA
tggtgatctctctgagctcatctatagcccggacctctctccccactccagacaattgcttactctacatctcaacttggatatctaatagatacctcaaattaaatctcttgaaaacca

SEQ ID NO: 24556 - DNA, 120 bp, synthetic construct
  source 1..120: mol_type = other DNA
gctgcataggaatatggctcaccttccctatattttactagctaccttcttggatgagaatttgttttctctcctatgtcagaatctgctataaacactcttaaccatccccaagctgaa

SEQ ID NO: 24557 - DNA, 120 bp, synthetic construct
  source 1..120: mol_type = other DNA
gttttctgacaaagacatctatatgcagagagccagctctctcggcaagacatttcctaagaaatccttctggtgatgtggtaacaccaagctttgtggtactcataaaatttctgtcta

SEQ ID NO: 24558 - DNA, 120 bp, synthetic construct
  source 1..120: mol_type = other DNA
tcatggccactcttagaatgatggtgatggtccactgattgtcacatccaatgaatttatctgaagtatttgtcctatgtaacctcttcaaagctttcagcgccagtcaccacccagttt

SEQ ID NO: 24559 - DNA, 120 bp, synthetic construct
  source 1..120: mol_type = other DNA
agtgccttgtcatttgttaccagcatcactacgtagatttccaactggtgttttggtctgcgatattgtatccccttacccacagctattccatctgtctttcatagtgaacagaatgta

SEQ ID NO: 24560 - DNA, 120 bp, synthetic construct
  source 1..120: mol_type = other DNA
gactagggggaaaaaaaaaaaaactgccacagctggtgatatacagtctgggataaagaaacaaatactgccaggcaattctttgagactctgttctagccacacagtagaagcatgatg

SEQ ID NO: 24561 - DNA, 120 bp, synthetic construct
  source 1..120: mol_type = other DNA
ttgctttccaatcttcatgtcttttattttcctttcatgtcttgctgcactggctatgaagctttcagcagcatgttgtcatattgagcacgtttgtcttattcctgatacgcaaggcaa

SEQ ID NO: 24562 - DNA, 120 bp, synthetic construct
  source 1..120: mol_type = other DNA
gcaggttgtacaggtttgttacataggtaagcatgtgccatggtggtaaacatatgtcatggtggtttgctacacagatctttgacaaacctgtcaaaactaagcaatggagaaaggagt

SEQ ID NO: 24563 - DNA, 120 bp, synthetic construct
  source 1..120: mol_type = other DNA
ccataaatgttaatttccctttgcctactttagctattatctgcccagctatccagctatctcactaggatgttgtaaactgagataaaaagggatctgagcccttcactacgtgctata

SEQ ID NO: 24564 - DNA, 120 bp, synthetic construct
  source 1..120: mol_type = other DNA
tcagaggacagaagctctcagatgacagattgaaaacccatctaaatccagatatatgttgtttataagcaatacacctaaaacataaagcatggagaactgaatgccaatgaaccatac

SEQ ID NO: 24565 - DNA, 120 bp, synthetic construct
  source 1..120: mol_type = other DNA
gcatttcaaggaccacagaaaccagtgacctagcactagatttgtggtggaatctttacagaagccatttggcagcaaagcctgtgatttgctcactttcttcaaactattttcacaaca

SEQ ID NO: 24566 - DNA, 120 bp, synthetic construct
  source 1..120: mol_type = other DNA
atgattctttctaatcttatagcttttaattccatctgtgcactcttgattcacaaacttatacctccaggccagatctccctttggaactccagtcatatttccaactgcctaattgac

SEQ ID NO: 24567 - DNA, 120 bp, synthetic construct
  source 1..120: mol_type = other DNA
tgtacttcctgagcccagaacagaacctggcacgcagtggtaactcaaaagatatttgttttttgctttagtttttgtttttttctggccccaggttttcttttttttttttttttatta

SEQ ID NO: 24568 - DNA, 120 bp, synthetic construct
  source 1..120: mol_type = other DNA
catccttgctttaacccatctcccaacctctaccaagatcttgtttgctcaatcatcctacaactcgacatttcaagttttcccttttctttggtcccttgctttatgccttcaaaaaag

SEQ ID NO: 24569 - DNA, 120 bp, synthetic construct
  source 1..120: mol_type = other DNA
gcaagaccttttccctcctcttggctttcagattaacatttggtgtgtcagacaagaagagtgttgtaaaaaggtcagagggcctccatttttaaatagtttagggtaagtagagaaaag

SEQ ID NO: 24570 - DNA, 120 bp, synthetic construct
  source 1..120: mol_type = other DNA
taatgaattagcattgatgtaatctacagcattaatggattgagtatgtgttggaagtgtgagcacaataatagcccaagtgttaattcacggaggtcccacatcactgtggcagcctcg

SEQ ID NO: 24571 - DNA, 120 bp, synthetic construct
  source 1..120: mol_type = other DNA
caaaatttctgagttaataggttgggagtggggcctgaagatttgcatttccaacttcccaggagatgctgatgctgctggtcagaagaccatacttggagaacaatgaaatgaagagac

SEQ ID NO: 24572 - DNA, 120 bp, synthetic construct
  source 1..120: mol_type = other DNA
agtgtcccctgttctgcagaggttgtcaggactgaggaagtggaatgaaagggtaccagtagttcttttaacagtttaaaagtaaaactgttcgagtggtatctctatatgttagggtta

SEQ ID NO: 24573 - DNA, 120 bp, synthetic construct
  source 1..120: mol_type = other DNA
aactaaccccaagtcaaacaaagcattcaaaccgctggatgcaggggctgctggtccttgctccattaacaagcaaagggaaagaaaagtgcagggaaaaaactgggacggaagaggtga

SEQ ID NO: 24574 - DNA, 120 bp, synthetic construct
  source 1..120: mol_type = other DNA
tttcccagttttagcaccaaaaatcttgtgccccaaataaaccctttggttctgagcaaagaggatacctggtcactctagccaaatgagagcttaattccttgcttctcaaattgtggt

SEQ ID NO: 24575 - DNA, 120 bp, synthetic construct
  source 1..120: mol_type = other DNA
tctattatcaaggttaatcattatgttttattaagtaagaagtttggttttcactagaggctcaagtcccaggggaaaaagaaatatgttcaaatttcaactgtgagaaaatggctcagg

SEQ ID NO: 24576 - DNA, 120 bp, synthetic construct
  source 1..120: mol_type = other DNA
gcccttaccacgtcgtatacaagtcactggtttatgtctccattaactttaagctcctttatatcaagatgcatctttatccatgtctacatcttcggacctaacgcagtgcttaaccca

SEQ ID NO: 24577 - DNA, 120 bp, synthetic construct
  source 1..120: mol_type = other DNA
tatagagataggaaattgggcatccggttctttcaggagcagtcacatgcttctgatgtggtccagaagctctgtataattttccctccaaaaacattaaaatgtagaatgccctctgtg

SEQ ID NO: 24578 - DNA, 120 bp, synthetic construct
  source 1..120: mol_type = other DNA
ggacttttaatgataaccctagacatttcaacaagcacactttactaatcaaaatctaagatttaccatctttttttcccttcaacaatacagaaccttagttactgcatccatccatat

SEQ ID NO: 24579 - DNA, 120 bp, synthetic construct
  source 1..120: mol_type = other DNA
caagcctacataaagtcaggattatgatttgaaaaatcagggattttcccctgtgcctgttcagttcaggtttccagtcaatgtattttattcacagtgtaatggagggccagggtcaga

SEQ ID NO: 24580 - DNA, 120 bp, synthetic construct
  source 1..120: mol_type = other DNA
gagttggctagataatggagtcatggattaatggtcaactgtctcaatactgaggaaactgccccacccaaatgttcaagtcataaacgcagaatttcttgccttgattccttgctgtct

SEQ ID NO: 24581 - DNA, 120 bp, synthetic construct
  source 1..120: mol_type = other DNA
tctatagcaatggctctcaaacattagaatcaactggagatttgtttctaaaactgttgcctgggtcctaccccaagatattatcatttaactggcctagggtaaagcctgagcatcagg

SEQ ID NO: 24582 - DNA, 120 bp, synthetic construct
  source 1..120: mol_type = other DNA
gagctaatggatccccagtaggatctggcttttaggtttctgagttagaaaacttcctttctggggcaacaaatcaggatccttaacctggggactaaattggttgtatttaatttgcag

SEQ ID NO: 24583 - DNA, 120 bp, synthetic construct
  source 1..120: mol_type = other DNA
tgacctagcaagccctggtgtcaatcaatgctacagaaataaaggcaggggcatataagggtatttgcacaaggatgttattggttatagtggtaaacaacccaaagaaccaactgaatg

SEQ ID NO: 24584 - DNA, 120 bp, synthetic construct
  source 1..120: mol_type = other DNA
aaaaagcagacttggagacacccagaaatgagaacaagaaaagacaaagaaaaatgggaagagaaaaacagcagacccccagaacggtcacaaggtaagataaagtgaaggggaacatca

SEQ ID NO: 24585 - DNA, 120 bp, synthetic construct
  source 1..120: mol_type = other DNA
agagtcagcatcattctagttataaagtattttctgaacccacatagggagaactaagcatagcatccactattctctgggcctccactgtaccctgtacattttcctagagagcactta

SEQ ID NO: 24586 - DNA, 120 bp, synthetic construct
  source 1..120: mol_type = other DNA
atggtacggaaatgagatacacttagtttctgctttgtcaagggatccagtatttaagaatattttgggctgctctccctccctcattttctacctttttaaggactggatggtctttcc

SEQ ID NO: 24587 - DNA, 120 bp, synthetic construct
  source 1..120: mol_type = other DNA
ggaagctctgttgtgtatgaattaggctgagtgagataagttgactataatattctgattttttacctaaactatgcaacattagctgacgcagttattttaactgtatctcagaagcta

SEQ ID NO: 24588 - DNA, 120 bp, synthetic construct
  source 1..120: mol_type = other DNA
tttgagttttgtgaacatttgttataattatataaactaaatgtcacagctgaaaagtatcaagcagcctgtgaaaacatgaattaaactgattaatacattactgctttaagaaatact

SEQ ID NO: 24589 - DNA, 120 bp, synthetic construct
  source 1..120: mol_type = other DNA
ctggatgttctggttgaagagctagtgtccattcaccactgtttcttctctccatgagagtggtgcttattacccacttctactcagctatctcacgccaaatctctaaacttagtcttt

SEQ ID NO: 24590 - DNA, 120 bp, synthetic construct
  source 1..120: mol_type = other DNA
tatctcaactgagttagattaattggtagaaacataaaagagcaagctgacagatttgagataagttttaatcacaggaagtttgaaaatgttttaatgcttacattaaagataaatgtg

SEQ ID NO: 24591 - DNA, 120 bp, synthetic construct
  source 1..120: mol_type = other DNA
gaggttgctataggtattttattatatacaaacaacttactggaatctactgctgctacaaattaccagtttgaatgaaatgcagagacttttcctttctttacttccctttacttctct

SEQ ID NO: 24592 - DNA, 120 bp, synthetic construct
  source 1..120: mol_type = other DNA
gtggggtgggatttttggctctccactatgcctcctcttttacccctcttacaaggaagaataagagtacctccttactgctcctcaaatggattctactaacccaattctcattcagaa

SEQ ID NO: 24593 - DNA, 120 bp, synthetic construct
  source 1..120: mol_type = other DNA
agtatgcgggttcacaggcagtatatgcattgctctgttcatttttcaaataacaaatcagtttttagctgtgtgtctcccttcaaatctccactgtttcttctgaattctgtagggcac

SEQ ID NO: 24594 - DNA, 120 bp, synthetic construct
  source 1..120: mol_type = other DNA
cctcaaagagcttacattctagataggaattgagaagttccgtggaagttgagagacaattaaagtttaaacaatgtatgtaagggaaaaggaaagcaaatatctcaggctccttaagac

SEQ ID NO: 24595 - DNA, 120 bp, synthetic construct
  source 1..120: mol_type = other DNA
ataaaataaaaataaataaataaataaataaaaggaagtcgggtgcccaagttctggcattctgaatttattcttggtctaccacttatagctgcatgaccttaagcaaattactttctg

SEQ ID NO: 24596 - DNA, 120 bp, synthetic construct
  source 1..120: mol_type = other DNA
ggaataacccagaatgcggcacaaggacataaagagaagagagaagaggtattattccaagagaaaatgcctgagaacttcctataatgaaagtcacatctgaggttgaaaaagggcagt

SEQ ID NO: 24597 - DNA, 120 bp, synthetic construct
  source 1..120: mol_type = other DNA
aggtagagaaaggatttctgtccttgtttacaaatggctagtagatgtcaaaccaggactcaagtgtggttcttgattccaagtctagagctctatctactatctgatggtgtccagtct

SEQ ID NO: 24598 - DNA, 120 bp, synthetic construct
  source 1..120: mol_type = other DNA
aagactaacaaggaccattctaatgccccctactctacagctgttgacattaaaggaataatctggaaatgtaaatggaagggcatctcacccacagttgtaggcttttggtagctcaaa

SEQ ID NO: 24599 - DNA, 120 bp, synthetic construct
  source 1..120: mol_type = other DNA
aggaccttaacacttatgtgttgaagtggcactcagaattaagtaagttttattttctccaagtcttcactgttatcaatgattattcttataacaaccacctggtgttcagcattatgc

SEQ ID NO: 24600 - DNA, 120 bp, synthetic construct
  source 1..120: mol_type = other DNA
gtcccttcccaaatgaacctagtctggttttctccaatgggtttacttagccgacacaggaacatagtccattacattcttgggacctcatctgattttaggaccagagtcctattttaa

SEQ ID NO: 24601 - DNA, 120 bp, synthetic construct
  source 1..120: mol_type = other DNA
gatctgctagcatgtcacagtctgaaatactgaaactgataataatgtcaatccctacacaaagtttggggatcagttaactgtgatctgtcaaaaacaattgtcctagcagtcagggca

SEQ ID NO: 24602 - DNA, 120 bp, synthetic construct
  source 1..120: mol_type = other DNA
accatagcaggcctgggcatagcctgagaagtataatctctgctcaaagaataaacacacccttaccaagggaattatctgaaaatttattttgtttgtgtaattcagatgccattttat

SEQ ID NO: 24603 - DNA, 120 bp, synthetic construct
  source 1..120: mol_type = other DNA
tgcaattctctaatgaggtatgatgctgaccaccttttcatatgcttatttgctgtccgtgtaccttctttggtgaggtatatgttcagatcttttgctccttattaaattgggctgttt

SEQ ID NO: 24604 - DNA, 120 bp, synthetic construct
  source 1..120: mol_type = other DNA
accgtggggagagggagagggagagggagagaggcccattgtttttcaagtgggaggtttctatttttctttcaataggaatgctatatattctggatactaatcttttgcatttacatt

SEQ ID NO: 24605 - DNA, 120 bp, synthetic construct
  source 1..120: mol_type = other DNA
agatcaaagcccaagaataaaccctggggtcattacaggatttcctgtaaaggcatcaggaaatgtttttggaagaatgtgattgtcttcgttgatatcaacccaaagatgtggttattg

SEQ ID NO: 24606 - DNA, 120 bp, synthetic construct
  source 1..120: mol_type = other DNA
agctcatcaaatccttgatgtcttcaaatagacttttctccctctctagctcttctagtagttgttggtgagaggttggtctgataaaagtaatctaccctggctagacatctgctgcta

SEQ ID NO: 24607 - DNA, 120 bp, synthetic construct
  source 1..120: mol_type = other DNA
gggaaaacaaactgtaaaataaatgatggtcctgacaatcctattaccattttggaaaagataaaattagatctcagctctctcctctctcctctctcctctctctctcctctcccctct

SEQ ID NO: 24608 - DNA, 120 bp, synthetic construct
  source 1..120: mol_type = other DNA
gacggagagagagagggagagggagaacaggtagtttttttaacccttgctcctctctctccctcccctcttttggagttcccagtgtttactgttcccatctttatgtctgtgtgtact

SEQ ID NO: 24609 - DNA, 120 bp, synthetic construct
  source 1..120: mol_type = other DNA
tgggtagtaagtagtcgtgtacacattggtctgctgcaatgggtagaagttggctctgtcatcagggatcaagttattcttgttcagggtctgtgggtggaagaaggaaccagagaaagg

SEQ ID NO: 24610 - DNA, 120 bp, synthetic construct
  source 1..120: mol_type = other DNA
ggatggctctctctatgtcacaggcacagtccagagagtgagagtgttttcagcagcaagtgagaacctggctgcaggagtggaagcccttgaccagacgaaatactttcccccagacct

SEQ ID NO: 24611 - DNA, 120 bp, synthetic construct
  source 1..120: mol_type = other DNA
gtccttagagtttcttcatttctgttactgcgtttttctgtccctaaaccttgccccagggacatacatctttatcagtgggttacagggggaagactttccaaggacaaaaaagataca

SEQ ID NO: 24612 - DNA, 120 bp, synthetic construct
  source 1..120: mol_type = other DNA
aaaaataatgaagagaggaagtctgctataaatcatctagcgcatttagaagtcctctgtcgctgggcattatccatgccattggctttcctgcttaatgcagcaaactggattgatacc

SEQ ID NO: 24613 - DNA, 120 bp, synthetic construct
  source 1..120: mol_type = other DNA
tattgttatgattccacttataggacatatccagaataggtaaatccatacagacattaagcagactagtggttgccaggggctgaggggaggaggaaattcggagtgactactaatggg

SEQ ID NO: 24614 - DNA, 120 bp, synthetic construct
  source 1..120: mol_type = other DNA
tgcaaaaatttcaaaaggtggggaaaaaaagctatgaacaccatctcttggaccagaaatatcaaaatggtgacctacggtccctgaccatagatgttctgtttgggcttgtacagtgct

SEQ ID NO: 24615 - DNA, 120 bp, synthetic construct
  source 1..120: mol_type = other DNA
ctctaatataaaccactgcatatttagatattcatctagacgcacatgtgtcatccccatgggacttgggggacatggagaactgatgcaaatgaagagggtgttctggctattgttttt

SEQ ID NO: 24616 - DNA, 120 bp, synthetic construct
  source 1..120: mol_type = other DNA
cagagtaagataaacatacctgtcatatcaaaaactatgaacgagcttaactcacctattatatgaaagattttcaaactggctcacaaaacaaaacccaactctatgctaatattaaag

SEQ ID NO: 24617 - DNA, 120 bp, synthetic construct
  source 1..120: mol_type = other DNA
gaatacgggtgaggtgaaagtatttaacacagtaagccacaaatgtttcttcccctttccttttctgcgaaacttcctcctgcagcctcccagacagtggctactcatacaacacggaga

SEQ ID NO: 24618 - DNA, 120 bp, synthetic construct
  source 1..120: mol_type = other DNA
aaggcattctcagctaggcaggtgtaggtgccatggtcctccggcagggcatcctggatgtggagctcagccacgccggcctcgcaggtggagcgagcgtactggatgggctgccctgtg

SEQ ID NO: 24619 - DNA, 120 bp, synthetic construct
  source 1..120: mol_type = other DNA
caggctcagagaagttcagtgatttctcaaagtgttacacaggctggacttgaattcacatatgactcccaaacccaaattgtttccatattgcaaactgaggacacctgatctttggta

SEQ ID NO: 24620 - DNA, 120 bp, synthetic construct
  source 1..120: mol_type = other DNA
gaaagaaagaaaaaagaaaaaaaaaattgtgtgtcatgggctatggccctaactaagttttcaatcctggggcaaatccagcctaatagcctacactgggcctgtcaccctggcctgtat

SEQ ID NO: 24621 - DNA, 120 bp, synthetic construct
  source 1..120: mol_type = other DNA
ataacaacagttttatgcaaactcttccagaaaatagaagaaggaacactttccaactcataaggctaccaatataccctgacaccaaaaccagacaaagacatcggatcaatatccttc

SEQ ID NO: 24622 - DNA, 120 bp, synthetic construct
  source 1..120: mol_type = other DNA
ttttcgataagattgtaccccttttaaacagtgtctattgatatatattctaggtgtctggaagtctttttctacagtcggctcttggttgtctctgggaatatgaatggaaggagcgga

SEQ ID NO: 24623 - DNA, 120 bp, synthetic construct
  source 1..120: mol_type = other DNA
tctgcttggcctttccccagaatgcagtgtgtactgtgcggacatctttatgttggcagaacaaaatcagttcagagaaacactaaagaaaataacaataatttcctccaagacaagata

SEQ ID NO: 24624 - DNA, 120 bp, synthetic construct
  source 1..120: mol_type = other DNA
cagagcttatccataaccccaactctttcaattcaatgcatttcctcctaagtgaaacctacatgcctctcaatgtaaaatggaggccaacatatacctgccaagtgctgaagaatgtag

SEQ ID NO: 24625 - DNA, 120 bp, synthetic construct
  source 1..120: mol_type = other DNA
aaccactgtcctccgggtaagaaaccgtataatagtattctgggtacaaaatacgcacacaaattggccagaaagccataatcccccacagtcacattctcttgaagatccccttgcctt

SEQ ID NO: 24626 - DNA, 120 bp, synthetic construct
  source 1..120: mol_type = other DNA
ctgagatgcctggggacaacagggaaagatagaaaatatttatagggtagaatgtggtcactgtgccagggcacttttacaaacatgatgacatcaaagtttcacagtaaactctgaagg

SEQ ID NO: 24627 - DNA, 120 bp, synthetic construct
  source 1..120: mol_type = other DNA
tattctagatatttttatctccctttgatgcattctagataatttcctctgacatatcctccagtttattctctttttagctgtgtctaatctgcaattaaatgtgttcactaacttctt

SEQ ID NO: 24628 - DNA, 120 bp, synthetic construct
  source 1..120: mol_type = other DNA
agtgccacttcagacataggctctaggggtgtgatcagagcacctgcttcacttttaagtactttcaaatttgacatgtttcttacttctgatggctgaggaaaacaattcagggttatg

SEQ ID NO: 24629 - DNA, 120 bp, synthetic construct
  source 1..120: mol_type = other DNA
agaaagtcttgtttattgtaataacaagtggaacattgcaaagatgtgtaaagagctaattattcctccactcccactttccaatttcagactcccaaggtaatcagttatcttgcacat

SEQ ID NO: 24630 - DNA, 120 bp, synthetic construct
  source 1..120: mol_type = other DNA
cttaaagtttttacatgtctttaagctgttttatctcaaaacatgagctgcctgcacgtttcaggccttgcagaaagaaaggtgtgatgctagagatgggactagagaagtcacctcaag

SEQ ID NO: 24631 - DNA, 120 bp, synthetic construct
  source 1..120: mol_type = other DNA
tcacctcaagattggtgacagatcttctcatgtgatgctagagatgggactagggaagtcacctcaagattggtgacagatcttctcatgtgatgctagagatgggactagagaagtcac

SEQ ID NO: 24632 - DNA, 120 bp, synthetic construct
  source 1..120: mol_type = other DNA
gcgcccagccaacatgagcaatttgaactgtaatttctctgtttttgtatgtgttagaaagagcaccagagattcatttcctgcttgacagtgacgttcttatgtaaaccttgccaagag

SEQ ID NO: 24633 - DNA, 120 bp, synthetic construct
  source 1..120: mol_type = other DNA
gaccacagccagcaaggaattttctgagataagattacagctttttccttaaagagatgccaaccaagttagtcgagctcctaatattccctgagtatagcaacgctgtgagttatcctt

SEQ ID NO: 24634 - DNA, 120 bp, synthetic construct
  source 1..120: mol_type = other DNA
tggtgagaaacacttttaaaactgtatctggataactgttgccatggcaggtgttttgtttgacaagagtcaagaagcctaggatgtggccttaatctcaggagtggctttaactagaca

SEQ ID NO: 24635 - DNA, 120 bp, synthetic construct
  source 1..120: mol_type = other DNA
aactagacagggttaacagaaccgcctctgactagacagggttatcagaaccgcctctgactagacagggttatcagaaccgcctctgactagacagggttatcagaaccgcctctgact

SEQ ID NO: 24636 - DNA, 120 bp, synthetic construct
  source 1..120: mol_type = other DNA
acggtttcttgaaatataaaatggaagtaacaatgctcacagcatcaattaagcctatgatgcgctcatgagggagagcagtgttttatgagcagtacaggcttgcacggatgaagtatg

SEQ ID NO: 24637 - DNA, 120 bp, synthetic construct
  source 1..120: mol_type = other DNA
gtcagccctcagaccttcactgcaccctggtgatctaatcaaaacatcattatgccacaagtgtataaatgtactcctgaaatccatttttagagctgaagggctcttatgtctctaaga

SEQ ID NO: 24638 - DNA, 120 bp, synthetic construct
  source 1..120: mol_type = other DNA
tgtaaattatatctccaatacacacacatcctgttaataatggggcaggggcggtcctgatggatagtgcctccaggtacctgtattgtgtagacacaaatacaaatgctctctagataa

SEQ ID NO: 24639 - DNA, 120 bp, synthetic construct
  source 1..120: mol_type = other DNA
agaggcttatgttaaaatctccacaaatatcaacagtatgcagctgataacctgtttcctcaatatcatttaggcccttatggctaaagggaagataaattttagatctgcatttgcaat

SEQ ID NO: 24640 - DNA, 120 bp, synthetic construct
  source 1..120: mol_type = other DNA
ccctccaagtagctaagacaacaggtgtgtgcgaactgtgcctggcttattcaaggattttctgatatctttctgttatttatttctaattattccccctctggtcagagagcatactct

SEQ ID NO: 24641 - DNA, 120 bp, synthetic construct
  source 1..120: mol_type = other DNA
ctccgtctcaaacaaaaaaagaaagaaagaaagaaaatagactgagaagctatgtgccgatctccctctggggagtaggagtgggaaaatggagtgaagggaagaaactttcacttgtca

SEQ ID NO: 24642 - DNA, 120 bp, synthetic construct
  source 1..120: mol_type = other DNA
tctcaaaacaaagcaaagcaaaacaaaacaaaacaaaaacaacagtcttgaaatcagaagacctggagacaagttgggccctgggccctactgccagctgtttgatcacaggcaaaatta

SEQ ID NO: 24643 - DNA, 120 bp, synthetic construct
  source 1..120: mol_type = other DNA
ggttctactgctctccttcttaagaagggtgggaggcactcggtctctccccacacctctcgcctgaggccaggcgccaggtgtcgcctgaagccagacagccggtttgggagcgagcct

SEQ ID NO: 24644 - DNA, 120 bp, synthetic construct
  source 1..120: mol_type = other DNA
tgagaaatccctgaaacaagactatacagtctattttaagacctacattcttcagcacttggcaggtatacgttgggctgccatttcacattgggaggcatgttttgtttgcttttttgt

SEQ ID NO: 24645 - DNA, 120 bp, synthetic construct
  source 1..120: mol_type = other DNA
ttctttcaggagagacctccagaggctgctcagtagatggagcttacacaacaatcgctgcgggcctggattgaagtagctttgcacagaaagcctctcagctatgaaattgctccttgg

SEQ ID NO: 24646 - DNA, 120 bp, synthetic construct
  source 1..120: mol_type = other DNA
tagtggtctcaggtaagccctctaccccttggttttgttttcaggctcttctatctgtcatataaggaataaaacaatttaggaatacaatagcagataaaagcatcaccagaaattaaa

SEQ ID NO: 24647 - DNA, 120 bp, synthetic construct
  source 1..120: mol_type = other DNA
aacgttattaaagaaggacacagaaacaaagagctccaccatgtagggggagaagagtgatatggtttggctctgtagccccaccaagtcacatgttgaattataatccccgatgttgga

SEQ ID NO: 24648 - DNA, 120 bp, synthetic construct
  source 1..120: mol_type = other DNA
gtacaacatcctaccactatgcgggagttcagtcagagtagtgggaaaaattataaagatagttataggaaatagtcacaaaccttcttggaaggccggggtgttgcatagcttcagtaa

SEQ ID NO: 24649 - DNA, 120 bp, synthetic construct
  source 1..120: mol_type = other DNA
actataattagagacacagcctttaagaggtaattaaattaaaatgaggtcattagggtgggccctaacccaatctgatgggtgtcctcttaggaagagggattaggacagagacatgca

SEQ ID NO: 24650 - DNA, 120 bp, synthetic construct
  source 1..120: mol_type = other DNA
ctgtcaaaacaagctagttcatttattaatttctagacaaaataaggaatgcatttctaaatcagggttgggaggctctatctagttctctcacacccaggacagcctggccctctcctc

SEQ ID NO: 24651 - DNA, 120 bp, synthetic construct
  source 1..120: mol_type = other DNA
agtttgaggcattggcgcccagcagggaggtgatcaaagggaggaaacattaacaacacctggacaactgggagatgggccaaggggagcaaaggggcaggaccacctgcttgcaatctg

SEQ ID NO: 24652 - DNA, 120 bp, synthetic construct
  source 1..120: mol_type = other DNA
accacctacccatccccttgtcaccccagcacccaccacctaccttccccctcgtcccccagcacccaccaactagcctcctcccacccccagcgcccaccacctaccctcaccctcatc

SEQ ID NO: 24653 - DNA, 120 bp, synthetic construct
  source 1..120: mol_type = other DNA
agagagcatctctgtcctcagctgggagacagacacacagacagcatccctgtcctcagccgggagacagatagacagcattgctgtcctcagccgggagacagatagacagcattgctg

SEQ ID NO: 24654 - DNA, 120 bp, synthetic construct
  source 1..120: mol_type = other DNA
cacttttctcagccaggagacagacagacagcatcactgtcctcagctggagacagacagacagcatccctcttctcatctggagatagctaaacctgcttccatgtgaagcagcatatt

SEQ ID NO: 24655 - DNA, 120 bp, synthetic construct
  source 1..120: mol_type = other DNA
tctttccctttttcaacataaatgttaagccctgttctgcactttggttttcccacttagtgtatcttagacagctgtgggatagtttgaaaggcatcaggagcatagtgtgcacatgtg

SEQ ID NO: 24656 - DNA, 120 bp, synthetic construct
  source 1..120: mol_type = other DNA
tcaaaccctacaattggtttgcagcatttttataaggttttgtaactatcaccgctgtctaatttccaaacattgtgatcaccctcaaaagcagcccagtgtcagtccatcagcagccca

SEQ ID NO: 24657 - DNA, 120 bp, synthetic construct
  source 1..120: mol_type = other DNA
ggcatgtggaagagtctgaattaacatatgttggcatggttcaacgtgatgtgtgctcattatctaatggaatgtccaagtcagttgagacagcaattttgaatcctccttttgggacca

SEQ ID NO: 24658 - DNA, 120 bp, synthetic construct
  source 1..120: mol_type = other DNA
actggaatccctccttgtgctgttctcattgacttcctgtctgggctgcttctctttgtttttggtgttctctccctttttatttgtaacagctttattgagatgtgattcacatgctgt

SEQ ID NO: 24659 - DNA, 120 bp, synthetic construct
  source 1..120: mol_type = other DNA
agaccaaaacattcagcctccatagtcccaaacaaacacacagagaaaaaaggaactcagggaacagataatgcagaggagcagaagaaaaagttttttttcttaagttaaatccacaga

SEQ ID NO: 24660 - DNA, 120 bp, synthetic construct
  source 1..120: mol_type = other DNA
cagtttctaaacaatattttgaacaagagcagctttgttagaatcattcacacagtgctttgcacgcgatatgtctttgatggagacctactgggaagcagtgtggcgagtgggaagaat

SEQ ID NO: 24661 - DNA, 120 bp, synthetic construct
  source 1..120: mol_type = other DNA
gtggttaaggtcacaggctctgaagttaggtacttttaagtcgtggcttcccaacgtgtgtactaaccgttataacctcaaccaagtgatttactccttactgaacttcactttcttcat

SEQ ID NO: 24662 - DNA, 120 bp, synthetic construct
  source 1..120: mol_type = other DNA
catcaccacctcctcctcctcctccatcacctcctcctcctctaccatcaccacctcctcctcctcctctaccatcatcacctcctcctcctccaccatcacctcctcctcccccactat

SEQ ID NO: 24663 - DNA, 120 bp, synthetic construct
  source 1..120: mol_type = other DNA
attaccaccattaccatcaccttctccaccatcaccacctccccacctccccctcctccaccatcaccacctcctcatcctccaccattatcatcatctcctcctcctccaccatcacca

SEQ ID NO: 24664 - DNA, 120 bp, synthetic construct
  source 1..120: mol_type = other DNA
cacttcttcctcctcctcctcctccaccaccacctccatttccaccaactctaccttgacatctacgttcaattttacctcctctacttccagccacctccattaccaactacacctcta

SEQ ID NO: 24665 - DNA, 120 bp, synthetic construct
  source 1..120: mol_type = other DNA
gtttttattttgagttagttatcatccttgagggatccggagacttcacatagaaatccggatgctttttgaaaatccaagatctgtgggtgctggctctgtgttcctctctggtaacgc

SEQ ID NO: 24666 - DNA, 120 bp, synthetic construct
  source 1..120: mol_type = other DNA
cacagatggtcaggggcctttgctgggccacatggtagaaagccagatcattcccttcctctcagagtgtgccccatgtggcaggcactgtgctgaggatcggtggtgagcaaaataaac

SEQ ID NO: 24667 - DNA, 120 bp, synthetic construct
  source 1..120: mol_type = other DNA
caatgcatctcccctcttccccccttcctcagtgcatctcccctcttccaccccttccccaatgcatctctcatcttccccccttcctaaatgcatctcccctcttcctcccttcctaaa

SEQ ID NO: 24668 - DNA, 120 bp, synthetic construct
  source 1..120: mol_type = other DNA
gacagtaagtttaatcatggtattaaggtagtcacagccatatcactgcattgtaaagatacttttccttcccctacccccattcctgtgtgattaggaagtgctctgtggggtaatact

SEQ ID NO: 24669 - DNA, 120 bp, synthetic construct
  source 1..120: mol_type = other DNA
taagcatctttgaatgggacaaaatagaacctggcctgctaccttgcacatgactagctatggagccttagacaagttgtgtaaatctcgaattctcaggaagaaaatgccatttgagct

SEQ ID NO: 24670 - DNA, 120 bp, synthetic construct
  source 1..120: mol_type = other DNA
ctgcaataaaaaaactcaatagatggactcaatgcagaatggaatgtacagaggaaagaatctgtaaacctgaagacaaaacaatagaaatagaaatacccaatctgggccgggcgcggt

SEQ ID NO: 24671 - DNA, 120 bp, synthetic construct
  source 1..120: mol_type = other DNA
ccactcacatgaccttgtctgagatgagaaactcagctccttattcttcaaatcccacaaaatagtccatccccacacacatttttatgcatagtagacattactgattattggcggggt

SEQ ID NO: 24672 - DNA, 120 bp, synthetic construct
  source 1..120: mol_type = other DNA
taatatccccaaagctcagtccagtagaaagaccatctgtcatctgaaccatcccactgaagtcctggaactgggcctcattcagccaacttggaaacatgttcatccctgaattcatca

SEQ ID NO: 24673 - DNA, 120 bp, synthetic construct
  source 1..120: mol_type = other DNA
gactagttgaggcacgtggccacctgggccgcctctgggctcaaagatcagagaaccagtcctgggcgcagtggcttgttatagaaatctgtttaatggtttaggaatgtgtacactctg

SEQ ID NO: 24674 - DNA, 120 bp, synthetic construct
  source 1..120: mol_type = other DNA
ttctgggagctgtgtccagctaggcatctgtgaccccaaatggcatgaataaaagggcaggttgctaagagccaggggagggcatggggcagggagaccaggttggcccagacaggacag

SEQ ID NO: 24675 - DNA, 120 bp, synthetic construct
  source 1..120: mol_type = other DNA
cccctgcagaaccaggctcagccattccacaggtagcctccctgcccaaaaggaagcctggcaggtgagatgctggctccaccaccagcatcaagccctgcttgtctcagtctcagcaga

SEQ ID NO: 24676 - DNA, 120 bp, synthetic construct
  source 1..120: mol_type = other DNA
tgtgctgatgaaaatgagaagctacacagaaagtcagaaaactcagaggtcctgataaggcagtgagccagaccccagggagatgtctgtgagtgctgcgggggcagtgaaggcaggaag

SEQ ID NO: 24677 - DNA, 120 bp, synthetic construct
  source 1..120: mol_type = other DNA
ccgggcccagtggccagatcgtccacacttgaagcactcattgctgctcatggctgcagtcagatctttgaaatattaaaagtaacagcattaaaccactgaaagttcttttaactttta

SEQ ID NO: 24678 - DNA, 120 bp, synthetic construct
  source 1..120: mol_type = other DNA
aagcatttaaaactatttaggaggggggagggggaagcccaggagataagtactatatctcttatctttttgaaaccctcaaagctctacactccagttatactgcttgaacaaacaaat

SEQ ID NO: 24679 - DNA, 120 bp, synthetic construct
  source 1..120: mol_type = other DNA
aaagccaaataggtattttccagaggcagagtggggaggggcaaaggcattccaggtgagggtgacatcctatggcgaggcaggcctgtaggtgggaaggaggggaggatgggcagagag

SEQ ID NO: 24680 - DNA, 120 bp, synthetic construct
  source 1..120: mol_type = other DNA
aaggaaaagcccaggtatgttcctgagctgtgtttccatctagaacctcagatggaggaaggaatggcttccaacctccactcccctaccccttccctctttatctccccacagtcaatt

SEQ ID NO: 24681 - DNA, 120 bp, synthetic construct
  source 1..120: mol_type = other DNA
tgagtgttaatcatggggaaaggagtgctttttttgttctcagtgaggctgacacaaagtactctccacagggtacattattcctgagacaaaccacttcttaccagtaacatagacctg

SEQ ID NO: 24682 - DNA, 120 bp, synthetic construct
  source 1..120: mol_type = other DNA
agcctgagatcactcttcccgagacctgggactcccccaactcagcccctcagggccgggccctgcctacctcctggttgcctgcttcagccatgtggagcccgcccttgctgctagaaa

SEQ ID NO: 24683 - DNA, 120 bp, synthetic construct
  source 1..120: mol_type = other DNA
cctgcacacacacacatacagaaactgcccctgcacacacacacacagactgtccctgaacacacacacagactgctcctgcacacacacacacagactgcccctgcacacacagagact

SEQ ID NO: 24684 - DNA, 120 bp, synthetic construct
  source 1..120: mol_type = other DNA
tgcacacacacacacacagaaactgcccctgcacacacacagattgctcctgcacacacacacacacacacacagactgcccctgcacacacacacagagactgcccctgcacacagaca

SEQ ID NO: 24685 - DNA, 120 bp, synthetic construct
  source 1..120: mol_type = other DNA
ttgcggggagctctcccgtggacagagggcttggggaatggccagcaaagcaatgcctgatgacccgtccttagaaaaagaagtgtgtagtgttacagctctgttagaatttgtctagcc

SEQ ID NO: 24686 - DNA, 120 bp, synthetic construct
  source 1..120: mol_type = other DNA
agatgaagggattgtcagggccaggctccctctgaggatgctaggggaaggatctccctcccagcttctgccaactccttatcttgtggagcagaagtccagtcttcacgtggtcttctc

SEQ ID NO: 24687 - DNA, 120 bp, synthetic construct
  source 1..120: mol_type = other DNA
aaacatcagccaaatccaaagtaagggacattctatcaaataaccgtcttgcgttcttcaagaatgccaataccatgaaagataaagaaaaactgaggatctgttccaggctaaaaggta

SEQ ID NO: 24688 - DNA, 120 bp, synthetic construct
  source 1..120: mol_type = other DNA
agctcagtaagtgatatggtgtggctgtgtccccacccaaatctctaattgtagttcccataatcaccacatgctgtgggagggacctagtgggaggtaactaaatcacggggtgggtct

SEQ ID NO: 24689 - DNA, 120 bp, synthetic construct
  source 1..120: mol_type = other DNA
tggattacattatatttctattggacagctctgttctaaagtctgcacgttgtccttttgtggcttatttccttgataattttattaaaattaaattgaagggccaggtgcagtgactca

SEQ ID NO: 24690 - DNA, 120 bp, synthetic construct
  source 1..120: mol_type = other DNA
actgcctttttaacccagtctgtgagactgaatcgtaaacgtgacattctttgaagtaaagctctcgattaatataccagactgcataaacgctaataacttacctttccacagaaagat

SEQ ID NO: 24691 - DNA, 120 bp, synthetic construct
  source 1..120: mol_type = other DNA
ccacctgccctctagatttatggagctgagactccacaaatgatgctggagccgggtgggccaggctgcagtttaggaagtgatcaggatcaggtagtgcgtgggctaagggaacttctg

SEQ ID NO: 24692 - DNA, 120 bp, synthetic construct
  source 1..120: mol_type = other DNA
tttatagatagcactgtaactcccaaatcaccagggctatgtctctgaatatgtctctgaaagtttttggactaattatttcctgaatgtttcagcttcatgtaaagagagtggtagatt

SEQ ID NO: 24693 - DNA, 120 bp, synthetic construct
  source 1..120: mol_type = other DNA
ccctaaaatgaatgatcaagtttagactctccataggctttccaaatttctccaatgaaatccattttaagatcgtgtcgaagatggccgaataggaacagctccggtctacagctccct

SEQ ID NO: 24694 - DNA, 120 bp, synthetic construct
  source 1..120: mol_type = other DNA
ttgttttggcccttccttaattcagaggtaccaaaactacacagggcagcaggtaaattgaaaatcaatgtagacttcattgggtgatgtgtgcctgtataaatctttcctcctgtccat

SEQ ID NO: 24695 - DNA, 120 bp, synthetic construct
  source 1..120: mol_type = other DNA
acgggcatgagccacggcacccagctagtagtaggtttttacatttatttctcataagtatacgtgtatgcttttgtaaatgttgaggtggtggtatattgcctcttctcgttgattctg

SEQ ID NO: 24696 - DNA, 120 bp, synthetic construct
  source 1..120: mol_type = other DNA
tgtattttttttattatactttctttgaatattttccacctgtgattgcttgaatccactgctacagagggaggactatagttggtggcagtggcctttccagcaggagcctgagaggca

SEQ ID NO: 24697 - DNA, 120 bp, synthetic construct
  source 1..120: mol_type = other DNA
gagggtcagatggaaaaaggttgtgggtttttttttttttttggtcttttgaaaatattttacttctctcagctataactttctaagccgaataatacatcgcttgaaatgatagcaaga

SEQ ID NO: 24698 - DNA, 120 bp, synthetic construct
  source 1..120: mol_type = other DNA
tcagcctggacaaatcacattgttggggtttcccaagtagagtgtgtgtgcgttaattatagcagatatcctgatgctattccaaggagactaaaacaaaataagacctaagccctgtca

SEQ ID NO: 24699 - DNA, 120 bp, synthetic construct
  source 1..120: mol_type = other DNA
gtctttatagagcgctgttggtataggacaaaaatctctggcttcatgagtcttagaagataaatgaatataatgttaaataagtgcttaagagcaacccccccccccacaaaaaaaggc

SEQ ID NO: 24700 - DNA, 120 bp, synthetic construct
  source 1..120: mol_type = other DNA
cataatacagtatagacaagagagggaaatcagccctaattttagctgctaagatagtcatacctattagctctcccatcctcacagacaagtctgtctgggtaacaggaattatccctg

SEQ ID NO: 24701 - DNA, 120 bp, synthetic construct
  source 1..120: mol_type = other DNA
catccatgctaatgtttgaaagcaaaggagaaaaaaatgctgaaaattatttccaagcctaaagctgttactatgtttatatacttattgttttctagccctacctgtaccagagtggtc

SEQ ID NO: 24702 - DNA, 120 bp, synthetic construct
  source 1..120: mol_type = other DNA
aatgtacaaaaatcacaagcattcttatacttgcatgatttctgagaagtctaatgtaattcttatctttgttcctatataggcaaaatggttttccccactctggcttctttcaggatt

SEQ ID NO: 24703 - DNA, 120 bp, synthetic construct
  source 1..120: mol_type = other DNA
attgctttcatccccttgttacatttccaggaggcatccttggctgtaaatagtgatgatcacagtccttaccactgattaggaacactcctgcctataatttatggcaactaattggtg

SEQ ID NO: 24704 - DNA, 120 bp, synthetic construct
  source 1..120: mol_type = other DNA
gcttagaaattgttccagaagttaatgtcttcatttataaaggaagacagtgactggcctacagaactgagtgactagactgcacagctagctaggagcaaagcctgaatgagaatcaat

SEQ ID NO: 24705 - DNA, 120 bp, synthetic construct
  source 1..120: mol_type = other DNA
gtgcctacattgaagggtgcttttattgatagaaatgcatagtaaaaaatggtaaaccatttcaaaccacatctctttttcccactttctcttcccacctttgctagttatccatgatat

SEQ ID NO: 24706 - DNA, 120 bp, synthetic construct
  source 1..120: mol_type = other DNA
accagtgtaagagtgttctgcacagagtatttatactcaattttaattcacccaaaaagtgcttacttgccttggatgccctaaacattaccatacccgaaaactatgtccacatttgct

SEQ ID NO: 24707 - DNA, 120 bp, synthetic construct
  source 1..120: mol_type = other DNA
aaagtgatggggaggaaaagcacaaagcttcctattctgaacttgtggaaacagcagctacatttaagcactgcaggccccctgcccatttccatgtgatatcctttattttattttttg

SEQ ID NO: 24708 - DNA, 120 bp, synthetic construct
  source 1..120: mol_type = other DNA
tgtttgtgggttctgttggggttttttctcatatagatgtggcagaaactactatttacagtccagagcctaattgccacatttttcttttgcctagagatactccccctccccttagaa

SEQ ID NO: 24709 - DNA, 120 bp, synthetic construct
  source 1..120: mol_type = other DNA
gatttgtcatatatgatcttgattatgcggaagtatatttcttctatgcctaattttttcagagtttttatcataaaaggatattgaattatgtcaaatgcttttctggatatgttaaaa

SEQ ID NO: 24710 - DNA, 120 bp, synthetic construct
  source 1..120: mol_type = other DNA
cccgacctcgtgattcgcccgacttggcctcccaaagtgctacaatcacaaacgtgagccacggctcccggcctgatacacctttctttttttttttttttttttttttttttttttttt

SEQ ID NO: 24711 - DNA, 120 bp, synthetic construct
  source 1..120: mol_type = other DNA
tactttcagaaaagattatcactcacccaggccaatatgcctgagttggacagaatgctacagatagcaccaaagttgagacaccaatttccttaacattcttatccagggaccactgag

SEQ ID NO: 24712 - DNA, 120 bp, synthetic construct
  source 1..120: mol_type = other DNA
taccactttctactttttgtttctatcacaatgaggattagagttttcatatctgatgtatatacatgggtttcatttggagcagagattcttttttttttttttttttttttttttttt

SEQ ID NO: 24713 - DNA, 120 bp, synthetic construct
  source 1..120: mol_type = other DNA
tcaggacaaaaacaatatggtgagtgtaagttcctgctacgtgtgtgaaatgcattaagctgcctggcatgtggagtcatctttgatattctctgtttaataaattcaagtcttaacttc

SEQ ID NO: 24714 - DNA, 120 bp, synthetic construct
  source 1..120: mol_type = other DNA
aagtttgagtaactaatcttggggtcatattccaatgtggctcccattaaagcatttcaaagagtgctagattcaggctcacatatgttacagcaacaggctatactctagggaaagaac

SEQ ID NO: 24715 - DNA, 120 bp, synthetic construct
  source 1..120: mol_type = other DNA
ctaaaagttctgctcacagtcgttatagttttcattgtcactcaactgccttataacattgtcaagttctgccgagccatagacatcatctactccctgatcaccagctgcaacatgagc

SEQ ID NO: 24716 - DNA, 120 bp, synthetic construct
  source 1..120: mol_type = other DNA
atacaagaacgatttccctgcataattttagtacttgaataagtatgcagcagaactccaactatcttttttcctgttttttttaaatttgtaagtaattttataaaatccacctcctcc

SEQ ID NO: 24717 - DNA, 120 bp, synthetic construct
  source 1..120: mol_type = other DNA
gacctcctgacctcatgatccgcccgccttggccgcccaaagggaatatatatcttcatattaagaatacaggacattcttttgttcatttcttatgttcatttggctgtacatatggcc

SEQ ID NO: 24718 - DNA, 120 bp, synthetic construct
  source 1..120: mol_type = other DNA
aattagaaatctagctataagtagagatggttttcattcattgaaagcacaaatgatgtctttgtggatggctgcaacttttctgcttattcaacccccggccacctaggaacctgccac

SEQ ID NO: 24719 - DNA, 120 bp, synthetic construct
  source 1..120: mol_type = other DNA
ttacatacatatccactaatcggcattgttggtgagtggcaaaaggtgtgtgaatcttaagtcaaatttaactttcagaagtggtgcttgcactttttgggtaaaatacagtgctatcat

SEQ ID NO: 24720 - DNA, 120 bp, synthetic construct
  source 1..120: mol_type = other DNA
tggcccttcttagaagactagagcaaaatgtctagccatacttacaagccttatcaaaaaaaaaaatgcaaccccttatgaattacacctcaattttaaaaagtagcctcaatataagaa

SEQ ID NO: 24721 - DNA, 120 bp, synthetic construct
  source 1..120: mol_type = other DNA
ctggctttagccctttcagaaggtttaacacattttacatgatatcttggaaaagctgaaagcttgagtatgagggtggtgatgagagcctttatggttatataaaaaccagatactgtc

SEQ ID NO: 24722 - DNA, 120 bp, synthetic construct
  source 1..120: mol_type = other DNA
acccccagcccaggcaacagagcgagactctgattcaaagaaagaaaagaggaagagagaaagaaagatgcctatgagccacattttcttaatccagaaaatgtggcacatatacaccat

SEQ ID NO: 24723 - DNA, 120 bp, synthetic construct
  source 1..120: mol_type = other DNA
cttgtcctttttagttacatgtttattgcaggaccaacgaataaccatctaaataagcgctaactaaataacactacagtgtggaagttagaaagcccccgcatttcagcaggctctggg

SEQ ID NO: 24724 - DNA, 120 bp, synthetic construct
  source 1..120: mol_type = other DNA
cccgcttacccctctactcactcctaccacgtctgctctattcacccctgccctcttccatctactcacacctgccctctcccctctactcatccctgtcctctccccactactcactcc

SEQ ID NO: 24725 - DNA, 120 bp, synthetic construct
  source 1..120: mol_type = other DNA
tctgctcacccgtctactcacccctgccctctcccttctattcaccccgtcctctcccctctactcacccctgtcctctcctctctactcatccctctacacaccctgccatcttccctc

SEQ ID NO: 24726 - DNA, 120 bp, synthetic construct
  source 1..120: mol_type = other DNA
caccctctatgcaccctgctgtctcccctctactcacctctgccctctctcctctactcacccctctactccttcctgccatctcccctcaactcatccctgccctctcccttctactca

SEQ ID NO: 24727 - DNA, 120 bp, synthetic construct
  source 1..120: mol_type = other DNA
tcacctctgtcacctctcctctattcacccctctactagaccctatcctctccattttactcacccctgccctctcctctctactcacccgtcctctcccctctactcacctctgtcctc

SEQ ID NO: 24728 - DNA, 120 bp, synthetic construct
  source 1..120: mol_type = other DNA
agcttagcaattctgacttataacctcacctaagttatcagggaactgggaaacaaagtgttttgtatgagtaaagtttctaagaagaaacagtttttccacaccggggcctgtcctggg

SEQ ID NO: 24729 - DNA, 120 bp, synthetic construct
  source 1..120: mol_type = other DNA
tggggggcggggggaggggttgttttttccagctgcctatgattaacgacaataggcaagttgcttacgctctttaaatcaattttcttacctataaattgatgttaccttactcacaga

SEQ ID NO: 24730 - DNA, 120 bp, synthetic construct
  source 1..120: mol_type = other DNA
atggggcagaagacctgagaaggaagagaggacagttctgtgccacactggtcatatttagaagacattttcatattccaaccattgttctgtgtgtgcattttatttctcacgactgta

SEQ ID NO: 24731 - DNA, 120 bp, synthetic construct
  source 1..120: mol_type = other DNA
ttgtaaatctttttgttaaaattcatatgtaatgttgttttggttggggggggtggccaaaccacctgttaataatacacattgtgtttgtgcactggttcaggggaggagagaggaaag

SEQ ID NO: 24732 - DNA, 120 bp, synthetic construct
  source 1..120: mol_type = other DNA
agtctgagtctatttggaatgctggccaagtaggttatatcacttagtgggaagagagagttctcttcagagactttgcagattctcaggactaagccattctcaggaatgaatcaaaaa

SEQ ID NO: 24733 - DNA, 120 bp, synthetic construct
  source 1..120: mol_type = other DNA
gggctcatatatcccaataaccagaggatggggggctcacacaccaatgatcagagaatggggaactcacacaccaaatgaccagaggatgggggactcacacacccaatgaccagagga

SEQ ID NO: 24734 - DNA, 120 bp, synthetic construct
  source 1..120: mol_type = other DNA
agcctctaaattcctgggtcatgtgtgtttctgattttgatagtccttgctgaattgttttcagaatggtcttatctttttacattcccatggaaaccattctctaggagcaagtgtgca

SEQ ID NO: 24735 - DNA, 120 bp, synthetic construct
  source 1..120: mol_type = other DNA
tgtaaaggcttaggattcagcagtacttggttgagagactcttatcttatgcagtgattatctgttcatatttaagaattgagaactctcaggggaacttaagccagaccatgaccagag

SEQ ID NO: 24736 - DNA, 120 bp, synthetic construct
  source 1..120: mol_type = other DNA
aactgcctgcctgtggactaagtgttacacttggtttgatgaattgccacctgcagttctggtgggctgacatctgggtgcctaagaagactcactcccagaagcctagaaagacagtgg

SEQ ID NO: 24737 - DNA, 120 bp, synthetic construct
  source 1..120: mol_type = other DNA
ttgtcagagtccttcaggtcctgcacatggattctgcagagccacatttctcctggagagactgtaggatgctcagtggaattcataagggaacagatagagagatgaagtgagcctgat

SEQ ID NO: 24738 - DNA, 120 bp, synthetic construct
  source 1..120: mol_type = other DNA
actttgtagggtggcagaaagaataatctctccgcttctggttccatgctatttttcctgcatggaaacagaacagactttcattatggccagggaactgtattttcttggctttcactt

SEQ ID NO: 24739 - DNA, 120 bp, synthetic construct
  source 1..120: mol_type = other DNA
tctggtctccatccatcctacaccggggggttgtctagcacctttttccttcctgttgtagtgggcccactttggaaatggcagcttttcatttcgtaaattaatttctatttttattaa

SEQ ID NO: 24740 - DNA, 120 bp, synthetic construct
  source 1..120: mol_type = other DNA
agctcttcaggccaatagggcaataagcattccacatgagacaggaatctagtgttgtaaattggggactgcttgcttgtctgcatgtctacacaatgagggtgatttttttttaatttt

SEQ ID NO: 24741 - DNA, 120 bp, synthetic construct
  source 1..120: mol_type = other DNA
ggagtgtgcaggggaacagggagattcattctcatgagcctgcggaaaatcaaaaccccacactgctgctcttcctagggcctgttttctttttatttatttatttatttatttatttaa

SEQ ID NO: 24742 - DNA, 120 bp, synthetic construct
  source 1..120: mol_type = other DNA
catgggtgctgagaaccaacttctcttgtatttgaacactagctccaccactgcttacctactgtgtgaccttgagcacattacttaatttctctgagccctacttgccttgtttataaa

SEQ ID NO: 24743 - DNA, 120 bp, synthetic construct
  source 1..120: mol_type = other DNA
cagctgatgcagttagaaaagacagtttaacctcaatgtcagaaacaatctcctttgaacattccaagaccctgatgctggacctacacataatgaaatacgttcctcatagattgcctg

SEQ ID NO: 24744 - DNA, 120 bp, synthetic construct
  source 1..120: mol_type = other DNA
tcacttgaaggtattatggcccaggagcccagaaatgtctgcatagcccgctttggcccagctatacctcttctgcatatgattccaagggagatatatatccatatatatgtatacata

SEQ ID NO: 24745 - DNA, 120 bp, synthetic construct
  source 1..120: mol_type = other DNA
tacacgtgtatatatgtatatctacacatgtgttcacatacatatatacacatatgtatatgtgtatatatgtatgacaagtaaaaagggaggactttattagcagatggggctaccctt

SEQ ID NO: 24746 - DNA, 120 bp, synthetic construct
  source 1..120: mol_type = other DNA
catagtggctaaaagtacaggctctggaggaagacatcctgagttcaaatcctggttctgctatttactagctgtgtgaccttgggtatttccctttttcttaggtttcctcatctctaa

SEQ ID NO: 24747 - DNA, 120 bp, synthetic construct
  source 1..120: mol_type = other DNA
gtgctgctaggcaaatttctttataaatgaggccttgagctctactggagtcataggaaagagaactagtgtgatatacagaacaccagatcccaagaacaggtaacaaaaagcagacac

SEQ ID NO: 24748 - DNA, 120 bp, synthetic construct
  source 1..120: mol_type = other DNA
aaaaaaagagtagtaaggtttcaaagtaacaatttaatgatgcacctcaggaactagagtaggaagaacaaaccaaatgcaaaattaacagcagaaaagaaataatacagatcagaccaa

SEQ ID NO: 24749 - DNA, 120 bp, synthetic construct
  source 1..120: mol_type = other DNA
caagtttttaagtaactgtatgaggaatgagaaaaaactaggaacaaaggagaattactgggtaatgctgagggttcaattaagattggagagcatgactctccctctccctctccctct

SEQ ID NO: 24750 - DNA, 120 bp, synthetic construct
  source 1..120: mol_type = other DNA
acacccaagaatgatcaataaaaaaaaaaaaaaaaaagattggagagcatgaatacttagtggctccagtctgcaagtttgttattttctccagctgtgctcagtagctcagagccaggt

SEQ ID NO: 24751 - DNA, 120 bp, synthetic construct
  source 1..120: mol_type = other DNA
agtatgagagtaatacttagtcaaaggatagctgtaaggctacagtgagaatttacgaatcagtgtaactgctaagcagtgtttggtatccatgaagagcctgtctggatctcccttcct

SEQ ID NO: 24752 - DNA, 120 bp, synthetic construct
  source 1..120: mol_type = other DNA
tggatttccctaatagctaatagtgtgcttatttgccatctatatatcctctttggtgaaatgtctattcatgtcctttgcctatttttagattggattgtttgatttttctactgctga

SEQ ID NO: 24753 - DNA, 120 bp, synthetic construct
  source 1..120: mol_type = other DNA
aagatagaatccacggtctataccacaaggcttctggtatagattgtgaaatggccctcagaaaagttattctcctttttgtacctccagtaagtagcatttgggaatacttggctcgag

SEQ ID NO: 24754 - DNA, 120 bp, synthetic construct
  source 1..120: mol_type = other DNA
gggtccctcatagaaccaaagttcacacagtgacccagagagattttcattctagtatgcctctaatgtgggaattcctaggggggctaaactgaaaaattatctaagatatctcatctg

SEQ ID NO: 24755 - DNA, 120 bp, synthetic construct
  source 1..120: mol_type = other DNA
ttgtcccaatctctaattatttccttagccagattcctagaatgggaatttatcaagcaaagagtgcaaagatttttaaagtccctgatatattttggtaaactgaaaaacatagttttc

SEQ ID NO: 24756 - DNA, 120 bp, synthetic construct
  source 1..120: mol_type = other DNA
acgggctgtgatcgcgcacggaccagacggtatgatattcttttatctgtttaatgtcttttatctgcaccatctgcagtgatgcccattttcattcctaatgttggttgtgacttcttt

SEQ ID NO: 24757 - DNA, 120 bp, synthetic construct
  source 1..120: mol_type = other DNA
tcatctctaaaatgggtatattaaactctggctcaagaggctgttgtaaagatgcagtaagcctgaggatataaaaacctggcatacaagaggctggtgtttaggttatccattgctgcc

SEQ ID NO: 24758 - DNA, 120 bp, synthetic construct
  source 1..120: mol_type = other DNA
cttgcccttgtggttctcacattctaatggggtgtcttagtcagctcaggctgccataactaagtgccataaactgcgtggcttaaattactgaaatttatttttgcacaattttggagg

SEQ ID NO: 24759 - DNA, 120 bp, synthetic construct
  source 1..120: mol_type = other DNA
cctatgggttttatttctttatcattatacctacgtgtggttcaactgaattcaaatgcgtattgagctctcatggagtccttagtgacacaagggagacatagatgccacagaggcaga

SEQ ID NO: 24760 - DNA, 120 bp, synthetic construct
  source 1..120: mol_type = other DNA
gataaattgttcacaggcccttgctatgcattttacacatcttcacctcagtgtctcattacccattactcagatgtgaggtaactgtggcttggaaagattagaaaacaactggctctg

SEQ ID NO: 24761 - DNA, 120 bp, synthetic construct
  source 1..120: mol_type = other DNA
aaacgttttatgggtattgattcccagaacacttgtacatgaggaacgaaagactgaaggagatgggaacttgcgtaagatcccagagttagtgatgagtagattcagtcccactccaga

SEQ ID NO: 24762 - DNA, 120 bp, synthetic construct
  source 1..120: mol_type = other DNA
ggctggtaagaactagagcaccgtgtgagaagttaataagacgcccaatttatggagcacccactgggggctattgtatgttcattatccctacttctcacaacaaattaaatactatga

SEQ ID NO: 24763 - DNA, 120 bp, synthetic construct
  source 1..120: mol_type = other DNA
ttcatggattagatacacacacagagttgctctcaatagctaatcacttgtcattggggcaagctcaaaagaccatctcatattggaaaggccagtcttgacgtactgtttgtgttgctt

SEQ ID NO: 24764 - DNA, 120 bp, synthetic construct
  source 1..120: mol_type = other DNA
tccagcatgtctggagtcctaaaatggtttagtggctgctgtattgtatccatacaagatactgtggaatcaccacattcctgagtaataccctgttctgattttcatagcacaatccct

SEQ ID NO: 24765 - DNA, 120 bp, synthetic construct
  source 1..120: mol_type = other DNA
ccatttcaacaggaaagggataaaattggtgctttaggaaaatgccttaggctcagtagctccccaacgttactgtgcattgaagtcacctgaggatcttttaaaattactgatgcctga

SEQ ID NO: 24766 - DNA, 120 bp, synthetic construct
  source 1..120: mol_type = other DNA
gggagccgtgatagggaagtaatttgtgagttcatgatttcttaaggttctagtgtgacatttatacactgataaaactcaggcaagcaaaatgtaattaaatgttccccctgccccccc

SEQ ID NO: 24767 - DNA, 120 bp, synthetic construct
  source 1..120: mol_type = other DNA
tactttattggcagggagctgggactcgaggcagttcagatttcctccaaagctaaatgttgtaattgtgggtaacagtgctcttagctctatttttgctctacctgtcactttataagt

SEQ ID NO: 24768 - DNA, 120 bp, synthetic construct
  source 1..120: mol_type = other DNA
agagagggaaagagtgtgcatgtgttttcgatagtttccctgggaactcttctacctgcagagctatcgtgtttcctgtggccctgatcccctatatcccctccctttttctgtgctgct

SEQ ID NO: 24769 - DNA, 120 bp, synthetic construct
  source 1..120: mol_type = other DNA
acttgatacagtattaatcttaagctgtgccagtctctgttgctctactttggaagactatcctatctgcaaaacaagagtaatcaaatgttaggttttgtaacattttgagtgctatag

SEQ ID NO: 24770 - DNA, 120 bp, synthetic construct
  source 1..120: mol_type = other DNA
taatcacaatgttaatgtttatattcattcgttctcttagtatagttttgaaaattgcagaataatatatgctcaacatctctgatctttttctgtagactacatgttcatttgtgaaat

SEQ ID NO: 24771 - DNA, 120 bp, synthetic construct
  source 1..120: mol_type = other DNA
ggggggaagaagatggcagcacaggagttcaaggaggagtgtttggtagaattctacaggcaggagcataggaataaactgtcagtttcagctttttttttttttaaagctgcacaatat

SEQ ID NO: 24772 - DNA, 120 bp, synthetic construct
  source 1..120: mol_type = other DNA
aaaaaaaaagaagtgaggaaaacaaggaaaaaaaaaaaacaacaaacttttttaaaaaggaaacctttttgcatactagactgataaaaaattaacaagtctgataatgcactgagttgg

SEQ ID NO: 24773 - DNA, 120 bp, synthetic construct
  source 1..120: mol_type = other DNA
agtagctaggagtacaggtatgtgccaccatgcccagttaatttttaaaaatgtttttgtagaggcagggtctcaccatattgcccaatctgagttttgtacgctactgatagtaggaga

SEQ ID NO: 24774 - DNA, 120 bp, synthetic construct
  source 1..120: mol_type = other DNA
accacttccctatcaaatagtagttgtttgttttcataccatgcaccctcaggggtaggagagtgttttggtattctccttacagcccactgagacctcaaaatctctagtagaaaacta

SEQ ID NO: 24775 - DNA, 120 bp, synthetic construct
  source 1..120: mol_type = other DNA
gaacactctcttctcccttgcatggtcaactttattaacttttaaggtctcaactacttcctccagaaattatttcttgactgacccagactaacacaggggctcttggtaactgttcca

SEQ ID NO: 24776 - DNA, 120 bp, synthetic construct
  source 1..120: mol_type = other DNA
acagctaacatcatacttaaaagtcaaagactgactgctctacccctaagatcaggaacaagacaaggatgtccacttttagcatgtctattcgacactgatttagttagggcaagtagg

SEQ ID NO: 24777 - DNA, 120 bp, synthetic construct
  source 1..120: mol_type = other DNA
caagaggtggtttggaatatttgtttacttggaacagatgttgcattttgcaaatcatagccattttgcaaatcaaaacacagcctttccattgagctgcacacagcgatgagggagctg

SEQ ID NO: 24778 - DNA, 120 bp, synthetic construct
  source 1..120: mol_type = other DNA
ttatcatgttactatgctgagaaatataagacctttattaatgaatgcttggacccagataaaacctttgatttaattgtaatgctattctcctataaaaacttttttttttggaatcct

SEQ ID NO: 24779 - DNA, 120 bp, synthetic construct
  source 1..120: mol_type = other DNA
aaagagctagtaagcaagttagcaaagagtgatgaaggatttaaagttctgggaggtgggagattagactggtatttctgcaaatgaaggaccagggttctaaagattggagagcatcaa

SEQ ID NO: 24780 - DNA, 120 bp, synthetic construct
  source 1..120: mol_type = other DNA
tctaatcttctcttgtgtttcctctgagagatttagtcatatggaataaagttccacaacaggtggcaaacttggactagaactcggagctcatgagctttatcccagggcttttcacaa

SEQ ID NO: 24781 - DNA, 120 bp, synthetic construct
  source 1..120: mol_type = other DNA
gaagccagttcttaatctttcacataccactgagagcagtgcctaggctggagtttccttttcttattctactattgtccccatttctaccaacaaggttggaagagtagaatagtgggt

SEQ ID NO: 24782 - DNA, 120 bp, synthetic construct
  source 1..120: mol_type = other DNA
ggaaaactgatgagaatgtgaatgtttctctctggttcaaaacaaggtcatccttacccatcaggaactgtgcctttcatgttctgattggctcaaatcctcactgtatgcacattgcac

SEQ ID NO: 24783 - DNA, 120 bp, synthetic construct
  source 1..120: mol_type = other DNA
aaagatttgcttagcagcctgcatgagctagaaatcacttctggccatgtttataggcgacaggtcagtgaaacctaatacactggtagatttcaaggaattccaaggaaatggcttcaa

SEQ ID NO: 24784 - DNA, 120 bp, synthetic construct
  source 1..120: mol_type = other DNA
gaaagcaataggcaattaattctgtttactgaataaatgaattaacaagtgaatgaatctctgaaggtcacccaccatgtggttagctcctcgaggatcagaacagctccttttctcctg

SEQ ID NO: 24785 - DNA, 120 bp, synthetic construct
  source 1..120: mol_type = other DNA
tcctgcccccagcccccccactgcctgggcccctacatacatcctccagacttgagtatatcactatttttctgttgaatttcttcagtgttcatttttttcctcctaatattatttaaa

SEQ ID NO: 24786 - DNA, 120 bp, synthetic construct
  source 1..120: mol_type = other DNA
aaaaaaagaaaaaaatgatcctttgtggagtagaaaaagactgatataattttattcaagttatatatttctattttataaatgagtcaccttaccacatagccttatgtattcacctat

SEQ ID NO: 24787 - DNA, 120 bp, synthetic construct
  source 1..120: mol_type = other DNA
gaaagcttacttggaatcgtacaaaatttcaaggaaaatgaaagtccaattgtagggaattgtttgaagaaaccatgacatagccacttaatgacatactatgcaactagtaaaaggaat

SEQ ID NO: 24788 - DNA, 120 bp, synthetic construct
  source 1..120: mol_type = other DNA
aaaggctctcaaacctagccatatggctgcacttattgggcaggaagaagctcccaatctttggtgcacctcccctgcaaagatgtctacatgacactgttaataataataataatacaa

SEQ ID NO: 24789 - DNA, 120 bp, synthetic construct
  source 1..120: mol_type = other DNA
tgcaggatggacctgcaccttcttctccaaagaaaagcaggcagttgtttagggcttcttgggtgatctccaaatctatttatcagtgattgataactatttagatagaagcatcaagga

SEQ ID NO: 24790 - DNA, 120 bp, synthetic construct
  source 1..120: mol_type = other DNA
agaggatgagagagtaggataaagaaacaaaaagacaggaagccgttagcaataggggccacataacttgcaaactggaaaaaaaaaagggggggggggagaaaaaagagaacttttaag

SEQ ID NO: 24791 - DNA, 120 bp, synthetic construct
  source 1..120: mol_type = other DNA
taaaggaaaaaatcacacacacacacacacacacaaaaccgccagtgccaaggcatctgagatacaaacacacttttgattcaatgactgtgtccttggtgaagcaaacagtcaacacgg

SEQ ID NO: 24792 - DNA, 120 bp, synthetic construct
  source 1..120: mol_type = other DNA
ctaaggggcaagaaaggtcaccacgtctctgagaagatatttggctggaaatggtaggttatgaaaaaccatgtcgtgtgaaatcagttttccctcatggattaatattttcctccagaa

SEQ ID NO: 24793 - DNA, 120 bp, synthetic construct
  source 1..120: mol_type = other DNA
tagaaattggggcattaccctcaagcaagacacccatcttgtggtatcttatttattttttttcattccagaaaattcttgtaaacttgaagtgagagctaaaggcttgttagaactggt

SEQ ID NO: 24794 - DNA, 120 bp, synthetic construct
  source 1..120: mol_type = other DNA
tcatacaaaccatcccaagtgatttgtgactcaaagatagccacgaaggcagcagaaatgcaattaacaattcctggaggaaagggaattgctttccaaataaagagagccattgtttaa

SEQ ID NO: 24795 - DNA, 120 bp, synthetic construct
  source 1..120: mol_type = other DNA
tgacagagctagaactaggatccagggtttctctttcatggttagttcagctaggaagaatatttaaagaagccagggtaattaagatgaaccttgataggtataggaaagaggtaagag

SEQ ID NO: 24796 - DNA, 120 bp, synthetic construct
  source 1..120: mol_type = other DNA
gccacctttacacaaagctcactgctgatggtaatcttgaaacattccctctgggacactcataatctcccagttttcctttttcctctttttctttggatattgctactcagtgtcgtt

SEQ ID NO: 24797 - DNA, 120 bp, synthetic construct
  source 1..120: mol_type = other DNA
tgaggcacagaggcatgtaccatgaccaagatttatacttagtgagtggcataataggaatttgaattcatgttctcactcttaaccaccttgttacagccaccttagggactggcatgt

SEQ ID NO: 24798 - DNA, 120 bp, synthetic construct
  source 1..120: mol_type = other DNA
ctatttattgtgtttgttgttctgagtgctttaggtgtttggtgttatgccagcctcacggtacctgtgaggtggtcattattatctcttgcttagaaatgaagaaactgaggcacagag

SEQ ID NO: 24799 - DNA, 120 bp, synthetic construct
  source 1..120: mol_type = other DNA
gcccagtaaggcaaagtgcaataaaatgaagtatgcctgtattttagatggataaagcactgtaaacatgggagagaaagcaactggagctagcatggtggtgagaaatggtagatagtg

SEQ ID NO: 24800 - DNA, 120 bp, synthetic construct
  source 1..120: mol_type = other DNA
ggagtagattctaagcatgtatattaagtttctaaattatctattagtctagatttttggaaattactacataatttatagaaaaactacacaataatattccttgtccttgccatccac

SEQ ID NO: 24801 - DNA, 120 bp, synthetic construct
  source 1..120: mol_type = other DNA
tatctgtgtaatatcaggatatattgagaaatacgaatcaagagttagtaagcaataaaaatacctctgctcttaggccaagccatgctggtgggcagcatggtcctctcacgtactgtg

SEQ ID NO: 24802 - DNA, 120 bp, synthetic construct
  source 1..120: mol_type = other DNA
aataagatcatcttgtgatagacacctcttagccgctgctcacaacagcattgaagtgggagccgtgtttgctgtcttaaaagcaattatgatgcttggtaagattattctgaccctaag

SEQ ID NO: 24803 - DNA, 120 bp, synthetic construct
  source 1..120: mol_type = other DNA
atatttcttctcattggggggactcctatggaatcaaaggtgtcctttgtttaaagctggagagttcagggagcatcagctaatgcccttaattatacagatgaataaagttagctggcc

SEQ ID NO: 24804 - DNA, 120 bp, synthetic construct
  source 1..120: mol_type = other DNA
agcagtttcttcttggtcttggattatgtacttgtgaggtaccagagggaagactagtttgtggtgaaggcagtggtgcaggtctggtagcctgctgagacataaggaaacaggtcatgt

SEQ ID NO: 24805 - DNA, 120 bp, synthetic construct
  source 1..120: mol_type = other DNA
ctaagtacttagcattttgccatgtacagtgggtcatctactgagactcagtacctcccacatcaagttattagccacattgacctgtggcaaatgacttcttttgatgttcccatgtaa

SEQ ID NO: 24806 - DNA, 120 bp, synthetic construct
  source 1..120: mol_type = other DNA
tgtcgaatcaacacatttcctatcactgttagtctctggtgaaggattcatcgatgagcttcatcttcctcagcactgattttgatgtattgttaatggctgcctggagtgcaaactctg

SEQ ID NO: 24807 - DNA, 120 bp, synthetic construct
  source 1..120: mol_type = other DNA
taactgatggccttagcttggctattgttgaagaatccttcactgttaggctcccctgcaagacttccctcttcagcacttgtttttttttttttatttttttttattttttattttttt

SEQ ID NO: 24808 - DNA, 120 bp, synthetic construct
  source 1..120: mol_type = other DNA
tttcttttgctgtgcagaagcttcagcacttgtttactggtcacatgctttacacagcactctgcttagattttgcctttgaggttggccatctcccttcagctgctctgatttggaaga

SEQ ID NO: 24809 - DNA, 120 bp, synthetic construct
  source 1..120: mol_type = other DNA
ctacaaagccagcttaattctctagctgcagtagtccttcaaaaccggagagccctagacttattaacagctaaaaaaggaggaacttgcctcttcttaggaaaagaatgttgctatttt

SEQ ID NO: 24810 - DNA, 120 bp, synthetic construct
  source 1..120: mol_type = other DNA
gttactgctattgttgtattggggattaagtttcaacatgaattttgaaggggacaccattattttcaaaccagagcaaggggttcaaacctaaaggccagaggaccagtatggaggtca

SEQ ID NO: 24811 - DNA, 120 bp, synthetic construct
  source 1..120: mol_type = other DNA
tttatggattgtgcttttggtgtcatatctaagaactcttttcctaatgcagggtcacagtaattttttcctaaattttcttctataagttttgttagttcttgcagttaaatctttgac

SEQ ID NO: 24812 - DNA, 120 bp, synthetic construct
  source 1..120: mol_type = other DNA
caatcaaaagaagtagtgtttttatagagtaactgctgtgtctaccacacagtttaatgcatcactatatacgatacatatgttaacattgctttgagagcaaaaaacggcactgggaag

SEQ ID NO: 24813 - DNA, 120 bp, synthetic construct
  source 1..120: mol_type = other DNA
tgtaaactgcattatttaaaaaatgaaaagatttatcatggtctagggtggtgctggtgaggaccagagggtcagtgagagatacactctgcagcatccttctggaaccatctgatttga

SEQ ID NO: 24814 - DNA, 120 bp, synthetic construct
  source 1..120: mol_type = other DNA
aggaaagcagaaatacagaaagttagattatatgcccaaagttacaaagcttgttggtgataaaacaggattctgtctagctacaagtcctctctctggcttccttccacttctccaaca

SEQ ID NO: 24815 - DNA, 120 bp, synthetic construct
  source 1..120: mol_type = other DNA
tttacacatatataaatgtgtatgcatgcatgattggaacatatgtgtgtaacagttgtaataataaacaacttgtcaatctccaaagtggtaagtagtcatagacatcctgccttttca

SEQ ID NO: 24816 - DNA, 120 bp, synthetic construct
  source 1..120: mol_type = other DNA
cctccttaccctggctaagcaccagcttaccttcgagggcactacttcctttctccaaggatgctcttttgtataaatcacagaagatttagatataaaccaaaaggcattatctatgcc

SEQ ID NO: 24817 - DNA, 120 bp, synthetic construct
  source 1..120: mol_type = other DNA
aggcgtgagccactgtgcccggccaggtatttcctaatggcaacacaagaacagcctaatacagtcaaatagacagtgtcaaaaaatgaaatgtgacttttaggaatagccttttaaata

SEQ ID NO: 24818 - DNA, 120 bp, synthetic construct
  source 1..120: mol_type = other DNA
acagtagctggcacatccgaaacaccaaaaatggtagctatttgtaacagactgaatgtgtatttacgtccccaaagacctaaccctcagtgtgatagtatttggagatgggtcttttga

SEQ ID NO: 24819 - DNA, 120 bp, synthetic construct
  source 1..120: mol_type = other DNA
agcccattttacacttttatagatgctatcacattagcattcacatatgttgaattttcacattcttagtacctgccactttgggcattaggtacttctctaatctgttactttttaaaa

SEQ ID NO: 24820 - DNA, 120 bp, synthetic construct
  source 1..120: mol_type = other DNA
gttgctcaaaactgttttcactcaggaaaagattgaattgcttcaaatactgaacttctcccttagaaaatgtacaattgactgagtatgaggaaaaaaccacttttctttcttgaccat

SEQ ID NO: 24821 - DNA, 120 bp, synthetic construct
  source 1..120: mol_type = other DNA
agctgtcatgatctggttgctaatgcctgtaagtgagcatcaaaactcgcagagtcggtgtcaccagattggaaaaaagtctcagagacaaaagttcagcatgctttcaaaaaaaaatgc

SEQ ID NO: 24822 - DNA, 120 bp, synthetic construct
  source 1..120: mol_type = other DNA
ataagtgtcagaactggagatgctgacatgaacaacaagccatccctggcttctatctgctaggtttagaaaaaccaacatgtaatcaaatcattgcagtgcagtggggtgatagaatag

SEQ ID NO: 24823 - DNA, 120 bp, synthetic construct
  source 1..120: mol_type = other DNA
aggctaccaggttaggagccagcccataagcctttgagatttaggagacaaaactggggcggcttgcccttctccttttctcatcggcaaaataactcaaaaaaatcacaataaaacata

SEQ ID NO: 24824 - DNA, 120 bp, synthetic construct
  source 1..120: mol_type = other DNA
tgaatgccttttattcctttctcttgcctgatgctctggctaggatatacagtactgagtggaataggagtagtgaaagtgtgtatccttgtcttattccacttcttaggggaaaggctt

SEQ ID NO: 24825 - DNA, 120 bp, synthetic construct
  source 1..120: mol_type = other DNA
ggaaaggagacaaaaaagagctatttttgccagctgtgtgaaagacaggttgctgtcagtggggtagacatcagctaatttattcctcaactaaggaaccactataattttggagcagtc

SEQ ID NO: 24826 - DNA, 120 bp, synthetic construct
  source 1..120: mol_type = other DNA
aggggcaacaagatcttgctttctaactcgagtaaaacagaacattcagctcattcaagccatcagccatcaccttttcttccctgaatattttatttcaacttcatcaaagggaccctg

SEQ ID NO: 24827 - DNA, 120 bp, synthetic construct
  source 1..120: mol_type = other DNA
tttactgtaagtgtgtttcatatcattaaacatgtctcataaacatgacttttcaggattggttaatattttttgttctctcagcagagagagccaggaaatagttgtctctcactgtgt

SEQ ID NO: 24828 - DNA, 120 bp, synthetic construct
  source 1..120: mol_type = other DNA
tctgccaatgaggtgggaaggctttgtctattacatgtcatctacacagtggatgccactcaaagttttggggcttcgaggagatgtccaaatttcaagttgatccatagacttaataaa

SEQ ID NO: 24829 - DNA, 120 bp, synthetic construct
  source 1..120: mol_type = other DNA
tgaaagcagtttaagactgaaaatacatctaccaggctttaaacttatttttgtgctgataacgattttataaattccaggtttctaaatgaagtagatagtgttctagggctgttgttt

SEQ ID NO: 24830 - DNA, 120 bp, synthetic construct
  source 1..120: mol_type = other DNA
attatattcacaaacacacattttttagagtaacctttccttgccttttaattgtgtgtgtgtgtgttttttgttttttttttttagagctgtcaaattttaaggaggtaagtttctggt

SEQ ID NO: 24831 - DNA, 120 bp, synthetic construct
  source 1..120: mol_type = other DNA
cagttggaaagagagttgtcattgattatgaatgtttgtcctgcgtgtgggaagtaccagataggtagcatgtatcacatgccctttccctgcctggattggacagttactattttatat

SEQ ID NO: 24832 - DNA, 120 bp, synthetic construct
  source 1..120: mol_type = other DNA
gagagagccagtttgaataacaaatttgaatgtcactctgacctctgaggagctgaagactaaggccaggccaaatttcttactacacaaaggtctttctctttcacctcttagatgaat

SEQ ID NO: 24833 - DNA, 120 bp, synthetic construct
  source 1..120: mol_type = other DNA
cctaatcacctaagacagtactgggaaacatagcaagtattcagtacatttgtgaatgtcttgacagagaaggagtctgtggtatattgttggttgaaaattctaattttcaggttagtg

SEQ ID NO: 24834 - DNA, 120 bp, synthetic construct
  source 1..120: mol_type = other DNA
ccattgtgtaacattgccttctctcattccaagctgtggactagctccccctgcaaaatggaagtaaaggtagacactttcagattttactctatacatttcttttctatgttacttatt

SEQ ID NO: 24835 - DNA, 120 bp, synthetic construct
  source 1..120: mol_type = other DNA
gtacaaacacaataggatgaaaaatgcttaggcatgcaattggacccgaattttaaaacttccttgcctgcccacagaccttaccatcataaacaacaaatggcagagtttataggtcat

SEQ ID NO: 24836 - DNA, 120 bp, synthetic construct
  source 1..120: mol_type = other DNA
attctggatatgagttaggtcccaccagttatgtgtattcacatgcagtttttttccacatggaattttgaaaatggaagtggtgtggtaggctatctacttgctgcttcagctgttgct

SEQ ID NO: 24837 - DNA, 120 bp, synthetic construct
  source 1..120: mol_type = other DNA
tgccaactgaaatgtctgtcacagaaagacgaacactgcatgattccacttatatgagatgggtaaaatagtcaaattcgtagaatcgaggagtgaaatggtggttaccgggttctgtgg

SEQ ID NO: 24838 - DNA, 120 bp, synthetic construct
  source 1..120: mol_type = other DNA
cctaaaataggcatatagaattgtatctttctttcccataatcagaaaatagcaataacatacatatatacacatgcatataaaaatgtgtatttaaaaatgtttggtagaaaaggtacc

SEQ ID NO: 24839 - DNA, 120 bp, synthetic construct
  source 1..120: mol_type = other DNA
tcatgaaaatgacagaggaggtaaccccattaagacccaggttttatatcctgagtcttgatggggatttactctagtcctgtctttcgggtcttggaggcacatcctagttacttgtta

SEQ ID NO: 24840 - DNA, 120 bp, synthetic construct
  source 1..120: mol_type = other DNA
atctaatatgtacctgtatcagtagttacagtattgaagttattccacatcaggtagtaataactgctgcctcatgagaacattcacctctgctctctcagtgtcttccctgggacaggt

SEQ ID NO: 24841 - DNA, 120 bp, synthetic construct
  source 1..120: mol_type = other DNA
tcatgtttgtttcccctacaagatcaagtgcctctcaggaatagtggctgtgttcatgtcaccactgtacacccagggcctagaactacttacattatattaggaaatgtctcactaagt

SEQ ID NO: 24842 - DNA, 120 bp, synthetic construct
  source 1..120: mol_type = other DNA
ataagatcacaccagttcataagagagaaaagcttttacccacatcttgcataataaacaacagttgaacaaccgcacatgatggcttatgcctgtaatcccagcactttgggaggctga

SEQ ID NO: 24843 - DNA, 120 bp, synthetic construct
  source 1..120: mol_type = other DNA
gtcaacacaatcaggccagagtcaaagtactattctatgattacatgtaaacatggctgagatttaagaaaatgttcttgccagcactctttttttccttttattattatactttaagtt

SEQ ID NO: 24844 - DNA, 120 bp, synthetic construct
  source 1..120: mol_type = other DNA
tctaatacaagagacaaagtgatgagagatgtagcaaatcatatgcagaatgagaggtggcagggacaacttctagataggaaggactccagaacgatttctcagagaaggcagtacttg

SEQ ID NO: 24845 - DNA, 120 bp, synthetic construct
  source 1..120: mol_type = other DNA
ttcccctgagatactaacaggtgctatgtgctatgtgcaggagggatgataagggagaagccctgtcctcaaatgtatttggggagtttttaatgcacacatcttacttatcttttatta

SEQ ID NO: 24846 - DNA, 120 bp, synthetic construct
  source 1..120: mol_type = other DNA
tataagacactaaaagctgtttataaactgtggttggggctagttggcatgcatcatctgcttagagagcccttccctgaccaccctattaaaagtaaacgttctcgtacccatcacttt

SEQ ID NO: 24847 - DNA, 120 bp, synthetic construct
  source 1..120: mol_type = other DNA
tttacagtccacatgaaccaacaaaaataaaatctgcaacatgcaacttatccctgaaaacacatctcagggaataagattgagtatcctttacctgaaatgcttgggagccagaagcga

SEQ ID NO: 24848 - DNA, 120 bp, synthetic construct
  source 1..120: mol_type = other DNA
gggcaggcaaaggacatcaaagaacagagcaacaagaaaagtcccaggttgtcattgtaataccacagtagtcttaatagtcaaaggacaagtaaaggcctgttaatagcctgttgattc

SEQ ID NO: 24849 - DNA, 120 bp, synthetic construct
  source 1..120: mol_type = other DNA
caaaatagaaaactattggccatagttgtttgaaagtaccgaaacatgtaatttacaagccccagcctaggtttttgtctatggtgggacgttgcatctctctgcatggtttcttcaact

SEQ ID NO: 24850 - DNA, 120 bp, synthetic construct
  source 1..120: mol_type = other DNA
tgccaggatttctaatgtattgtgatggtccatttgtagtagtgagaggtaggtaaaatgcatccttggttgactctcagactctgaagatatgtaatcatagacagctgggctgctgtt

SEQ ID NO: 24851 - DNA, 120 bp, synthetic construct
  source 1..120: mol_type = other DNA
ttatggcctatgtgatccttaaacattattttaattttccatttcaggtgaacctggccctaagggagataaaggaaacattggtttgggaggagtgaaaggacaaaaaggctccaaggg

SEQ ID NO: 24852 - DNA, 120 bp, synthetic construct
  source 1..120: mol_type = other DNA
cagctgtagtaaatggaggcatgcaaaaatattggatgaggtttcatcactagcaataagcaaagaccaattatgatataatatagcttgacatctgttatcaaagtggatgcctcataa

SEQ ID NO: 24853 - DNA, 120 bp, synthetic construct
  source 1..120: mol_type = other DNA
tactgcatacacttgaaactacagcgtatcctttcaaatgaaaaatcaaagtgtgtgtctgtgtgtgtgtgtgtgtaggtgtattttctcttctaaacaactggtgtggatgttggctaa

SEQ ID NO: 24854 - DNA, 120 bp, synthetic construct
  source 1..120: mol_type = other DNA
tcaactttgaacaaggtcttacaaacacctagattttatttcatttgcaacctatgtggtttgcttatgctagatattgcaaatattggaacagaacagagccctcagaaataatgccgc

SEQ ID NO: 24855 - DNA, 120 bp, synthetic construct
  source 1..120: mol_type = other DNA
ccaacctgtggcctctgtaaatcctctgtaaaggcacaaaggatagacaccgctgcctacatacaatatagtagaaattttatgtatctattctatacttaagaatatatttctctggct

SEQ ID NO: 24856 - DNA, 120 bp, synthetic construct
  source 1..120: mol_type = other DNA
acatgtgactctgaatagggtatcttccccactgagatattgggcattgcctgatttgggggaagagggaatattttaatcactatcactgcatagcatgtaaaagccttcaagagtaga

SEQ ID NO: 24857 - DNA, 120 bp, synthetic construct
  source 1..120: mol_type = other DNA
tcacagaagaaccattctggacctcagtttccccatctataaaatggtgagactggatacagtaatcgctaattctgtggtataagaatgactctaagtatctctgctttcatactggca

SEQ ID NO: 24858 - DNA, 120 bp, synthetic construct
  source 1..120: mol_type = other DNA
taagtaagtttggggacttaatacaatatggaaaccatcaattagacatggttgatatgggagagaaatgtgtcaaaatgacacatttttttggactgaacaactagatagatggcaatg

SEQ ID NO: 24859 - DNA, 120 bp, synthetic construct
  source 1..120: mol_type = other DNA
ggcccctactttgtccctacctggtagttatcaatatgtagacaccacccagataccatgccaaatgtcaaagatttttaaatcagagaaaaacctagagaaggagtcattagcatccaa

SEQ ID NO: 24860 - DNA, 120 bp, synthetic construct
  source 1..120: mol_type = other DNA
acagaggtttcactttggtccatattttccacttgggtcaataaatcttggtattcacctcaactcgaatcagtatcaggtgattattaattcatggtatactcgactagcagccaaaac

SEQ ID NO: 24861 - DNA, 120 bp, synthetic construct
  source 1..120: mol_type = other DNA
tgggtgcaatcaagagtgaacttcagaacttgcttcttttttttgcccccaaaaccattgttttatataactaatggaaagtacaacctatagctaccaggcatttaaaataatctattg

SEQ ID NO: 24862 - DNA, 120 bp, synthetic construct
  source 1..120: mol_type = other DNA
gacccaaaatgctacatactgtgtgattgcatttatctgaaatgtccagaataggcaaatccactgggacagaaagtagattagggagggataatgagaagtaactgctaacaggtaaag

SEQ ID NO: 24863 - DNA, 120 bp, synthetic construct
  source 1..120: mol_type = other DNA
tgaaatgacctcagaggttaaaggacaaggtcagctaccaggtacttttttcaaagacaaaaaaaaaaagaaaattctgttcattctaccttagactcaagaaatcattccttacatgat

SEQ ID NO: 24864 - DNA, 120 bp, synthetic construct
  source 1..120: mol_type = other DNA
tttctcatgtctgggactcacattgctctccactacctgagtcccatccccaaagactctgatttaattggattggggttagtatttttaagcattccaagtgattctatgcagccatat

SEQ ID NO: 24865 - DNA, 120 bp, synthetic construct
  source 1..120: mol_type = other DNA
gtgatgtcaggcaatgaagtaatgacgtatccctaagtcattcattcaaccaagacatttggatctccctaaacaaaactaaaatcataacgtaatagaaaatcacaatgcagataactt

SEQ ID NO: 24866 - DNA, 120 bp, synthetic construct
  source 1..120: mol_type = other DNA
acgggcacatttgtaggccaagaaacaatatctaagcctgtttgaatttagtgtcagtgtaatacctgcatcaagaaggaaaagtcataaactttgatctgacattagacataataaaat

SEQ ID NO: 24867 - DNA, 120 bp, synthetic construct
  source 1..120: mol_type = other DNA
gagataattatgtttaggagcattagaaacgtgaaatgttagtgtgaccataaaggttggagactgagaagtcacagaaaacccagctactttggcttgccttactgcttgtccaggtag

SEQ ID NO: 24868 - DNA, 120 bp, synthetic construct
  source 1..120: mol_type = other DNA
gggattacaggcacgagccaccttgcccagccaaaactggaccttgaacttcaaagagatttctcttttccccttactacattgacagggctttataacattgcttttttactttattgt

SEQ ID NO: 24869 - DNA, 120 bp, synthetic construct
  source 1..120: mol_type = other DNA
ataaaacagatttgtaaactttgctcctggactagaatgctactttgcaggcaaacttacttttgtaaaaatgctagactctggccagacatggtggctcacacccataatcccagcact

SEQ ID NO: 24870 - DNA, 120 bp, synthetic construct
  source 1..120: mol_type = other DNA
acaaaccccaaagcaagacttttgctttaacatttaaagcgaagttgaaatagaccaccctgagagatatgatgcagtcattctacaagttacaccttaaacattcatttacaactgata

SEQ ID NO: 24871 - DNA, 120 bp, synthetic construct
  source 1..120: mol_type = other DNA
aacatttatcatgtgccagacacagttcaaagcaccaggaatgtggtgctgaacatgcaggcaagatccctattctcacaaaacttattaggctccagttgggacagccagatttttaaa

SEQ ID NO: 24872 - DNA, 120 bp, synthetic construct
  source 1..120: mol_type = other DNA
tttccacacctcccagcaggcagaaaaacagaagcagagccctaagctgatagcccaggccacaaagagcaatttcagtgaattgtgcaaagatatattttcaaaatacagatcacaaga

SEQ ID NO: 24873 - DNA, 120 bp, synthetic construct
  source 1..120: mol_type = other DNA
acatataaatagtagctattcatattgtgagatggtgaactcactctcacactctgagttccagcaccataccacagcaaattgtcttctatggcaaagtctcatgccccagtgtgagtg

SEQ ID NO: 24874 - DNA, 120 bp, synthetic construct
  source 1..120: mol_type = other DNA
gaaagaaagctgcctagagctaggggaggaaaagagagaggtagggaggatgggtacaaagtctccttttggagtgatgaaaatgtttaaaaaatggactatagttatggtcacacaact

SEQ ID NO: 24875 - DNA, 120 bp, synthetic construct
  source 1..120: mol_type = other DNA
tgctaactttagtgtactaaggaatcttctggagaatttcgtgagaatacacactgcctgctctttctgttcaaagggaggatatctaggcctcccttcagagattctggtttagtagat

SEQ ID NO: 24876 - DNA, 120 bp, synthetic construct
  source 1..120: mol_type = other DNA
gtgaatatctgtgaggaatctgcgtttttaaacaagcaccccgcttaattctgttgctgatagttcctgcacatatctggagaaactctaacctgaatggttagtgttgtagaatgactc

SEQ ID NO: 24877 - DNA, 120 bp, synthetic construct
  source 1..120: mol_type = other DNA
tccacgagaatcctgtgttcatttttctctaaagaataattacgaccatctaaggtaatagctaaagaatcgagacctgtaagaactcttagccaggtacagtggcctgtgcctgtagtc

SEQ ID NO: 24878 - DNA, 120 bp, synthetic construct
  source 1..120: mol_type = other DNA
tctagctgctgtggtaaatgaggtgaaatcttttgtgtatacagttaattcccaattattcatacatgctttagccaaattgctgattctctgtggactttggagaccttccccccgcca

SEQ ID NO: 24879 - DNA, 120 bp, synthetic construct
  source 1..120: mol_type = other DNA
ctggatttgtggaaccagttctaaagctggcattactttcagattcttagtatcttagaggtgggtgtgatcttgtagatcctgtttcagtctcctcagaagcgggaaaaattggtatca

SEQ ID NO: 24880 - DNA, 120 bp, synthetic construct
  source 1..120: mol_type = other DNA
tgacccaccccctccctacctgggctgtctttggtcattaacagccaccattaatgttactataggactatgtgtagtagccaaaaaagtgaatatgactttacgatcactaagagatca

SEQ ID NO: 24881 - DNA, 120 bp, synthetic construct
  source 1..120: mol_type = other DNA
tgttttcctggttgcccagatggtcagaacatatccactagcatccatatgtcaaataagttgagtttttagatgttatttcagaaaaggtctgagagactttgatcaaaggcaattggt

SEQ ID NO: 24882 - DNA, 120 bp, synthetic construct
  source 1..120: mol_type = other DNA
ccaaacaccctttacctactcatattcctatattttgcttctttgtacacactttgcttacacaacttgtctgtcttgtctgggcagtagatactttctccaaacatagagcgggctgga

SEQ ID NO: 24883 - DNA, 120 bp, synthetic construct
  source 1..120: mol_type = other DNA
gaggatgaaacaaaagtcttaatacagcactatacaaggttgggtggaccaaagggatcctctgccagtccctcaataataaagcgcctctaacaagttctatttaccccaatgttaaga

SEQ ID NO: 24884 - DNA, 120 bp, synthetic construct
  source 1..120: mol_type = other DNA
aatttgctggtagctaatgaaaagagggtcgcatagccagtattaaacaagcaattgttcaactcaagtatttcttggcctacaatcagaaagatgagcttatccaaagatgccctataa

SEQ ID NO: 24885 - DNA, 120 bp, synthetic construct
  source 1..120: mol_type = other DNA
tagactacctgaaattccctctatgctgtaaatatccccagcttcatggtttgtacagagccttctcaacctgaaactccctcccaggtctacctttgaggtgttatcactttctttttt

SEQ ID NO: 24886 - DNA, 120 bp, synthetic construct
  source 1..120: mol_type = other DNA
ccagtaatcaagcctatgtaggttctgggtaaaatgctaagatttgaattatattagggtgccttgccatttggataggtttccaatttctgaattctcttgttcctcacagttgttgat

SEQ ID NO: 24887 - DNA, 120 bp, synthetic construct
  source 1..120: mol_type = other DNA
gccaggtagaggaaaaagattaatagaaagatctcacaatatctcttaaaactcctgctcagatgtggcatatgtcactactgctcacatcccactagccaaagcatgttacgtaggcaa

SEQ ID NO: 24888 - DNA, 120 bp, synthetic construct
  source 1..120: mol_type = other DNA
taggctggtgcaaacataatcgcggtttttgccattacttttagtggcattatctgagcttctatcatggtcaagaaaagactctgactagagcagtcttccaacttccgttacaatgat

SEQ ID NO: 24889 - DNA, 120 bp, synthetic construct
  source 1..120: mol_type = other DNA
atagtagtaagagtgagagtggatatgtggccaaggtgatcttttctaaaaagcactattttctaattcttggggatgtggactgccttacagaggggagtaagtctgaacagtgtggaa

SEQ ID NO: 24890 - DNA, 120 bp, synthetic construct
  source 1..120: mol_type = other DNA
gtatcttctgaggttttgctggtatggcactgtagaggtagaatacagaacctcaatttgtgatattttttgggtagttcatcagttcaaaaaaccatgccttgtcccctggcagagtca

SEQ ID NO: 24891 - DNA, 120 bp, synthetic construct
  source 1..120: mol_type = other DNA
ctgggacgcaacatttgcaatcagaatacctttgaaaaagtatgcacttggtatcttccatggaaaactcaattgggagcatgggttcctctaaaatagatcaaccattaagaaaattgc

SEQ ID NO: 24892 - DNA, 120 bp, synthetic construct
  source 1..120: mol_type = other DNA
tacgttaaatatgtctcaaatgacagggtctattctcaaaacatttaacgacgggggcagaacaagggttgatctttcagaaggagacccccataaggttacgtgtaaattcctcagttg

SEQ ID NO: 24893 - DNA, 120 bp, synthetic construct
  source 1..120: mol_type = other DNA
ggtagatcctctattaatccaaaaaaagtagaaagttaaaatccacttagttaaaaatcagagagtgaggaattccatgaatagacaattgaaataaaatatagacattatagcaatgct

SEQ ID NO: 24894 - DNA, 120 bp, synthetic construct
  source 1..120: mol_type = other DNA
gtggatttttctgattccacgaaggcaaaataacatgtttggtggtcatccttctcagtacagaaatcaaaataccaggtctgaaattgtgtgtacttttgagtgtgatgagatggaaca

SEQ ID NO: 24895 - DNA, 120 bp, synthetic construct
  source 1..120: mol_type = other DNA
acactcagtggaagctcttaatttaggatattggtaccacgggaggggagcgccttagagaattgaagtactcttgtattttttcaccttccaggataaaagcatactgtttggataagc

SEQ ID NO: 24896 - DNA, 120 bp, synthetic construct
  source 1..120: mol_type = other DNA
atttacagggtatatgtgatattttgatacaagcatacaatgtgtaatgatcacataagagtaattgggatatcattacctcaagcgtttatcattcctttgtgttaggaggctttcagt

SEQ ID NO: 24897 - DNA, 120 bp, synthetic construct
  source 1..120: mol_type = other DNA
catggggaaagttttctaaccttttttgagcctgtttcctactgatgatccgtacctatggataagctaattggaaaggaagacccaaattaatattaacaaagactttacctgtgtagt

SEQ ID NO: 24898 - DNA, 120 bp, synthetic construct
  source 1..120: mol_type = other DNA
accttcgtggcagagcatgagagtactgtttaaagtcagcttgccaaaaatgtgcctttaaaaatatatatttaccaattcttggccgggtgtggtggttcacgcctataatcccaacac

SEQ ID NO: 24899 - DNA, 120 bp, synthetic construct
  source 1..120: mol_type = other DNA
ttgcccaaggcaatagaccagaaagtagcaaaactaggatttgaatccaggcaatctggctccagtgtctatgtgcatagctaaccctgggacaatcagcaataatcacttcaaagtatt

SEQ ID NO: 24900 - DNA, 120 bp, synthetic construct
  source 1..120: mol_type = other DNA
aggaaagtccaaagagatcataatgataagcagtaaaatcactccttagaataggaaaattatagactgggcatggtggctcatatctgtaaccccaccactataggatgctgaggcagg

SEQ ID NO: 24901 - DNA, 120 bp, synthetic construct
  source 1..120: mol_type = other DNA
cactgacaattaattttcaacatgagttttggagaggacaaacttatccatagcatacatcaagttatttaatacctcaggtaaaatgtagtttgtgctgatcccaggtcccggcaggtt

SEQ ID NO: 24902 - DNA, 120 bp, synthetic construct
  source 1..120: mol_type = other DNA
agtcaaatatgggccacatatactatagtggtctcataagattataatggggctgaaaatctcctattgcctggtaacataaagaacaatgcatgactcatgtgtttgtagtgatgatgg

SEQ ID NO: 24903 - DNA, 120 bp, synthetic construct
  source 1..120: mol_type = other DNA
tcttctggtcaaatactcagagtaaatgagaagtggagatactcactgctatacttacagtgaaagcccagaggaaaggatcaccactttgtatctgcactcacatattcactgcagcat

SEQ ID NO: 24904 - DNA, 120 bp, synthetic construct
  source 1..120: mol_type = other DNA
ataaataaagctaatgagagaatttgcctggttgagtgtgaaactgagccccactgagctgtattacaagagccaaaggtcctcccctacaggattttactgtgactgcctatcaaaact

SEQ ID NO: 24905 - DNA, 120 bp, synthetic construct
  source 1..120: mol_type = other DNA
tgctgtattcaaatctctgccgtttgcccagtacctagcccccggcaaccactgtcctaaagttttcccttgtccagaataacataaatggagtcatagggtatataatcttttttttca

SEQ ID NO: 24906 - DNA, 120 bp, synthetic construct
  source 1..120: mol_type = other DNA
tccaaaggagccatacatgagattcccattgctcaacagccttgtttagagttttcggatttctaattttcagtaatcaagagggtattattattttaattttcatttctcagattatta

SEQ ID NO: 24907 - DNA, 120 bp, synthetic construct
  source 1..120: mol_type = other DNA
ccccattgatctaaaaatcacttgtcatatattacatttccatatatacatggatatgtttttgaatctctattctgttctagcggccagttttgtccacctcagacaaacacctcacaa

SEQ ID NO: 24908 - DNA, 120 bp, synthetic construct
  source 1..120: mol_type = other DNA
aaaaaattcctctgtgtataaaacagcaggtggtgatatttttcaggatggccaccagactggcaagacagaggaaaatgtaagtaaaccgtaagaatcagattatcaaaaaagtctggc

SEQ ID NO: 24909 - DNA, 120 bp, synthetic construct
  source 1..120: mol_type = other DNA
caaataattctttgttgtaggagccatcctgtgtgtgcaatccaggatgtttagcatccctgtcctctaccctactgcaggccagtagtgccatcctgctaagttatggctatcaaaaat

SEQ ID NO: 24910 - DNA, 120 bp, synthetic construct
  source 1..120: mol_type = other DNA
tttatatccatcctgctcatttggggcatgtctttaagagaaggctgaaagttgtgagagtatattgtataccgtaagagaatcaactcttcatcatggatgggattgtgaaggctgaac

SEQ ID NO: 24911 - DNA, 120 bp, synthetic construct
  source 1..120: mol_type = other DNA
tctgcaaccttatttaatctgtcactataataattttgtggttatgctaagaaccatgtatacttttaggtattcttatttttgtcaatttttctaggttggcaaggaggcagaaaacct

SEQ ID NO: 24912 - DNA, 120 bp, synthetic construct
  source 1..120: mol_type = other DNA
ctgatgctgttctatataaggtacttttccacctacctcatctctgactacagtgctatatttttcacacagtaaggacaggtgttgtgttaatctcaccatgccaacaatcagggcacc

SEQ ID NO: 24913 - DNA, 120 bp, synthetic construct
  source 1..120: mol_type = other DNA
actttggttcctgggagacagaaccagtggagaagggagctctgtcagctggtgacttttttcaaaaaagcttgaggtttattaccatatccattaggtacttgaggtactgtgctaaag

SEQ ID NO: 24914 - DNA, 120 bp, synthetic construct
  source 1..120: mol_type = other DNA
cctcggcttccaaaagtactgggattacaggtggcttggagacttttgaagctacctaatgaatttgcatcccaatttctcacctctcaaatgaggataatgataacaacaatctcttcc

SEQ ID NO: 24915 - DNA, 120 bp, synthetic construct
  source 1..120: mol_type = other DNA
ttctcacagattagaaatgcttatttcttcatgggccagtaatagtgtttatggatcagcattgatctatggaccacactgtgagtcacaactggtctttttgcaaggggacagtaccac

SEQ ID NO: 24916 - DNA, 120 bp, synthetic construct
  source 1..120: mol_type = other DNA
atgcaagtacagtattgttaataaagcagcccagtatagttgtaaacatcttaaatgtagtaaacaagacttggcatgtcttttctccccaaaacatgccattacaatgctctttccatg

SEQ ID NO: 24917 - DNA, 120 bp, synthetic construct
  source 1..120: mol_type = other DNA
aatgtttagtaccaacctgatgacaaacactattttgttgaaaaggttttgcatttaaaaagaaaaatatgtaaaatccaaggcactaggccacgaaccaatatgacttttaaagaaaac

SEQ ID NO: 24918 - DNA, 120 bp, synthetic construct
  source 1..120: mol_type = other DNA
tggcgatcataaccatgagggaatctcccgctttcactttgtctccagctttgacaaacaccttgagattcagtgtgacaggttaatatttgaaaacacagaggtcctagatatgttcat

SEQ ID NO: 24919 - DNA, 120 bp, synthetic construct
  source 1..120: mol_type = other DNA
agaggcctacaggtcaaatgcactggtcaaatcagaggcctacagcccaaatgcactggtcaaatcagaggcctacaggtcaaatgcactggtcaaatcagaggcctacagcccaaatgt

SEQ ID NO: 24920 - DNA, 120 bp, synthetic construct
  source 1..120: mol_type = other DNA
aaaaacatgagtggctgccggggtttaggggggatgaaaggatgaatagacagagcacagaggatatttagggcactgaaactattctataccatagtacaatggtggatacatatcatt

SEQ ID NO: 24921 - DNA, 120 bp, synthetic construct
  source 1..120: mol_type = other DNA
gttgttcacaaatttgtatttatttgtcccatcatagttgtacgaaatctttgtggccttgcataatccacaatggaaagttgaggtctgagtggcacattctaaaccttaccttttaca

SEQ ID NO: 24922 - DNA, 120 bp, synthetic construct
  source 1..120: mol_type = other DNA
actgggcttaagcaacttggcaagctggcttcaggatgcattgacaattaaaggaagtcagaaggcagaaataaccaggaggtggacagaagtcaaggttattatccaaaaatgatctat

SEQ ID NO: 24923 - DNA, 120 bp, synthetic construct
  source 1..120: mol_type = other DNA
gaaatagcaagtaaggctgaaaacctctccaactcaatggctctcctattctgtttgattgtttgggcgaccagacacatatacctaagataagagatctcaaaaatcccaggagaaagg

SEQ ID NO: 24924 - DNA, 120 bp, synthetic construct
  source 1..120: mol_type = other DNA
aggtcttcaccatgattttagagctgcatggaatataaatgcaagcatttcttttactaaaaggccaattaaatggaaccttctaatttcctttcacttgtcttacaggttggatagggg

SEQ ID NO: 24925 - DNA, 120 bp, synthetic construct
  source 1..120: mol_type = other DNA
aaagtcaaaagacttccagagagagaacgagagagagacagagatacagaaaatcactagacacttgacttgctgactttttggaccttttgttttagtcaaggtgatcgtcccccctct

SEQ ID NO: 24926 - DNA, 120 bp, synthetic construct
  source 1..120: mol_type = other DNA
ttgatcaatatagccattttcatatagaagcagtcctacctattgccatttcaggtggaaagccttaccacacaaattgatactgtgtcctcaccaagtttaaaagatctggccgggagc

SEQ ID NO: 24927 - DNA, 120 bp, synthetic construct
  source 1..120: mol_type = other DNA
cttgccattatcagctggagtaacctatttcctttaaggccattagctccctgcctgagataagtatttctccaagctcaagaaataatgcttttattgggttaacagtccgtgatgaga

SEQ ID NO: 24928 - DNA, 120 bp, synthetic construct
  source 1..120: mol_type = other DNA
ctttgatgttactattattttggggcacgacaaaccatgctcataggaggatgaaagtaattgatcagtgttttgtggattctgactgttccagcaaccagtcattccccatctcattcc

SEQ ID NO: 24929 - DNA, 120 bp, synthetic construct
  source 1..120: mol_type = other DNA
tcatacctggatcatggcaacactttccttaacttcaaacactttaacctgttgcatgttcttctggcctcacactgcttttcctccacattctatagtttctcaaatgtcctctcagag

SEQ ID NO: 24930 - DNA, 120 bp, synthetic construct
  source 1..120: mol_type = other DNA
tgttatatgcagatccatgtgtatatcacatcagttatatgcagctccgtctgtttatcacatcggttacaggcagatccgtgtgtatatcacatcggttacatgcagctccatgtgtat

SEQ ID NO: 24931 - DNA, 120 bp, synthetic construct
  source 1..120: mol_type = other DNA
ccgtgtgtaaatcacatcggttacatgcagatccgtgtgtatatcatataggttacatgcagatccgtgtgtatatcatataggttacatgcagatccgtgtgtaaatcacatcggttac

SEQ ID NO: 24932 - DNA, 120 bp, synthetic construct
  source 1..120: mol_type = other DNA
agatccgtgtgtatatcacattggttacatgcagattcgtgtgtatatcacatctgttacatgcttatccgtgtgtatattacatctgttacatgcagatccatgtgtatattgcatgac

SEQ ID NO: 24933 - DNA, 120 bp, synthetic construct
  source 1..120: mol_type = other DNA
tagctaaatatctaaatatctaacttccgaccctcattcttgaatcttttctgtcagttttttggtgtgactttgcctgacataagcttgtgaccttcagttagggcgtgcggccttcag

SEQ ID NO: 24934 - DNA, 120 bp, synthetic construct
  source 1..120: mol_type = other DNA
tgggcaacagagcgagactccgtctcaaaaaaaaaaactctacttcccatctgatattaagcttctggggcttttctgataaagatgactacatcctgtagtctttgtcattacatggta

SEQ ID NO: 24935 - DNA, 120 bp, synthetic construct
  source 1..120: mol_type = other DNA
tattccatggtgtatgtataccacatttctttatgcactccttggttggtggacatttaggttggttccacatcttgcagttgcaaattgtgctgctataaacatgcatgtacaagtgtc

SEQ ID NO: 24936 - DNA, 120 bp, synthetic construct
  source 1..120: mol_type = other DNA
tctaggcagcttagcaacttgtctgcctgttgtagtatttcattacctaattcattattagctgggacctactgagagttttgaggcattggagaatgagggtctatgaagagtcaggtt

SEQ ID NO: 24937 - DNA, 120 bp, synthetic construct
  source 1..120: mol_type = other DNA
tgctagtgggaatataaaacagagtagacactttggaaaacaatctggcagcttcttaaatgttaaacatagagttaccatatgacccatcaaatccattcctgggtatatacccaagag

SEQ ID NO: 24938 - DNA, 120 bp, synthetic construct
  source 1..120: mol_type = other DNA
taaaagtggctgaggatctgttagccatttacaggtataagggtgagaggagggtacttaaatgcggactgccatttacccagatcgtgattctagcagttccaaaatacctcacatatg

SEQ ID NO: 24939 - DNA, 120 bp, synthetic construct
  source 1..120: mol_type = other DNA
aaaatgctattgcataggcttagtctgatgtgagtcttccttggaagcaccaaagtcctgaggtttaaacaaatcaggagaaataattttgcgtttccgggccagggcaaaattctgctt

SEQ ID NO: 24940 - DNA, 120 bp, synthetic construct
  source 1..120: mol_type = other DNA
agaaaatgcagtctttactctgaaggaatctagaaaggaaaatgccggaaataaacttcagtattagaattacctgtggaacctttttcccttccctccctacctctttctccccatccc

SEQ ID NO: 24941 - DNA, 120 bp, synthetic construct
  source 1..120: mol_type = other DNA
tttgggtcatgggggcagatccctcatgaagagcttggcaccatcctcatgggaataagtgggttttcactctattagttcccacaagagctggttgttaaaaaagagcctggtaccggc

SEQ ID NO: 24942 - DNA, 120 bp, synthetic construct
  source 1..120: mol_type = other DNA
gagatagagtgtaagatgaaaacttaaatagggagcttggtctggtctggggatcaggaatcttctttctcttgcatcatctgaaaataatgagtagctaaatgccaacaatgggggatt

SEQ ID NO: 24943 - DNA, 120 bp, synthetic construct
  source 1..120: mol_type = other DNA
gattcagattcctgaattccaagggtaaaggcaaattattataaaaggcaaaaaaacttatagataccgggggggaaaaacagacaggcgtgttggtgtgcacctgtagtccctgctact

SEQ ID NO: 24944 - DNA, 120 bp, synthetic construct
  source 1..120: mol_type = other DNA
aaactaagtccttcaaattgtgccgtatggctcaaatgtcttcctaaacccttctgttatcaaaaggcaaatagatcttcccttgaatctaaatgacagcctggctttctcctggctcct

SEQ ID NO: 24945 - DNA, 120 bp, synthetic construct
  source 1..120: mol_type = other DNA
tgtttctgagtcatttcacttagaataacggcctccagttccatccatgttgatgcaacggacatggtattattcttttttatagctgagtggtattccatgggtgtgtgtgtgtgtgca

SEQ ID NO: 24946 - DNA, 120 bp, synthetic construct
  source 1..120: mol_type = other DNA
aagaaacaagaggctggagattgtcaaattcagtatcccagttggctcttgattcttggtgaaaccatccctcagctcctagagggagattgttagatcatgaaactaattaccatcctt

SEQ ID NO: 24947 - DNA, 120 bp, synthetic construct
  source 1..120: mol_type = other DNA
tcgtcctcaggcaggttggcttcctggatgatcagagaagtagaatctagggtgaaatgaaacaaaagtagatggagaaatctcaacaggaccaagtagagagggagaatttaggaattt

SEQ ID NO: 24948 - DNA, 120 bp, synthetic construct
  source 1..120: mol_type = other DNA
acttgccctgtcttagatttgtaattgcatactaaattttcccaccatattatttctatccatttctattcacgtgtaattttttctactttaggtattttgattccatgccttctggtc

SEQ ID NO: 24949 - DNA, 120 bp, synthetic construct
  source 1..120: mol_type = other DNA
agtgagaggaagggagcatgtaccgtgtatcatttaatcaaccttgagcttgagaccaaagggaacataccctaagtttaactaggatgggtttatccagatataatggcatcacatcgt

SEQ ID NO: 24950 - DNA, 120 bp, synthetic construct
  source 1..120: mol_type = other DNA
gatattgtgggactcattcctccactatctgcaactctttgttcaaatgtccccttctcagtgagttctcctctgactgccctttggaaaatggaaacctacctcaacccagtacttccg

SEQ ID NO: 24951 - DNA, 120 bp, synthetic construct
  source 1..120: mol_type = other DNA
ccttggttgtacttctgggcaagcctaattgaggtaaatggaatcagcggaatgggtgggatgaacattcccttattccacatcctcataagtttttctcagaaataaagacctcttatg

SEQ ID NO: 24952 - DNA, 120 bp, synthetic construct
  source 1..120: mol_type = other DNA
caactgactgtgtgcctattgatctatattacataaaaggctggaaaccactggtttgatgcttaaaccttagtgtctgttaaaatttcaaacatgatctggaatatattccccctagca

SEQ ID NO: 24953 - DNA, 120 bp, synthetic construct
  source 1..120: mol_type = other DNA
tacacacatttccaaaacactttcagatctcgtttgttgctcaaacctcacaccagtcccgtgaggtctccattcttagaaatagaaaaccaagttgaaatgacttgttccagatgaggc

SEQ ID NO: 24954 - DNA, 120 bp, synthetic construct
  source 1..120: mol_type = other DNA
gatcatacaatcattgaatcatagcacgtctaaaatccaaggctctgtgctggccactgtgtgttttacagactagctcagacgtggctatgagccccaagacatgtttaaactattaga

SEQ ID NO: 24955 - DNA, 120 bp, synthetic construct
  source 1..120: mol_type = other DNA
ccagtttataacatgaagctatcattatcatgtatattcatttatgtctgatgaacatattaacttttctttatgaaaattctttgtaagctgacatgaacagacacttctcaaaagaag

SEQ ID NO: 24956 - DNA, 120 bp, synthetic construct
  source 1..120: mol_type = other DNA
ttaatgtgtaggttgaggcaaaacaagcactcccttttgacagaagggataagtactggttcatataaatacaattttatctccatctgtatctgtatcagccatttatttctgcttgat

SEQ ID NO: 24957 - DNA, 120 bp, synthetic construct
  source 1..120: mol_type = other DNA
gtgtgagggtcctcaggcagcacccattttactaaaacatgcttagagaaaagatatttctatgagaaatgaaactgcagaatgctgagcagtgtaatatgtgacagttccctgggagtt

SEQ ID NO: 24958 - DNA, 120 bp, synthetic construct
  source 1..120: mol_type = other DNA
tggcgctctactgaagactggagcccaagaagacatttatagggattgtttattttcatgttgttactacactccatggtctgcaaaaccagagtgccagatgttaaattctatcagcat

SEQ ID NO: 24959 - DNA, 120 bp, synthetic construct
  source 1..120: mol_type = other DNA
gatagtaactggccactggagaaaaagctctgacctcaagccaaagagcaatctgtctacatgtctataccatggcagtgattattgataacacaactgattattgtaatcacaacttcc

SEQ ID NO: 24960 - DNA, 120 bp, synthetic construct
  source 1..120: mol_type = other DNA
agttcattaaggaatctccacattgtttccataggaccagcctgctgattttctctttacctatgtctcagttacctttgctgttttgtattctccctgactcctaagttgtccagtctc

SEQ ID NO: 24961 - DNA, 120 bp, synthetic construct
  source 1..120: mol_type = other DNA
cagagttttgttttatgcagtttgcctttggcttaatatgaaggaaaggggtgacggcaagagacaagtaaaggctgtggatgatttgtgtgaaatgaaggcagattctctttgaagggg

SEQ ID NO: 24962 - DNA, 120 bp, synthetic construct
  source 1..120: mol_type = other DNA
agacacagtagcaatctgatctctctttcttttccccacactctttggatcagagcattcaccagagacagaactaggaaatagtaaaaggcctgcttcattctccagggtaactagtag

SEQ ID NO: 24963 - DNA, 120 bp, synthetic construct
  source 1..120: mol_type = other DNA
tcagaaaaacgtgaggcacgaggagactaagttagttacttgtctagatcacagagctagtaactagcagagctctagagtccaaacctgagtcttgtgttaaataaatccaagatgtgg

SEQ ID NO: 24964 - DNA, 120 bp, synthetic construct
  source 1..120: mol_type = other DNA
accaacagttgccaatctgagagaaccctaccacagatgagggcagagatcttgtgggatgagctgcaaaaggcatttggatatttgaacatggtatgtactttcatctccttagaaaca

SEQ ID NO: 24965 - DNA, 120 bp, synthetic construct
  source 1..120: mol_type = other DNA
aggaattagagataatatctgaaaatccgcaaattactgcttagcatttgacagacgtaaaacaaattgtgaccatataaaccacaatgagataccatctcacaccagttagaatggcaa

SEQ ID NO: 24966 - DNA, 120 bp, synthetic construct
  source 1..120: mol_type = other DNA
tcagtgctagcacatgcagattgctaaagcagtatatcagccttgacccttccttcacactcatgacattcaggcaagttcaagagcacatatggaatctgccatgcaagaaatataaaa

SEQ ID NO: 24967 - DNA, 120 bp, synthetic construct
  source 1..120: mol_type = other DNA
ttgtaagatgaaaatctccttttcctttccccaagatagagttttgaaatatgaaggatgcattactatttatacattcccaatctttggtcagggactacaaatgagaaacaagtgccc

SEQ ID NO: 24968 - DNA, 120 bp, synthetic construct
  source 1..120: mol_type = other DNA
accgcacccagctctttcatcagattcttaaaaggtggtggtgacctccatttagatctgtaggactgcattttctgtagtggctcttgtttcctatctgcccatgactcttattaatta

SEQ ID NO: 24969 - DNA, 120 bp, synthetic construct
  source 1..120: mol_type = other DNA
atccatttagccatatgtggccactgagcacgtacaatgtagctagtcctaattcagatgagacataagtgcaaaaataaacactacaggactgggtaaaatagggaggtgatgacgaat

SEQ ID NO: 24970 - DNA, 120 bp, synthetic construct
  source 1..120: mol_type = other DNA
aaacctcatggttgtacacagcactttctggaattctactacatctttctggtcaatcagctctctcatgcttcgcaagttacttatttcacaccttccccttgtacctcaagcttccaa

SEQ ID NO: 24971 - DNA, 120 bp, synthetic construct
  source 1..120: mol_type = other DNA
atactgttttcccaaggttataaagtcagctagtgaaaaagctaagctgtgaacctagattctggtggctacaaagctgtaaaatattgttgctcttaagatataacataggccgggcgc

SEQ ID NO: 24972 - DNA, 120 bp, synthetic construct
  source 1..120: mol_type = other DNA
agcagagcaacgcagagtttggagcgtgctaaccagtaaacaaagttttagggtgcattagctttaccctagaaagcagggcacttggcttattttgaaataataggttagcttgagaat

SEQ ID NO: 24973 - DNA, 120 bp, synthetic construct
  source 1..120: mol_type = other DNA
aacatgaaagatagaaatgaaaacaaacaaaaagcttactggaaacagaggttatagagggagattaaaacttctttaaaaatgtaaatcccgtccgggagggaggtgggggccagcccc

SEQ ID NO: 24974 - DNA, 120 bp, synthetic construct
  source 1..120: mol_type = other DNA
ctttgagtcatccaagtagaattgtcaaagaggcagtcaagaggtctgagctggaacacaggcttgggagacagagactggcactttaagatagattacagaggccaggcacagtggctc

SEQ ID NO: 24975 - DNA, 120 bp, synthetic construct
  source 1..120: mol_type = other DNA
gagtcagtcaggatttctgagtcgtaggtcaggcataccccctaatcagtcaggtaatgtgagtatgtaagaaattgcgccttagaatttagtcgttttctctgtaaacagacaacattg

SEQ ID NO: 24976 - DNA, 120 bp, synthetic construct
  source 1..120: mol_type = other DNA
tgatttgatacttcattttctgctggcagagtttactcttaaggcatataataagtcctacctgacctcttgctcttcactggtcagacccaatccaaatgtctgatggatgtcagagca

SEQ ID NO: 24977 - DNA, 120 bp, synthetic construct
  source 1..120: mol_type = other DNA
cccagattccactttatacccaaaagagttgaaaacagggactcaaaaagatattttatgcaaatgttcattgcagcattattcacaacagccaacaggtgggagcacccaagtccatca

SEQ ID NO: 24978 - DNA, 120 bp, synthetic construct
  source 1..120: mol_type = other DNA
ggcatttcaaagaactttcgaaaaagtgtgtgctggtattgttactatcagcacattggtgaacttatttaccaataaatcaagtcttactattccccacccaactaaaccacatgtgct

SEQ ID NO: 24979 - DNA, 120 bp, synthetic construct
  source 1..120: mol_type = other DNA
gccatgcactgccctattgtactcaaatcgtgtatcaaatggagttggatttcttctcttcatacagtacagcatttccaagtagaaatatttctcaatgaaatgtggagagaagcaccc

SEQ ID NO: 24980 - DNA, 120 bp, synthetic construct
  source 1..120: mol_type = other DNA
acatgtatcttcaattgcagattatttacttttaaatataaaagatataaatgtcaaatattaaatgcatcttacatggttttcctacatagtgaaagtagaatgcttgccagttttgcc

SEQ ID NO: 24981 - DNA, 120 bp, synthetic construct
  source 1..120: mol_type = other DNA
gctccttcctctcctcacattgcttatgggagggtacgtttctgtgcatgcctcaagccagtctgtcatccaccacagagctaagcctcacttcttccagagggtgatgggacctagaat

SEQ ID NO: 24982 - DNA, 120 bp, synthetic construct
  source 1..120: mol_type = other DNA
agcccacaccacccactgcccagttcatcccaccccatccgctgcccagttcagcccaccccatcctctgcccagttcagcccacaccacccgctgcccagttcagcccaccacccccgc

SEQ ID NO: 24983 - DNA, 120 bp, synthetic construct
  source 1..120: mol_type = other DNA
agagcacagttaattgcctgaattaaaaagacaacttgtttctctgaaataaattcaaacgaaattcttctaaaccatctgtgaagtggggcagcctggcttctgctggcctgtgtccat

SEQ ID NO: 24984 - DNA, 120 bp, synthetic construct
  source 1..120: mol_type = other DNA
tactgcctcccgaaggggctggctgtttccatcggcgtcactgatagggcccctgaaatagtatgctgtcgtacctgcctccagaaggggctggctgtttccatcggcgtcactgatagg

SEQ ID NO: 24985 - DNA, 120 bp, synthetic construct
  source 1..120: mol_type = other DNA
tggctgtttccctcagcgtcactgatagggcctctgaaatatgttgtcgtacctgccttccgaaggggctggctgtttctatcggcgtcactgatagggcctctgaaatacattgtcgta

SEQ ID NO: 24986 - DNA, 120 bp, synthetic construct
  source 1..120: mol_type = other DNA
gcatagagtgctgctagtaagtccacaaaagatcacagagctgtatccttggacctagcctgttcaacgatgttatcaatgacacaaaaattcacagttagaaggcaaggaaatgctaac

SEQ ID NO: 24987 - DNA, 120 bp, synthetic construct
  source 1..120: mol_type = other DNA
aagccctcctcaagcttgagtaaaaggagcctgcatggaccccaaatcagcagaaaccctttcccttcttccgcctcagagaaagcctttcccttcttccgcctcagagaaagcctttcc

SEQ ID NO: 24988 - DNA, 120 bp, synthetic construct
  source 1..120: mol_type = other DNA
aactggaatttgaatgaacataaagagtggaatttttaacagccagatcaaagcgggcattaaaattagatgctactggaggagccaagatggccgaataggaacagctctggtgtacag

SEQ ID NO: 24989 - DNA, 120 bp, synthetic construct
  source 1..120: mol_type = other DNA
atgataacatctggccccttttaaagatgaaatatatgaaattgggatatagcaaaaaatacatctgagccgggtgctgtggtgtgttcctgttatcctagctacctgggaggctgaggc

SEQ ID NO: 24990 - DNA, 120 bp, synthetic construct
  source 1..120: mol_type = other DNA
taaaaataaatcccaaacacacacaggcacctgccctttgcctggtggaatggagagctctcgttttgttttgcccagaacgactttcatttacagcttcacattttcagcaagacgaaa

SEQ ID NO: 24991 - DNA, 120 bp, synthetic construct
  source 1..120: mol_type = other DNA
agggtccctacacacaacacaacccattttatctggccaacacaactctgatgccattcggctctcatgcagttgaaccgtgtcagatgagaagtggctggaaacctccctctagctgta

SEQ ID NO: 24992 - DNA, 120 bp, synthetic construct
  source 1..120: mol_type = other DNA
gtattattatttccaatatattgataaagcagtgaattctcaggaaagtgaactcgaaaggggcagagccaggactgttaatcacccagtcccactacccccaaaattcatgctcagcat

SEQ ID NO: 24993 - DNA, 120 bp, synthetic construct
  source 1..120: mol_type = other DNA
ggtatatgtgtgtgtggtatatgagtgtgcgtgcatgtgtgtgtgttgtgtgtatgtgtgtgggtgggggtgtgtgcatggtgtgtggttgtgtgtggcatgagtgtgcatgtctggtgt

SEQ ID NO: 24994 - DNA, 120 bp, synthetic construct
  source 1..120: mol_type = other DNA
gtgaagcctatcttttctcacagaattccactgtcttcaacgtggtaagattaacagacagacttctaacataagctgtcttcacagggccttgaggctggattacctcagttacaacaa

SEQ ID NO: 24995 - DNA, 120 bp, synthetic construct
  source 1..120: mol_type = other DNA
aattttacttaaggaaaaaagaaaagatggtattttaaaggctttctgcaaaaggccacacacacactgacctcagtgtttcagggcaggcaggcaggaagggaagaaggaatgaggaag

SEQ ID NO: 24996 - DNA, 120 bp, synthetic construct
  source 1..120: mol_type = other DNA
tgcagggaggtgccagctggtgatcattgtgcagaaagctgaagaatgtggcttaacaagattctgactcctcccagtttattacctagcatggatttccttcaaaatacagatttcgtg

SEQ ID NO: 24997 - DNA, 120 bp, synthetic construct
  source 1..120: mol_type = other DNA
gcggaaatgcaggcttggagctgagagacttggccagggtcacagggcagagagcagattctccaactcagggtcccaagtccacacgctttcctctccaccagatttgaagattgtacc

SEQ ID NO: 24998 - DNA, 120 bp, synthetic construct
  source 1..120: mol_type = other DNA
taggccccttttgggtctatgggctacttttgggccagtggagctgggtaaagaccatctcaaaccctgtgccaggggaggtcagactccaagagcgccacctttgggcttccagctgtg

SEQ ID NO: 24999 - DNA, 120 bp, synthetic construct
  source 1..120: mol_type = other DNA
cctgtctctggaggttcccccgcctcaatccacccagctaccccgaaaggcacaatcataggcctttctcgtcttttaagggtttttacttccatggggaactatgtgttggatgagaaa

SEQ ID NO: 25000 - DNA, 120 bp, synthetic construct
  source 1..120: mol_type = other DNA
accctttgcaccgatgacagctctgaagaggcaaagacactcacaatggacatattgacattggctcacacctccacagaagctaagggcctgtcctcagagagcagcgcctcttccgac

SEQ ID NO: 25001 - DNA, 120 bp, synthetic construct
  source 1..120: mol_type = other DNA
accagctctgcctgactccactgaagcaaaaccacacatcactgaggtcacagcctctgccgagaccctgtccacagccggcaccacagagtcagctgcacctgatgccacggttgggac

SEQ ID NO: 25002 - DNA, 120 bp, synthetic construct
  source 1..120: mol_type = other DNA
cagattaacacagaaagcaaccgatgaacactaaatcagtaccttttcagccacgaattccttttcgggtgtttatcctgagaaataattggagaagtgcacagatacatatgcccctgg

SEQ ID NO: 25003 - DNA, 120 bp, synthetic construct
  source 1..120: mol_type = other DNA
gcttgtataataaaaattataggttttccttaattgcatagtcagggcttgcctccctgcgcctcctaccccaactccccaacatacagtagttctgagggatttcaccccctgctccgg

SEQ ID NO: 25004 - DNA, 120 bp, synthetic construct
  source 1..120: mol_type = other DNA
cttccccggagatgggctggaagaccacgtcgttcctgggctcctcactcctccgtggaacgtggtataagaacgcctccaccaccgcggccagcagctggttgttcaggaagtcaatga

SEQ ID NO: 25005 - DNA, 120 bp, synthetic construct
  source 1..120: mol_type = other DNA
gtccagaaatagagagggagtgaaacctcttcacgggtctgtttctcggagccctgccatttccatttcatagttgcttcacacattcattcagtcagtcatttaacaaacatttattga

SEQ ID NO: 25006 - DNA, 120 bp, synthetic construct
  source 1..120: mol_type = other DNA
tcatagatgcatgagctatctccgtcacagttggagatcaaatgttcagcccaggagctgtttttttgcagttgtgagtagaaaacaggggtgaagttggaaggcagctggtcattcctc

SEQ ID NO: 25007 - DNA, 120 bp, synthetic construct
  source 1..120: mol_type = other DNA
tgttggagagcgcgatcaccgagacggtggcccagccgtcgaagctggccgagacctcagagccgttgcggctcaggaggactccggtggcgttgaacgtctcctggcctggagcatcgg

SEQ ID NO: 25008 - DNA, 120 bp, synthetic construct
  source 1..120: mol_type = other DNA
agttttcacatctgtataaaagggattacagtggcatctacctcactgtattgtgaggattaaatgcagtaacatctgcaaatccctcagaactgagtgaggccttgatacaacagatgc

SEQ ID NO: 25009 - DNA, 120 bp, synthetic construct
  source 1..120: mol_type = other DNA
gtgaaagcagtgtaatcaaaggggtaacctgaacacactcaatgtaagagaagacatttgcagcaattatcaagaacaaaagacatgtggccttcgtactgattgccacaccccagcata

SEQ ID NO: 25010 - DNA, 120 bp, synthetic construct
  source 1..120: mol_type = other DNA
gtagctttcatcacatttcctctgattggagttattcacccagtccaggagcacaggacgggccctcttgactcactcttgttaggatagaccccctacagcctgattttacaatcaaag

SEQ ID NO: 25011 - DNA, 120 bp, synthetic construct
  source 1..120: mol_type = other DNA
agctcctcaaaagcgtgacccccaagggtagagctttagagatgctaacaacccctggaagtcacctcctgtgtcctgttttggggagagccctttccatatattctcacagaatgctcc

SEQ ID NO: 25012 - DNA, 120 bp, synthetic construct
  source 1..120: mol_type = other DNA
acttagggggtggaaacctctctctatcactcagcaggtgtggacaccctctctccatccctcaggggtgtagacaccctcccttcatcgctcaggggtgtagacatcctctctccatcg

SEQ ID NO: 25013 - DNA, 120 bp, synthetic construct
  source 1..120: mol_type = other DNA
cgccatcgctcagcaggtgtggacaccctctcgccatcgctcagcaggtgtggacaccctctctctatcgctcagcaggtgtggacaccctctccatcgctcagtcgccctctcatgctg

SEQ ID NO: 25014 - DNA, 120 bp, synthetic construct
  source 1..120: mol_type = other DNA
aaaagtccagcgcaatgaagatgagtaactgcaaagcccttttcagggaatgagacttgtttcctaagacggcctttctccagataaacttgaagactcctccaatttaacctaggactc

SEQ ID NO: 25015 - DNA, 120 bp, synthetic construct
  source 1..120: mol_type = other DNA
gtttcttacagtaacaaaacaggagagtcaaagagattcaaagaaatcaggagctggaagagggagctggaaactccttgtctctcccctgctcatatccaaactactctcgacatcagt

SEQ ID NO: 25016 - DNA, 120 bp, synthetic construct
  source 1..120: mol_type = other DNA
acaggaagaggggtggcgttgctgatgagggccgtggtgaaggttttaccagaccctgaaggtgacagagtgtgggtctcggtttgtggagatgtaagcccagtggatgtgatcgatgga

SEQ ID NO: 25017 - DNA, 120 bp, synthetic construct
  source 1..120: mol_type = other DNA
tcgaaatgcagctctcagcacaccctgtacttttccacactgcatttaccacatgtgcagttgagaacatttccgtaattatttgatgtctgtctgcaccaagattttagtgccaagaga

SEQ ID NO: 25018 - DNA, 120 bp, synthetic construct
  source 1..120: mol_type = other DNA
tctgtactttaataaactatgagtaaactaacagaagagcactcctgcgtattagagaatccgaagacgacaggtgggatagagcccaaagcctatgtggatgcaaatcagtaagaacca

SEQ ID NO: 25019 - DNA, 120 bp, synthetic construct
  source 1..120: mol_type = other DNA
aatcagttaagaatgacccgagacaggatgggacagacaggtgacaccgagtgcctgcatcccaggtgcaaatcagtaagaaccacccgagactgggacagacaagtgacacggagtgcc

SEQ ID NO: 25020 - DNA, 120 bp, synthetic construct
  source 1..120: mol_type = other DNA
aaaggagacatcaagcccacctcccttagtgcaggtatggccgaggcaagagcccccatggctgctgggagtcctgacaccactcgagaaaacatgcttgctcctgggggaaggagagta

SEQ ID NO: 25021 - DNA, 120 bp, synthetic construct
  source 1..120: mol_type = other DNA
ccctcgggatggcgcccacgcacgctccgaggcacaggaagctcccctcgggatggcgcccacgcacgctccgaggcacacgaagctcccctcgggatggcgcccacgcacgctccgagg

SEQ ID NO: 25022 - DNA, 120 bp, synthetic construct
  source 1..120: mol_type = other DNA
tgaatacaaaagaggctgctctaaattactccaggacaacgggcataatttaagacctctgctcgccctgggtgtaaagccagctgctcgttaagatgaccatgcgtcctggatcataag

SEQ ID NO: 25023 - DNA, 120 bp, synthetic construct
  source 1..120: mol_type = other DNA
gtctatccctgtaacacccgcccccagcgatgccccttggagaggacacagtgtctatccctctaacaccacccgccagcaatgccccttgaagaggacacaggatctgtccctctaaca

SEQ ID NO: 25024 - DNA, 120 bp, synthetic construct
  source 1..120: mol_type = other DNA
ccacagcatgtatccctgtgatttccagcacccagaccctggcacgtgggccctcaagaattcctagatggatggtgagcgaatgggtgcaaaggagggcaccccaggcttagaacagac

SEQ ID NO: 25025 - DNA, 120 bp, synthetic construct
  source 1..120: mol_type = other DNA
tataaatacatattcattatagaataattggaaaagaaagacactagggattttcacacaccgagaaaaggccatgtggggacacagtagaaacgcggttgtcggctggacccggtggct

SEQ ID NO: 25026 - DNA, 120 bp, synthetic construct
  source 1..120: mol_type = other DNA
cttctttcttaactagtttctctcagtccgtgagaaaagagggaatataaaaatagcaaccacgagccctctgactggaatagatacatctattggcctgagaaatacaaaccgaaggcc

SEQ ID NO: 25027 - DNA, 120 bp, synthetic construct
  source 1..120: mol_type = other DNA
atttttgacatcatcatctgcactaactgcctctgttagcctggttgtaccaaacttttcaggcacaacaaataacagagaactgtcaacttagaagccaggaaatgatttcccggggaa

SEQ ID NO: 25028 - DNA, 120 bp, synthetic construct
  source 1..120: mol_type = other DNA
tacactatgctgaggctgaggatcagatacactatgctgaggatcagatacactatgctgaggctgaggatcagatacactatgctgaggctgaggaccagatacactatgctgaggacc

SEQ ID NO: 25029 - DNA, 120 bp, synthetic construct
  source 1..120: mol_type = other DNA
gctgaggatcagatacaccatgctgaggttgaggatcagatacatctccttcctgtcttcagggcaatgaatgaaggagaaggaaagtagttctcaggaggtttatgaatttttgttttc

SEQ ID NO: 25030 - DNA, 120 bp, synthetic construct
  source 1..120: mol_type = other DNA
ttgaattcctggcctcaagtgatcctcccaactcaaactcccaaagacttgggatgacaggcatgaaccacatcactgagtgaatttcttaactctaaaagttctatagatttcagtgac

SEQ ID NO: 25031 - DNA, 120 bp, synthetic construct
  source 1..120: mol_type = other DNA
cagaatacataaataaatgggagaggagagacaaatttcctgtgctgaaaattccaaagaatttacgcagatacgatgcccttgaggaggtgggtcataactccctgctctttcagtgtg

SEQ ID NO: 25032 - DNA, 120 bp, synthetic construct
  source 1..120: mol_type = other DNA
ccacatgtgtatcttcaacctggacctgcactgaacttcaacacattccaactcatgctccatatgaatgtttattaggcaactcaatacatccaataatgagcttctcatactcccctc

SEQ ID NO: 25033 - DNA, 120 bp, synthetic construct
  source 1..120: mol_type = other DNA
tgatctcacaaacctagctgagtaccctctgctctggcccgtgagcctgatatttttttcagtgtgtgtgtgtgtgtgtgtgtgtgtgtgtaaagttagtgatctcacaaacctagctga

SEQ ID NO: 25034 - DNA, 120 bp, synthetic construct
  source 1..120: mol_type = other DNA
tatgtttatttcttgcttatatgctaatcaaggagtggattacttatgagttttccaggaaaaggttgggcagttccgagaactgagggctcctcctcctttttagacgatacagggcaa

SEQ ID NO: 25035 - DNA, 120 bp, synthetic construct
  source 1..120: mol_type = other DNA
gagggaaaaagattcaacttccgtaacttcttcatgcttaatagggacgatggtattcctgtctattagatctcttgcattcagagtagagaggacctcagtctgaaagcatctgtatgg

SEQ ID NO: 25036 - DNA, 120 bp, synthetic construct
  source 1..120: mol_type = other DNA
tgcacagtaataaaagtttccctgtatgattgacatctttgatgagaatgaaatgctgagttctgtaacccaaaatggggatttgagtagctccgaacagccatgatcatcagaggctgc

SEQ ID NO: 25037 - DNA, 120 bp, synthetic construct
  source 1..120: mol_type = other DNA
tatgagggaaacctgcctgggccgcctagattgttgttatgagggaaacctgcctgggctgcctagattgtctttatgagggaaacttgcctgcgccaagtagattgttgttatgaggga

SEQ ID NO: 25038 - DNA, 120 bp, synthetic construct
  source 1..120: mol_type = other DNA
aaaagttagaagccaggtgactgaatttcaaggaagtgtgcaagtaccatatggatggatgggactgtatcattctgggtccaatcaggagagagaagccatacagtaatttgaacatga

SEQ ID NO: 25039 - DNA, 120 bp, synthetic construct
  source 1..120: mol_type = other DNA
tggccagtctcctatctgtagacatttgggttgttttcatgaatagtgttgctatggataatgttgaatgtacatcttactgggtgtagggcaaagcttctcaaacttcaggtgatctgt

SEQ ID NO: 25040 - DNA, 120 bp, synthetic construct
  source 1..120: mol_type = other DNA
tgatttcatttgggggaatagttgacttttttggtaaccgacagaaagctttcctagggctaataagtagatttcactactcattgatcaccagcggtatggcagctgctgcaatttagg

SEQ ID NO: 25041 - DNA, 120 bp, synthetic construct
  source 1..120: mol_type = other DNA
tattttgtttctaacctgatgaatggcacttatacatttatttttccccttctttctggcagcatcctttcctgaaactggccaaaccgttatctagcttgacaccactgatcatggcag

SEQ ID NO: 25042 - DNA, 120 bp, synthetic construct
  source 1..120: mol_type = other DNA
cctgcaaatgtcaagagaattcagtgaacacttttaatccttatcttgctcgacttctcaacaacctttaactgaccatttccctctttttagaaacctgttctagctttgctgatacca

SEQ ID NO: 25043 - DNA, 120 bp, synthetic construct
  source 1..120: mol_type = other DNA
agtttgaggctgtagtgagctatgattgtgttactatgccccagctgggatgatagaaagagaccccatctccaaaaaattctatttactgtcttaaaatgtgcttcactagctgggtgt

SEQ ID NO: 25044 - DNA, 120 bp, synthetic construct
  source 1..120: mol_type = other DNA
tcagttaccaaaaggataggcacatttgactatgtgattaagccctttagaagtcacgctttaagagaaggttaagctgtgggaagctgttagtatttccttctagctatccattccttc

SEQ ID NO: 25045 - DNA, 120 bp, synthetic construct
  source 1..120: mol_type = other DNA
aggatgtcctctgcagagagaggcagaggtgagccagtaccaagctcagggatgtagtgggcaaaattctaggagggcaccccacatttcccaccccttggtgtgtgtgccctgcgtaat

SEQ ID NO: 25046 - DNA, 120 bp, synthetic construct
  source 1..120: mol_type = other DNA
aggtcacagaataataatttcccttcactgatgattaacattgctttgcagagtctcagcagcatggtcatttttatggctccacattaccatgcaaagcaaggactgcctgcattttga

SEQ ID NO: 25047 - DNA, 120 bp, synthetic construct
  source 1..120: mol_type = other DNA
tgtctgttccatattcctaagaatacagctttgctgctctcagcttaatttggcatgttgtgttttttttttgggggggggggggctttttgagtatttatagtgctctatatgttgaga

SEQ ID NO: 25048 - DNA, 120 bp, synthetic construct
  source 1..120: mol_type = other DNA
acttgttttgctagagtataaattcctatacatccatagactttaagaactgcatcacacatagcctgaggtccccagtgggtttcttgatgtagctgagacaaaacctccctcatgaga

SEQ ID NO: 25049 - DNA, 120 bp, synthetic construct
  source 1..120: mol_type = other DNA
ccctgtcaggaaacctggtgtgttgagtgaactgtcagtggttagtgttaagtcatctctctttagtaagggagcttcacactttaaaattcttgagttggtgggccatcttcctacctt

SEQ ID NO: 25050 - DNA, 120 bp, synthetic construct
  source 1..120: mol_type = other DNA
actgctaatattacagctcaagatcaacatgacagctggcagacccctaatcaagccctttacattcattaacttccctgatcctcacaaccaccctggaaaatagatcctaaattgtct

SEQ ID NO: 25051 - DNA, 120 bp, synthetic construct
  source 1..120: mol_type = other DNA
ccccctcaggctgacccccccgatcagtcacttcctgctctatggtctccatccccccctcaggccgacccccccgatcagtcacttcctgctctatggtctccatctccccctcaggct

SEQ ID NO: 25052 - DNA, 120 bp, synthetic construct
  source 1..120: mol_type = other DNA
cacttcctgctctatggtctccatcccctcctcaggccgacccccctcatcagtcacttcctgctctatggtctccatcccccctcaggctgacctccccgccccatcagtcacttcctg

SEQ ID NO: 25053 - DNA, 120 bp, synthetic construct
  source 1..120: mol_type = other DNA
tggaatgaccacagatccccttccagagagaaggacacagatacagttactgctgtggcctcctgtttaccactttacagttctgcaaaatctctctactctccttcgttacataacaag

SEQ ID NO: 25054 - DNA, 120 bp, synthetic construct
  source 1..120: mol_type = other DNA
acgctctgacaactggcttcagactgtcctgtgctctaactgacaactggcttcagactgtcctatgctctgacaactggcttcagactgtcctatgctctaactcgacaagtggcttca

SEQ ID NO: 25055 - DNA, 120 bp, synthetic construct
  source 1..120: mol_type = other DNA
tgacaactggcttcagactgtcctacgctctgactgacaactggcttcagcctgtcctacgctctgactgacaactggctttagactgtcctacgctctaacttgtcaactggcttcaga

SEQ ID NO: 25056 - DNA, 120 bp, synthetic construct
  source 1..120: mol_type = other DNA
cttgaccttcctatagagggcactgtttatgtcctgcacgttgaagagaggatcattccagatcttaatgagcaggtccttggagaagttgctgacgtagtacttgctgaagtcccactt

SEQ ID NO: 25057 - DNA, 120 bp, synthetic construct
  source 1..120: mol_type = other DNA
taatttgaacacccatatttgggcatttctgaagcaacagtacaccctagattttttttttttttttttgagagagaaagtgggaccagggggccatcacgagtgtggatgctgtgccaa

SEQ ID NO: 25058 - DNA, 120 bp, synthetic construct
  source 1..120: mol_type = other DNA
gggtcttcacgggtagaatgtatagagttcttcaggggtagaatgtatagagttgttcttcaggggtagaatgtatagagttgttcttcaggggtagaatttatagagtgtttttcaatg

SEQ ID NO: 25059 - DNA, 120 bp, synthetic construct
  source 1..120: mol_type = other DNA
gttcctcagtggcagaatgtgtagagtgttcttcagtggtagaatgtatagaattgttcttcagtggtagaatgtatagagttgttcctcagtggtagaacttatggagtgttcttcagt

SEQ ID NO: 25060 - DNA, 120 bp, synthetic construct
  source 1..120: mol_type = other DNA
tccagaaagtggaaagcaatatactgtacttgcaggaagtagaaaccaatatactgtacttgcaggaagtagaaagcgatgcactgtacctgcaggaagtagaaagcgatgcactgtacc

SEQ ID NO: 25061 - DNA, 120 bp, synthetic construct
  source 1..120: mol_type = other DNA
agcactgccagttgcctttctgtcttacatattaatatttttataggtcatgcttcaccccttcctccatctgctgcacctaccactgattctacagattccataacaggacagaattca

SEQ ID NO: 25062 - DNA, 120 bp, synthetic construct
  source 1..120: mol_type = other DNA
cattacaagtcttgttaacatattttgtctatagcctgcaaggaggaaaacatgattcttctctatcaccttctaattaggtatcagtaactcaggggtggccctggggctcatcaacag

SEQ ID NO: 25063 - DNA, 120 bp, synthetic construct
  source 1..120: mol_type = other DNA
gcatcacatgttacaaagtgaaagagagagcgcccagctccacagatcatctgtgtcagccagcaggattcccaggattgtttttctcttatgaaagtagatcatcattctattatttat

SEQ ID NO: 25064 - DNA, 120 bp, synthetic construct
  source 1..120: mol_type = other DNA
ctttttttttttaaattggaaagcacaattcggtttaacatttagctttgcttgactccagtgtaagatgaagatgaccttgtcacagctcccctgacctgaagcagagcccttcccatc

SEQ ID NO: 25065 - DNA, 120 bp, synthetic construct
  source 1..120: mol_type = other DNA
tgcaaatcaaaactacgagacatcatctcgccccagttaaaatggtgtgtatctaaaagacaggcaataatgaatgctagcaaggctgtggagaaaaaggaatcctggtacggtattggt

SEQ ID NO: 25066 - DNA, 120 bp, synthetic construct
  source 1..120: mol_type = other DNA
ttggtgtgtaagtgatttccttctgagttagttatctgagttttatgtcccactgtaacatgctaagatttgaccctagttatggatccagtgacaacaggggtgactgtaccaggtctg

SEQ ID NO: 25067 - DNA, 120 bp, synthetic construct
  source 1..120: mol_type = other DNA
cacaggggtgactgtaccaggtctgaacagtgagccctttccaaggcatcctcccagatgaagttatcacaggggtgactgtaccaggtctgaagagcgatccctttccaaggcaccctc

SEQ ID NO: 25068 - DNA, 120 bp, synthetic construct
  source 1..120: mol_type = other DNA
acaaaaacctgccattcttgttggcatcattttctgacccacagttccctaatgtgcatatacttcctatcttcttgttttccaaccttgacctgactactggttttcagtaactccggg

SEQ ID NO: 25069 - DNA, 120 bp, synthetic construct
  source 1..120: mol_type = other DNA
actctggggatttcacctggtttcatcttggtagttcttttttgttccaaggcttgccttggatcttctagtcttggtttctttctttctttttttaagacccactacgaagcagaatct

SEQ ID NO: 25070 - DNA, 120 bp, synthetic construct
  source 1..120: mol_type = other DNA
ggccatcctctgtaactttctaaactgctcctagaaaagttgtcagtcatcctaatacagctggtttctaactgcttaggttgtagccccaactttgttttgcaagtcaattccttaaaa

SEQ ID NO: 25071 - DNA, 120 bp, synthetic construct
  source 1..120: mol_type = other DNA
aaaaccatctatagatggttggtaataatatagtgagaagttagctgtaagtagtttttaatcatatactaaaggaatccacagtgaagggcccacagccatgaacatttctattcagct

SEQ ID NO: 25072 - DNA, 120 bp, synthetic construct
  source 1..120: mol_type = other DNA
catctatctatatatcatctatacagatacatatcatacgtagtaagtttgccatctatctatatatcatctatacagatacatatcatacgtagtaagtttgccatctatctatatatc

SEQ ID NO: 25073 - DNA, 120 bp, synthetic construct
  source 1..120: mol_type = other DNA
tgggtgaagcgttgcacaaatgtcagttaagtcctgttggttgatgatgttgggttcttctatatccttgctaatttcctgcctagttggtctatcagttgttgagagaattcaccacca

SEQ ID NO: 25074 - DNA, 120 bp, synthetic construct
  source 1..120: mol_type = other DNA
gtataagtttggtgtagagcctatccagtagcgtccactgtaccacttttaagtaagactcagtccacagaagctggaagattgccttcgctttaaatatcctttaccttctgcatttga

SEQ ID NO: 25075 - DNA, 120 bp, synthetic construct
  source 1..120: mol_type = other DNA
ctgggaatctcaaacatagtcaacttaactaaaaagaagctaatacaggttgagcattcctaatccaaaaatccagaatccaaattgctccaaaatctgaaactttctgaatgctgacct

SEQ ID NO: 25076 - DNA, 120 bp, synthetic construct
  source 1..120: mol_type = other DNA
gacacagatttgtttagaatgataaagctcactttaagatcacacaaaagttgagcacaaaggataggattcaattcagcaatacagagtaatgaagagtaaaagatactaagtttctcc

SEQ ID NO: 25077 - DNA, 120 bp, synthetic construct
  source 1..120: mol_type = other DNA
gtcaccgtgagaactcctggagctgctctatctagatccatgctatgtatccagcaatattctttttgtgtcagtattataaatagaaactgaggctgaaacattgctcccgtttccctt

SEQ ID NO: 25078 - DNA, 120 bp, synthetic construct
  source 1..120: mol_type = other DNA
tattttttctttgcatataaccaaccagcatacacagaaggcctccccaattaccaggtgagtttaagatgaactatgtataacaaatggtttgtacagaagggaggcaggagaatgggg

SEQ ID NO: 25079 - DNA, 120 bp, synthetic construct
  source 1..120: mol_type = other DNA
acttctaaactctggaggacaaggctgtgaagagatctgaagacatggtgttctctgcttgtgtggccccaacattctttgtttgctgtctgatatttgaaaggaagaggaacctttgat

SEQ ID NO: 25080 - DNA, 120 bp, synthetic construct
  source 1..120: mol_type = other DNA
gctcaatgtggcagccacctgccatatgtagctactgggtacctggaatgtgactggtttgaagtaaaatgtgctgcaaacataaaatacacagtgagtttagaagaattagatcagaaa

SEQ ID NO: 25081 - DNA, 120 bp, synthetic construct
  source 1..120: mol_type = other DNA
cgttgctctgtgacctgagggtattggacaatttgtagctaagactcccggataccctgaagtcgggaaatggtgagtgtgcggggcagggcgtccggaggctggggaggcctcatcgga

SEQ ID NO: 25082 - DNA, 120 bp, synthetic construct
  source 1..120: mol_type = other DNA
aaggagttctgagaaacatcccttccctgcaccctgctgccagcccccacccaatgctagtccactcctgagcacgcccaccgggcattcgcattgccccactcttcccagtacaggatt

SEQ ID NO: 25083 - DNA, 120 bp, synthetic construct
  source 1..120: mol_type = other DNA
aactattgctttgaaatgtaaatagcaagaatatacaccctatttcacagtttctgtaggggactaggaggctgccttcagcaggtacctagctccacattgcaaatctacatcctgtca

SEQ ID NO: 25084 - DNA, 120 bp, synthetic construct
  source 1..120: mol_type = other DNA
cacactcacatactgttctcctccttgaactatttgtcttttgaaattgcttgctattgccacaagtggctgtaaattaacctaataatgccacactggacactatgacccataccctat

SEQ ID NO: 25085 - DNA, 120 bp, synthetic construct
  source 1..120: mol_type = other DNA
gtgagtatttgagacatttgaggatgtcctgtgcagactgggtcagtgtttcatatggacattagaaaaagagatgaaatagtcgtggtccctaccatcaaggaacttgcattctagagc

SEQ ID NO: 25086 - DNA, 120 bp, synthetic construct
  source 1..120: mol_type = other DNA
tagtacatgctccacaaatatcgcattaatgcatgtggatgtgctgtttttcaaatgcagacttactcagacattgccaccatctccagcctctgtaacctttaaagggcttgcagataa

SEQ ID NO: 25087 - DNA, 120 bp, synthetic construct
  source 1..120: mol_type = other DNA
gaacctggtctccctgggtgaggataacttcaatacataattcctaatacttcctcagagtttcattttctttctttgcagaatgtctcttgggtgcttctgctttgcattaattaattt

SEQ ID NO: 25088 - DNA, 120 bp, synthetic construct
  source 1..120: mol_type = other DNA
agagacataggagtatttgtattattgaggacctctatgttaaagtattttttcaaatattattttcgcatcatgcctaaaatacgtaaggtgagtagtggacataatgggatttggttt

SEQ ID NO: 25089 - DNA, 120 bp, synthetic construct
  source 1..120: mol_type = other DNA
acaggcctgagccaccgtgcctggcccgccttctagatttcttaaatgcactatgtcattaaccggcttagaacattcctaagtgtatattaagctctcaattgttaccttatttcttga

SEQ ID NO: 25090 - DNA, 120 bp, synthetic construct
  source 1..120: mol_type = other DNA
agattcctcatctaactgagaacatgcagtttctttgtgtttggcttatttcacttagcgtaatgtcttcaaggtctatcaatgctgtaaatggctagatttccttctcttttatggctg

SEQ ID NO: 25091 - DNA, 120 bp, synthetic construct
  source 1..120: mol_type = other DNA
acaattgtgttttctattactgtgaaaaatgccactcaaattttgatagggatgacattgaatctccatatcactttggataatattccttgacaatattagttatcctaatggaatatg

SEQ ID NO: 25092 - DNA, 120 bp, synthetic construct
  source 1..120: mol_type = other DNA
cttccttggcctctagcctctgaaagtgtgcagggactacagaaatgaggcactgcacctgaccctacatacaaatatttgttgcatttccatatagtaacaacaaactttccaaaaaag

SEQ ID NO: 25093 - DNA, 120 bp, synthetic construct
  source 1..120: mol_type = other DNA
gggcctgcttttcccaaataaccctttttgatctttggcaccactgaggtttcacaaccctaaccataggcaagcacctttctacttccgttttccaggagtttactatttaaaatatct

SEQ ID NO: 25094 - DNA, 120 bp, synthetic construct
  source 1..120: mol_type = other DNA
cttaatacacagtaatacctcattgtggtttttctttacatttttctaaagattagaattttttttcaataattgtgtatttcatctttggagaaacattttcatctcttgtctattagt

SEQ ID NO: 25095 - DNA, 120 bp, synthetic construct
  source 1..120: mol_type = other DNA
cctgcacatatactctgatcttaaagtttaaaaaaaaagggtgggggggttgttttgcattctaacaggttgtccatgaaacaacagttactcattttcttctccacttaaccccgacac

SEQ ID NO: 25096 - DNA, 120 bp, synthetic construct
  source 1..120: mol_type = other DNA
ctggattgcaccatgctgtattgggaggaggtcaggctgcgctgggcatatctaataagctttttcttctcttctacatgtttttggcattgtgctcaactgaagtagtacaaattctta

SEQ ID NO: 25097 - DNA, 120 bp, synthetic construct
  source 1..120: mol_type = other DNA
gtcttttttgactcagacttgtctttatctaggacttgggaactattgctttgaaatgtgaatagcaagaatatatcccacagtttctgtaggagggtgggaggctgccttcagcaggta

SEQ ID NO: 25098 - DNA, 120 bp, synthetic construct
  source 1..120: mol_type = other DNA
atgacaaagtgcagcaaggtgctccccaaatctgcaaacaaaatagtctctctatttgggatctacagtcccttctagagcagttagactagatttctacaaaaatcacttcaggacagc

SEQ ID NO: 25099 - DNA, 120 bp, synthetic construct
  source 1..120: mol_type = other DNA
acaagagttatgtttgcatgacatatagcaacaatgttcatttaaagatgcacttttcatgaacctattttgaacataaagtgaggacttactgtacatacatgtgcaacctggattttt

SEQ ID NO: 25100 - DNA, 120 bp, synthetic construct
  source 1..120: mol_type = other DNA
cttcactctgttgggatttttttgctatgcaaaacatttttagttttttgtagtcacgtttgcagatttttacatgtactttgaggtcttaaacatttttttctctgtaatatgtggtaa

SEQ ID NO: 25101 - DNA, 120 bp, synthetic construct
  source 1..120: mol_type = other DNA
accagaagcctcccacacaactatatcaggtcactggacaagatctggaaaactcaaagagctccacctatgttgacctctcatgatgtagaaaatgtcttctatgagttttctgttatg

SEQ ID NO: 25102 - DNA, 120 bp, synthetic construct
  source 1..120: mol_type = other DNA
ggggggggaatgctgttatacacatgtgtgtgcaaatgtccattccagctcctgctttgcatacatagatacccagaaatggaattgctggattgtatgacaatttcatttttctgatag

SEQ ID NO: 25103 - DNA, 120 bp, synthetic construct
  source 1..120: mol_type = other DNA
tttcatttgcagcttttacccactggcactgtggcccaggtgcgtgactcaccctctgtgtctcagttgcctcctctggataacagttctgatgctcatccctgcctcatagggtcatta

SEQ ID NO: 25104 - DNA, 120 bp, synthetic construct
  source 1..120: mol_type = other DNA
ctttagcctctttcctctcttgcggcagtgccctcacttcagctcatttgctgacgagctcactgactacaagacaaagaatatgctggccacacccatcatgaatggcaaagacgtcgt

SEQ ID NO: 25105 - DNA, 120 bp, synthetic construct
  source 1..120: mol_type = other DNA
gcaaaatacccacgggggcacatgtctgaaaactggaattttaattcctcttgttgcaattcctgtttcaggtgttcttgaagtacctgaattttgccacgttgtacctgaagatctatc

SEQ ID NO: 25106 - DNA, 120 bp, synthetic construct
  source 1..120: mol_type = other DNA
ctggtcagtgatgaacaccgacacctacgacaagatgaacaagctggagaaccgcaaggacatcgcacaggacatggtcctttaccacgtgaagtgcgacagggacgagatccagctcat

SEQ ID NO: 25107 - DNA, 120 bp, synthetic construct
  source 1..120: mol_type = other DNA
ggcaggtcacccaggggtcacagctgtgtggggcaggtcacccaggggtcacggctccctctgtgcagtgggcggccaggttacccaggggtcacagctctctctgtgtggtggggacac

SEQ ID NO: 25108 - DNA, 120 bp, synthetic construct
  source 1..120: mol_type = other DNA
cagctgactccacctcggtagcaaacccggactgaaaaatttcctctgttcctagccagtgaaccccatttttcaagaaagaagtaaccatatcttatgtcctttataaaggacttagtt

SEQ ID NO: 25109 - DNA, 120 bp, synthetic construct
  source 1..120: mol_type = other DNA
cccatgctattcccgctatgccatgctattcccgctaccccatgctattcccctaccctatgctgctcccactaccccatgctattcccactactccatgctgctgccactaccccatgc

SEQ ID NO: 25110 - DNA, 120 bp, synthetic construct
  source 1..120: mol_type = other DNA
caggactccgggaggtcgaagaccccagcccaggcaggacccagggagggctgggacagcagcccaggcaggacgcagggagggcaagaccccagtccaggcaggacgcagggagggcaa

SEQ ID NO: 25111 - DNA, 120 bp, synthetic construct
  source 1..120: mol_type = other DNA
gacgtagggaccaggcagaatccaaagaatgccaggaccccagaatagatcccccaggaaggtcctgccttaaagtgggtcacagacgagggccaggaccccatgaccataattcaggag

SEQ ID NO: 25112 - DNA, 120 bp, synthetic construct
  source 1..120: mol_type = other DNA
taggctctcaaagaggacctgatgagagctggaacttccagacaggtcctcagagggctgggactcctgaacaagtcactgaggagcatgtaggccccaagactggactgtaaggagtac

SEQ ID NO: 25113 - DNA, 120 bp, synthetic construct
  source 1..120: mol_type = other DNA
tcactaggtcacgcaaacctgggcactcccgattttgaggtagcttatttgggaccttaattacagcttcaaaagtccctttacagcagtccatgggtcagtatgtcagtaacagaactg

SEQ ID NO: 25114 - DNA, 120 bp, synthetic construct
  source 1..120: mol_type = other DNA
gaccctctagacactgtgagtgtgagaactgggcgtcggtgctgggcccctgtggacactgcgagtgtgagaactgggcgtgggtgctgggaccctgtagacactgtgagtgtgagaact

SEQ ID NO: 25115 - DNA, 120 bp, synthetic construct
  source 1..120: mol_type = other DNA
tccttaatatcatccttcgctttgcacatcatactgaatacgtgtgtatgtgacttttactgcaaaacaaaacaaaaagcagaagctactgtgttatccagacggctgtgtgctgcaggc

SEQ ID NO: 25116 - DNA, 120 bp, synthetic construct
  source 1..120: mol_type = other DNA
tctgaaaagtgtggtgagagctgtgttccctgcgcatttctgaaggctcctagccgctgcagttgccgggagccatggagccacgtgaccttgaggtccaccggggagaggagggtgcat

SEQ ID NO: 25117 - DNA, 120 bp, synthetic construct
  source 1..120: mol_type = other DNA
tgctggttgtggcgagggccggcgatcattaggagccagctggtcaggacacgatgcagtgttcacggttcactgccgagttttcctggcccctcctgtgagagtccaaggtccagccag

SEQ ID NO: 25118 - DNA, 120 bp, synthetic construct
  source 1..120: mol_type = other DNA
tgagtgggcgtggtcctcaggttggtaaggcggggctcccctcccctcgtgggtgggcgtggtccttaggggcgtagggtggggctccccctcccctcccgagtgggcgtggtcgtcagg

SEQ ID NO: 25119 - DNA, 120 bp, synthetic construct
  source 1..120: mol_type = other DNA
gcacgggttcccagaagagccttctctgtcattatttgaaatgtttgaagcagccagagcccaagttaaatgacgcgttaattcagctcatacatggcttttggtgacacattttttcat

SEQ ID NO: 25120 - DNA, 120 bp, synthetic construct
  source 1..120: mol_type = other DNA
tggagtacagtgtagttttttaaatggcttgacagtttggatttcatggtgcgctatgttctgtttgtgctaaaaggtgaaaccaaagcagacgacagttcaaacaaagaggccgcggag

SEQ ID NO: 25121 - DNA, 120 bp, synthetic construct
  source 1..120: mol_type = other DNA
gcggctctcaccgggcaccccctttctccctgcttctcacttcttccgccaaactccaggtctttctccccgcgcggcccctctcccgagttcttctcgctccggactccaggtctttct

SEQ ID NO: 25122 - DNA, 120 bp, synthetic construct
  source 1..120: mol_type = other DNA
agctcttcttgctccggactccgggtctttctccccgcgcggcccctctcccgagttcttctccttccggactccgggtctttctccccgcgcggcccctctcccgagttgttctccttc

SEQ ID NO: 25123 - DNA, 120 bp, synthetic construct
  source 1..120: mol_type = other DNA
gtatttcttgtattttggattcttttgcttcctgaatctgaggactgcccttcactgttgtgggagatccttagtcactgtttcttaacacttcctttcctttctgttcttccctttggg

SEQ ID NO: 25124 - DNA, 120 bp, synthetic construct
  source 1..120: mol_type = other DNA
acacagatgcacagtatacacgaatgcacagacagcacacacatagatgcagggtacacatgaatacacacagcacacacagatgcacagtacacatgaatgcacacacagatgcatggt

SEQ ID NO: 25125 - DNA, 120 bp, synthetic construct
  source 1..120: mol_type = other DNA
acatacacagcacgcacaggtcacacatacagcctctttcagggacgctgaagatgctcagaaagaaaaagcaaacactgcaaaccaagagccgagaacaagcgtggcatgagcagtgga

SEQ ID NO: 25126 - DNA, 120 bp, synthetic construct
  source 1..120: mol_type = other DNA
tcggcaaaggcctgtgagacagatgctaattttcttcagggctggaaaagcaacgtttctggaagatccgcttccactgttgagaggctcacgcacatcttctaggtgagatggtgtagc

SEQ ID NO: 25127 - DNA, 120 bp, synthetic construct
  source 1..120: mol_type = other DNA
tgagcaggaagtggacaatggacgccccttgtgctgccttcaacttttccgccagtttgacgtttcagaacacaacactgagaaacacaagcggcacatccccacagtgtcagatgaaga

SEQ ID NO: 25128 - DNA, 120 bp, synthetic construct
  source 1..120: mol_type = other DNA
gggaacagctcctcctggctgctgagcaggggctggcttgtggacgacagatctcacgcggctacaggtgccctccccacaggcttccttctgtgggactccctgcctcagtctcccctg

SEQ ID NO: 25129 - DNA, 120 bp, synthetic construct
  source 1..120: mol_type = other DNA
tgtcaccagacagtccctttacatacgtcagaaatccagagaaggcgttaaatggttcattacctttaatgcatactctctgccactccccacatcttgagcttcatacacaaatgcaaa

SEQ ID NO: 25130 - DNA, 120 bp, synthetic construct
  source 1..120: mol_type = other DNA
acagccccagcgtgcacggccccacacacacacagccccagcgtgcacggccacacacacacagccccagcgtgcacggccccccacacacagccccagggtgcacggccccacacacat

SEQ ID NO: 25131 - DNA, 120 bp, synthetic construct
  source 1..120: mol_type = other DNA
cctctactccagagacagacaggaataacctaagaacagaggtcaatagaaggaaaaacaaaaccacaagcagttctccaaagaccaacgagactgataaattctagacagactgatcca

SEQ ID NO: 25132 - DNA, 120 bp, synthetic construct
  source 1..120: mol_type = other DNA
atatattaaacacaaaaaaaaggaggaactaaaactcctctcattttcagatgccatgactggaaagacagaaggctccaaaggcctcagcgccccatgaccttagaaaggcagaaggct

SEQ ID NO: 25133 - DNA, 120 bp, synthetic construct
  source 1..120: mol_type = other DNA
gaccttagaaagacagaaggctccaaaggccttcagtgccgcatgaccttagcagggccacaggtctctgggtgcctccccagcctcctcctctccagccgcaccccgcatttggttcca

SEQ ID NO: 25134 - DNA, 120 bp, synthetic construct
  source 1..120: mol_type = other DNA
aaacgtcacttttctcttctgcgagatggaagtaattatagtacccactttccagggctactgtgaggaccacacaatccacataaagtactactgaccatgctcggcaaatacgaagag

SEQ ID NO: 25135 - DNA, 120 bp, synthetic construct
  source 1..120: mol_type = other DNA
ctcacctgcagtccgcacccctccccgctcacctgcggtccgcactgccccgcacccctcccggctcacctgcagtccgcactgccccgcacccctcccggctcacctgcagtccgcact

SEQ ID NO: 25136 - DNA, 120 bp, synthetic construct
  source 1..120: mol_type = other DNA
ccatacctcagttctgtctccgtgaggcgctggggtctcttctgtccagagtactctccacctggcatcttattcatcttcccagatgcatctctgatattaaaaatgcctggggagtgc

SEQ ID NO: 25137 - DNA, 120 bp, synthetic construct
  source 1..120: mol_type = other DNA
cctcagagccattccgaacccccaccccaagttttccatctcttgatggtgtagggttggggggtctccatgtacagatactctagttcataccaggccttcatagggttattttccaag

SEQ ID NO: 25138 - DNA, 120 bp, synthetic construct
  source 1..120: mol_type = other DNA
ccccaagagagtgactagagtctaggatcccactgtccagtctgtaatcatggcttatgcccatcctccaggtttgctgggaggattaggagacaacatacacaaaatataacaaaatct

SEQ ID NO: 25139 - DNA, 120 bp, synthetic construct
  source 1..120: mol_type = other DNA
aggggagaggctgacaggacagggtgggtgtgacaggagcagggagtgggtaataggatggggtaaaggggtgacagaatggggttgagaggtgacagaatgtggtgggggtatgatatg

SEQ ID NO: 25140 - DNA, 120 bp, synthetic construct
  source 1..120: mol_type = other DNA
ttcaacccacagaaatattttggcagaaaatatttgctgatcaaatatcttcaaaggaacttgcctccagaacacagaaaacacatggtctcaggatagcgcacctggctcatcacggaa

SEQ ID NO: 25141 - DNA, 120 bp, synthetic construct
  source 1..120: mol_type = other DNA
cagaaccaagcacaactcccacagctccatggtctcgggatagcgcacctggctcatcacagaaccaagcacaactcccacagctccacggtctcgggatagcgcacctggctcatcaca

SEQ ID NO: 25142 - DNA, 120 bp, synthetic construct
  source 1..120: mol_type = other DNA
ggaggtttccctggagtacttcttacacagactgtctatgctcatgaagaatgcctggatatctgcgtcggtctgaaagagaaagaaatgactctacatttattgtgtctaataaacgct

SEQ ID NO: 25143 - DNA, 120 bp, synthetic construct
  source 1..120: mol_type = other DNA
ctgtcttcagggaaaagctgctctgaatcactgatccctggctacaagtagaagccagaccaacctagttctcatcacggaggagcctgtgggtctcctgagcaaacaagaatcaggaaa

SEQ ID NO: 25144 - DNA, 120 bp, synthetic construct
  source 1..120: mol_type = other DNA
cccagtgtccacctcctgatggcgctcaggacaaaccgagtgtggggctcagggaaaaccccgtgtccacctcctgatgaggctcaggagaaaccgagtgtccacctcctgatggggcac

SEQ ID NO: 25145 - DNA, 120 bp, synthetic construct
  source 1..120: mol_type = other DNA
ttctgccagccccaggcgaccacgtggtggtaccttctcatggatctcctgcgtggactgcgcgtcgcagaaggccacagtggccacgtccttcaggatgggcatctccactgtgcagtc

SEQ ID NO: 25146 - DNA, 120 bp, synthetic construct
  source 1..120: mol_type = other DNA
atgacttctcatgagcagaaaggtttatgttgctgtttctgagtgagtggatagacatccgctctcagtatccttggatttcacttctgatgaggaaggcatggacacacgggatcactg

SEQ ID NO: 25147 - DNA, 120 bp, synthetic construct
  source 1..120: mol_type = other DNA
ggtggacacctgagatttccagggttccgtgtggggctccaccctcgtgctggcggcctccacatggaggccctccgtgcctctcagacactttccgacagaaacagacagcagatgcca

SEQ ID NO: 25148 - DNA, 120 bp, synthetic construct
  source 1..120: mol_type = other DNA
gctgacccaggcatcgcaaagcacacttcctgccggggtaactgctgatgatttttaggtctgttatttcagaatcgttatagctaggggccattattttgaaaacctgaacaaaaagaa

SEQ ID NO: 25149 - DNA, 120 bp, synthetic construct
  source 1..120: mol_type = other DNA
ctatgctaccctcacctgtgcccccccacccgcacctgtgcccccctcacctgtgcctgtgcagccgtcacccatgccattcctcacctgtacccctcacccatgcctgtgccgttcctc

SEQ ID NO: 25150 - DNA, 120 bp, synthetic construct
  source 1..120: mol_type = other DNA
gtatattaatataaagccagaaatagcagagagaagctgcagatccagggtggtggattttcactgcctccgtctgcagctcttgggccaggcacacctgcctagcggactcggtagagc

SEQ ID NO: 25151 - DNA, 120 bp, synthetic construct
  source 1..120: mol_type = other DNA
ttaggattttcccgcccgatacctgtaccccgggttttgcgctgacacatgctccattgcttcctcgtgagagctttgcctttatctcaggcggggtgcgttttccgtgttttctgtggc

SEQ ID NO: 25152 - DNA, 120 bp, synthetic construct
  source 1..120: mol_type = other DNA
tgcttctgtctaaccaggggtcttctctctttccacggcttaaatcccacccacatgtgtgtggctcccacctggggcatcatgggcctcagccctggctgaattcaaccccagcacaag

SEQ ID NO: 25153 - DNA, 120 bp, synthetic construct
  source 1..120: mol_type = other DNA
acagcactgttgctctcggcaccgctggggtatggcgtctcggttcacaagcgtgaatgtgatgtgtcacagctgtgccatgagttgatctgccagatggcaaagtgcactgatcctctg

SEQ ID NO: 25154 - DNA, 120 bp, synthetic construct
  source 1..120: mol_type = other DNA
aacaaacaaaagtcagcatgagcatttcgtgtgagacagaaaaccagttcacttagatggtttctagtttcagttgacgtacgagcctgctgccagctggcctcacatctttcatgtgac

SEQ ID NO: 25155 - DNA, 120 bp, synthetic construct
  source 1..120: mol_type = other DNA
tgcaagaaaacactatgaaggggcttcagaaaagaaatcaaagcaaacgtgcaagaaaactctatgacggggcttcagaaaagaaatcaaagcaaacgtgcaagaaaatgctatgaaggg

SEQ ID NO: 25156 - DNA, 120 bp, synthetic construct
  source 1..120: mol_type = other DNA
agcaaacatgcaagaaaacgctatgaaggggcttcagaaaagaaatcatcaaagcaaacctgcaagaaaatgctatgaaggggcttcagaaaagaaatcaaagcaaacgtgcaagaaaac

SEQ ID NO: 25157 - DNA, 120 bp, synthetic construct
  source 1..120: mol_type = other DNA
tggtggatgagtgtgtctggtgttggatgaagttgagattggtgttggatgaagttgagattggatgcctggtggatgaccgtgcctggtgttggataaagttgagattggatgcttggt

SEQ ID NO: 25158 - DNA, 120 bp, synthetic construct
  source 1..120: mol_type = other DNA
ttccttgcctgtccccctggttctcctttctctacagcccctgagtcaggagttaggctgcaccgtcttccgtggttctttctcttgctgacgctttgtattttatctgtaaatattgga

SEQ ID NO: 25159 - DNA, 120 bp, synthetic construct
  source 1..120: mol_type = other DNA
ccatgcccacccctgtgctcatcacactgggaacagtttcagttcctggaaaagggggaagcagataaaacctcctggagttgacagtttgttctctgagcctggcaccagtctctgtca

SEQ ID NO: 25160 - DNA, 120 bp, synthetic construct
  source 1..120: mol_type = other DNA
atggaccggttgttttccatttcatacatgatttctctgaagtaagagtttttacacctaatgctctgaggtgcactctgcactgagctgtccttccagctgtgtgagtctattttttgt

SEQ ID NO: 25161 - DNA, 120 bp, synthetic construct
  source 1..120: mol_type = other DNA
gttaagtcagcccttgtcctgcaggtgttgaaatcagagcgttaagtcagcactggcctcacagcgtgttgaaatcagagacttaagtcagaactggccccacagtattttgaaatcaga

SEQ ID NO: 25162 - DNA, 120 bp, synthetic construct
  source 1..120: mol_type = other DNA
ttgctccacaaggaaatacttctgtgagttgtgacgaaaatatactttttgcaatgcgaaaggatgctggtctaggcttgggaggaagatggtgagtgccgtcagcatgtcaagatcagg

SEQ ID NO: 25163 - DNA, 120 bp, synthetic construct
  source 1..120: mol_type = other DNA
ggcctgagattctggcagtggaaccttctggaatgcctggtgctacccctgcctgcatctcacagctctacagcatctgggatgccctccaagtggggttggctggtggaagtgaatctg

SEQ ID NO: 25164 - DNA, 120 bp, synthetic construct
  source 1..120: mol_type = other DNA
tctggcactatatgttatgcattgtagcacccggtccacatctaccttttagaaaattaaaacacataaattctgtttagtgtgtgataacgcgctgcactggctgagaaccgtaatgcc

SEQ ID NO: 25165 - DNA, 120 bp, synthetic construct
  source 1..120: mol_type = other DNA
cattgtagaaaggatttacacacatatgtgtttctcaatttctgtactatttcctgcataaaacaaataacctagcaccctctccccacgtgtggcctccttccaccccatcacattgga

SEQ ID NO: 25166 - DNA, 120 bp, synthetic construct
  source 1..120: mol_type = other DNA
ggcctttcgtggggaacacagacgcatgttaatctgtttgcagattcatgtttaatagaacgcccttctgaaatgcatccaaaatagagaagctttctcccgaactgcaaaagccataaa

SEQ ID NO: 25167 - DNA, 120 bp, synthetic construct
  source 1..120: mol_type = other DNA
tgaggcccctctggctgcagccaggcatggtgatgccagggaggccccgggagtcacatggggaggacagaaccgtcttcactggggtgtcatcctcatcgtcatcttcgtaattgaggg

SEQ ID NO: 25168 - DNA, 120 bp, synthetic construct
  source 1..120: mol_type = other DNA
cgtttctgaccgacactccttacggagaagagcggttttgaaatcactcccttcaaaaagtggagcccgatcctcctcccactgagtaagggctagacagagttaaggagcagacgaaat

SEQ ID NO: 25169 - DNA, 120 bp, synthetic construct
  source 1..120: mol_type = other DNA
tgtttgtgaggtggcataggcgtggtgtttgactgtgaggtggcacaggtgtggtgtttgactgtgaggtggcacaggcgtggtggtttttggttttgattttggttttttctgttgttt

SEQ ID NO: 25170 - DNA, 120 bp, synthetic construct
  source 1..120: mol_type = other DNA
atttagggataaaaaggtttgtcctcctttttcagatagaaaccaccgccatattcacaggccgtgttttaagaaaacaggagtcattgggaaaaaccatcttcgacagcaacagactca

SEQ ID NO: 25171 - DNA, 120 bp, synthetic construct
  source 1..120: mol_type = other DNA
acttgccaaaaatgtcctcagaggcacacagccatctgataggcatgtgccgctctgtatcctttggtcttggttagagacaccttaaaaatgttttctccatttaatcaaaaggaaaaa

SEQ ID NO: 25172 - DNA, 120 bp, synthetic construct
  source 1..120: mol_type = other DNA
agtggctccattcaaattgtctcaaactaaggagcacaaatcagagccagccacactgcacaccccacgctggtcgatgtcagctggggaaaaaccaccagtaactggggtgccagctca

SEQ ID NO: 25173 - DNA, 120 bp, synthetic construct
  source 1..120: mol_type = other DNA
gcacacccaccttccaaaccctcctgattgcacaaagcacacacacaaccctagaaaggcaacagcagccacactataacttgaaaaaataataactaggattttattttaaaaacaggc

SEQ ID NO: 25174 - DNA, 120 bp, synthetic construct
  source 1..120: mol_type = other DNA
ggggaggtctgctggtgacacagtcttagcttccttccctctgatactgccttggctccccatcattgctatatttttgctggttatagatcctggattgacagttcttttttttttttt

SEQ ID NO: 25175 - DNA, 120 bp, synthetic construct
  source 1..120: mol_type = other DNA
tgctatggcatcaggcaaacaaccccttgttttctgtttattgcatgttctgacagacgagtcacccagtctgagtggatttagtgttctaattcatgaaataagagaatcggaccagat

SEQ ID NO: 25176 - DNA, 120 bp, synthetic construct
  source 1..120: mol_type = other DNA
cacactacatgacattgcctgtgtcccctgggggtccaattcagcccgggtgagacccactgggtgagtctctgctaaatcaggatttaaggggagctgatgggacaagctatcctgcag

SEQ ID NO: 25177 - DNA, 120 bp, synthetic construct
  source 1..120: mol_type = other DNA
gaccctgaaggggcttaactccgactgacacggagtcactggggggtcctgagcagcgagtcatgacccgaattgaattgtgtgcttcaacgatcactctggctgctgtgccgagaacag

SEQ ID NO: 25178 - DNA, 120 bp, synthetic construct
  source 1..120: mol_type = other DNA
tgctgctttagagacaggagaggtcatggcaggttttcacctatatgggagtcacagactgggagagaccagtacaagagaggagcactgcaggaagctcttgagaaggaaaataggtga

SEQ ID NO: 25179 - DNA, 120 bp, synthetic construct
  source 1..120: mol_type = other DNA
ctctgacatctggttttctgccaagtcccaagctcaaagcctggcacatcatacatacccagttcatgtttgttgaatgaatacgtgactgttttaactccgtgcccgttttgagagggt

SEQ ID NO: 25180 - DNA, 120 bp, synthetic construct
  source 1..120: mol_type = other DNA
tccagtttggacaactcgctttcctctccagctatcaagaaattgttgcaattcactgattttgctaggccaaggctcaagagtgccacttgccagaaaattacgcaatacataaaccaa

SEQ ID NO: 25181 - DNA, 120 bp, synthetic construct
  source 1..120: mol_type = other DNA
gaattggattgtgttcaatccttggtgtgtgtcacacgcattggtcatgcatagcctgcttttctctgttagttacttgtaacaacctactgagcaatgcaaatcctcctccacatgaag

SEQ ID NO: 25182 - DNA, 120 bp, synthetic construct
  source 1..120: mol_type = other DNA
tcaaactgattgcttctttctcttttgtttttctccttctgtttacaagattgttgacggtgagtggtttcgtttcctttttcactgggtttggagaggaaactggcataggtgagagcc

SEQ ID NO: 25183 - DNA, 120 bp, synthetic construct
  source 1..120: mol_type = other DNA
tactgtggatttggtaaccctaactctgaatctaagttcagagagtcattctgtgctaaagaagcaactctaaatcgctgcagtgagctttggtgacatggctcaggagatactgaaata

SEQ ID NO: 25184 - DNA, 120 bp, synthetic construct
  source 1..120: mol_type = other DNA
aagggctttcattacattttaaaagtataattgtgagaaatgactctcaaacgtgcagttactgctttgtctctgtgcacacctgtcaccctgtctttgcagcccttctaaacttgccat

SEQ ID NO: 25185 - DNA, 120 bp, synthetic construct
  source 1..120: mol_type = other DNA
acacctcaaaacacccctaagaaccaaccggaacatacacactacacaatacacacagaatacacacagcatacacacacccccctcggaatgtgttcccacacacgaacctcaaaatac

SEQ ID NO: 25186 - DNA, 120 bp, synthetic construct
  source 1..120: mol_type = other DNA
ttctcctactccatctcttacaggacagttgccttggatttagggcccacttggtcaatccaggatgtgctgcttaacttagttacatcgaagaccctttttccaaataaggtcgtgttc

SEQ ID NO: 25187 - DNA, 120 bp, synthetic construct
  source 1..120: mol_type = other DNA
ctagggctcagtgcccaccttctcccagggttagtgccctccctccctccctgggctcattacccaccttcccccaggttcagtgccctccctccctcctctgggctcagtgtccacctt

SEQ ID NO: 25188 - DNA, 120 bp, synthetic construct
  source 1..120: mol_type = other DNA
agcctccagttcttctgtctgtccttgtaactgtgtgtgcatgtccgcgtgttgctccgtgtgtgtgcatgtccgcgtgttgctctgtgtgtgtgcatgtccgcgtgttgctctgtgtgt

SEQ ID NO: 25189 - DNA, 120 bp, synthetic construct
  source 1..120: mol_type = other DNA
ttgttaaaaatctcagcgtacaaatgtctcccaacctttgaataacatagaaaccgagaccaatttaaaccagcccacaggcttgggcccttaaggacaataccgtggttctatttgcct

SEQ ID NO: 25190 - DNA, 120 bp, synthetic construct
  source 1..120: mol_type = other DNA
ccctggcaatgccgcccggcctttggtctcaatcatttcttccatctcatgcatcgcatctcggagaacaaatttgatagcgtcacttgcagattcaggaaacatctggcaaagatgata

SEQ ID NO: 25191 - DNA, 120 bp, synthetic construct
  source 1..120: mol_type = other DNA
aaagtccacatttgagaaaaaaatgctcacacgcaacagcctggcctgagaccacaggcacaatggcacttgagaaatacccaaggtaagccactctgagaaaacccagacccattacac

SEQ ID NO: 25192 - DNA, 120 bp, synthetic construct
  source 1..120: mol_type = other DNA
ggaattaggatctccccagggaatgcgttttatagctaagggtccacgagaagtcttgaacaatgaaaagagcaaagacaaaggcacagaggggttaaaataactggccattctcttcac

SEQ ID NO: 25193 - DNA, 120 bp, synthetic construct
  source 1..120: mol_type = other DNA
ccatgaacagctcactccccttgcaaaacttgactgtaactccctctagaagaatttttggactttcctaactattacactttttcctgaccgggatctcctaaggcactcaggttccat

SEQ ID NO: 25194 - DNA, 120 bp, synthetic construct
  source 1..120: mol_type = other DNA
cagggagctactggaccagcctgtatttttctagacatagttggaaaaagaagtcccactcttctgtcctttcacctttgacagatgtttccaccccaagataagtgaaaatgaccaata

SEQ ID NO: 25195 - DNA, 120 bp, synthetic construct
  source 1..120: mol_type = other DNA
tagcccctagatgccactggactgagccgctacttgcttttgggaaagaggggtgggggttaggggtctgggcgaggggagtgcaggggctcctccttggcctgagagctgttcatacag

SEQ ID NO: 25196 - DNA, 120 bp, synthetic construct
  source 1..120: mol_type = other DNA
gtggcagattctcatgcctttgtgtgagacttgtctttttcttctgaaagttttgtgggacttttttcatctccctgctcagggcttggtgggccctttgcattcgaagattcttgtctg

SEQ ID NO: 25197 - DNA, 120 bp, synthetic construct
  source 1..120: mol_type = other DNA
ctgggacccgggaaatggcaggtgtcctctgaggagagctgagcaggagaggagctggggcctgggaatggcaggtgtctgctgaggggaactgtgttgaggaggagctgggacccggga

SEQ ID NO: 25198 - DNA, 120 bp, synthetic construct
  source 1..120: mol_type = other DNA
ttggtgattccagaatctgccagctcactccctttggcaccgtgtcctgctgtgtccagggcgggcaggtccatgctgctctgggtccagggaaggtctgggaagagtggccagggactt

SEQ ID NO: 25199 - DNA, 120 bp, synthetic construct
  source 1..120: mol_type = other DNA
agaagccaatgaggttaacgggcaggtcagcgtcaggggctcacccagccaccccagaaccccttgctgttgttccagaaccttcagattgctttctctgaaagtgtgcctgtgtgtgtg

SEQ ID NO: 25200 - DNA, 120 bp, synthetic construct
  source 1..120: mol_type = other DNA
cagtttggggtttgcatgttgattttgtacatccagcatctcaggatggctcgccacgtcatgggggctcagcagatgctttgccaagtgagtgggagcgttctcagcttgcgtttgcca

SEQ ID NO: 25201 - DNA, 120 bp, synthetic construct
  source 1..120: mol_type = other DNA
tagcgtattttattatgctgctgagaacattctgtgaggctgctctgtcagtcagctgcattccataaagctgcagcagaaaaccaagcccaaagcccagggcttcttaacaacacaggt

SEQ ID NO: 25202 - DNA, 120 bp, synthetic construct
  source 1..120: mol_type = other DNA
actccatcaagcctaggacagtcatgcagtcgggtgggatcacacacatctgttccctgaagttccagtctgggtaaattattcagtgctgatctctgccctagagtggagagaaggagc

SEQ ID NO: 25203 - DNA, 120 bp, synthetic construct
  source 1..120: mol_type = other DNA
cccggcaaaatggaggctgcaggctcggtcatttgggctggttctgcagttccttgcgtgcagggaatcgggcggtcgacagagctctttccaacgtgttgccttggtcatgacagtcct

SEQ ID NO: 25204 - DNA, 120 bp, synthetic construct
  source 1..120: mol_type = other DNA
aggggcagatgccagtctgggaagccggattgtttgaagaccaactttaaagttgggagcagtgcccagagcggggccgatgtctgctaggtggttgtctctgctttttgaaaaagaagt

SEQ ID NO: 25205 - DNA, 120 bp, synthetic construct
  source 1..120: mol_type = other DNA
tggctgtaaggccttccgtgtgctcatgactccacagttatttttacatctccagaagcctgcgtccaactgcctgtgtgcatcgccgcccggtgtctggtgggcttctcagcctcacgt

SEQ ID NO: 25206 - DNA, 120 bp, synthetic construct
  source 1..120: mol_type = other DNA
gctcattccttccttctcctcctgctcattcattccttccttcttcctcctactcattaattccttcctccccccattcctttcttcaccccctcattcattcctttcttcacccccatt

SEQ ID NO: 25207 - DNA, 120 bp, synthetic construct
  source 1..120: mol_type = other DNA
gctcattcattccttccttcttcttcctgctcattcattccttccttcccccccattccttcctttcttttcccccggctcattccttccttctccccactcctgctcattaattccttc

SEQ ID NO: 25208 - DNA, 120 bp, synthetic construct
  source 1..120: mol_type = other DNA
acacagtcctcaatagcatatcgaacacctaggactagatctaaaggaaaacatgccagacacatgcacagaaaactccagttcattgttgggagaagttgaagatgaactcaatacctg

SEQ ID NO: 25209 - DNA, 120 bp, synthetic construct
  source 1..120: mol_type = other DNA
agtcatgcaatggaatactatacagcaatgaaaaggaacacacttctgctagatgacagggctgagtctcaccaacacactgagtaccttaaggctctcaggataatgggaaaaaaaaga

SEQ ID NO: 25210 - DNA, 120 bp, synthetic construct
  source 1..120: mol_type = other DNA
tgcagaggtgagagttgaaagacgctgcccccaggccacagtctctgactgtccacagaaccacacgctccacatcttcccctcaaactcaactcaagcgctcttggctttaaatcaggc

SEQ ID NO: 25211 - DNA, 120 bp, synthetic construct
  source 1..120: mol_type = other DNA
tccagcctcgggattacaaagtgctcagattacaggcatgagtcactgcccccgataataatcttcaattcaagcagggcttccctagcacttacaattcaatacggtgttatgcagaag

SEQ ID NO: 25212 - DNA, 120 bp, synthetic construct
  source 1..120: mol_type = other DNA
gtgctgaatacgctccatagactgacacaccgcactcaacaaacccaggaagctggattgatgcttacccagtagttgacactaatgcaaaaagattgctgagtatgttattaataataa

SEQ ID NO: 25213 - DNA, 120 bp, synthetic construct
  source 1..120: mol_type = other DNA
acagacttgtttcaggactgagtcctctgcacttggcattcccctgtttcttccccacgggctcttcccagggcatcgtcttccttcccatctacagggctcagctcaatttcacctact

SEQ ID NO: 25214 - DNA, 120 bp, synthetic construct
  source 1..120: mol_type = other DNA
tatgcatattatttattgatgcaatatttcttcttagtttcagtgacattacaccctccaaggttgccccctgcttttctggctgttccttctccttcttctttgcaaggctggcttcct

SEQ ID NO: 25215 - DNA, 120 bp, synthetic construct
  source 1..120: mol_type = other DNA
aaaaaaaaaacactgaataggtcaaatagaaatcagagggtctccatttgtaacctctgaaatgaggcacagagaggtggaatgacttgccaaggccacacagcagagaagtgatagagc

SEQ ID NO: 25216 - DNA, 120 bp, synthetic construct
  source 1..120: mol_type = other DNA
aagaatgaaatgtgtcaaagacaagcatagaaataatataacacacaccagtgtaccctgccctcagcttacgaagtgaaacatagacacagttaaagccccatgtttgccacatccgaa

SEQ ID NO: 25217 - DNA, 120 bp, synthetic construct
  source 1..120: mol_type = other DNA
aggctggtaggaagttgaactgaggtactgaattctgatcctggctggctcattaccagatgttttactcgaggttctctagtgaaacagaaccaatggggtgtaactatatatatatat

SEQ ID NO: 25218 - DNA, 120 bp, synthetic construct
  source 1..120: mol_type = other DNA
gaattttaaaatagaaccacaaagatatgatcgattgatttttgacaatgtctctgccctcatgaagctgcccttttaatggtggggggtagggtgggacagaccatattgagataaaca

SEQ ID NO: 25219 - DNA, 120 bp, synthetic construct
  source 1..120: mol_type = other DNA
aatgatgaaattaaaaaaggtaaaatccctgcccacaggaactcacagtccagcaaaggaaacagacaagcagcccaaacaatgtggtaaatgttctcaccaagagatgtcccagcatca

SEQ ID NO: 25220 - DNA, 120 bp, synthetic construct
  source 1..120: mol_type = other DNA
cagcttcttattaatgagtcaggggaggtgattcctgagcaggatttgacagtggtgtgttgtgccactatgcaaagcagcccactgatgagtttcttctcttttctttttttttttttt

SEQ ID NO: 25221 - DNA, 120 bp, synthetic construct
  source 1..120: mol_type = other DNA
gacctttacggcaccgggaattcagcttccaaggtttctctggggtcccattggccaagaagccccaactgttaatcagttggcagcttagaatttttttttttaattattatttaagtt

SEQ ID NO: 25222 - DNA, 120 bp, synthetic construct
  source 1..120: mol_type = other DNA
ccaagttatctggttagccatatcagaaatataatctctaaatcttttaaaagaatgtgggttccatatgcccttgtcatggtcactttattctgaccaaagtcagggttggcgatgagc

SEQ ID NO: 25223 - DNA, 120 bp, synthetic construct
  source 1..120: mol_type = other DNA
ctccctgatagatgctgagagcatccagaaacttccagaccagccctctcaccacacccagaagaggcctttcccatctggagagaagcttccagaccagcccttcacacaccacagcca

SEQ ID NO: 25224 - DNA, 120 bp, synthetic construct
  source 1..120: mol_type = other DNA
ctcaccacagccaggagaggccgttcccacctggagggaaaattgctcctttgatggaggttagggactgtcaccctcagcactgtgaacataccgggcgagatcattcttcaggggaag

SEQ ID NO: 25225 - DNA, 120 bp, synthetic construct
  source 1..120: mol_type = other DNA
ttccagtccaggataagccctcaggaaaaataaataaaaagtcaagagagagaaaattacagtgtaggtagtgagggtgatttacccaacatcctactagatgagcacaagcccaggaag

SEQ ID NO: 25226 - DNA, 120 bp, synthetic construct
  source 1..120: mol_type = other DNA
caggttcctgggctacaaccctgctttctcagctactctgctgatgagagaccgaggcagaagtggctggggaccacacttgatgggcaatttagggagctttcaagagaagtgtgactg

SEQ ID NO: 25227 - DNA, 120 bp, synthetic construct
  source 1..120: mol_type = other DNA
caggggatcatgcagtgtggagaccagggctctggcagtggactcaggatgggcctggcctggaagggtcactttgtggctagctgaccttcatccagctgttttgtctctgtgccttca

SEQ ID NO: 25228 - DNA, 120 bp, synthetic construct
  source 1..120: mol_type = other DNA
ttctgtggaggtctttcttagatgagataaacacctaaatcagtagactttgagtaaagcagatgagcctccataatgtgtgtgtgtggttcattcaatcacctgaaggccttgagaaaa

SEQ ID NO: 25229 - DNA, 120 bp, synthetic construct
  source 1..120: mol_type = other DNA
gacaaaagacaattacctccttttctgccttcctaaatctccacccacattccttactaaggagcagctacttctctcccaaagaaactacaggtggtatagagaaaccatgagtttcaa

SEQ ID NO: 25230 - DNA, 120 bp, synthetic construct
  source 1..120: mol_type = other DNA
gtactgaggcagaggttaaccattagccctccatcaccgaggtagaggctaaccggtatccctccatcaccgaggcagaggctaaccagtatccctccatcactgaggcagaggttaacc

SEQ ID NO: 25231 - DNA, 120 bp, synthetic construct
  source 1..120: mol_type = other DNA
ccagtttccagatagaaacgcaccactcgattctggaaatcccgttgtgggcctgccccgcctcactcagctcagtgacaaagggacacaggcttgcatctggcatctgctgtcctggcc

SEQ ID NO: 25232 - DNA, 120 bp, synthetic construct
  source 1..120: mol_type = other DNA
ccacactggtggttgaagggctctggaccataaagccacagcagaggcggcctggagcccagtgtcaggaagatggaccagcccaacaataggccagccctccccatttcttcagttgtc

SEQ ID NO: 25233 - DNA, 120 bp, synthetic construct
  source 1..120: mol_type = other DNA
acactagtttgtctatccacaaacagattttgttttgcacatgacaccatttccattcattcacacagctggcatcagttgggcaccatgtggttacatgccccagatgagtctcattgg

SEQ ID NO: 25234 - DNA, 120 bp, synthetic construct
  source 1..120: mol_type = other DNA
tccaggagagggtgattctgtgcatgttacagacacaaacatgcaggtaccatacagaaacacacacacacaccatacacaccatgcagaaacacacacacacacacaccatacagaaac

SEQ ID NO: 25235 - DNA, 120 bp, synthetic construct
  source 1..120: mol_type = other DNA
cacacacacacaaacacacaccatgcagaaacactcacacgcacacacaccatgcagaaacacacacaccatgcagaaacacacacacacacaaacacacaccatgcagaaacacaccac

SEQ ID NO: 25236 - DNA, 120 bp, synthetic construct
  source 1..120: mol_type = other DNA
atggtcatccctctgtgtatgtccatgtcctaatatctcctcataatcacaccagtcatattgaattagggaccatcctaatgacctcagtttaatgtaaccacctctttacaggccgta

SEQ ID NO: 25237 - DNA, 120 bp, synthetic construct
  source 1..120: mol_type = other DNA
agacatcagattaatataggtaaagtgctcacaagagtgcctacaatgcactctgtaatctttaagtttttctaccaccaccgatactaccactaccatcactctcatcaccaccaccac

SEQ ID NO: 25238 - DNA, 120 bp, synthetic construct
  source 1..120: mol_type = other DNA
tcctcaacagtgtcatcaccaccaccgttaacatcaacaccatcacctctaccattaccaccaccaatcccaccacccttctcacctccactgtcaccctccttaacaccatcaccacca

SEQ ID NO: 25239 - DNA, 120 bp, synthetic construct
  source 1..120: mol_type = other DNA
ttgcgtgtgtgtgaatgtgtataggggtgggttgtgtgaatgtgtgtgtaggggtgggttgcgtgtgtgtgaatgtgtgtgtaggggtgggtttgaatgcaggtaggttgcgtgtgtgtg

SEQ ID NO: 25240 - DNA, 120 bp, synthetic construct
  source 1..120: mol_type = other DNA
ccacaaatacatcagcatagcatgtgtccataacatcctgatccccagagactgtggagtgtgatctcatttgggaaaagggtctttgcagatgtagttaaagatcttgagatgagatca

SEQ ID NO: 25241 - DNA, 120 bp, synthetic construct
  source 1..120: mol_type = other DNA
cccacaccgacagcccccaacaccgacagcccccaacaccgacagccccacacaccaacagcgcccccacaccgacagcccccaacaccgacagcccccaacaccgacagccgccccaca

SEQ ID NO: 25242 - DNA, 120 bp, synthetic construct
  source 1..120: mol_type = other DNA
tgttgggcacattcccactgcagggccctcacactcatgcccttcagatccctgcctcaatgctccttaacaaagtaacctcctgtaaatctcctctgcccctcaaaataaacatttatt

SEQ ID NO: 25243 - DNA, 120 bp, synthetic construct
  source 1..120: mol_type = other DNA
gggtccctcactgacctctttgggacaggataaacagaagttggaaaagaggcctcatgcaagagcctcttgcatgaggttccaagaacctcacaagttcttggctaggggtgtgtacca

SEQ ID NO: 25244 - DNA, 120 bp, synthetic construct
  source 1..120: mol_type = other DNA
tgaactcagattgtcatcaaaggcactcaggtgattccacgaggaaagcacagtctttccaataaatgactgggggcaaaatgaatatcaactcttacaccatctgacaaactgacattg

SEQ ID NO: 25245 - DNA, 120 bp, synthetic construct
  source 1..120: mol_type = other DNA
aataaccccatctcgggctgttgttcttccctgcggaggaagagctccggataaatgtgagggaggaaggcaggggctcactgacacccagaatgttgtggaaatgtggatatttcaagg

SEQ ID NO: 25246 - DNA, 120 bp, synthetic construct
  source 1..120: mol_type = other DNA
attcaaataaagcactttagtaggatgtgggttccctagtaaatgctcagtaagtgtttgctgccttccatcacaattaccaccttcagcaccataatgaccatgactactaccatcacc

SEQ ID NO: 25247 - DNA, 120 bp, synthetic construct
  source 1..120: mol_type = other DNA
accattactaccactaccatcaccaccatcaccactaccaccatcatcttcaccactacaatgaccattactaccactaccatcaccaccaccccctaaacactatcaccatgatcacca

SEQ ID NO: 25248 - DNA, 120 bp, synthetic construct
  source 1..120: mol_type = other DNA
tgttaatttggggggaagccattaaactgaaagtgtgtcatctgtcataaaaactaagaaattcaacctaggtatataagaagacaagtttctttttttttttttaatttattattatta

SEQ ID NO: 25249 - DNA, 120 bp, synthetic construct
  source 1..120: mol_type = other DNA
tcaatgaaattactcttcatctacttatttccgttatacttagatatgaactagtgatttattagttgtttttcagcattacagaaacaaaattttactagtccaatctcttgagatagc

SEQ ID NO: 25250 - DNA, 120 bp, synthetic construct
  source 1..120: mol_type = other DNA
tgaactctgaacctcagcagtctgcctctaggacccatactgctaaccatgatgtcactttgctgttgcatttgagacagatccaaactccccgccacgcctctacagccctgtatgttt

SEQ ID NO: 25251 - DNA, 120 bp, synthetic construct
  source 1..120: mol_type = other DNA
cttccactgctggagtccctgtgcccagtaaagttcctggtgcatagcaggtactcaaagactttgaaaatgaaataattctttatcctaccctaacatggctaacattttgtccaagtg

SEQ ID NO: 25252 - DNA, 120 bp, synthetic construct
  source 1..120: mol_type = other DNA
gaagcgctgtgtgcttggcgcttttccaggtccgaggtcccggtgggttttgtgacaggtagcctggacgtgctgtgtgcttggcgcttttccaggtccgaggtcccggtgggttttgtg

SEQ ID NO: 25253 - DNA, 120 bp, synthetic construct
  source 1..120: mol_type = other DNA
cctccatggtggtgaggattaaacgggtgaatacacacacgcactcagaatagtagtggacatagaaagtatttgctgttaccgttgtttctttcttatgacaagtcaaccttgaacaac

SEQ ID NO: 25254 - DNA, 120 bp, synthetic construct
  source 1..120: mol_type = other DNA
taattgttctacactaagggataatgcgcatgtggtgtatttttgcccagggttgaacacagtgagtcgcccggcgttactagtcaaggaatggatgtcttgacttttaatcaataggtc

SEQ ID NO: 25255 - DNA, 120 bp, synthetic construct
  source 1..120: mol_type = other DNA
acagttgaatatacataactctcatttcctgggaaacacaattttaaataaatagttgagttccccaatggactatcaatcccggagaagaaaatcagggcgctccctcctctccctctc

SEQ ID NO: 25256 - DNA, 120 bp, synthetic construct
  source 1..120: mol_type = other DNA
taatgtctggcgtttgcagtgtatgtagatgttaatatgtaggacaagtgaaatacaaaaggggacaaggtgtggtgatgaagtttctgcattccacttgaagtagtaaaatactgattc

SEQ ID NO: 25257 - DNA, 120 bp, synthetic construct
  source 1..120: mol_type = other DNA
ggaggactctgggacacagagctggatatatgtctaattgctttcagaatcaaggtgagcgcagtttatgggtttaactaagtttgaactgagtcttaagtaaccatctccaacttttaa

SEQ ID NO: 25258 - DNA, 120 bp, synthetic construct
  source 1..120: mol_type = other DNA
catctcaaaaaaaccccaaaaaagcaggtcatttgtcctgtaacatttcccactgggggagagttttatggcatatacatatgtcaccccccccacacacatcacacacctatacgtaca

SEQ ID NO: 25259 - DNA, 120 bp, synthetic construct
  source 1..120: mol_type = other DNA
tcacacaaccacacacaatcaccccccacacatcacacacccacatacacaatcaccccacacacatcacacatccatacacaatcaccccctacacatatcacacacccttaaatacac

SEQ ID NO: 25260 - DNA, 120 bp, synthetic construct
  source 1..120: mol_type = other DNA
tcgtctgaatttcctccttccggagcttgcctggaatccctcctgtcatgatctggaccaaaccttacttggctcatgcccagggcatagagggctgaggtcactccgaggctgaaaaag

SEQ ID NO: 25261 - DNA, 120 bp, synthetic construct
  source 1..120: mol_type = other DNA
gtcatgtgctcatgtatgaaggagatgaagatggtcaagtcttccagtgtctgggcaggagtagtgtcatgtgctcatgtatgaaggagatgaagatggtcaagtctttgagtctctggg

SEQ ID NO: 25262 - DNA, 120 bp, synthetic construct
  source 1..120: mol_type = other DNA
ttaccatgatcattatcatcattaccaccactaccttcactgccatcattactaccatcaccatcaatactatcaccaccaccaccatcattactatcaccactatcaccaccgtcattg

SEQ ID NO: 25263 - DNA, 120 bp, synthetic construct
  source 1..120: mol_type = other DNA
agggaaatgcacctgtcttttcggtgacatcttgctcttgtttctctcaatgtgatagaaagcaatgtgactgacattttctctctgggctggatccagagttcttgcaaatatgacttg

SEQ ID NO: 25264 - DNA, 120 bp, synthetic construct
  source 1..120: mol_type = other DNA
gtatggggagtccttgccagctgcaacaagcgggatctctgtcccctgtttttatttgtcacagtgacatccgtcagcgcaggcacctcagttctgtgccagaggcaaatgcaggaggag

SEQ ID NO: 25265 - DNA, 120 bp, synthetic construct
  source 1..120: mol_type = other DNA
gaaaggaaatgcacacttattgagcactgaccgaatgcttccaccagcatctagtcttcccctttgctgtgtgtaccagccccactggcatgaaaatgagcatcttcctcatgttttgga

SEQ ID NO: 25266 - DNA, 120 bp, synthetic construct
  source 1..120: mol_type = other DNA
gatacacatgcacatacatacacatgcacacacatacaggtacacagagatacacacagatgcacacacaggcacacagagatatacacacatgcacacacccacatgcacacaccgata

SEQ ID NO: 25267 - DNA, 120 bp, synthetic construct
  source 1..120: mol_type = other DNA
tcaggctccgtcttggggtcaggctccatgttagtgtcatgcgccacgttagggtcaggcactgtgttggggtcaggtgctgtgtgttggggtcagctgctgtgttggggtcaggcactg

SEQ ID NO: 25268 - DNA, 120 bp, synthetic construct
  source 1..120: mol_type = other DNA
agtgtaatgcgccacgttagggtcaggcagtgtgttggggtcaggtgctgtgtgttggggtcagatgctgtgttggggtcagctgctgtgttggggtcaggcactgtgttggggtcagga

SEQ ID NO: 25269 - DNA, 120 bp, synthetic construct
  source 1..120: mol_type = other DNA
tgtgtgttggggtcaggtgctgtattggggtcaggctccgtgttggggtcaggctccgtgttggggtcagcctccgtgttagtgtcatgcgccacgttagggtcaggcactgtgttgggg

SEQ ID NO: 25270 - DNA, 120 bp, synthetic construct
  source 1..120: mol_type = other DNA
gagagtttggagaggtcgggggagccgagagggatggtcctgaatgtaacgttgaccattggtgagccagagaggagtctgctgaggctctgcctgtccatatttgaaagtttaactttg

SEQ ID NO: 25271 - DNA, 120 bp, synthetic construct
  source 1..120: mol_type = other DNA
cctgacgttgttcagacctgtatccccactgcggacacccctgacgctgttcagacctgtatccccactgcggacacccctggctgctgttcagacctgtatccccactgcggacacccc

SEQ ID NO: 25272 - DNA, 120 bp, synthetic construct
  source 1..120: mol_type = other DNA
tttagactctggttttttatttttaattggaataaatgtagattggaatgatcagctcctgagttgctgggtgcagttaaagaacttggtgatggtgcagctactgaatgctggggaggt

SEQ ID NO: 25273 - DNA, 120 bp, synthetic construct
  source 1..120: mol_type = other DNA
ccatccatgcatccctccgttcatctgttgactcattcattcatcagtccactaattcattcattcatctatccacttatccatcctcccacccacctatccgttgattcatacatccac

SEQ ID NO: 25274 - DNA, 120 bp, synthetic construct
  source 1..120: mol_type = other DNA
gcattcatcatgcatcaacttatttattcattcaactaatatctatcccatggccatctatgctgctgctgacacctgtgaggtgacatcaaggtgagagatgatgaattggtgagcagg

SEQ ID NO: 25275 - DNA, 120 bp, synthetic construct
  source 1..120: mol_type = other DNA
gggctgtgcagagagtagacactcagtaaatgccattgaatacatgcaggagagagtgagtggtggaactcagataataggtagatggagggatgatcaattggatggatattagattaa

SEQ ID NO: 25276 - DNA, 120 bp, synthetic construct
  source 1..120: mol_type = other DNA
gtgggtgagtgggtagatgggtggatttacgagtagctaggtaaatgaacttaataagacaggcacacaaacaccctgccactctgagaactaacttttaattcatctatttgaggacaa

SEQ ID NO: 25277 - DNA, 120 bp, synthetic construct
  source 1..120: mol_type = other DNA
atgtgctctgtggcaggtgtggatctatggactgggactacactctggctgggttcagcaggaagtgctggcctggctcattcaccagttcacaccctgagttttcccttccagctggca

SEQ ID NO: 25278 - DNA, 120 bp, synthetic construct
  source 1..120: mol_type = other DNA
gctgggctctgtctgggcagggatgaggctgggcagggatgaggctggcctctgcctggacagggatgaggctgggctctgcctgggcagggatgaggctgggctcctcctgggcaggga

SEQ ID NO: 25279 - DNA, 120 bp, synthetic construct
  source 1..120: mol_type = other DNA
gatagggtgatggtgatgatggtaacagtagtggtagtaatggtgatgatggtggtgatagggtgttggtgatggtgatagtagtggtgggaatggatggtggtggtgataatggtgaca

SEQ ID NO: 25280 - DNA, 120 bp, synthetic construct
  source 1..120: mol_type = other DNA
ttcctgtcattggcctcaaccaggaggtgaacctcacagctgtgctgcttcccttgaaccctaacctcaccgtcttctactggtggatcggccacagcctgcaggtgcgctggctttgcc

SEQ ID NO: 25281 - DNA, 120 bp, synthetic construct
  source 1..120: mol_type = other DNA
tcaaaaaaaagcaagataaaatagaggaagcatctttccgaaagcataaggcagctactatgatagtaagcaaggcctgggccaaaatccagaagaagatggaaattcagaagggaagcc

SEQ ID NO: 25282 - DNA, 120 bp, synthetic construct
  source 1..120: mol_type = other DNA
ctgaattgagaataaactaattttggagcgctaacacccccaagtgtgcgggagaggcaagggaaaatgctccttggtagtggaaagcagagttctaggaatcaagttatttccatagga

SEQ ID NO: 25283 - DNA, 120 bp, synthetic construct
  source 1..120: mol_type = other DNA
accagtcccgtcctgaccccacaataagcaaattctcttgaaagtcaattcatcaatagcgaaacggccaactagcccaaagccaattcattaaggcaaacttaatgtacttagtgacta

SEQ ID NO: 25284 - DNA, 120 bp, synthetic construct
  source 1..120: mol_type = other DNA
aagtttgagaagcgctgctctgaggagggattagagtgcaggacttaaatatatcctaagcacttgagatatatttgctctttccatctcctggataatcctgaggcacagaggttacat

SEQ ID NO: 25285 - DNA, 120 bp, synthetic construct
  source 1..120: mol_type = other DNA
gcccggcagcacatgatgcctggcagcatgtgacacggtgtgacacggtgtatctatggcccattcctctggaaacagttcctttggttttgtcacctacgtggctggtctctgctggct

SEQ ID NO: 25286 - DNA, 120 bp, synthetic construct
  source 1..120: mol_type = other DNA
gtcattctacttataaagcaaaggaccacgggatagatgggacttgtctttggtaactcaccagctgttgcttgaaccagaacaaagccaggtctcctgatgcccagaaaagaactagtg

SEQ ID NO: 25287 - DNA, 120 bp, synthetic construct
  source 1..120: mol_type = other DNA
atgagacactaggcccagatcactagaaaaacagggctgcagatgagacactcagcccggcccccggaaagggaatctgactgagcagtggagggaaattcacacagattatcccggccc

SEQ ID NO: 25288 - DNA, 120 bp, synthetic construct
  source 1..120: mol_type = other DNA
cccattaatccattcatctgtccacccatgcattaatccacccatcaatccacctaaccgcctacccatccacccatccaccaatccatccatccaatcctaccatccaatccatccatc

SEQ ID NO: 25289 - DNA, 120 bp, synthetic construct
  source 1..120: mol_type = other DNA
aaaaaaaatcctgagttgcttgcaattggggggcttcatattaaaatccaaatttctagcttctcgtgaaataatagagggctggtctgagacaatgaactctggattccctgtggggca

SEQ ID NO: 25290 - DNA, 120 bp, synthetic construct
  source 1..120: mol_type = other DNA
tctaggcttgaatcgcacgtcccagagagagcgccaggatgtgctgagaaaatagccagcacatcctgtggtctttgcggggaagaagggactggatttgggtcttagccctgtggccga

SEQ ID NO: 25291 - DNA, 120 bp, synthetic construct
  source 1..120: mol_type = other DNA
taggtaggtgggtgcaggtgggtgatgggtggtaggtaggtgggtgcaggtgagtgggtggcaggtaggtgggtgcagatgggtggttggtaggtgggtgtgggtcgtgatgccttccct

SEQ ID NO: 25292 - DNA, 120 bp, synthetic construct
  source 1..120: mol_type = other DNA
gaaggagacctggaaggcttcctggaggaggtatgctagagctgggcaaaagcagcagtggacattagatgggaaagcagcagtgggcattagatgggaaagcagcagtggacattagat

SEQ ID NO: 25293 - DNA, 120 bp, synthetic construct
  source 1..120: mol_type = other DNA
tgatatgctgaggtggggcacaatttctcagccaaccacatgcagcagcagcttaactgatactatatgtaaatggcgaacaaaaaattcacagaaaacaccttcattccttgtgatgtg

SEQ ID NO: 25294 - DNA, 120 bp, synthetic construct
  source 1..120: mol_type = other DNA
gaaggaaacagagaatgtggtcaaacacaccacagggagccatgcagtgggatcctacacggcagctaaggaatcagccatggcaggggatttcatgccaggcaggaacttcgtgaaaca

SEQ ID NO: 25295 - DNA, 120 bp, synthetic construct
  source 1..120: mol_type = other DNA
caacttctgaaaaaaaaaaaaaaaaaaaaaaaaaaaaggccgtcacagctcaggaaccattgtggaatgatgggctggtgcctcctgttgggggagtggattccagattccagaagtctc

SEQ ID NO: 25296 - DNA, 120 bp, synthetic construct
  source 1..120: mol_type = other DNA
tgggaacacttttttctcagcgtctccaggcactgggaagggatagtgcatagggcagatggggtcacagccccaggagcctggattctagtgggaaattgccaacctcagacattgagg

SEQ ID NO: 25297 - DNA, 120 bp, synthetic construct
  source 1..120: mol_type = other DNA
tatctgcttgacatctcggcagccctgtgcacctgtcatcccacttcacagaggacgcaggggcgggtggttacccaaagccgcagaaaagtttatgcaaaagcagctcgttgtgcagag

SEQ ID NO: 25298 - DNA, 120 bp, synthetic construct
  source 1..120: mol_type = other DNA
ggacgaggatcatgcttccctgtctccccaccccgcgttgaacagtcgaggagaccgggggccaggggacgaggatcatgcttccctgtctccccaccccgcgttgaacagtcgagaaga

SEQ ID NO: 25299 - DNA, 120 bp, synthetic construct
  source 1..120: mol_type = other DNA
cagaaatagatggcctggtgcaggggccaagctcggctagggcctcagccctgggagttgtaaagaaggccggcctctaccatgggcatctgcaccaagctgtgcccatgtcacggtgtg

SEQ ID NO: 25300 - DNA, 120 bp, synthetic construct
  source 1..120: mol_type = other DNA
gctgctgaattctagtccaggcaactcccgcaagaagtccactccaggtagaaatctataatcacagaaacaaggcacactggcctcaggtaactatgatgctgtgataaatacatattt

SEQ ID NO: 25301 - DNA, 120 bp, synthetic construct
  source 1..120: mol_type = other DNA
gatggatggaagaatgaatggatggatgagagaatgaatggatggatggaaggatgaatggatggatggaagaatgaatggacagatggaagaatgaatggatggatgaaagaatgatgg

SEQ ID NO: 25302 - DNA, 120 bp, synthetic construct
  source 1..120: mol_type = other DNA
agcactgacagccccagggcatccatctgtggcccatctccctccaccccgcaaccctccatgcacccctccatgcactgacagccccagggcatccatctgtgtcccgtctcactgcac

SEQ ID NO: 25303 - DNA, 120 bp, synthetic construct
  source 1..120: mol_type = other DNA
tcagggaaggtcgagaaaatgaacgaaacactcaaacaacatctaaaaaagctaactcaggaaacccacctcgcatggcctgctctgttgcccatagccttattaagaatacaaaactcc

SEQ ID NO: 25304 - DNA, 120 bp, synthetic construct
  source 1..120: mol_type = other DNA
atgtcgtgacaatctacattttcgggcaaacacaaatttggggaatgtcatcaaatagtctcccgctgattgcatgattccacaaagtcctacacagtctacattgtgcactgagtatct

SEQ ID NO: 25305 - DNA, 120 bp, synthetic construct
  source 1..120: mol_type = other DNA
aagaacttccagtctcttttgtgtaaccctggtatctgggttgctcttgattcttaagataattctcctgaccccaacgtttcagaatcacttcaggtagtggaaacagttaacccatca

SEQ ID NO: 25306 - DNA, 120 bp, synthetic construct
  source 1..120: mol_type = other DNA
aaaacatattaaactgcggttcatacctgagatttagattactggttgacttattgatcatttctgaagcacattttaatacttaacaattcaagattccctcatttatataatacttca

SEQ ID NO: 25307 - DNA, 120 bp, synthetic construct
  source 1..120: mol_type = other DNA
cctatcaaaatcctaatggcactcttgacagaaataggaaaaacaatcttaaacagacatataggccactggaagagaatagaggacccagaaatcaaccgacacttacacagtccactg

SEQ ID NO: 25308 - DNA, 120 bp, synthetic construct
  source 1..120: mol_type = other DNA
tgcacatgtgtgtatgtgcatgtgtgtgaatcagtatatgtggatgttgtgtaatcccagctgtgtgcatgactgttttgcttgtgagttgatgtaggagatggtgcagtcctgttgtgt

SEQ ID NO: 25309 - DNA, 120 bp, synthetic construct
  source 1..120: mol_type = other DNA
tagcttagttgcctattgtagaccttaagaactctggctctggagtcaaactgataggaagtggaattgtggttcactgctgtgtaatccaggtaaagctcttaaccgctctgagtctca

SEQ ID NO: 25310 - DNA, 120 bp, synthetic construct
  source 1..120: mol_type = other DNA
ccctgatgaacatagatgaaaaaatcctttacaaattaccagcaaaccgaatccagtagtatatcaaaagtcaattcaccatgatcaagtaggcttccttcctgggatgcaaggttagtt

SEQ ID NO: 25311 - DNA, 120 bp, synthetic construct
  source 1..120: mol_type = other DNA
gttacacagtccccatcaaggtgtgtgaaaggtggccctaaggctagacccagcccacaggtgggacgttttttgttttttaaaggtcagtttccaatatttacaaattatgaaatatga

SEQ ID NO: 25312 - DNA, 120 bp, synthetic construct
  source 1..120: mol_type = other DNA
aggaagcacattacttcgacaatgcagcagctcagggtaggtatgcatacatatttactgttaaaccacagttttgctccttagaaggcaattctattgccacctatactggagagactt

SEQ ID NO: 25313 - DNA, 120 bp, synthetic construct
  source 1..120: mol_type = other DNA
tgtttagaatcacaaacaggttcgttcacagccattgggggtgacccttcccagtctttgcacagaggtcataagaggcagaggtgatgcaggcagggtaaggaaacttagaaggaacca

SEQ ID NO: 25314 - DNA, 120 bp, synthetic construct
  source 1..120: mol_type = other DNA
acacattgtatatatgtaaggcccaacaactgacataaaggcagcgcagtgtcctgtaaagagcacagatttgggaatttcccatagacttgtcttgcactgactgcaaacatttaagca

SEQ ID NO: 25315 - DNA, 120 bp, synthetic construct
  source 1..120: mol_type = other DNA
aacaccatatcagctcactcagtgaccttaattctctctgttttgttctctacctgtagctttgcccttcctcctctctttccttagggctcccagagtcatctttttttttttaaatta

SEQ ID NO: 25316 - DNA, 120 bp, synthetic construct
  source 1..120: mol_type = other DNA
ttgcaggtgcaaagtggagggtggcatttgattttagctccttcttttgccagagttgtagtctcaaagaatctcaaagcatgaagctgggtggaaaaatatatatcatctgcttgaacc

SEQ ID NO: 25317 - DNA, 120 bp, synthetic construct
  source 1..120: mol_type = other DNA
tagtcaccatgatatgcatttttatgtactgaatctcatttctcaccacaaattcgagcagtagatatttttattccattttataaaggataaacagaggttctgaggagttaaataact

SEQ ID NO: 25318 - DNA, 120 bp, synthetic construct
  source 1..120: mol_type = other DNA
ttttgcaggccatgtggtctgtagcaattatttacctcagcagttgtagcacaaaagtagtcatagacaacatgtaaatgaatgactgtagctgtatttccataaaactttataaacact

SEQ ID NO: 25319 - DNA, 120 bp, synthetic construct
  source 1..120: mol_type = other DNA
gtgttctaaaggtgagatgtgtgtgtgtgttctagaggtaaggggtgtgtgtgttccagaggtgaggtgtctgtatgtgtgttctagaggtgaggggtgtgtgcatgtgtgttctagagg

SEQ ID NO: 25320 - DNA, 120 bp, synthetic construct
  source 1..120: mol_type = other DNA
aatccattcatggattactgattaatacgctaatgggttaatggatcaatgggttatccttggaatgaaatggcaggctttacaaggagaggaaaagggacttgagctagcatgctcacc

SEQ ID NO: 25321 - DNA, 120 bp, synthetic construct
  source 1..120: mol_type = other DNA
aaagcagcaagccagccagtgtgtttggaatgttctcttatggaaaatttcaaagatatgtaaaactagggctaataatacaattaacccctacttacccattacccaacttcaacaact

SEQ ID NO: 25322 - DNA, 120 bp, synthetic construct
  source 1..120: mol_type = other DNA
atattgttcctgtttccatgtcactaccttctctcactaaccacatcagaaaagcagaaggatagattctggagactctactgatggcttttgtttcccaaatgacctgaattccccatg

SEQ ID NO: 25323 - DNA, 120 bp, synthetic construct
  source 1..120: mol_type = other DNA
ttccttccagaagcccaggggtgctggcagctgcttctgaggatctctctcttccttggctcatatttagcaaaatcaaatttaaagaaccccattcctcgctatccaccatccccctat

SEQ ID NO: 25324 - DNA, 120 bp, synthetic construct
  source 1..120: mol_type = other DNA
taataaaacagggttatgtgatagaaaatggccagaaatgaggatagcaggtttgatggaggtcttttcaagaggacatgcaatcaggacccaatcatgcaatgatgtgtgggaagaacc

SEQ ID NO: 25325 - DNA, 120 bp, synthetic construct
  source 1..120: mol_type = other DNA
ctaagccctttgtgtgaagtagcttaaatattcctcataacaagataggtaccactagtatccccattttatacctgagcacactgaggcctgtgggattaagtgatttgcctaaggtca

SEQ ID NO: 25326 - DNA, 120 bp, synthetic construct
  source 1..120: mol_type = other DNA
ctgtcctcagtttctaactcatggggaagtttatcacaagggtgtgtggtataaacaatgctacaccagctattgccaagattttccaatgaagaaccatcaggcacttgaaaggtctat

SEQ ID NO: 25327 - DNA, 120 bp, synthetic construct
  source 1..120: mol_type = other DNA
gtatctcttaaaaatgagcactccaccagcagcatttattaatcatctattatagtccaggcaatttatgttctttaatgatatctaagacttgttgcataactacaaggtgtgcttcat

SEQ ID NO: 25328 - DNA, 120 bp, synthetic construct
  source 1..120: mol_type = other DNA
agagcgagactccgactcaaaaaaaccaaacaaacaaacgaaaactcagtgggagtgtcttcactatgcagtcgtctattcagcaaccttgacaacaagctctggcactcagtttctatt

SEQ ID NO: 25329 - DNA, 120 bp, synthetic construct
  source 1..120: mol_type = other DNA
cagttcacaagtgcaggagagaattttgataaattgttagctggaaagctgagagagactttgaacatgtaagtgttgcttgtgggctctagttcttaaagtgcccccaaatcgaaacag

SEQ ID NO: 25330 - DNA, 120 bp, synthetic construct
  source 1..120: mol_type = other DNA
atcggtgctccaagcccctcttctggggcaactattgttaccattttattgtctattcttcagatagtcccctcacattgaaatatgtaggtatctgtgtttcaactctctccttgtaca

SEQ ID NO: 25331 - DNA, 120 bp, synthetic construct
  source 1..120: mol_type = other DNA
tgcacattcttcaaggattgtccaagttaatctactttttagtgatcttatcactggattgcagattgcacactacatacgagtatttggctgaggaggaggagaatggggcctgaaatc

SEQ ID NO: 25332 - DNA, 120 bp, synthetic construct
  source 1..120: mol_type = other DNA
cctaaacccagtaagaatactcagaaaaatgttcttggagaaaaatatctctgggacagctttagtttggtgaccaactctgagccactcacctgtggccaatggcaagattagtagtaa

SEQ ID NO: 25333 - DNA, 120 bp, synthetic construct
  source 1..120: mol_type = other DNA
aactactttttcccttgacattttacacaatgagatatgctgtgagaatagcaaggtcatatgaaaatatcaactaaattatactgtttataatggtcactggtggtacatttctgtagg

SEQ ID NO: 25334 - DNA, 120 bp, synthetic construct
  source 1..120: mol_type = other DNA
gcagagatagacaataagtggttcccagggatggtgggtgggggaaaaaatgagatgaaggtcaaagtatatgaagtagcagatatataggatgaacaggtctagaggtctaatgtacaa

SEQ ID NO: 25335 - DNA, 120 bp, synthetic construct
  source 1..120: mol_type = other DNA
cccaaagataactatgcgagatgatagatacgttaatttgattcaccatagtaaccattttactatctgtagtttttccataacttgtaaacctcagatatacacaaggaaatttatttt

SEQ ID NO: 25336 - DNA, 120 bp, synthetic construct
  source 1..120: mol_type = other DNA
tggtatggattgaatgtttgtgtcctctctaaaattcatgttaaaactaaatttccaatgcagcagcattaagaggtgcggcctttaagagatgacttggccatgctggctctgccttca

SEQ ID NO: 25337 - DNA, 120 bp, synthetic construct
  source 1..120: mol_type = other DNA
aggtatttaaaagcagtatttagttggagacaagataggcttagtcaacttgccaacggcttaatgccaggaaggcccagtagggtcacagaatctcagaaatggatgaaaccatactta

SEQ ID NO: 25338 - DNA, 120 bp, synthetic construct
  source 1..120: mol_type = other DNA
atgcaatgaatggatagttaacagaagcactgaggtgtagtgaaaattgttcagggtttcacagacaaaacaacttaattcaacttgatgtgaaatagctgactgtgtgaatttgaacca

SEQ ID NO: 25339 - DNA, 120 bp, synthetic construct
  source 1..120: mol_type = other DNA
aaaagtagctgcctgtagaagacaggaggattcctgcattcttttaaacatgctagccatctgcagcagataacagaccccatgtagcaaaaattcctttttgaaatccagtctcatcag

SEQ ID NO: 25340 - DNA, 120 bp, synthetic construct
  source 1..120: mol_type = other DNA
tgtgtgtatccttatctgtggtagacattggctatatagccatccaaatcgttagtggtgaaggctctattgaatccaagtctgactgcaaagctcatgttcttaaacctcatcatgcag

SEQ ID NO: 25341 - DNA, 120 bp, synthetic construct
  source 1..120: mol_type = other DNA
ttcagccagctaggtggacaatcaaccacctatccattgacccattcttccatcttttaacgttttctctctcatgccataatctgaaggtgatttattcttgtcttgagaaaacatacc

SEQ ID NO: 25342 - DNA, 120 bp, synthetic construct
  source 1..120: mol_type = other DNA
gactgaacatcaactgttatctgaatttctagcctgtcggcctgccctacaagttttatacttgccatagacatattagccaattctttaaaataaatctgtctctgactctctgtcata

SEQ ID NO: 25343 - DNA, 120 bp, synthetic construct
  source 1..120: mol_type = other DNA
gcgtatggcagtcccagaacagggtcactatcaaaaagcaaatgccaaccatgtgatatataggactgctgggaatgtagtccatcattgctctatggtaaaaaagaataccttctctaa

SEQ ID NO: 25344 - DNA, 120 bp, synthetic construct
  source 1..120: mol_type = other DNA
ttgttgttgttgtttttggaatgattgtacaatgcttgaccagcgacagttcatgttgatttcctccaacagttcatgtttgctttcctccatagaaacagaaactcaaccgggcatggt

SEQ ID NO: 25345 - DNA, 120 bp, synthetic construct
  source 1..120: mol_type = other DNA
tttcccagtggctgatgggcaggcagcagtgttaagcctgctaactgaaacatattctaaattatatggatctctggaggggatgcattctacttaaccttggcgtttgttttaaattac

SEQ ID NO: 25346 - DNA, 120 bp, synthetic construct
  source 1..120: mol_type = other DNA
ataatggggaggagggatgaaggtaggagggaagagagagtaaaacatagtcaataatcaatcaatcagaacagagcagaatggcttaatttgatctcaggaagaaaaatgctgctcaga

SEQ ID NO: 25347 - DNA, 120 bp, synthetic construct
  source 1..120: mol_type = other DNA
aacccattgttttccatccttacagatagcccagagttctagagaaggatggcgactacaaagaaatcaatcatcaggatgtgcttcttttaacacataatgctgttggttaattgggtt

SEQ ID NO: 25348 - DNA, 120 bp, synthetic construct
  source 1..120: mol_type = other DNA
agaatctgatataaatttggacttgcattcaaagtccctgacagaactactgccaagaaacggaaaagtaatgttttcctaaaactattacttgaaaatcttgaaagaaatgacttatgc

SEQ ID NO: 25349 - DNA, 120 bp, synthetic construct
  source 1..120: mol_type = other DNA
ttgtcatcaataatggctgtattttcaaaggctcctagtggtaagttctccctcatagcagctaggaacattccatctctcccttccttgacatattgactactttacaatctcccctga

SEQ ID NO: 25350 - DNA, 120 bp, synthetic construct
  source 1..120: mol_type = other DNA
atcattcaggatacctctttgtgtgggttagatctctgacaacagagaacgtaagctcacatgtgggtttggactaaataatgatcaagtatctatgttcagatattatctgtcccaaga

SEQ ID NO: 25351 - DNA, 120 bp, synthetic construct
  source 1..120: mol_type = other DNA
acagacccagtactatatggaaagatggtgagctgtgtcaattagagggaaaaaatggtcctggggcaactaattacccatctgaggaaatcatcagtttgaaacccactctcaatccaa

SEQ ID NO: 25352 - DNA, 120 bp, synthetic construct
  source 1..120: mol_type = other DNA
gtagggtgagattatttttaaaaacacgacacaaaatgtaaactatgaaagatgataataaattctactacataccagtttaaagagtgaaaagacaaaccagagacaacagaaggctac

SEQ ID NO: 25353 - DNA, 120 bp, synthetic construct
  source 1..120: mol_type = other DNA
agtctctgataacagcagaggaagcaccactaaactcaatggcagagagattacaagcaatgctattgtttcctgataatccttcaaaaaataaatacctcagcaagaagccaaagaagc

SEQ ID NO: 25354 - DNA, 120 bp, synthetic construct
  source 1..120: mol_type = other DNA
cccttggtacacacctaccagctgaagaaaggaagacagctggtgtatactaacaccaaatacactaggtaatcagtgacacacgaatggaataagctcagtaaaatatgcctagttttg

SEQ ID NO: 25355 - DNA, 120 bp, synthetic construct
  source 1..120: mol_type = other DNA
agcaacaagataaaagaaatctgaattcttagatgactcaaggagcagggctgccctccatgcctgaaccaccacactcacaagaaagagacacaaatgtcttaccttatttaaaccact

SEQ ID NO: 25356 - DNA, 120 bp, synthetic construct
  source 1..120: mol_type = other DNA
tgagaaatcagcaacgcagacattaagacccagatacataaatggggaaaacatatggacagacggtacaaatacagttaagaaatatagaaagttccaccttataagtagtcaaatgca

SEQ ID NO: 25357 - DNA, 120 bp, synthetic construct
  source 1..120: mol_type = other DNA
agccacagtggtatcctaactaccgtctttttgctaggacttaaactgacttgagtgtggcaaaaagttaacaaaaaaggagaaaaaatgaacaatcgtttgtggtttcttgggaaaact

SEQ ID NO: 25358 - DNA, 120 bp, synthetic construct
  source 1..120: mol_type = other DNA
cctgacgttcagagagcttatgtgaatttgcctaaggtgtgcagttagtaagcaaaggaaccagtattagaaacttgcgtttttatttctggtaaaatgctctgggtaagtaccggagct

SEQ ID NO: 25359 - DNA, 120 bp, synthetic construct
  source 1..120: mol_type = other DNA
gacagctgtcttcataatactaaaggctagctcagctgaggcctgcaaagaatactaagaataataaaagacattttcagatgttaggtttggagaaaaaacaaagaaggcagcaggtta

SEQ ID NO: 25360 - DNA, 120 bp, synthetic construct
  source 1..120: mol_type = other DNA
ttagcataaactcaggttggtggatgggggcaatagtgaataacaaaagactcacctatcaggaaatttccagggttttaggatctctgtgcctggaacctaggacaaagaccaaatata

SEQ ID NO: 25361 - DNA, 120 bp, synthetic construct
  source 1..120: mol_type = other DNA
tcctttgttacattttgattaagagacagggtaccatagtgattaaaacacagactctgcagccacgttgcctcagttccacttctggctctgtcacttgttagtgtgaaatatcagaag

SEQ ID NO: 25362 - DNA, 120 bp, synthetic construct
  source 1..120: mol_type = other DNA
gtatagggacaatcttgttcttggcaaacatagcagtagtatgctaaggtagctatgactaaataataatcccctgttgatagtaaggatatttgatttttttgaaataaccattgtttc

SEQ ID NO: 25363 - DNA, 120 bp, synthetic construct
  source 1..120: mol_type = other DNA
aggaattgccagacaattggataagtgcaatattagagctgtgtagtgaacacacagggattatggtcagttcggcttaggtgtcagtatagacatcaaataaagtattgctagaggttt

SEQ ID NO: 25364 - DNA, 120 bp, synthetic construct
  source 1..120: mol_type = other DNA
tcttgatatccaagtgaaataactaatattactaagatagggaatgtgtccttttaagttattgtagcaatccagttaagtgggggcctttgtgttattaaacatgatcaagtaacatga

SEQ ID NO: 25365 - DNA, 120 bp, synthetic construct
  source 1..120: mol_type = other DNA
tgaatgatattaatcagcctccctgtaattgtagctttccagataagctcagttgattggaaagtggtattgatgaggccaaggccctggtctggagaccagtttcattcaggaaaaaaa

SEQ ID NO: 25366 - DNA, 120 bp, synthetic construct
  source 1..120: mol_type = other DNA
ttttaaactagatcactttgctgaacccttatgacatttgaggagggaatgagcgctcatcaaatctcaaagtgactttggaggtcagttagtggttttgttacctccagactcccaaag

SEQ ID NO: 25367 - DNA, 120 bp, synthetic construct
  source 1..120: mol_type = other DNA
gcacaggtaggtcaggatggtgactgtggctgggaggacttcagtggaaatgaagagtagccaactgctttaagatctattttgagtttgaaatgatagaatttgctggtaaattggatg

SEQ ID NO: 25368 - DNA, 120 bp, synthetic construct
  source 1..120: mol_type = other DNA
tctagtaaataatgatactgcttcaacactttctttctcaccacattaaataacttgctgtgtcaaagggaggaagcaggcagatggcagtgcaagaatcagttcgtcagaatcgccact

SEQ ID NO: 25369 - DNA, 120 bp, synthetic construct
  source 1..120: mol_type = other DNA
gtcctggtctaaccctcattgcttcaaaaatgggatgaacaaaagcatcctaattgatttattttcccgcttacccctagtagattgcaagtccttgaggaagagactggttcttgtttg

SEQ ID NO: 25370 - DNA, 120 bp, synthetic construct
  source 1..120: mol_type = other DNA
tatacaataccaccagaatcatcaccctacttgagtatttctgtacaataccaccagaatcatcaccctacttgagtatttctgtacaataccaccagaatcatcaccctacttgagtat

SEQ ID NO: 25371 - DNA, 120 bp, synthetic construct
  source 1..120: mol_type = other DNA
actttacccagctggttcatcctccacaatgttgctacggtggtatttttaaacaccaatctgacccttgtccacaagatacagtctatgcttcttggcacaatgtgcaagttctttttt

SEQ ID NO: 25372 - DNA, 120 bp, synthetic construct
  source 1..120: mol_type = other DNA
ctccttcgcctttcctccctcttttctttcctcctttctttcgccttcccctgtacacctcttgaattcaccatcataaagttgacctgagatgtttcaatgagtaatgttttatgattg

SEQ ID NO: 25373 - DNA, 120 bp, synthetic construct
  source 1..120: mol_type = other DNA
gcttcttctcgcctgtcctatttatccagctcatctatgaattatcagcagaaaaggaaagtaaaggaggagtagaggctgggaataaaatcctgggctttagaaatggggtagtttaag

SEQ ID NO: 25374 - DNA, 120 bp, synthetic construct
  source 1..120: mol_type = other DNA
actgacataattgactattaccctgcccgctccttttcccttgcaacaggtagattcagtaatgtgaacatctgctccctctttccccttgtattgaaacctcaatacaagtattgaaac

SEQ ID NO: 25375 - DNA, 120 bp, synthetic construct
  source 1..120: mol_type = other DNA
agcattccccacatttccttttattttaattattcacagtaaaatcacaaaatgtttttcaaaaaagggaggaggtatgcacagaaaaaaaggaaccccctccccctccccctccccctc

SEQ ID NO: 25376 - DNA, 120 bp, synthetic construct
  source 1..120: mol_type = other DNA
cctgttaaaaaaaatacctcccaagtataattaacatttatgttttcttgctggaactctggggcatttttttctctttttctactttttgcagtttctaaaatgtcctgatcataatcg

SEQ ID NO: 25377 - DNA, 120 bp, synthetic construct
  source 1..120: mol_type = other DNA
gagacccccctcaaacttcaccaggcattaaggttttgtttttgcttttttttcagagaggtatcatttcgtttgaaatccacctagatgtggcttttcctgttttgattttacttaaca

SEQ ID NO: 25378 - DNA, 120 bp, synthetic construct
  source 1..120: mol_type = other DNA
aggtgtgagccactgcacctggcctaacattgatatctgttgatgagaagaagccaggtgttggagtgatagcttatagcacatgaactgaataaaacagtgtttaagacaatgtttgca

SEQ ID NO: 25379 - DNA, 120 bp, synthetic construct
  source 1..120: mol_type = other DNA
ctttatttccctagaatgttgttaattggcaccaggttggagctcaggtcgtattctttattccttgcagagtctgacagggtcagaacatgataacacatttgagaagtgagaagaagg

SEQ ID NO: 25380 - DNA, 120 bp, synthetic construct
  source 1..120: mol_type = other DNA
cttccccaccaccaaatattagaccagccggtttgataatttaaaaaagcaggcaagaagccagtcccaaaaactccaagacatactcagtagtttataccagtatccagtttggcacca

SEQ ID NO: 25381 - DNA, 120 bp, synthetic construct
  source 1..120: mol_type = other DNA
ctgtcaatgtggaaagccaaagagaagtcattgaaaaaatgttagcaccaataaaagactacaataaagtggccgtcacaaaataaattattatcattactattttcttaaacactttct

SEQ ID NO: 25382 - DNA, 120 bp, synthetic construct
  source 1..120: mol_type = other DNA
gtcacatggccacaactggttacaaaggaggctcagaaatacagtcttaccctaggtagccatgtctccagctaaaagtcatttactgtggtagatataaagaatggatcttgggttata

SEQ ID NO: 25383 - DNA, 120 bp, synthetic construct
  source 1..120: mol_type = other DNA
agaaaagtaaccttaggaaatagagatatacactgaatgtcttgttgaaatggagctgagagctggtcaggaactgaagaggggtcctgagctctatctagaggtcaacactaaagtttg

SEQ ID NO: 25384 - DNA, 120 bp, synthetic construct
  source 1..120: mol_type = other DNA
atcatgtcgccaactcagcctcctcaagcaactaatctcaacataccggttacctcaccgatgccaacgtcacagcaaataattacttaagagggatatgatggtctttaacataaatga

SEQ ID NO: 25385 - DNA, 120 bp, synthetic construct
  source 1..120: mol_type = other DNA
agcagcaagtaccattgcataatagcttttatattttttaggtctggtaatttacagaaaggactgcacacttttttcaacctgcatgttggaccttgcaggggtgtcaagccccctgtt

SEQ ID NO: 25386 - DNA, 120 bp, synthetic construct
  source 1..120: mol_type = other DNA
gcccctaatactgatatcctttgtgttgagcatatctgaggcagcaagatgagaggggaagtggaactggtagttgcacatggcttcctttcaagggttgtctttaataaattgaagaat

SEQ ID NO: 25387 - DNA, 120 bp, synthetic construct
  source 1..120: mol_type = other DNA
tgcagagagtgtacacaagatgattatgagaccttatgggccaaattggcaatgaagttacttctccctcctgataatatgcaaggcactgtgagtcattatggtaatagggggtgataa

SEQ ID NO: 25388 - DNA, 120 bp, synthetic construct
  source 1..120: mol_type = other DNA
ttaccatgctacacattagctcagcagaatgtattctttttaagcttgtaccctttgaccagcatttcatttcctcctctctattctggcccctggcaactaccattctattatgtttct

SEQ ID NO: 25389 - DNA, 120 bp, synthetic construct
  source 1..120: mol_type = other DNA
atactcaccaaaaccactaatttgatttgtctggtcctttataagtcgcagaacgagagtatacaggcaaattcaggcagcttccttgggattcctctgttcaatttttgcagtgccctt

SEQ ID NO: 25390 - DNA, 120 bp, synthetic construct
  source 1..120: mol_type = other DNA
gcctcccagtgagccacagcactcgaccccttatttcttcttgtgaaactgaaatggcatctgaaccttagttaggtttactaacgtcctcatccaatttagaatcaatgcaaacaattt

SEQ ID NO: 25391 - DNA, 120 bp, synthetic construct
  source 1..120: mol_type = other DNA
agccttcctaaagagacacctcaaaaagggcaacactcttttgcatgattttcttagtacttaatgagccttgtacatccttgctcgtaggaggcagttaattactcagttcagccagat

SEQ ID NO: 25392 - DNA, 120 bp, synthetic construct
  source 1..120: mol_type = other DNA
aatatactataggagaaatgcctatgtttagtgattgaattgtggagaagaatagtagcacattgctgagaaaatacatgtacaaagatgccacagtattttactcgagtcttctttgtt

SEQ ID NO: 25393 - DNA, 120 bp, synthetic construct
  source 1..120: mol_type = other DNA
cccacccacaatccaaagatgcataatgaaatggttaacaatttccttcctacatcttgccacttctagtcctaaaatatcccattaaagggatgaagtagggttctggaggtcccttga

SEQ ID NO: 25394 - DNA, 120 bp, synthetic construct
  source 1..120: mol_type = other DNA
ggttcctgaggtctttgtagggcagagccatcatattagtggactgctactgccaggcttctatgtgaaagggaagtacatttttattgtaataagtcacagttattttggggtcttgta

SEQ ID NO: 25395 - DNA, 120 bp, synthetic construct
  source 1..120: mol_type = other DNA
agagggttaacaaaatggcaaaaccaattagctgccacacacctgtggaatagcttggtttttctttcccagcaatgaaaaagtgatatgcagagctctgagtttttcaaagatgcaggg

SEQ ID NO: 25396 - DNA, 120 bp, synthetic construct
  source 1..120: mol_type = other DNA
acctggggccactgagggaactgtatctttgaaaaaaaccctaactagattcaaagttctcactttgcagtagcaagatacaacctttcttttagaatcagggccaaggcactctttaac

SEQ ID NO: 25397 - DNA, 120 bp, synthetic construct
  source 1..120: mol_type = other DNA
tttctaggctccccaaagtgcagtctacgatccaaagataattgcatcatgatttagtcataaaacacacaccactgtgatgactatgtatttaacacacagcaagtcaacagacaacta

SEQ ID NO: 25398 - DNA, 120 bp, synthetic construct
  source 1..120: mol_type = other DNA
tgttttcctaaggcctgaaattaatctgctgattagacccaaggagaatacattcagtattgggggcggggggggtttctgtctaagcaaactctacaagctattaataagatgcagatt

SEQ ID NO: 25399 - DNA, 120 bp, synthetic construct
  source 1..120: mol_type = other DNA
agtaaataactgccacatatgtagcaggtggtgaagctattttgttttaaacctctctgaacctcagttctctcctctcaaaaaataaaaatattctccctctccctatccctccccctc

SEQ ID NO: 25400 - DNA, 120 bp, synthetic construct
  source 1..120: mol_type = other DNA
agtacagaatcaggtgggatctggcaggggtcatcaagtaaaagtctcagaaagataaaatgtgttgaaggtgtgaagaggaccatcttgattttgacttatatccttgaagatcccctc

SEQ ID NO: 25401 - DNA, 120 bp, synthetic construct
  source 1..120: mol_type = other DNA
gtaccaaatgaacatccacatgtacttcttccactggcaataagaaaagcaaaattccagggagaaaattttgctgtctctggaaaatgatgtgacccaaattggaagtctgagtactga

SEQ ID NO: 25402 - DNA, 120 bp, synthetic construct
  source 1..120: mol_type = other DNA
aatactttaacttgtagatgattactgctatgctggtctccctagctaaactgagtcactcagggtcaggaacagagtcttatttaataatcatagctctgttttctagcacagggcccg

SEQ ID NO: 25403 - DNA, 120 bp, synthetic construct
  source 1..120: mol_type = other DNA
tccataggatcatgatttttaatttgttgcctctgaagatttcactccatcaagatctgccaatcttcaatattctggctaaatcttggtatgtggtttttaaacagtcactccgtttca

SEQ ID NO: 25404 - DNA, 120 bp, synthetic construct
  source 1..120: mol_type = other DNA
tctgccattaaaacctgcatatctatgtgtgcaccatctcctccatcttttttcctgatatgatggaagaaacattttcctcttatcagaggccttccttacacatgcctgtgaacctcc

SEQ ID NO: 25405 - DNA, 120 bp, synthetic construct
  source 1..120: mol_type = other DNA
cctcaccagaacccaatcatgcaggtactctgatctcagatgtttagcctttggaaatgtgagaaaaataaatttccatcattaaagccacctagtctatggtgttttgttagggcagcc

SEQ ID NO: 25406 - DNA, 120 bp, synthetic construct
  source 1..120: mol_type = other DNA
cagagcagatatttgacctccctgtgtctagatatttatatctttcttcatatttggaaagtgttctgctattattgctttaaagaggctttccacccctttgtctttctttctccttct

SEQ ID NO: 25407 - DNA, 120 bp, synthetic construct
  source 1..120: mol_type = other DNA
agaccaaacagttgggtttgaaaaaggctttggataattctgttgcaaaaaatataggtgatgtattccatataatgagaaactgctgaaagcacaaatgggtcgttggcaaccatgcta

SEQ ID NO: 25408 - DNA, 120 bp, synthetic construct
  source 1..120: mol_type = other DNA
tcagctttgcaatctgattgcaacaagagaatgtactgttatatgcaataactagaaaaataaacttatggtatgttttttaaatgcttattcaaactaatcctacaccagtaggattat

SEQ ID NO: 25409 - DNA, 120 bp, synthetic construct
  source 1..120: mol_type = other DNA
gttgacaaagacatcctctcctctagaccatatttgtattgacacagtcaagctattaattctgagatcctctcttttccatacttcattttatgactaactcttttttgatgggtacat

SEQ ID NO: 25410 - DNA, 120 bp, synthetic construct
  source 1..120: mol_type = other DNA
aaggagctagaagttgaatccctgtgtgtctgacttcaaagcccagagttctaaactgtaaccattgtaatacagcaatcttattgggagctttaagtacttctggcttttcgcccttac

SEQ ID NO: 25411 - DNA, 120 bp, synthetic construct
  source 1..120: mol_type = other DNA
ctaaggagccacgaattatgcctctgcaatggagaaaattgggagaggcttcacagagaaggccacctaactatatggctttaaaagacgacaatggaaagaggaaacattaattatgag

SEQ ID NO: 25412 - DNA, 120 bp, synthetic construct
  source 1..120: mol_type = other DNA
ttctgcccaatatccaccaggttagcaccacacttcattgggtcactgctcaaatgccacatcatcagaggtatctattgagactccacaatataaaatagcaaatatcataccactcac

SEQ ID NO: 25413 - DNA, 120 bp, synthetic construct
  source 1..120: mol_type = other DNA
aatcagttggcaggtagcgtgattcctccagctttgttcttgtttaggatttacttggctattcaggctcttttttggttctacatgaatttaacctgtattcccagctatccatgctca

SEQ ID NO: 25414 - DNA, 120 bp, synthetic construct
  source 1..120: mol_type = other DNA
ctcctttccgattgattggcccagcaggtcatattgatttaacctagagccatcaggagcaacctgtactgaatcagatgcattgtaagtccaaatataagtgacctctgaagttgtata

SEQ ID NO: 25415 - DNA, 120 bp, synthetic construct
  source 1..120: mol_type = other DNA
caaccatcaccctgatgatcgagcagccaacaacattcagtcaagaccctccacctgcagaaagactgtaatttgctgaaggctcagatgattgttggcattttttagcaataaagtata

SEQ ID NO: 25416 - DNA, 120 bp, synthetic construct
  source 1..120: mol_type = other DNA
tggtagcactcaactgccaaagacaaggtgggcatgattactatgatggagagcagagtcaaaacagcaataataataatctgactcacacagacttatggtgttggctaaatgactacg

SEQ ID NO: 25417 - DNA, 120 bp, synthetic construct
  source 1..120: mol_type = other DNA
ttaatgaaattttagcttaggtctgtcccactgtgggctcagtaagtccttaatccatcctatagttatttctcaagttctggaatgtacaattggaacggatatgctcagcagcaggcc

SEQ ID NO: 25418 - DNA, 120 bp, synthetic construct
  source 1..120: mol_type = other DNA
tactttgtctaaggtcaccagtgattcagtgccaaattctgccagtctgatgtcatcccttctctggctcaaaatgcaacactgtttctgtgatatagagtgaataagaaaagtcagagc

SEQ ID NO: 25419 - DNA, 120 bp, synthetic construct
  source 1..120: mol_type = other DNA
tatctgagccaaggacatgagtactttctttggtggtgatatatacatcacattttgtggctcatttctctagtattctcaaccctagcttttaccaaacctcatgaagaagctaaaatg

SEQ ID NO: 25420 - DNA, 120 bp, synthetic construct
  source 1..120: mol_type = other DNA
ccgggaagaagagaaaaacaacagtctcatggaaagtgcagagaccaagtgatgcatgtttgactccaggacttcactgtgaaggcttcctaaatatcaaaccactaaatcatttctaaa

SEQ ID NO: 25421 - DNA, 120 bp, synthetic construct
  source 1..120: mol_type = other DNA
aagttcaatatcagtcctaggctttaagagggacattgtaaaaattatcttcaagctgacatatcacaaaacgtaattactattgacataaagtttgtcagaataatgatccagtttatt

SEQ ID NO: 25422 - DNA, 120 bp, synthetic construct
  source 1..120: mol_type = other DNA
aagcaaacttacactgggctctgcagccatttattcaatcaacaaatactgtgtcctaccacaaggctaccagattagacacgattagggtgaaaaagaatcacatctataggtctctgc

SEQ ID NO: 25423 - DNA, 120 bp, synthetic construct
  source 1..120: mol_type = other DNA
cacatttgggtttgcttatttgagatactttgtttatttcttcatagtagtgagggtttggtgagaagagagtataggatgttcagagatctttcccagcatgtttctagatccattttc

SEQ ID NO: 25424 - DNA, 120 bp, synthetic construct
  source 1..120: mol_type = other DNA
aagaagcaaatgtgaatcttatgactttcagtagagagtttgtgcctagggaatcaagttttcttagcgatcctgcatgcttttgaagtggtaaggaacgatacgcctactgtgaccatt

SEQ ID NO: 25425 - DNA, 120 bp, synthetic construct
  source 1..120: mol_type = other DNA
gtcttacttattgaatgagcagggctttgtctaaaaagaaacaaagtgggaaaaataaaaatggcttcttggcaaaatgatgtgcaaaatagaacaagaaaagaggaaaattgttgtctg

SEQ ID NO: 25426 - DNA, 120 bp, synthetic construct
  source 1..120: mol_type = other DNA
gagattctgcagtgatgttcgtcagtttggggtaggttttcccttagttttattcttctgctctctttaggcatattgtggtggttaattttatgtatcaatttggctgggccacagcac

SEQ ID NO: 25427 - DNA, 120 bp, synthetic construct
  source 1..120: mol_type = other DNA
gggttcctcaccccaatatctgtttcacaatgaaatttctctagaaattcatgctgatgacaggtgttttggaaagtcttaaaaaaaagtccatgaaatcaattgtgatggcaccatcca

SEQ ID NO: 25428 - DNA, 120 bp, synthetic construct
  source 1..120: mol_type = other DNA
aagcctaggagactgttctgagtggcattgttgaatatccatctaggaaattcatgtgtagcagactaaaggaggcctgttctttagataagaaagccacagataagaatgccttacaat

SEQ ID NO: 25429 - DNA, 120 bp, synthetic construct
  source 1..120: mol_type = other DNA
aagacatcaattttattacctctggtataaaagacatggagctcagaaagtagttgaatgaagagatcctgactatggaaggaagagtctgtctgtgggtataggggtcacggtgtggtt

SEQ ID NO: 25430 - DNA, 120 bp, synthetic construct
  source 1..120: mol_type = other DNA
aatgggaagggcctcagagctgacaacatttagagaccattgcattgaatctggagaaagaaaggatcagggccctcaaattttaaagtggcaaagtttatgctgatacctgtatctgtg

SEQ ID NO: 25431 - DNA, 120 bp, synthetic construct
  source 1..120: mol_type = other DNA
aaacatcttagcaaagcttagtgtaataagtattttctttctaatccttcctgaacttttatcatccagtttagcaaagtattaactaggacaactacatatgcatgcaaccaaaccttt

SEQ ID NO: 25432 - DNA, 120 bp, synthetic construct
  source 1..120: mol_type = other DNA
agcagggctccttggagaaattctaggacacaggcagaaaatatacaagataagcctggagcatcttggagtatcagaaacaaagaaagtagagaaggtagagaaagacaagggctcaaa

SEQ ID NO: 25433 - DNA, 120 bp, synthetic construct
  source 1..120: mol_type = other DNA
ggtatttgacaacactgaagagaagactgtgaacagcccaacagcacaagctttgaagggcaagacttttcacctacagccagagtaataatgtggaagcttccatgtgtaataaatagt

SEQ ID NO: 25434 - DNA, 120 bp, synthetic construct
  source 1..120: mol_type = other DNA
attggggtccctgctccgtgagtctttaggcaacagttgttaggaatgttaacattcttacagaatgttataaaagggattatgccaccaggtaaaaagattatggtaaattacctcaaa

SEQ ID NO: 25435 - DNA, 120 bp, synthetic construct
  source 1..120: mol_type = other DNA
aattacatggaaaaatagatgaatccactattagagttgtagacttcaacattcctctatcagaagcaaacagatcagaatcagaagcagtaaggacatagctgaactcaacaacaccat

SEQ ID NO: 25436 - DNA, 120 bp, synthetic construct
  source 1..120: mol_type = other DNA
acaacatcaaaactgtgggatgcaacaaatgaaatgcttagggggaattttgctgccttaaatacatacatagaaaatgagaaaaatctaaaatcagtaatctaagcttctaccttagga

SEQ ID NO: 25437 - DNA, 120 bp, synthetic construct
  source 1..120: mol_type = other DNA
tgttactatgaactggtccatttctttcttttaggctatccaattttttggcatattattgctcatagtagtcacttatgattatttgtgtttctgtggtatcagttgtaacatctccac

SEQ ID NO: 25438 - DNA, 120 bp, synthetic construct
  source 1..120: mol_type = other DNA
actcacccaccctagcctgaacatttccaagtgcctctagcctgccttcaccaggtatggatgaccaacatacacatttctccaggaaaaaaaaaaattatggaaacctaaacctcaatt

SEQ ID NO: 25439 - DNA, 120 bp, synthetic construct
  source 1..120: mol_type = other DNA
agctactgctgctgaaggctgctattgtattcaaatgaagtaatacctacctggcaggtgaaatgttactttgataaagggaattgttaggggaggcatttcccttgtcttccagagtga

SEQ ID NO: 25440 - DNA, 120 bp, synthetic construct
  source 1..120: mol_type = other DNA
ccaggtatgaagagtgggacatggtattcagcatgtgttagtgaaaacacagaaacagccagcattcttctgagtacagttttaggacctttctgctgcagtgaagtcattttggttatt

SEQ ID NO: 25441 - DNA, 120 bp, synthetic construct
  source 1..120: mol_type = other DNA
gtttatctcttcaaaatgactgcttcaagaaaactgaagaaacgaagacagtggcaaggggctggcatacagggtgaaataaaaatgccactccactcataccaggcaaaagttggcaat

SEQ ID NO: 25442 - DNA, 120 bp, synthetic construct
  source 1..120: mol_type = other DNA
gagttacagaatataatacatgaaatggttaccacaggtgaggttgtggcaggtttagaatatcatgtttaaagacatgggctacagatccacaatacctgggctcaattccaggctcta

SEQ ID NO: 25443 - DNA, 120 bp, synthetic construct
  source 1..120: mol_type = other DNA
tgggagtggtgtggtgaaacaaaagtgataagggtttctggcaagattgatacatttctgacaacattagaccaagttagagacatgagcagctatagtcatccttcttctacgactctt

SEQ ID NO: 25444 - DNA, 120 bp, synthetic construct
  source 1..120: mol_type = other DNA
aaattagatgaaaatgcctcactaactataaagaactatacatacatcaaaccaatatgtacactgtattgtatgcttcttataggtcaggcatattccaagtgaagtgaaagcacaaat

SEQ ID NO: 25445 - DNA, 120 bp, synthetic construct
  source 1..120: mol_type = other DNA
atctgtacaacaaactcccatgacacgagtttctctatgtaacaaacctacacatgcgcccctgaacctaaaagtgtaacacacacacacacacacgaagccaaatatcacctttaatac

SEQ ID NO: 25446 - DNA, 120 bp, synthetic construct
  source 1..120: mol_type = other DNA
atctcaaaatgccttctttattcaagtgatcaaagctaacatcactataagtggacgaatttaaattatgttccacctgatgggatgcaataaacaggcagggcgcgatggctcacacct

SEQ ID NO: 25447 - DNA, 120 bp, synthetic construct
  source 1..120: mol_type = other DNA
tagttgtagcatcttattattcatgcctacagtaatgcaatatctttttccctcctctctcaaaggatattaatgataggctgttttgtttctgttagatttttcttttcctgcatagtc

SEQ ID NO: 25448 - DNA, 120 bp, synthetic construct
  source 1..120: mol_type = other DNA
aaactcttggaaagcattttctgtatcctgctgattgtggaagtgttttccctgcaaaaagttcttaagatgcttgaaaaagtggtagttgggaggcaggagatcagatgaatatggcgg

SEQ ID NO: 25449 - DNA, 120 bp, synthetic construct
  source 1..120: mol_type = other DNA
taagttaaaatgaagaaaataagtcaaccaacatgaagcggtcagtgagattcttacggacatcccagctttgcctcttatccgcctgacatagtcatggaactagaaagacaagcacaa

SEQ ID NO: 25450 - DNA, 120 bp, synthetic construct
  source 1..120: mol_type = other DNA
tctttaaatgctatagatttgggattttaactaacagctttggctatagaaatgaagaacagacactgctgaatcttcatttgaatgctcaagtttcatggggcagggtggggggcggga

SEQ ID NO: 25451 - DNA, 120 bp, synthetic construct
  source 1..120: mol_type = other DNA
gttttagttgagcaaaaactgccctccaagactttttccctcttccaatactgaatccaatccagggtcatgtactgcatttagctgtcatgtctacccagacttctttaagctgaaaca

SEQ ID NO: 25452 - DNA, 120 bp, synthetic construct
  source 1..120: mol_type = other DNA
ccaaacgtgcccgagtggtgacaggaataaagtgggtcacaaggcctagcgggtccccagcgaaagctctctcggcacccggtccccgtctttccccgcctcccagctgctggaatcggc

SEQ ID NO: 25453 - DNA, 120 bp, synthetic construct
  source 1..120: mol_type = other DNA
cgcatgcgacttgccccgttaggcagcacggagccgcgccaggggatcccggacgcccgaagagactcccgcgccccttgggccgaaatctggctctgcaggcgcaccgttccctgcccc

SEQ ID NO: 25454 - DNA, 120 bp, synthetic construct
  source 1..120: mol_type = other DNA
aaaagaactgatattaggcctgagtcaccttgcccagctgcatcttaacttctttaaatatatttttttctgtaaaagaatgtatactttttttttgcaagtctgagttttttccagcat

SEQ ID NO: 25455 - DNA, 120 bp, synthetic construct
  source 1..120: mol_type = other DNA
attttattttttgttttacaattgtgtcacagctatggaggctagaaatccaaaaccaaagtgttggcagggttggctccttctgagggctgtgagggagaatcttcttcttgcctctgt

SEQ ID NO: 25456 - DNA, 120 bp, synthetic construct
  source 1..120: mol_type = other DNA
gaaaaatgcgcatttgagggacctggtgccgctcatacctggaagactctgtgttttaaacttttagtaattaatctgctcacttttggtgagctagaactagaactcagccagctaagt

SEQ ID NO: 25457 - DNA, 120 bp, synthetic construct
  source 1..120: mol_type = other DNA
aagaaaaaaaaaaagaaaagaaatgtgactacactccaagcctgcccattttgcacatggtagtgcttgtttcttgaatagccccatcccccatctccacctccttcctttgtctaattc

SEQ ID NO: 25458 - DNA, 120 bp, synthetic construct
  source 1..120: mol_type = other DNA
acagcctgtcagcttctatacctctcctccttactcaaaccaagtcaaatgtgatctgctgatgacattcccaataactattgtgagataaataaaatcaccatgaaactatatgcaata

SEQ ID NO: 25459 - DNA, 120 bp, synthetic construct
  source 1..120: mol_type = other DNA
cttcgtttatttccataaccctaaccctaatcctttaatacaggtcctgcttgctccatttcacaggtgagacaacagagggacaaagagattaagcaatgtgccaatgatcactgttag

SEQ ID NO: 25460 - DNA, 120 bp, synthetic construct
  source 1..120: mol_type = other DNA
tgtagcacagttagctagccccactttaggtttactgtggctctttctttgtttattagattgattatagaatgaaaatgattgtaaacaatgttcttttgaaatctaaatatataaaag

SEQ ID NO: 25461 - DNA, 120 bp, synthetic construct
  source 1..120: mol_type = other DNA
ggtccttgcagaaccctgtgaagattatagacattattattctatgtaatgaaggagtaaactgcataatagagaaagtcaattgcattgtgtcctcatatacatagtgttggagctgac

SEQ ID NO: 25462 - DNA, 120 bp, synthetic construct
  source 1..120: mol_type = other DNA
ttgataaaactgtacctgcgttgcagtttggggttttaaagtgtgagtattgttttgacacacacacttaggcttgacatcatgtattattttatttggtcctggcagaaccctgtgaag

SEQ ID NO: 25463 - DNA, 120 bp, synthetic construct
  source 1..120: mol_type = other DNA
gcttggatgggctcttttgttttgttcttttgacaaaagtactttgtctataataagtttattgtcctttgtgaattaaccagaatttgagagaacaaggttctgcttaatattcttcta

SEQ ID NO: 25464 - DNA, 120 bp, synthetic construct
  source 1..120: mol_type = other DNA
cttcctacccatgagcatggaatgttcttccatttgtttgtatcgaagaggcaattttaaactcatattattctcctttactaaatccagctcaacattaaaataatgcattattgtgca

SEQ ID NO: 25465 - DNA, 120 bp, synthetic construct
  source 1..120: mol_type = other DNA
cctgcaaatttaggaagaatgcacaaaacaaaattaaggaataggaagtattagttggggaatggaatgctaaataggaagtgtcatggcatgagagaatgtcctggccgggcgcggtgg

SEQ ID NO: 25466 - DNA, 120 bp, synthetic construct
  source 1..120: mol_type = other DNA
catcactttaattttctgccctttaggtccttgatctactcaaatctgaagattctctgctctgcaactctttccccgcgtcttatactaagaaatgcactacccccaaactagagattt

SEQ ID NO: 25467 - DNA, 120 bp, synthetic construct
  source 1..120: mol_type = other DNA
ctgatatagaagaactgtatggttgcaggtaatcttttccactttgactacacattgtaacatcttcttccactgtaataagactaacccaacactgatgggtgcctcaacagcaaaaaa

SEQ ID NO: 25468 - DNA, 120 bp, synthetic construct
  source 1..120: mol_type = other DNA
tccaattaattgaaagcctcacttgataaagactgatctcctttgaagaagaagaaaatttgccagcggactgccttttaactcgaacagcaatttttccctgagtctccagtctgcccg

SEQ ID NO: 25469 - DNA, 120 bp, synthetic construct
  source 1..120: mol_type = other DNA
tcattaagccttaaaaaaaagccttaccctggcccactacttcccaaattactagagaagaggtaaatccaaaagactacagtatgtacgtttggaacaggtagaacagggctgagtcag

SEQ ID NO: 25470 - DNA, 120 bp, synthetic construct
  source 1..120: mol_type = other DNA
cagtatggtaggcaaataagtgcatgaaaagatgttgaacgtaattagctaacagtgattttcaaaataatgagatatcactacccacttattcaaaatgactgacaaataagtaaataa

SEQ ID NO: 25471 - DNA, 120 bp, synthetic construct
  source 1..120: mol_type = other DNA
tgtgctaaatgcctcatgaattctgttagattggggagaatgcatagatgacctgatatatcaactgtattatttttattttaagggagtcacatttttgacatttgttttacatttact

SEQ ID NO: 25472 - DNA, 120 bp, synthetic construct
  source 1..120: mol_type = other DNA
gggccactcaatgacaggggctggagggtcacagttaaatattatttgcattagaaagtgaccctgaaaggctgcagtctagataaagccagaaggcaatcttatatagaattctgttca

SEQ ID NO: 25473 - DNA, 120 bp, synthetic construct
  source 1..120: mol_type = other DNA
tttacatgaatatccatataacacttagccttggatgacagacaattaccttcactctagagcatagagcaagtttctgtctgcctcagtataacaaaggtaaagctagaaactctcatg

SEQ ID NO: 25474 - DNA, 120 bp, synthetic construct
  source 1..120: mol_type = other DNA
acagaaaaagggaaatatgagattacggagcagcgcaagattgatcagaaagctgtggactcacaaattttatcaaaaatcaaagctattcctcagctccagggctagttgcgatctgtg

SEQ ID NO: 25475 - DNA, 120 bp, synthetic construct
  source 1..120: mol_type = other DNA
gaaggaaggaaggaaaataaatgcagaaaattgatcaagggtatgcatgacatttgccaattttgttccaaacctttggtttctagaaacatgcccagtatggaactctgcatccatgtg

SEQ ID NO: 25476 - DNA, 120 bp, synthetic construct
  source 1..120: mol_type = other DNA
acatagtgttatgaaaatcaccataggaggatttaatttagaatttgggggaaaagaaagtctgttttgataaagaaatttaggtccctctccctctcctgctcccgctccccacggtct

SEQ ID NO: 25477 - DNA, 120 bp, synthetic construct
  source 1..120: mol_type = other DNA
cagcaatcccactactggatatttatccaaaggaaaagaaatcaccatgtcaaagagatatttgtacttgggtgtttatcgcagcactgttcacaatagccaagatgtggaatcaaccta

SEQ ID NO: 25478 - DNA, 120 bp, synthetic construct
  source 1..120: mol_type = other DNA
aatcaacaatatggtaaagggaagaagatggtaacacattgttttatctgcaaattgtgttgccaagtgaaagtagaaatctgtggttatctgcagaaaggtgggacccaggaggcccca

SEQ ID NO: 25479 - DNA, 120 bp, synthetic construct
  source 1..120: mol_type = other DNA
tcgttaccactatcggccttacaagaggtccttaagagaatgctaaatgtcaaaatgaaggaacaataccagctaccacagaaacacatttatttatttatttatttttttatgttcttt

SEQ ID NO: 25480 - DNA, 120 bp, synthetic construct
  source 1..120: mol_type = other DNA
tggaaccattccccttgagaactggtacaaaacaaggatgccactctctccactcctattcaacatagtactagaagtcctacacagagtaatgaggcaagagaaaaaagtaaaaggcat

SEQ ID NO: 25481 - DNA, 120 bp, synthetic construct
  source 1..120: mol_type = other DNA
tgtgggaaaatataatccctacattcctggaagtggatccagccctatagaacaggaagacaagtgatgctatctcaatgcaaattttactctttaggttttcaagaaaccaaacttcaa

SEQ ID NO: 25482 - DNA, 120 bp, synthetic construct
  source 1..120: mol_type = other DNA
agccagaagttatttgcagatatttctcaagattaataacctgccagtgccacttcctaaacttgctcacttaccacaccaccagtgttgatcgcggcattaggggttttcaaattttag

SEQ ID NO: 25483 - DNA, 120 bp, synthetic construct
  source 1..120: mol_type = other DNA
gctttattttacctgtgatatcaagctttttaatcctttgatatttgacaaattttccaaaattatgtttttttctgacctaagtaatcctttaatttattagtttccctaaagtccaaa

SEQ ID NO: 25484 - DNA, 120 bp, synthetic construct
  source 1..120: mol_type = other DNA
agtttattttggaaccccaagaggagaggaattcacccaactcataggtatttgatggtacaaatctatggcttgcctcagctttaaaaaagtcctatctgagattctttctataagaca

SEQ ID NO: 25485 - DNA, 120 bp, synthetic construct
  source 1..120: mol_type = other DNA
ttgcttaactgatctttcacacttagatgatgcactacctagcattgacagccttgatatatggtcagctatagccagtcattaccatgtctagtaccaaactaaggtactgattttaga

SEQ ID NO: 25486 - DNA, 120 bp, synthetic construct
  source 1..120: mol_type = other DNA
aatcctgtaaaccaaaaggagcaaatgacagggcagaatttagtgatttctatgtacatgctacgataccatgataataccaaacttcactagcacctcttaaatatatttccttctgat

SEQ ID NO: 25487 - DNA, 120 bp, synthetic construct
  source 1..120: mol_type = other DNA
ctctcctgccactaagtgagaagatccaagcttgcttccccttagcctttcaccatgattctaagtttcttgaggcatcccagtcatgtagaactgagtctattaaacttcttttcttta

SEQ ID NO: 25488 - DNA, 120 bp, synthetic construct
  source 1..120: mol_type = other DNA
ataaaaacactatcttctgacattatatttatataagcccaccttcaaaggcacaggaaaattagaacttaataaacaccaattggacacacgacttacctagaacttcactataaaact

SEQ ID NO: 25489 - DNA, 120 bp, synthetic construct
  source 1..120: mol_type = other DNA
accagcacctttccacaactcccagagctaaagtaacaactgagctgcatcagcagaaagactgacatccatttcagagacatcctggtcttatgcagtgcttcttttccagttgttgtt

SEQ ID NO: 25490 - DNA, 120 bp, synthetic construct
  source 1..120: mol_type = other DNA
ggttcaaagattcttctggggcctgaaagcttgaagggatgagtaactcctcccttctcaggcccagtcccaagatgcaaggctgcttgcatcagcagcgtgtgtcagcaagatagcaga

SEQ ID NO: 25491 - DNA, 120 bp, synthetic construct
  source 1..120: mol_type = other DNA
aatgaagatttttgcctttttttgaaatccttgagttaccacattagtcaaatgaatgatttatcttacctgtgatattaagtgttttaaacctttgatatttgagaaattttccaaaca

SEQ ID NO: 25492 - DNA, 120 bp, synthetic construct
  source 1..120: mol_type = other DNA
cctttagggaatcaaacttaacttatggagccaataaaaccccttgggaaaactggcctcataccttcatctataaggtccctgtacagggttcctgaactgtgttaagcaaagaatgta

SEQ ID NO: 25493 - DNA, 120 bp, synthetic construct
  source 1..120: mol_type = other DNA
ttaaactgcacatatggtgagaaataatgctacatatgtagtatgtgtaatttcttttcatttgctaactatcaagtgctactttcaggaaaaatttcaagtggcagtgtttgacacaaa

SEQ ID NO: 25494 - DNA, 120 bp, synthetic construct
  source 1..120: mol_type = other DNA
gtgtatacagtaccttctaaaatcctgtaaaccaaaaggagcaaatgacagggcagaatttagtgatttctatgtacatgctacgataccatgataataccaaacttcactagcacctct

SEQ ID NO: 25495 - DNA, 120 bp, synthetic construct
  source 1..120: mol_type = other DNA
ttggcttcaattctaattttttttgtggttctactaaatctcttgtgtttatttggggtagttttattttattttatttttttctgttcagttcttttagttaggagtcattggagccat

SEQ ID NO: 25496 - DNA, 120 bp, synthetic construct
  source 1..120: mol_type = other DNA
tggcaagtccttgtttttgacctcccatattcccctcactctgagttaaacactctgaaagaaacatatccagccattccttctgaaaatgtcaagcaaacaaatgaaacaagaatacat

SEQ ID NO: 25497 - DNA, 120 bp, synthetic construct
  source 1..120: mol_type = other DNA
catcttaccttacccatgaaaacagctttccaggaagtactctagtgtctacagtttattaagctagtcccttgatccttggttctcaaagtaaaccatgagttttttgagctcaacact

SEQ ID NO: 25498 - DNA, 120 bp, synthetic construct
  source 1..120: mol_type = other DNA
atatgtatcatattttttatcctctccatgaaaatcatttgatcacttaattctgacataacaacaggtacataggaaggagggaacagaaatcctccaccattcttctcaaatgtgtag

SEQ ID NO: 25499 - DNA, 120 bp, synthetic construct
  source 1..120: mol_type = other DNA
agagcaaaagtagaaatttctacataataatcttagaaggagacccctccagcacctccagtgatgaaggagctacaattgggtaagatcatctctggggcccaggaaataatgaaatca

SEQ ID NO: 25500 - DNA, 120 bp, synthetic construct
  source 1..120: mol_type = other DNA
gttggcattctctggccttccagaaagtcaacaagcaaaatgccttcagcatccctaaaaactgttgccatgacctttgcttttgacccgtctgcttttgctttgattgcaccacttcca

SEQ ID NO: 25501 - DNA, 120 bp, synthetic construct
  source 1..120: mol_type = other DNA
catgtacctaaacatgtcagataatcctgtttaccttttttctagatgttttcaggggccctctgatccatccacaaagccaggcattagaaaagacaattttgggatggctgggtcaaa

SEQ ID NO: 25502 - DNA, 120 bp, synthetic construct
  source 1..120: mol_type = other DNA
tctgtgtgcatgagtgtggagggtttatcaactgtgggctttgctgaaggatgatatagctaggttatttccttgaagaactcctggtatgattatcttttcaggtccttatacatggtg

SEQ ID NO: 25503 - DNA, 120 bp, synthetic construct
  source 1..120: mol_type = other DNA
gtgctgggataataggcatgagccactgagcctggccccttgcagttcaaatttggattcatctgttttcttgcaaaaatgagagctgctgaacagtcaaagttggaaaaaggaaatatc

SEQ ID NO: 25504 - DNA, 120 bp, synthetic construct
  source 1..120: mol_type = other DNA
taccaaaatgtatggttgtatgtgtgagagagacgttgctaagattttcgtttctggagaaatgagaattgaaattgaaagcaaggccaggtgtggtggtttatgcatgtaatcctggaa

SEQ ID NO: 25505 - DNA, 120 bp, synthetic construct
  source 1..120: mol_type = other DNA
tcagggtaatataagtctcatagaatgagtttggaagtagtctttcctcctctatttttagaaatgttttgggtaggtaaaacagagatatagaccaatggaacagaacagagccctcag

SEQ ID NO: 25506 - DNA, 120 bp, synthetic construct
  source 1..120: mol_type = other DNA
agccatattcatgatggtgttcctctttaactgacagcacttgtagtagtcatagaggtttataggccttggtgaattctagaaagtacgggaagggtgtacattccattccattctccc

SEQ ID NO: 25507 - DNA, 120 bp, synthetic construct
  source 1..120: mol_type = other DNA
ctgtgatgggaaggggggttgtacgtgcttcattatacactcctccctttacaattcgggcacaactgaacagcattaacattaaaactgacaccttaagaatgacaaaacagactcttt

SEQ ID NO: 25508 - DNA, 120 bp, synthetic construct
  source 1..120: mol_type = other DNA
accttactgcatagatctgagtttttgtgatgtttatcattaaaaaaaaattttattgaggttgtgatgaaaggacccttcccttgacccctgcttgggactggtgaaggggcggctccc

SEQ ID NO: 25509 - DNA, 120 bp, synthetic construct
  source 1..120: mol_type = other DNA
taaaggatgatctacagagggtttctgaaactcatcttaaagttgccctgttagattcaggcatgaaggcagttttcaaggatagcaccaactcactctcagttacattgcctaatggtg

SEQ ID NO: 25510 - DNA, 120 bp, synthetic construct
  source 1..120: mol_type = other DNA
acgtgtgtatatatgcacacatggtgtgtgtgtatatacgtgtgtatatatgcacacatggtgtgtgtatatatacacacggtgtgtatatatacgtgtgcatagatatgcacacggtgt

SEQ ID NO: 25511 - DNA, 120 bp, synthetic construct
  source 1..120: mol_type = other DNA
taccataccggacagcactaatttagaacacttccatcatcacgtaaaatcctattggacagcagtttcctaaaagctgggagtagaaacatgaaacagaacatctgaatgatgccaggg

SEQ ID NO: 25512 - DNA, 120 bp, synthetic construct
  source 1..120: mol_type = other DNA
tgcaggtactggttagtcaagagggaacagcattctcattttgcaccttattccttaagtgggacagatatctattagaatatgaaagagtatttgggacccaccttacaatatgggcag

SEQ ID NO: 25513 - DNA, 120 bp, synthetic construct
  source 1..120: mol_type = other DNA
tttaaatgaactatcccattttactaaatgaatacagcaagcaacacttgtaaatatttactaggcaaagaagcagtgaggactgtagtatgagtcaagtgaagcctgattccaaaactg

SEQ ID NO: 25514 - DNA, 120 bp, synthetic construct
  source 1..120: mol_type = other DNA
attacatactaaccacacggccatgctttccacagccaatactggaacaatttatcattttttctttttttttaaggagacaggagattgctctgttgctcatagctcaccccagcctcc

SEQ ID NO: 25515 - DNA, 120 bp, synthetic construct
  source 1..120: mol_type = other DNA
ttcttacggaatttctcgtggagcagaaagtttgctctccatgttatgataccagttgcaagtgttgtttaggggcaaatttgaatgctaatagaaatacatatagcaacatgcatccta

SEQ ID NO: 25516 - DNA, 120 bp, synthetic construct
  source 1..120: mol_type = other DNA
taccctgatgcatgccagccatgggtagaatcattttaaagcattttgccaatctgagaagtgcaagataatattacggtgtggcttgagcttgcatttccttagctacttgcatttcac

SEQ ID NO: 25517 - DNA, 120 bp, synthetic construct
  source 1..120: mol_type = other DNA
catttcagtatcactttaagttttctctattctctctattatgctcctagcatcccacttacagcgccttcccaatgttctgcttctaacctttcacccctcaccacgaagttctgaata

SEQ ID NO: 25518 - DNA, 120 bp, synthetic construct
  source 1..120: mol_type = other DNA
tggaactcttgtttaaactagggctttgttctttcatagaactgggttccttccctcagaatacatgtcagtttgtttcaggcctttagatctatgtggatctcaaagtgtgatccccag

SEQ ID NO: 25519 - DNA, 120 bp, synthetic construct
  source 1..120: mol_type = other DNA
cttctttcacatatctcatgatgacgttattgacccttttgtgacaaaataacagatgtgatacccagtttctcataataatttcttttcatttcactgggtcatcaaacatggataatg

SEQ ID NO: 25520 - DNA, 120 bp, synthetic construct
  source 1..120: mol_type = other DNA
cgttaagggaatgcaaatttaaagcacagtgacataccaccatatgtccactaaaatgtcaacagttttaaaacctgaccatctgaagtgatgacaagtatatggagcaaccagaactca

SEQ ID NO: 25521 - DNA, 120 bp, synthetic construct
  source 1..120: mol_type = other DNA
gtgctggaagcagaaaactgcctaagacaacaaaatggcttagaatgagagactggggattattctgttcaaggatttccttagacccctctttttgtcaaagggtgttagagagacata

SEQ ID NO: 25522 - DNA, 120 bp, synthetic construct
  source 1..120: mol_type = other DNA
tggataattcagtaactaagctggaaaattcaacagatggcttcaacagcagactatgtcaagcgaaagacagaatcagcaaacttaaagacagataattggaaattatacaatcatagg

SEQ ID NO: 25523 - DNA, 120 bp, synthetic construct
  source 1..120: mol_type = other DNA
ttccacagttaactgcttaattctgatgcagtttctctgaaaactagacaagcaagcaaaatcctacagtactgtgtcttcaaggaggttcatgaaaggatgaaaaggaccctgacaaac

SEQ ID NO: 25524 - DNA, 120 bp, synthetic construct
  source 1..120: mol_type = other DNA
catccacattgtagcatgagatactggtccattaattttctttgctgtatggtattgcattgtacaatttcttcattctactattgataaatgtttgggtagtttttcacactggggtta

SEQ ID NO: 25525 - DNA, 120 bp, synthetic construct
  source 1..120: mol_type = other DNA
tatgtctatgtacctagctctgtccactaagagggccttggaacaatgactccccccaaatcagtggacacacctagagcccagatcttaatttctaaatatgattttctactaaaggaa

SEQ ID NO: 25526 - DNA, 120 bp, synthetic construct
  source 1..120: mol_type = other DNA
tgaggtaacatctaccacaacattatctgagaaagctgaagcaaaaggcaccaaactatttccaaatgcaaaaaattgcatgcaaacagactgtcccctgaaatggatgtagcacgcctg

SEQ ID NO: 25527 - DNA, 120 bp, synthetic construct
  source 1..120: mol_type = other DNA
ttagttcaccctgaatcgtatccagctgaactcgcaactgctcttcatcagcctgaatggcataaccactcttcctttgaatttcctgtttgattaggacctatacaaataaaaaccacc

SEQ ID NO: 25528 - DNA, 120 bp, synthetic construct
  source 1..120: mol_type = other DNA
gactctgtctcaaaaaacagacaaacaaaaactatggtatggcttaaaagcagtacaaaaaaatagacaacataataccagtttcagacatttactcacagcctttccaaataaagtgtt

SEQ ID NO: 25529 - DNA, 120 bp, synthetic construct
  source 1..120: mol_type = other DNA
ggttaaaatctcactattttattaaagcatcccaatcagaattaatcccataattgtctctatcataattaatcattctatgccactggcttacatttacatgttacaagaaagaggtta

SEQ ID NO: 25530 - DNA, 120 bp, synthetic construct
  source 1..120: mol_type = other DNA
taatacaccaagagagtcaaggtgcatgagggaaaggcttagtggagtggataaaagttgactagatagtaaggcttagccaagttacctaaacactctgcttctgtttcctcatctgta

SEQ ID NO: 25531 - DNA, 120 bp, synthetic construct
  source 1..120: mol_type = other DNA
atgaagccagaatgcaacattcaaggaaagttctgatttaaagaaaaagaggcagagcttgcaaagcatcacctgttgttctctcagtccattggcctggtcattagattatactctccg

SEQ ID NO: 25532 - DNA, 120 bp, synthetic construct
  source 1..120: mol_type = other DNA
ttcaatgaaagactgctaaaattctcagcagttgggaggaggattacctaatgtctcctaccttcatagaaatggtgaatgaaacggcccttatggggttccatttcccctggaagtatt

SEQ ID NO: 25533 - DNA, 120 bp, synthetic construct
  source 1..120: mol_type = other DNA
aatcatgaagattttgagttgaaaggaatcttgaagatcataatagtctaggcgcctcagttcctagatgagttatggattatgcacagggctatgggagcacagacagcccccatctct

SEQ ID NO: 25534 - DNA, 120 bp, synthetic construct
  source 1..120: mol_type = other DNA
tatctcaaaggtaatttcttctaaaaactcttgattctttaatcatgtcataaagcagctttctgttaactccccaactacgttataaattcctggccaggcgcagcggctccggcctgt

SEQ ID NO: 25535 - DNA, 120 bp, synthetic construct
  source 1..120: mol_type = other DNA
acatcaaaattcactgaactacaatgacattccaattataatagatgacaaacaacgcctctatcactaggcacttttaaaagggagttcaggctttacagaacccttctgatgcaatcc

SEQ ID NO: 25536 - DNA, 120 bp, synthetic construct
  source 1..120: mol_type = other DNA
gaaacaaagattaaaagcatatgatggccatttggcagctagagtcaggaaaatgacccaacgttttcaactactgccccaaatttgttctctctcccaaatcctttgcactgtcatctc

SEQ ID NO: 25537 - DNA, 120 bp, synthetic construct
  source 1..120: mol_type = other DNA
ctatggtcacatctgtgaatagccactgtattccagcctgggcaatatagcaaaaactatgtccccctgtcctaaaatcctcatagtccaggaaacaagatgagaaaaatgtaaacaatg

SEQ ID NO: 25538 - DNA, 120 bp, synthetic construct
  source 1..120: mol_type = other DNA
acaataaaccagatgagagagtcaccccaggccacccaaacctgaacttggtacttagaaaaattaatttcacttggtggcagtttttaaaatttagagtcctatcccagcaacgcagga

SEQ ID NO: 25539 - DNA, 120 bp, synthetic construct
  source 1..120: mol_type = other DNA
ccttggtacttataaagaccgatacgaattctcttttgcatgtgtttgacaagagatgggggagaggatgtgtgttcctcaccatcgtttttgaacatattagtcttaacatcacagggg

SEQ ID NO: 25540 - DNA, 120 bp, synthetic construct
  source 1..120: mol_type = other DNA
gttttgctctggggagagatgtgattagatttgtgggtttataaagatatcagtgttctggccatagcctggataacagattggatgggacaagagtgaatgatagtggtgttaaccaag

SEQ ID NO: 25541 - DNA, 120 bp, synthetic construct
  source 1..120: mol_type = other DNA
tggcagttgtcgctcactgcaatttttatgaataattttccccagtactgtgccagattttcagcattcattcaatggacggtagctatggcaaactcctattccctctaactcatgaac

SEQ ID NO: 25542 - DNA, 120 bp, synthetic construct
  source 1..120: mol_type = other DNA
ttgggtctgccactgattgtattattgtgctactattgggctccctaggaacataagcaagtctttgactcaataaatctccttgtatttgaccaagtctatgattggtatttcctccct

SEQ ID NO: 25543 - DNA, 120 bp, synthetic construct
  source 1..120: mol_type = other DNA
tgggggtatctaaaatttggaaggactataatctcttcccatcctgaccctatggactcctttccactgaattttggaatttagtgccatggaggagaaatctgaggtttgtctgctttc

SEQ ID NO: 25544 - DNA, 120 bp, synthetic construct
  source 1..120: mol_type = other DNA
taaatcatgttctctctcatcatttttcactgtgcctttcctctgcatggcgagattttcttaagtttatatctagtatctctaatactgattttaatttgataattttgctttaattaa

SEQ ID NO: 25545 - DNA, 120 bp, synthetic construct
  source 1..120: mol_type = other DNA
gacactctgtggtgtgtgtacaaaaggcaagggggtggaggaccatctgatttcattaagcagtccttctttctctagaaagttatgatttccttctctgtaaatcccatttctcaaaag

SEQ ID NO: 25546 - DNA, 120 bp, synthetic construct
  source 1..120: mol_type = other DNA
tctcctagtccttcccaagacgagggaggagaacttttcttgaatatcaactttggtttataaaacactctttgacactgaaaacttgtcgatgccttcccattgcccattgcattagct

SEQ ID NO: 25547 - DNA, 120 bp, synthetic construct
  source 1..120: mol_type = other DNA
ggctcctacggcagccttcccaacacattggtgagtttgtctacactgggtagaaatcactgccctataacatgaaggtcattctgttgtcgtgttttatttggttagttttttaagagt

SEQ ID NO: 25548 - DNA, 120 bp, synthetic construct
  source 1..120: mol_type = other DNA
tgcttatttcacttggttactgtaggttcattatttcaactggttaaggtaactgaactgttgttcttccagctggtgaaacttaactatgtatgttttctatataggtgcatgtggcat

SEQ ID NO: 25549 - DNA, 120 bp, synthetic construct
  source 1..120: mol_type = other DNA
atggaccagtaccagtccatgacctgggggatgggatccctgctctagaagactagttcttgccttcttgccaattatttctagtcaaactgaaacctacttaaatgtacattttaataa

SEQ ID NO: 25550 - DNA, 120 bp, synthetic construct
  source 1..120: mol_type = other DNA
taacaacttgaatgcttatgtatatattgagcatcaattatgtacccagcactgtgatagtgtttttaaaaccccctaagagaggagccaagatggccgaataggaacagctccggtcta

SEQ ID NO: 25551 - DNA, 120 bp, synthetic construct
  source 1..120: mol_type = other DNA
taaatgcctctgcattttcatgccaagctctctataactaattcagcccctacagaaaaatttaaataatgctgaaaaagtaacacattacattaagtattgctactttgttatccattg

SEQ ID NO: 25552 - DNA, 120 bp, synthetic construct
  source 1..120: mol_type = other DNA
tgaaatatttaccatgattaaatggcctgtgattgctgcacattctttttggcacaagttgcctttgtcaatcaagatatttactgtgctggcgactataagaatagggcgtccggggag

SEQ ID NO: 25553 - DNA, 120 bp, synthetic construct
  source 1..120: mol_type = other DNA
aagaagaaggaaggaaggaaaagagggagggaaagaggaaggtggggaggaagggaagtaagatagcactctagagatggtgaaaccaaaatagtatggtttcctaatacatactgtaaa

SEQ ID NO: 25554 - DNA, 120 bp, synthetic construct
  source 1..120: mol_type = other DNA
tgggcatgtgagatggtaccaccactctgggtaacagtttggcagtttcccataaaactagatatacaactactttataactcaggagtcacagatggcatttacctagaaaaatgaaaa

SEQ ID NO: 25555 - DNA, 120 bp, synthetic construct
  source 1..120: mol_type = other DNA
ctcatttacacctcttttatattccactacttcaatatgtcacacacttttatgtcttctattaactttggtcagatgttcaagcatgtctgttcttctgggcttttagctccatatcta

SEQ ID NO: 25556 - DNA, 120 bp, synthetic construct
  source 1..120: mol_type = other DNA
gatctgctgcccgattatgcttctgggaaatagtttcaaaacatttccttcctcctgttcctttttccttctactatcttccttctatctatcagctatctatagtctgcattcctacaa

SEQ ID NO: 25557 - DNA, 120 bp, synthetic construct
  source 1..120: mol_type = other DNA
gtcaactgatccgagtgtattttgtatatgatataatagtagtagcattttaactatcctttgctgatgtgtgtcaggcactggggaggagtttagatgttttaacttgtttaacgctca

SEQ ID NO: 25558 - DNA, 120 bp, synthetic construct
  source 1..120: mol_type = other DNA
aagtctttggcaggaaagatctggcggcattaatttcgtgcaaccataaaaagaatctttgctaaatgccagcaaatgaggtggtaataacttcagactactttgctcagcagggagaga

SEQ ID NO: 25559 - DNA, 120 bp, synthetic construct
  source 1..120: mol_type = other DNA
attagctacccaatgcagaatgtctggtttcaaaacaatgcacagggaaatgtgaccctgtgcttgggaactgaaaccttgccaattgcactgaagtgttacattcattatgtcatacca

SEQ ID NO: 25560 - DNA, 120 bp, synthetic construct
  source 1..120: mol_type = other DNA
aggcaggcagggagtctctgttgctctacatacttaaaggagaatcatgaagaaagaggctgctcaatggccaaactagttaaatgctcaggtttaagcaggattctgttgttttgtttg

SEQ ID NO: 25561 - DNA, 120 bp, synthetic construct
  source 1..120: mol_type = other DNA
atgttccccaccttcagctttatagcttaaaaagcactatgaaaatagaatgaaaaaatgcttctgagcatctacacaaccgaagacaccgtaaatttggtatatcttattaatcaactc

SEQ ID NO: 25562 - DNA, 120 bp, synthetic construct
  source 1..120: mol_type = other DNA
aagatcaagtggagacacataattgaagacataaagaaagcagaactccttttgtctttgaaatgagtattacacacctgttttagcatttgtttggttgttgtttttgcctattgaaac

SEQ ID NO: 25563 - DNA, 120 bp, synthetic construct
  source 1..120: mol_type = other DNA
gtagagcaccaaggaaaaatacaggtttttaccttaaagtgacaattcaaatacttctatttctaattacatatctgtcttattgttttgccatctaaatttttatcctgtagcataaag

SEQ ID NO: 25564 - DNA, 120 bp, synthetic construct
  source 1..120: mol_type = other DNA
ggtttccaagagggtcgattgaggtaggagtctcggtcttgtctgagtcattatatatgagtcagttactgtaagaactgggtccttatatttacttattaaattttgctggcccatccc

SEQ ID NO: 25565 - DNA, 120 bp, synthetic construct
  source 1..120: mol_type = other DNA
cgctggagttaaactacacggctgtgagtcccagttggttacttgctagccatgtgccattcagccaagtcacttagcctctctatgcctcaactttcttatctataaaacctctttagg

SEQ ID NO: 25566 - DNA, 120 bp, synthetic construct
  source 1..120: mol_type = other DNA
ataattgcattcaattaggtggaaacttttttatttctgctcattttcaaagtgtaaattttgtgaagcaatactaaaacccaccagcactgttctttgaaaaataccaaccttgcaatg

SEQ ID NO: 25567 - DNA, 120 bp, synthetic construct
  source 1..120: mol_type = other DNA
accaactctgatggcacataggcggaatgtgctcatatcgtgggtcaggatgtctacagtagtgatgtttgcaggaatctgaattttgtcgaaatttatatagaatgcttaggttcactc

SEQ ID NO: 25568 - DNA, 120 bp, synthetic construct
  source 1..120: mol_type = other DNA
tgtaatgaaactgttgcactgctaaatactggccagtacttagattgagtaatgggctttgagtggtattgcagtgcctgtagagcaaaagggtaattcagtaggcacactatcatggtt

SEQ ID NO: 25569 - DNA, 120 bp, synthetic construct
  source 1..120: mol_type = other DNA
tgtgcacagatatcaagtgcatagttcaggaaattagacaaacatctagacccatgtttctcctgtctcatcaagatgtaagacatttccatcaccttagaaaggtcccttgtgcccctt

SEQ ID NO: 25570 - DNA, 120 bp, synthetic construct
  source 1..120: mol_type = other DNA
tgtgttatatgggtaaattgcatgtttcaggagtttcgtgtacagattatttcactaccccaggtaataagcacagtgctccacaggtagttttttgatccttatgctgctccctccctc

SEQ ID NO: 25571 - DNA, 120 bp, synthetic construct
  source 1..120: mol_type = other DNA
tctcccattctgtaggttatctttctactctgttgacagtttattctgctgtgcgcaagctccttagtttaattaggttataattgtcaactttcatttttgttgcatttgcttttcagg

SEQ ID NO: 25572 - DNA, 120 bp, synthetic construct
  source 1..120: mol_type = other DNA
ccacttggggactttgcagtagttctcatcttcctcaagcctttcctctaggtgactccaaggttaacctttttccttcatttcatctttgtgcacatgttactttcttaaggaaagtga

SEQ ID NO: 25573 - DNA, 120 bp, synthetic construct
  source 1..120: mol_type = other DNA
ttctcccacgggggaataaaataaaacactttggatgtgtttttttttccactcaggggagtgcaagtttacaagaacagagatctttgttttattccccaaaagagtatcttttgatat

SEQ ID NO: 25574 - DNA, 120 bp, synthetic construct
  source 1..120: mol_type = other DNA
gcaagctcctcctcttgacagacactcagaagcagacactatgaaaactgcattgattagcttaagagtattggactctctgtaaaggatacaatgtagagggaactttctttggagaag

SEQ ID NO: 25575 - DNA, 120 bp, synthetic construct
  source 1..120: mol_type = other DNA
ggctttgtaatttgagtctacccagaacccttctatgcatttccatcttcaggtggtcaatatgcatttaactgaacgaaaagcttaggacttgccataagtcagggcattatccttgca

SEQ ID NO: 25576 - DNA, 120 bp, synthetic construct
  source 1..120: mol_type = other DNA
aaacagagtgggcaccaacaagtgttcatttaacaagtgtctgcaagtctagggatcgcctaaaatcaatgtaacagtgagattgcgatggatgatattagagacggggtaaccatgaaa

SEQ ID NO: 25577 - DNA, 120 bp, synthetic construct
  source 1..120: mol_type = other DNA
aaaaaaaaaaaaaagatttcaggaaggcaagagaaaaatgcaggtttgtgggtgaaaatggtgattcttatttggggatattctgtgtttaaagttaatatagtacatctggatggcaaa

SEQ ID NO: 25578 - DNA, 120 bp, synthetic construct
  source 1..120: mol_type = other DNA
ttagtgtagtgaactttacaatttaatgtccaggaagctttctgcctcgtctgcccggcatgtgttactggcttatctgtgctggcattcacttatttactattaaatgacagctgcttc

SEQ ID NO: 25579 - DNA, 120 bp, synthetic construct
  source 1..120: mol_type = other DNA
tctacatatggtaagtacttgttttctagatgttcatagaatacaaacatgaacaactatgtccaatttagttgagcacatgatttttctttctttttttttttgtagcacttgaagggc

SEQ ID NO: 25580 - DNA, 120 bp, synthetic construct
  source 1..120: mol_type = other DNA
aacatggtaaatatgtttttaaagaatgaccaaaaccattttttgtagaagaatttatttgctttagaatacccataaattaccatttttataccacatagagtaaggatttacagatct

SEQ ID NO: 25581 - DNA, 120 bp, synthetic construct
  source 1..120: mol_type = other DNA
tttcaaccagctacaaattacacatacatgtgtatgcacaggcaggtgtgcacaaatacacacacacacacgcatgcacgcataactattggctgctagagacttagtaattacttccca

SEQ ID NO: 25582 - DNA, 120 bp, synthetic construct
  source 1..120: mol_type = other DNA
gtaaatggctaggataatgaaggctaaggaaatagctcacagtcatacagcttgcaagtgctagggcccagatatttaacctaaaaattcaggcctactcattttacaccacagcaggat

SEQ ID NO: 25583 - DNA, 120 bp, synthetic construct
  source 1..120: mol_type = other DNA
aaatataaagatgtctgccatcattgtttctattcaatagtaccctgcaaatgaaatgaaatttttaaaattggcatacgaattgaaaaaaacaaactgttctccactgaagacaacagg

SEQ ID NO: 25584 - DNA, 120 bp, synthetic construct
  source 1..120: mol_type = other DNA
gaaaagaggaagtcaaattgtccctgtttgcaggattgtttagatagacattgcaatagcaaccaccaattattttaagcaataaaataattaagaatttctggtgacaaatcaatagta

SEQ ID NO: 25585 - DNA, 120 bp, synthetic construct
  source 1..120: mol_type = other DNA
cttcagggagcaactcagagaagtgaaggaattgtccatcacaaaagatatttgttcccacattagaagcctaaaactgatgctgattcttaaaatcactgaggcaggattgcaatctcc

SEQ ID NO: 25586 - DNA, 120 bp, synthetic construct
  source 1..120: mol_type = other DNA
gtgggagtctaagtctctttgtaggtcactcaggacttagaacatctttttttaaaggcttataaaaattggggtttttgtaagtattctcggaaataccaaaacgcttgctctgatcac

SEQ ID NO: 25587 - DNA, 120 bp, synthetic construct
  source 1..120: mol_type = other DNA
agtataattaaaaaaaaaagaatctatatgagtggttctactaaatatcctaaataaattgtaaacctgttttgtaaccccaagacagatatgtactgctctcatttgtaacatacctcc

SEQ ID NO: 25588 - DNA, 120 bp, synthetic construct
  source 1..120: mol_type = other DNA
ctattgggtaagcagcttggcatggaatggctaggtcatatgttaagtgtatatttaactttttaagaaactatattaacagttttccaaagtgtgccattttacattcccactagcaac

SEQ ID NO: 25589 - DNA, 120 bp, synthetic construct
  source 1..120: mol_type = other DNA
tgcatacatcagacacaaaaaagcctgacagaaataagtaaggattgagggtagtgatagttctgaaagtgtggtaccagcaacattagcatcttttgaaaacttgttagaaatgaaggc

SEQ ID NO: 25590 - DNA, 120 bp, synthetic construct
  source 1..120: mol_type = other DNA
ttcagttattgactttacaggtaatcattgagcacctgccatgtactaggtgctttcagatactggagatagagttgtgaacaacacagaaagtcccttgagggaaatgagaagtagcca

SEQ ID NO: 25591 - DNA, 120 bp, synthetic construct
  source 1..120: mol_type = other DNA
cttagattaacccatgtggttctttttgatgttttaaggcatctcattatgatgtatctgtagtgctcctgagcggtgagacctggggggttgctcactccttcagttttctacttatca

SEQ ID NO: 25592 - DNA, 120 bp, synthetic construct
  source 1..120: mol_type = other DNA
tgcatttgttagagtttagataatggtaaggggtcttcagctggagcagagggaaaggggcattctaatgaagagaaaatactgtctgcaaaggttggtggcattagagaactgtggggc

SEQ ID NO: 25593 - DNA, 120 bp, synthetic construct
  source 1..120: mol_type = other DNA
acaaatatttatgttgaaacttaaacccgatgtggcagtattaaaaggtggagcctttaagaggtgattggatcgtgaaggatctgccctcatgaatgaatgcattcaagattaacgagt

SEQ ID NO: 25594 - DNA, 120 bp, synthetic construct
  source 1..120: mol_type = other DNA
aaaaatatcagccatctagaattaagggctataactggaaggaggattcacatgggctgggatagtggaggaaagcttcaaaaggacaactgatgtccaggaatgcataagagatgagta

SEQ ID NO: 25595 - DNA, 120 bp, synthetic construct
  source 1..120: mol_type = other DNA
tgggtgtggcagctcacgcctatagcccagctacttgggacactgaggcaagatcagcctggggaacaaagcaagaccttgtctctaaaagaaaaaatatatatatgtatatttttaaaa

SEQ ID NO: 25596 - DNA, 120 bp, synthetic construct
  source 1..120: mol_type = other DNA
gtaatagtagtgacagcagcaatagcagtgacagcagcaacagcagtgacagcagtgatagcaatagcagcgacagcagtgacagcagcaacagcagcgatagcagtgacagcagtgata

SEQ ID NO: 25597 - DNA, 120 bp, synthetic construct
  source 1..120: mol_type = other DNA
gagagtgacagccagagcaagtctggtaacggtaacaacaatggaagtgacagtgacagtgacagtgaaggcagtgacagtaaccactcaaccagtgatgattagaacaaaagaaaaacc

SEQ ID NO: 25598 - DNA, 120 bp, synthetic construct
  source 1..120: mol_type = other DNA
tccaagaagaagtctgcagggttattataggcctcacagtgataacctatgaaagaaggcagctcaaaaacacaaacttgatggtcttggaaaacaaagagaactcactttcagagggtg

SEQ ID NO: 25599 - DNA, 120 bp, synthetic construct
  source 1..120: mol_type = other DNA
tgttagaaattttggcccatctaagtcaggtttaggactaaccactctattgaccgatacccactcaagggctaaagctgcaatctatagttaccagaaaattaagtagtgtctgccggt

SEQ ID NO: 25600 - DNA, 120 bp, synthetic construct
  source 1..120: mol_type = other DNA
aaacccttcatgcaattaattaacaagtgtttgctgccagttttggaagcctacactatactgtgctagagactatagtggctcaggagttttagagaactgtcagctcatggactgggt

SEQ ID NO: 25601 - DNA, 120 bp, synthetic construct
  source 1..120: mol_type = other DNA
tgatgctggctgattgggtgcagatgatgctggctgattgggtgcaagtgatgctgattgattgggtgcaggtgatgctggctgattgggtgcagatgatgctggctgattgggtgtggg

SEQ ID NO: 25602 - DNA, 120 bp, synthetic construct
  source 1..120: mol_type = other DNA
gtaacttcactctgccatgtaacttaacatatttacaggctccaggattaggaagtgggagaccattattctttgggaggccattattcagcctaccataggatcctttaaaaatcccga

SEQ ID NO: 25603 - DNA, 120 bp, synthetic construct
  source 1..120: mol_type = other DNA
ggaaatctcagagctcccggtgtcctggtgtgtgttctagaagatcctacagaatctttggcctgtgggaaggactaaagcttgaggagggctgaaaaaaagcaagtctttctaaagcat

SEQ ID NO: 25604 - DNA, 120 bp, synthetic construct
  source 1..120: mol_type = other DNA
ctcaccatcttcttactggctcaccatcttctctgccttctttctcactcccatatatcatctcttttgatggctacagctgccttgagattaggaatgatgtttctcattttacagata

SEQ ID NO: 25605 - DNA, 120 bp, synthetic construct
  source 1..120: mol_type = other DNA
agtgatttcattaatgtatgagaaacgtttctgtgctgaaagcactacttaagacttgcagctacttttaatagccacccaaccaacccactttgaaatcatcagggaatagccagggct

SEQ ID NO: 25606 - DNA, 120 bp, synthetic construct
  source 1..120: mol_type = other DNA
cctgaaaacattaagctttgaaaagaaaaacaagttaacaattgcttctactccataactgtttgcttgacaactatacttctttatcccgcatcttatagttaatatgactctgtttaa

SEQ ID NO: 25607 - DNA, 120 bp, synthetic construct
  source 1..120: mol_type = other DNA
aggaggaagaggaggaggaggaagaagaagaaaaaagaagaagaaggcggcaaataatacatgtctccttttactactgtgatcacaattccatagagaattgcctggtatagcaggaac

SEQ ID NO: 25608 - DNA, 120 bp, synthetic construct
  source 1..120: mol_type = other DNA
gaataagaaacctttgactctggcctcatcagcaacgttcaacaactaaggctggttattcactagagagatgcagtagtcctctatgatctgcaggagatatgttccaagaacctgaat

SEQ ID NO: 25609 - DNA, 120 bp, synthetic construct
  source 1..120: mol_type = other DNA
ttggagtcacaatggggcagctataaagtgtggcactagagtgtgggagctgagcctaagatgtaaggaggttctgggcagcgctttcttttttttttttcttttttcttttttctttta

SEQ ID NO: 25610 - DNA, 120 bp, synthetic construct
  source 1..120: mol_type = other DNA
ttggatcagatggtagaataccttgaaagctaggcagtgaaatttgggatattctgtagatgatgggaggtgcttaagcttttgagcagtagaccagcatgctcagagttgcttttaaga

SEQ ID NO: 25611 - DNA, 120 bp, synthetic construct
  source 1..120: mol_type = other DNA
aagcagtagaaatcatggtgctgtttattatcatttgaaaagtatttttttattttgttctattaatatgtttcaatatgaatgatgcactgagatcttggataattagcacataacaac

SEQ ID NO: 25612 - DNA, 120 bp, synthetic construct
  source 1..120: mol_type = other DNA
agataagaaaatggcagtcatcagtgaaagcggagcatgaagtgtgacgagaggactaatgaatctggagatgtagacagcatccaagccttaaagagccttcctaaagaatatggataa

SEQ ID NO: 25613 - DNA, 120 bp, synthetic construct
  source 1..120: mol_type = other DNA
tacttatttctagaaatataaggtgtgaaagagataatctgtgggaaagtacctggtacgtagcagttgatgagttgtagctgccacatctcctcactcgtgtcctcctcctcctttatc

SEQ ID NO: 25614 - DNA, 120 bp, synthetic construct
  source 1..120: mol_type = other DNA
atacaggattttgttttgttgcccaggcttgaggacagtggcacaataataggtctttgtaactgtaaagttctggactcaatcattcctgctattgaaggctcctgagtagctaggact

SEQ ID NO: 25615 - DNA, 120 bp, synthetic construct
  source 1..120: mol_type = other DNA
actgtattcctctctaacttcctcttggagccactcctctctgttccagtcatccaaggcttctctatgccccactaatggaccaggcttacacacactttacattttaatttttatttc

SEQ ID NO: 25616 - DNA, 120 bp, synthetic construct
  source 1..120: mol_type = other DNA
taatccatgatgatcaagtggttttcatacgagggatgcagggatggtttaacagatgtaagtcaataaaagtgacacacaagcaaaacagaattaaaaacacatatcacatgatcatct

SEQ ID NO: 25617 - DNA, 120 bp, synthetic construct
  source 1..120: mol_type = other DNA
tctagtccactacactgctacttcaaataataagaagccctcaccatttctcactttgtttatttcaatagtgctgtcagtggtttcactcagtcttgttcctgtacttaggtgttgccc

SEQ ID NO: 25618 - DNA, 120 bp, synthetic construct
  source 1..120: mol_type = other DNA
acaaaatttcttggaggtcagcaaatcaaaatttcttggaaagtcagcaaactatagcaacaaaataccagacaagatttctgcctggaggggataaactgcggagctaggctgagagca

SEQ ID NO: 25619 - DNA, 120 bp, synthetic construct
  source 1..120: mol_type = other DNA
cagcttagactctagggagataatacagctccagggaagctaagtactagaattgtttgaccttttgggtaaggtgtctcagctcagccactgctcttttcctgggaaataggcttcccc

SEQ ID NO: 25620 - DNA, 120 bp, synthetic construct
  source 1..120: mol_type = other DNA
agggggatggggtggttgaggccaagtgttttattttattttatacatggctttcctttctctccagggtttctgatactcctttgatgtactccagtgctcttctttagttatttttat

SEQ ID NO: 25621 - DNA, 120 bp, synthetic construct
  source 1..120: mol_type = other DNA
ctgcaaaatttgagttgccatacaaagatgattagattctgtccacataggactggaaggtgacatatttgaaacagagaaacagaaaagttcaagtttggagagaatcaaacccatagt

SEQ ID NO: 25622 - DNA, 120 bp, synthetic construct
  source 1..120: mol_type = other DNA
ttacgaaactacttgtgaatcatggttcttatttttttgtaactgtgtcaacttatacaatatgagaaaaactgaggttccctcttcatttttactggctatgacacacacatttgtgct

SEQ ID NO: 25623 - DNA, 120 bp, synthetic construct
  source 1..120: mol_type = other DNA
ctcatcatcactggccatcagaaaaattctttttaaaaaaataagttctacctttattttagattctggggttacattgcaggtttgttacatgggcatatggcatgatgctgaggtttg

SEQ ID NO: 25624 - DNA, 120 bp, synthetic construct
  source 1..120: mol_type = other DNA
cattatgtgtttaataacataatataacctaacaaataaataatacgcttttacaaacaaattatggctgctcaccccatctgggaactgaggagtgcctctgcccggccgccaccccgt

SEQ ID NO: 25625 - DNA, 120 bp, synthetic construct
  source 1..120: mol_type = other DNA
aaaatctaatgttaatacgtatgtgattcatggtagttcctattttagaactttctaacctgtcattatgagatatttttatctgtcttgctcccatgcttttctgtgcatgtcactgac

SEQ ID NO: 25626 - DNA, 120 bp, synthetic construct
  source 1..120: mol_type = other DNA
gtaaatctcacaatgattaagaagtctgagaagctctgacagctctcagcaaaattttagaaatccaggtgaaaaatcagtgtttttgaaaatgtatgtttatattacagatgactataa

SEQ ID NO: 25627 - DNA, 120 bp, synthetic construct
  source 1..120: mol_type = other DNA
gtattataccaaaatgaattgcagctctagcatgtgttagatattgtgctaaggaggggatatatggtaataaaaatgcttaatccataacaccatgcatattttaacttaaaaacccta

SEQ ID NO: 25628 - DNA, 120 bp, synthetic construct
  source 1..120: mol_type = other DNA
ccaaatacttgaagaagtgtatagtggaattcttcctaaaattagtaagaataaacttaataatacccttattgaatctgaggagagctacttactgaaattatatgtcctggcttcaga

SEQ ID NO: 25629 - DNA, 120 bp, synthetic construct
  source 1..120: mol_type = other DNA
gaggctttggttggtcattgagagcaaaggcttgtttttctgtgcttgtatcaccagttcagcagattagaataaattaagttaaacaaacacatcttgcaattcaaaagccttatggta

SEQ ID NO: 25630 - DNA, 120 bp, synthetic construct
  source 1..120: mol_type = other DNA
tcagtcttctgcttgtgggtttccagctttcctagaatcatttattgaagagaatgtcctttccccattgtgtgttgttgacatcttggtcaaaaatcaaatggcagtacatgtgtggat

SEQ ID NO: 25631 - DNA, 120 bp, synthetic construct
  source 1..120: mol_type = other DNA
agaaaatgaggagctgatgaatggttagagatatacattttgggcggtaagcaaagatgccagtggtgaatcacgatgggattagctggcctcaaagtctcagtgagaatctcacataaa

SEQ ID NO: 25632 - DNA, 120 bp, synthetic construct
  source 1..120: mol_type = other DNA
aaaagaattttccatcttgattgcactgttttagactcctaccggcttcgtaggagagttctcgtcgtaccacactcttggcatcacttgttattgtctgttttcgtaatggaacgtttg

SEQ ID NO: 25633 - DNA, 120 bp, synthetic construct
  source 1..120: mol_type = other DNA
ggtagtagcagtacaacttgttccctaaaaagctaaatagccacaacaaatgtacaatgatcggttagagtgggactgagaggcaatgtttcccaatatgtagaggagggattcagaaac

SEQ ID NO: 25634 - DNA, 120 bp, synthetic construct
  source 1..120: mol_type = other DNA
taataaacaacatacatttatcaagcacttagcatgtatcgagcatggctgttaatgctgggggttgaaagaaacagccgtttctcccttcactgaagttacattctgtctgggtagaaa

SEQ ID NO: 25635 - DNA, 120 bp, synthetic construct
  source 1..120: mol_type = other DNA
acctacaagtaatgttttaccagctatctgggcattgcttggcccaatcaggttgacatgtaaaattaaccatcacaagtccatcactgggtacccataggtatttccttgaaccatact

SEQ ID NO: 25636 - DNA, 120 bp, synthetic construct
  source 1..120: mol_type = other DNA
ggtggtttggaagcgtccccaggtagaaagccaagctgaagtggaggtcacctaatatgtttaccttattgaaaaagaaaatacagccctacgctatatgttatttaatgcctgagaaga

SEQ ID NO: 25637 - DNA, 120 bp, synthetic construct
  source 1..120: mol_type = other DNA
tacctcctaggtacagtggtttctcagatatacttagaatctttattcgggctctccagctttaaattcacaaagtctacaactttgtgttcttgggcaaacctaatgtactgcttcgca

SEQ ID NO: 25638 - DNA, 120 bp, synthetic construct
  source 1..120: mol_type = other DNA
cgtgggctattcccagaacctttaattctcaggcactcgtagcccactatgcattcaggtagttcaggccctgaggaaaatagatacagatactatttgtatctacatataaatgcagta

SEQ ID NO: 25639 - DNA, 120 bp, synthetic construct
  source 1..120: mol_type = other DNA
ccctgatagcccttacaagactggtcatcaacattcagaaccatgttaattgccaacactgtcatgaatggggtatttatatacctaattttgctgcatggccaaagattccataaaaat

SEQ ID NO: 25640 - DNA, 120 bp, synthetic construct
  source 1..120: mol_type = other DNA
ttcagtttctctaggtgatggaagttagcacgagcaaaggaactttacaatttttcagaattttttttttttcatgtttggaaggtctcctcctcctcctcctccttctcctcctcctcc

SEQ ID NO: 25641 - DNA, 120 bp, synthetic construct
  source 1..120: mol_type = other DNA
attctcttgaacagcaagagaaggaaacagtttagtaagttagataggcagaagtagacctagtacttgtgaaatgtgtgccaaaactcttcagtaactattttccttctgctttctgta

SEQ ID NO: 25642 - DNA, 120 bp, synthetic construct
  source 1..120: mol_type = other DNA
atggaaggttagccttaggaaaggggacagctcctgtattgtggaagcagataaatagagtagactgggtatgggctataggttggaacacagaaataagtatgatttttaatctcccat

SEQ ID NO: 25643 - DNA, 120 bp, synthetic construct
  source 1..120: mol_type = other DNA
ctgattttgccattttgccccatcaagttcaatggggcatgaactctccagcaggttcatcatatacattatacccagaatgaagtcctagcttttcagcgtagaattcaacaacgttca

SEQ ID NO: 25644 - DNA, 120 bp, synthetic construct
  source 1..120: mol_type = other DNA
gtggaattcgtaattgcctcttatctatcccatttcatagttctttgagcagctcaaataaactaacatcataattggtcagacagtctactcacatgttaaacgtttactaatatgaaa

SEQ ID NO: 25645 - DNA, 120 bp, synthetic construct
  source 1..120: mol_type = other DNA
tattcagtaaagtgactcaaaatcattcattaaggtagatgagaaaatagactgggtctcagaggctgtaaatatcagaccagcctgactcaatttaggacaaggggaatcattgaaggg

SEQ ID NO: 25646 - DNA, 120 bp, synthetic construct
  source 1..120: mol_type = other DNA
ccgtatctgtttcagaagaaaaaaaaaccctaggttaaaaactgagggaaatatgattcaatatatctttcccattaatagggaaaatttaaattgctaacatttttaaggtcatacatt

SEQ ID NO: 25647 - DNA, 120 bp, synthetic construct
  source 1..120: mol_type = other DNA
tgcttcctcatcccatgtcccctacatatctttctttacaagtacccaaagggtgtacttgcttttttttttttttttttttttttttggctacatagggattcattgaggtagatgcgc

SEQ ID NO: 25648 - DNA, 120 bp, synthetic construct
  source 1..120: mol_type = other DNA
attattgactgtagtcatcctgctgtgctataggtctcaaaacttatttctcctgtctgtctgaaactttgtatcttttgaccagtaactccctattccctcccctcaatgtcctccttt

SEQ ID NO: 25649 - DNA, 120 bp, synthetic construct
  source 1..120: mol_type = other DNA
gagagggagagcaggagctctagaagaacagctcctgggctgtacatacggtcttgaggttgtgggtggctttctaaagttctgatatatatatatatatattgaggaaaactagtatcc

SEQ ID NO: 25650 - DNA, 120 bp, synthetic construct
  source 1..120: mol_type = other DNA
taaactgaaactaggcagtattatagagcctttatgatggcttcttaatcaattggcagtgtttattaagcacatgcctgctgtccagcactgtgcaaaattcaggagaaaagagattac

SEQ ID NO: 25651 - DNA, 120 bp, synthetic construct
  source 1..120: mol_type = other DNA
ttgaagcagaattaattatggagaaaatacaactgtctcctttacatagtgttcaccaaacacccttagatatacaaaagttacctgaaaaatttccaaagcaacataaagaaattctgc

SEQ ID NO: 25652 - DNA, 120 bp, synthetic construct
  source 1..120: mol_type = other DNA
ttcaggatcgcaataaattatatcagttggcaaaactttttacactgcagtgacagtctctttggtaacaaccaaatgtggtgtgaaagatacaataatatatttttagattcaaattta

SEQ ID NO: 25653 - DNA, 120 bp, synthetic construct
  source 1..120: mol_type = other DNA
atgttttcaaacaggtgctcctgaccgtaggtctcagaggatttaagcgtgcattgttccagcttgtttgcacgttttaccttgcatactgaatgtcattataaaccatccagggtttta

SEQ ID NO: 25654 - DNA, 120 bp, synthetic construct
  source 1..120: mol_type = other DNA
gctggttggaaaagcaaaagcaaatggtgcctgggaactattaaagcaataaaagaaaatctacttaatctactataaatgccatctctctctattttttttttcttttttatttattta

SEQ ID NO: 25655 - DNA, 120 bp, synthetic construct
  source 1..120: mol_type = other DNA
gaagtatatctattagagtatgacaagtctgcccccagggtccaggctgaagctgggttacagagccctgcacagtggtgattttgtgccaaaaattgtgaggtgctagggtcccacagc

SEQ ID NO: 25656 - DNA, 120 bp, synthetic construct
  source 1..120: mol_type = other DNA
ctcacctcctccctttctcatatcctcctctactcacctcttttgctcgccctcctctgctcaccctcctcccctgttcaccctcctttcctgctcacctcttctgcccacctcttctca

SEQ ID NO: 25657 - DNA, 120 bp, synthetic construct
  source 1..120: mol_type = other DNA
ataaaatcctctacattcataaactgttcctgtgacctgattcttccttaatgatgaaaaagaattcaggacacactgggtgcaggaacccaaaaaggctgtcacactgactcttcacgg

SEQ ID NO: 25658 - DNA, 120 bp, synthetic construct
  source 1..120: mol_type = other DNA
tctagtatgtcagcctttggctggatgctggccttttctgtaaagttctggatgaaaatgaaagctcctaataaagctatgttgtatattactccattcctgaatctcaggagaactgag

SEQ ID NO: 25659 - DNA, 120 bp, synthetic construct
  source 1..120: mol_type = other DNA
acatgcagtaataaaaaaaaaaagtaccagcccatgactaccttgttttcaagaccttctgctaatcgtatatgcctgggttttggctctggtatattagactgcccactggcaaggaac

SEQ ID NO: 25660 - DNA, 120 bp, synthetic construct
  source 1..120: mol_type = other DNA
gcaccatacagcctagatacttttttcgtaacccatagtatcacaggaatagacactattatcatgcccattttatttattttttattttttattttttgacttcttttattttatttta

SEQ ID NO: 25661 - DNA, 120 bp, synthetic construct
  source 1..120: mol_type = other DNA
aggggtatacaagctccataatatcatcaagtatttataggtcctttcatgttttttgctgcatcgtatttaggttgtgaccctcatccttatattctctcaagatattgactgtagctc

SEQ ID NO: 25662 - DNA, 120 bp, synthetic construct
  source 1..120: mol_type = other DNA
gtttaacaactataaaagccttttctgaagtcttttctgaaagcctaatctagtaacttctattttctttgcattggttaaaactgtgccaaataactaccctcaagctgcaagggaacc

SEQ ID NO: 25663 - DNA, 120 bp, synthetic construct
  source 1..120: mol_type = other DNA
ctatcttacataaagaatctaccctcaaatggttacaccagtaaattcaacaacaatctcacacaaattctttcagaaaatggaaaaacaggcaacacttaccaactttatgtggtgacc

SEQ ID NO: 25664 - DNA, 120 bp, synthetic construct
  source 1..120: mol_type = other DNA
taaccaaatgttgccaaagtcatctccacatatatatgtagcacacataagcaagggttaatttatactctgaattagtattttaatacaagaataaaccaaagtatctacacatttttg

SEQ ID NO: 25665 - DNA, 120 bp, synthetic construct
  source 1..120: mol_type = other DNA
attaggaaagaaattggtaatagctaataaagttgaaaatgcacataccttacaaaccagcaattgctgactggttatatacccttgtgtatcaaagacacaggcaaagacggttagtgc

SEQ ID NO: 25666 - DNA, 120 bp, synthetic construct
  source 1..120: mol_type = other DNA
gattagtgttgataggttttgtgttttttgtagccagagtatctggagaagagctgtttgaaaatgtccccgttacgtgattctcttttcagaatgattcagtgtaggggggaggagcca

SEQ ID NO: 25667 - DNA, 120 bp, synthetic construct
  source 1..120: mol_type = other DNA
gcattaggccatcttttaacctttgggtaattaatatcaaatttctacttggtcagcaatatctcccttttttcttccccattctcaacccctttcttgaacctcattcgataactgctg

SEQ ID NO: 25668 - DNA, 120 bp, synthetic construct
  source 1..120: mol_type = other DNA
gcttgctctctcagggatggcagaagagaagaaaatccaggtataattggacccacacagttcaaacttacgttgttcaagggtcaactgtatattctttggtgaaatgctgatttttgt

SEQ ID NO: 25669 - DNA, 120 bp, synthetic construct
  source 1..120: mol_type = other DNA
cagtgtcatgttctgaacacaggtcaactgaactccaagactagtctattatcagctcactaagaccccacaagggtgaaatggctcctttagcctaattaccagcattaagataaccat

SEQ ID NO: 25670 - DNA, 120 bp, synthetic construct
  source 1..120: mol_type = other DNA
gttgaaggacttatactcccttatttaaagatttattataatgctacagtaatcaagacagtgtggtatatggccaagagatcaatggaacagaatggagaatccagaaattgacctaca

SEQ ID NO: 25671 - DNA, 120 bp, synthetic construct
  source 1..120: mol_type = other DNA
gagccaccgtgcctggcccctcctaaattttttatgtgccttagtttcaggtatttgagagagagtctcattttctacgttcaaaggcaggaataacaggaacttcagagttattgaaca

SEQ ID NO: 25672 - DNA, 120 bp, synthetic construct
  source 1..120: mol_type = other DNA
catatgtccccaccacctgtactttccctacactatcattttgacacttaacatagaaacaactcaattcagcaaccaagttttacaaccactgttgctaccaatcaaatggtgatgcat

SEQ ID NO: 25673 - DNA, 120 bp, synthetic construct
  source 1..120: mol_type = other DNA
attttttttcctgtaaagtatagaaatgccaagttgttttctgactattgtggataggtaaaatctgtatgtaattaatggtaattctactgaactattacagagtgggccaggaacaca

SEQ ID NO: 25674 - DNA, 120 bp, synthetic construct
  source 1..120: mol_type = other DNA
ccttggcacagcatagctttgcaaaataagttagtagttattggtagcaacagaacaaacggttgagggaaaggagaggtgaactacatagagatataaaaaatggcctctgtaggccgg

SEQ ID NO: 25675 - DNA, 120 bp, synthetic construct
  source 1..120: mol_type = other DNA
taatgcaaattgattgtgaactcttgatatatatccctttgcatttttttctgtacaaacctataaattcttttgtatttcactggagttatccttcatatactgtttgcccactttaaa

SEQ ID NO: 25676 - DNA, 120 bp, synthetic construct
  source 1..120: mol_type = other DNA
ttctacatatggctagccagttttcccagcaccatttattcttttgatttttttttctccaaagatgtttaatcctgatattttctaacactgtcctgaagacaactgtttacccacaac

SEQ ID NO: 25677 - DNA, 120 bp, synthetic construct
  source 1..120: mol_type = other DNA
gcatttaggataaagtggttaattttgacataggctaaaatgttccctattatgtggcctcatctcctatcaactccctcccccattatgcatatgccacagtggacttgtctaagttgc

SEQ ID NO: 25678 - DNA, 120 bp, synthetic construct
  source 1..120: mol_type = other DNA
catacttgcggagttcccgttgctcttcccattgtttctgttttattagttttttcatttgtcgtttagatattggttcacacccttcacctaatcttggcttctggctctcctcttgat

SEQ ID NO: 25679 - DNA, 120 bp, synthetic construct
  source 1..120: mol_type = other DNA
gatgaaaagcatcttttctatagtcttttttaatgctgtagaatgagggaaactacaaaaagacagaactgatttttaaaactgaaatcaataaccaagaaataaattcacttgatacaa

SEQ ID NO: 25680 - DNA, 120 bp, synthetic construct
  source 1..120: mol_type = other DNA
tttcaacctcctttctctgccttctgatggtaacctcaaagcagtgcctggggcaggttatgcagcagtagcaatctcaacctcaaattttccagccttctgaatatatatatacacaca

SEQ ID NO: 25681 - DNA, 120 bp, synthetic construct
  source 1..120: mol_type = other DNA
agccaattttacattatttttaagtcacttaagggaatcagaacagagtcctacatttggtttggtctagctcctcaggcactatactgaggtttagggccaaaggcttagccagtagct

SEQ ID NO: 25682 - DNA, 120 bp, synthetic construct
  source 1..120: mol_type = other DNA
gtgtcaataagaagttcctaaatgaatcaattgttttgatttctcctctccctcttgtcccctataaggtcctatcagttctgtataacttgctatttctaaaaataatgggatttaagt

SEQ ID NO: 25683 - DNA, 120 bp, synthetic construct
  source 1..120: mol_type = other DNA
tctaaaagataaatgtgtgtctgaagtaaacactgtcaatgtgttgggtgattacagcatatggataagtgaaagtaatgacagcaatatcataagggacaggagggacttaggtttgtt

SEQ ID NO: 25684 - DNA, 120 bp, synthetic construct
  source 1..120: mol_type = other DNA
agctataacagggtgtcatttttcacaaaggctccttattaaatgacttctttactgaaatgactttttcttcctccttagggatggagaagctcagctattttttccattaaagatgag

SEQ ID NO: 25685 - DNA, 120 bp, synthetic construct
  source 1..120: mol_type = other DNA
tataatattgatgggagaagtagaaagtggggaaagctggaggatgacaaccaggaaggaaatagtacaaagataaataagtaaaactgccttccatcagcaaacttaaatcactgtggc

SEQ ID NO: 25686 - DNA, 120 bp, synthetic construct
  source 1..120: mol_type = other DNA
gcccacagtctatcattctgaaacattagaaaatcaaacgatgacttaccttttctaatgtactgaaggacggccaggactgatatccatattcagatgcaaatcgagcttttgggaaaa

SEQ ID NO: 25687 - DNA, 120 bp, synthetic construct
  source 1..120: mol_type = other DNA
cattgcgttagccaaaaatgttggcccacagttagttaaaacagctgttttccctcttcttcaccaagcagcaagatctccttacctactcagcagtacaaaatccttgaaactgaaatc

SEQ ID NO: 25688 - DNA, 120 bp, synthetic construct
  source 1..120: mol_type = other DNA
ttttaaataggcataaatgatattagaacttgagtttcttggtactcagtggctggggggggggggactttagcaagaatatgcaggtaacactcatgccatattcatagccattaggca

SEQ ID NO: 25689 - DNA, 120 bp, synthetic construct
  source 1..120: mol_type = other DNA
aaattccattgttttaaaattaagcaataggtgagctcgaattttaagctccacaaatgaccaagaacttattcgattcccttttaaacctgttgtctattttaatcactcatatggact

SEQ ID NO: 25690 - DNA, 120 bp, synthetic construct
  source 1..120: mol_type = other DNA
tctcgttttggccttccaaactgcatttggttaggtgaattaagaaaaatattgccatcaagaattacttgtgttttcacagagatagactctttgctttatagagattgttgtgtattt

SEQ ID NO: 25691 - DNA, 120 bp, synthetic construct
  source 1..120: mol_type = other DNA
tctggcagtttcggtgatatattctgtaaaagcccttagtcttaataggaataacacatagttttgattgccttaaattttaattgcttcacttggcaaatttatgtgtaaatgtcatat

SEQ ID NO: 25692 - DNA, 120 bp, synthetic construct
  source 1..120: mol_type = other DNA
ttggagtaaaaagtccaagaaaagccctgtactgaaatcacatgtttactaaatcctggattctctgtacagtccccacatatttctactttaaaattcttctgtcatgtgaaataattc

SEQ ID NO: 25693 - DNA, 120 bp, synthetic construct
  source 1..120: mol_type = other DNA
attaaatatgagaatgcaaagaacagctggcacacagtaggtattcagatagtagtaagtttctctctccctcactcctcatgccctgccaggtcagagaatgagttcctttgaagtttt

SEQ ID NO: 25694 - DNA, 120 bp, synthetic construct
  source 1..120: mol_type = other DNA
aaaacaaaaaccaaacccattgacttttaagagatgattatgataatggtgaaactagaaataatatttatatagttatatggcattcatcatatggcaggtatcattcttaaagctttc

SEQ ID NO: 25695 - DNA, 120 bp, synthetic construct
  source 1..120: mol_type = other DNA
gaataacaactaagaaaagagccacaggaaattaaggtatattatgctgccaagttaaacagtctaacaataagtagcaatatattttaggaggaggagaatatccttgaataagagggc

SEQ ID NO: 25696 - DNA, 120 bp, synthetic construct
  source 1..120: mol_type = other DNA
ggataatagctcatattttgtgactagagtaacatttttcattttaaattttaaaagcatcaaaatgaaagcattaagcaacaggcttaatatgttcttacctgtactgtagctttgggc

SEQ ID NO: 25697 - DNA, 120 bp, synthetic construct
  source 1..120: mol_type = other DNA
ttcagataactcagggaatatattcagggctgtccttggtttataaaaaaaaaagagcacccagtgtaaaggaagagcaatatgaaaatatgacactgtatcaacatgtgtttctgaaga

SEQ ID NO: 25698 - DNA, 120 bp, synthetic construct
  source 1..120: mol_type = other DNA
tccagattttgtctgtaaagtaactgaacagagatataactacatcatgcctgatgagaacatacccagttcatgcaaacatttgggttctcaaaagggggttgggaagccctccactaa

SEQ ID NO: 25699 - DNA, 120 bp, synthetic construct
  source 1..120: mol_type = other DNA
aaaggtaatataataatattatataaaacttgggaaaaagagaagcctgatgtgattaactcaacttctgattccatattagtatatttccaggtgcttttcctaaatattttctttcct

SEQ ID NO: 25700 - DNA, 120 bp, synthetic construct
  source 1..120: mol_type = other DNA
tttaagtacagagtaggcattggaggctagttttagagaaatagaattaagtattaaatttcatcgaccttaccaaagtttaatattttgaaaaaaatgtctaatactatacttctataa

SEQ ID NO: 25701 - DNA, 120 bp, synthetic construct
  source 1..120: mol_type = other DNA
tagaaactaaaaaaaaaaaaaaaaaaaaaggaaccatacagaaactctgaagctaaggaatacaacagctcaattgaaaaattcactattggaaatcaccaacagactgtgtaactgccc

SEQ ID NO: 25702 - DNA, 120 bp, synthetic construct
  source 1..120: mol_type = other DNA
aacactgtagaccaattggacctatctgacatatacagaacacttcacccaataatagcaaaatacactttcttctcaagtacataccaagacttttccaggataaatggcatgctagtc

SEQ ID NO: 25703 - DNA, 120 bp, synthetic construct
  source 1..120: mol_type = other DNA
ggcctttataaaagaggcttaagggagtttactttcccttttgaacatgtgaggacaaagagaaggtgctatctatagtgaatatagtgacctcaccagtcactgagtctgttgtagcct

SEQ ID NO: 25704 - DNA, 120 bp, synthetic construct
  source 1..120: mol_type = other DNA
ggacgttaccgccaaccacacagaaatacaaaaaactctcagagactacgatgaacatcttcatgcaaacaaagtagaacacctatgagaaattggtaaatttctggaaacatacaactt

SEQ ID NO: 25705 - DNA, 120 bp, synthetic construct
  source 1..120: mol_type = other DNA
atggaagccaaactatgcctcttcataggtgaaacacttttataccaagaaaaccccatagtagcctctcaagagctcccagatctgacaaatgacttcagcaaagtttcaggttacaaa

SEQ ID NO: 25706 - DNA, 120 bp, synthetic construct
  source 1..120: mol_type = other DNA
cttgaaagcattgtaaaataattaaatagaacatctagaaaaaactgtaaaatttactcaactaaaaaaaaaaccactaagtacccaaacagcagtctagacatggctgaagagagaaca

SEQ ID NO: 25707 - DNA, 120 bp, synthetic construct
  source 1..120: mol_type = other DNA
tgctctcagcccctggcatccagcccacacctggaggttgagctgcacccactgctctgggtctcagccctgtgatcacctcagtagatattctgagcttggctatgcaggcaacactga

SEQ ID NO: 25708 - DNA, 120 bp, synthetic construct
  source 1..120: mol_type = other DNA
tgccagattaaaactcagtaaggagctcagtggcaggagaatcaaacctaagtttgcagaggttcaggtggtaatccatcacatgcaccacaatgccttatggtttggaagcttaatgat

SEQ ID NO: 25709 - DNA, 120 bp, synthetic construct
  source 1..120: mol_type = other DNA
accaagccaaaagtaagtaggatgtatgaaataaaaaggtcacagtggaaaacgataaatacagaacaggataacattaaaaacaaccaaagaaactcaaaattgcttatttcggaaagt

SEQ ID NO: 25710 - DNA, 120 bp, synthetic construct
  source 1..120: mol_type = other DNA
ttgttagccttgtatacagaaaatcctaaggaacacacccacacacacacacccacataccacaccccctcccagacttactagaactaagagggtggcttagcaagtttgtagagtata

SEQ ID NO: 25711 - DNA, 120 bp, synthetic construct
  source 1..120: mol_type = other DNA
cgactgcgtgccaccaaggtttatggtttgtatcttgtggaatggcagcctgagccatacctgggtatgattgtgccatggctggggtggctgctgagggctgtgccagaatttggggag

SEQ ID NO: 25712 - DNA, 120 bp, synthetic construct
  source 1..120: mol_type = other DNA
ctcaacaccatagcctcctccctgcaaaaggagcattgaaggcaccacaacagctggagatacagcacctaaaacaaaactaggcagacagcattttaaacatttatgataacatcttac

SEQ ID NO: 25713 - DNA, 120 bp, synthetic construct
  source 1..120: mol_type = other DNA
acactgtttttcaaaatgtagccatagacaacttgcttcagactacttaggttgcctaaaaagatatatttattagtggtatagaaggcctaatgagggtaggccccaggatgctggctt

SEQ ID NO: 25714 - DNA, 120 bp, synthetic construct
  source 1..120: mol_type = other DNA
cttacaagcaggataaaggaggaaagtggggacatgtaatgtagcccttacaaagttacattgcctatttttagcagttaagaatctaactacgtaggcaggatggaactgcatgtcctc

SEQ ID NO: 25715 - DNA, 120 bp, synthetic construct
  source 1..120: mol_type = other DNA
ttggttggcttaccacacaaaagccttttatctcataatacgtaaataatacaataatacaattcagtggtactggtaacacattcaaaagctagcagaaggcaagaaataactaagatc

SEQ ID NO: 25716 - DNA, 120 bp, synthetic construct
  source 1..120: mol_type = other DNA
ttcaacatgagcaagatgttatataaggcgggttgaaattacaaaggggagagagatactgttcatgtaagagggccatgtttttgaagctctcctcgctttaggattcgtttgtaggtg

SEQ ID NO: 25717 - DNA, 120 bp, synthetic construct
  source 1..120: mol_type = other DNA
aaatatttttagaaaataatgactgaaaactccctaaatttgatgaagcacattaatccacaaatatcaaaagctcaacaaactgaaattatgataaatgcaaagatctgcacctaggca

SEQ ID NO: 25718 - DNA, 120 bp, synthetic construct
  source 1..120: mol_type = other DNA
atgttgctgtaaaaaatatacctcaaaagtatttaaacaaagtttaatcaatttgtcctattttggagtccacattgttttgcatgtatctcagagtcattatattttaaaagtgttcat

SEQ ID NO: 25719 - DNA, 120 bp, synthetic construct
  source 1..120: mol_type = other DNA
ggagctcttcaatcacagtggaaaataaagtcatggttctggatgagattggttggggacaggaaataaagaagaagaaaacaggcccagaacttagtataaagcaacttttgcatttaa

SEQ ID NO: 25720 - DNA, 120 bp, synthetic construct
  source 1..120: mol_type = other DNA
cgaagaatagtttttaattttataagaaatgccctataaaaaacactttctttacctcaagagtgagacttggcaaccataccaatattacatagtaattttaaagtcaaacgaaatgga

SEQ ID NO: 25721 - DNA, 120 bp, synthetic construct
  source 1..120: mol_type = other DNA
ctatgcaaaaagaaggtggggaagaaagtgttccgcaatttacatttttaaacactggttctattattggacgagatgatatgtaaatgtgatcccccccccccgcttacaactctacac

SEQ ID NO: 25722 - DNA, 120 bp, synthetic construct
  source 1..120: mol_type = other DNA
caaatataaccccatctacttcacggttctcttctttcaaataccttctcttactctgagcaatctcctaagtaactttcctagagaggttctgttctttcccagtcttcccgttactgc

SEQ ID NO: 25723 - DNA, 120 bp, synthetic construct
  source 1..120: mol_type = other DNA
acaaagagagaacattaaaaattttaccttttattttttccgttacctcccttataagaataccttagatgttttcccccgacaaaaaaaatgttgagtctccatcatacatctacctat

SEQ ID NO: 25724 - DNA, 120 bp, synthetic construct
  source 1..120: mol_type = other DNA
tagaatagaatagaaaagtttctttccccagatctctgcaagagcagatttttatcactgaagtctctgttcgtcttttttgggagtccctccctgaccatccgacctaaagtgatgtag

SEQ ID NO: 25725 - DNA, 120 bp, synthetic construct
  source 1..120: mol_type = other DNA
gtcttgaaaaatatgccccttgattgttaagtggagaagtacatagacatcagtttgtgtatttaagggagataatggaaaatgttgatttatctcatgacttcaataccctgtctttac

SEQ ID NO: 25726 - DNA, 120 bp, synthetic construct
  source 1..120: mol_type = other DNA
taactggtagtttcatctgaccagagaatgatgagattatgggagtaaaggagtggcaggaagtgagctcaaccagatgatgaagtctcaatgttaaaaatctaggaaggggaacatcac

SEQ ID NO: 25727 - DNA, 120 bp, synthetic construct
  source 1..120: mol_type = other DNA
aaaaaaagacataagaataccatgtttaatcagaaagtagagatacggtaggcaattaaaaatatattttgttgattctaattctattagaattcatagagttcagttgaaatatgagga

SEQ ID NO: 25728 - DNA, 120 bp, synthetic construct
  source 1..120: mol_type = other DNA
ttgttgatgatgaaataaaagtacatgcttgaaacttgcttgtacgcagtaataatacagaataccataatgggggggggggggcggaaatggaccataggcaatacctaggtacaattc

SEQ ID NO: 25729 - DNA, 120 bp, synthetic construct
  source 1..120: mol_type = other DNA
aaatgttcccattttaatgtagaacctatacacaagaaggcaggaagcattttatccctcaggtgtgctggtgcagagagacaatgacttgagaaaaagctggccccaaatgattaccta

SEQ ID NO: 25730 - DNA, 120 bp, synthetic construct
  source 1..120: mol_type = other DNA
ccaagagtaataattctttagaaaatttagctgaccatgtctattaaagtaaaataattgagaatttatttagaattgtctgcatttcaaaactttttttgcagtttctatgacctacaa

SEQ ID NO: 25731 - DNA, 120 bp, synthetic construct
  source 1..120: mol_type = other DNA
atgctctttacttttagaaggcttaagtgctttcgaattgtaaggtaaatttagatcagtgattgtatttgagcaaattgtcattattcttaaaggatctaactaggggtgtggaaagct

SEQ ID NO: 25732 - DNA, 120 bp, synthetic construct
  source 1..120: mol_type = other DNA
catgtgtatatatatgtacatatatgtacatgtgtatatatatatataactggatactatccagccattacaactgatgacacagacctacattcacataaagatgagcacacgtaatac

SEQ ID NO: 25733 - DNA, 120 bp, synthetic construct
  source 1..120: mol_type = other DNA
tgtattaggatactagtggttgatagtacactcaatcctaaatgcctgcactacagatacagaaaaaaagctaactactcactttcctgacttgcctccctgcagcaatgagtggccaga

SEQ ID NO: 25734 - DNA, 120 bp, synthetic construct
  source 1..120: mol_type = other DNA
actccagaggaaaataagtggttcatctaaaacctggtggatatttcttttttaaaaaatttgaaagagacagagagcaagaatgagcatggagattattatgggggggggggggttcaa

SEQ ID NO: 25735 - DNA, 120 bp, synthetic construct
  source 1..120: mol_type = other DNA
atcatgctgctataaagacacatgcacacattttggctactattaacatgaggaacattttcgtgcagatagggtttttgttttcttttttcataatagggattgtttccttgggatgaa

SEQ ID NO: 25736 - DNA, 120 bp, synthetic construct
  source 1..120: mol_type = other DNA
aacctaatatgtataaaccagaagtaatttctaaagaagatttcttccactgctcaaaggaaacaaatcgagatgccttgaggcacagcaaagctagccccaacggtgtgagctggctca

SEQ ID NO: 25737 - DNA, 120 bp, synthetic construct
  source 1..120: mol_type = other DNA
atctcaaggattttggcacacttggttacttctccactcttgagttcctcagttactctgatctcatattttaccacgtgacactaacagtatatggaaccaagccccttttgcacagaa

SEQ ID NO: 25738 - DNA, 120 bp, synthetic construct
  source 1..120: mol_type = other DNA
gtagctcagcctgaagtgaggatggaagggagaggcctccggaaaaattctctttctttttttttttttaaggagagatgtatggtctttattaaggttgcgtgatccaaaccagatccc

SEQ ID NO: 25739 - DNA, 120 bp, synthetic construct
  source 1..120: mol_type = other DNA
actatattggacagcatagagagagatttccatcatcacagaagttccatagaatagcattgttttggtatgactgtgggagtgaatagctgaggagaagagcagaaaaggtttatttga

SEQ ID NO: 25740 - DNA, 120 bp, synthetic construct
  source 1..120: mol_type = other DNA
agatttagcacttcctctcttcccttgactcggtgcctcacaaagccttaggaaaagacacagatgtctttatttaggtcttcttaaacttcttttttttttttttaatttattttttat

SEQ ID NO: 25741 - DNA, 120 bp, synthetic construct
  source 1..120: mol_type = other DNA
tttccagtttggatgccctttatttcattctctggtctgattgctctagttaggactatcaatactatggtaaataacagtggtgaaagtgggcatccttgtcgtgttccagatccagga

SEQ ID NO: 25742 - DNA, 120 bp, synthetic construct
  source 1..120: mol_type = other DNA
ctcacccacgtaatgctttctgctacattatgatgcagcaagaaggcccttgtcagatgctggtgcattgatcttggatttcccagcctccactaacaaatttctgttccttataaggaa

SEQ ID NO: 25743 - DNA, 120 bp, synthetic construct
  source 1..120: mol_type = other DNA
acaaacctggcttctagacccagttttggcacttactgttacatgatgcagggcaagtgaccctcctgaaacgtgaatttcctcatcgtaaaatgagataatatctcctattttgcaaga

SEQ ID NO: 25744 - DNA, 120 bp, synthetic construct
  source 1..120: mol_type = other DNA
agtagcagcagtcaccgtaacagcaatcaagcccattattactgcaattaatgtaaaaataaatcgtttactccttttaagaattttctttagaatattattaataacatcgatagaaga

SEQ ID NO: 25745 - DNA, 120 bp, synthetic construct
  source 1..120: mol_type = other DNA
aggctggcggtgatggggactaaagagagacatggtttaacaggtgggcatggactacagcttatagggcctttgaggatcctgacacagagatagtaataattatacaattcattttat

SEQ ID NO: 25746 - DNA, 120 bp, synthetic construct
  source 1..120: mol_type = other DNA
tgagtttaagatgggacatcaaagaaagaaaatgcaaactgatatgaaagcaagaggttaggcaatgtatgtgcatgcgttggagggatgtggggaggggaaatcataaccactggaata

SEQ ID NO: 25747 - DNA, 120 bp, synthetic construct
  source 1..120: mol_type = other DNA
gatctggactgtggcatctctcccgccttccctgtcgcgcagacatcaccctgtgcacacacatatgttctgtgttatataatctatataaaagatgcctatgtagccgcggttcacaca

SEQ ID NO: 25748 - DNA, 120 bp, synthetic construct
  source 1..120: mol_type = other DNA
gggggaagtcctctggtgtcagttagacctctggagtctaatagcacccacctgactgtgattttgtgaggaactaatgctttggaatatatgtgtttaatagtttattgaacaaatggc

SEQ ID NO: 25749 - DNA, 120 bp, synthetic construct
  source 1..120: mol_type = other DNA
agctggttgtactttgaagttctttgactccaaaagtatacttactgtgcacaaagagcatgggttgatgtatacattataatttataaagctattcacttctgataaaagaatactgct

SEQ ID NO: 25750 - DNA, 120 bp, synthetic construct
  source 1..120: mol_type = other DNA
ggacacaagaaatcctccctctcagcatcctgagtagctaagactataggtatgtgccaccactacaggctaatatttttatttttattttatctaaggttctcgctatgtgcccaggct

SEQ ID NO: 25751 - DNA, 120 bp, synthetic construct
  source 1..120: mol_type = other DNA
tatcgtatcctctcaagattcccttgcagggcaggaattaagctgaaatattttgtgatggtattagaagtgagggacttgaggtatatttaggtcattcacattcaaagtccagactgg

SEQ ID NO: 25752 - DNA, 120 bp, synthetic construct
  source 1..120: mol_type = other DNA
gtagtcactgacctagtagcccgctatctatacacacatgtgtacatacacatatacacacgtacacacacatttgtgtacatatacatacgtgtgtataaacacaaacacatacacata

SEQ ID NO: 25753 - DNA, 120 bp, synthetic construct
  source 1..120: mol_type = other DNA
tcttccccatccccaattgtactgggacaaatagggcctacccatccataaggcaatttatacttctggtccagaaatcctctggaggaaaaaaaaaaaaatcagggtagcaatgcaagt

SEQ ID NO: 25754 - DNA, 120 bp, synthetic construct
  source 1..120: mol_type = other DNA
atacagctgtatgtaatggagataataaggctagactgaatcgccagtatgatcagatcaacttacttttgctataagctgaagatctttccttccgacttagcttaagataaagtttgg

SEQ ID NO: 25755 - DNA, 120 bp, synthetic construct
  source 1..120: mol_type = other DNA
agaaaaagatcccttccacctacctcatcatctctgtgtacactaagctctcccaagagcactctgtgtgacttaccgtgatgacaggtttttgtgtctgttttaatcgtatttaccata

SEQ ID NO: 25756 - DNA, 120 bp, synthetic construct
  source 1..120: mol_type = other DNA
tctaacaaaaatgttagaaagttctgtagaacttctaacaaaaatgttagagttgaaatttaaacaaatacagcacctctcaaattctacaggaacatatagatatcacctatatgtgta

SEQ ID NO: 25757 - DNA, 120 bp, synthetic construct
  source 1..120: mol_type = other DNA
ggtctctggaagactcattctaccagtccacacaatttgtctaagtctgggcttaaattcaagctaagacctactccattatactttgcttcattgtaaagtaccatatgccttgggcaa

SEQ ID NO: 25758 - DNA, 120 bp, synthetic construct
  source 1..120: mol_type = other DNA
ttaaaattaaaggcatggcggtggaatgggtattgtattaatgagacagaaagatgccaggaaacaattcgagctgttaaagcacagcaaaattattcatctagcacctaggggcatctc

SEQ ID NO: 25759 - DNA, 120 bp, synthetic construct
  source 1..120: mol_type = other DNA
ttctttgcagaggaaacgttccaaaaaccactgcaaacatcagtattctcattaaaggcagtaacaagaaaaggattcctgtttgcgatactatttgacattgcaatcaatccctagcca

SEQ ID NO: 25760 - DNA, 120 bp, synthetic construct
  source 1..120: mol_type = other DNA
agcatttcttattccattttctttgtattttccctctcatttttgcttaggcagattaaggagcaagttcaatgactgtctggggcagtgatttcaagtgatgctccagaagcccttgtg

SEQ ID NO: 25761 - DNA, 120 bp, synthetic construct
  source 1..120: mol_type = other DNA
gaccatcgcttctttaccatttctttctacatcctaccacggtttgaataagaatagaggccaggcttatcttatccaaggggtggatggaggaagaaattatgccctctagatatgtta

SEQ ID NO: 25762 - DNA, 120 bp, synthetic construct
  source 1..120: mol_type = other DNA
taagagacacgtgctgatatacctggaaattaaaaaggtcagctcttcttcctgggattaacattgacattcaattagaagatgaacagatgttccatagatatttcatagatattcttc

SEQ ID NO: 25763 - DNA, 120 bp, synthetic construct
  source 1..120: mol_type = other DNA
aagctggagatgtaaagcttcatctatatagtagtactatgctatgttgttagctatgtgggggtcagaaaattgaggatgacaatgtttagaagagactaataatttcattccagttac

SEQ ID NO: 25764 - DNA, 120 bp, synthetic construct
  source 1..120: mol_type = other DNA
aaagttaaaacagaattgggctgcgatgctgggtgaaggagcaatcatgtactgtgttctcagaaagatgttgtaaaagtgtgtcaggacttccctttctagaatcaaaccacaggaaga

SEQ ID NO: 25765 - DNA, 120 bp, synthetic construct
  source 1..120: mol_type = other DNA
gttccatatctctatgttccatatctctatgttccatatatacattccacgtctatacacgttccatatatacacgttccacgtctatacacgttccatatatatatacgttccacgtct

SEQ ID NO: 25766 - DNA, 120 bp, synthetic construct
  source 1..120: mol_type = other DNA
tatgtgcttttctctaaaattcatctgaaaggaaataatacattgacctaatgggaagttttatgtttctttttttgttcgctagttctggaacacattctaataataggagacccttcg

SEQ ID NO: 25767 - DNA, 120 bp, synthetic construct
  source 1..120: mol_type = other DNA
ggataattttttaatttctaacccctatgctcacaaatctccttgcaagtcttccctatcagtaaatgacattaatgtctcaggcttggggattagacccaagtactccatggctccagg

SEQ ID NO: 25768 - DNA, 120 bp, synthetic construct
  source 1..120: mol_type = other DNA
ttattttccaccctcagctgtgcctggtgtcctgtagggtaaataaacgatatttacatggctgtgggaaacaggaaatggcattgagagggtctactgtgtttttagactttcaacaac

SEQ ID NO: 25769 - DNA, 120 bp, synthetic construct
  source 1..120: mol_type = other DNA
ttgagctggattggggaaaaagttcactcaatacttatcatctgcctactttatggaggttactcagtgctagatgcagaataaatagtattttgaccgagtctgggaaatggggtgggg

SEQ ID NO: 25770 - DNA, 120 bp, synthetic construct
  source 1..120: mol_type = other DNA
aagcaaatgaatatgtaattgctgaaggtatgtgaaagtggaggcccatgtgccaagttcccagctgtctgggtaatgttgaagcaggctgaagtcctgatcatttgttctgtgctatta

SEQ ID NO: 25771 - DNA, 120 bp, synthetic construct
  source 1..120: mol_type = other DNA
aatttttggggggataattttcaaatcctacatcaatagaccacccaaaccctctagataaattcaaaagcgtctgatacctaggaactctgagatacccaccctcgtttggactcagag

SEQ ID NO: 25772 - DNA, 120 bp, synthetic construct
  source 1..120: mol_type = other DNA
ttttgtggtgtataaatcttaataaaactgctatgaaaaattcacaaatgccccctgcatttatgcccaatctattagtgaaaaaacaaatctcttcatgaccacatatcagagaagcaa

SEQ ID NO: 25773 - DNA, 120 bp, synthetic construct
  source 1..120: mol_type = other DNA
aacaatgatatttaacagttttgttttaatctaagtatcctttctcctaaatgaggatgcccaatattcatggatccatctggatgagggacccttacaccccttccctaagctttacgg

SEQ ID NO: 25774 - DNA, 120 bp, synthetic construct
  source 1..120: mol_type = other DNA
aatgaaagtcacgaccttaggaaagaataaaggtaactgccctgtatagttacggaacatacaacatttacatcactcatgcaaggcattaaccagtctcgctagagatactgatgaact

SEQ ID NO: 25775 - DNA, 120 bp, synthetic construct
  source 1..120: mol_type = other DNA
tgtcagatgagtaggttgcgaaaagtttgcttttaaacaaaaagataaatgtgtcattttttaaaaagataagaacatttttctgttcacaggagttatgatcgaagttccaggagctta

SEQ ID NO: 25776 - DNA, 120 bp, synthetic construct
  source 1..120: mol_type = other DNA
atctacgtaaacaatttgatgtttaaagcatttcatgaggaatttgacttacaggtgttttttttttcttcctttttccaaatgtctttttttttgggggggggggtacaactactgtca

SEQ ID NO: 25777 - DNA, 120 bp, synthetic construct
  source 1..120: mol_type = other DNA
ttgctctcaagaatatcctaaacatatccataggatgtgggatgacctatgaaaatagtctggacaaacatttatcttgtttatcttatgataagcagagttctgagaagtttggtaata

SEQ ID NO: 25778 - DNA, 120 bp, synthetic construct
  source 1..120: mol_type = other DNA
ggcaaataacttttaaatagtttcaacataggcagtagcatgggaattctcctacacttttatgtacccttaaaatatgttcactttaaaaaatgtaaatagttaacaggggcgattgaa

SEQ ID NO: 25779 - DNA, 120 bp, synthetic construct
  source 1..120: mol_type = other DNA
ctttgaacactcagcccttcccactcaccctgtgcatagcacttcacatttttacttgtctgcacaatctgtctgcttttcattggttttcagagtcctcgagtgatttttgtattttgt

SEQ ID NO: 25780 - DNA, 120 bp, synthetic construct
  source 1..120: mol_type = other DNA
aaaacttaaagtataataataatgataataataataataaaaggaaggaaaaaaaagggttaaaactcctttcagaactctttgatgaagtcccatgatcactacctgggtgaggggttc

SEQ ID NO: 25781 - DNA, 120 bp, synthetic construct
  source 1..120: mol_type = other DNA
aataaaaatagttattttttaaaatattcataggttgtattatttatggtgcaataatgggcagtattatagattaagaagagtaaagttaggagagtagccctgccaccaatgagctgt

SEQ ID NO: 25782 - DNA, 120 bp, synthetic construct
  source 1..120: mol_type = other DNA
ccctctacttggctccataaggacaagaattctcatagtacccccatagcactgaacctgatacactgacttaacatttgttgattaattttagaaccttattaaagtacatacagtctc

SEQ ID NO: 25783 - DNA, 120 bp, synthetic construct
  source 1..120: mol_type = other DNA
attaacaacaatgaaacttaacattaatacaatgtgattgtccacaggcagatttttctcaataaagtcctttatagtcgtcccctcccctgctccaaggatccattctgggatcaccca

SEQ ID NO: 25784 - DNA, 120 bp, synthetic construct
  source 1..120: mol_type = other DNA
ttacttcgcttggcctgtttaaatactgtactttggccctgttctcttgtcccacgtgtgcttaagtaaacaaaaatgtattaaccatttcagttgatataagtaggcagacaccttgtg

SEQ ID NO: 25785 - DNA, 120 bp, synthetic construct
  source 1..120: mol_type = other DNA
agcagaggttggcaaactttttccataaagagccagctagtaaatattttaggctttctgggccatatatctgtcgcagctactcaactctgctgttgtagtgtgaaagcagctatagac

SEQ ID NO: 25786 - DNA, 120 bp, synthetic construct
  source 1..120: mol_type = other DNA
tatgagtctagtgtaatctcgattccaaaagcagataaagacaggaaagtaaaattatggttccacttcacttatgaatagattccaagactccttaacttaaagcaacgcgaagcaaaa

SEQ ID NO: 25787 - DNA, 120 bp, synthetic construct
  source 1..120: mol_type = other DNA
gccatgaatcatccctttatccaccatattcacgctgtctacactacctgctcattagtcacttagtggccatctcagctatcagatcaactagtatcttagtgctagtaacccttattt

SEQ ID NO: 25788 - DNA, 120 bp, synthetic construct
  source 1..120: mol_type = other DNA
aagtgtacatacccaaagaaatgacaacacatctacacaaaaacatgaatattcatagcagcataatagcccaaaaaaatagaaacttaaatgtccatcaactgatgcacagataaataa

SEQ ID NO: 25789 - DNA, 120 bp, synthetic construct
  source 1..120: mol_type = other DNA
gtttgagtagttcttaactctgaagtatggctgtttactaagagccctagtcttgcatctaatacctgagatagtgccacattctttgccgtcttaggttgccactgccactaaatgaaa

SEQ ID NO: 25790 - DNA, 120 bp, synthetic construct
  source 1..120: mol_type = other DNA
atcctggagcttgcttctcttctttactaataaatgtcctttgtgactttttttttctcccccgggacagggcacttttgtttgcattaaaaacctgttcaggcagatatcctttctcct

SEQ ID NO: 25791 - DNA, 120 bp, synthetic construct
  source 1..120: mol_type = other DNA
agctgcgctctggaagcgcagatctgttttaaagtcctgagcaatttctcgcaccagacgctggaagggaagtttgcgaaccagaagttcagtggacttctgataacgtctaatttcacg

SEQ ID NO: 25792 - DNA, 120 bp, synthetic construct
  source 1..120: mol_type = other DNA
tgaaagacaacattttaaaaaggaaaattccaccccctaaccctccaaggcagtttccaggaagttctgatataaggtctgttgactctcccagccttccttttctccttatttacttgg

SEQ ID NO: 25793 - DNA, 120 bp, synthetic construct
  source 1..120: mol_type = other DNA
acgtgaatatattcatgccgtagccagtaatttaacaattttattcatccagtctctgcccttggtaccactgctgacccctgcaccccaccacacacaaacaaacacacacacacacac

SEQ ID NO: 25794 - DNA, 120 bp, synthetic construct
  source 1..120: mol_type = other DNA
taaggccgcaatgagacatcactatacacttagcagaatggctaaaataaaaaacagtgacaccaccaaatactggcaaagatttagagaaatggaccatttgtacattgctggtagaca

SEQ ID NO: 25795 - DNA, 120 bp, synthetic construct
  source 1..120: mol_type = other DNA
aaacctctgggtgctccccttttctatgtggcagcttctgctggtatatgtaaccgcacaaaagccaaacaaatgtataacgcataataaaaaaaccaaaaccctttacacaatgtcaaa

SEQ ID NO: 25796 - DNA, 120 bp, synthetic construct
  source 1..120: mol_type = other DNA
gcacaaaatagaagagcgatgaatgaataatacctaataatatcccaaccaaccggccaactgcaggacaagccagttttacaggacttgccggccagtcctttatttttaaacttcttt

SEQ ID NO: 25797 - DNA, 120 bp, synthetic construct
  source 1..120: mol_type = other DNA
tgaaaaggtggggaagagggaacagtcaactctgcatttgtctggcgctcagtaaatctgcactttacataagataaacgtagaggaagatgacaaatatgaccttatcttagggtggtg

SEQ ID NO: 25798 - DNA, 120 bp, synthetic construct
  source 1..120: mol_type = other DNA
ttattaatcaagaagcctaagtgaggtagaccatgcagaagtcctacagttgtccttggtctttgtccaagggcaaaaaatccatttagattcactccaaaccacagtgaccattagctg

SEQ ID NO: 25799 - DNA, 120 bp, synthetic construct
  source 1..120: mol_type = other DNA
tcagctcccagaacacattgtctatactcttaactttggtggcagatcattctgcttagcagttaccaactcttagttctgtgttgcagatcttagctgcaatgcacccaaagaaactat

SEQ ID NO: 25800 - DNA, 120 bp, synthetic construct
  source 1..120: mol_type = other DNA
taggcagaatggagatgaatccttagcattctctgggaagccccttaaggtgaggaatcttaaactagacacagccagctttctgtatggcagattcaaccaataatggattgaacacat

SEQ ID NO: 25801 - DNA, 120 bp, synthetic construct
  source 1..120: mol_type = other DNA
gcgttacatgcaaataatgtgccatttcatataagggactgtagattttggtatccatgggtaggaggggggtgctggaccaattcctcatggatgctgagggataactttattaggaag

SEQ ID NO: 25802 - DNA, 120 bp, synthetic construct
  source 1..120: mol_type = other DNA
ttcaaaagaaagtatgacccagaattgtaggtgactatgtcagataactgaacttgtacttaactttagaagaacacatttccaggccacgtgcggcggctcacatctgtaatctcagca

SEQ ID NO: 25803 - DNA, 120 bp, synthetic construct
  source 1..120: mol_type = other DNA
ttgggtagtatttccagtttaatttttaagagctgaagacctcaaatacttttgcattatcaacaagaaaaaaggaaataggaagaaaataaaaacaagcagggagggattgagggaggg

SEQ ID NO: 25804 - DNA, 120 bp, synthetic construct
  source 1..120: mol_type = other DNA
gtgtcagctattaatgtgattattacccctcctttgatacctcgtttggtctccaaactgcatttgattttcattccttgatacttctgacacctcatctgagagtaatcctcatgcctc

SEQ ID NO: 25805 - DNA, 120 bp, synthetic construct
  source 1..120: mol_type = other DNA
ggcgcgtgggtaagtgttgaatttcaattttttaagtgtgtattttgtactctttctaggtacaggattaaaaacaggccaatgtggaaaaaattgttataattgttataaattgtttat

SEQ ID NO: 25806 - DNA, 120 bp, synthetic construct
  source 1..120: mol_type = other DNA
tcagttttatttttcaaattgagaattttattccatctactattgtgtcatgtagacatttacttgtcccaggaacatttctttccttctttcccgcccccgccccccaccccgagacat

SEQ ID NO: 25807 - DNA, 120 bp, synthetic construct
  source 1..120: mol_type = other DNA
ctacttggcaaagcaaggccagggttgtaacccttaatcagtctccactcttcccacaatgtccctcctgcattgctctcctcctgcttttagcttttcttttttcaataaaagtatgta

SEQ ID NO: 25808 - DNA, 120 bp, synthetic construct
  source 1..120: mol_type = other DNA
tgcaattaaccctatgaggtaggtaatgctatcatacccattgtacagagaaggtaactataacacagaaaaggtaactgagtgactcactgagggtcactgagctagtactatgtgaca

SEQ ID NO: 25809 - DNA, 120 bp, synthetic construct
  source 1..120: mol_type = other DNA
ctaaaatgacactctccagtctcagtacctctgtgcagtgtcagtgcacttcagtcaactgcaccaccttaagaattgttctttatagatatacaatcatgtcgtctacaaacagggaca

SEQ ID NO: 25810 - DNA, 120 bp, synthetic construct
  source 1..120: mol_type = other DNA
ttaaggtcacaggacccctaggaggttgctgctgacatctagtggcatactttttaaaacatcaaattcattaaaaatatagagagctatccctcattacccagtggggtatggttccag

SEQ ID NO: 25811 - DNA, 120 bp, synthetic construct
  source 1..120: mol_type = other DNA
gtaacaataagaatctaattactgccctttaaagaattactacagaaagtccattgctttacttactggtcactggttcagctgaaatgacttattctaacttttgtcttgctaaccttt

SEQ ID NO: 25812 - DNA, 120 bp, synthetic construct
  source 1..120: mol_type = other DNA
aaacctctgggtgatgggcatcctgtttattcccatcacttgacaagaattgcaggatatttgcttagaactagaatattgatccagatttatccatccccttagcttcttctgagctgc

SEQ ID NO: 25813 - DNA, 120 bp, synthetic construct
  source 1..120: mol_type = other DNA
gtcccacttctcaatttccggtttgttgcaattgcttttgaagacttggtcataatgcctagtttcttgagggttattatcaggaggagacattggattttatcgaaagctttttccagg

SEQ ID NO: 25814 - DNA, 120 bp, synthetic construct
  source 1..120: mol_type = other DNA
tcccagttgcctagcatataggaggtacttaataagtatttgttaattataaaataatgctacagtaaagtcagaatactgttaggccatttctgaaattcagcccaagttctagctagg

SEQ ID NO: 25815 - DNA, 120 bp, synthetic construct
  source 1..120: mol_type = other DNA
tttcaaaatattcagagatggggatactttaatctgaggacattaaaatatacagcatttttatgctttgctaggcctagaaaaagtttaatagacttaggtaagacttacattaaactg

SEQ ID NO: 25816 - DNA, 120 bp, synthetic construct
  source 1..120: mol_type = other DNA
acatgttagacatgcaacatagtcaaagaatgcatagattagggtaactatgtcaattataagtaaaaccccatgtagactaatgtaactctgttagggagatgtgtactagcaactgtc

SEQ ID NO: 25817 - DNA, 120 bp, synthetic construct
  source 1..120: mol_type = other DNA
gttttgactgagtacaaatatacatattcctccaagtttcctaactgttcagcaggatgttagggactacctgagtcagaattccaggggttcaggtagagaggtgttttcagtctatgg

SEQ ID NO: 25818 - DNA, 120 bp, synthetic construct
  source 1..120: mol_type = other DNA
ctgattggtggccaaattgatttgagactgaaagttgccacttatgttcttagaaatacttgctttaattcaccagaatcagttgctctgatacaacttcttatagtcacctaagtcaac

SEQ ID NO: 25819 - DNA, 120 bp, synthetic construct
  source 1..120: mol_type = other DNA
tgctggccctcaatattagtctcaccttccggatctcgctgactggttgagatcttgtcagcaagatttctctaatgttttagtacattagtcagcaagcattggggcatattgtacata

SEQ ID NO: 25820 - DNA, 120 bp, synthetic construct
  source 1..120: mol_type = other DNA
ctcaaactcctactttaaatttatgtttttcagttttcaggcactgaaatggcatttgctatggtacttagtacaaagtaaatctgtgtgacctgaattgaattctgtaatttaggtttg

SEQ ID NO: 25821 - DNA, 120 bp, synthetic construct
  source 1..120: mol_type = other DNA
ggaaaaaaaaacatcagaaacattgcccgacttgcttaagttcacacagcagccaagtggcagagctggattttgaattcagacctgtgtaactacagaactgtctgccaaggtctactg

SEQ ID NO: 25822 - DNA, 120 bp, synthetic construct
  source 1..120: mol_type = other DNA
gaatctttggatgtgaaacccaatcaacagtgctacagagattctctgagaaaattcaaacctgcagtcaagatggtgcattcctctagtaatgggctatgaaatcagtccagtgggttg

SEQ ID NO: 25823 - DNA, 120 bp, synthetic construct
  source 1..120: mol_type = other DNA
tgttgtaagagtaacggagccaatcctggaacatcactaggtatggtacaggcaacataacatattctccaagtgcacagattctgcagtggaactgcctaggctcaaactgattcctct

SEQ ID NO: 25824 - DNA, 120 bp, synthetic construct
  source 1..120: mol_type = other DNA
tttgcagttggtgtcaaaatataatctgtaaagataacttgggggaaattcctcaaaagtatacttctcaaatagtctcatagatgttttgaataatcttctagaaaccaaggtgaaaag

SEQ ID NO: 25825 - DNA, 120 bp, synthetic construct
  source 1..120: mol_type = other DNA
cctgtctcttcctttcccttctctcttctcccttcttgcctccctctctctctccatcctctcttctttccttcctttttccttttccttcttcctttctctccctctctgcttatctct

SEQ ID NO: 25826 - DNA, 120 bp, synthetic construct
  source 1..120: mol_type = other DNA
aaatattggctttattcttaagattcctggagaaagcaaggcaatcgtctttttttcatagcaaaaaaaaaaaaaaaaaagaaaaaaaaagaaaaagacttcaccatgtttagtcttcag

SEQ ID NO: 25827 - DNA, 120 bp, synthetic construct
  source 1..120: mol_type = other DNA
gcatagtaagcttaacattttactttgtttcaggcatcagtaagtgtattccattaaacattttgtttaatctttacgcaattattataaggcaagtgccaacattgcctgcattttaaa

SEQ ID NO: 25828 - DNA, 120 bp, synthetic construct
  source 1..120: mol_type = other DNA
catagcaatagaaaaataagacagataacatcagcataacatcaccttgccttttaatacaaagtacagttaacatactattatgtgtattttgtctttttttaaattgtgtgctttaca

SEQ ID NO: 25829 - DNA, 120 bp, synthetic construct
  source 1..120: mol_type = other DNA
cttggtggaaattttgtaccgaaatgaaggctgaaaccccagagatcaaacactgtactcaagtttacaaagctggactcagaccctaacactggctttaaaatgtgtcctaagttagac

SEQ ID NO: 25830 - DNA, 120 bp, synthetic construct
  source 1..120: mol_type = other DNA
caaatttccacaatatgatcccttaaaatcaccaagaatgttcaaaactacatttgataacaacagctcacacaactacttggctctcctagattcctaagaccctaaccagctaataga

SEQ ID NO: 25831 - DNA, 120 bp, synthetic construct
  source 1..120: mol_type = other DNA
accccttcacatcttctggcaggaacacatccagtctctacctgaaaaatttcacttctctctccaagtgaagtatatttaccttgtggtgttatgaaagatgtgtccagcatctggcta

SEQ ID NO: 25832 - DNA, 120 bp, synthetic construct
  source 1..120: mol_type = other DNA
tccagtggctgagctctcatcaagatgtgataagctgctggtttgagttttggttcgctcctgacttgcagctgaaagaagccttatcttgcataagcaaactcttacaaggacacaccc

SEQ ID NO: 25833 - DNA, 120 bp, synthetic construct
  source 1..120: mol_type = other DNA
tgctaacgaatcaataaggacagattttattaggcattcccacattcccatacactcattttgaaagaacatttctgtatttcctgatacaatgtttttgaagtctgaatctagcagaat

SEQ ID NO: 25834 - DNA, 120 bp, synthetic construct
  source 1..120: mol_type = other DNA
aataaaggtggactcttgtcatacatcatatagaaaaattaactgataataaaccaaagatctaaatataagagaagaaatacaaaactcttagaagaaaacatagggagaaatttttat

SEQ ID NO: 25835 - DNA, 120 bp, synthetic construct
  source 1..120: mol_type = other DNA
agcagctggcatagagctgagcccgggtctgagctgaactcagtttgcccacagaccctccgcaccaccgcactattaggtcccctttatctggcccactatttcatggtcacgtgcatc

SEQ ID NO: 25836 - DNA, 120 bp, synthetic construct
  source 1..120: mol_type = other DNA
acaaattcttacgtagaaagaattaggtgagtggtatggtttggatctgtggcatcatccaaatctcatggggaaatgtaatccccaatgttggaagtggggactggtgggtggtaattg

SEQ ID NO: 25837 - DNA, 120 bp, synthetic construct
  source 1..120: mol_type = other DNA
gggtaattccagtgcagtaagagcgacaattattaatctaagtataataagtattttaggatggtggtggaagtggggacacaaaggagacagcggtcaactctacttggagaggtagaa

SEQ ID NO: 25838 - DNA, 120 bp, synthetic construct
  source 1..120: mol_type = other DNA
taaactgggtagaaagcattgaagcaaactcgtaaccattgaacaacaaactttagtttgccaaaactgcttagggactggattaagggaaggctctcctgttatttttatctctttgcc

SEQ ID NO: 25839 - DNA, 120 bp, synthetic construct
  source 1..120: mol_type = other DNA
tgtgatattagcctgaacgactttagaaataacatcatttgccatcttaaatgttggtgtttcttagggttttgttttagagccacagtctccctcacttcctccctcaattcgcattta

SEQ ID NO: 25840 - DNA, 120 bp, synthetic construct
  source 1..120: mol_type = other DNA
gatctaaatataagagaagaaatacaaaactcttagaagaaaacatagggagaaatttttatgactttaaatttggcaattatttttagatatgatatcaaaagcgtaagcagcaaaaga

SEQ ID NO: 25841 - DNA, 120 bp, synthetic construct
  source 1..120: mol_type = other DNA
ttaatttcctcacccctgggatgagatttgaagttgcagaggactcagaccaaagtcccatggcagaaaatgtacatatttttaaactactcccaggaagtaaactagtactgtgaatgc

SEQ ID NO: 25842 - DNA, 120 bp, synthetic construct
  source 1..120: mol_type = other DNA
gaggaagtggaaaatgtgtttaaaattctaaggaaaattattttcaaactagaattccacagctaagcgattcttactgcaaggttatcgcaatcctatgtaggtaatgaataagatgca

SEQ ID NO: 25843 - DNA, 120 bp, synthetic construct
  source 1..120: mol_type = other DNA
gaagacattattcaagtttgacagatattgagatgaaaggcctttgggttggaagcattttaaaagacaacagtgttttaggctgagaattgtttgagcccagtttatgactaaggcatt

SEQ ID NO: 25844 - DNA, 120 bp, synthetic construct
  source 1..120: mol_type = other DNA
aactgcacttagggtccagggcagacaactcttacttcagttcacaattttaaaaatcttgctcctattagaactgcaagtatgtgacctcagtcactgaccatgaggagcaatggtata

SEQ ID NO: 25845 - DNA, 120 bp, synthetic construct
  source 1..120: mol_type = other DNA
tttcttttgatttcttttttaaacatccagatcctccccatcttactggaaaagacaatcatccaaagcatgttgatagtatccagtggctcacgcctgtaatcccagcactttgggagg

SEQ ID NO: 25846 - DNA, 120 bp, synthetic construct
  source 1..120: mol_type = other DNA
accaaagagaaattagaaattttgagtatatggaaccaagaggagcattaaggaaacagaattaaagaggaggctcagtgagccttgggaaggaggccaaggagttgatgctgatgtatg

SEQ ID NO: 25847 - DNA, 120 bp, synthetic construct
  source 1..120: mol_type = other DNA
tggtgagaaggactgagtttggagtggtgagaaggactgagtttggagtggtgagaaggactgtgtttggagtggtgagaaggactgtgtttggagtggtgagaaggactgtgtttcgag

SEQ ID NO: 25848 - DNA, 120 bp, synthetic construct
  source 1..120: mol_type = other DNA
gagcagggcatttcctaacatatctgagctggaagcaaaagtgaacaaggggagtgaaaaatatggagatttttcaggtagagaacgggcaagcagaggcaagttatgtcagagatttta

SEQ ID NO: 25849 - DNA, 120 bp, synthetic construct
  source 1..120: mol_type = other DNA
tctcctccctctgaatatcctttctctcaactgctctgacattatgtaagatttcacaatttgatccataaagaaaagatcagatagaattggaggccttacctgtccaatgatgagagg

SEQ ID NO: 25850 - DNA, 120 bp, synthetic construct
  source 1..120: mol_type = other DNA
gatgaaggaagggaggcaagggttgaaaacctactgggtactatgctcactatctgggtaatgagatcattcatatcccaaacctcagcattatttcatataccctagtaacagtcctgt

SEQ ID NO: 25851 - DNA, 120 bp, synthetic construct
  source 1..120: mol_type = other DNA
agaaatacttcaaaacattgaaaaaaatttgtattcacatcagtgtaaactaatcttccttcacctctccctcacccacttccttccttccctcccttccttccctcccttccttccctc

SEQ ID NO: 25852 - DNA, 120 bp, synthetic construct
  source 1..120: mol_type = other DNA
ggtgtgagtgtgtgtatttcaatgtgccacgcccattttcattcctgacagactgcaaagtaatgggtgtgtctattgtgttacgtcttctgattaaaacacaaggtgggatataactca

SEQ ID NO: 25853 - DNA, 120 bp, synthetic construct
  source 1..120: mol_type = other DNA
tacccccccacgcttgaaaaatgtgctacttcctttagtctccatggtttcagatgggaaatccattgttcgaattggtgttccttacagatcatgtatcatttctcacagcctgctttc

SEQ ID NO: 25854 - DNA, 120 bp, synthetic construct
  source 1..120: mol_type = other DNA
atattccatatgaaccattaattccatttcttgatatatacctgaaagaattgaaagcaggggcctaaacaggtatttgtacatccatgttcatagcagcactgttcacaacaggcaaaa

SEQ ID NO: 25855 - DNA, 120 bp, synthetic construct
  source 1..120: mol_type = other DNA
tttctggaactttactgtttactcagagaaaatgtcttatttatcctttgcttgcctcttctcatttctaaatacaggcatgccttgcacacatagtaagcactcagtaagcatttgctt

SEQ ID NO: 25856 - DNA, 120 bp, synthetic construct
  source 1..120: mol_type = other DNA
gatacaaagtggaaagatctattccatcccattgactcagtgcctgcgtctgcaagccagatctgtagccattgatgttcatgggttgaaccacataaaattgccatcttttaggtaaaa

SEQ ID NO: 25857 - DNA, 120 bp, synthetic construct
  source 1..120: mol_type = other DNA
ctgttcattcaaacatgggaactatatgtttcgtagagcaccaaactggctgcaagtacgtcttcactaactaccccggtcgatactctagaataaccagaccttatgtacaatgtaagt

SEQ ID NO: 25858 - DNA, 120 bp, synthetic construct
  source 1..120: mol_type = other DNA
catacaaggatattaacaattatgaagaaagatatatttgtttccatgcctttccccaaatccttttccttgggcccttccctccaagaatgttgtgcagtcatggcttgctccctggct

SEQ ID NO: 25859 - DNA, 120 bp, synthetic construct
  source 1..120: mol_type = other DNA
cttcaatagatggctggacaacttaacttttctccacatactcagtactcatgactgctaaggcaaagaatactcaaccatttccaccttgttagaaacctttggatccttcaggttcaa

SEQ ID NO: 25860 - DNA, 120 bp, synthetic construct
  source 1..120: mol_type = other DNA
acagagattttatttctaggtagaaagaacaaagaaaaggctaacaccttatccaatgaagatatatctagctatcatgttacctacacctgcatactcagacacagacacccccacccc

SEQ ID NO: 25861 - DNA, 120 bp, synthetic construct
  source 1..120: mol_type = other DNA
acaacctaaactgaagcacaaagtgatgtagatgcttctacaaataggtgaacaaatatttatcaaagtctaaaaaattgttccaggtactaggatatagcagtggcaaaacaaagtcca

SEQ ID NO: 25862 - DNA, 120 bp, synthetic construct
  source 1..120: mol_type = other DNA
ttaagatactttgtcactcctggctcaagactaccacagaaaaccactcagttgggccacctatcacttatctcccatacttgactttagaaaggagttagataatgagcaagaaaattg

SEQ ID NO: 25863 - DNA, 120 bp, synthetic construct
  source 1..120: mol_type = other DNA
atcgggctgggacctaagattagaagattagaatctttctaacaaattcctaggtgataacaatgctactgacccatggacaacacatagagtagacagggccaaaaatacattcctcca

SEQ ID NO: 25864 - DNA, 120 bp, synthetic construct
  source 1..120: mol_type = other DNA
caatttttctcttcccattctcttttgaactggctctcaccagacttttgcccttgctactttaaactgcttctagtgaactctgtgactactaagagccccctaaagaacttattaccc

SEQ ID NO: 25865 - DNA, 120 bp, synthetic construct
  source 1..120: mol_type = other DNA
ctgttttccagtttggatgcccttggctaggacttccagtaactgtattgaatagaagtggtaaaagtaggcattgttgtcctgttccagttcttaggaggaatcctttcaagttttctc

SEQ ID NO: 25866 - DNA, 120 bp, synthetic construct
  source 1..120: mol_type = other DNA
agaggcacttctctcagtacgtaatactagatatcaataccaacttacagagacaactataacaacctaacttgcatttaagcaacacaagatctctatactaaccacttagcatttata

SEQ ID NO: 25867 - DNA, 120 bp, synthetic construct
  source 1..120: mol_type = other DNA
cactcataggtgggaattgaacaatggacttatgttttaaaacattaggtgaaatattttaacaccacttggcagaatagcaaacgttttcattagttgtgtttctttggtgccctcgca

SEQ ID NO: 25868 - DNA, 120 bp, synthetic construct
  source 1..120: mol_type = other DNA
agagagagactatgacccagagccacctagctaagccactctcaaatttcttactcaaagagactatgagaaaaaaaaaagaaatgtttattgttgttctagctgttgtatttttgagta

SEQ ID NO: 25869 - DNA, 120 bp, synthetic construct
  source 1..120: mol_type = other DNA
aaagggataaagaaataaagaaaccacaggaaaattggcagctttagacccataaggctgactcggcctcgtctagatacttagaggaacaaacagcctggaaaaaacactgccatcttt

SEQ ID NO: 25870 - DNA, 120 bp, synthetic construct
  source 1..120: mol_type = other DNA
catcaagaggctttatttaactatcctaattgtttatgatctgaataacagagcttcaaaacacaagaagcaaaaactgagagaactgaaagaagaaacacatgaacccacaatataaac

SEQ ID NO: 25871 - DNA, 120 bp, synthetic construct
  source 1..120: mol_type = other DNA
gggcgtgctctctcagacacacaactctgctataaacagcagaaactctggacacaaacttttatgtaagtcacctgaaataggaatccggcagaagaccttcattaattaagaagcaaa

SEQ ID NO: 25872 - DNA, 120 bp, synthetic construct
  source 1..120: mol_type = other DNA
gtaaatggtgaaggtaaagaaataaatgacccacttgcctagtgtgtaattacactgcctgagattgtaacaatctatcacatgaaggaggatgacaccacgctaaggggtgagtcaaag

SEQ ID NO: 25873 - DNA, 120 bp, synthetic construct
  source 1..120: mol_type = other DNA
cttggttccttttggaaagcaggcaatgcagcaatcttccacaattaacctctggataattactgagcccaccccttagagtgagcacatacctagtacaaaatgaacttaactgtagtt

SEQ ID NO: 25874 - DNA, 120 bp, synthetic construct
  source 1..120: mol_type = other DNA
ttttaaagatccccggaaaggaaaggaaaaagatcagttgttactgccttctcagagagaagtcccacaaaacaaaaaaaaagagagagagagagaaagcatgaccagcagccaatctcc

SEQ ID NO: 25875 - DNA, 120 bp, synthetic construct
  source 1..120: mol_type = other DNA
tttcctggacttgggaggctgctgtagcaagataactagatgatgacttagaagatctgggtttgagtatgattacagacaagaaaatagaagtgacgcccagctttgttattgcacagt

SEQ ID NO: 25876 - DNA, 120 bp, synthetic construct
  source 1..120: mol_type = other DNA
atgtctgtgagaggatttctggatgagattaacattagaattggtaaactcagtaaagcagactgccctccccagtgtggatgggtcttattcagtctattgaaggcttcagtagtacaa

SEQ ID NO: 25877 - DNA, 120 bp, synthetic construct
  source 1..120: mol_type = other DNA
gaactaccctttgtatataactatagtactgcttcttatatctcttttactggagagtaactctctaagcccccccccccttttttttttttttccacgccaataccttgcagaaaccat

SEQ ID NO: 25878 - DNA, 120 bp, synthetic construct
  source 1..120: mol_type = other DNA
tctgggattagcagaagacagccctaatgatataaatggaggttaatgcatcagtctgcagttgttggaagtgaagggtcagagtaaattaagaggggtgctgctcttaactgctcatga

SEQ ID NO: 25879 - DNA, 120 bp, synthetic construct
  source 1..120: mol_type = other DNA
aaagggagcaatcacgtcagtgtcttagtagtcattctgaagcatcatggcattcttatatcagggataattttgaatttggaagggctgactgagtacctaaaactaagagtgctgaaa

SEQ ID NO: 25880 - DNA, 120 bp, synthetic construct
  source 1..120: mol_type = other DNA
aaaccaaacaaatgcagcctcctctgggaggcctttcttcgtttcctgcttctatgttcctataaccctctgtccatacacttctatcatttcatagtgttttgaaattgtaggtcgtcc

SEQ ID NO: 25881 - DNA, 120 bp, synthetic construct
  source 1..120: mol_type = other DNA
ctggctgcaggagcctttagtcatcgcacagggaaatctttctggaaccgggcaccaacttgcgtgtttgttttcatgctctttgtgcggggattagctgtcgtgccgggcctgaaaatg

SEQ ID NO: 25882 - DNA, 120 bp, synthetic construct
  source 1..120: mol_type = other DNA
gctcagcttaaaaatcagcttccatttggtaaaaaccagttcatctgaggaagctgtcatatatctgactctgaaaataaggagaaaaagaaccttggagagcttggacacaccctgcct

SEQ ID NO: 25883 - DNA, 120 bp, synthetic construct
  source 1..120: mol_type = other DNA
acaaagacagtaaatcagtgttcatctattctgttcaggtgctttttagccccttctctcctgtttttcagtatttctttcccttccttgtatgccctctaagcctgggtgcactttcaa

SEQ ID NO: 25884 - DNA, 120 bp, synthetic construct
  source 1..120: mol_type = other DNA
agaacattcactaaaggtgtagcagactagggaaaatcctcctttatttcttattgccttaaatatcaagaaaagcactaaaggatagaagccatgccacagcaggtgttgtgcggggtg

SEQ ID NO: 25885 - DNA, 120 bp, synthetic construct
  source 1..120: mol_type = other DNA
caaatataccatactcatcccctactccaaacatcattatatcatcgtcatctgggtgacctttcagccttgttaccgctggtgacaaaatttagtgggcaggtacacagaattcaactt

SEQ ID NO: 25886 - DNA, 120 bp, synthetic construct
  source 1..120: mol_type = other DNA
tatttactttcaacaaaaaatggactcagggaaagtccctttgaagtgtgacatgatggataagagaagccactcgtgataaatatcggggaagagctttgcttgcaaacagtagtggtg

SEQ ID NO: 25887 - DNA, 120 bp, synthetic construct
  source 1..120: mol_type = other DNA
ctcctactctattgtatgaaggtcccatcctcagggttcatgaattaaatgtgtcagaacaataaacatcacactagtaaaaaaatacctatatttacaggccgtcatgcttctgtgtat

SEQ ID NO: 25888 - DNA, 120 bp, synthetic construct
  source 1..120: mol_type = other DNA
gcccagcagataccaccatacgtaagtgatcaaagctaacatcatcactaataagtaaggctggttgtatgtacctcctgatatgataagggcatatcacctatttggaattcttcccca

SEQ ID NO: 25889 - DNA, 120 bp, synthetic construct
  source 1..120: mol_type = other DNA
ctttcctcccaatgagaattacccatttctgttgtttgctatttataactacttatcaggatttttctctctcttatagtcagcagtcagcagaggaccttgcccgagtacctgccaact

SEQ ID NO: 25890 - DNA, 120 bp, synthetic construct
  source 1..120: mol_type = other DNA
gtattctgccaaattatcatttagtagtgaagaggaaatacatattttcccagacaaacaaaacctgagggaattttttgccggtagacctaccttgcaagaaatgctaaagaagttcct

SEQ ID NO: 25891 - DNA, 120 bp, synthetic construct
  source 1..120: mol_type = other DNA
ttagagatatttaagtaactgtcccagaatcttacagcaataagtagcaaagttaggatttcgactgggtctgatgccaaaatacttccctcagttgttttcctctgccacctctgtggt

SEQ ID NO: 25892 - DNA, 120 bp, synthetic construct
  source 1..120: mol_type = other DNA
catctatatggaaaaaaacccacatttaaactctaatagctaagtatgaaatgtgatgctgaattcatattaattggacacttacatagttgttttagtctaatgagattatttcatcaa

SEQ ID NO: 25893 - DNA, 120 bp, synthetic construct
  source 1..120: mol_type = other DNA
cacatatagttgggatataaagcaaaaaaggaggaagaacaataatcaaactgtctgatttactctatctgacttattcagacacagtcagcctttatcagaattctggtatttgggtaa

SEQ ID NO: 25894 - DNA, 120 bp, synthetic construct
  source 1..120: mol_type = other DNA
cctagtatttctgtgcctgctttcctggtgacataaagcacacgtttaggctctcctaatgtatttagaacagagtagttattgcagcattttattttattgaaggttaaaacaaataac

SEQ ID NO: 25895 - DNA, 120 bp, synthetic construct
  source 1..120: mol_type = other DNA
gttatggagtgtttataggttatgaaaagctacacaaaaggggtaagaggtgtccctcaaattctagtgtggagaaggtaaaggaaagtagattaggcaaaatgagaatagtggtatttg

SEQ ID NO: 25896 - DNA, 120 bp, synthetic construct
  source 1..120: mol_type = other DNA
agtttgagtcaaactgtacccaaaggagcaagataaggcaaataagaatcaaatataactgttaaagtaattaggtgtctttctatattaaacattatccataatctcttgccccttcaa

SEQ ID NO: 25897 - DNA, 120 bp, synthetic construct
  source 1..120: mol_type = other DNA
ataggacagtgcagtgatattttttgggaggtgagacgatccttccagatagcaagaactgcaagaaatcgtggagttcattataagtaagaaatgtgtctctgcctggctttggtatca

SEQ ID NO: 25898 - DNA, 120 bp, synthetic construct
  source 1..120: mol_type = other DNA
aatcactttgcttttccacgtttcagggaagggtgtatatgtgtgacagagaagagaaacacagacacactccaataaaggggaaaatacggccagaaaacatactgtgggacattacca

SEQ ID NO: 25899 - DNA, 120 bp, synthetic construct
  source 1..120: mol_type = other DNA
ctgtagaaagctctattacacagcactgctttacattctcacacatcaaaaaagccctccattacaaaacatattcccaggcattaacaatatcaatttatttctggccattaacacagg

SEQ ID NO: 25900 - DNA, 120 bp, synthetic construct
  source 1..120: mol_type = other DNA
catgtgggaaacaacagaagagaagctacctgatggtgccattcagagaaaaataggaggtcagaaggaggctgacttgggagagattaaatctctcagctatctgtcttattataatgt

SEQ ID NO: 25901 - DNA, 120 bp, synthetic construct
  source 1..120: mol_type = other DNA
ggccctcgccagaagctgagcacatgctggtgctgtgcttcctctacaatctggagaaccaagagtcaatcaaattacttttttttaaattacccagcctcagatatttctatatagcaa

SEQ ID NO: 25902 - DNA, 120 bp, synthetic construct
  source 1..120: mol_type = other DNA
ataaatttatgatggccctaacacattcaggatctctgagggaaacttctaccatcaactaagattgatggagcaaagccagaaatgtgtaagggaaagctcatttgtttgccaggcctc

SEQ ID NO: 25903 - DNA, 120 bp, synthetic construct
  source 1..120: mol_type = other DNA
tagaaagtacaaatcccctatatatcattcaagtttttaattaaaagatgggggtgtaatatcacaatatctagaaaagcagaaataaagccaagtagcaacttgaggggatggaatcac

SEQ ID NO: 25904 - DNA, 120 bp, synthetic construct
  source 1..120: mol_type = other DNA
tgcacacccttgtgtaacatcaatcaaagcttttctgaggcaattagaagaaaggagaacagagtgaactacgatttcatcatcagtccatgtctacaaatgagcagcagtgccaatgga

SEQ ID NO: 25905 - DNA, 120 bp, synthetic construct
  source 1..120: mol_type = other DNA
tctcactcataggtgggaattgaacaatgagaacacatattggatcttaagtcaatccctttataattataccagggccttttaggcatatactcagatcagtgcagcttcctggttgac

SEQ ID NO: 25906 - DNA, 120 bp, synthetic construct
  source 1..120: mol_type = other DNA
cccagcctaggctggtgatgggcaacctgggatggtattaggcaagattgaatgaagtacgtacttctttttataatgccaaaaattgtcatggagccctctagaataaacatctttcca

SEQ ID NO: 25907 - DNA, 120 bp, synthetic construct
  source 1..120: mol_type = other DNA
ttgtataatcataagaaagttaagtgcctaacataaataaggacacaccactaatttttggtggattcagaatcaaacataccattttcatgaatcacaattaagggaagcaatatgtgt

SEQ ID NO: 25908 - DNA, 120 bp, synthetic construct
  source 1..120: mol_type = other DNA
ttcgtattagggacagtgacctaatttgtgtcatccttcagagctcagctaactgtaagaagaaaacttccttcaaggcaggatcagtttggcaattttcctctatgttattacagcatc

SEQ ID NO: 25909 - DNA, 120 bp, synthetic construct
  source 1..120: mol_type = other DNA
tgtgatgcatatatatacgcatgagtcgatttctacaagcatgcatagaatacctatataagacgtatgtgtgtataacaatgcacttgcaatggctagaatgttggcaacttttacaag

SEQ ID NO: 25910 - DNA, 120 bp, synthetic construct
  source 1..120: mol_type = other DNA
atctcaagctcccaagtagctaggactgcaggcatgttccaccatgcatggataatttttgttttgaatattttatatagacagggtatcattatgttgccggcgatgctggtcttgaac

SEQ ID NO: 25911 - DNA, 120 bp, synthetic construct
  source 1..120: mol_type = other DNA
gcatgaagttctcttataatttcacggggccacaaacagaatgcttgagtcagatagtaaaactaacagccacagatgaatccttcactgtataatcagctaagtgtatgcagaaatcac

SEQ ID NO: 25912 - DNA, 120 bp, synthetic construct
  source 1..120: mol_type = other DNA
ttcttcacttatcttcagaaaatgtaaagcagtcatcccaaaagagggaactggaatcatggcggaaggtctttaattactgcttgcctcagaattgggtcagaacctgtccactcttat

SEQ ID NO: 25913 - DNA, 120 bp, synthetic construct
  source 1..120: mol_type = other DNA
ctcatacagtctgtgatgctaacacacatgaaggtaacagtgatgcttggctgggcaacatttgcatatgattgagaagaattcaagtataatcaatcttctggtctagtagagctttta

SEQ ID NO: 25914 - DNA, 120 bp, synthetic construct
  source 1..120: mol_type = other DNA
aatttttctgacaaagccctacataaaaatagtacctatttctcttccttgctcaaaggtacaaaagaagcccagtaaagaagaggacattctccgaagcctgggaactcctggggagag

SEQ ID NO: 25915 - DNA, 120 bp, synthetic construct
  source 1..120: mol_type = other DNA
ataagctgccagccatttactccttaagactcttcagactttttccctgtgtttccagataatcagaatgctgtcataatcactttggttcctggagtaattgcatttaaattttgtcca

SEQ ID NO: 25916 - DNA, 120 bp, synthetic construct
  source 1..120: mol_type = other DNA
agtgttgcattaatgaggttagagaataaaagaaggggaggtggtgacagggcagtaaccacaggaaatgaagcaatgagccagagaaaggaataggaagaaaatgtgtcacatatacac

SEQ ID NO: 25917 - DNA, 120 bp, synthetic construct
  source 1..120: mol_type = other DNA
aaaaaatgtaatcccaggcaatgggaatgaaggacaaggggaatgaaatagggcagcagagatattatgtcgctgttttttcaaaatggtcatggctaaaggtaactgagatcttatcca

SEQ ID NO: 25918 - DNA, 120 bp, synthetic construct
  source 1..120: mol_type = other DNA
cagtgatgatgatttaatctgtaggagggtagaacattgatagttttcatatatctccaggtgattttaacatataaccggggtgagaatcactgacctagttgtaagaagataatattc

SEQ ID NO: 25919 - DNA, 120 bp, synthetic construct
  source 1..120: mol_type = other DNA
gggtgtgtgtccacgataagcactatcacaaggactttctataaactcacaagaaatttctgcccacccagcacactctgtttgtccagcttatcctgtaggtgtctctataataggacc

SEQ ID NO: 25920 - DNA, 120 bp, synthetic construct
  source 1..120: mol_type = other DNA
ttagtgggtcaatattaaaaactgaaacaaactcaatttagagaacctacttctaagattgtgtgctccaacttgccactaaaaacactttccttcttatgatgctcttagaattcatcg

SEQ ID NO: 25921 - DNA, 120 bp, synthetic construct
  source 1..120: mol_type = other DNA
gagggtaggaggcaggaggggatcaggaaagataactagtgggtaggcttaatacctgggtgacaagataatctgtacaacaaacccccacaagtttacctatataacaaatctgcatat

SEQ ID NO: 25922 - DNA, 120 bp, synthetic construct
  source 1..120: mol_type = other DNA
gagttttatcccttcctctctatccttcctgctaaaatcctgacacagagctaaaactcactctgagttttttccagttaccattctcttccttcattctctcctgtacatggagatgcc

SEQ ID NO: 25923 - DNA, 120 bp, synthetic construct
  source 1..120: mol_type = other DNA
gaggcagatggtaaccatatttttttaatttgaataaaaacagctcagggaattttaaattctcatatctgtgatagatatccttaacatttgccagtaattccagttctgacttcacat

SEQ ID NO: 25924 - DNA, 120 bp, synthetic construct
  source 1..120: mol_type = other DNA
tagatccttccaggacataatgatgcaggagagacagaagttatgcccacagctgatggtcactgggtctttcaagtagtccagacagatgggacagctagcctctgctcggaggtcagc

SEQ ID NO: 25925 - DNA, 120 bp, synthetic construct
  source 1..120: mol_type = other DNA
ttgcagttaattcttgcccccctcctcatgggaccctgatttttttggttaattttatgtcctaagtcttgaaagaataattcatgtagcaatgctagtatagccttgtgtgcttaaaaa

SEQ ID NO: 25926 - DNA, 120 bp, synthetic construct
  source 1..120: mol_type = other DNA
aaaaacactgcccagtgacagtgaatccttggcatatgaagaaagctttcaaagtcatgaacgaattaagaaggtatcattatactaatgtacatgcaaccattggtttcgtccctttat

SEQ ID NO: 25927 - DNA, 120 bp, synthetic construct
  source 1..120: mol_type = other DNA
ttttcttagcactttatgaaagatctgctttttcccagcattccgtttgtgaaagtactctacgtatatctatctgaaatgctgaaagcctggctaagaagggattaaaccttcccttaa

SEQ ID NO: 25928 - DNA, 120 bp, synthetic construct
  source 1..120: mol_type = other DNA
ggcggtggaatcacacaggagaggcagctgagtaggtaggaggggccattggactgaggtcctgaaattttggtcttaatcaagagttgccttgagagaaagccagtggagagtgttaag

SEQ ID NO: 25929 - DNA, 120 bp, synthetic construct
  source 1..120: mol_type = other DNA
tccagtcttcattcatctgtttgcccctttttggatgtgaactctataactgtgagatagtaccttcttgttctttgtgtggcaccctttcagcagctgggtctggtatgtcactgggct

SEQ ID NO: 25930 - DNA, 120 bp, synthetic construct
  source 1..120: mol_type = other DNA
cctaacccaggatgtggctgcataatattttagcagtgttttaaccttattagttaactaacatcaactaataagtcagtaaggccaagttaattatgtaagtgacagccagcaggtatt

SEQ ID NO: 25931 - DNA, 120 bp, synthetic construct
  source 1..120: mol_type = other DNA
catggttatgtttgtctaagattcatgctttcattcatcaaggaatatttattgagaatcttctctgctaggcattgtcctaggctttggggactagagtgatgaataaaacagataagt

SEQ ID NO: 25932 - DNA, 120 bp, synthetic construct
  source 1..120: mol_type = other DNA
aaaaactaaggtaataatgtaacaactggaattagatataaataacttttacaatactctttagtatgggctttgattcatagtaattagaatttttaaaccattaatacagtcatgggc

SEQ ID NO: 25933 - DNA, 120 bp, synthetic construct
  source 1..120: mol_type = other DNA
cacgcagttttgtacaccactattgttatttctcttctcccagggttttgtttacaaaggaattttgtgtaattatgatttcccatagacttttctgatagtttatggtcgctgacagtg

SEQ ID NO: 25934 - DNA, 120 bp, synthetic construct
  source 1..120: mol_type = other DNA
ggtgcaggctatgcatgccccggcaggcatttgtgtgtttgttgaaggagtaatgctaaccaggtgggtccttttcagcagctgttcattgctattagccaaaggcagtaacatcgttac

SEQ ID NO: 25935 - DNA, 120 bp, synthetic construct
  source 1..120: mol_type = other DNA
ttcaggattagtggttgtttatgatataaccatgggtacttatatcattgtaatgaatttatctgacattctagcacccagaaatcagttaccttgatattttatcactttacctggtta

SEQ ID NO: 25936 - DNA, 120 bp, synthetic construct
  source 1..120: mol_type = other DNA
tatggtccttgaagatgtctccatggctgaatcattttgagagtcacgttttaagtagtttcatgtggtacataaaaggcatttatcttgatgaacaaaaaaatgactccatcctgatta

SEQ ID NO: 25937 - DNA, 120 bp, synthetic construct
  source 1..120: mol_type = other DNA
ttgagcatttataacctcaggtctcttcccaataaatctcccactccctttccaggcaaccattgatgtgatttctattataataggttagttttccctgttcttgaacttcatataaat

SEQ ID NO: 25938 - DNA, 120 bp, synthetic construct
  source 1..120: mol_type = other DNA
aaagatatgctaagggccaaggcttactgtactttagtttgaatatatattgtctggaaacattttgttgtttgaattgggaggtgctagaaagaaaagtaaaaacattttgtattgtag

SEQ ID NO: 25939 - DNA, 120 bp, synthetic construct
  source 1..120: mol_type = other DNA
cgttcccgtttcaccacatccacaccaacatctattgttttttcacttttaataatagctattctggttagggcaaggtggtatctcgctgaggttttaatttgcattttcctgatgatt

SEQ ID NO: 25940 - DNA, 120 bp, synthetic construct
  source 1..120: mol_type = other DNA
ggtggcctgatggcctaactgccctttagaaaattatttcagtgaaaaaatgtgatctgagttctaggaagccgatttacagatgagcttttagaacacaacccttctgtaagttgggga

SEQ ID NO: 25941 - DNA, 120 bp, synthetic construct
  source 1..120: mol_type = other DNA
ccatgcttctgaatcttgtatttgcttgagtttcttaggttttaggtaacattttaaaacatctttcattatgaaaaattgcaagcatgtacaagaatagaatagtactcatgatccaac

SEQ ID NO: 25942 - DNA, 120 bp, synthetic construct
  source 1..120: mol_type = other DNA
cacttggccagttgcatctaatagacatctatagaatattcctcccaacaactaaagaatatacattcttctcatctccacatggaacatacttgaagatcaaccacatgcttggccata

SEQ ID NO: 25943 - DNA, 120 bp, synthetic construct
  source 1..120: mol_type = other DNA
agtggtctttcctctgagtctaaactgcatggcaaattctgtggcgctgaagtgcctgaagtgatcacatcccagttcaacaatatgagaattgaattcaaatctgacaatactgtatcc

SEQ ID NO: 25944 - DNA, 120 bp, synthetic construct
  source 1..120: mol_type = other DNA
gacctgccaccatctgccttcatcgctgccaactttctactttcatttccccaaatgttcattcctatattccaagttctttccaaatcaagctatgtgtttttcccaaattcaatgctg

SEQ ID NO: 25945 - DNA, 120 bp, synthetic construct
  source 1..120: mol_type = other DNA
tcaagctacacactactccacatgggttacccctggtaagctgcagacctcacgaacctcagtttcctaaatagcatcagatgcaatgtcagtgttttgaactattttaaaaatttgctt

SEQ ID NO: 25946 - DNA, 120 bp, synthetic construct
  source 1..120: mol_type = other DNA
tgggggcttgaaaaatttacaatttcacaaacttttgggaatttgttaattttcagaagatatttaatgctcatatctgtgaatcaccatattagaaaatggtaatacaaaggtaaaaga

SEQ ID NO: 25947 - DNA, 120 bp, synthetic construct
  source 1..120: mol_type = other DNA
taaagtataaaaataataataataataattaaaaaaaagaaatttgaatttcttctcctggcaaaggggattccagagaaaccttgaaaactgaggtgctgccatgataggataggaggt

SEQ ID NO: 25948 - DNA, 120 bp, synthetic construct
  source 1..120: mol_type = other DNA
tggacaaacaggtcttgctaaaccactccccacctatttatgaacattaggtcatacccttttgtctaatcacacttctccctgactaaccacctcttcaccaaacctagcacaaaaaaa

SEQ ID NO: 25949 - DNA, 120 bp, synthetic construct
  source 1..120: mol_type = other DNA
gcatgtatgcatgtctccatctaccttcctacttatcgatttctctgtctctatccatacatctatctaccatctatcttcatactaatacctccaatctaatcaacaacaccgttctaa

SEQ ID NO: 25950 - DNA, 120 bp, synthetic construct
  source 1..120: mol_type = other DNA
gagctgtcatggcctcatcacctcccagaggctccaccttctgatcccatcaacttgataattaggttttattatagatattggaaaagacaccacattcaaaccatagtacagggtaat

SEQ ID NO: 25951 - DNA, 120 bp, synthetic construct
  source 1..120: mol_type = other DNA
gtttacagaatatggagagggtgagaattttgttaaaactagtaaaatttgctacattttatgcagtcagtttattcaagtgtttgtcatttaagggaattaaatgccagaggtccaaaa

SEQ ID NO: 25952 - DNA, 120 bp, synthetic construct
  source 1..120: mol_type = other DNA
agaataaaaataaaataaacatgtgggtaaaaataaaaaaaaaaaaaaaaaagaggttataaaacccagaagtagggattgaaaccaccattgcaaaattatgactgaaacggtgaaaga

SEQ ID NO: 25953 - DNA, 120 bp, synthetic construct
  source 1..120: mol_type = other DNA
aagaaatttaggggtagctctttcatttaaccaagcagcttgatagcttctgtatatgcacaggttggcctggagctgagtttgagagtaaggaacagagaaagacgaattactgtgtgt

SEQ ID NO: 25954 - DNA, 120 bp, synthetic construct
  source 1..120: mol_type = other DNA
ggatgtaattgtttgttaaatgcaaagaactaactgctgggcattctaggagtccgtacatgaactgttttacgtgggtttctgcaattccatagagtcgaagacaccaataggagctgt

SEQ ID NO: 25955 - DNA, 120 bp, synthetic construct
  source 1..120: mol_type = other DNA
cttgatgactttcctgcttcactcaccaccgtatcatgtacttatttctcttctgtgtcctcacaagatcagaggggtatgtgtgtgtgtgtgtgtggtgtacgtagtggatgtgggtat

SEQ ID NO: 25956 - DNA, 120 bp, synthetic construct
  source 1..120: mol_type = other DNA
atcccccttacttatggagtgcacaccattagatgtgcaggtgaactcagctctctgacttaaggttacatgacttggaagtccaagaagttctggcagatagaggtagaaaatgaagtt

SEQ ID NO: 25957 - DNA, 120 bp, synthetic construct
  source 1..120: mol_type = other DNA
ggaccctgagagaatcactttgaacacccaggattcattgatattgagcctgaagaaatgagggatttgacctaatcaatctcttacagtactgatcttgtatgtccccttctatggcta

SEQ ID NO: 25958 - DNA, 120 bp, synthetic construct
  source 1..120: mol_type = other DNA
tcaaggagcatctgtataggctttggggtcaggcatcagctggaatcctgactctacctctttagttcagctatgaccttgaataagtcacttagactctttaagctttagctttattga

SEQ ID NO: 25959 - DNA, 120 bp, synthetic construct
  source 1..120: mol_type = other DNA
acatcccccacttgtgcatagttgaaatccctagtttctctcaccaagaaatactacatgctagactcacagatccatgggctgggcctgtgcaaatggatttcttagattaaaagtata

SEQ ID NO: 25960 - DNA, 120 bp, synthetic construct
  source 1..120: mol_type = other DNA
ggaactctagggacaaagttcaaagtagtcttcgcaatcaaggaattccactccaaaacacatctgtgtgggaggatgctgggtgtgtgaatccagcagataaattctatttaatcttat

SEQ ID NO: 25961 - DNA, 120 bp, synthetic construct
  source 1..120: mol_type = other DNA
tacctgaatactagttaaattacttaactctgctttcctgctccctcccacctcaccccaaatcacattgcctcagaaagaagggtagagagtatttaagtgagaccaactgagtttgaa

SEQ ID NO: 25962 - DNA, 120 bp, synthetic construct
  source 1..120: mol_type = other DNA
tgtgatttatttagggaaagcttgccacaatctctccccagacctatgaatggatacttggaataacaaatatcaggggacagctgctagccatcactgaactctgcactaaaagtaaag

SEQ ID NO: 25963 - DNA, 120 bp, synthetic construct
  source 1..120: mol_type = other DNA
aaaaatgtaaagctagtctctaatgataaattactctgggctgtatggaacttccatgtcattttatattaaaggttatgaaccacgtgatcttcatttataaatatattcacaacccag

SEQ ID NO: 25964 - DNA, 120 bp, synthetic construct
  source 1..120: mol_type = other DNA
ttgactgagaggaaaggcaaagatgacccaaaatatacaaagtggaaattcccaaagactggagaaaaaaaaacagaatactagatgcccggtatggtggcacatgcctataatcccagc

SEQ ID NO: 25965 - DNA, 120 bp, synthetic construct
  source 1..120: mol_type = other DNA
gcaaattagatcctggtggttagtgatggtgtttagctattctatatccttgctgattttctgtctagtagttctatcaattgctgagagcaggatgttcaagtctcaactgtaattgtg

SEQ ID NO: 25966 - DNA, 120 bp, synthetic construct
  source 1..120: mol_type = other DNA
accggagctgttcctattcggccatcttggttcctccccctgcaataacttcttagtgcatgattcttttgttaccttgtctctttttatctctttgtccttagtaacttaattttgctc

SEQ ID NO: 25967 - DNA, 120 bp, synthetic construct
  source 1..120: mol_type = other DNA
acatgcatacaatgtgtaatgatcaaataagagtaactgggatatcgtcagcagctgcttttaaacattaagaataaaagctctctccctctccctctccctctctccctccctccctct

SEQ ID NO: 25968 - DNA, 120 bp, synthetic construct
  source 1..120: mol_type = other DNA
tttacacgcgaagtggggatacacagtgcagtccccatgtattttaaactgtaactgagtgggtatgtcaagcttatgcactgaatgttcatgaagctgcattgcttcagcacaaataaa

SEQ ID NO: 25969 - DNA, 120 bp, synthetic construct
  source 1..120: mol_type = other DNA
atccacataccatgtcattactagagtcagctgactctgaaagatctaaaacatattccatgtcttcgttgtgtcaacagtgtgaaactcaagtcctacgcaggacctaggtgattcttc

SEQ ID NO: 25970 - DNA, 120 bp, synthetic construct
  source 1..120: mol_type = other DNA
ccacagtgatgatgatcatatttttaagacatttatacagggtagaaattatactttgaaactactgtatattatttaagccatagatgatccagggttataaaagagagaaactcagca

SEQ ID NO: 25971 - DNA, 120 bp, synthetic construct
  source 1..120: mol_type = other DNA
tgggtacatagtaggtgtgtacatttgtggggcacatgaaacattttgacacaggcctgtaatgtgtaatgatcacatcagggtaaaaaggccatccatcaccttaaacatttatccttc

SEQ ID NO: 25972 - DNA, 120 bp, synthetic construct
  source 1..120: mol_type = other DNA
accatttgcctactaaatctttctcagaatagtaacatggatactgtcacatggaagaaaagtaggtttttagtcaaggatctagtagttacataagtattcaaagtccagcaacttcaa

SEQ ID NO: 25973 - DNA, 120 bp, synthetic construct
  source 1..120: mol_type = other DNA
aaaatgaaatgattcggaaagccttcttgtcaggcttaattggtgcttcatttcaccaggtgtgccctggaaaccgaatttaacaagaggctcttttagacactaggccattcttgacaa

SEQ ID NO: 25974 - DNA, 120 bp, synthetic construct
  source 1..120: mol_type = other DNA
tactagttctgtggatggaaaggaagaggcagcactctgttcacaagattatatgcttaggacatgatctagcaacactggcatttctgaatatccctaatgtcctatccattccattcg

SEQ ID NO: 25975 - DNA, 120 bp, synthetic construct
  source 1..120: mol_type = other DNA
atcacaccgatcactctggcttattaccagtcagatccatgtgaagagttttatttcttcaggcctagtggtcccttgcaggatgcaatcatatatgtcataccactgatctttagttga

SEQ ID NO: 25976 - DNA, 120 bp, synthetic construct
  source 1..120: mol_type = other DNA
aggtcttgagagggatgaatgatgaaatgtaaagatcagtgattgagcaggaatgggagaaagattagggattgggttttctggcacaaggctcctttctgtcaaaggactgcaaatttt

SEQ ID NO: 25977 - DNA, 120 bp, synthetic construct
  source 1..120: mol_type = other DNA
aatgctaccccaagtttggttgtgttctcaagtgaaaaacattgctagctatgccgtgtgtgaactttcagcctagtcattttgtggccataaatattgtttctatgagcctcttttcag

SEQ ID NO: 25978 - DNA, 120 bp, synthetic construct
  source 1..120: mol_type = other DNA
gatggattagctggaggacagtcagccattttatattgccaagctcaaccatgctagcatttccaggatataatcctgttatgagaatgtcttcctctattagcctttgtttgtgccagc

SEQ ID NO: 25979 - DNA, 120 bp, synthetic construct
  source 1..120: mol_type = other DNA
tatggttgggtctcatgttctgtatatgcatgttaggtctttggtctatagtgttgtatagtttgcaatttacttgttggtattctgtccggatgaccagtacattatagacagtgacgt

SEQ ID NO: 25980 - DNA, 120 bp, synthetic construct
  source 1..120: mol_type = other DNA
ttttatttcctttgcttgcttcatttcactagctaggacttctggaacactgttgaataggagtggtgagataggacatcctcgtgttattcccagtctttgggggaagtatacagtttc

SEQ ID NO: 25981 - DNA, 120 bp, synthetic construct
  source 1..120: mol_type = other DNA
tttcttgtttaggcaatttggtaagtggtttctagttataaactagccactgttgattaacttgagaaggtgaagcaggggagttctgaagagattacctagagctacataaccctaagt

SEQ ID NO: 25982 - DNA, 120 bp, synthetic construct
  source 1..120: mol_type = other DNA
atggagaatgggtaagggggcaaaactagaggcagagaaatcagtgggagactattacagtaatcgaagaaacatagtaagagtgacttgaattatgatgacagtggagatggagggaaa

SEQ ID NO: 25983 - DNA, 120 bp, synthetic construct
  source 1..120: mol_type = other DNA
tgacttggatttctctaatggtcagtgatgttgaactttttttcataagaaaaaatgtgctggccacttgtcttcttttgaaaagtgtctgtttgtcccctctcccctctcccctctctc

SEQ ID NO: 25984 - DNA, 120 bp, synthetic construct
  source 1..120: mol_type = other DNA
gaatatggactcaccataatgaatctgctaattcccgattatgtgtcttgtggtttagttaaatgacaactgcatatttttgaagatcaactactaattagttctcagcggattcacagg

SEQ ID NO: 25985 - DNA, 120 bp, synthetic construct
  source 1..120: mol_type = other DNA
ttagcaaattaccaaataattaatataaaacggtttcctagagttaagggcatgagtctgtagattggtagcactcactgagtttgcttctggggctgaattcctcccttcctgtagctc

SEQ ID NO: 25986 - DNA, 120 bp, synthetic construct
  source 1..120: mol_type = other DNA
actgacgttttcacaaagaagatgaagtgtagggttttactcccagaggccccagcacacagctttataaattcttatgtgaaatatctcctattctaatgtcacctcttctgtatggct

SEQ ID NO: 25987 - DNA, 120 bp, synthetic construct
  source 1..120: mol_type = other DNA
tttgtccacacaccgttttatctaccaactgccagcttgaaattttcaaagggtcgcaaatccatacaaggaataaaatcaacaatctgtgttctctagtctgaggacaacagctgccga

SEQ ID NO: 25988 - DNA, 120 bp, synthetic construct
  source 1..120: mol_type = other DNA
aaaaaaaagaaaaagacacgcatataaaatatttttatttggcggagtgtgcaggggtgctgttctaatgccactttttgaggttaaaagaaatcgggaaaagggacaatatgtctgatt

SEQ ID NO: 25989 - DNA, 120 bp, synthetic construct
  source 1..120: mol_type = other DNA
aataataattactagctcttatactttcaacatcacagcaggctattttgtgcatgctatttttgtgattctcatattctacactctttgccacggaggttttcctacacttggagattt

SEQ ID NO: 25990 - DNA, 120 bp, synthetic construct
  source 1..120: mol_type = other DNA
aagatatcattaaggcatctctctatctttttcatctttgtcattcttagccggtagcttttgtccccttggtgcccaggtggcagctgtgctttcatattcctgttggagtaagaatga

SEQ ID NO: 25991 - DNA, 120 bp, synthetic construct
  source 1..120: mol_type = other DNA
gcaagggcagccctctcgtaaatatatcgtaatttgcttttgtaatctttaaatagtttttttgttctacttttttagacagggtctcactgtgttgcccaggccgtggtgcaagggcta

SEQ ID NO: 25992 - DNA, 120 bp, synthetic construct
  source 1..120: mol_type = other DNA
gtccatctgcgttgtgatttaacttttcaaagcctctgatttttaagccctttcacttcaggtgccaaattttctcaaagcacaagaccccttaactcaatcttttctctctgccaaatg

SEQ ID NO: 25993 - DNA, 120 bp, synthetic construct
  source 1..120: mol_type = other DNA
ccttctgctctaatttcatttagtaagattgcatgatcttaagctccgtgatattttacttggaaaatgttatgacttaacgtaggtcagtgtcccctgcattatgtgatttggtgtgcg

SEQ ID NO: 25994 - DNA, 120 bp, synthetic construct
  source 1..120: mol_type = other DNA
agtttcatcatagaacagattgtgtgccaccaaccccaaatccttccttttcttcttggtacctacatgactgtcaaagctacctgccgtattccccaacatattcctgttttccactta

SEQ ID NO: 25995 - DNA, 120 bp, synthetic construct
  source 1..120: mol_type = other DNA
tcagaattctaggtctgccgttatttctttgaacgtattaaaaataccattttattgtcatctagcttccattgattctgttgagcttttggaggacaacttaattgttagttcatacag

SEQ ID NO: 25996 - DNA, 120 bp, synthetic construct
  source 1..120: mol_type = other DNA
ctagattttctagtttatttgcgtagaggtgtttgtagtattctctgagcatcattccttttactgcttgtaagattcttctttttctttgatttttcagcagtttcactctgatatgct

SEQ ID NO: 25997 - DNA, 120 bp, synthetic construct
  source 1..120: mol_type = other DNA
ctcttgtcttctgggcccttgaagctgaaaactaaagctgtccttaacctctaggttccaactttcactgaattttttggcctctaggcattccttttctcctgtgagctcatttgaaaa

SEQ ID NO: 25998 - DNA, 120 bp, synthetic construct
  source 1..120: mol_type = other DNA
cagacccaagctgcacaggtgtaacttgaggcactaacaatcttcctaccagacgtaatagttttatgtgttcttaaagctgggcgcatatacaaaatcactgtacatcacacataaaca

SEQ ID NO: 25999 - DNA, 120 bp, synthetic construct
  source 1..120: mol_type = other DNA
gaaaatagcacatccaccaggataagatcatttaaattaacactgattcttattccccatgcctgtccatttataaagctcaaggggcttcataaagtatactaaacagtaacattttca

SEQ ID NO: 26000 - DNA, 120 bp, synthetic construct
  source 1..120: mol_type = other DNA
agcagtaaatgagaaactgtagagagtgtttaatctagagagcaatataataaaaatttgcattgtggaaggcagagaaggattggagcgggcaagaagggaggcatggagaccagggaa

SEQ ID NO: 26001 - DNA, 120 bp, synthetic construct
  source 1..120: mol_type = other DNA
ctccctgtcagaactgtggaagatgtgggtgtttctgcagctttagaactaaagaaatgtcctacatgacagctcctcctcatctgaacaatatttatagcctcttgcagaatacgactt

SEQ ID NO: 26002 - DNA, 120 bp, synthetic construct
  source 1..120: mol_type = other DNA
aggctgtatgaatagcttgttttccaacagcctttgaccctgtggttttatcatgcatcagtaattcttgctttaatcacttgttgcaatggtggttacaaatgtgatattcgaattcga

SEQ ID NO: 26003 - DNA, 120 bp, synthetic construct
  source 1..120: mol_type = other DNA
ccagcaataaatgacaatggcaaagaaatggagcgtggaagagagagcagtttcagatttagcaaagttttagagggagcaaagttaattattctgaggtgaattttttttttttagttt

SEQ ID NO: 26004 - DNA, 120 bp, synthetic construct
  source 1..120: mol_type = other DNA
acacatttgggctcacaacaccttgctacacactttagaatattagtgggcacccattcgcgagtgttctgcctcccctgcttgaatgtaatctccctggtgaaaggcctgttttaagat

SEQ ID NO: 26005 - DNA, 120 bp, synthetic construct
  source 1..120: mol_type = other DNA
ccactcacaaccttcaacttcgccaagccatagtttcctcatcactaaacagagatcttaatagcaacttagcagagctaccgtgagaagaaacagataaaggctagtttatgttaggag

SEQ ID NO: 26006 - DNA, 120 bp, synthetic construct
  source 1..120: mol_type = other DNA
aacaagcagaaggaactccttccggggtgcctggcactgtcatacactgttaatgtgagattacaatgtcaatcacacaagccactggaaaaaaaaactggaattagctatcaagaacgt

SEQ ID NO: 26007 - DNA, 120 bp, synthetic construct
  source 1..120: mol_type = other DNA
ctgaggtaggaggatcccctggaacccagcaatttgaagctgtaatgagctatgactgccattacactccagctggacaacagagtgagaccctatctttaagaaaataaataaataaaa

SEQ ID NO: 26008 - DNA, 120 bp, synthetic construct
  source 1..120: mol_type = other DNA
agcggtctggttcaccaagagcttttatgagttaatattgtgatacgcatactgaaaacttaaagcaagagtagagtaccctgtcctcgtttctggaccaggatactgaagattatcagt

SEQ ID NO: 26009 - DNA, 120 bp, synthetic construct
  source 1..120: mol_type = other DNA
agtacagaggattacataattgactgttgccctgcctgctcctttttgtttggaacacgtggattaccatactctcctcctttcccctccagcccacttttcccctttattttattttat

SEQ ID NO: 26010 - DNA, 120 bp, synthetic construct
  source 1..120: mol_type = other DNA
tcccagagtctctgagaaatgctaaaagcaggaagggcttgaactagcgacaagtcttgttatgctgcatcatactgcacagatagttaatatagattcgttcaggtgataaggtctcag

SEQ ID NO: 26011 - DNA, 120 bp, synthetic construct
  source 1..120: mol_type = other DNA
ccccagacctaggtcaatcctaagtgaatagattggctataaaaactgccttgcatttgaatttactcgggaatctttcacgatctggactaagtcaaatgtccctcacagactcttaag

SEQ ID NO: 26012 - DNA, 120 bp, synthetic construct
  source 1..120: mol_type = other DNA
gcagcttccagagcgaatgtggacatattcttaggccccacctcacgcacttcttcagagaaacctcagaggctcctccacaagccacgggtacccccagatttccctcactctatgcat

SEQ ID NO: 26013 - DNA, 120 bp, synthetic construct
  source 1..120: mol_type = other DNA
gtctaggattcttatgtttcctctaagcatccacaaaattgtgacaaactaatgtgctggcttttcagcagagtaaaatgaaatcccagacccttcacggtccttgatagccagcataga

SEQ ID NO: 26014 - DNA, 120 bp, synthetic construct
  source 1..120: mol_type = other DNA
cactgctgctaggaagtataagaagtaggtttacttcacagtaaacatccttccagtctacctggattccacaggtagattgaaacaaggggatgcttttgacaaaaggctttgtgatga

SEQ ID NO: 26015 - DNA, 120 bp, synthetic construct
  source 1..120: mol_type = other DNA
atactgagcgcgtaataaatttttcttgaattgcatttttattgagagatgtggtcgcaggtgaggctggaaaggatacacttgttcacgcgaggcctgtagtggtgccaaggaggttgt

SEQ ID NO: 26016 - DNA, 120 bp, synthetic construct
  source 1..120: mol_type = other DNA
cttgctgaaagcatctccaaggttctgtaggctttgttcagaagcccctgatgtgtgtttgcagtccgtcattttatcaatgatacgcaaacataattagcatgtgtatgtactcacaca

SEQ ID NO: 26017 - DNA, 120 bp, synthetic construct
  source 1..120: mol_type = other DNA
gagtttccctgtggagcgtcctggaggaagaagccctgctgatgtcttgattttagcccagtaagacccaatctctagaacagtaagataattaatttgtgttgtttttaaccactaagt

SEQ ID NO: 26018 - DNA, 120 bp, synthetic construct
  source 1..120: mol_type = other DNA
actgttatagttataggacagtgatataggacagtgatattgttatagttataggaaactagtacggtgatactgttatagttataggtacagtgatattgttatagttataggaaacta

SEQ ID NO: 26019 - DNA, 120 bp, synthetic construct
  source 1..120: mol_type = other DNA
tgcagtattcagtgacatacttggtgactccttctcccagcctttaactccttaaactccccaaactataataccctcttcatgtgacacgccatccacatcacaccccattaacgggat

SEQ ID NO: 26020 - DNA, 120 bp, synthetic construct
  source 1..120: mol_type = other DNA
catgggacacactgtcctcctcacaccctgttcctgggacatgctgtacccatcacaccctgttcctgggacacaccgtcgtcccacacctggttcatggtactcgcggttgtctgaaca

SEQ ID NO: 26021 - DNA, 120 bp, synthetic construct
  source 1..120: mol_type = other DNA
gagagggcagaggaaaagcaccagtggcagcaggtctgattaagcaataagctcttaggaatcctagaacagtgagaatatctcaaaaatcaaagcacggaaaggaaagagataaaagct

SEQ ID NO: 26022 - DNA, 120 bp, synthetic construct
  source 1..120: mol_type = other DNA
agaaaacagaaaactgtaaactgtcttcccaacatttcatcactttcagaggatctggcatgagcaggaacatcctaaagcaacgtgacttctgattgtacagactgtatgctctaaagc

SEQ ID NO: 26023 - DNA, 120 bp, synthetic construct
  source 1..120: mol_type = other DNA
gaatgaatgaatgagggaccaacatggcacctgacacataaagtgagcttcaccagcccacagaatgaatgaatgaatgaatgaatgaatgagggaccaacatggcacctggcacataaa

SEQ ID NO: 26024 - DNA, 120 bp, synthetic construct
  source 1..120: mol_type = other DNA
tttctgaggtttcagccaattacaatgagatgagtcaacactgttatggagcttcctgctctgctcaagagaaaatactctctgacaaaaaagtgaaacgttaaattactaggcaagcag

SEQ ID NO: 26025 - DNA, 120 bp, synthetic construct
  source 1..120: mol_type = other DNA
ccaggcctctgcctggggggtctgcattagtctgatctcgtagttcatgataatttcctttattagggattattattttctccattgtctcttttctttctagaaaacttattaattttt

SEQ ID NO: 26026 - DNA, 120 bp, synthetic construct
  source 1..120: mol_type = other DNA
cactcttggttttttatttttttattgagatataattcataattataaaattcacccttttgtacagtcaggggtttttagtatatattcaagaggttcaccactgtctagttgctcagc

SEQ ID NO: 26027 - DNA, 120 bp, synthetic construct
  source 1..120: mol_type = other DNA
tctaagtctgtttcacttattacttctagtggtttgcttatatagaaaactaagaaatttgcaattatgtttcctgtgactatcgttttacttctttctttctaatccttttgtcttgtc

SEQ ID NO: 26028 - DNA, 120 bp, synthetic construct
  source 1..120: mol_type = other DNA
ggcaaagagtttcactgagctctgctagattcagaagcagttggacttacaacatcgtactttgcaaaacacatatattttatttacccaggaactaaagctaagtcagctgtggattaa

SEQ ID NO: 26029 - DNA, 120 bp, synthetic construct
  source 1..120: mol_type = other DNA
catggattatatcaatttcagtttcctgattctgacagtgtatgatacttatgcaagatttaatcgagacaaagtgagtaaagaatatgtgagatctttgtattatttcttacaactgca

SEQ ID NO: 26030 - DNA, 120 bp, synthetic construct
  source 1..120: mol_type = other DNA
gtttacggctgtcaaattatctgattccaggtgagcttatgttgtaatataattagtaaccagttattttaaaaatttaattgtattcattaaaaattttagtatctgtcttaagcccac

SEQ ID NO: 26031 - DNA, 120 bp, synthetic construct
  source 1..120: mol_type = other DNA
caccaccatgttccagggctcaccaggagccatccagatgagagaccacccagcccttgtgaccttgactaagaaattaaatccatgttatcagcacttttttaacttgatgtgatataa

SEQ ID NO: 26032 - DNA, 120 bp, synthetic construct
  source 1..120: mol_type = other DNA
tttactgtcactttaaagatttacttaatagctttttataatgtggtgtttcaaatagactcatttttaattataaatcccatagttgatgtcttgtttatacaatgtggtagagaaatg

SEQ ID NO: 26033 - DNA, 120 bp, synthetic construct
  source 1..120: mol_type = other DNA
ttagccctcagattttaaaaatatttttattaatagtacccgtcttctttgcattaggagaaacatgaatcacataaaacatgatttttattttatttttaaaatttgtgtgcgtcacta

SEQ ID NO: 26034 - DNA, 120 bp, synthetic construct
  source 1..120: mol_type = other DNA
tgtattcttttccttttagacctacagatttgacagtgaagtgcttctcaaagtgctttcaaaataaattacctacttagctgggcatggtggtacatgcctataggcccagctactcgg

SEQ ID NO: 26035 - DNA, 120 bp, synthetic construct
  source 1..120: mol_type = other DNA
atttttcaatgaagacattttctttacagaaagaaatttcagagcttccaagaccacaaacttaaaataagtaaagaagacagtaaaattcttaaaaaggctcggaaagatggatttttg

SEQ ID NO: 26036 - DNA, 120 bp, synthetic construct
  source 1..120: mol_type = other DNA
ctagctccatccttccctcccactctgtctccgttcccgtcctcatctctgcctgccttgcctcttgcctggaaagggcagcaccctggtttgcacggggtctcgggtctacatttagtt

SEQ ID NO: 26037 - DNA, 120 bp, synthetic construct
  source 1..120: mol_type = other DNA
ctgaaactctggtgtctacaggagctcatataacaggctggaggtgactgtagacgagcgccccggctcctggagcggttgggaggcgcctggatggctggcatctgtgcttgccgcgga

SEQ ID NO: 26038 - DNA, 120 bp, synthetic construct
  source 1..120: mol_type = other DNA
tggaggaagtttctttctattcttggttttctgggtctgttatcatgaaagggtgttggagtttgtcagatgcctgttctgtgtcacttgagatgatcatgtgagctttttcctttgttc

SEQ ID NO: 26039 - DNA, 120 bp, synthetic construct
  source 1..120: mol_type = other DNA
ggagagactgttgtgaggttaatccatataaagccctggaaaaagtctgtaggggagagactgttgtgaggtaaatccatataaagccctggaaaaagtctgtaggggagagactgttgt

SEQ ID NO: 26040 - DNA, 120 bp, synthetic construct
  source 1..120: mol_type = other DNA
tctataggggagagactgttgtgaggttaatccatataaagccctggagaaagtctataggggagagactgttgtgaggttaatccatataaagccctggaaaaagtctgtaggggagag

SEQ ID NO: 26041 - DNA, 120 bp, synthetic construct
  source 1..120: mol_type = other DNA
caatctgcaacacgtgcacacaccggttgctctgcaacacacatgcatacacccacaaaatctgtaacacacgtgcacacacccacacaatctgcaagacacgtgcacacacccacacaa

SEQ ID NO: 26042 - DNA, 120 bp, synthetic construct
  source 1..120: mol_type = other DNA
tcgggtttgaagtcagcacacgtttgtacatttggcagaaacaagaatcctgagttctacaaagacaagaaattgggctgagctggtggacctgtgcttgcaggtcccctgccctgtgtc

SEQ ID NO: 26043 - DNA, 120 bp, synthetic construct
  source 1..120: mol_type = other DNA
acgaagctaaacccatttcgcccttgctgtccctgctgaagacggaggcagaggctcctatactcactgaggaatctcaagtttagggacaccaggtggcaggttgtgccaggaaagaca

SEQ ID NO: 26044 - DNA, 120 bp, synthetic construct
  source 1..120: mol_type = other DNA
ttcttcttactttcgcagtacgtggctcttcttagaaaatgtcagtgtcctacctgagacttggaggagacaggctcagtcatgaccccccttacagagtgggatccactcacattgagc

SEQ ID NO: 26045 - DNA, 120 bp, synthetic construct
  source 1..120: mol_type = other DNA
ttcaaaacttgcacatttttatataaatccttattattttatcaacaactattgctgcgatgaatgtgcgggtgaaagagccagcagcatggagaggcagcagtggggtggaggcatccc

SEQ ID NO: 26046 - DNA, 120 bp, synthetic construct
  source 1..120: mol_type = other DNA
actccttcctggggtgtctcccccatctcccctcctccctctgctcttcctggggtctcctccatctccctccccactctgccccatcctgtggtctcctatttcctgtatccaagtctt

SEQ ID NO: 26047 - DNA, 120 bp, synthetic construct
  source 1..120: mol_type = other DNA
acggagcggagctcacagtaatgctgtgacggagcggagctcacactaatgctctgacgggcggagctcacactaatactctgacagggggcggagctcacactaatgctctgacggggc

SEQ ID NO: 26048 - DNA, 120 bp, synthetic construct
  source 1..120: mol_type = other DNA
gcggggctcacagtaatcttctgacggggcggagctcacactaatgctctgacggggcggggctcacactaatgctctgacggggcggggctcacactaatgctctggcaggaggcggag

SEQ ID NO: 26049 - DNA, 120 bp, synthetic construct
  source 1..120: mol_type = other DNA
catagaaggggtttcctcctcacaccctgatcataggtttaatctgaacggagaaggcccaagaacactcttctgaaacacacctttaggttgccagactcagtgtttaccttgttaaag

SEQ ID NO: 26050 - DNA, 120 bp, synthetic construct
  source 1..120: mol_type = other DNA
acctcacgagtagccaaagccactgtaaacccagctgtccctctctaccctacaagcccaccctggcagctctggcctctcagacctaaaacccaggcacccaagctacagacacgacca

SEQ ID NO: 26051 - DNA, 120 bp, synthetic construct
  source 1..120: mol_type = other DNA
aagtggggaagctgaggcttcacttacagagacagaaacggttgcagccaacttgacagcaacttgattactacaggttgctgcattccaaggaagattgctttaacattctgtgaggag

SEQ ID NO: 26052 - DNA, 120 bp, synthetic construct
  source 1..120: mol_type = other DNA
aagacctggatgagagatggcagtatcatctgacaaggacttcagagcagctgccatgacagagagcctaagaaaataaacacaagacgtaaagaagaaccaaatgaaaattctggaact

SEQ ID NO: 26053 - DNA, 120 bp, synthetic construct
  source 1..120: mol_type = other DNA
cccagaagctccagctagtgccggaaggcaagacaagaaatcaaaggcaaacaggctggaaagaagaaatacaactaaagtcttactccttattaacaaaattaactcaaatgggtaagg

SEQ ID NO: 26054 - DNA, 120 bp, synthetic construct
  source 1..120: mol_type = other DNA
cagctgaaaactggaaaggacccagatgtctttcagtggttaaacacactgtggtacgtccatgtcataaaacacgactcagcaatgaaactatctatgaactactgatacagcaacaat

SEQ ID NO: 26055 - DNA, 120 bp, synthetic construct
  source 1..120: mol_type = other DNA
ttcaattattcagtttctcatgttcctaagtgccagcccagaaccatggaatgtgaagaaacacaaaactcactcctctgcatcagtgaattgattgtgtggtggggatgtaagtctgca

SEQ ID NO: 26056 - DNA, 120 bp, synthetic construct
  source 1..120: mol_type = other DNA
cataattccacctgcttccatcaccaccatccgccctggaattaggccggatattccaatttgggggatcatttaggttattcatggagatataccttgaagtaaagaataaaaacgtta

SEQ ID NO: 26057 - DNA, 120 bp, synthetic construct
  source 1..120: mol_type = other DNA
cgggctcagcatgcaccctccatagctaggctgggggctaacgttagtaagaatttactgatttactgagtacctacacgaagtttcacattttcacaaagtagagtcactttaagtttg

SEQ ID NO: 26058 - DNA, 120 bp, synthetic construct
  source 1..120: mol_type = other DNA
taatttaggccattctagaaacaaagtacagctagcctctattagaggagaagggatgacttacagtgaacaggattcccaccctttacggacagattggatttcacttgctggttttct

SEQ ID NO: 26059 - DNA, 120 bp, synthetic construct
  source 1..120: mol_type = other DNA
cccttccttctgcagggtgggctggtgtctgtcccgtcagtgctgacttagttccgtgcttgctgtctggatgggtcctggcccacagctataaagccacaaccagtgactccatggact

SEQ ID NO: 26060 - DNA, 120 bp, synthetic construct
  source 1..120: mol_type = other DNA
gagtaagtcactgtttcaaacctgtcctgtggaggaaatgccagtttattaacgaataagccaccgtttcaaacctgccctgtgaaggaaatgccagtttattaaataaggagtaagcca

SEQ ID NO: 26061 - DNA, 120 bp, synthetic construct
  source 1..120: mol_type = other DNA
aagggaagcttgggatgcaaatgcaagttcaggataaaccacatcagcaaaaggacaaaggctccacaaggcaggcgcacaggctggttcaggaccgtgtgtaggcggctggtggcagcc

SEQ ID NO: 26062 - DNA, 120 bp, synthetic construct
  source 1..120: mol_type = other DNA
cgtctgcaggggagctgaggggatgtggtgcagcctttagcatcccctgggcactgagcaagcagagaagggcagaaatggaggtggggttggggtgagcagtgtcctgggaacagccag

SEQ ID NO: 26063 - DNA, 120 bp, synthetic construct
  source 1..120: mol_type = other DNA
accagagcttcctgtggaacgttttccagaggtgcggcctggcaccgcccgggcacctcccgcctccgccgcggcggccccgacccctgtcccgactcccccgaccaaccccgttccctg

SEQ ID NO: 26064 - DNA, 120 bp, synthetic construct
  source 1..120: mol_type = other DNA
ttttcctgaactttcgatcgccagcttatttggtcttcttgatgttatagggtcgataaagacaggagtggagtgatatcagacaccgagcttcagcaagctctctccaacggtgagtgg

SEQ ID NO: 26065 - DNA, 120 bp, synthetic construct
  source 1..120: mol_type = other DNA
gcgtgttctcagaaactgtggtggccgttctgttttgtttgcatcttataaacgtttacctgatgacattttcctcttcaatttagctgctagaaaatttaaagtcaggttggtggctca

SEQ ID NO: 26066 - DNA, 120 bp, synthetic construct
  source 1..120: mol_type = other DNA
aaagaaaatgaaaaaaagaaagagatggggcaagcaggggagagggctggggacacaggggagggtgctggggatgcaggggagggtgctggggacacaggagggtgctggggatgcggg

SEQ ID NO: 26067 - DNA, 120 bp, synthetic construct
  source 1..120: mol_type = other DNA
aaaaaaaaaaaaaacgaggagccggtgctgcagttcattaatagtaatggcaaaaactgcgatgacttgtgcgccaacctaacccagtaatcacgggtgtgcaaaatgtggcgatgggca

SEQ ID NO: 26068 - DNA, 120 bp, synthetic construct
  source 1..120: mol_type = other DNA
gtggggagggctgggccaggcaccagagtggagaccacaggccagggcagagggcagggctgtgagggcactgtaggctgtggatgggagctggcatttaagaggggagtccatagacca

SEQ ID NO: 26069 - DNA, 120 bp, synthetic construct
  source 1..120: mol_type = other DNA
catttattcatttacttctgctgcagttttcttgactgctgaatttcgtaagaagggattggtcagggagggtcttggggctgaagacctggagaggagctggtgctatcgctgttcaaa

SEQ ID NO: 26070 - DNA, 120 bp, synthetic construct
  source 1..120: mol_type = other DNA
gctgatgttctagattgagggtcatggagttggaggcctggagaggagctgatgttgtagtttgagcatcttgccagctgcaaacccggagagaagctgatgtagtttgagggtcttgca

SEQ ID NO: 26071 - DNA, 120 bp, synthetic construct
  source 1..120: mol_type = other DNA
aatggatgacagagattaatctgagagttactattagtggagaaacttagaacttaccatttttcctgtgaggtttcggcgctgatactgctattctgtgagttctggcaattgagtccg

SEQ ID NO: 26072 - DNA, 120 bp, synthetic construct
  source 1..120: mol_type = other DNA
ttcattgctgcgtgatctcccgtctccattctctgcctgagacccacccacactgacatggttcattttcattgctgcgtgatctcccatctccattctctccctgagacccacccacac

SEQ ID NO: 26073 - DNA, 120 bp, synthetic construct
  source 1..120: mol_type = other DNA
ccatgggatctcccttatgcatttctgccatggttggctcagctgaacgcacctcttgaacaagacttggccttggacacctagaggcccttggttgagggtttacctcctggcgtggcc

SEQ ID NO: 26074 - DNA, 120 bp, synthetic construct
  source 1..120: mol_type = other DNA
aacagcacgaggcactgggagctgcaaacgcccgcgatactgtcagagacggagaaaggtatggccatggctgacacaaaatgttactcaacatttatcacaggcctaaatggagaacat

SEQ ID NO: 26075 - DNA, 120 bp, synthetic construct
  source 1..120: mol_type = other DNA
catgcccagtgaaggaagctagtttcggtgcgcacaggccgagggatgccgccacgtgacatcttggagaagacagtgctaccgtgttggggagcagggcagtggtttcgaggggctacg

SEQ ID NO: 26076 - DNA, 120 bp, synthetic construct
  source 1..120: mol_type = other DNA
cgtgatctggtgagtctctcttccttcacactacctgggaggcctgatggtcagtttcctaagaaaggaactcaaataagacaaatgtcactttctcaagttttaagaccaaaaggatcc

SEQ ID NO: 26077 - DNA, 120 bp, synthetic construct
  source 1..120: mol_type = other DNA
gctcctctcaccacccccgtgcagccagcggaccctgcccccacccagctgctccccccagctgctcccactcagctgctcccactcagctgctcccactcagctgctcccactcagctg

SEQ ID NO: 26078 - DNA, 120 bp, synthetic construct
  source 1..120: mol_type = other DNA
gggccgttaggccttgtggtggttctctcttggtttctgtggagaagccagaccccgctgtggttggcaaggaaggcgagtggagacatcaggagtgtccatccctcagcggccctttct

SEQ ID NO: 26079 - DNA, 120 bp, synthetic construct
  source 1..120: mol_type = other DNA
tcatggcatgaagacagaggattgattgcccaggaggcttccaggggctttggctcctggggcttctgtcagcgctgggtcagagcaggtcacccttgtgtgcagacactaggttgccgc

SEQ ID NO: 26080 - DNA, 120 bp, synthetic construct
  source 1..120: mol_type = other DNA
tgtgtgtgccttgggttcaggtgcacctgcctttgtgggaatagcacagcttccctgcataactgctggagggcgggtcgtggagtgctgctgtgtgtgtgtgtgtgtgtgtatgcctcg

SEQ ID NO: 26081 - DNA, 120 bp, synthetic construct
  source 1..120: mol_type = other DNA
ccgtgctccaccaggagcctgacattgttctctgagatcagggggctgtctctgtgtactgcccaggactgtggcatttttgtgcataaaaaaaaaaaaaaactgtgtgtctaacacaga

SEQ ID NO: 26082 - DNA, 120 bp, synthetic construct
  source 1..120: mol_type = other DNA
aagtgcgaacttctcaacttagctggtgactgcatccttgaaaaattctgtgtgtaaaatgatacagaaccatttcttggttatctgttaaataagagtgcatgtccagccgcgatgact

SEQ ID NO: 26083 - DNA, 120 bp, synthetic construct
  source 1..120: mol_type = other DNA
atcttatctgggtgtttttgatagacattgcttatttatttttgtgattccattctttattcaaatatttcatatgatagtcttcagttttaagaacatgcttttttgaaaagcgctaga

SEQ ID NO: 26084 - DNA, 120 bp, synthetic construct
  source 1..120: mol_type = other DNA
gacgctggtggcctcatgtggactgactttcatgaacagaaactcagaaacagttgcttctggattttggcttctcagataaacattctttttgtagttcgtttgttcatccctcatttt

SEQ ID NO: 26085 - DNA, 120 bp, synthetic construct
  source 1..120: mol_type = other DNA
gtgcttgactcttgatccgtaaaatggctgtttgtgcaggtcattaactgtgagattcagagagtaggtgcacacgtccctgcagagattccagcaggactgaaaaccagtagaaatata

SEQ ID NO: 26086 - DNA, 120 bp, synthetic construct
  source 1..120: mol_type = other DNA
gcagaaacagtaaagtatcccgccttctgcttgtgtgggttgttgcacccatggaaggggagggttggggtttgccttgaaaacggagttttaggaacagggcgagcgaggaaggcttcg

SEQ ID NO: 26087 - DNA, 120 bp, synthetic construct
  source 1..120: mol_type = other DNA
tgtgagactgtgtgtgcgggtgtgtgtgggggactgtagggagctgtgtgtgtggggtgtgtgagactgtgcaggtgtgcaggtgtgcgaagctgtgtgagactgcgtgtgcaggtgtgt

SEQ ID NO: 26088 - DNA, 120 bp, synthetic construct
  source 1..120: mol_type = other DNA
cttgggaaggaaggatcctgtttactgtttacatcttgtttaggtgtcttgttatggtaaacagtaaagagatcccatgtcccgcagggagaccttaccttgtccctcaaggctgcagtt

SEQ ID NO: 26089 - DNA, 120 bp, synthetic construct
  source 1..120: mol_type = other DNA
tgagaaatggagtttgtgccgcagagttcctgacagaacagattgtttcagacttacagcttgcacgtgtcagctcactcataaatgcaaacaccttagaaaaataaggaacttcttgac

SEQ ID NO: 26090 - DNA, 120 bp, synthetic construct
  source 1..120: mol_type = other DNA
taaatgggtcagccgtaggggacggtcactctgaggttaaatgggtcagctgtaggggatggtcactctgaggtgagagggtcacgccaagctcctgtcattttaaggtaggttgggtga

SEQ ID NO: 26091 - DNA, 120 bp, synthetic construct
  source 1..120: mol_type = other DNA
gatgatggcctgagcatttgcttgtgatgtttaatgttaatgtgactgttaaggtcgggattttccactcttggtgattttactattcacaccaggggaagtcaggcacaaaataagagg

SEQ ID NO: 26092 - DNA, 120 bp, synthetic construct
  source 1..120: mol_type = other DNA
cagatgtcaggtgagaaccgtggggtgaacgcggggaaacacaggaaagatgtgaatgaagaagagtggccaggccaagggttgggggtgcctaatgtgtcttttcttctctgacagtcg

SEQ ID NO: 26093 - DNA, 120 bp, synthetic construct
  source 1..120: mol_type = other DNA
tgagttcttcccagccgaggtctctcatctttggttctggacattctgtgtctgtcgctgcactggtggtgtccctctccattcttgcttttatcttctggacctgctgttatccaggca

SEQ ID NO: 26094 - DNA, 120 bp, synthetic construct
  source 1..120: mol_type = other DNA
gcagggctgtctcgaggcatcttgggagggcaaaggcaggacgggaaagtgatttctcccacctgtattttgactgtgaccccaaagcccctgccctgggccgtggctcccaatctcctc

SEQ ID NO: 26095 - DNA, 120 bp, synthetic construct
  source 1..120: mol_type = other DNA
gctaagagaaatccacgttttaccgtctgttgtagctgctgggcctgctgttccgaaactcctttcaagtggctttcatttcaggagtccatcagatgtatgtaataaataaaggtatgg

SEQ ID NO: 26096 - DNA, 120 bp, synthetic construct
  source 1..120: mol_type = other DNA
ccatgttagcccctgaccatgttagcccctgaccatccctgttagcccctgaccatccacgtagctcctgaccatccatgttagcccctgaccatccacatagcccctgaccatccacgt

SEQ ID NO: 26097 - DNA, 120 bp, synthetic construct
  source 1..120: mol_type = other DNA
cccctgactgtccaccttagcccctgaccatccacataagcccctgactgtccagttagcctctgaccatctgtggtcactgagccgggtgcacagagttctattcagtggtgttcactc

SEQ ID NO: 26098 - DNA, 120 bp, synthetic construct
  source 1..120: mol_type = other DNA
accccacatacataaggaacccagccaactcaagaggaagaaaaaaccccattaaaaaccaggaaaaggacctgatagacgcttctccaaaggagacacaaaatggccagtttgtaggtg

SEQ ID NO: 26099 - DNA, 120 bp, synthetic construct
  source 1..120: mol_type = other DNA
cagaaatttgaacagttttatagaaagacttatgacgggtttagtgtaaggcagtgttaaccagtagcaccggctcagcaacgaaggactaaagggactctgaggacacagatacagcaa

SEQ ID NO: 26100 - DNA, 120 bp, synthetic construct
  source 1..120: mol_type = other DNA
ccctgaggctgcacagttttatccaatttccataagagctgggcttttgaattttttcccacagctgaaattgctgctgccttgctggtgattctgcaaaaaaactcctctagtccgcct

SEQ ID NO: 26101 - DNA, 120 bp, synthetic construct
  source 1..120: mol_type = other DNA
gactcaaacagttgttatgcatgtggcttctggttcttccgagtggaggatgtttccagaagccgggctgtgcgacaccgccggggccgtcccagccacttacttgtctctgagataatt

SEQ ID NO: 26102 - DNA, 120 bp, synthetic construct
  source 1..120: mol_type = other DNA
caaagggttccaaagtccctccccacctgacctgtctcagggtgggcactgctgtcggcccacagacaattcagtggaaacgccaactccttattttaaaatttaaataaattctttgcc

SEQ ID NO: 26103 - DNA, 120 bp, synthetic construct
  source 1..120: mol_type = other DNA
cctggtgaccccgcggaagtgccgggagcccgggaaacgggggtggatccctcactctcttggagatcgggcctggtctcagcaccagccttggttcagcaagtggggaggaccctcccg

SEQ ID NO: 26104 - DNA, 120 bp, synthetic construct
  source 1..120: mol_type = other DNA
cccatttgatgggattggctttgaaacgtcacgattgtcactgtgaagtagtaaccatgttccttggggttcctgaatcttctcctggccttactgagcgctgatgtggcctttgggcct

SEQ ID NO: 26105 - DNA, 120 bp, synthetic construct
  source 1..120: mol_type = other DNA
actgacaccgtgatccagaccgcactgacacccaccacactgacacccaccgcactgacacccaccacactgacaccgtgatccagaccgcactgacacccaccgcactgacacccacca

SEQ ID NO: 26106 - DNA, 120 bp, synthetic construct
  source 1..120: mol_type = other DNA
aaaattaggttcacagcgatcaccaccgttgtgaagccaccccagacaaccgcgggccagcaagtcagggacacagggacacagggaccagctttgtctttaaaaacaacaacgcaactc

SEQ ID NO: 26107 - DNA, 120 bp, synthetic construct
  source 1..120: mol_type = other DNA
ttggaacattctgccatccggggttggaaagggtgttggacacgcctttcccatgtgcggtggcgtccgagggcagctcctgcagtcttcagggtgtgtgtgtgttgagagctcacctgt

SEQ ID NO: 26108 - DNA, 120 bp, synthetic construct
  source 1..120: mol_type = other DNA
ataaattgtttccaaccaggaaacaaggatatctcttaacacaattgttctattctttggttattcctccacttcaaagaagcttcctgaagcttccagatcccctgcagcccccctgag

SEQ ID NO: 26109 - DNA, 120 bp, synthetic construct
  source 1..120: mol_type = other DNA
aaatgggaaaaggcctcagaacagcgtggacgcagtgacccctttaacagaatgaggggatggaatcccgggtggctggagacctggacaaatgagaaacagcatcctcctccattttta

SEQ ID NO: 26110 - DNA, 120 bp, synthetic construct
  source 1..120: mol_type = other DNA
ttcaggtctcgctgacctttatccctcaggagaggatctccagtgaggctgtgctctccgggaattcttttgtgcaggtagacggtgagggcagcttcccaagcctgttaactgcacctg

SEQ ID NO: 26111 - DNA, 120 bp, synthetic construct
  source 1..120: mol_type = other DNA
ggtttcaccgttttttttttcttaaatagtgtctagctctgttgcccaggcgagcaccaccaggcctggctaattttactattttttgtagagatttttttcaccatgttgcccatgctg

SEQ ID NO: 26112 - DNA, 120 bp, synthetic construct
  source 1..120: mol_type = other DNA
agagatgccgcagggagacgcaggcctcagcgcgcccggggatggagatgccgcagggaaactcaggcctcagcgcgcccggggatggagatgccgcagggagacgcagcccatagcgcg

SEQ ID NO: 26113 - DNA, 120 bp, synthetic construct
  source 1..120: mol_type = other DNA
ctccatctcaattcttcctagactgacgacacgacactttggaaatggacttgacacacagccagccccaagggaaggctggcagtcggatagaacagggagcccagagctcaggcttgt

SEQ ID NO: 26114 - DNA, 120 bp, synthetic construct
  source 1..120: mol_type = other DNA
aagacggatgagaccattcaagctcctaaaagtggttggtatgctaagggtattggctgcctgtgacccgagttctattctgtgtcccaggagggtgccaggttgggcagttccagcacc

SEQ ID NO: 26115 - DNA, 120 bp, synthetic construct
  source 1..120: mol_type = other DNA
gtgaaagcttcagtcatggattttctcagttgagattgtccacagttcccgtctttgatcatctcaagactgaactatcacagagatgagagtggaagatgacgtgggtcaatgtccata

SEQ ID NO: 26116 - DNA, 120 bp, synthetic construct
  source 1..120: mol_type = other DNA
gcacattcttctctgtatagagggtcaccatgctaaggtgggtcatattctgacacacctctgatttcagccattatgaaaacattctccctgaatgtgaaagtgaacatttggaacact

SEQ ID NO: 26117 - DNA, 120 bp, synthetic construct
  source 1..120: mol_type = other DNA
acttgtctgacaagtacatactgtccgtttcatgggaaccaacatctcagagatcccacacaacgcttcctctttagagaagaaaaacacagcaaaacaacacaggcagcctctgtttaa

SEQ ID NO: 26118 - DNA, 120 bp, synthetic construct
  source 1..120: mol_type = other DNA
agcctctggatttaagcacacatggccccttctctggaagcctctatatttaaacacgtgtggccccccgtctggaagcctttatactgaaacacacgtgaccggctgtctggaaagtga

SEQ ID NO: 26119 - DNA, 120 bp, synthetic construct
  source 1..120: mol_type = other DNA
tactcattaatggtacttttttttttctttctctttcaggacttcaaacaagtgtgaagaggctgtgtggcgagattgtggaactgaagcagcacctggagcactacgacaagatccagg

SEQ ID NO: 26120 - DNA, 120 bp, synthetic construct
  source 1..120: mol_type = other DNA
ctgtgaggtatgactgtgaggcatggactgtgaggtgtgactgtgaggtgtgactgtgaggtgtgaccacgaggcatggactgtgagatgggactgtgaggtatgtgaccatggggtgtg

SEQ ID NO: 26121 - DNA, 120 bp, synthetic construct
  source 1..120: mol_type = other DNA
gcagttttgtgggtgctgctgtgtgaacccctgttgctgtggcctcagcagggaaggctggtctgtggtcagttcctccccctcccctccccctttcattccctcttcctttcccccgac

SEQ ID NO: 26122 - DNA, 120 bp, synthetic construct
  source 1..120: mol_type = other DNA
cctggggttaggcgaagatttcttagaaatggcaacaaaacatggcctatagtggaaaaaatggatgaactagacttcatcaaaacgttcgaaactctgctctcagaagacaccgttaag

SEQ ID NO: 26123 - DNA, 120 bp, synthetic construct
  source 1..120: mol_type = other DNA
cttctcatcacagccaaaggtggcccagcagtcccgttcctgggtccttgctcaagagaaatgaaaacagaggctcacacataaacgcaaatgtttaccactgttctgctcgtagtcacc

SEQ ID NO: 26124 - DNA, 120 bp, synthetic construct
  source 1..120: mol_type = other DNA
acataagccctgtggatgatgtgggagctccagcgagcctgtgggagctgccccttgccaaagagcccacaagcaaggcctgtactgcagagtcaggcgccagttgcttcagccacagtc

SEQ ID NO: 26125 - DNA, 120 bp, synthetic construct
  source 1..120: mol_type = other DNA
aggccggggagcacaaggttgcatgactacctacacagaggggccagccacagcctcctctcacaccggccagtggctgagcccatgaggacactgaggctgggaagccacagaggaggt

SEQ ID NO: 26126 - DNA, 120 bp, synthetic construct
  source 1..120: mol_type = other DNA
agcgcactcacttgatcttgctgaagacgatgtccacgtcagtgacggtcacgttcctgccgtcgatcacctggcagtccttgcacagcttcgaccagttcttgccgtgcatctccctcc

SEQ ID NO: 26127 - DNA, 120 bp, synthetic construct
  source 1..120: mol_type = other DNA
cagggctgaggcagtggtgggggcaccggtgtcagggcgcagggacgccctctggactttgcaaggcgcccgcccccagagtaggcggctgggccatggggttgagaagactgaggggtg

SEQ ID NO: 26128 - DNA, 120 bp, synthetic construct
  source 1..120: mol_type = other DNA
ccctcagagccaccttcagggctcacgcaggacttcccagcccatcagcacgtgctttgcatgaggttttgataagcttggaggttggccttggagggctgagcgggacataaaacgtcc

SEQ ID NO: 26129 - DNA, 120 bp, synthetic construct
  source 1..120: mol_type = other DNA
tgcattagcttaacaaaatattttttaaaaggtttttaaactaaaaatgacaatgaattaggcacgacgtgccgctgtgggaagtcagccaggctgctgctgggtctggaggagcaggac

SEQ ID NO: 26130 - DNA, 120 bp, synthetic construct
  source 1..120: mol_type = other DNA
ggccagggaatgcctgtcccaggtgtgtcaccagctccaaggactcggccacctaggcggggcttcgtcccagacaccgcaggccaccttggccccaaccccacaggctgtccctgttcc

SEQ ID NO: 26131 - DNA, 120 bp, synthetic construct
  source 1..120: mol_type = other DNA
gagacctcagagccagccctcggccctgctcaggctctggcctccctgagaacctctgtcctggtcacaagtgtcctgcaggccccctgggttgtgctgggctggaccaggccagggtgt

SEQ ID NO: 26132 - DNA, 120 bp, synthetic construct
  source 1..120: mol_type = other DNA
agagaaaaccctcccaggccacacggcagatcccctctgagtgggagactcaggattaaggatgacagggagacgcaggtgggaggatggaacattccagagcactatggctgagtatcc

SEQ ID NO: 26133 - DNA, 120 bp, synthetic construct
  source 1..120: mol_type = other DNA
ctggaacctaatccccattgtggtggcattaacagagcctttgggggatgagattcagctatgggggccaggctcctgggaatgaccgagtgccttatcaaagggctggggcatgaggac

SEQ ID NO: 26134 - DNA, 120 bp, synthetic construct
  source 1..120: mol_type = other DNA
aaaccccagggtaggagatgtttgctatgcacaacaaatgttggcttgtctccagaatatataaagaacctctacaaatcgataggaactcaatccacaaagggcagctgacttgaacag

SEQ ID NO: 26135 - DNA, 120 bp, synthetic construct
  source 1..120: mol_type = other DNA
gtggcaggaacaagcctggtgggaggtgaggctgagatgagcttcaccccagtggctctgtccatggcccaggctcctcaggcactgagaaggcagaggtgccaccccgccgaggggcag

SEQ ID NO: 26136 - DNA, 120 bp, synthetic construct
  source 1..120: mol_type = other DNA
ccttttatcatgccaagaagtcaaacgtgggatgccatgtggggaacatgccctgggtgggggaataccctgggtggagatgccatgtggggaggatgctctgggtggggaatctttgtg

SEQ ID NO: 26137 - DNA, 120 bp, synthetic construct
  source 1..120: mol_type = other DNA
gccccagatggcatccctctcacacactccccctgtctcaccaacagctataaatagactcggctctctgctggcacggcctctcccgaggaagcttttaattctctgcgtcctctgcag

SEQ ID NO: 26138 - DNA, 120 bp, synthetic construct
  source 1..120: mol_type = other DNA
catcaggctgcagctgcctcactcccctccacttcctgccccttcccggccttggtccagccccatctcctagtcccaggccacagggagctgggtcacctcccaggggcaggggctggc

SEQ ID NO: 26139 - DNA, 120 bp, synthetic construct
  source 1..120: mol_type = other DNA
aaccccctatcaaaacagtagcctcccaaccacctatcaaaacagcagcctcccaaccccctatcaaaacagcagcccccaaacccctatcaaaactgcagctcccaaccccctatcaaa

SEQ ID NO: 26140 - DNA, 120 bp, synthetic construct
  source 1..120: mol_type = other DNA
tgacagacctgtccctggcgcggccgacggtgacccccgctcgcggcctttgcaaagcctccccgtcgcgtcctcgcaccgagcccgcagcgccgaactccgggcatcccaatccggggg

SEQ ID NO: 26141 - DNA, 120 bp, synthetic construct
  source 1..120: mol_type = other DNA
actgtgctcccatttccaaatactgtgctccatttcccagtactgtgagctcccatttctcagcgctgtgctcccaattcccagtactgtgctcccatttcccaatgctatgctcccatt

SEQ ID NO: 26142 - DNA, 120 bp, synthetic construct
  source 1..120: mol_type = other DNA
gttaagcaggtggctgcatcctctgcagttgctggcagcccatcttcctggagatgtaaaccctcctgcaaggctggctcttctttgggtgtgatgaagatgatgacagagatggatgct

SEQ ID NO: 26143 - DNA, 120 bp, synthetic construct
  source 1..120: mol_type = other DNA
ctcacatggacacggacacgcgcacgcgtgcacacacacacccttaacttgctcagtttcggagcattgtccgatccttgtaagtgacttgccacatgactagaacctctggcttcattt

SEQ ID NO: 26144 - DNA, 120 bp, synthetic construct
  source 1..120: mol_type = other DNA
tgctgttagtggaagaaggctgagaccctcaccacatgcagagctcaatcttcaacttttcagccatcagaatcataagccaaatacacgatttttctttataaattacccaggctcaag

SEQ ID NO: 26145 - DNA, 120 bp, synthetic construct
  source 1..120: mol_type = other DNA
acttcagggtgtaaagcagcttgctttgccttggaaagccaaggtaacaccttagagaaagggttgcagtctcattttaaggtacaatcatgtctcatgtttcttagctgaggggatata

SEQ ID NO: 26146 - DNA, 120 bp, synthetic construct
  source 1..120: mol_type = other DNA
agacagtaacatgactgcactgctgaaagaatgttgcttttttcttctgcatgtgtgctgatatagagacaaagtgtgctttccctgataaataagagggtcttgtggtagccaaggaag

SEQ ID NO: 26147 - DNA, 120 bp, synthetic construct
  source 1..120: mol_type = other DNA
aaagtcagagattggtggattggatttttaaaaagctgaagtgcctgtggacaaagatgctgagttaaaggaggttgtcttccttactgagtaatagagaagctcccgggccccgagata

SEQ ID NO: 26148 - DNA, 120 bp, synthetic construct
  source 1..120: mol_type = other DNA
attagtgcagggatagacaaaactgatgagtggaattgactagacagcccagaaatagactcaaatatgtgcataaatggaattcaggacagaagaagctttttatgccagtggggagag

SEQ ID NO: 26149 - DNA, 120 bp, synthetic construct
  source 1..120: mol_type = other DNA
catctccatgcccaaccatagcagagggggtaattaagtgtggtacggggtggaacagccacagaagcaaacgccaacagactacagcgacaagcagtatggacagaccttggcaattta

SEQ ID NO: 26150 - DNA, 120 bp, synthetic construct
  source 1..120: mol_type = other DNA
ttaagggccagagtgtgaccttccgtggtcagaatggggctctcctaagtggactgaaagacaaaccctagatcttcaggtgggtccttctgaatctctggtgccacagaaggaaaactg

SEQ ID NO: 26151 - DNA, 120 bp, synthetic construct
  source 1..120: mol_type = other DNA
caaacataaacaggactggaaaaggctttacaaaaaaataaaaaacaaacaaaacctgaacccagcacctggaagcgaccagggctaatgtttgtcctccaccccatcacataactgtct

SEQ ID NO: 26152 - DNA, 120 bp, synthetic construct
  source 1..120: mol_type = other DNA
ggagtatactacacaacagacaccacctgggcatgacgcttacatggaaagcaccctggatgcttggcagggggatgatgcaaaggaacagctccaacctccagtggaaaattaatacaa

SEQ ID NO: 26153 - DNA, 120 bp, synthetic construct
  source 1..120: mol_type = other DNA
ggttgtgtgaaagagcattttcacactaagtgatatgtaatccttgattgctgaaactaggcaaaactcttaagcaattctcagatttgagaaattgatgaatggggcacttctcctggg

SEQ ID NO: 26154 - DNA, 120 bp, synthetic construct
  source 1..120: mol_type = other DNA
tattcttaaacaaaattcaagttcattactagtcagttctgagtaatggtacttcaagaatgcctggatcatggaataggatctcagtggtggcacagcacgcttcctcccaatccttgt

SEQ ID NO: 26155 - DNA, 120 bp, synthetic construct
  source 1..120: mol_type = other DNA
tggttccctggtggcaaatgatgttgagcaccattttgtgggctttatttctcatggatattgttgccttggtgaagaacgtgttcaatctttcacccatttaaaaactgagctgttgtg

SEQ ID NO: 26156 - DNA, 120 bp, synthetic construct
  source 1..120: mol_type = other DNA
gcaacttacctgtgccttcgaatccccgtcctggtttactgaagtgcagaagtgacatgggcatttgtaaatcagcagggagctcttggccttgactctggtgggacaggaaggaggaga

SEQ ID NO: 26157 - DNA, 120 bp, synthetic construct
  source 1..120: mol_type = other DNA
aagctccatctctaggggaaggggcagtgcacaaatcagggaccaccccatgggactaaagaatctgaccagcagccttgagttccagattttcccactgaaataatctacacacatgag

SEQ ID NO: 26158 - DNA, 120 bp, synthetic construct
  source 1..120: mol_type = other DNA
aggaatgttcacagcattaaatggccacatcaaaaagactgaaagagcacaaacagacaatctaaagtcacacctgaagtaaccagagaaacaagaacgaatcaaacccaaacccaacag

SEQ ID NO: 26159 - DNA, 120 bp, synthetic construct
  source 1..120: mol_type = other DNA
caagccacatgtgaagaatgaagctggatcctctcctcacaccttttacaaacatcagctgaggatggataaaagacttaagacctgaaagcaaaatctacaagatatcatcagaaaaac

SEQ ID NO: 26160 - DNA, 120 bp, synthetic construct
  source 1..120: mol_type = other DNA
cactgctagtgggaatgtaaactagtacaactactataaaaaacagtacggagattctgtaaagaacttaaaggtagaactatcatctgatctagcaatcccactactggctatctaccc

SEQ ID NO: 26161 - DNA, 120 bp, synthetic construct
  source 1..120: mol_type = other DNA
tggcttcagaaaagtccacaacctctacactgtgaaagatcccatagggttcctaataagcaaagagctgttacgtttgataatccaaatagcccaactgttgaacattaattcacacaa

SEQ ID NO: 26162 - DNA, 120 bp, synthetic construct
  source 1..120: mol_type = other DNA
gaagcttgcaacttacccctgtgcagatgagcccagggcgccagctccttgctgtggggcaaaagaaaattcgtcacatgaaaaaagaagttgttgacatgcagctgattcttacataaa

SEQ ID NO: 26163 - DNA, 120 bp, synthetic construct
  source 1..120: mol_type = other DNA
ttattgtggctttctaaaaccaaacctgcagtatctctcatgtgtgcctgtatttttattttcttaatggtgacttttgaagagcaaatattttcaattttggtaaagtccaaactatga

SEQ ID NO: 26164 - DNA, 120 bp, synthetic construct
  source 1..120: mol_type = other DNA
tttttaggtttcatcgtctgcaaataaacgcagttttactttgtattctgtgtgccttaattttccctgctgcgctgggctggccggaatgtgactgcaatgtcagaagtaggaggaagt

SEQ ID NO: 26165 - DNA, 120 bp, synthetic construct
  source 1..120: mol_type = other DNA
acacttgtttgtgtctcattcttcatcctctccccgcagcgtgcaggtgaccatgcctcacccaaaggagcctgcagccccccacgtgctcagcacacagtgggcattgactattttaac

SEQ ID NO: 26166 - DNA, 120 bp, synthetic construct
  source 1..120: mol_type = other DNA
gagcagggaggttgttgttacttccaacacaggtttccttggggctggggagtttaccctccgtcgttcagcaacatgactgaccgcctaccgctgtgcccactgtgagaccaagcaaga

SEQ ID NO: 26167 - DNA, 120 bp, synthetic construct
  source 1..120: mol_type = other DNA
gccctgctgactgaggttggttttcatgatccctgctttatggatctgggaggtgacgctccaacagggtcactaagtgccagggctccagcatccaccccttcctaagttctggggtca

SEQ ID NO: 26168 - DNA, 120 bp, synthetic construct
  source 1..120: mol_type = other DNA
catgttccaggagagaaggcagcacatgccatcttggccacctctgctctctcactctcccctggcatcccccacagggagagcccagacaacatggaggctgctggggaaggtgacttg

SEQ ID NO: 26169 - DNA, 120 bp, synthetic construct
  source 1..120: mol_type = other DNA
tcctgtgacgcccccccaggtctccaggcctctcgctggagaggggtggccgtgggacattcccaccagcacaccgcctgacaattcaggcagtgcttcttgcaaacgtgattgccttta

SEQ ID NO: 26170 - DNA, 120 bp, synthetic construct
  source 1..120: mol_type = other DNA
acaccaggcaacgttggtccccactcccacgcacaccaaggcctctttcaggtcagcacagagtagctggggagcaggcgtggttcttttccctggtgatcttcacaatacagtgctgca

SEQ ID NO: 26171 - DNA, 120 bp, synthetic construct
  source 1..120: mol_type = other DNA
gggcctccagggacttactctatgcggatgagcttgtccagggacggctgcaccacagccccagagccagacaggaggccggggcacgcaggcaccaagcgccaccacatcaggacaggg

SEQ ID NO: 26172 - DNA, 120 bp, synthetic construct
  source 1..120: mol_type = other DNA
ggcttgtcttgaaactccccaagaaagacagtgctctcttgccctgggccctcaggggagggacctcgtgcacaaaatccactgaggaccaaacatgcctgagtgctgctgtgtttcatt

SEQ ID NO: 26173 - DNA, 120 bp, synthetic construct
  source 1..120: mol_type = other DNA
tggttcatccctgttggacacagggcaaatcccccacagaatgtaccgcacccccagaggctcagtcagcccagccaagcacagtgaccccaaaaccctttacagcttgagggacagagc

SEQ ID NO: 26174 - DNA, 120 bp, synthetic construct
  source 1..120: mol_type = other DNA
cagtgaggggcttagcacctaggccagcagctgtggagggtgcgccaggtcccccaggagtgctggtctgctgtagctgtgctcaattctcactgggcctcagctgcctccctgcggggc

SEQ ID NO: 26175 - DNA, 120 bp, synthetic construct
  source 1..120: mol_type = other DNA
agaatctgaccctggccagagccgagtggcaacagaaaatggctctccagggtgtggaggaccctgggcagaggacctggcctgtggcagacctgggtggatgactgaaagcaacgggaa

SEQ ID NO: 26176 - DNA, 120 bp, synthetic construct
  source 1..120: mol_type = other DNA
ttgagaactgtgttagagggtgagaagaagatgtgtgtcaaacacaacaaaaaaaaagtatcaacaaccacaacagccccaagaggaagaggggagcaggggctggtgaagacaagtggt

SEQ ID NO: 26177 - DNA, 120 bp, synthetic construct
  source 1..120: mol_type = other DNA
caataaaaaataccacatctttggccaccacaccagcaatactttgagaacattttcaaatggatcactcaacaactccaagaagaaatcttgtcctgcgtgttctaacagcgaaacggt

SEQ ID NO: 26178 - DNA, 120 bp, synthetic construct
  source 1..120: mol_type = other DNA
ccacagccccgcgagacggccgtccacaccactcggtgcacatgtcctccaactccagcgacagcttcttggctgcccagtccttcgaggggtcccccggggacttggggggcgtcctgt

SEQ ID NO: 26179 - DNA, 120 bp, synthetic construct
  source 1..120: mol_type = other DNA
aggcagtgctgggggcaccggtgtcagggtgcagggatgccctctggacttggtaaggcgcccgcccccagagcaggtggctgggctgtggggctaagattgaggggtgccacccaggca

SEQ ID NO: 26180 - DNA, 120 bp, synthetic construct
  source 1..120: mol_type = other DNA
gcccctcagagccaccttcagggctcacgcaggacttcccagcccatcagcacgtgctttgcatgaggttttgataagcttggaggttggccttggagggctgagcgggacataaaacgt

SEQ ID NO: 26181 - DNA, 120 bp, synthetic construct
  source 1..120: mol_type = other DNA
cacacacacagatcaggagcggagaagatgggagatgcactgtctggatcgcttcattagacccacgtgctgtttccacaatgacggtaataagaatacatttagttttaagagaatgag

SEQ ID NO: 26182 - DNA, 120 bp, synthetic construct
  source 1..120: mol_type = other DNA
cagaacagaattgacagggctggggaaacagcagccccagcctctgatcacagagctgtccaggggctggaaacccgggtgtccatgtggcatcagtaagcggggccaggcactaggact

SEQ ID NO: 26183 - DNA, 120 bp, synthetic construct
  source 1..120: mol_type = other DNA
ctgctcaggctctggcctccctgagaacctctgtcctggtcacaagtgtcctgcaggccccctgggttgtgctgggctggaccaggccagggcgtgacctctgacagctccacctgctct

SEQ ID NO: 26184 - DNA, 120 bp, synthetic construct
  source 1..120: mol_type = other DNA
gcagtgctgggggacccggcgcacctccgcagccaccgtaggacagaggggcaagggggctcccagactctgcaaaggacgctgcggcggagactgatacgggtctgagatggctgtcca

SEQ ID NO: 26185 - DNA, 120 bp, synthetic construct
  source 1..120: mol_type = other DNA
aacctaatccccattgtggtggcattaacagagcctttgggggatgagattcagctatgggggccaggctcctgggaatgaccgagtgccttatcaaagggctggggcatgaggacatgg

SEQ ID NO: 26186 - DNA, 120 bp, synthetic construct
  source 1..120: mol_type = other DNA
aaaagcaaaccccagggtaggagatgtttgctatgcacaacaaatgttggcttgtctccagaatatataaagaacctctacaaatcgataggaactcaatccacaaagggcagctgactt

SEQ ID NO: 26187 - DNA, 120 bp, synthetic construct
  source 1..120: mol_type = other DNA
aggtggcaggaacaagcctggtgggaggtgaggctgagatgagcttcaccccagtggctctgtccatggcccaggctcctcaggcactgagaaggcagaggtgccaccccgccgaggggc

SEQ ID NO: 26188 - DNA, 120 bp, synthetic construct
  source 1..120: mol_type = other DNA
caccttttatcatgccaagaagtcaaacgtgggatgccatgtggggaacatgccctgggtgggggaataccctgggtggagatgccatgtggggaggatgctctgggtggggaatctttg

SEQ ID NO: 26189 - DNA, 120 bp, synthetic construct
  source 1..120: mol_type = other DNA
acagactgcctgactctccagagagctccccagtctccatctgcgatgggtgatcctaattttcttcaggaagttctcctgagccctgcgtgtggcgctttggcctttgtgcccacggaa

SEQ ID NO: 26190 - DNA, 120 bp, synthetic construct
  source 1..120: mol_type = other DNA
aagagccaataaacatgccaggtggatcagcggtgacactgagagggaacgcaacaccccatcaaaacagcagccccccaacccccatcaaaacaatagcccccaacccccatcaaaaca

SEQ ID NO: 26191 - DNA, 120 bp, synthetic construct
  source 1..120: mol_type = other DNA
agtactgtgtgctcccatttctcagtactgtatgcccatttcccagtactgtgctcccatttctcagtagtgtactcccatttctcagtactgtgctcccacttctcagtactgtgctcc

SEQ ID NO: 26192 - DNA, 120 bp, synthetic construct
  source 1..120: mol_type = other DNA
tgagaaatctttgaggcttaggatgaaggtttgttactcagaaggaattatgcttggctcctgggaatgaccagttcagaatcactctctattaaattctcagcttggggacttttggtc

SEQ ID NO: 26193 - DNA, 120 bp, synthetic construct
  source 1..120: mol_type = other DNA
tgcaaatgataaagaatgtgacctgaaattatctgcaacttcagcagacaagctgtggttggctgagtttgggcttctataaaacacactgagccatcttgtttcagtcactaatcaagc

SEQ ID NO: 26194 - DNA, 120 bp, synthetic construct
  source 1..120: mol_type = other DNA
ttcttgcaatctttccacatctctttcatctccccttcaatctcagtggatttgtcttctcatctcaacttgtctccaattatgattttgactcctgcctcatgaagaccctgtgctatg

SEQ ID NO: 26195 - DNA, 120 bp, synthetic construct
  source 1..120: mol_type = other DNA
caataagccaccagttcacactactcgactgtcaattccaagtgttggagaggacatgaagcaataggacttcttataccctgctgtgagagtgtaacatgtgcaacacctttaaaaaac

SEQ ID NO: 26196 - DNA, 120 bp, synthetic construct
  source 1..120: mol_type = other DNA
taacgtgcagagagcacttagtatcgacaatacaaacaactccatttaaaagtgcgcaaacctttgaaaagctaattcatacaagaggaactgtgaaacggtaaaaaagagaatgacaat

SEQ ID NO: 26197 - DNA, 120 bp, synthetic construct
  source 1..120: mol_type = other DNA
aaagtggtgtgcagttgggctggaattgtgcagtgttggggcagagctgtcatcagtggatgtatttagagttgaaatgacaagatctgactctcaatgaaacactattagaaacattaa

SEQ ID NO: 26198 - DNA, 120 bp, synthetic construct
  source 1..120: mol_type = other DNA
ttcgagatgagacgagtgtataactatgttactaatagataaaataatcccattaaacttacaaactcacccaagtgcagatggacacgggtcttcatccccttcctgtggggaagtgaa

SEQ ID NO: 26199 - DNA, 120 bp, synthetic construct
  source 1..120: mol_type = other DNA
aacgacggtgtcactttcataggattgtcctggagcccacggagacgcgggcttgggattcaacatgatgctgagcggatcttctctgcttcagaccaggcctcatgtggcttcactatt

SEQ ID NO: 26200 - DNA, 120 bp, synthetic construct
  source 1..120: mol_type = other DNA
tgggagacaggtctgatatgcagctcccacatggagagacagaacagcatgtggagactcatactgtggcctttcactccaggaaccaccacagcagcataccagaaaaaacaaaaagtc

SEQ ID NO: 26201 - DNA, 120 bp, synthetic construct
  source 1..120: mol_type = other DNA
ctgacaaagcagacaaatccacaagtttggaaaacttatttgaggaaatgatcaaggaaaccttccctggccttgctagagttctagacatccaaagacaagaagctcaaagaatgcctg

SEQ ID NO: 26202 - DNA, 120 bp, synthetic construct
  source 1..120: mol_type = other DNA
caagtatcttttcagaccacaggggaataaattgataattaactccaaaaggaacccatgaaattacacaaatatgtagaaattaaataactgcttctgaatgatctttgggtcgacaat

SEQ ID NO: 26203 - DNA, 120 bp, synthetic construct
  source 1..120: mol_type = other DNA
gtttcattgtctgcaaataaacacagttttattttgtattctctgtgccttcattttccctgctatgctgggctggccagaatgtgactgtgatatcagaagtaggaggaaagggcgtca

SEQ ID NO: 26204 - DNA, 120 bp, synthetic construct
  source 1..120: mol_type = other DNA
ctgcacttccctgctctgccgcctgaggcaagggccagcttctctgcagcacaagggcctgcagcaccccacgtgctcagcacacagtgggcattgactattttaacccagggaaacatt

SEQ ID NO: 26205 - DNA, 120 bp, synthetic construct
  source 1..120: mol_type = other DNA
tgctgccttcggttggttttcatgatccctgctttatggatctgggaggtgaggctccaacattgtcactaagtgccggggtcacagtgcccaccccttcctaagtgctggggtcacagc

SEQ ID NO: 26206 - DNA, 120 bp, synthetic construct
  source 1..120: mol_type = other DNA
aaggcagaatggcagagggatggattcagcatggatgtctttgggtgactcagcatggatgtctttcggtgacagaccctctctggaactggtggcctcggggccatcctagaaggcaaa

SEQ ID NO: 26207 - DNA, 120 bp, synthetic construct
  source 1..120: mol_type = other DNA
acctcagatattaagtcacagccacaggcccatttcccgaggatgctggcatcacgggatctgggttaggcgtggactcgcctctggagcccacagtcctcaccgccacgtctctccagt

SEQ ID NO: 26208 - DNA, 120 bp, synthetic construct
  source 1..120: mol_type = other DNA
acccgccagattgagccagctcgaggcaccagagcagaatgagtccagaaggaagtggcacctggggctagcatgagccagaggagctggccccaccttggccatcgtggagctgctctt

SEQ ID NO: 26209 - DNA, 120 bp, synthetic construct
  source 1..120: mol_type = other DNA
ctccaccgtgctcagggaaacatctctcttccttgcatctccaccgtgctcaggggaaacacctctcgtctatgagcctccaccgtgctcagggaaacacctctcatctgtgagcctcga

SEQ ID NO: 26210 - DNA, 120 bp, synthetic construct
  source 1..120: mol_type = other DNA
cctgcacacacagccctgctcacccagatctagaggagatgagtccacccgtcggccctgcacacacagccctgcttacccaggcctagagaagatgaggctacccattggccctgcata

SEQ ID NO: 26211 - DNA, 120 bp, synthetic construct
  source 1..120: mol_type = other DNA
tcacttaggaaacacaattcaatacgatccagtgtgctcaacacacccccaaccccttcacaagctacgccctgatcaccaccttctgactgagttacccagatttcaggactggcctgt

SEQ ID NO: 26212 - DNA, 120 bp, synthetic construct
  source 1..120: mol_type = other DNA
ccagggacaaaagtgctgtggttgagaactgtgttagagggtgagaagaagatgtgtgtcaaacacaacaaaaaaaaagtatcaacaaccacaacagccccaagaggaagaggggagcag

SEQ ID NO: 26213 - DNA, 120 bp, synthetic construct
  source 1..120: mol_type = other DNA
acaataaaaaataccacatctttggccaccacaccagcaatactttgagaacattttcaaatggatcactcaacaactccaagaagaaatcttgtcctgcgtgttctaacagcgaaacgg

SEQ ID NO: 26214 - DNA, 120 bp, synthetic construct
  source 1..120: mol_type = other DNA
ggtgcgagcaaggtcgggaagccgggcagcctctcatgctgccccatggccatggctcagcttttcattacagaatatcaacggaggcccaaaaagcagtgtacggagagcataaagcca

SEQ ID NO: 26215 - DNA, 120 bp, synthetic construct
  source 1..120: mol_type = other DNA
tgggtaccttagagttcctggctaacggagagtgcccatgtgctcttctcacatgcctgcttggtctgtcctgctgagtggctccttgtctgcttgatgcttctccgtgggcattgctga

SEQ ID NO: 26216 - DNA, 120 bp, synthetic construct
  source 1..120: mol_type = other DNA
ttaaagaaggatgggaagttaaagtttttttaaaagacaattgtgcgtgataatgagacgtaaagtgtaattctttgactccatccagttgtctgccagaagttacatgtgactggcatt

SEQ ID NO: 26217 - DNA, 120 bp, synthetic construct
  source 1..120: mol_type = other DNA
gttttcccatttaaacaatccagatgatgaaaagctgctgtgaggcaggatgaagagggagacagaaacatttctattttctggtcttataggaagttaagtcgcagcagaactctggct

SEQ ID NO: 26218 - DNA, 120 bp, synthetic construct
  source 1..120: mol_type = other DNA
tcctgctggcctcattttccaccttgtctcataaggtgccctcccaccctccccctaccgccagtcgaaacggggtccttgctgtccttcagccccagagcctgcacccttgaccttgct

SEQ ID NO: 26219 - DNA, 120 bp, synthetic construct
  source 1..120: mol_type = other DNA
tgcagtctcagaaaaccaacacctgcacctggtctgcagacacacgtgtgtgataccagcctggtgggacccacgaagaccccatgaggccgtgacctcacagagctgagcatcccgcta

SEQ ID NO: 26220 - DNA, 120 bp, synthetic construct
  source 1..120: mol_type = other DNA
gctgcatgatccacgctcacaggtgtcattgtctatgctcaggggggcttggcaccatgggaaacccacccagaacacatggagaagccacagcacaacctcagcgcccgccatgcagga

SEQ ID NO: 26221 - DNA, 120 bp, synthetic construct
  source 1..120: mol_type = other DNA
actgaggagacacacaggggacagtgaggggacggcgaggggatgcagaggggacaccaaggggacagtggggacgaaaaggggacagtgagaggacagcgaggggacactgaggagaca

SEQ ID NO: 26222 - DNA, 120 bp, synthetic construct
  source 1..120: mol_type = other DNA
gatgggaccccacaggctttcatcgtgtcatcattccgtttctggatagtgtgaagcttcccataagaagtttgaaaatcagagaaatgaagacacaaagtctcagaccccgatgtcctg

SEQ ID NO: 26223 - DNA, 120 bp, synthetic construct
  source 1..120: mol_type = other DNA
ctgctccgcgtccaggttcagcatcaccagcacctggggcctgcagccagggtggggcggctgttaccacggcaacgcttaccagggcacggcccatcaacaggcagggcagatgggacg

SEQ ID NO: 26224 - DNA, 120 bp, synthetic construct
  source 1..120: mol_type = other DNA
ggctccaattcaaacacgctttcgagatggtacctctgggaaagctgcctgtctgcgtctacggagggaaggtcagcactaaagagaagcctcatgtggggaacaacatactcctggaaa

SEQ ID NO: 26225 - DNA, 120 bp, synthetic construct
  source 1..120: mol_type = other DNA
gcctgggcttcccgtctcgggttctggaaagtccaggcttcccgtctcgggttctggaaagcctgggcttcccatcttgggttctggaaagcctgggcttcctctctagggttctggaaa

SEQ ID NO: 26226 - DNA, 120 bp, synthetic construct
  source 1..120: mol_type = other DNA
ggcatttgggcaacggaggccaagggcagatgggcgttctccacactggtcttgcaacctttctgaaatctaaaattacatggaaatcaggttaaaagaaaaattacacatactttcaac

SEQ ID NO: 26227 - DNA, 120 bp, synthetic construct
  source 1..120: mol_type = other DNA
attacaaccttcaagcctttaaagagaacgcatctcccctcactttcttgagaagagtgtcgcttggtctctacggaggccacagcaagcgtgctctcagcaggatggaagtgcccactt

SEQ ID NO: 26228 - DNA, 120 bp, synthetic construct
  source 1..120: mol_type = other DNA
ccagccgcgtcccttgcgctccctggcctggacttggacatcggcagtcctggctgctgtgaagggcagtgagttttcctctggccgagccctgcctgtgttttggggatagagccactc

SEQ ID NO: 26229 - DNA, 120 bp, synthetic construct
  source 1..120: mol_type = other DNA
caggaacttgacgttggcccacacgacacttagcgttatgtaggagtaatacaaactaccagaaagagatagacgatgatgatgatgatggtgatgatggtgatgataaaacaggaaagt

SEQ ID NO: 26230 - DNA, 120 bp, synthetic construct
  source 1..120: mol_type = other DNA
tgggcccagaccccgggagaggcctggctgccctgtgcccccgccagcctcaataccagctctcacccacggggacaggcagcctgctgctcgaccagtcccaggcctgaggaggtccac

SEQ ID NO: 26231 - DNA, 120 bp, synthetic construct
  source 1..120: mol_type = other DNA
gcttctctgaggcttgtggacagaccagaggccatttcaagtctcatgactccaccttttgtttcaaggtgatttacttcacagctttgttcccttacctggtcctgaccatctttctca

SEQ ID NO: 26232 - DNA, 120 bp, synthetic construct
  source 1..120: mol_type = other DNA
agagcattctgtactatcccagatcgcggcactccctgcccagcatcccgaggcagtttccaggggctggtgtgggagtgggcacctgggtatgggcatgtctgcccggagtcctagcaa

SEQ ID NO: 26233 - DNA, 120 bp, synthetic construct
  source 1..120: mol_type = other DNA
agaagtgaggggagcgaggtctctctcttcaggattgttctaggaatagctggagccccaaaaaggtgtttgctggtatccatgtgtcccgcccttggctgtctgtgcttgaaccttaag

SEQ ID NO: 26234 - DNA, 120 bp, synthetic construct
  source 1..120: mol_type = other DNA
ggccgcactggctgtgtcccactgccaaaggctgcaaacaattcccacagacccagggccagggcctgtgaaccaagaaccccagtctatctttgtctcaggttgccaggcctcctggaa

SEQ ID NO: 26235 - DNA, 120 bp, synthetic construct
  source 1..120: mol_type = other DNA
caccgtctggaggctgttcacctagagtcgccaagaaagagtgagaaacggtagaaacctctctgggattttaagtttttactttttgctttatcatccattcagatggaacaagaaaga

SEQ ID NO: 26236 - DNA, 120 bp, synthetic construct
  source 1..120: mol_type = other DNA
gaggggggagtggacacggacgcccacaggagagagggagcggacgcagatgcccacaggagagggagtggacgcggacgcccacaggaggggggagtggacacggacgcccacaggaga

SEQ ID NO: 26237 - DNA, 120 bp, synthetic construct
  source 1..120: mol_type = other DNA
cacgaactgtcgcatgtacggctggaggtctgtcaaggtagagacctgccggcagaggagagggcatgagccacaaatgtggcctgccccggccagagctgggcacttgtttcttccgat

SEQ ID NO: 26238 - DNA, 120 bp, synthetic construct
  source 1..120: mol_type = other DNA
accacacatcagaccccacgaccgccatccacagtcaccacacatcagaccccacgaccgccatccacagtcaccacacatcagaccccacgaccgccatccacagtcaccacatcagac

SEQ ID NO: 26239 - DNA, 120 bp, synthetic construct
  source 1..120: mol_type = other DNA
aaaccacatcgagtacgattcaaccctgagaaccaacctggaaggcagtaacaggaaggtacatggggcctgcacccttcccaacccaggagcaggcaacacgcccacaaatagcccatg

SEQ ID NO: 26240 - DNA, 120 bp, synthetic construct
  source 1..120: mol_type = other DNA
cacagatccccacctaccccacacatgaaaaccaatcccacagatctccacctaccctacacatgaaaaccaactccacagatccccacctacccccacacataaaaaccaactccacag

SEQ ID NO: 26241 - DNA, 120 bp, synthetic construct
  source 1..120: mol_type = other DNA
acaaacagctttagccacaaacagctgataaagtggactgcgttactggactgtgttagtggactgcgatagaagtacaatcttccagtcctcaaaaggcttgacttgagagcacaaaag

SEQ ID NO: 26242 - DNA, 120 bp, synthetic construct
  source 1..120: mol_type = other DNA
atacagtacctgattccaatgctttgcaacttgctccagacactcttccggtagaaaaagagcctgttcttttgaaacgtggtctccgtgacataaaagaaagacctgagcagctcgacg

SEQ ID NO: 26243 - DNA, 120 bp, synthetic construct
  source 1..120: mol_type = other DNA
tgcaccatccggacaccacacatccagctaaccgcagggcctggtgacctcaccccggacctgcaccatccgacaccgcatatccagctaaccgcagggcctggcgacctcacgccagac

SEQ ID NO: 26244 - DNA, 120 bp, synthetic construct
  source 1..120: mol_type = other DNA
tatccagctcacagcagggtctggcgacctcaccccggaccggcaccatccggactccatacatccagctcaccgagggcctggcgacctcactccagacctgcaccatccagacaccgc

SEQ ID NO: 26245 - DNA, 120 bp, synthetic construct
  source 1..120: mol_type = other DNA
cgggatcccgcagacaaagctcaaaaaatgtcaaatgtcctgtgagtgatgctcccaccaataacaccctaaaatgatgaggtgtggacatgctgggcttcagtaaaatctattattaca

SEQ ID NO: 26246 - DNA, 120 bp, synthetic construct
  source 1..120: mol_type = other DNA
agcatcagaaaagataggcttggggaccagcactgcgcctgcaccatctacccaggcaatgggcaaccggcgcagctgtggctatagaaagagcaaacattcaggagcaagctcaagtga

SEQ ID NO: 26247 - DNA, 120 bp, synthetic construct
  source 1..120: mol_type = other DNA
gttaggagtgccaatctcatgttatatgacttttgccaccataaaaagaaaaaaagaaaaaaaagagccccaagaaggtcaccctccttgtctgcatggccggaagtcttacatgtcttg

SEQ ID NO: 26248 - DNA, 120 bp, synthetic construct
  source 1..120: mol_type = other DNA
ggacaacaaaaacagcatgtgagggcagttctttacgccactctgcctgcacccaaataagcccccacctacttctgcctgccactcgggcagccctggagccagttttgggaccgctct

SEQ ID NO: 26249 - DNA, 120 bp, synthetic construct
  source 1..120: mol_type = other DNA
agggacattccacccagctcctcctctacagggacattccacccagctcctcctcgacagggacattccacccagctcctcctcgacagacacattccatccagctcctcctctacagac

SEQ ID NO: 26250 - DNA, 120 bp, synthetic construct
  source 1..120: mol_type = other DNA
gcctcaggactctctgcttggtggacagggcctcaggactctctgcttggtggacagagcctcaggactctctgcttggtggacagagcctcaggactctctgcttggtggacagggcct

SEQ ID NO: 26251 - DNA, 120 bp, synthetic construct
  source 1..120: mol_type = other DNA
attcattcattacgttatttgatacacatattcagacatccaatgagggtctttgaacacaccccctgaggatgagggactactgtataacaccagatgaggataaggggcggactactg

SEQ ID NO: 26252 - DNA, 120 bp, synthetic construct
  source 1..120: mol_type = other DNA
cacatcgggtaagggggaactactgtatacacacaggactgactttttacatttaaaaatcagtgtgttagaatttatacaagagaactactttctgctagaggctgcccagctccgccc

SEQ ID NO: 26253 - DNA, 120 bp, synthetic construct
  source 1..120: mol_type = other DNA
ggcactcgtcggcttcttctccgcctcgatctgctgttaagtgaggaaaacagaggccaatgctgggacagaaaaccatgcccaggacagcagggtcagccccctaacctgcgaacagaa

SEQ ID NO: 26254 - DNA, 120 bp, synthetic construct
  source 1..120: mol_type = other DNA
tgctgctttgcaacatgtggtcacggacttcaccaattccttttttgaggtcctcaaactaagtgggcccacttctcagaagttgagagggtgagagccccctgaccttggcagaagact

SEQ ID NO: 26255 - DNA, 120 bp, synthetic construct
  source 1..120: mol_type = other DNA
ccatcccatcatgttctattccatcccatcctgttctattacatcacatccggctctatcccatcccatctcatcccatcccatcccttcctgctgtatcccaccttgttctattccttg

SEQ ID NO: 26256 - DNA, 120 bp, synthetic construct
  source 1..120: mol_type = other DNA
catctgcccttggcacccctgctcactggagctgcggaggcggagggcaccttgggtctttgaagaaaaggagccacagaaaccaaaaggaagttgctgagcaatgctgggtgcccacca

SEQ ID NO: 26257 - DNA, 120 bp, synthetic construct
  source 1..120: mol_type = other DNA
ggtgctgggtacccaccgctgcccacagtgctgcccacgctgctgggtacccactgctgcccacaagacagccccagggtccctctccagggatgaggccgagcaaactctagcaataat

SEQ ID NO: 26258 - DNA, 120 bp, synthetic construct
  source 1..120: mol_type = other DNA
gagagcactgtggagggttttccatggtggtaactgacaatggatgcccaatttgaaaatttttcaaggttaaaactttctgtatcaagtccttagcttgaaaccctgggaagtccttga

SEQ ID NO: 26259 - DNA, 120 bp, synthetic construct
  source 1..120: mol_type = other DNA
aggaaacccactaccctgttggctacagaaccttctagtgatctctgctcatgacatcactgtgggctccagatgaagcttcacctgacacatttcttaaacaccatttagtgacacggg

SEQ ID NO: 26260 - DNA, 120 bp, synthetic construct
  source 1..120: mol_type = other DNA
agggaggcctctttttgtagctccatttcagtgcagtccagtgaatgtggagcccaggaagaaattactgaagtcataagattcactaagcagcccattaagaacgaatgagtctcgtgc

SEQ ID NO: 26261 - DNA, 120 bp, synthetic construct
  source 1..120: mol_type = other DNA
aagctgcgttagtatcacaagacgctgacctcagcaacaccactgtaacgacaactgggaggctgacaaaattaagatctgtcaaagtaacgcccattagaaccgtcttcaaagttgtca

SEQ ID NO: 26262 - DNA, 120 bp, synthetic construct
  source 1..120: mol_type = other DNA
tgagtgtaaaaatttgtgtttccacattttgcagttataatccccttgtccctccaattccctgtatcccagattatcccatgtggcaaatttccccgggttgactcctcttttaacaca

SEQ ID NO: 26263 - DNA, 120 bp, synthetic construct
  source 1..120: mol_type = other DNA
gcaaggattcctgggcagccctacgccccggcaggaaggagctgatttcccgcttgctttaaaacctggtctcgcaaacctgaagtggggatgttctgagttgcagaagcagtgtgtggt

SEQ ID NO: 26264 - DNA, 120 bp, synthetic construct
  source 1..120: mol_type = other DNA
ttggtaggaagtgccaagcaaggcattgaatcctgttgagactctgtttcagtttgttactaaaaaataagaacacccttgctcgcttaagtgagcttgccattgctaacaatgcacttc

SEQ ID NO: 26265 - DNA, 120 bp, synthetic construct
  source 1..120: mol_type = other DNA
tcagagcttctctcttaggcctggatcagcgagcaaccaagaggagtgttccaagtcctctccatcttcgatcaggatgcacaaaaagcacacctgtaagcctaaagatgtgagtgcaag

SEQ ID NO: 26266 - DNA, 120 bp, synthetic construct
  source 1..120: mol_type = other DNA
aagagaaacctagctgaaatattcgacctgcaggactagccaagtttctcagaaacacctgtgatatgacatatggtcttactgcaattggaggctattcaacagtggaataccaatgcc

SEQ ID NO: 26267 - DNA, 120 bp, synthetic construct
  source 1..120: mol_type = other DNA
ttactatatgatcatatgatccagccattcaacttctgagtgtatatccaaagaatcgtaaccaggatcttggagaggtatttgtataccatgctcacagcagcatggctcacaacagcc

SEQ ID NO: 26268 - DNA, 120 bp, synthetic construct
  source 1..120: mol_type = other DNA
tactgctctgttaacctttcccaatatgtcaaccagcagagtataaagttcagtaacaacagaattcaatgtattagatgaaatttcactatttaaaaaacctccatacttcctaaatat

SEQ ID NO: 26269 - DNA, 120 bp, synthetic construct
  source 1..120: mol_type = other DNA
gactggagtgggtgtcaggggtgtgtgctcacatatttcagaggcatggatgcatggttctagaaagatagacacggggaaaagatgtgtatgtgactacatgattatttatatacatta

SEQ ID NO: 26270 - DNA, 120 bp, synthetic construct
  source 1..120: mol_type = other DNA
cccatacaagtggattctctcatatactacccctgacctttaaattagatcccagatgtagaggagaatctagtgaaacatagcaatgcttttcacatggaggacatcctttgagtcacc

SEQ ID NO: 26271 - DNA, 120 bp, synthetic construct
  source 1..120: mol_type = other DNA
gtaagcaataattaactcccaggttgataaatcacgtggctgcagaatttttttcccttgaaatatataggtgaatgctgcttagaatgtggtggtgtaaccacctccttggacggagag

SEQ ID NO: 26272 - DNA, 120 bp, synthetic construct
  source 1..120: mol_type = other DNA
gtggcccaggtttggatatggaaaaattttttttaaagggagagaaaattctgactgagtgacagtgttcctgtttgggcttatgtccaatggtgatgtggaggtaaaaatgaaggggaa

SEQ ID NO: 26273 - DNA, 120 bp, synthetic construct
  source 1..120: mol_type = other DNA
aggctggagacactatagtatcccacaccacacagaggacatgcctccttggaagggtcaggagtactatatcatgtaattttattaaccaagttacttcatcacatgcttaagcaaaac

SEQ ID NO: 26274 - DNA, 120 bp, synthetic construct
  source 1..120: mol_type = other DNA
ttgtctcaggattaaagtagaaagggctttatgtgagaatacatcaagtcctgttgtcactgtgttggtcatatgctgaagcgactaaaatattaacaggtgacttccccagcatggtcc

SEQ ID NO: 26275 - DNA, 120 bp, synthetic construct
  source 1..120: mol_type = other DNA
ctcatcatcgtcatcaccatcaccatccctatcaatatcaccatcactatccctgtcaccatcactgtatcacctgttatcatcaccatcattaccatcaccgtcattattatcatcatc

SEQ ID NO: 26276 - DNA, 120 bp, synthetic construct
  source 1..120: mol_type = other DNA
tttgggacatggctggactgtcagttgtttggacagcaaagggtgctcagtgttgcccaaggatcaagcaagaaaaagagaattggtgtagggttattttagatccaatgttacaaagct

SEQ ID NO: 26277 - DNA, 120 bp, synthetic construct
  source 1..120: mol_type = other DNA
aaatgttttcatttatttcacataaccacctttatatgtagttctgatctagaaaagtcgcagggaatgtcataggacgtataacattttgcaaaattaatgcattttgatcaacaatat

SEQ ID NO: 26278 - DNA, 120 bp, synthetic construct
  source 1..120: mol_type = other DNA
agccataaaatgatgggatgattgtagaaaaagagaatctgagagttaaacggatttcatgcatccagtccaaggcttaatttactatcacacccttgcaggggcaccccaagttccaca

SEQ ID NO: 26279 - DNA, 120 bp, synthetic construct
  source 1..120: mol_type = other DNA
aaatgcctaaggaattccaaatgatttggcaagctaaatccattctgtcaatagaaaaaaaaaaaaagatacagatgtctctgccaacaaaaaatcggttcagaatattaggttgtttat

SEQ ID NO: 26280 - DNA, 120 bp, synthetic construct
  source 1..120: mol_type = other DNA
agatgccagtcaaagcttcccccaccagttgtgacaactaataatgtccccagatattgccaaatattcccagaaggtgaaattgtcggaagttgagaacttctagtctaaaaattgact

SEQ ID NO: 26281 - DNA, 120 bp, synthetic construct
  source 1..120: mol_type = other DNA
agcacgaggtgggatctccaagaagccaaggatgctgttataatgggctggtccaaggtcacttcttattggttttacaacacctataagacataaatgttgactattttcactatcgtg

SEQ ID NO: 26282 - DNA, 120 bp, synthetic construct
  source 1..120: mol_type = other DNA
gggattggcaaactatggcctatgggcccaatctatcccatcacctgtttttgttaataaagttttatcagaacacagccatgcccattgtttacatatgttctatggctggatttgtgc

SEQ ID NO: 26283 - DNA, 120 bp, synthetic construct
  source 1..120: mol_type = other DNA
gagtattttctacactttcacacaaaatcgttttgaaactccagctaattactatacttccatttcctctgagggaaaaaataaaataaaaagcaaaccttctggaattcctagcacagc

SEQ ID NO: 26284 - DNA, 120 bp, synthetic construct
  source 1..120: mol_type = other DNA
tgtcattacagtaaggtgacaggaaagggcattcatagtcttcatgcagagacgtgggcttttttaagcaacttaccatggaaggctaactccttgaagaggcttttactctaaatagac

SEQ ID NO: 26285 - DNA, 120 bp, synthetic construct
  source 1..120: mol_type = other DNA
attacgtgagttaatatgaaacaaatgaatttgccaatatgaagatttattctagaaagccaatttgggagacaacatataagcatttttggtgcgtctacttcaaaacccctgaaaccc

SEQ ID NO: 26286 - DNA, 120 bp, synthetic construct
  source 1..120: mol_type = other DNA
ctaatagaaatcaagtgacacgtctttagcatgttctttgctatgccactggttatctgtagaggctccagagtttagtaagtcttcttaattggacatcatttagctcagccactgggc

SEQ ID NO: 26287 - DNA, 120 bp, synthetic construct
  source 1..120: mol_type = other DNA
cttagctaaatccatgcaaagtgttccccgaaatgaacgttcagtctcctccaggaaggtgattccccgtctcagtaaaacataggtagaaaaatcagtcttatcatgggttacagaata

SEQ ID NO: 26288 - DNA, 120 bp, synthetic construct
  source 1..120: mol_type = other DNA
tcagacacttctaccaagaagggatacttgtcattgtacctcatatttcattgaccaaagtaagttacatgtccatgcctaatttcagaggtggcagggaagtgcagtttcagtgtatgc

SEQ ID NO: 26289 - DNA, 120 bp, synthetic construct
  source 1..120: mol_type = other DNA
ttctggctgttttatacttcaacaattttttccctaagtggtaagcaattactttaaaacatatttttaaaaacatcggtatcgggagctgcggtggctccggccggttgtcctggcaca

SEQ ID NO: 26290 - DNA, 120 bp, synthetic construct
  source 1..120: mol_type = other DNA
ttgtggatcttggtataaagtcattggaacatatctgttttaacagcaagagatcctaggcagatacttcaaaaggttaaaaattcttaatcctacagaattttaaatgaatcttatcaa

SEQ ID NO: 26291 - DNA, 120 bp, synthetic construct
  source 1..120: mol_type = other DNA
tggttctcagtcatgtttgccaagcgatgtggtgtaaatactcccactgctgctgagttcaggctgccaaggtgaagtcctccagctcacacaactgctggaaacttagcagtaggctca

SEQ ID NO: 26292 - DNA, 120 bp, synthetic construct
  source 1..120: mol_type = other DNA
cccaagtctcctccgtgagcgctaggcctactaagtagccacctgagtcaccagttccactgggcgcctgacagacatgtcagtggaagccaccccaaactcagcttctctctggaactt

SEQ ID NO: 26293 - DNA, 120 bp, synthetic construct
  source 1..120: mol_type = other DNA
cctggcctcaaactagatttcaatatggcgtgtgtttgggttcccttgtgcaaggaaggctgtgtgtctcatatatgtaaagaaaaggaaagctccttttggttactcatcatggttttt

SEQ ID NO: 26294 - DNA, 120 bp, synthetic construct
  source 1..120: mol_type = other DNA
tgcttgttaacgttaggaggcgacatgttgcacggtagcattaggaagtaacatggagttgcagggtaatgttaggaggtgatccggagttacatggtaacattaagaggcaatgtggag

SEQ ID NO: 26295 - DNA, 120 bp, synthetic construct
  source 1..120: mol_type = other DNA
acgcggggttgcgcggcgatgttaggcggtgacgcggagttgcgcggcgatgttagcgggtgacgcggagttgcgcggcgatgttagcgggtgacgcggcgttgcgcggcgatgttaggc

SEQ ID NO: 26296 - DNA, 120 bp, synthetic construct
  source 1..120: mol_type = other DNA
tctttgtcaccctgtcaggaaacacggaaagctcaggttaatcaataggaagcatggggtttgtgggtgaggaagccccaggccagtgcccaccagcgtccctgcggaaggatagcaatt

SEQ ID NO: 26297 - DNA, 120 bp, synthetic construct
  source 1..120: mol_type = other DNA
tgtaggaagcatggggtttgtatgtgaggaagccccaggccagggcccaccagcgcccctgcaggaagcatggggtttgtatgtgaggaagccccaggccagcgcccaccagcgtccctg

SEQ ID NO: 26298 - DNA, 120 bp, synthetic construct
  source 1..120: mol_type = other DNA
cagcattgctaagtctacttgccacagctcatcttcagctgtccatgtgcttatcatctgttgttcccagtggcatggctgccctgtgagaagagggattttgttttgctcactaatgtg

SEQ ID NO: 26299 - DNA, 120 bp, synthetic construct
  source 1..120: mol_type = other DNA
ctctactgagagccctggtggggggaatctttctctactgagagccctagtgagggggaatctttctctactgagagccctagtgagggggaatctttctgtactgagagccatggtggg

SEQ ID NO: 26300 - DNA, 120 bp, synthetic construct
  source 1..120: mol_type = other DNA
agggaatctgcagtcatcagctctaaggaagcttctttgggatatgtcacgtaagaggttgtatcatggcaagaggggaaaatatctcaacagcagtttcatgcagttccccttaaatcc

SEQ ID NO: 26301 - DNA, 120 bp, synthetic construct
  source 1..120: mol_type = other DNA
aaagtcaaacaatacacaagttacaaaaaacatattaatactaacgtggcattctaacaagtgcttggaaggaaaaaccaagccggattaggggatagacgagcaggggcggggatagag

SEQ ID NO: 26302 - DNA, 120 bp, synthetic construct
  source 1..120: mol_type = other DNA
tgtgggaaagaggaatcaagccttaccgcagtgcttctggtgtgaaccacaggggcctgaggtccccttcactgagccaggaacaatgggagggagggaagcagctttagggagtggaac

SEQ ID NO: 26303 - DNA, 120 bp, synthetic construct
  source 1..120: mol_type = other DNA
attcttcagtagttggggttaggactgcaaaatgtgaatcttggagggaggtataattttactcaaaacagcccctaataaggagagtgaatcatttgactggtgggtgatgaagctctg

SEQ ID NO: 26304 - DNA, 120 bp, synthetic construct
  source 1..120: mol_type = other DNA
aacgtgttttgaaagaatgaaggtgctaacgaatgaagaaagggcttggacatggacagtgtttccacagttctaccagtgactctcagaagagcaagagtcattcctagattagccaca

SEQ ID NO: 26305 - DNA, 120 bp, synthetic construct
  source 1..120: mol_type = other DNA
taacacccaacacacacacacccaatacacacacccaacatgtacacacacacatccaacacgctcaaacacacccaacatacactcacacacccaacacacacagacacacacagagga

SEQ ID NO: 26306 - DNA, 120 bp, synthetic construct
  source 1..120: mol_type = other DNA
agttgtcctttaccttcaaaaacaaaggccatgctgtttctcaacatggaaacaccccgaggacccggatttaccgacctctcctctttctctgcctttccccagcggcatctcagtaga

SEQ ID NO: 26307 - DNA, 120 bp, synthetic construct
  source 1..120: mol_type = other DNA
accctcaacccacacatacatactctcacacactccctccccatgcaccctcaccccacatgcactcacactcccgatataccctcaactcatgtacatatgctctcacacactcactct

SEQ ID NO: 26308 - DNA, 120 bp, synthetic construct
  source 1..120: mol_type = other DNA
accatcgcaaaggatggggtatttgctaacgaggaattaagtaactagtactttgggtaggactatgcatcaggcatgattgcctgtctctcattactcttgaccacatgatatcatgga

SEQ ID NO: 26309 - DNA, 120 bp, synthetic construct
  source 1..120: mol_type = other DNA
gagatgataagtttctcctggtttatgccacccactttgtggtaatctattatggcagccactatggtctgaatgtttgtgaccccctagatttgtaggctgaaacctaatcacaaatgt

SEQ ID NO: 26310 - DNA, 120 bp, synthetic construct
  source 1..120: mol_type = other DNA
ttaccctgtctggagggaagtgcatccatcatactgtcttctccttaatcatcagttatgtgactattaacaagatattttcgccaatatgtgcttccattagcataaacccgtgcctta

SEQ ID NO: 26311 - DNA, 120 bp, synthetic construct
  source 1..120: mol_type = other DNA
ataattatatgatgtagggaaatggttttgtgatgaactgtactatcatttagcaaatctgtactcctccccaccccactgccatggaataggctttgtgtcccactgactatggacttt

SEQ ID NO: 26312 - DNA, 120 bp, synthetic construct
  source 1..120: mol_type = other DNA
ggatgtgaatagattacgtaagctcctttctttggtgagatcggtcagtgagtatagagttcccactggctacctgaacaccacaaaagagaactgagcttgaaacttttcagagagatc

SEQ ID NO: 26313 - DNA, 120 bp, synthetic construct
  source 1..120: mol_type = other DNA
tgggttctggagtcaccacaactgtcaaactctccattcaactcttgccaatccatgccaaaaatgtaccaacttttactcttgtgggctgctgaaaccgggaattatttgttaaagcaa

SEQ ID NO: 26314 - DNA, 120 bp, synthetic construct
  source 1..120: mol_type = other DNA
ccactactactaccactactactgctactaatactactactactaccactactactactaccactaccactactactgctactagtactactaccaccactactactaccactactactg

SEQ ID NO: 26315 - DNA, 120 bp, synthetic construct
  source 1..120: mol_type = other DNA
cgtgggatttgctaaaaaaaaacttccttccctacctatggtctaaaaatacagggctacagggggcttcgtccctgtgcaaaagaatcatgttgagtaaattatcctttcatgctttcc

SEQ ID NO: 26316 - DNA, 120 bp, synthetic construct
  source 1..120: mol_type = other DNA
ttggagagcttcatccactttggccaagtgagggacaatcaattgctcaatggcagcaggtatttttgacttcactctctgatattcagctagcatcatctgcaatgaaattggggttaa

SEQ ID NO: 26317 - DNA, 120 bp, synthetic construct
  source 1..120: mol_type = other DNA
accagtattgatctcaactagtgtcacggctttgaatttcatccagatgccagaaacaaacacatttacgtctccagcccagatctcactcctgaaagtctagattcacaaatggcagca

SEQ ID NO: 26318 - DNA, 120 bp, synthetic construct
  source 1..120: mol_type = other DNA
atctgggccccaagaaataggtggacctgaatggcagtcatgtttacttggctttgacagtttcaagaaaaaagttgaaaattgcgtgttctcactcataggtgggaattgaacaatgag

SEQ ID NO: 26319 - DNA, 120 bp, synthetic construct
  source 1..120: mol_type = other DNA
atcgtgccactgtactcaactccaccctgggcaatagagcaagaccttgtctcagagagagagagagagagagtgaaaatacaagccacagaccaagacaaaatatttgtaaatcatata

SEQ ID NO: 26320 - DNA, 120 bp, synthetic construct
  source 1..120: mol_type = other DNA
ttgaattagcttttttaattgggccttccgcacttgcctttcactcttaactgtgatggatttcgataggatctccctaggaaatttggcagtgatttctcagctgttgatgatcctgga

SEQ ID NO: 26321 - DNA, 120 bp, synthetic construct
  source 1..120: mol_type = other DNA
taagcctttcctaagattcacagagaagttcaggcccctttttcttggtctccttttaattctggtgtcaatttcctttgaaacagtagcggaatggactggctgctcttccttatttca

SEQ ID NO: 26322 - DNA, 120 bp, synthetic construct
  source 1..120: mol_type = other DNA
tactaggtttctggcttgaggaaggacatgtggtggaattagtgggcaggcatttgaccaggcctttcaacatttaatttgtagacaagaaaggaaagtatgggctatctcttagttact

SEQ ID NO: 26323 - DNA, 120 bp, synthetic construct
  source 1..120: mol_type = other DNA
tttcttaaaaatgggcaaatttccagcgtatagcaaggacaggcttagtgccacagccgaaataattgttgctgcattaaaagctttgcaagtgagactgtcagtgcagaggttggtgag

SEQ ID NO: 26324 - DNA, 120 bp, synthetic construct
  source 1..120: mol_type = other DNA
ggatttaaatatatttggtgtgtttcaaagcagtcactgtcatttatcttttaacacgcagctcatcctatccataggagccctttcaaggcaggttgcttagctgtccttagccatcac

SEQ ID NO: 26325 - DNA, 120 bp, synthetic construct
  source 1..120: mol_type = other DNA
agtggtagtgtagatggtggtgagggtttaggtgttgatggtgagggtacagattttgttggtctagatggtgtggtgagagcgtagatggagatactttagattttaatggtagtaagg

SEQ ID NO: 26326 - DNA, 120 bp, synthetic construct
  source 1..120: mol_type = other DNA
gtaggttgtggtgagggtgtaggttgtggtggtgagggtgcaggttgtgagggtgcaggtggtggtgagggtgcaggtggtggtgagggtgcaggtggtggtgagggtgcaggtggtggt

SEQ ID NO: 26327 - DNA, 120 bp, synthetic construct
  source 1..120: mol_type = other DNA
tcataaatattccggcaaaatgaaagaatgtcacttccgtcattcaataagtaggaactcagggcaagaactgctgcttctcatcaatggcagttgtcacccagtcctttgcatttaatc

SEQ ID NO: 26328 - DNA, 120 bp, synthetic construct
  source 1..120: mol_type = other DNA
tctcacgctgcttcccagatgccaacaggttctctcacatagacgttcaccaggaaaaagtccaggtggaaaatgagataattttgggaaagcgtttggttacctattgcagataaatag

SEQ ID NO: 26329 - DNA, 120 bp, synthetic construct
  source 1..120: mol_type = other DNA
atgtgaaactacaaggcctggagccagtctccttagtgagagcccaataagcccttaaaaatatgtgctgtcattgcaaagctcatttttccaagttgggctccaatatttggctaagaa

SEQ ID NO: 26330 - DNA, 120 bp, synthetic construct
  source 1..120: mol_type = other DNA
ttgaatttgcttaaaagggaactaaaagcaaagattgcctagaaaagtggttctaaataaagatcatcgccaacatatcaaatgtacacttccttccctcctggttccaaacccaggcat

SEQ ID NO: 26331 - DNA, 120 bp, synthetic construct
  source 1..120: mol_type = other DNA
gcgggtggtagggaggctggcttttgcagagaaactgtctctatggaatcatgaccctggaggccacaagtttccctttcatcaaataatgtccacttcttttttttttattattatact

SEQ ID NO: 26332 - DNA, 120 bp, synthetic construct
  source 1..120: mol_type = other DNA
tatggaagactcttttccctctataaaccgctcattcattcaacagatacttagcaccagctatgaaccagaaatgagacagcagtgaacagccccaagtcccttttctcaaaacttaca

SEQ ID NO: 26333 - DNA, 120 bp, synthetic construct
  source 1..120: mol_type = other DNA
agagttggattgactcagaaggtctgttcaattgacagaaggtcaccttgctagactaatatattcacttcccatagcgttttcagagcacatgcatatctgttctctcattgcatcctc

SEQ ID NO: 26334 - DNA, 120 bp, synthetic construct
  source 1..120: mol_type = other DNA
tatgaaagcaatcagccaaattcaggaaacccagacaaggcctccatggagagtacttaccctaaaaatgatctgtcttccttcctgcatgtgttcataaacagcacatcttattcctca

SEQ ID NO: 26335 - DNA, 120 bp, synthetic construct
  source 1..120: mol_type = other DNA
atttatattttatactgtatattttataaacgtacagattttccgtccgctcgctcccaggctgttcagttggggtcaatccttgcaagctctgagtgcgctcattgatttccaggatac

SEQ ID NO: 26336 - DNA, 120 bp, synthetic construct
  source 1..120: mol_type = other DNA
caagaaggaagagataaactcccacctacttcacttctctggcttggcatgaaccatccaaatgctaggactgaccagaatttccaggccagcttttacaaagaaagaacgctgcctctt

SEQ ID NO: 26337 - DNA, 120 bp, synthetic construct
  source 1..120: mol_type = other DNA
agattgtcagcgtctgaagtgataaaatactttatgctggtgcctcctcagtaacagacattcaaaactacagtcagccctcagtgttcatgtggtctgaatccaaccacagatagaaaa

SEQ ID NO: 26338 - DNA, 120 bp, synthetic construct
  source 1..120: mol_type = other DNA
ggaatcctgagaggtgagcagtagaaagaagacttctgtcaaattctttctgagcctaaaataaaaacaaagacaacacacatccaagtctttgccggctttccttgggtgcctggcggg

SEQ ID NO: 26339 - DNA, 120 bp, synthetic construct
  source 1..120: mol_type = other DNA
ttagataaaggacaacagaggtgctgacaaacagggacaccaagagcagggagggtgcttcccaatgaagacagaaatgcatttatttatgtatcaatgaatccaattgccctgaacatt

SEQ ID NO: 26340 - DNA, 120 bp, synthetic construct
  source 1..120: mol_type = other DNA
gcccagagattatacctgcaggtggcagtacattttttcctgaaaggtaacagatccttactgctgaattatctgtagcagaaatttccaaacccttaactgagactaattctcaatagc

SEQ ID NO: 26341 - DNA, 120 bp, synthetic construct
  source 1..120: mol_type = other DNA
tgcagatggaagtcataaccccaaatgtcttacttatctgcaattttgctctgagatatggaccaggctctagcagaccgtctgccactgtgtagttagtgttgcctgattagaaataaa

SEQ ID NO: 26342 - DNA, 120 bp, synthetic construct
  source 1..120: mol_type = other DNA
gttctttagagaaacagctattcaggtcctaggcccattttttaatcaggttattgatcatttttttccttccttcttctccttctccctctcctcctccctttctttcccacttctgtc

SEQ ID NO: 26343 - DNA, 120 bp, synthetic construct
  source 1..120: mol_type = other DNA
tatctgattttctagctaacgaattttttgccactcttacatgtgaccctatgggaaccagctcagtgattctgatacatgcacaaatttggatgtgcaagggactgcacaaccaacgac

SEQ ID NO: 26344 - DNA, 120 bp, synthetic construct
  source 1..120: mol_type = other DNA
atgagtgataaccatgaaagttgatgagctgaacaggggagtgagaaacaaatggtcagtaaagaaccattgagaaacacctactgctccagggcagcaagaataaaaaaggctcagaat

SEQ ID NO: 26345 - DNA, 120 bp, synthetic construct
  source 1..120: mol_type = other DNA
gttccggctaatcctccaagctgtcctcccatatccttggcttggatgagtacttgatattgttctttgacttctctgtccatgtttggcaaagctgttctaataacaccttaagggata

SEQ ID NO: 26346 - DNA, 120 bp, synthetic construct
  source 1..120: mol_type = other DNA
agcactatgagatagcatctcacaccagtcagaatggtgattattaaagaatcaagaaacaacaggtcctgttgaggttgcagagaaataggaacacttttacaccattggtgggcatgt

SEQ ID NO: 26347 - DNA, 120 bp, synthetic construct
  source 1..120: mol_type = other DNA
atggaacaggtacataataggacaatatgggagaataattaaagaagtcctgagggtaggtgactgaggccttatatgttataaaagggggattttactctaggaattgggaaagtgttt

SEQ ID NO: 26348 - DNA, 120 bp, synthetic construct
  source 1..120: mol_type = other DNA
cctacactagtgcatagtcctctaatggcagtttcagtaagggctgcagggccatgctcacacacagatcagcatcacttgactggtgcctcccctggaggcctctccactgtgggacct

SEQ ID NO: 26349 - DNA, 120 bp, synthetic construct
  source 1..120: mol_type = other DNA
cttcctgggagaaatgctgtctataggtagacacagagagacaagaatcaaagcctcttctgaagaagggttaaataaatctcaggcagataggctatgcatgacctgcttcttttatct

SEQ ID NO: 26350 - DNA, 120 bp, synthetic construct
  source 1..120: mol_type = other DNA
aaaaagcattttgccctcacaaaagaaaattagtttcagattactagtaattatttaggtactaattaaaaaaatgaatctcagttactaaatacacaaataagggagttatatgaaact

SEQ ID NO: 26351 - DNA, 120 bp, synthetic construct
  source 1..120: mol_type = other DNA
ctaacttgtgaagttcacagctatttcaaaaaacagttaagcttgttccaaaaactcactgccatcccaccaaacacacatatggacttgagaataattaggctttcagaaaccatttta

SEQ ID NO: 26352 - DNA, 120 bp, synthetic construct
  source 1..120: mol_type = other DNA
ttatagactatttatatattttgcaaactgtttgctgttctctgacttcaagtaagagagagatattaagtgacaaatcatacaacggaaagggagttatataggaagactctccatttt

SEQ ID NO: 26353 - DNA, 120 bp, synthetic construct
  source 1..120: mol_type = other DNA
taacattgaatttattctcaaaattttatgcaaccaattacatacattttagatctaaagtggactttgtttttttccatggaataagtattttgtaggacttctcttcaatattggtgt

SEQ ID NO: 26354 - DNA, 120 bp, synthetic construct
  source 1..120: mol_type = other DNA
cttaaacttctaaagaatgacctcaattaaagagatagaaaatgggagttaatattgttagtgttgccatgtaaaatttaataattaatataatgtctcatatattctgtggtgattaat

SEQ ID NO: 26355 - DNA, 120 bp, synthetic construct
  source 1..120: mol_type = other DNA
aaattaaaatacaataatggaaataatagattcagaggatggtcacaaaagaagagagcacagagcagaagatggaatcagtgaatctgaaaacatgccaacagaatttactgtctgaac

SEQ ID NO: 26356 - DNA, 120 bp, synthetic construct
  source 1..120: mol_type = other DNA
gttggatgctcaaggaacatagaggaaatatttaagataattatatctaaaaagtagtgatagtaaagagactcatatggaaacaagttttctacacttcactcaaagaggtaaaacatc

SEQ ID NO: 26357 - DNA, 120 bp, synthetic construct
  source 1..120: mol_type = other DNA
ctgattgtgatatagacagtgaagtccaagctgaggtggtcttggatggagaagaagaactcattaggagctagagcccaaagatcactcttactctgccttagcaaagagactagaagc

SEQ ID NO: 26358 - DNA, 120 bp, synthetic construct
  source 1..120: mol_type = other DNA
ctttatgttttaatgactgccctgctgggtttcagactttcatggggtctgtatcccctttgttttgactaatttctccaatttggaatgggagcatttatccaattcctgtaccctcat

SEQ ID NO: 26359 - DNA, 120 bp, synthetic construct
  source 1..120: mol_type = other DNA
tagacttcaaccacaacatataaattgttaaacataaaaggcctatagaaaccaactaaaaaacatagattggcagagtagttaaaaaaacaaaaatcaaaaacgaaaaaacatggccaa

SEQ ID NO: 26360 - DNA, 120 bp, synthetic construct
  source 1..120: mol_type = other DNA
tttcgcatcttgtcttcctgtattctttccttctgtgacagttcttgagatcatgacctcttttggaatggtgttctcagaagtccttggacaatcagggtgtactgggagaaaacatgc

SEQ ID NO: 26361 - DNA, 120 bp, synthetic construct
  source 1..120: mol_type = other DNA
cttgggcatgctttccgaacctcttgagatagtgtaacccaggccttggtcacttatactggctctgaataaacctctttaaatatattttgacagaatttgttttttgtgtatttttct

SEQ ID NO: 26362 - DNA, 120 bp, synthetic construct
  source 1..120: mol_type = other DNA
gattattggtgctcctcctcctgtcattgaggttaaaattaaatgttacatattccttctctgtgtatgtgtatcttatttcctcatattctacctcttcagagtagtgtgtgtgagtgc

SEQ ID NO: 26363 - DNA, 120 bp, synthetic construct
  source 1..120: mol_type = other DNA
atgtgattacttaaattaaatataatagataatttaccaccagattagataccattgaaggaataattaatatactgaaatacaggtcagtagaattttttttcaattcagcatggagat

SEQ ID NO: 26364 - DNA, 120 bp, synthetic construct
  source 1..120: mol_type = other DNA
cagggtttgttgtacagatcattttgtcacctaggtaccaagtactcaacaattatttttcctgctcctctgtctcctgtcaccctccactctcaagtagactccggtgtctgctgttcc

SEQ ID NO: 26365 - DNA, 120 bp, synthetic construct
  source 1..120: mol_type = other DNA
tattgagacttatttaatggccgagactacatagtccttcataaacgttccatgtaaatttgataaaaatattttcatgaaattttttgtgtagtgttctaaaacttgaaattagactac

SEQ ID NO: 26366 - DNA, 120 bp, synthetic construct
  source 1..120: mol_type = other DNA
atgccaatgttttcattatgaatcatttcactgtcaaacaaaatgtacgctattgattaaacacaggcaaaaagagaggggaaaaagggtatattaaaaaaagacctttggttattccgg

SEQ ID NO: 26367 - DNA, 120 bp, synthetic construct
  source 1..120: mol_type = other DNA
attagtgtggtgctcacttttacccttcattttaccttgggtcttgccattttctttctatttttacgtttttttttttttttttcttttggaagaggtaatttttagggagaaaaaaac

SEQ ID NO: 26368 - DNA, 120 bp, synthetic construct
  source 1..120: mol_type = other DNA
aatgaaaaacaaaaattattttggaagacacagctgacatctatatgaaatattcagtatcagtgattgaacttcagcaagctcctgtggccagcagggttttacggaggtgcaactgct

SEQ ID NO: 26369 - DNA, 120 bp, synthetic construct
  source 1..120: mol_type = other DNA
cttccccatctagacttgatttagatgaaaagctcctggactttgagctgatgctatagtgggttgaaaattttggggtcctcagaaagggatgagaatatattgcatgacagagcaaca

SEQ ID NO: 26370 - DNA, 120 bp, synthetic construct
  source 1..120: mol_type = other DNA
gacaagtgctaatgcttgaatagggctgaaggattagattataataatacattaatgcaaatttcctgattttaaacattgtagtttgattgcacaaggcgaatgtctttatgtgtggaa

SEQ ID NO: 26371 - DNA, 120 bp, synthetic construct
  source 1..120: mol_type = other DNA
agcaagaatccccattctcaaataatataatataaactttccaaattcttaagtagatcatctgagattgaaagctaagtttaactttctcaaagatattttagccgcatgacacctaga

SEQ ID NO: 26372 - DNA, 120 bp, synthetic construct
  source 1..120: mol_type = other DNA
gggagtatctggatcattaagtaatttccggaggtcagagtaaaagctttttatctctaaatattacttccctggaatattagatgtaacagaagtcagtaacggagtgatctttctctt

SEQ ID NO: 26373 - DNA, 120 bp, synthetic construct
  source 1..120: mol_type = other DNA
tcatagggaatacttcaaacactgatatctacaacaggcagtaagattcgtcacaacaattggtatactgtcaatataccatacaaagttccatctggtcttgattaaaaattattttag

SEQ ID NO: 26374 - DNA, 120 bp, synthetic construct
  source 1..120: mol_type = other DNA
gctgaaactactctgctttctcacttacctacacttttgactttccaaatatatttctctctttggatatgatctgcaaactccttacacgaaggctccaactctgcagccctagttatt

SEQ ID NO: 26375 - DNA, 120 bp, synthetic construct
  source 1..120: mol_type = other DNA
aatgttttcatgacattattcatttgctgcttggcttgatggcacaacaagtatgggttatttaccctgaaaaggaaacagtattacccttccagaatctctatttacagctacaaaaga

SEQ ID NO: 26376 - DNA, 120 bp, synthetic construct
  source 1..120: mol_type = other DNA
caaaaagttgaaaactgtgcgatgaacgcatatatacctatacatccaaacattcctccattcgtctattaatctgcttgccttatcagatagatctcatatctattcttctgttcatcc

SEQ ID NO: 26377 - DNA, 120 bp, synthetic construct
  source 1..120: mol_type = other DNA
tttctctgggttgaaaagtgcacataaaatggaaaatgctttttataccactatttccagcagggattttattttcatttgtcatttgccagcctggggtatgttgggagaaggaacaat

SEQ ID NO: 26378 - DNA, 120 bp, synthetic construct
  source 1..120: mol_type = other DNA
aaatgacttctgatttgtgaattgttctctgtgctccaaacttcttttatttgtccctgtgtttatgctcataaccattcatttccctcttttcccactgacttagcctctggggttgta

SEQ ID NO: 26379 - DNA, 120 bp, synthetic construct
  source 1..120: mol_type = other DNA
atgcatttaaaagtaggttgtagatacaaataaccatcaccctaacacccttcaatacaatgtttacagttgtttttttgacattggaatgtatctgtggtttctctatttcataggatc

SEQ ID NO: 26380 - DNA, 120 bp, synthetic construct
  source 1..120: mol_type = other DNA
cctgcataaccacattgtcacagtttcagttaagaaaattaattaaaatgcctgttatcacttaataatgggtcatattcaatacccccacttctctctccaaatatctttgtagcattt

SEQ ID NO: 26381 - DNA, 120 bp, synthetic construct
  source 1..120: mol_type = other DNA
atgctagtctactctcctgaggtgactcatttgttctccctagtttaattgttgctatatgagcaagagggataccactttacaaggttaggaattccctctaacagcccaatgtgcttt

SEQ ID NO: 26382 - DNA, 120 bp, synthetic construct
  source 1..120: mol_type = other DNA
ttcttcccacaaagcagtttatctatttattgtgaaagcgattgagttttgcagtaccaagggatcttttgcttttaaaccagttaattagtttttattagatgcaatgcaatgttttga

SEQ ID NO: 26383 - DNA, 120 bp, synthetic construct
  source 1..120: mol_type = other DNA
gactataatatttatatcataaatttggagaatactgtagagaatttggcttcacagtttgttttccttcatttctctcccttcatatccaaataagcccagtatagcaatattcctttc

SEQ ID NO: 26384 - DNA, 120 bp, synthetic construct
  source 1..120: mol_type = other DNA
aactccatttaataacagaaatggttattaaaatatctacattctttctcacaatgaactaataactacacagatttgtgcatgtgtatgaagatgtttatatgtgttttatgtgagaga

SEQ ID NO: 26385 - DNA, 120 bp, synthetic construct
  source 1..120: mol_type = other DNA
taggattcccaagaaactgccaaagagataatagttccattttgactttaacttaaaagaaaaaaataaaataagaaggcaaaaatgcaaaaacgaaaaaaatagatgtcacagatgcta

SEQ ID NO: 26386 - DNA, 120 bp, synthetic construct
  source 1..120: mol_type = other DNA
ccaaaccatatcactttggcttactcaatactgaactaaatcaaaatcaaacctgaattttcaattatgactgaaatgtaacctacagagtagtaggaagtattctacaaccgactccta

SEQ ID NO: 26387 - DNA, 120 bp, synthetic construct
  source 1..120: mol_type = other DNA
tggtaattactgtattttgtcccttacccacaggctgagcaagagtcttaggtctggccaataatcatgggcagctttttagaaaaaagagtagttgcttcattactcagatggtcccca

SEQ ID NO: 26388 - DNA, 120 bp, synthetic construct
  source 1..120: mol_type = other DNA
acactgcactattttcacaagaaatatgatttgatctgagaagaactgcagcagcctgaaacatatattcccagatcatgtctctcagagtaccgtagccattaaatgtcttctataatg

SEQ ID NO: 26389 - DNA, 120 bp, synthetic construct
  source 1..120: mol_type = other DNA
agctatatgtgtaagtctcagaaagagcaggaggactcaactttggtgaacactttatctagttaattcaacaaataagcaaggggtgggactcaacctcttcattcttactgtagcaat

SEQ ID NO: 26390 - DNA, 120 bp, synthetic construct
  source 1..120: mol_type = other DNA
gtgactccatttcaccttatgcagtaaacatgggaaaaatcttttggggctttttaggaaaagtttttttaattattttattctattttttaacttttaggttcaggagtacatgtgcag

SEQ ID NO: 26391 - DNA, 120 bp, synthetic construct
  source 1..120: mol_type = other DNA
gaaagccacatgtttgattgagaaattaaaaggtccttttttgatgttatcatggagttgctgtataagacccaggatgccaatctttgggttgctgtataagacccacgagaaaaataa

SEQ ID NO: 26392 - DNA, 120 bp, synthetic construct
  source 1..120: mol_type = other DNA
aaatataaatactttctcactgagcactctaagagaaagtttggaacacattctattttgagcattataaattgtgctttcaaaaatgatatagctaaagaaaattatttaaacaaaaag

SEQ ID NO: 26393 - DNA, 120 bp, synthetic construct
  source 1..120: mol_type = other DNA
tcatagtcaataaataaatgtttatttgtttcgtttcatgaaagaataaatgatcagcaggcccccgcttccacaaaaaaaaaaaaaaaaaaaaaaaaggatttacatttaggttaaatt

SEQ ID NO: 26394 - DNA, 120 bp, synthetic construct
  source 1..120: mol_type = other DNA
aaacagtgttttgtttactgccactattagatactttttgaattaatgaatttataatcagtccttcaattattttttcctaaattgcctgaaattgtatacctagtcaacttactctcc

SEQ ID NO: 26395 - DNA, 120 bp, synthetic construct
  source 1..120: mol_type = other DNA
tgtataatctgatcactgacagtaactagcacattaggtcgctctaagcatgaaaataggtaatgcatgtgaagtgttcacactgtaacaaccttgcattaatccctcagaacagctttt

SEQ ID NO: 26396 - DNA, 120 bp, synthetic construct
  source 1..120: mol_type = other DNA
atactgttgtacaccataaagatatacaacttttttttagttaaaaaaatagtaaaatgatgatgacaaacacagaccaggaagtaatagtgtggcttccactaagcctattttagaaaa

SEQ ID NO: 26397 - DNA, 120 bp, synthetic construct
  source 1..120: mol_type = other DNA
gtaatgctctgattcagaattttggggcccaatccctattcatttgtgtcttaacagtctttgaagggatgtttgacttcaaggattccttgaagtttccctctgagcaaaggtgagatg

SEQ ID NO: 26398 - DNA, 120 bp, synthetic construct
  source 1..120: mol_type = other DNA
atagtgagaaacagaataagttatttgtgatatgaaagagaaaaatgataagttaatataattttaattccagttgagttaagaaaatgaaaaagtgcatcattgtcgcttctacttgca

SEQ ID NO: 26399 - DNA, 120 bp, synthetic construct
  source 1..120: mol_type = other DNA
aaacatatgatatataagtatatataaatgtatactcatacgcataactcagatgtatgcaaaggcttcatatatctagaatgtatattgtgtgtattctatataatatgtaatgaaggt

SEQ ID NO: 26400 - DNA, 120 bp, synthetic construct
  source 1..120: mol_type = other DNA
gaaactgaacactgattctccaaaaatcattttcatcaataaaatctgccaaaatgtgttgaatatatgcagcatttagacaaatgtcaccattatttcttgcccagacatggttcaagg

SEQ ID NO: 26401 - DNA, 120 bp, synthetic construct
  source 1..120: mol_type = other DNA
tttaattgactaggctatcagtaaagctttgggtcaacagaaggctacgagtagttaagttttgggggagtcaaaagtttcacttggattttcaactgtgctggggagaagtcagttctc

SEQ ID NO: 26402 - DNA, 120 bp, synthetic construct
  source 1..120: mol_type = other DNA
aaattctcaaaatatgtgtggggtggattgtgggggtattacatattcatagcatgccgcagaaatcattttaagtctatcaaaaacaactatattgtgcattttcaaataagcacatat

SEQ ID NO: 26403 - DNA, 120 bp, synthetic construct
  source 1..120: mol_type = other DNA
gctagatgtgtaggagcacatccttacttgacaaatgtctgacagaatgacctggcaccattactgttttaaatgtgtaatatgctatctcaactgggacattttatgaaagctataggt

SEQ ID NO: 26404 - DNA, 120 bp, synthetic construct
  source 1..120: mol_type = other DNA
ccaggtattagtgtttaccaaggaggaatatttggaacaagaataatctgatgctacttttcatttgtcaagtacattttctaaattatattctaataagacagaatatgcacatttgca

SEQ ID NO: 26405 - DNA, 120 bp, synthetic construct
  source 1..120: mol_type = other DNA
gacaaagatagcgggcatgctctttcatctatctatccctggcccttagcacacctggtgcttttcagtgctccagctttacgtgtttaatcgttttttttcattcgaaataaattttct

SEQ ID NO: 26406 - DNA, 120 bp, synthetic construct
  source 1..120: mol_type = other DNA
tagacatgggttcaaatcccagatcccactggacatctctgaggcttactagacatcatctgtaaatataagataaacacctaatataaaatgtgttcagctataagaagtttgagttag

SEQ ID NO: 26407 - DNA, 120 bp, synthetic construct
  source 1..120: mol_type = other DNA
ccagacctaaggaaggatacattcatctatagctccctctcaatttacagaaatgtttggttggtagagagtcttgcctaagtatttaatctggcccaaggtaaagaaatactgcaacct

SEQ ID NO: 26408 - DNA, 120 bp, synthetic construct
  source 1..120: mol_type = other DNA
tttccaggccttgccaggtcaggaaaggaaaatccctaggtggggttcatacctgtagtcaaatacaagtaaaaccaaaaggtagggcctaatccaggcacatttatttttccccaaata

SEQ ID NO: 26409 - DNA, 120 bp, synthetic construct
  source 1..120: mol_type = other DNA
agaagaggaatgtgataggaacttttgtcactgttggaaagtgcgtgggtggtgacattgaatagattcactcagggagacaagttagcatatctttcatctttttataagcagctgagt

SEQ ID NO: 26410 - DNA, 120 bp, synthetic construct
  source 1..120: mol_type = other DNA
tctgtcatatttcataagagatttttcaaaatgcacattaattctgatatttttattcatttattcaggaaatattaatgaggactgttgaagtcaaaatagaaatgtaaagaggaatct

SEQ ID NO: 26411 - DNA, 120 bp, synthetic construct
  source 1..120: mol_type = other DNA
ataaatgagagcagatgagctgttacttgtgttgtgtccccaaatgaaacagctcattctaacatggggtagcgtgcatcaaagacaaatcatgccatctcacaatatgtatacccacca

SEQ ID NO: 26412 - DNA, 120 bp, synthetic construct
  source 1..120: mol_type = other DNA
taagtatactactgtgtctttctcagtgattaatgatgactagattaattggctttctctttcattgtaagttcccctttaacatttctgattttaattgtgagaaataaccctgcacat

SEQ ID NO: 26413 - DNA, 120 bp, synthetic construct
  source 1..120: mol_type = other DNA
taacacatcaggtgcatgtttgaatacaaataagatcaaataggtcttgagtcatatctgcaggatcttaattttaacatcatagagacaaagattttagttagtcttttgttttgctgt

SEQ ID NO: 26414 - DNA, 120 bp, synthetic construct
  source 1..120: mol_type = other DNA
ctcaatagacgtatccttccttctgaaatgcaaaggaaatcccattgatcaataggggttgcagtacttatcaacatcacaacggagacagcttaattcctcagattagcatttggctca

SEQ ID NO: 26415 - DNA, 120 bp, synthetic construct
  source 1..120: mol_type = other DNA
gagccctcaacttgccattacatgactaagttcttcccatctcaggaatcagaaaatcccaagaatctttatcacaacagaatgttctgggagagtccccttggatttaggacacacagg

SEQ ID NO: 26416 - DNA, 120 bp, synthetic construct
  source 1..120: mol_type = other DNA
aaaatcactctaagtactttgtctacattgtctcatgtaatcttcacagttttctgagttgtgcattatatgttgctactgtccacattccttcactaaagttatggattttagtttatt

SEQ ID NO: 26417 - DNA, 120 bp, synthetic construct
  source 1..120: mol_type = other DNA
actacatctcaaaagaccctatttctaaaaagggtcatatttataagtaccaaggattagaatgtgaacatatattcttgagggacacaagtctacccactaaaatgtgtaattccaaat

SEQ ID NO: 26418 - DNA, 120 bp, synthetic construct
  source 1..120: mol_type = other DNA
tattatctagggtcttaaccacattgcttgtttttctattagagtttggaatgggtcacccatgctctgaggctctatgaaaccctgaagggagaggtaaacatataagctctgcaatcc

SEQ ID NO: 26419 - DNA, 120 bp, synthetic construct
  source 1..120: mol_type = other DNA
tctccagaaattactttttctgcataattgaaaatttctatcctttgaccaacatctctccatttcccctaaccccagtttacacacacacacacatatacatatatagtgaatatatac

SEQ ID NO: 26420 - DNA, 120 bp, synthetic construct
  source 1..120: mol_type = other DNA
agaggtggcatataattggagagctaagaaccgtcaatatctcaacatctaaaaaaataaaaattgtaattgtatttaaaatgttaggaaacatagttagaaatttagggttttaagcag

SEQ ID NO: 26421 - DNA, 120 bp, synthetic construct
  source 1..120: mol_type = other DNA
ttctcaaaatttaatgagcataatttttattattgaacaatgtttgcctataaagtcttactcaacttgatgaaaaaatgctaagatacatgttaaggagtcctcattttaatactttat

SEQ ID NO: 26422 - DNA, 120 bp, synthetic construct
  source 1..120: mol_type = other DNA
ttctcatagctcttcagacctatgcacacaccaggaaatgaaagtaacatacacccaggcacatttgaagcttctgagctgtcattcaccaaatgaaatttaagtgttccatcaaagtca

SEQ ID NO: 26423 - DNA, 120 bp, synthetic construct
  source 1..120: mol_type = other DNA
ttttgcatatgataaaatagataatatttactgagcacttatcacaagtcagttgtcttgttaagtgatgcagaagcattttctattagtccccagaaaaccactgggaggttggtacaa

SEQ ID NO: 26424 - DNA, 120 bp, synthetic construct
  source 1..120: mol_type = other DNA
gctgtaatgggaggatcactcaagctcaggagttcgagacctgcttggacaacatagcaagaccctgtctgtatcataataataataataataataaattgccagacatggttgcacgtg

SEQ ID NO: 26425 - DNA, 120 bp, synthetic construct
  source 1..120: mol_type = other DNA
aacttgttccttattttggtgttacattaaatttgcactttccatctgaagaatcaggagctgcctcaggttgggttttccctggaacactggggagaatacaacgtcaagctcccaatg

SEQ ID NO: 26426 - DNA, 120 bp, synthetic construct
  source 1..120: mol_type = other DNA
cacttagctgtgcaggaacaatggcaagactttaacccgatggggagcgacagtgggcgcctcgctgaatcaggagcacagcaggcaccctgctggatcctgagggatggaagtcagcgg

SEQ ID NO: 26427 - DNA, 120 bp, synthetic construct
  source 1..120: mol_type = other DNA
gacctagttagatagtagcttctaagtattttttaatgaatatctgactgcactgggaattatatagctgttcatttatattggacatctggtcatcccttgaatagaagtcaatgggtt

SEQ ID NO: 26428 - DNA, 120 bp, synthetic construct
  source 1..120: mol_type = other DNA
tctaaacccactgacactgtccattgttctgaatttgattccagagttagagctcaattctctgcctaatatagtattttctgtttacatagtgattgctcatatattttgctcttgtca

SEQ ID NO: 26429 - DNA, 120 bp, synthetic construct
  source 1..120: mol_type = other DNA
catgcatttgatttgcatagtgccttttcagtcaaactgttatgcagcctagttagacctctgactttgaggatgcagacagaattgtttaacacaatgaccttgacgagcctcacagta

SEQ ID NO: 26430 - DNA, 120 bp, synthetic construct
  source 1..120: mol_type = other DNA
cacatttttcttcttcacaaatagtaaaccatctatccatgtcagatgtagaaaaaattgtttaaagcaaaatatggtagcttcttctgtgtctatcaggttattctgttaaatgccaga

SEQ ID NO: 26431 - DNA, 120 bp, synthetic construct
  source 1..120: mol_type = other DNA
ttctattttgctttcttcctgccttcctcacctaaataagccagcagctttgtttctcataccaaatgctaggtgtcatctttttattccttccttatctattccaatagcagagtctgg

SEQ ID NO: 26432 - DNA, 120 bp, synthetic construct
  source 1..120: mol_type = other DNA
ctagataaatgctgttaacatttaacacatattggcaagttgccattctgaagagtaacaccaattcatactcttaccaatagtcctcagggtacccttttcctcacatactgtgaactc

SEQ ID NO: 26433 - DNA, 120 bp, synthetic construct
  source 1..120: mol_type = other DNA
agctttttttttgcattcatattcctagagatacttgatgacccccttcacctagaaagtcttccctctcctttatcacatagaagtcccctattctcctcagcattcttccccatcctc

SEQ ID NO: 26434 - DNA, 120 bp, synthetic construct
  source 1..120: mol_type = other DNA
cctcttcctacttaaggaattgtattcactttgtttcccttgtttagattcctttttttctaacctagcttttatcatttttcagtttgcaacttaaagtctccctctctgacttcccag

SEQ ID NO: 26435 - DNA, 120 bp, synthetic construct
  source 1..120: mol_type = other DNA
agaaggagaatgaaagaatttgagccaaagaaaattaaaaagaaatggctacatgggtagaaataaaacagcaagaaatttgggaataaaaaccaagcgaagtgagagacattcaaggag

SEQ ID NO: 26436 - DNA, 120 bp, synthetic construct
  source 1..120: mol_type = other DNA
cataaccagtaggagaacctggtcaaattaagcacatttgtgattcccagaacattctgaagagaaatacttgagtcattcatttggttctaagtacacctgacagaattgcatctgggc

SEQ ID NO: 26437 - DNA, 120 bp, synthetic construct
  source 1..120: mol_type = other DNA
ggccatttaatcaagattccctttaaactggtgaatgctagcagaatgtctcaagagagctgatttccttcactttcaagttcattgtgaccacgaatgcattaacctgggctgcctaca

SEQ ID NO: 26438 - DNA, 120 bp, synthetic construct
  source 1..120: mol_type = other DNA
ttttgaaatttgattcccagcatgtaggtgttgggaggtggggtctagttgggaggtgtttgggttgtgggggtggatccctgatggatggcttggtgctgtgatcctagtagtgagttc

SEQ ID NO: 26439 - DNA, 120 bp, synthetic construct
  source 1..120: mol_type = other DNA
taacagggtttcttattgtgattcaataacaagggagcatggagatgcaatgctgaaaatgctccccaaactcttttaattttcttgaagtgtaattttcttctgtgaaaccaatgtgaa

SEQ ID NO: 26440 - DNA, 120 bp, synthetic construct
  source 1..120: mol_type = other DNA
ctctcagttaggcacagatgctgagtgtccacccatccctaacattagccttgcgttctggactaattgggccaacagagttgcaattaagatttgaataattagataacggacatgatt

SEQ ID NO: 26441 - DNA, 120 bp, synthetic construct
  source 1..120: mol_type = other DNA
tggggaaactcccaggtcttttctgctttacataacatgtaagtatttttgtctctttttgctggttactttcctaggcattgaggagtacaggtgaattcatatattacctctggggta

SEQ ID NO: 26442 - DNA, 120 bp, synthetic construct
  source 1..120: mol_type = other DNA
aacctcctcagcagtagtgtgcttgctgtaagccaggtgcttcactaagcacatttattatagtatctcattatataactacctgttaatattgtctgtgttatgctatgaaaggaaatc

SEQ ID NO: 26443 - DNA, 120 bp, synthetic construct
  source 1..120: mol_type = other DNA
tacacagcttcaaaagtccctcatttgctctcatcaaaaaaggatatctgcaaggggactagagacatttattctaacatgtgcatcaggactcaaacaacttctgaggtgtcctcaggc

SEQ ID NO: 26444 - DNA, 120 bp, synthetic construct
  source 1..120: mol_type = other DNA
tggaaagaatattggcaaggtagattttgccagagagtatcagtgagatgcttttaaagagaagcagctttaagcagcattgtttcttttctgattagtcagctcttctgttttattcta

SEQ ID NO: 26445 - DNA, 120 bp, synthetic construct
  source 1..120: mol_type = other DNA
atttctgctgtttaaaagatacctagcaactggaatgttaaatttgctctatttgtataagtagttatgctgttgtcagattgagatgagtaactccaggacctatgaaaactctacttt

SEQ ID NO: 26446 - DNA, 120 bp, synthetic construct
  source 1..120: mol_type = other DNA
ctaaatttttgtgttaactgttttcattccccgctgcttacctctgggctgagttcctcttttcatgcctgcagatcagagcataattggacctgctctttttccctaaaatattctcaa

SEQ ID NO: 26447 - DNA, 120 bp, synthetic construct
  source 1..120: mol_type = other DNA
tttaccaaacgtgtgtgaacaatttccactgttcattaaagtacaagatatctacatcatccataaggtggatatgatgttggaaatgcattaaacagatttcagtggttactaccatga

SEQ ID NO: 26448 - DNA, 120 bp, synthetic construct
  source 1..120: mol_type = other DNA
gggtgtccagtgggggttttaattatgtctttaaaaagcagggaaactacaagagaagccttaacatgggggtaatagggcaagcttgtattcagagatatcaattttctgtcagtatat

SEQ ID NO: 26449 - DNA, 120 bp, synthetic construct
  source 1..120: mol_type = other DNA
cgtcagtactagcagatatggccatccatattcttcacttttcctgaactctgaaactgaaatacattcattcatctaatcctgcaatacagaacccctgaaaatcacctatggatttat

SEQ ID NO: 26450 - DNA, 120 bp, synthetic construct
  source 1..120: mol_type = other DNA
gtgctgcaataaatatgggagtgcagacatctctttgacatactgatgttatttcctttggatacagacccagcaatggcattttgggatcatatggtagttctatttttaatattttga

SEQ ID NO: 26451 - DNA, 120 bp, synthetic construct
  source 1..120: mol_type = other DNA
acagataagggaattcctcttggcctctctgtttaagtcaggagctattttttgtgcattgacagcagtctgtacatatgttccatgatggcagaccacaagcattgtgactactcgttc

SEQ ID NO: 26452 - DNA, 120 bp, synthetic construct
  source 1..120: mol_type = other DNA
gggagagaagaaagttgaactgacaaataagaaagtcttaaggctacattgctagaataaagagaactgagatgttaccagagaagtcagcattttctgataagttttgaacttcagtat

SEQ ID NO: 26453 - DNA, 120 bp, synthetic construct
  source 1..120: mol_type = other DNA
acctctctggcaggttgtcagaaatgcagaatcttgagccacactctaaaacctctaaaaaagatccccagataacttgcgtgcctgttcttaaggtttgagagttgctggtctacagca

SEQ ID NO: 26454 - DNA, 120 bp, synthetic construct
  source 1..120: mol_type = other DNA
tgtttctcttctaaataagcagtcagcaaactttttctgtgaaagacaaaatagccaatatttttagctttgcaggctctacaatctttttctgttctactattcaactctggctttgtg

SEQ ID NO: 26455 - DNA, 120 bp, synthetic construct
  source 1..120: mol_type = other DNA
tatgacagctaatcatattaaattttccaggtcacctctaatcttataacatccctcccttcttgtcacaggattagatcaaatattaattgaaaaatattaccacaatatcaacatgat

SEQ ID NO: 26456 - DNA, 120 bp, synthetic construct
  source 1..120: mol_type = other DNA
ctcagctatctgagttgaggaagcatgtgagctagattagatactgcctatctctagtgtcttttattgaacatattacttattgaggagcaagttatagaagaacttgaagcaagtttt

SEQ ID NO: 26457 - DNA, 120 bp, synthetic construct
  source 1..120: mol_type = other DNA
ttagaaagtgttctgacatctttataaaatgtcccatctcaagagatccatagaagaaaagggaagtcagcacttcaggaaatacgagtgctcactctgaaaagcacacttgagatacca

SEQ ID NO: 26458 - DNA, 120 bp, synthetic construct
  source 1..120: mol_type = other DNA
agaaactataacatttaagttttaagttccaaatggatactattaaaatattcagggatttagtcctaaatccttaaaccaaaagggagctcaggaatattgctaatgtagaaagctgca

SEQ ID NO: 26459 - DNA, 120 bp, synthetic construct
  source 1..120: mol_type = other DNA
attagcaagaacgctccgggtgcgcaggcaacacacgccgagggttggtgggtctcccgggaactggaaaaggcaccaaggccacttgggaatcttgtcttttccagcctaatggatgaa

SEQ ID NO: 26460 - DNA, 120 bp, synthetic construct
  source 1..120: mol_type = other DNA
aagaacagatgaaaaaagtaatttgcatgtcttgagggtgagaaaattctcattgccagagagaaagctgacgactgtcctctcacaatgatcctgagtgatatgttcagcacttttgtt

SEQ ID NO: 26461 - DNA, 120 bp, synthetic construct
  source 1..120: mol_type = other DNA
taaaacaggtgcacacgaaactttgtgccatagtagatgggttctatctggaaactccaactccatgagactgccctgatgacatttccaaataaccagcctttctgttctcataaaatc

SEQ ID NO: 26462 - DNA, 120 bp, synthetic construct
  source 1..120: mol_type = other DNA
agccttcatggcaggtggcttaccctcaaacaacaaacccaatctcagttttttacatagacaactatgtaaactatgtcaaggccctatttagagaaagaaactgtcatgttacaactt

SEQ ID NO: 26463 - DNA, 120 bp, synthetic construct
  source 1..120: mol_type = other DNA
ccaggcttgttacattggcagagtatgatgaatatgcctatgatgcctattaaacggcatgaagaagatatttctgctcctccaaacaaccttttacacagctaatctctactgattgaa

SEQ ID NO: 26464 - DNA, 120 bp, synthetic construct
  source 1..120: mol_type = other DNA
ctgatgtttaagaactttgtgtgattaatccccacatcctggagtgaggaaaaccactttccttccaaaatttagtggagattttaaaagatgatttgtgccaggcacggtggctcacgc

SEQ ID NO: 26465 - DNA, 120 bp, synthetic construct
  source 1..120: mol_type = other DNA
gtttggcagttcaacaataaaaactaaataattctcatgaacatgctttatggtgggaaaatggtgatgagttttctccgtatacaattaggtgtagtttctctatgtagttgtgatacc

SEQ ID NO: 26466 - DNA, 120 bp, synthetic construct
  source 1..120: mol_type = other DNA
tgtgggggtaggaatctcaagaattgcaaaagtcaagtatggagagtgtggacaaggtttcagtgttaaatcagatgttattacacaccaaaggacacatacaggggagaagctctacgt

SEQ ID NO: 26467 - DNA, 120 bp, synthetic construct
  source 1..120: mol_type = other DNA
accagaggacacacacaggggagaagccctacgtctgcagggagtgtgggcggggctttagcgataggtcaagcctctgctatcaccagaggacacacacaggggagaagccctacgtct

SEQ ID NO: 26468 - DNA, 120 bp, synthetic construct
  source 1..120: mol_type = other DNA
cctcacctaccatttgactgcaacttcgtaagtaactctaagtaaagaaacacccagccaaatcctttccaaggtcctgaaacccaggaatcatggcagataaaattattgttgttgtgc

SEQ ID NO: 26469 - DNA, 120 bp, synthetic construct
  source 1..120: mol_type = other DNA
cgtgagccactgcgcccggcctatcatagtatattaacttgagtaattgcatgctagctttgcagtcctcaagccactacataaataacagtgattatgattagtgaccaaatatgtcac

SEQ ID NO: 26470 - DNA, 120 bp, synthetic construct
  source 1..120: mol_type = other DNA
atcactattacacaagtctgttttcaggtaaatttttcatggtcactcaaacggatctgagacaaggaggttaatttcacattcaaaatgtctcctgctggtccagcaccagtaccatgg

SEQ ID NO: 26471 - DNA, 120 bp, synthetic construct
  source 1..120: mol_type = other DNA
cccaagaggaggtggtcccaaacctccagatacaaaaagtgcctgctcagccataacttttgcattcatagcaaatgctattacctggaagaaaattgcatttaagataagaatgcagga

SEQ ID NO: 26472 - DNA, 120 bp, synthetic construct
  source 1..120: mol_type = other DNA
gctgttgttgtagcatagcccatattctgtttagacagaattgaaacaaggtagagagtagcagccttcccactaacactaacttctctatataccatggatgcttaaaactctgggggt

SEQ ID NO: 26473 - DNA, 120 bp, synthetic construct
  source 1..120: mol_type = other DNA
ttgtgagttagggaacacaggggttcaggatctttactcccacatatgatggaataacagtggaacgctatagttctagaagggaatagaaggcgttttctagcctcacttctgcttaaa

SEQ ID NO: 26474 - DNA, 120 bp, synthetic construct
  source 1..120: mol_type = other DNA
cttggtcaggaaagtattttctcactacagagttaaccttcccgctaagaacttcccagagtaagagtggatttattcaggtattgggtaccttctgaggatatggatttctgtcaacac

SEQ ID NO: 26475 - DNA, 120 bp, synthetic construct
  source 1..120: mol_type = other DNA
tctgtcagctggtgaattccacaaggagggaaatgctgcaagagaaggagaaactagttcattgttttgccagatgaagtgggagcctgaaagcatctttgggtcttatacacacacaca

SEQ ID NO: 26476 - DNA, 120 bp, synthetic construct
  source 1..120: mol_type = other DNA
cacagcccacctcctcaaaatcgtgtgctgaagaacatgggtttctgcacgagcattccaccatgtactgctaaacctgcatttcttgtgctgacttccttctcttgttagtttttttgt

SEQ ID NO: 26477 - DNA, 120 bp, synthetic construct
  source 1..120: mol_type = other DNA
cctatgcgtaaattgcacaataacacttctgagtttttaatgtcaagtctttcaaaattatggcttttaaaagctgcaaatgactctccctctccctctccctctccccacggtctccct

SEQ ID NO: 26478 - DNA, 120 bp, synthetic construct
  source 1..120: mol_type = other DNA
aaagctgcaaatgaagtctagaatctttctgaatttgtaagatccagtggccggttaccttaacaatcaattacattactcattgtaggtgaaagaaccaggaaaccaagaatgcaaaaa

SEQ ID NO: 26479 - DNA, 120 bp, synthetic construct
  source 1..120: mol_type = other DNA
ggatctaccaccacagggtgaaagacagttgagcaacaggcccacagagtacttgttcattataaaggaaaaaggtatctttataatggagagatctgataggcacagctttaaccagta

SEQ ID NO: 26480 - DNA, 120 bp, synthetic construct
  source 1..120: mol_type = other DNA
agaaggggccctactgaaatttgggtcaactacctcatttacaggtaagagaacagagataagagaggtaaaaaatcacttgcccacattagcaataaagccagtactggaagccaattc

SEQ ID NO: 26481 - DNA, 120 bp, synthetic construct
  source 1..120: mol_type = other DNA
gagagagatgacagaggctgagtgtcaccttctcacacatgccccatcactgggatcctggagtcagttctcagtcccgtttgctaacattgcccacagagctttttaaaaattaccaac

SEQ ID NO: 26482 - DNA, 120 bp, synthetic construct
  source 1..120: mol_type = other DNA
atattagctgctaatagtttacttcactttaactggcgagatgagtcatgaaatgtcaaaaatgctgaatgatttgaacatgtgattactttgctgcaaaatcctcttttgcattgttac

SEQ ID NO: 26483 - DNA, 120 bp, synthetic construct
  source 1..120: mol_type = other DNA
gaccagagcatgttcattgcggcaacggaatgtttattcagagagaaacggacagattcactaagtcgcatttacataatggactgctatgcagtcactaaaaggaatgaggtaaaccat

SEQ ID NO: 26484 - DNA, 120 bp, synthetic construct
  source 1..120: mol_type = other DNA
ccatctatgtgtttggatggtagtgagacctcagctacattgccaggcattacggggagaatgggcttcttagtaaaataccaaattggagtctataataagctttagtcatgtactgac

SEQ ID NO: 26485 - DNA, 120 bp, synthetic construct
  source 1..120: mol_type = other DNA
agttgccccaatgacaacttgcctagggaaaatgcaagcaggcttctattcttagcagaagtattttgagtgtctatcacctagggtgattgcaagtattagcactgaaaaagagaagtg

SEQ ID NO: 26486 - DNA, 120 bp, synthetic construct
  source 1..120: mol_type = other DNA
tattgcatagcaatacacatatgtattgcatagcaatatatatgtattgcatagcaatatatatgtattgcatagcaatatatagtatctatatatgtattgcacagcaatatatggtat

SEQ ID NO: 26487 - DNA, 120 bp, synthetic construct
  source 1..120: mol_type = other DNA
tatgtgtatttattatcatattttattttttaagagacagggtcttggtctgtcactcagaatggagtacagcggcacagtcataggtcaccgcatccttgaacccctggcctcaaatga

SEQ ID NO: 26488 - DNA, 120 bp, synthetic construct
  source 1..120: mol_type = other DNA
actaacaagcagcatctacctcttttcactttcactaagtctgtccagttccttttgctggctgaagtgatagacactcagaaaacaggcagtgttaactgatggagaataaaaggccag

SEQ ID NO: 26489 - DNA, 120 bp, synthetic construct
  source 1..120: mol_type = other DNA
attcctcatgggtaatgaagttgttcccaagcctgtcaccaccacatccttccaaccctgctcttaagcttctttttcagagggaagcagaatgtttactcagtaggacatcctaaagga

SEQ ID NO: 26490 - DNA, 120 bp, synthetic construct
  source 1..120: mol_type = other DNA
caccataaggtacgtggttagtggttctcaacatttttaaacatgagaaacctgttctaacatacacagagttcacagatctttaagaacttttagctgttctgttatctgttggttgag

SEQ ID NO: 26491 - DNA, 120 bp, synthetic construct
  source 1..120: mol_type = other DNA
gcctccagtgaaaaatcatgtgaccttaccaaatggtttctctatggagttacaaatgctgctcccagctggacctttggagctgttcaaagacccttatatttattttaagcaggtttc

SEQ ID NO: 26492 - DNA, 120 bp, synthetic construct
  source 1..120: mol_type = other DNA
gtgcagcagctttagaaaacaggttagcagttcatcagaaagttcaacgtagttgccatatgactgagcaattccactcctcggtatgtacccattagtactgaaaaatgtgtctacact

SEQ ID NO: 26493 - DNA, 120 bp, synthetic construct
  source 1..120: mol_type = other DNA
gcccaaaaagggaaagttagcataaaagagtcttggtgatttcaatcactggctcctaaatgtttgtcttctgcaaatttttttttttaattagtgagtttactttacaaaactattttc

SEQ ID NO: 26494 - DNA, 120 bp, synthetic construct
  source 1..120: mol_type = other DNA
acggatgcacatgcagcccccatgtttatctgcctgagtgatttgataaaactcagttgagtctttctgtactgtcccttgttatcatctatttgtctcccaattttctgtgactcattc

SEQ ID NO: 26495 - DNA, 120 bp, synthetic construct
  source 1..120: mol_type = other DNA
aagtgtacactttaggggtgaatgatctttccctactgagcccatcttattctgctgcactgtgctagagcatcttgaccactgtgtatctacttataaccaaagacaaatcttctttcc

SEQ ID NO: 26496 - DNA, 120 bp, synthetic construct
  source 1..120: mol_type = other DNA
ctaacttcagaggaccggaacagttgggcctgctaaagcctgagagacctaaattgtgaggttctgaagcatctgaaaaaattatatttcttcctctcacatgattaccttttccaacag

SEQ ID NO: 26497 - DNA, 120 bp, synthetic construct
  source 1..120: mol_type = other DNA
tcaggctgctataataatacactatagactgggtggcttaaacaacagcaatttatttttcatagttctggagactgagaagcccaaggttaaggtgttagccagtttgactccccagtg

SEQ ID NO: 26498 - DNA, 120 bp, synthetic construct
  source 1..120: mol_type = other DNA
gaacttttaatttcacatgaagttgcttgttttatggcctcttctgtttcttgccaagaagtcttaattttcttgtcttttgactatgaagatgcttctactgatgaacctgagcattaa

SEQ ID NO: 26499 - DNA, 120 bp, synthetic construct
  source 1..120: mol_type = other DNA
ttagtgatacacatttctttccccttccatttcctcctcaccccacctcttgtattacattgccctttaccgtctttttacacttgttcactttgctttcccactggacgttttcaaaca

SEQ ID NO: 26500 - DNA, 120 bp, synthetic construct
  source 1..120: mol_type = other DNA
ttatttttactcagtaaagaattataaattatagtctatctacattcagactttgggcaacttcaatcatatgaaacaaggctttacactcagatggaagtggaaaagccctcggagtag

SEQ ID NO: 26501 - DNA, 120 bp, synthetic construct
  source 1..120: mol_type = other DNA
aaaggccatgaaaagacatgggattcatgggggttggggacttggtttcccccaccctcagaagtccaaggatgaaaagtcttagaagcaacagtgagaggtttttttttgttttttttt

SEQ ID NO: 26502 - DNA, 120 bp, synthetic construct
  source 1..120: mol_type = other DNA
aggtaataatactacctagcttaaggatgttgtgaggcattaaatgagccaatacaagtatagtgacttatgttccgacacatagatacacactgaaaggactctatgtgataactattt

SEQ ID NO: 26503 - DNA, 120 bp, synthetic construct
  source 1..120: mol_type = other DNA
ggacagagaagttaggcaagagaaataaataaagacatccaaattggaaaggaggtagtcaaattagcctttttcacagaagacatgattttatacttaaaaaacctagagaccctagca

SEQ ID NO: 26504 - DNA, 120 bp, synthetic construct
  source 1..120: mol_type = other DNA
agaaatcaatttaacaaaagatgtaaaagatatatatggaaaactataaaactccactgaaagaaactgaagaggtcacaataaatagaaagctattccttgttcatggactagaagaat

SEQ ID NO: 26505 - DNA, 120 bp, synthetic construct
  source 1..120: mol_type = other DNA
ttatgtactgagtcacaatgtaagagatctctgattatggatcacagtcagttttgagttcttttggttggctacaagatgaacttcacgcaagtcttgctgttctctccttcacacata

SEQ ID NO: 26506 - DNA, 120 bp, synthetic construct
  source 1..120: mol_type = other DNA
tcttgcaaaactgaaaccctgtaccattaaacaacatatcctcaatcctttctgccccaaaaccctagaagcgccattctactttctgtctctctaaattgctcatgtaagtggaatcag

SEQ ID NO: 26507 - DNA, 120 bp, synthetic construct
  source 1..120: mol_type = other DNA
actaaagataatagaggagttgtgcttgcttaattttcacgaactgaagcaacttatttttagaggttgtcttatgcagatgtttgaataagtgtgttagagatgggtttatgtgattga

SEQ ID NO: 26508 - DNA, 120 bp, synthetic construct
  source 1..120: mol_type = other DNA
aaagtggtgtttcagtttatagccctacttcttacttaaaattatggtcattgagaaatacccatcttattttgcattttcctggttattagtgagcttgagccccttttcctatagtta

SEQ ID NO: 26509 - DNA, 120 bp, synthetic construct
  source 1..120: mol_type = other DNA
aaaagtaagatatataccagaacaggcaaatctaaagtagattagtggctgcctagggctggagggtgtgaaggaatgggaagtgacaactaatgagcacagagtttctttttgggatga

SEQ ID NO: 26510 - DNA, 120 bp, synthetic construct
  source 1..120: mol_type = other DNA
ataggtttcctcactttaacagcttttcagaaaagggcaactgcatcctgatttcagaaatattaaatgtgttttttaatgccccacccctagatttatttgacagttctaactgtggcc

SEQ ID NO: 26511 - DNA, 120 bp, synthetic construct
  source 1..120: mol_type = other DNA
tgtatcctcagtggcttgacagatacctagcacatagtaggtactcaagaaatattagttgaatgaatggaatggccatccttggctgtgggcatggctactttcttcctaaacatttca

SEQ ID NO: 26512 - DNA, 120 bp, synthetic construct
  source 1..120: mol_type = other DNA
tgcataggaagtttttgtttgggtttcactaagaaaaattctcagtttgaagacatgatatctgaagctattgtgttatgtgcataaaggttcttgaacttggtgttatagtttctcagt

SEQ ID NO: 26513 - DNA, 120 bp, synthetic construct
  source 1..120: mol_type = other DNA
tgtttttttcagtggaggaaaccaggactcagcaaagttatattaactagtacgtcaactctgtgggttcaggagcatctctgtatagtgttgccatctagtcttgtctcctcattttcc

SEQ ID NO: 26514 - DNA, 120 bp, synthetic construct
  source 1..120: mol_type = other DNA
ccaaaagacaaattgtcatgagtttttttttttttttttttctgaagtatccatttgtttctcagctttggaattagaggtgtagaaaataaatgggactcaacagcctaagattttgtt

SEQ ID NO: 26515 - DNA, 120 bp, synthetic construct
  source 1..120: mol_type = other DNA
tctcatgacctcatctaaacctaattctctcctaaaggccacacctcccaatatcctcactttgggggttagggctttatcatatgaattttttttttttttttttttgagacagagtct

SEQ ID NO: 26516 - DNA, 120 bp, synthetic construct
  source 1..120: mol_type = other DNA
gtcgtctgccacaaacatattaaagtgtaactggatatggttgatgcagaattttgaacctttgttttaattctgatttttactcttttcccccatctagtgcccttttgtaatacagta

SEQ ID NO: 26517 - DNA, 120 bp, synthetic construct
  source 1..120: mol_type = other DNA
atcaacatgtcctggatagtgtccttgggtggtggttgcagcagcagtagtaggcagggagagtctatcctcagggcatgtggaaatgaacagctctgctaaggggaaggctcaatgaca

SEQ ID NO: 26518 - DNA, 120 bp, synthetic construct
  source 1..120: mol_type = other DNA
ggacttgagacactgtttttgtatgagggtagtagccagtgttaccaaccacttgctatgtgccaggtgaactcttataagcactttgtattaactcatatgactctctcacaagatcag

SEQ ID NO: 26519 - DNA, 120 bp, synthetic construct
  source 1..120: mol_type = other DNA
actcttttccatctcttagctttagcacctgctctttcttcttcctggaatgctcttattttcactcttctgacaaactttactccctcagggatcctcagtctaagtgaagtttctctg

SEQ ID NO: 26520 - DNA, 120 bp, synthetic construct
  source 1..120: mol_type = other DNA
gtattttacttccaaattatgggatgcttcaagatagcctctgagctctatgaaagcagagatttttacctgttttggctgggttctatctccaggtctaagctcttgggttctgttcct

SEQ ID NO: 26521 - DNA, 120 bp, synthetic construct
  source 1..120: mol_type = other DNA
agtgataggacagtatacctaacataggtgtgtggagcacttgctcactgagaacagaaaggtggagtttcagagcactggttgtttcttggtcttccaagatgtatgaatatttgatag

SEQ ID NO: 26522 - DNA, 120 bp, synthetic construct
  source 1..120: mol_type = other DNA
tctttctcccccacttttcagccacctttaagactatgttagaataggcctcttcgcttagcaataaatgtggccagtactggataattacacagggggaagcaaacataaaactaccta

SEQ ID NO: 26523 - DNA, 120 bp, synthetic construct
  source 1..120: mol_type = other DNA
agtccctgtttggaggcagctttcagtcttctgaaaaccacatccacacagataaaacaattagggagcaaagtaagatcagatgtcgttattaacatgctgcttagtagacagggtttg

SEQ ID NO: 26524 - DNA, 120 bp, synthetic construct
  source 1..120: mol_type = other DNA
cctgatttctcagtgcaagatgtgaattgagccccctttttcagggagccaactggagaccatactatgtatgtcaattttcggttagttaccctgtctctccaaatgatttatcttttc

SEQ ID NO: 26525 - DNA, 120 bp, synthetic construct
  source 1..120: mol_type = other DNA
acagaaggaatcagaaaaagaagttactttagtaatacatttcttaaacctattttgtccagactgaagtagttaataacagaataagatccagaataagatctaggtatcaattttaat

SEQ ID NO: 26526 - DNA, 120 bp, synthetic construct
  source 1..120: mol_type = other DNA
aggggagggggtcccaaacagaatagggtaggagacaggactagaatagctgctatcagatattgcaacactgctgatattacaatactggtattccttaaaattctgatatgacgaaca

SEQ ID NO: 26527 - DNA, 120 bp, synthetic construct
  source 1..120: mol_type = other DNA
attttaaacaatggtccttccaaggttctttttcaaaaaagttgttaacactatcaatagactggaaaacaggttgtcccctagattgtattccataattttattacttatataattttt

SEQ ID NO: 26528 - DNA, 120 bp, synthetic construct
  source 1..120: mol_type = other DNA
accaaaacacagacattattcaattatacttgtcatggcaaatcaggtttcaactctagtgtcggccctagtgcttccaggaatactactctgaggattatgaaccctcagtgtcactca

SEQ ID NO: 26529 - DNA, 120 bp, synthetic construct
  source 1..120: mol_type = other DNA
attcagcaccaagaaaaaaagattgtttccaaagcactcacagcccacatgtcttagtgctggataggtgggacgacagtggcagttaaagttgaataaggggaaagattgacataaatg

SEQ ID NO: 26530 - DNA, 120 bp, synthetic construct
  source 1..120: mol_type = other DNA
taattagggttatacacacatcacttacaaggaaatctattaatacaactatcatttctacaatgtttggttttgctatctcgtcttgaaaaacaatacactacttcagtttcaagtgat

SEQ ID NO: 26531 - DNA, 120 bp, synthetic construct
  source 1..120: mol_type = other DNA
cactgcgagggaagattgactttttgggaaactttttgttggttacagagaagaaaacagattggaaaagaacagaactagaacagggagagtagttacgaagtcaatagaatcatcagg

SEQ ID NO: 26532 - DNA, 120 bp, synthetic construct
  source 1..120: mol_type = other DNA
caagagagtttgatactagctaatgcacactaaaagaaatgccaaaggaaatttttcaggcagaagaattaccacaaagaactaaaatttggacctacataaagtaatcatgagctctga

SEQ ID NO: 26533 - DNA, 120 bp, synthetic construct
  source 1..120: mol_type = other DNA
aaaaaaaaagaaagaaacagtcccctctataaagaacgtttagaagagtttaaacttcaaagaagctttatgcatccaaataagggcacattctttgtttttggattttggtttttgggt

SEQ ID NO: 26534 - DNA, 120 bp, synthetic construct
  source 1..120: mol_type = other DNA
taggaggaaactgactaaggatttggaagaagtggtctgtcccagaaatccacattggcaaagaccactaggtcttcttcatgctttctctagaagactttcccattgtactcaaatact

SEQ ID NO: 26535 - DNA, 120 bp, synthetic construct
  source 1..120: mol_type = other DNA
ctgaagtggtagacctggacctaagattcagggcccttacacaaagccttgaaattatttgaggacctagaggcaagaaattataggagctgtatttgtggtttgcagattaaccacatt

SEQ ID NO: 26536 - DNA, 120 bp, synthetic construct
  source 1..120: mol_type = other DNA
aatttccaaaatcaattcattaatttttacagaactctctgatgcactgggggataaagattattataaaaatgtcaatgatagaccgctagcaagactaataaagaaaaaaagagagaa

SEQ ID NO: 26537 - DNA, 120 bp, synthetic construct
  source 1..120: mol_type = other DNA
ttgtcgcatctgtcctgcattcctgtttttctctttttcttccttctttgggttagttgaatcattctcagaattctatcttatgccaaccttcggcctagtagctagactctctacctt

SEQ ID NO: 26538 - DNA, 120 bp, synthetic construct
  source 1..120: mol_type = other DNA
gtgcatagagtcaggtatcaaaatgcattaacttccaagttggctcttccaagcaaatgactcatataaattggcctttagattaaaatacattaagcaatggagtgcactgaaagcatc

SEQ ID NO: 26539 - DNA, 120 bp, synthetic construct
  source 1..120: mol_type = other DNA
tgatggccatttatagagtagttgagtatagtgaataagtccctagattcaggagccagaccacatgggttcagatcttagctccgtcagatcttagctccgttacttattagctataca

SEQ ID NO: 26540 - DNA, 120 bp, synthetic construct
  source 1..120: mol_type = other DNA
aattgttagaaaaatgataaaaatggagtagactaaattagctagcatggtcagggaatgtctcctcaggaggtgtcacaccggagactagaggaggaaaagaaggaagcctagtgatga

SEQ ID NO: 26541 - DNA, 120 bp, synthetic construct
  source 1..120: mol_type = other DNA
gttcaggcaatttatatggtgtttcaggtgttactacctctaatagtctatcagtaaaaccctgataggggatggtctctcctttttgccttctactccatctcttctcacacacacttg

SEQ ID NO: 26542 - DNA, 120 bp, synthetic construct
  source 1..120: mol_type = other DNA
tttcagccttttaatatatttctgctggaggtttccagctttgattacatagcctgttcacctaggagtaaaggacattgggagggagagatgctcagtggttctcatttgcaaagtaga

SEQ ID NO: 26543 - DNA, 120 bp, synthetic construct
  source 1..120: mol_type = other DNA
tcaccctgatttaaaacctggcaaagacacaatgagaaaacaaactacaggccaacatctctgatgaacatagacacaaaaatccttgacaaaatactagcaaactgaatacagcagcac

SEQ ID NO: 26544 - DNA, 120 bp, synthetic construct
  source 1..120: mol_type = other DNA
gattgtgcggtagatggctatgtggctttcttgatggagaactttcaaacgtaggtttcagaaagtcttttctcttgagttagtctatccaaaagaggagtagccaacctcgaggttttt

SEQ ID NO: 26545 - DNA, 120 bp, synthetic construct
  source 1..120: mol_type = other DNA
agctgccatgttacaggagccattttgaaaaacatttcttactacaacttccaaaaaccacaattacgtacattatttcctttatagaaggaattttaaagttttaatgttttatatttg

SEQ ID NO: 26546 - DNA, 120 bp, synthetic construct
  source 1..120: mol_type = other DNA
agttgttgatatattccaagactttagtgctaaagattttcaagattatgattcatatttgaaattcaattcattgggacactaaatgtcaaactaaaatgaaagctataatactcctac

SEQ ID NO: 26547 - DNA, 120 bp, synthetic construct
  source 1..120: mol_type = other DNA
ccgggggtgagaagcactgaaaaatatgagtgagcattcctggcgtcctaccgcctacaagtacccactctgaatctttacagaagctataatttgtgtttctttaattataagtatggt

SEQ ID NO: 26548 - DNA, 120 bp, synthetic construct
  source 1..120: mol_type = other DNA
gtctttaagggcttgttaactatcctttattttctcatttgtcttaaattaggagtttgtgtttaaattactcatctaagcaaaaaatgtatataaatcccattactgggtatataccca

SEQ ID NO: 26549 - DNA, 120 bp, synthetic construct
  source 1..120: mol_type = other DNA
aataagtaaatgtataagtttttacacattatatatatgtttatattgctactcatgtatctatctggacagttttctggcatgtagactatcattttatattctcttttttttctagga

SEQ ID NO: 26550 - DNA, 120 bp, synthetic construct
  source 1..120: mol_type = other DNA
tcctatccattttctgactgatgaccttattcatactcaaatgttgcttcctcaggaaagacttttttggcctctccaaggagaaaattaagcgcttactccaataggggcttgccctta

SEQ ID NO: 26551 - DNA, 120 bp, synthetic construct
  source 1..120: mol_type = other DNA
gaaaatgcctaacctttacagagttctactttctcctgctctcttttccttgctcatcatcacttttttccatatccagtcagacacaaagatccattatttcaaccagtatcttatcaa

SEQ ID NO: 26552 - DNA, 120 bp, synthetic construct
  source 1..120: mol_type = other DNA
ttttctagagatatcacttattttggtttttccattgctcctatcttgcagatacacagtgcaactactaagctagatttccttctcctggggcctagagctggggatttcatgtcaacc

SEQ ID NO: 26553 - DNA, 120 bp, synthetic construct
  source 1..120: mol_type = other DNA
tcttcatttgcatggcgtatagtacagagtcaataaatgtttagtggtttaaatttctgaaggtgacatggccagtaatggtggagataggatctaaacagaagcttataccatgttatc

SEQ ID NO: 26554 - DNA, 120 bp, synthetic construct
  source 1..120: mol_type = other DNA
ttttggtttgtatgcatttactcaaccttcctgctacactgatgaaccctgaaagtgaagagtacatgtctcaaagccaaaggataccagctgatgtcactgaaaagtatagtagccatt

SEQ ID NO: 26555 - DNA, 120 bp, synthetic construct
  source 1..120: mol_type = other DNA
ttcttcagtaaaattagaaaaaaaaacttgccatatcaatagtcatcaccaaattagtatgttttatactctgtggtagaaatagtctcaattatgattcagggtattgcagataatccg

SEQ ID NO: 26556 - DNA, 120 bp, synthetic construct
  source 1..120: mol_type = other DNA
gggtaatttaagtgacaggctgtgtatctggtttcttcaacagcttaaaaagcaaacaacaaaaacagaaaacttgtgaagaaataaattctcagactctttttggtaccagagagatac

SEQ ID NO: 26557 - DNA, 120 bp, synthetic construct
  source 1..120: mol_type = other DNA
ggtgcttgaatagtatttgcttcaaaaatatttattactagaaagctgctgtgtttggggtgagaggttagtagggaagggggttcataaagggaatgcaaaagccacgtcctctggaag

SEQ ID NO: 26558 - DNA, 120 bp, synthetic construct
  source 1..120: mol_type = other DNA
ctggaactaaaaaaatgctaactcatagggctatacatttataactattcttattattaaaatttgactcaaagtcttaggttaacagacaacctgtgtctaagtatgtaggcctataca

SEQ ID NO: 26559 - DNA, 120 bp, synthetic construct
  source 1..120: mol_type = other DNA
tgggactactggtgtacatcaccacaaccgcacttttaatttttttttttttttttttaataaagaagggaccttgctatgttgcccggggtggtcttgaactcctggattccagccatc

SEQ ID NO: 26560 - DNA, 120 bp, synthetic construct
  source 1..120: mol_type = other DNA
gaaggatgagtaggatcaagccaggagatctaggggattcccccccccccttttattagtgaatgtattctcatttgaaggatggaatttatgttttgaattaaatctagtggtgtcccc

SEQ ID NO: 26561 - DNA, 120 bp, synthetic construct
  source 1..120: mol_type = other DNA
tgaggatctgcttcctgcagttgttaacagggttaaaagcaataatgcatataagaagattagcacagcatgtggcacatagtcaacaatattgatattgtggttgttatgaacagtcat

SEQ ID NO: 26562 - DNA, 120 bp, synthetic construct
  source 1..120: mol_type = other DNA
ccagaattaaaggatgtatttcgtctttacaaacccaggaaactgcttcagatctgaggagctctcagtctggaaggctcagttgggtagatcactggctttccttgggtctatctatgt

SEQ ID NO: 26563 - DNA, 120 bp, synthetic construct
  source 1..120: mol_type = other DNA
cccaccagcagtgagcaagtgttccattttcttcacatccttgccagtacttgctactttttgtttgttttttttggggggggggggtgataataactatcgtaataaatatgaagtggt

SEQ ID NO: 26564 - DNA, 120 bp, synthetic construct
  source 1..120: mol_type = other DNA
ggggcaaataatagagcaaaacacaaaaagaccaagagaaaaaaacaattaattctacaattggggaattgtcaggacaaagatatgtataaattaagataaaggaatgtgaagtatgca

SEQ ID NO: 26565 - DNA, 120 bp, synthetic construct
  source 1..120: mol_type = other DNA
ttttaacattccttaccaagggcattttctatattttaaagacttaagaagggtcaggacatgaaaacatttaaaaggagctaggtggtcgggcacagtcgctcatgctggtaatcccag

SEQ ID NO: 26566 - DNA, 120 bp, synthetic construct
  source 1..120: mol_type = other DNA
ttataacactaaggtcatgctaatgacaaagagttggggtggggggcgggtctagacagagttttaaagttttctaatctttacaagaagacacaagaggagaaaccagtcagtctgttg

SEQ ID NO: 26567 - DNA, 120 bp, synthetic construct
  source 1..120: mol_type = other DNA
caggtaatgagaaatatctcatgaatgccagggaaagaactttaaatgactgctcttttaacacacctttcaggcaaatgtcttaaggccactgtcacagaaaagcacctgattgggagg

SEQ ID NO: 26568 - DNA, 120 bp, synthetic construct
  source 1..120: mol_type = other DNA
caaaatgacaagtcctcatcggaggcactgcatccaaatttgcttacctcaaactttgagaagcagccaagatatgaaaactctagagaaggaaaaacttatgccatgactggcaataag

SEQ ID NO: 26569 - DNA, 120 bp, synthetic construct
  source 1..120: mol_type = other DNA
acaggcatgagccaccgcgcctggccagagctctgttttaaagcaatgatcctcgaaattgtttgtttcagcatcctctgcattaatattctgaagctatatacttatactcacttatcc

SEQ ID NO: 26570 - DNA, 120 bp, synthetic construct
  source 1..120: mol_type = other DNA
tgaattcctctcacatctttggccatctcttcactcctgtcgaccactacattcaaacctcttcccaggcctggtcttttcctactctctaaatcaagcctctaaacctaggccattcaa

SEQ ID NO: 26571 - DNA, 120 bp, synthetic construct
  source 1..120: mol_type = other DNA
aaagctgaaagcctttcctctaagaactggaataagacaaggatgcctactttgacccctcctattcagcatagcagtgaagacctaaccctgagcaatgaggcaagagaaagaaataaa

SEQ ID NO: 26572 - DNA, 120 bp, synthetic construct
  source 1..120: mol_type = other DNA
ctacacacacacacacacacacccctttggggaaagaaacaaggtatggggagctcctctaatggaaaagtaatttttaacttggaaaatctataacagatgtatgtacaagaacatttc

SEQ ID NO: 26573 - DNA, 120 bp, synthetic construct
  source 1..120: mol_type = other DNA
catgagccaccgtgcgtggcccaagagctcttgcagtaaatacaaaacaaaaactctaagtcctaagaggttattgcatcagagttatgggcagcagtttttcttagtgttaaatttttt

SEQ ID NO: 26574 - DNA, 120 bp, synthetic construct
  source 1..120: mol_type = other DNA
gagtgtcaaatcaagacatagtgtatgcagtatgaatatacctaaatgactcacaaaaaaggaatctttgacgctaaagtttttctggtcagccctgaccattggtctctagttattgag

SEQ ID NO: 26575 - DNA, 120 bp, synthetic construct
  source 1..120: mol_type = other DNA
cgttgaatccctttttttcaatatggtgagaaatagggatccaattttatttctgtccctataacaacctagttttttccagcaccatctaagcattctgtcttttccttgttgatgtgt

SEQ ID NO: 26576 - DNA, 120 bp, synthetic construct
  source 1..120: mol_type = other DNA
atttttgtgcctcactaaagcttttgtgcaagctactgaactagaaactggggatacaaagataaaaaaaggcatggtctgcctctagaagtttatagggttggaggagagtgggagagg

SEQ ID NO: 26577 - DNA, 120 bp, synthetic construct
  source 1..120: mol_type = other DNA
ctgcaacagacaagcctcactctatgtcaatgattcttctgaggtcctgttttgaagaacaaaagcacaaaggacaatctgacctatcttgcttttttcagtgttaaccgcagtgtggat

SEQ ID NO: 26578 - DNA, 120 bp, synthetic construct
  source 1..120: mol_type = other DNA
caagcaatcttccagtctcagcctcctgaataggtaggactacaggagcacaccactatgcctggctacttttttaaaaaaatcatttttagaaatgaggcctcattatgttgcctaagc

SEQ ID NO: 26579 - DNA, 120 bp, synthetic construct
  source 1..120: mol_type = other DNA
ctcaacgtacggggattaccggcgtgagccactgcatctggcccaaatatttcttaagtttaaaataattttcctgaggtgtctctaactgaggtttagggaggaatgacagatttatct

SEQ ID NO: 26580 - DNA, 120 bp, synthetic construct
  source 1..120: mol_type = other DNA
caaagaagtgtcatagagcaattaaaatgtctgagttaaattaatccagatccacttgaataaatcttaaagacataattttgagtgaagaaagccaattgcaaagatacacactattat

SEQ ID NO: 26581 - DNA, 120 bp, synthetic construct
  source 1..120: mol_type = other DNA
cattgttcaactcccacttatgagtgagaacatcatattttgggtaccattataaactgtaagtcacgcctgataatctcatgtctgaatacccaaatatgtgatgtttggttttctgtt

SEQ ID NO: 26582 - DNA, 120 bp, synthetic construct
  source 1..120: mol_type = other DNA
tcacatctgaaagcacatcacgtccatctgtccttcattggtgatgttaactttaatcagccatacaagtgttttctgatttccctactaggtaattattgtataatttttttcccctgc

SEQ ID NO: 26583 - DNA, 120 bp, synthetic construct
  source 1..120: mol_type = other DNA
tgctatacaagagaatccaaactatgagaagcccaagaaagaagttaaaaacagcaggtggaaacatcccaaaatgtcccatgcccagaagaaagatcaggtagctcaaaagaagggaag

SEQ ID NO: 26584 - DNA, 120 bp, synthetic construct
  source 1..120: mol_type = other DNA
caaatctcccaaagattttacacttctcccacccccatcagctgtttcttaagcattaagcatttcagagtcctttgactctgaaaacaacccgacgaggccttttaataagcctttaat

SEQ ID NO: 26585 - DNA, 120 bp, synthetic construct
  source 1..120: mol_type = other DNA
atccccactgctggaagataaccacagataatttgttaaatttccttttatgccttttttctacccttgtatgtgaatacatatttttaaaactggcatcaggtggtatacagaacatag

SEQ ID NO: 26586 - DNA, 120 bp, synthetic construct
  source 1..120: mol_type = other DNA
tgaagtgtttaattcctcccttgtaatctcttcatcaacacacatttaaagcatatcagttttacctcagcaatttgattctcagaggcttatgtggctcagggcctctgtccagcacct

SEQ ID NO: 26587 - DNA, 120 bp, synthetic construct
  source 1..120: mol_type = other DNA
gtccactagatggagatcattttcttaaacaaggaaactattttctactgaagggttaaataaccttaaaggcctaaattatttcttaggaactcatgaaaataaccctttaaatgacat

SEQ ID NO: 26588 - DNA, 120 bp, synthetic construct
  source 1..120: mol_type = other DNA
caccatatggtcatcctctcttcatttggttaactataagccactaactaggaactcctactggaaaggattgttttaccattcttggtagagcacaaggcattatggaggcccaaatag

SEQ ID NO: 26589 - DNA, 120 bp, synthetic construct
  source 1..120: mol_type = other DNA
caatatctggcttacaaggtatttgcttaacagcagaataaatctttggtcaacggtggtagataagccctttacagattttcttcctgtgcccttttgtggcatttgcttcatggctgg

SEQ ID NO: 26590 - DNA, 120 bp, synthetic construct
  source 1..120: mol_type = other DNA
atgtcagtatcgaaatgtgaggtaccattgcattcatcatgctctttgttgcctgtatacttttgttttgttttgttttcgctttttagcttgtatttttgttttacaggtcctttgtga

SEQ ID NO: 26591 - DNA, 120 bp, synthetic construct
  source 1..120: mol_type = other DNA
ggttgagcatccccatccaaaaacctaaaattcaagatgctctgaaatccaaaatgctccaaagtctaaaactttttggtcactgacatgagatagtgactcctttgctgatggttcagt

SEQ ID NO: 26592 - DNA, 120 bp, synthetic construct
  source 1..120: mol_type = other DNA
ttgttgaggatttctgcataaatgttcattgggagtattggcctgtagttttctgtttgcaatgtgcctttggtctgtttcggtatgagggtaatactggccttgtgcaataagtgtgga

SEQ ID NO: 26593 - DNA, 120 bp, synthetic construct
  source 1..120: mol_type = other DNA
gctaccatccataccaggcctacctccaaataaggctcaaatcttattaaggaatggccatgattacccatctatgttttgtttgtttttgcatactgggatttctatggaagacaggta

SEQ ID NO: 26594 - DNA, 120 bp, synthetic construct
  source 1..120: mol_type = other DNA
tgtaattcaaatcaactgtgttcctcccctcctccactccctctccccacatttcttcttatattccctagtactggccaccattcagccaataaccagacaataactgctaatcaggtc

SEQ ID NO: 26595 - DNA, 120 bp, synthetic construct
  source 1..120: mol_type = other DNA
cccacaggtgtggaggggcaacccaccccttcactcgggtcatgcaggaatcatatgtgcaaaaataatgtgataaaaacacacctataaggtgaaaaacatctacgtatttgctataaa

SEQ ID NO: 26596 - DNA, 120 bp, synthetic construct
  source 1..120: mol_type = other DNA
tatctgagaggtgaatgagtgttcttagacacttgggcagcagctgaagctcacctggcattcctacttgatgctctcatagttcaagtctcaactatggtgattatttggagcaaaggg

SEQ ID NO: 26597 - DNA, 120 bp, synthetic construct
  source 1..120: mol_type = other DNA
gagaaagaagccatcttagaagtaaatcttctagcccaactgacaccacctttattggaagagaaaaactactagttgagctctttctaaatgcttgccacaaaacccatgagtaaaata

SEQ ID NO: 26598 - DNA, 120 bp, synthetic construct
  source 1..120: mol_type = other DNA
tctcaaggtcttaggaaaattgcttaaatgcactgagcttcaatttcattccctataaaatgcggatgatttcacctatcttgatgcattgtgagtagtaaatgagtatgtaaagggctt

SEQ ID NO: 26599 - DNA, 120 bp, synthetic construct
  source 1..120: mol_type = other DNA
tggcctactaaagtggtgagattacaggcatgaactaccttacttggctgatttcttttttgaatagtttactgttagtgtatttttgtatcccacaactttactgaacttgtttgttct

SEQ ID NO: 26600 - DNA, 120 bp, synthetic construct
  source 1..120: mol_type = other DNA
ggaaaaacacagagagaaattgttaagtggaagtgagagctcatccaaaaaaagacagagaaagaaaaaagaaaagaagaaatctggtaggtattcatcttcttcttcatcaagctctga

SEQ ID NO: 26601 - DNA, 120 bp, synthetic construct
  source 1..120: mol_type = other DNA
tgactagaagcgtctaaggataaaccaacagaaattgaatctggatacatctttaagatgtaatcagaaatgaccagatgactctagttagaatttttgaaggagggattacattaatat

SEQ ID NO: 26602 - DNA, 120 bp, synthetic construct
  source 1..120: mol_type = other DNA
tgaagacaggaacctggagactgcagaacacacagaacatgataaaagtagcattttaaatcagtgagggaatttattcaaagggtgttgggataactgggtagccatctggaaaaaaat

SEQ ID NO: 26603 - DNA, 120 bp, synthetic construct
  source 1..120: mol_type = other DNA
ttatgggctacttcttggcttgcgttgagatggaattgaagaaagcaagttccgcagtgaaaacagattgtcaaaaccagaaaagaggcacattgtgctcagttttcaaaactcttctgt

SEQ ID NO: 26604 - DNA, 120 bp, synthetic construct
  source 1..120: mol_type = other DNA
actctttgacaggtaggagactcagtttcccaagcaataagatgtaatgaagacagcatgaggccaaccacatctgcctctccttcctacattttttccctgcagtttacttgaaaagta

SEQ ID NO: 26605 - DNA, 120 bp, synthetic construct
  source 1..120: mol_type = other DNA
catggagcataattacagtagttggtatagagcttctgagtgataattctaacatctagttcatcttgcttggtatctgttgactgttttttccccttgagaattggtcacattttgctg

SEQ ID NO: 26606 - DNA, 120 bp, synthetic construct
  source 1..120: mol_type = other DNA
agcccgagagaccttcttaatggcgcatgatggacacattcagtttacacagtttattgacaacctgaaacaaatctacaaaggcaaaaagaaactgatgatgttggttcgggagaggtt

SEQ ID NO: 26607 - DNA, 120 bp, synthetic construct
  source 1..120: mol_type = other DNA
ctattgaggagaagttctcctaggtgacaagcatttgctgaagccatgggatacttagaagctgtcgtcaccctcctcctgaccccggtcctaatgaagtccctggaattaatatctttc

SEQ ID NO: 26608 - DNA, 120 bp, synthetic construct
  source 1..120: mol_type = other DNA
tatcaaagtgagaaacaagaaggcaacataataatgttatcagaaagatgttaggaagtaaggacagctgtgtaaagcttgaggctgaaaagtagcttgccagcttcatttctttggttt

SEQ ID NO: 26609 - DNA, 120 bp, synthetic construct
  source 1..120: mol_type = other DNA
gagagggagagggagagggagacgggaggacatccccaaggatattcttagagcaatttcaaatactgtaatactcagcttatagcaatctcaaatactggagctgaaacgctgtccagc

SEQ ID NO: 26610 - DNA, 120 bp, synthetic construct
  source 1..120: mol_type = other DNA
tttcagatggaccagcttttgggaaatatgattgaaatgtgggttgatcgaatggacaacattacccagcctgaaagaagaaaactttcagctttggctttgctctctcttctgccatct

SEQ ID NO: 26611 - DNA, 120 bp, synthetic construct
  source 1..120: mol_type = other DNA
gcctgagtttttttctactccatcccctcagcatattaacctcatctgcaggctaccattcctcatcgataaaaagtagttctaggcattacagttcatgacaatgccactgacagataa

SEQ ID NO: 26612 - DNA, 120 bp, synthetic construct
  source 1..120: mol_type = other DNA
gagtagtaacacacacagaaaactggaactaaccattttggtctgagcttagtgctagctgtgtttgatgaatagaactaggtgatggcttcagctcttttggccttacgcataggaaaa

SEQ ID NO: 26613 - DNA, 120 bp, synthetic construct
  source 1..120: mol_type = other DNA
ctcaagaagaactagaagacatgaagagaccagcaaatattaaagaaattgataggtatttttaaatctgcccatagacctgaaaaaagtacaggcccaagtggttttataggctagatt

SEQ ID NO: 26614 - DNA, 120 bp, synthetic construct
  source 1..120: mol_type = other DNA
ataacaaaataccacagaccaggtggcttaaacaacagacactgattttctcacagttatgaaagctgaacattcaagatcaggatgccagcatagttgagagccagggctcttttcctg

SEQ ID NO: 26615 - DNA, 120 bp, synthetic construct
  source 1..120: mol_type = other DNA
ttgaatgctggctcaactgaggtttcatttccttgaaacacaagtcatttctacctactctctgtattgggttttctgcttatttgtcacccatattcaagaatgttcccccttctgcca

SEQ ID NO: 26616 - DNA, 120 bp, synthetic construct
  source 1..120: mol_type = other DNA
gtcattattgtgccactctaggccctggattttaaatttcagtgcttctaatattagcctagagatcaataccatgcatgtttcagtcttatgggtaagatatggaagctgcagtgagac

SEQ ID NO: 26617 - DNA, 120 bp, synthetic construct
  source 1..120: mol_type = other DNA
cgcattaacaagagaagtggccacttactactttcaataacttctttaaccagttagtttttaaaagagttaatagtaaaaatgcacaggtggccgaagactggaaggaagttgtgatgc

SEQ ID NO: 26618 - DNA, 120 bp, synthetic construct
  source 1..120: mol_type = other DNA
atttgaccctgcctgtattttcatgtgagaaggcagtctaaacttctgcactatgccatgtttgtcttcacattcttgataatttctgtcatagtgactcgcacgtagtagcattcaagc

SEQ ID NO: 26619 - DNA, 120 bp, synthetic construct
  source 1..120: mol_type = other DNA
aactattagttcagtgtaatagcagtgacaggcgtggagcctggtgatggggtcatttaaaaaaaaaaagagcttaaataagtccctcaggttttctaagggattgccagccacacaaac

SEQ ID NO: 26620 - DNA, 120 bp, synthetic construct
  source 1..120: mol_type = other DNA
atcggttattctatttctcttttaattttaaccacaatggatctgaagaatagaatctgaagtgggaagtgtgtgggtgtgggagaatcactggctcactctgtatgtgtccacatgtgg

SEQ ID NO: 26621 - DNA, 120 bp, synthetic construct
  source 1..120: mol_type = other DNA
ctttttcccacctagcactgctgggcctgcaggtctctgtcaagtggcagacaataaataaataaaaaacacacacccaaatacaggttgatagctcacataacaaacagagataccatt

SEQ ID NO: 26622 - DNA, 120 bp, synthetic construct
  source 1..120: mol_type = other DNA
tcaaggacaaagaattttgaaggcaagagaaaaaagattcataacatacaagggaactccataggtctatcagcagatttctcagcagaatccctgctggccagaagaggctgatagcta

SEQ ID NO: 26623 - DNA, 120 bp, synthetic construct
  source 1..120: mol_type = other DNA
tgaaacttacacttcatatagaggagagtatgaaagaagggaaagtgcatcaaacctgtgcgtttcacagtagaagctccgtcctcacagcttagtaaacaccaatgatcctgtctctaa

SEQ ID NO: 26624 - DNA, 120 bp, synthetic construct
  source 1..120: mol_type = other DNA
caggctcctcctgcctgccctgagccactgctcccagctcaccaccttctactttcatggaaacgagacctccatgaatgctctgaaagacctgctgtgtcacacaggcgggctgagcaa

SEQ ID NO: 26625 - DNA, 120 bp, synthetic construct
  source 1..120: mol_type = other DNA
agaatgtgcataggttatatacaaatacaacaccattttatatgagggatacttggagcatcctcagattttggcatatgtgagggttctggaactaatcccccatagatactgagggat

SEQ ID NO: 26626 - DNA, 120 bp, synthetic construct
  source 1..120: mol_type = other DNA
agaccatctggcgaacatggtgaagcccccatctccattaaaaatacagaaattaactatatgtagtggcatacactttaatcccagctactgtggaggctgaagcatgataattgcttg

SEQ ID NO: 26627 - DNA, 120 bp, synthetic construct
  source 1..120: mol_type = other DNA
ttgtctgtttctgttcatgtaattgctacacacacaaccaccttacatactgagagtttaccattcataaacaagtttatgaaatgttttaaaaacattaagaaagagctgacctttgaa

SEQ ID NO: 26628 - DNA, 120 bp, synthetic construct
  source 1..120: mol_type = other DNA
ctccatctcggatgtctgattcagtttctcttaatactgatagtagtcaagacacctcactctgctctccagtgaaacaaactcatattgatattaattccaaaatcaggtgtgtgaacc

SEQ ID NO: 26629 - DNA, 120 bp, synthetic construct
  source 1..120: mol_type = other DNA
tgaatccctttggagggatggcattgaataacttataatttcagtgaatcatttacgttttcattggaagacagtatctgatttcaactggtgcgttacgaagtagagccattcccacaa

SEQ ID NO: 26630 - DNA, 120 bp, synthetic construct
  source 1..120: mol_type = other DNA
gataaaaatagtcttaatgcaaggaactgaaaggattttctctagatgttcctctcctcaactccaatgaagttcccagtgggcagggatttctgtcagtttcgttccttgcccttttgc

SEQ ID NO: 26631 - DNA, 120 bp, synthetic construct
  source 1..120: mol_type = other DNA
atatggaacagattctttcaaatgatgtggtttgccataacctaagggtcttttccacacatgaagtgttcagtttttcaaaatactagagactcactttagtttccagtatgtcacctt

SEQ ID NO: 26632 - DNA, 120 bp, synthetic construct
  source 1..120: mol_type = other DNA
ttagtagaagagaaaagaaaattagattcagtgctaaggtagtgcagaggaggatgaggttctgaagagtgttttggggaaaaagttttagggaactggttgcgtttgagctggaccttg

SEQ ID NO: 26633 - DNA, 120 bp, synthetic construct
  source 1..120: mol_type = other DNA
tggcagagcttactgtgtctgaggagcttaaagtaatccagtatttctgacaggcacataaacaacagagggcacttgttaagggatgaggcaggagaaataacaagggattatagcata

SEQ ID NO: 26634 - DNA, 120 bp, synthetic construct
  source 1..120: mol_type = other DNA
agaaatccaaagtagcatgcagttttatcaacctctctgcatccccttggcacaaggaataatttttctgttattgaggggcaaaacagaggggtaaaggcactcatacagttaaatgcc

SEQ ID NO: 26635 - DNA, 120 bp, synthetic construct
  source 1..120: mol_type = other DNA
tgaatagttccctctctgagggaagcttttagtttgccccttcctttcaccagttagctgtagtctatattgacataactttctccctgctgactcttaagcaattattagaattcactc

SEQ ID NO: 26636 - DNA, 120 bp, synthetic construct
  source 1..120: mol_type = other DNA
atatacatgtagatacatgtagatacatgtatacatatatacatgtagatacatgtagatacatgtatacatatatacatgtagatacatgtagatacatgtatacatatatacatgtag

SEQ ID NO: 26637 - DNA, 120 bp, synthetic construct
  source 1..120: mol_type = other DNA
ctggtctgatgacttgcttagcttggaaatccttgttttcagtgtgtcgagtcaaaatgtgtttatgtgagctgtcactgtggggaaccaattgctttgtcatatagctggttatgaact

SEQ ID NO: 26638 - DNA, 120 bp, synthetic construct
  source 1..120: mol_type = other DNA
ctggggtggggggtgggggtagtgtgcctccttgacatttcgttcaagttatagattcaatggagctatgtcttgttttaagttgctttaatgcattgtattagatcttcaaacagaata

SEQ ID NO: 26639 - DNA, 120 bp, synthetic construct
  source 1..120: mol_type = other DNA
ggtgctgaaaaaattggatatccatctagacacagacctcacgttcttcacaaacattaactcaaaatggatcctagacctaaatgcaaaatgcaaaactataaaacccttagaatataa

SEQ ID NO: 26640 - DNA, 120 bp, synthetic construct
  source 1..120: mol_type = other DNA
ctgggattacaggcatgagccactgacctcagccagttttcaaacttctaaataggggagtgatgataggatagatagaacattctcttaagaagcttggctatgaaagtgaagaaacag

SEQ ID NO: 26641 - DNA, 120 bp, synthetic construct
  source 1..120: mol_type = other DNA
tcaagttggattttcagtgtcagcattggtattcctctgatgtttcatagaaatctcgtctcttgtctccgaatacagatttttgggcagtctatctgacacacctcttacatccaggct

SEQ ID NO: 26642 - DNA, 120 bp, synthetic construct
  source 1..120: mol_type = other DNA
gttacatcgagttcatattaggactttgagcttttttccagatactaaaaggaccaaattaaacaatcatatctatagctgcttttaattttgttagatgaaaatttatgcaagtaaaca

SEQ ID NO: 26643 - DNA, 120 bp, synthetic construct
  source 1..120: mol_type = other DNA
acttcttccctctactcccttttatttttctgcttatcattttggagataaacagaaaccattgccaaaggtgctctcgtgggtcaagattggcaagagtgtttttggaatagcaggtgg

SEQ ID NO: 26644 - DNA, 120 bp, synthetic construct
  source 1..120: mol_type = other DNA
gtttctggagataactacatagctcaagggggaagtaggacttgattgctgtttcattttaatgcctctccgggcctgatagcttttaagaaagggcttacattcctcagataagaagaa

SEQ ID NO: 26645 - DNA, 120 bp, synthetic construct
  source 1..120: mol_type = other DNA
ttcagtgtcttcccccttttcattacaagataaataataactatctcttggggttttttaaggttaaaaatgtgtctgcaggcacacaggacgtgccttcacccccatctgactatgtgg

SEQ ID NO: 26646 - DNA, 120 bp, synthetic construct
  source 1..120: mol_type = other DNA
ttgagtgaacatcacagtgtacttaacacaaacctagatggatagcctgctacgagcctaggctatgtggtatagcttcttgcttttacgctacaaatgcagacagcatgttaatatacc

SEQ ID NO: 26647 - DNA, 120 bp, synthetic construct
  source 1..120: mol_type = other DNA
ctggcctgctttgaagttttatccccaatgcccgactcctgattagtgggccatgatatatgagatttactctgagtgcatagttgttttggtattcagacttgatcttgctgttgattt

SEQ ID NO: 26648 - DNA, 120 bp, synthetic construct
  source 1..120: mol_type = other DNA
gctagctagttcctctccccagaggcaactaatgtcatcactttctatttctccacagattttaaaacataaagatactggccaaagtacattgattcccccacccccccttaaaatact

SEQ ID NO: 26649 - DNA, 120 bp, synthetic construct
  source 1..120: mol_type = other DNA
aagtgcaaacacgatgcttcattttagaacccagatgaatgggtgaatgggagtggtactaagagatactaatgcacaatatctcccccagagcatggtaatgatggaaggattttacag

SEQ ID NO: 26650 - DNA, 120 bp, synthetic construct
  source 1..120: mol_type = other DNA
ctgtccacacccaggttgaattacccttcataaatcaaggaagttgaatgttgctgcaatgcaaagctttcaaagaaggctgactccttgcattgctaaatgagaccattgtttggtagt

SEQ ID NO: 26651 - DNA, 120 bp, synthetic construct
  source 1..120: mol_type = other DNA
aaagtgctgggattatacaagtgtgagctaccgcacctggccggcttgttctttttattcttcagtcatttgttttattctctctcacactccttcacgctgcctttattgctcctacct

SEQ ID NO: 26652 - DNA, 120 bp, synthetic construct
  source 1..120: mol_type = other DNA
tttttctaatttcttttgccctttagttccctccctctttggccccacccctaaaatgaatccactgcattctaaaggttttgtttttctacctcaaagaagaggcatagtacctggcag

SEQ ID NO: 26653 - DNA, 120 bp, synthetic construct
  source 1..120: mol_type = other DNA
tcatgtttgtgtccgaaacatgcaattgtgatgcaactttaaataattgtattagaagaaaatagtaagtgtgtaatggtaacccttctattcattctacgtggcttcaggattaacagc

SEQ ID NO: 26654 - DNA, 120 bp, synthetic construct
  source 1..120: mol_type = other DNA
aggtcactggtgtaatttcattctttgccaaccaggactggagacagttttttgtgtggtgttggctggttttttccttagcacccttttgtgacaaagtttgaagtggagagaatgttt

SEQ ID NO: 26655 - DNA, 120 bp, synthetic construct
  source 1..120: mol_type = other DNA
gaaacatttgcaatgtgaatggtaatcaaaacatcgcttctcagagagtgaggaatgataggcggggcatgggtagcttgagatcccctattcactgatgattctgatactttatcttcc

SEQ ID NO: 26656 - DNA, 120 bp, synthetic construct
  source 1..120: mol_type = other DNA
aaataaataaaccagtctgaaaactatgggtggtagcaggaaacagccacttccagtcagctgtgctgccactgtggtgatcaaagcggactttgtgttccagaattccagttttaagac

SEQ ID NO: 26657 - DNA, 120 bp, synthetic construct
  source 1..120: mol_type = other DNA
atacaagagcttacaatcagaacttgatgagatcaataaagaactctcccgtttggataaagaattggatgactatagagaagaaagtgaagagtacatggtaaattcaacctgatattt

SEQ ID NO: 26658 - DNA, 120 bp, synthetic construct
  source 1..120: mol_type = other DNA
ttacttttaagttttttatgtgtaaaattaggtaaacaactttcaaatttatggttgtatcataatttaagagtcattttctatggatagacatttaagtatgtctccccctactccagt

SEQ ID NO: 26659 - DNA, 120 bp, synthetic construct
  source 1..120: mol_type = other DNA
gcggggaggtgcatgattacagccataaggaaaacatgattgaaatcctgaagcatttaacatgtctcagtttttaaaggagttgctgatgatgggtactgagactggaaaggtaggaaa

SEQ ID NO: 26660 - DNA, 120 bp, synthetic construct
  source 1..120: mol_type = other DNA
agccttaaaggaaggttctggtgtgaactaaactttcacaccccagacgatgtcttcatacctacatgtatttgtttgcataggtgatctcatttaatcctctcaaccacctttcagata

SEQ ID NO: 26661 - DNA, 120 bp, synthetic construct
  source 1..120: mol_type = other DNA
aggatcagggtgtttctgttggcgttggcattaactagctggatgtaaatttgaaaagccactcaagcagcttcctagtctagaaagtcagaggtttagattagatttccgacatccctt

SEQ ID NO: 26662 - DNA, 120 bp, synthetic construct
  source 1..120: mol_type = other DNA
agaattcataatttcctggcagctcatgattctgctacactacaccatgccatctcttgtgtgaaaggacagatttgatggaggactatgtcatccctcatgcgtttcttattgtctaca

SEQ ID NO: 26663 - DNA, 120 bp, synthetic construct
  source 1..120: mol_type = other DNA
ggccactcatgggcaaagaacagattatccattctttatagttgtcttttagttttacaagttgaaaaaacatctgagtaggttagataatttattctaccactttgtaaatgattagaa

SEQ ID NO: 26664 - DNA, 120 bp, synthetic construct
  source 1..120: mol_type = other DNA
aagaggccctagcttctgcagttcctttgtgttattcctaacccttttctcatctgggggtgcactgcctctccatttctcaagtatgggaaatgccagtaattccacttgtgttaattg

SEQ ID NO: 26665 - DNA, 120 bp, synthetic construct
  source 1..120: mol_type = other DNA
aatgtttgttgaatgaacagcaagagcaatggaggagtcctgaaatacacagcaagaagcaaggataattctggctttacttctgtggccagggtccttcatcccaaccttttagaagta

SEQ ID NO: 26666 - DNA, 120 bp, synthetic construct
  source 1..120: mol_type = other DNA
tgagtttaaaaacgttgagaacgttatgcgagtttttcatttttaaagttcacaatacgtaacagaaaacagggaggagcaaaatgttcagttgaggctgggtgtggtgactcacgcctg

SEQ ID NO: 26667 - DNA, 120 bp, synthetic construct
  source 1..120: mol_type = other DNA
ccttccctgtctaatagtctccaatgtctgttgttctcatcgttatgtccacgtgtactcagtgtttagtttccactcgtaaatgagaacatgccgtctttggttttctgttgctgtttt

SEQ ID NO: 26668 - DNA, 120 bp, synthetic construct
  source 1..120: mol_type = other DNA
gagacatacacagagagatagtacaatgaatcacatgtcactcagctataatagttcaactacgcccatactgactcctcacaagtctacagtttgtcatgtgacacatctataaagcat

SEQ ID NO: 26669 - DNA, 120 bp, synthetic construct
  source 1..120: mol_type = other DNA
cctaggcgtgggataggctataccatctaggtttgtgtaagtataccctgtgatattcacacaataatgaaattgcctaacaatgcatttctcagaatgtatccctgtcagtaagcgatg

SEQ ID NO: 26670 - DNA, 120 bp, synthetic construct
  source 1..120: mol_type = other DNA
atttgagcaccatggacaagttcgacttggaatggtatgtcattattttttcttttactagtacagaactagtttaggttagagaaacattctgtcttgctagaaaaaacaatagcaaaa

SEQ ID NO: 26671 - DNA, 120 bp, synthetic construct
  source 1..120: mol_type = other DNA
tttttgtttaaacagttgttggaatactttgtagaggaatattttgatcaaaatcctattagtcaggtacgtatctaagtgatagaattcagaattagattcctattttgcttccaaatg

SEQ ID NO: 26672 - DNA, 120 bp, synthetic construct
  source 1..120: mol_type = other DNA
agtgctgatagtcttacaaattagttcaatattttttagaaaagcataaaaattgttcctgaaattatatttagggaatgttatggaaggagaatgatcactctacaaagatactctttg

SEQ ID NO: 26673 - DNA, 120 bp, synthetic construct
  source 1..120: mol_type = other DNA
tccctaagcatggctatgcagactctaaagttagtattatacattatgtataattgaattagaagttttttaaatgagttaagttgaagtgatgtgttaatatggggcccataaacccag

SEQ ID NO: 26674 - DNA, 120 bp, synthetic construct
  source 1..120: mol_type = other DNA
gtaatagaggtaagtacagtagtagggtctaccagtgagagctgagacgataacaatgaaaatataagcaggaaagctataactaattgataaaattgctgcagaaagcataaaaacgtc

SEQ ID NO: 26675 - DNA, 120 bp, synthetic construct
  source 1..120: mol_type = other DNA
gcacccagtcacccaagagctctaattgagatgtacaagaagattaatgttattttcatatctactaacatagcactcattctgcaacccttggataaaggaatactttgaactttcacg

SEQ ID NO: 26676 - DNA, 120 bp, synthetic construct
  source 1..120: mol_type = other DNA
ttgacccatgtaacaaactactttgtcttattttaagaaattgccatagccacctcacccttcagaaagcaccactctgatcagtcagcagccatcaatatcaaggcaagactctccttc

SEQ ID NO: 26677 - DNA, 120 bp, synthetic construct
  source 1..120: mol_type = other DNA
ttttgtatctgggacttgaacatctgcagattttggtatccataggagggcctgaaatcaatcccccaaggataccgaagaacgactgtatatatagggttcagtactatccttgatttc

SEQ ID NO: 26678 - DNA, 120 bp, synthetic construct
  source 1..120: mol_type = other DNA
aatatgggcagtcatcttaaatatatcattgattccataagaaatcatctccaaatgcaaagagttttcagtacttatgtcagtatttagaggaggtattataactcttggaaagctgga

SEQ ID NO: 26679 - DNA, 120 bp, synthetic construct
  source 1..120: mol_type = other DNA
gcacacctgtacagcatattgtgtactgaataatgtaggcagttgtaatgtaacacctagtgtttgtttaactaaacacagaaaaggtacaactaaaatgtattattttatgggaccact

SEQ ID NO: 26680 - DNA, 120 bp, synthetic construct
  source 1..120: mol_type = other DNA
ctggcaaagcaaaattcatagtccctggcagaaattaccagggatgcaaaggaaaatatgacccataaaatggagaaaaatcacagaatggaaacatacccagaaataacccagttggta

SEQ ID NO: 26681 - DNA, 120 bp, synthetic construct
  source 1..120: mol_type = other DNA
cttaatctgtattgctgctaaaattaatgtaaatgttaagttattcctatgtttctggatttaatctgtgcaaagaaaaatagattactttttaaattgagtgcccagtactccacttcc

SEQ ID NO: 26682 - DNA, 120 bp, synthetic construct
  source 1..120: mol_type = other DNA
aaaaaaaaagaacatccaggatttaggaatcacattaaacacttactggctagccaaaaacaattatgtatccatcttgcttttcacacttaagtcatttagaagtcattcaatatcacc

SEQ ID NO: 26683 - DNA, 120 bp, synthetic construct
  source 1..120: mol_type = other DNA
accattaaccctaaacatttccagagaggaaaaactaggtcacacacaaaggatctggaattaaaattgtttggcttctcattagcaacaccggatgcagagagggagcagtcaccttca

SEQ ID NO: 26684 - DNA, 120 bp, synthetic construct
  source 1..120: mol_type = other DNA
gcacctcagcactccagcctttgagacaaagcaagaccctgactcgaaaacaaagaaaaataaagcatgctcacagttaaccttaatgaaaataaaaactaaattttgggctgtcagatg

SEQ ID NO: 26685 - DNA, 120 bp, synthetic construct
  source 1..120: mol_type = other DNA
actgcatttagtctgaaagtatttaaaatattttcttcatattatactttaagctgtgtgataacacattgaaattgtttaaggtggccacagataataggtgattcttccattatgcca

SEQ ID NO: 26686 - DNA, 120 bp, synthetic construct
  source 1..120: mol_type = other DNA
tcattccctaagaataattaaatcgatgttaaatttttatgcttctctttttaattgaatcaatcaggtggtcttgctaagcattcaaaagtagcgctggtttgaagctcatatgtcttt

SEQ ID NO: 26687 - DNA, 120 bp, synthetic construct
  source 1..120: mol_type = other DNA
gttaacagagctctaaagtttgacagaaagtgagattcaaatcctttcactctcatatgctaaaccttttgccttactctgggtcatcagagaaatttaggtgagaatgtatgatgaagt

SEQ ID NO: 26688 - DNA, 120 bp, synthetic construct
  source 1..120: mol_type = other DNA
ttagtgggtggcagagtttaggagaaaaggtaagaagtttcagtccttgggccctgtagtaaggagaaaaagggtacaggaggttgtcacacttctgagaagtagtcttagagtgcccta

SEQ ID NO: 26689 - DNA, 120 bp, synthetic construct
  source 1..120: mol_type = other DNA
ccttgccctgggtcaacaatattctcagtcatctctactatttaactgtaaatctcaaactatgtgctgtttagaattatatgtgcctatcccattctgccggacgtacgtgttcttttc

SEQ ID NO: 26690 - DNA, 120 bp, synthetic construct
  source 1..120: mol_type = other DNA
cattgctagaaactaattcttcttggcatggactttgtatactaacttagtccctggtttcaaagaatttttatttttctttcattttgatgtcctcatctaattaattttattgtattt

SEQ ID NO: 26691 - DNA, 120 bp, synthetic construct
  source 1..120: mol_type = other DNA
tttggagcctgaaaaccttgatttcagtttagcctccactacttactggatttgtgaccttaagcaagttatttcatttttctcaaactgggtttcctcttagatgaaaataacaatatc

SEQ ID NO: 26692 - DNA, 120 bp, synthetic construct
  source 1..120: mol_type = other DNA
aggcagattaagttcccatttcttagctattcttaatataaagcagttttaaaaaccctggttataggatcctatgagacaagccttaaaggtatctgattgatttagatataaatgaca

SEQ ID NO: 26693 - DNA, 120 bp, synthetic construct
  source 1..120: mol_type = other DNA
cattcataacatcatttatctgaccctttcccgcaatttatctggcctatctgccaccatttaattaaaaaaattacagtgattatatcatgactgctttcaaatctcactgtacaactc

SEQ ID NO: 26694 - DNA, 120 bp, synthetic construct
  source 1..120: mol_type = other DNA
ccgcttcagtcggcagagagagagctcgcgggtggttccggtccggcttttcaggccggacgggtgcctgcccctcaggtgcgagtttgtgcggtaaagaacacaccccggagatgtgga

SEQ ID NO: 26695 - DNA, 120 bp, synthetic construct
  source 1..120: mol_type = other DNA
attagcaagggaaagaggaaagaggatagcttgactgcctctcagagaaagcagaggtacgtggtactaatttaattctaaagtcactgacgttgtgattgaagcaacattttgggctgg

SEQ ID NO: 26696 - DNA, 120 bp, synthetic construct
  source 1..120: mol_type = other DNA
aaacaactttattcagcaaaataacatcttctatatgcaaaacactgtgaggtgctagagttacaacattttcaaagtagacagcctacccaaactactctgaatgacaagggactcaat

SEQ ID NO: 26697 - DNA, 120 bp, synthetic construct
  source 1..120: mol_type = other DNA
gatatctctatgctcaaacatttatctttcatccagttctgatttaattggtcagaggtcgagcattaaaaagcaccctaggtaaattttactgtacttaggttatgccttttttttttt

SEQ ID NO: 26698 - DNA, 120 bp, synthetic construct
  source 1..120: mol_type = other DNA
ctctctctctctctctctctctctcaaaaacacttggtctgttatttttacgaaattgtcagtcatagttatctgttagaccaaagctgagtaagaacatttattacattgcctcctaca

SEQ ID NO: 26699 - DNA, 120 bp, synthetic construct
  source 1..120: mol_type = other DNA
atttccagcaccctcttagataatgcctcccatctgattatcaccatagattagttttgcctgtttttgaattttttgtaaatgggatcacacggtatgtgctgtagtgagcctagcttg

SEQ ID NO: 26700 - DNA, 120 bp, synthetic construct
  source 1..120: mol_type = other DNA
tggtggctccaggtattacttggcttatggcagcataactcctatctctgcctttgtctttgtggtcttcttttctgtcttcttcccttctttttatgaggacttttgctgttggattta

SEQ ID NO: 26701 - DNA, 120 bp, synthetic construct
  source 1..120: mol_type = other DNA
tgagaaagaacagtattacatactgttttggaagaaagctcattcacactagagcttgtgggagctagcaagctctgattggtgagcgatggtggtaggtaaaaccagtcttagagtcat

SEQ ID NO: 26702 - DNA, 120 bp, synthetic construct
  source 1..120: mol_type = other DNA
ggaaatataacacagtgaaatgaaaggattgagagaaatgaaaaatatacacgccacaaatgtgggagggcgataaccactcgtagaaagcgtgagaagttactacaagcggtcctcccg

SEQ ID NO: 26703 - DNA, 120 bp, synthetic construct
  source 1..120: mol_type = other DNA
aaagagaagatgggaagtagatagttctttagaagagtgggcaagggttggactagggaagtttagtggaaatattgctaggcaacataaagagcctacttgagattcgtggtcatgagt

SEQ ID NO: 26704 - DNA, 120 bp, synthetic construct
  source 1..120: mol_type = other DNA
tttgggtaggaacacagagctgcaccacatcagaggatgtacaagattgtggtggagaggagtttagagacctgcaaatatagggtaattgaagggatcatctacatggatatttaaatc

SEQ ID NO: 26705 - DNA, 120 bp, synthetic construct
  source 1..120: mol_type = other DNA
tggctgcgaaaggaaaaggcatcctcagggagctagattttacttagagcaagaaatgaagggatgattcagaggttaaaagagtggattttatgaattactcaagggagcacagtggaa

SEQ ID NO: 26706 - DNA, 120 bp, synthetic construct
  source 1..120: mol_type = other DNA
ctttgatggttttgagagaggaggtaaaaaaagactaggtaagccgatagttagacagagtcctcggtagaacttcccttctaacaaaaagcagcccaagaaatcacttctcttctaaca

SEQ ID NO: 26707 - DNA, 120 bp, synthetic construct
  source 1..120: mol_type = other DNA
agtgtatattgatgtcagtactacacttttaattactattgcttcagggtatgtcttgtaaaccaaaaataaaattataggccccccccgcccctgcacaaccaactgaatggacccatc

SEQ ID NO: 26708 - DNA, 120 bp, synthetic construct
  source 1..120: mol_type = other DNA
attaaattgtaggggcattcacttgatggcattcattcttagaacatttacctatgtctagcttttggagtaaagtcacataacctctaaccaggtaagtttcctgtggctttatttagg

SEQ ID NO: 26709 - DNA, 120 bp, synthetic construct
  source 1..120: mol_type = other DNA
aagtgttcctattgggtaggaatatacagttcttttaggaaatgtagtatggttctgtgtctcaaacaggacacttacacagttggccaacatcatcaccttctccattctctgagatgt

SEQ ID NO: 26710 - DNA, 120 bp, synthetic construct
  source 1..120: mol_type = other DNA
gaaagtataaagaattagatgggaatgataaatgctaaaatcaggacatgtgttccatttgtgaatggaaggcagggagaaggtgccgtttggaaggagtacccaagagccgtaagctga

SEQ ID NO: 26711 - DNA, 120 bp, synthetic construct
  source 1..120: mol_type = other DNA
aaagaatgaaaatgaaagccaagtttcaacagatgaaagtgagaactccaggtctcctggaaataaatcagataacatcaagcccaaatctgctccatggaactcttttctccctccacc

SEQ ID NO: 26712 - DNA, 120 bp, synthetic construct
  source 1..120: mol_type = other DNA
cagaaatcaactctaaaaagatttttattataggttagattatgtcatggaaccttaaggcttgtccctttctagttcttttgtgtaaagcggtgatttcttccatggagggaatggtat

SEQ ID NO: 26713 - DNA, 120 bp, synthetic construct
  source 1..120: mol_type = other DNA
attcctatcatattgaaattggtaagttaattttcctttgaaatattccttatagccaggtctaaaattcaatggcccaccaccgccaccgccaccaccaccaccccacttactatcatg

SEQ ID NO: 26714 - DNA, 120 bp, synthetic construct
  source 1..120: mol_type = other DNA
ggatggggttagaacaggtgttctacccaagacatttacttaaaatcgccctcgaaatgctatgtgagctgtgtgtgtgtgtgtgtgtgtgtgtgtattaaggaaaagcatgaaagtatt

SEQ ID NO: 26715 - DNA, 120 bp, synthetic construct
  source 1..120: mol_type = other DNA
tggttttggttttcagttatgcaaccatcactacaatttaagaacattttcatcaccccaaaaagaaaccctgttaccttcattttccccagccctaggcagtcagtacactttctgtct

SEQ ID NO: 26716 - DNA, 120 bp, synthetic construct
  source 1..120: mol_type = other DNA
ctttcaatacatcttacggtctgttaggtgtagattagtaatgaagtgggaagccactgcaagctagtatacatgtagggaaagatagaaagcattgaagccagaagagagacagaggac

SEQ ID NO: 26717 - DNA, 120 bp, synthetic construct
  source 1..120: mol_type = other DNA
gggtgggaggccagcacggtggtgaggcagttgagaaaatttgaatgtggattagattttgaatgatattggataattattggtaattttatgagctgtgagaagggtgttgtagtttat

SEQ ID NO: 26718 - DNA, 120 bp, synthetic construct
  source 1..120: mol_type = other DNA
agcgtgagcttagagcatagactggtgggattgtcaaagaagagggcaactggaagagaactgtcagttatttttggatcagtctttaattcatcatgacgggttaggcattagttgtat

SEQ ID NO: 26719 - DNA, 120 bp, synthetic construct
  source 1..120: mol_type = other DNA
cactacactccagcctgggtgactcagtgactgtctcaaaaagaaaaaaagtaattaagttctgtcatgatatatcatcattaccctttttgaacttttaaaattttttatctttagagg

SEQ ID NO: 26720 - DNA, 120 bp, synthetic construct
  source 1..120: mol_type = other DNA
gccaccgtgccaggccctgaaatgttatcttagttattaatttgcaattccttggctctagaggttgggcatcttctcagatctctagtggacatttggattttctttttggtgaactgt

SEQ ID NO: 26721 - DNA, 120 bp, synthetic construct
  source 1..120: mol_type = other DNA
tttgaatgatttgtctatcatatgaaataacttttataaatatagtaactcaggcctgggcacagcggctcaagtgggaggactgcttaagcaaccgagtttgagaccagcgtggacaac

SEQ ID NO: 26722 - DNA, 120 bp, synthetic construct
  source 1..120: mol_type = other DNA
gaggctgcaatgagccgagatggtgccactgcactctgacgacagagcgagactccgtctcaaaacaaacaacaaataaggttgggggatcaaatatcttctagtgtttaaggatctgcc

SEQ ID NO: 26723 - DNA, 120 bp, synthetic construct
  source 1..120: mol_type = other DNA
gcgacttggcagtagcttattttgttcactcctctctggctggtgtgggggaggtgggggcattaggccagggtgaagcaggggaaccacttaggagtctgttaagatgatctgaacttc

SEQ ID NO: 26724 - DNA, 120 bp, synthetic construct
  source 1..120: mol_type = other DNA
attaatgcagttgtgattttaccacgtggatatgaagaagtgagggggagaagtacaaaggagttctcttaatgattgaccatggaatttaagctggctaagaaaggaagtgagaggccg

SEQ ID NO: 26725 - DNA, 120 bp, synthetic construct
  source 1..120: mol_type = other DNA
gtggaatgattgtccccatcaaatcactagtaggagtaagttgcagagcctagaaggtgatggttaagagagtgggattcttgaaactgcatttatggagaggttgtggttattggttat

SEQ ID NO: 26726 - DNA, 120 bp, synthetic construct
  source 1..120: mol_type = other DNA
ctagggattggcaggctatctctttttttcatgtagtctcatgaagatttctttatgtggtttcaatgtgtgggctggtttggatttccttatagcatggtggcctcagttggattgctg

SEQ ID NO: 26727 - DNA, 120 bp, synthetic construct
  source 1..120: mol_type = other DNA
caacacctggtcctaactggttttttgctccctatgtgtagataagctacccccttcccattagctcatttataaaaatgcttgcatttcactgtggaatgggaactcttttcaggacct

SEQ ID NO: 26728 - DNA, 120 bp, synthetic construct
  source 1..120: mol_type = other DNA
taacttagtctttttgcttagaggctctctgaggatgggagggggttcttcctcccatccctaggaatttttcttttttttaaattcctaatcactagaccaccaggaagattgtttgtt

SEQ ID NO: 26729 - DNA, 120 bp, synthetic construct
  source 1..120: mol_type = other DNA
gttcagtaatattaagtatgttcatgttgttgcgcaatagatcttcggaagtttttcgtcttgcaacctgaaactctacccattagcaaattcccatttctccttacacttagcccttgg

SEQ ID NO: 26730 - DNA, 120 bp, synthetic construct
  source 1..120: mol_type = other DNA
gagaaagagaagtgaaggaaggaagaaaggaaggagggagggagagaagaaagaaacgaaagaaaggaaaagaaaaggaaggaaagaaaattggtaccaggaaagcaggaaagggaaatg

SEQ ID NO: 26731 - DNA, 120 bp, synthetic construct
  source 1..120: mol_type = other DNA
aggtgctttctgaggtgacggagccttgagactagcttatagtagtaactgggttatgtcgtgacttttattctgtgcaccaccctgtaacatgtacatttttattcctattttcgtagc

SEQ ID NO: 26732 - DNA, 120 bp, synthetic construct
  source 1..120: mol_type = other DNA
tttagaccccaagcctttctcattacatcattttgccttccaaatctctaccctctatccttcacctccccactgatcaaaacgagatgatagtttgccctcttcaaaagaaatgtgtgc

SEQ ID NO: 26733 - DNA, 120 bp, synthetic construct
  source 1..120: mol_type = other DNA
atcatgcttcattggtctcagggggctgatttttataaggagagatttgctagttttcacaatatgtcctctaagttggcatgtatagctaaacaggctttcataaaaatatacaattta

SEQ ID NO: 26734 - DNA, 120 bp, synthetic construct
  source 1..120: mol_type = other DNA
ctccagataattcccccaccacctcccatatgtccagattctcttgatgatgctgatgctttgggaagtatgttaatttcatggtacatgagtggctatcatactggctattatatggta

SEQ ID NO: 26735 - DNA, 120 bp, synthetic construct
  source 1..120: mol_type = other DNA
aagtattggtataatttatgttctaaataactttcttgagaaataattcacatggtgtgcagtttacctttgaaagtatacaagttggctgggcacaatggctcacgcctgtaatcccag

SEQ ID NO: 26736 - DNA, 120 bp, synthetic construct
  source 1..120: mol_type = other DNA
aagagcaaaactccatctcaaaaaaaaaaaaataaggtataagcgggctcaggaacatcattggacatactgaaagaagaaaaatcagctgggcgcagtggctcacgccggtaatcccaa

SEQ ID NO: 26737 - DNA, 120 bp, synthetic construct
  source 1..120: mol_type = other DNA
caaaatcaaaaagaaggaaggtgctcacattccttaaattaaggagtaagtctgccagcattatgaaagtgaatcttacttttgtaaaactttatggtttgtggaaaacaaatgtttttg

SEQ ID NO: 26738 - DNA, 120 bp, synthetic construct
  source 1..120: mol_type = other DNA
atacttaagcatttaggaatgaagtgttagagtgtcttaaaatgtttcaaatggtttaacaaaatgtatgtgaggcgtatgtggcaaaatgttacagaatctaactggtggacatggctg

SEQ ID NO: 26739 - DNA, 120 bp, synthetic construct
  source 1..120: mol_type = other DNA
tgtccttgtggttgtaaggaatctagatgaaaattacatggtctgttctacagccacagctgtacctacattcagaagacagacaaaagttgctgtgtttgaagagatccttcattaagg

SEQ ID NO: 26740 - DNA, 120 bp, synthetic construct
  source 1..120: mol_type = other DNA
ttggagggcataagccatagccttcacagcttccattaggtggtaagcctgcaggcacacagaatgcaaaaatggtgaattcttggtagcctctgcctggatttcagaggatgtatggaa

SEQ ID NO: 26741 - DNA, 120 bp, synthetic construct
  source 1..120: mol_type = other DNA
ctcaactggtataaaagggtatgcaggagaaaaaaagcaaacttccctctctcccttttctgtccaccagccatcctgttctcctccctaaactcaattatggttgcctgttttttatat

SEQ ID NO: 26742 - DNA, 120 bp, synthetic construct
  source 1..120: mol_type = other DNA
catctgcccaggcttctctttattccttactacccaatccccattccaatcctctgttaataactcttacggacagtccccaactcatgatgacttgacttaggatttttctactttgca

SEQ ID NO: 26743 - DNA, 120 bp, synthetic construct
  source 1..120: mol_type = other DNA
tgcaggcacgaaagtaaaacaaaaaacagtacagaatgggagagactgaaaagtaagaatggcttccaggcccacttcctagaggtacgcactattaacatttttagatataaacttcca

SEQ ID NO: 26744 - DNA, 120 bp, synthetic construct
  source 1..120: mol_type = other DNA
tgattcaaccgttaagttagccatttattatataaattgaatacttcttccatattgtggcttttagatagattggcagacctgtccccaaccccttccctgttgaccatggacaatgga

SEQ ID NO: 26745 - DNA, 120 bp, synthetic construct
  source 1..120: mol_type = other DNA
ggtagacaaggttatttgaaccagcctcctctcccaccactactgctagtaggaagtactcaatataattttgttttttgaaatggggtcttgctatgttaacacaggctggtctctttt

SEQ ID NO: 26746 - DNA, 120 bp, synthetic construct
  source 1..120: mol_type = other DNA
cttctttcccctgtttcagcataactcccacttcatattgtgtgattagccggttctgtgatgtgtctgaatgctgtctcctacaggtaaagtttaagcattactgactataggcaaaca

SEQ ID NO: 26747 - DNA, 120 bp, synthetic construct
  source 1..120: mol_type = other DNA
agttcttcaaatatatctggttctctttaactccaggctatgacacaagtgattacctctgtttgaaatgatgtctcaattcctcctctaccaactatgcctgggccattctcccttcag

SEQ ID NO: 26748 - DNA, 120 bp, synthetic construct
  source 1..120: mol_type = other DNA
gaccaaaaagctattctctttgtactttttgttcctatgcaacagtaatctgaaaatcatgtatggtctaaacatcatgcacagtccaggaagcaagagaagggccagcacatgcttccg

SEQ ID NO: 26749 - DNA, 120 bp, synthetic construct
  source 1..120: mol_type = other DNA
tgggtagaagttgagcatgactatcacttcgttctggtaagcaagggtagctaatgcatatcttgcttccttgtggctaattcagaataggagaaaaaggattctgggcagaaagagaat

SEQ ID NO: 26750 - DNA, 120 bp, synthetic construct
  source 1..120: mol_type = other DNA
ccaaatgggacggcttgaaaaaatgaatccgaaaacttaatttctgtgagtttcttacaggaaacaagcatagtcatgagagacccaaaatccgaaaagaagttacacttcagatggaaa

SEQ ID NO: 26751 - DNA, 120 bp, synthetic construct
  source 1..120: mol_type = other DNA
agtgtgtagtaaaggctcaataattacaaacagcactctgctttcttaatgagaaagagtgctattcctcacaatttaccatggatacaggctacacccttagaaccacaggcactttaa

SEQ ID NO: 26752 - DNA, 120 bp, synthetic construct
  source 1..120: mol_type = other DNA
tagcatctcttcaacaaacggttggggacaactggatttgcacatgcgaaagaatgaagttggattcctatccctcaccatgtaaaaaaaatcaactcaaaatggatcaacgacctaaat

SEQ ID NO: 26753 - DNA, 120 bp, synthetic construct
  source 1..120: mol_type = other DNA
gagcatgcatgctttcatggcctcagaagttttcaaccacttaaagtaagaaaaagaaattatacatcagaatagtcatccaaaatatatacaggtataccttgtgactggattgtccct

SEQ ID NO: 26754 - DNA, 120 bp, synthetic construct
  source 1..120: mol_type = other DNA
ggctggtgctttaagtagtcatcattttcagatatattctccaatgactctttgttatccactaaatggagcaaatgagacacaattttgggccctgcttttgttgaagggaggctggag

SEQ ID NO: 26755 - DNA, 120 bp, synthetic construct
  source 1..120: mol_type = other DNA
gaacctgtttaacaggggacagcatccagatgcccacagaaaagctattttcttcaggaggaccgtctttccacttccagcttcaccctccacacacatgacagagttcaagttgccaaa

SEQ ID NO: 26756 - DNA, 120 bp, synthetic construct
  source 1..120: mol_type = other DNA
gtttggtcctgcctgcactctggagaagccacaagaatcttgacttttgctcatacacgacactgttgcaatgctgctcctctttggaagctctttggacaattataaatactctttttt

SEQ ID NO: 26757 - DNA, 120 bp, synthetic construct
  source 1..120: mol_type = other DNA
attacctgggtttatgattttgttgggcacttgcttttgttaaagtaacatcttctcaacccctaaaaaggccaagtagcaaatccagccttattgccctccacatgaagatccagagag

SEQ ID NO: 26758 - DNA, 120 bp, synthetic construct
  source 1..120: mol_type = other DNA
ctctggattttagtaaatagtaatgtacagtatatgaattggtacactgatgattttgacaaatatgctagtgtaagatgttagcattagggtaaattgggtatggcaatatataggaac

SEQ ID NO: 26759 - DNA, 120 bp, synthetic construct
  source 1..120: mol_type = other DNA
gataaagagggatatttctgttttttagagacaaagttttactctgtcacccaggccacagtacagtggcacaatcatagctcattgcaacctatactcctgagctcaagcgattctcct

SEQ ID NO: 26760 - DNA, 120 bp, synthetic construct
  source 1..120: mol_type = other DNA
tttgttatgtatcctagagaaacacacatgagcactggaaaatatgtacaagaatgttcatagggcattatttgaatttgcaacactctgaaaacgacccacgaggttaatcaacagtaa

SEQ ID NO: 26761 - DNA, 120 bp, synthetic construct
  source 1..120: mol_type = other DNA
ttgacaagcagaaaggcatggaacttctcgacagcacattaggaaccagtagaaatgtagcagtgcctctacaatttagaattaaaatgacttccaacctataattctacacctagctaa

SEQ ID NO: 26762 - DNA, 120 bp, synthetic construct
  source 1..120: mol_type = other DNA
ctagcaatatcgttgttaggtatatgccccagagacttgaatacagttacatgctccatcagatacctgtacccaaatgttcctatcggtattactcatggtagccaaaaggtagaaaca

SEQ ID NO: 26763 - DNA, 120 bp, synthetic construct
  source 1..120: mol_type = other DNA
atgtgaatatatgaatctagccaaaactatgccataactataaagaggggaaggctagtacaggaagggggtcatggagcaaagggatgaaagacatgaagactcatccttcatagcctg

SEQ ID NO: 26764 - DNA, 120 bp, synthetic construct
  source 1..120: mol_type = other DNA
cttcccccactgtcaggccatgttctctatagagttctggtctcctgagtcatgttaatcaataaattctcatttttgtttaagccagtttggattcgatttcccatcactctccactag

SEQ ID NO: 26765 - DNA, 120 bp, synthetic construct
  source 1..120: mol_type = other DNA
taagcagtggtgactaaatctagtcgctagggttatatgaaagctactggcagtaaagagaactatatttaaaataataggccagacgcagtggctcacatccaggagttcaagactagc

SEQ ID NO: 26766 - DNA, 120 bp, synthetic construct
  source 1..120: mol_type = other DNA
gtacgcacatatttctatggcaaggtttatcactgcacattcttttggactgcagcaattcagataagataacatgagatgagatgctgtcaaaagaacacctgcccaggaacagcatct

SEQ ID NO: 26767 - DNA, 120 bp, synthetic construct
  source 1..120: mol_type = other DNA
tctagtaggtgctagtcacatgataatgtgatcatgtgtgagtggtgccactggtacttgtccagtgtataacccagcgacactaaacacagtgaccctgaggctaagtgaagcctgagc

SEQ ID NO: 26768 - DNA, 120 bp, synthetic construct
  source 1..120: mol_type = other DNA
aaactgctagatccaagtgtcaggttcctggaaatgcagaaggtagaggaacatgttagactatgccagaggaacacattctgccaaatctagagtagagggaattttacaggacagatt

SEQ ID NO: 26769 - DNA, 120 bp, synthetic construct
  source 1..120: mol_type = other DNA
gcaacagggcgagactctgtctcaaataaaataaaataaaaatatagttattgttattatttccaggaaaaaaggtgggtaggagatggatgaaatatgatttggctatgtgttgacaag

SEQ ID NO: 26770 - DNA, 120 bp, synthetic construct
  source 1..120: mol_type = other DNA
tctaagactacttctcagaagtgtgacaacctcctgtaccctttttctccttactacagggcccaaggactgaaacttcttaccttttctcctaaactctgccacccactaatggcctca

SEQ ID NO: 26771 - DNA, 120 bp, synthetic construct
  source 1..120: mol_type = other DNA
taatcaaaaagaaggcaagaaggaaaagatcgtatcaaatatgtagttaaaaaaatttaaaaaaacgaaagatggaattgttggaaccaataacacaaagataatagacttaaacccaaa

SEQ ID NO: 26772 - DNA, 120 bp, synthetic construct
  source 1..120: mol_type = other DNA
aaacacagacttcatcatacattctcacctaaatttctctgatgacccagagtaaggcaaaaggtttagcatatgagagtgaaaggatttgaatctcactttctgtcaaactttagagct

SEQ ID NO: 26773 - DNA, 120 bp, synthetic construct
  source 1..120: mol_type = other DNA
gcttcaaaccagcgctacttttgaatgcttagcaagaccacctgattgattcaattaaaaagagaagcataaaaatttaacatcgatttaattattcttagggaatgacctcacaattgc

SEQ ID NO: 26774 - DNA, 120 bp, synthetic construct
  source 1..120: mol_type = other DNA
ttatctgtggccaccttaaacaatttcaatgtgttatcacacagcttaaagtataatatgaagaaaatattttaaatactttcagactaaatgcagtttagcttgaaagctaaagacaaa

SEQ ID NO: 26775 - DNA, 120 bp, synthetic construct
  source 1..120: mol_type = other DNA
ctgacagcccaaaatttagtttttattttcattaaggttaactgtgagcatgctttatttttctttgttttcgagtcagggtcttgctttgtctcaaaggctggagtgctgaggtgctat

SEQ ID NO: 26776 - DNA, 120 bp, synthetic construct
  source 1..120: mol_type = other DNA
taccatcatcctaggccgttcttcagcctgttttgaattagatacatattactagatcccatgtcattctccttctcagttcctttgaatcacctacctcttccagaccttccccagaaa

SEQ ID NO: 26777 - DNA, 120 bp, synthetic construct
  source 1..120: mol_type = other DNA
aaaagaaaatcttaaatatccaacaggaagcaattgattatataaaccataattatacctgaaatatgcaacaatttcaaaaacaacattgatctagatatggtgatattgaatgacttc

SEQ ID NO: 26778 - DNA, 120 bp, synthetic construct
  source 1..120: mol_type = other DNA
agcagaatatgttcagtttcttttaggatggcagttattaattttacctgtggctataacagaagattgtaggatggagtcttagttctgtcactaagtgtgtaaccaacctgtctcggt

SEQ ID NO: 26779 - DNA, 120 bp, synthetic construct
  source 1..120: mol_type = other DNA
ctaccgcacccaaccctttgtctattaattctaccaactgggttatttctgggtatgtttccattctgtgatttttctccattttatgggtcatattttcctttgcatccctggtaattt

SEQ ID NO: 26780 - DNA, 120 bp, synthetic construct
  source 1..120: mol_type = other DNA
tcagcaaggcttgctgtccaacgtctgaaaaccactgttttatatattttgtctgctttttttgacaggagggtaaatctagtccctgttacagctttttggctggaggcagaaatcttg

SEQ ID NO: 26781 - DNA, 120 bp, synthetic construct
  source 1..120: mol_type = other DNA
attctaggactaagaacctaaaaatgttcttctcaaaaagccaatgaagttgtacaaaatatcactttactgcctttcagataagcttattatagcatgatgaaactgactaattccaag

SEQ ID NO: 26782 - DNA, 120 bp, synthetic construct
  source 1..120: mol_type = other DNA
atttccagctttccaagagttataatacctcctctaaatactgacataagtactgaaaactctttgcatttggagatgatttcttatggaatcaatgatatatttaagatgactgcccat

SEQ ID NO: 26783 - DNA, 120 bp, synthetic construct
  source 1..120: mol_type = other DNA
tttaaagtgcagagatgtggcttcaaaacagtaacacacacttctttctcaaagactatagtagtcccctcttatctgcagaggatacattccaagacccccagtggatacctgaaatca

SEQ ID NO: 26784 - DNA, 120 bp, synthetic construct
  source 1..120: mol_type = other DNA
gccttgatattgatggctgctgactgatcagagtggtgctttctgaagggtgaggtggctatggcaatttcttaaaataagacaaagtagtttgttacatgggtcaactcttcctttcat

SEQ ID NO: 26785 - DNA, 120 bp, synthetic construct
  source 1..120: mol_type = other DNA
aacaaacattggtgccaacatcaagtcaccagctgtattagcccctaacaagagaagaagcctatcccatgaagctctgaaaccaggcattcacttcttctagctatgaaaatcctagat

SEQ ID NO: 26786 - DNA, 120 bp, synthetic construct
  source 1..120: mol_type = other DNA
gcaccaacagacttgctcaacagagttgccataaactgtcagtttgtaaaaaaaaaagttatctgaaaagtgcaataaaagtgcaacaaaatgaggtgtgccttacatacacacctatga

SEQ ID NO: 26787 - DNA, 120 bp, synthetic construct
  source 1..120: mol_type = other DNA
tctcaaaatttacatatctatgatgttaaagaacagaatcctttcaatgtatatttctgttggaattttatctgcaatattttgtaaacactctcacttcatactgaaaaacagaataca

SEQ ID NO: 26788 - DNA, 120 bp, synthetic construct
  source 1..120: mol_type = other DNA
atatttactgcaagtattttagattcataaattttagagatgaaaagtacctcgctaagcagtccaaatccctcacttcataagtgagaaaattaatctaaacaagtgaaatgacttgcc

SEQ ID NO: 26789 - DNA, 120 bp, synthetic construct
  source 1..120: mol_type = other DNA
cagaaaatctatcagagaatgaagccagacaaagccaggaccccaacatatgcagcaactatatatggaattggcccacctttgaacatagcccaaaattttccttctgcacttaagcta

SEQ ID NO: 26790 - DNA, 120 bp, synthetic construct
  source 1..120: mol_type = other DNA
gaaatggtgggtgatgagataggtttgagctaggttttaaaagatggaaccatttggatgtgtcagaagaaatttcaatgaggaaaagatccaatgaagagagatgggagaacgagcaga

SEQ ID NO: 26791 - DNA, 120 bp, synthetic construct
  source 1..120: mol_type = other DNA
actctgttaaaattatacaaacattttaatgtaattccatatactatccccccccacaaaaaaaatacaactttccaattgacctcctttgtttttctttttttctaattctgagtaaga

SEQ ID NO: 26792 - DNA, 120 bp, synthetic construct
  source 1..120: mol_type = other DNA
atgcagtctgtctttgaccaaaacatcattatgtggcacatgattgtatatgatcacatttttgtgaaatgtccagaaaaggttaaaatttggagacaaaaagtagactaatgattgccc

SEQ ID NO: 26793 - DNA, 120 bp, synthetic construct
  source 1..120: mol_type = other DNA
ctccagggttcaagcgattctactgtctcttctgtctcccgaatagctgagattaaggcacacgccaccacagctaacctttttatttttagtagagacggggtttcaccagcctgttgg

SEQ ID NO: 26794 - DNA, 120 bp, synthetic construct
  source 1..120: mol_type = other DNA
agggtgattactgtccttgtttttcaggtatgggattcaggctcagaggttggtcactttctcaagcgggtcacaaactcgaaccctgaaccatcatttctaaaagtcgcgcttttactt

SEQ ID NO: 26795 - DNA, 120 bp, synthetic construct
  source 1..120: mol_type = other DNA
tcaaaaatccttgctctcgtggagttttccttctccaaggggagtcagtatgaagaaaaacatatactatatgaaatggtgataatgctgtggagaaaaactaagcactgaaggggaaaa

SEQ ID NO: 26796 - DNA, 120 bp, synthetic construct
  source 1..120: mol_type = other DNA
caattaacacaagtggaattactggcatttcccatacttgagaaatggagaggcagtgcacccccagatgagaaaagggttaggaataacacaaaggaactgcagaagctagggcctctt

SEQ ID NO: 26797 - DNA, 120 bp, synthetic construct
  source 1..120: mol_type = other DNA
gccagtggaatcagatataaaaagcatgcaacttgaaagactgggagaagtgaacctgtctattccaatagacaggctcccttacagggaaactaaatcattccagaaagcctcatctaa

SEQ ID NO: 26798 - DNA, 120 bp, synthetic construct
  source 1..120: mol_type = other DNA
accaactgaagctaaggtccccggagccatgataaaagcacttttctgccctgattcttctttacacacatgtacccattcaggtctttacagatatttcacaggaagcatttatgttac

SEQ ID NO: 26799 - DNA, 120 bp, synthetic construct
  source 1..120: mol_type = other DNA
agaactacaggtcagaaatggaagggatgtcggaaatctaatctaaacctctgactttctagactaggaagctgcttgagtggcttttcaaatttacatccagctagttaatgccaacgc

SEQ ID NO: 26800 - DNA, 120 bp, synthetic construct
  source 1..120: mol_type = other DNA
tcgtagtgattattaggatttgaagagttcattctctaaataacctctaccaaatataatttggggccttgtataaccttttgtgattgctcagtccctatggcccaggcccagcaaggg

SEQ ID NO: 26801 - DNA, 120 bp, synthetic construct
  source 1..120: mol_type = other DNA
cgagaccactttggccgtacattctataatcaggcaattatgtcttctaaaaatattgcacaggtaatttttcatgaataaagtgtacagtggtgctttttactcttaagtatctttacg

SEQ ID NO: 26802 - DNA, 120 bp, synthetic construct
  source 1..120: mol_type = other DNA
agatacagagggccaactgtatatatattactttccggcaggatctcagaatgtgcccagtaaagtccattcacaacattgaccaggatgggagcatgaaatgaatctcttcaatttgag

SEQ ID NO: 26803 - DNA, 120 bp, synthetic construct
  source 1..120: mol_type = other DNA
gttaaaatattcctaaaatgactccacatttatattttatccctctgaattacatgtcaaaatcctatctttttcacagggtatcagtctctggaccatcaagatcatcaataatgcagc

SEQ ID NO: 26804 - DNA, 120 bp, synthetic construct
  source 1..120: mol_type = other DNA
agaaaagtctaaccaatagggttgagtggttgctaactttatttctgtcatccacatttagcatcagcagttatgagcaaattatgtgtgaggatgcaagatgtatccataagtttaata

SEQ ID NO: 26805 - DNA, 120 bp, synthetic construct
  source 1..120: mol_type = other DNA
gaattcttcctcacctatgttcacctatatttcagattttaccatttctctgggttattgtgatgatttcctggctatagtctgtgtttccatgctctcgtctacctgtttgcatccacc

SEQ ID NO: 26806 - DNA, 120 bp, synthetic construct
  source 1..120: mol_type = other DNA
ttccaattcattcttaaaggataaagcttttctgccacacaaaataatccaaacaacatgtcacaagctgtgaaataagttctaaaaatgttttcagtagtagcaaactcattggaaaat

SEQ ID NO: 26807 - DNA, 120 bp, synthetic construct
  source 1..120: mol_type = other DNA
aggacctgacccaagtgttcctttcacagtaatacattcctttacttctctgggagacattgccagattgctaccttaaacgttgatagattgaagagctactccacaagaagcaatctt

SEQ ID NO: 26808 - DNA, 120 bp, synthetic construct
  source 1..120: mol_type = other DNA
aatatgcatcttgaattttcaagtgaattcagatctataaatggaaaaattatgtacaacttagagctccccttgtatcctctctaagccactcctcccattttcacctgcccccatttt

SEQ ID NO: 26809 - DNA, 120 bp, synthetic construct
  source 1..120: mol_type = other DNA
ttatagagcaggacttaatctagggaattagtttttgtatacaagcagcaccagtaagaaggaaaaccaaatggaaggagagtagtgacaaaagagaggagtggattctgccccaggaac

SEQ ID NO: 26810 - DNA, 120 bp, synthetic construct
  source 1..120: mol_type = other DNA
gtaatccagtttctctacatcctcaccagcatctgatattgacactatttttaattttggctattttaagaggtataaagtaatatctcattatggttcaagttgcacttccctcatggc

SEQ ID NO: 26811 - DNA, 120 bp, synthetic construct
  source 1..120: mol_type = other DNA
aaagcacatctcaacagccacaaaatgtgcaaaacgtacaaccattcacacacgtccatacatgtgaagacagctgtaggcattgtttcagcatgcaggcatcgaacaataaatagctaa

SEQ ID NO: 26812 - DNA, 120 bp, synthetic construct
  source 1..120: mol_type = other DNA
ttacatgttcagtaggaactgtgcaaagatatttaaagtacttgccttaaatgcacacacgtgtgcacgtacacatccatgcagatggctggcctgacaaaaacagtggtgtctaaagaa

SEQ ID NO: 26813 - DNA, 120 bp, synthetic construct
  source 1..120: mol_type = other DNA
ctataataattcagtaaaaacctactcctcactaaagtcccaatagggatgttgaatgaggcatttccctcaaaccatgttcttctcccaacccatccaggcattgttggagccttcaag

SEQ ID NO: 26814 - DNA, 120 bp, synthetic construct
  source 1..120: mol_type = other DNA
tacatcctgtatctcctagacacttatggaagtgagtgaagacacatttatgacagtggcagtgtctatggacaagaagtagccaaagaactcaaactaggtataaaggatagcagctac

SEQ ID NO: 26815 - DNA, 120 bp, synthetic construct
  source 1..120: mol_type = other DNA
gtggaaatgacacatgaaaaatactgagtcttctaggccatgaacacaatatatcacttcatttatttaggtcttctttaattactctcagcaatgttttgaggtattcagtgtaaaggt

SEQ ID NO: 26816 - DNA, 120 bp, synthetic construct
  source 1..120: mol_type = other DNA
cacactgttgtctataatttctctgaaatgcaccaaaataaagatggattgatggatggacagagagatttcaagatggatagatatctgataaaataaatatgtagaatctagatagta

SEQ ID NO: 26817 - DNA, 120 bp, synthetic construct
  source 1..120: mol_type = other DNA
tggcatctgagctgctactcccataggtaattctatgaagcatgccccaagtcaatagcaacactgatttcatatttataaacatatagtaagccaggctcagtagagcatgcctgtagt

SEQ ID NO: 26818 - DNA, 120 bp, synthetic construct
  source 1..120: mol_type = other DNA
tgtaacatggagtctgtgaacccaaagggcaaggaaagttcaagttcaataatataaatgcttgtgttttttcctatcatccatttcattgtatctaagactaccacacagattttgttg

SEQ ID NO: 26819 - DNA, 120 bp, synthetic construct
  source 1..120: mol_type = other DNA
atgtgatctctgaaaccatccgcaagtctgagatacgccatggttttttgggttttgctagcaattctgggcagagatcctggttgtccttcaacattctacttttctgccatattatta

SEQ ID NO: 26820 - DNA, 120 bp, synthetic construct
  source 1..120: mol_type = other DNA
gtgagagaggaaaatcaaagtagtgtgagttgattcccactgaagttgcaaggttattgatgcaataaataaacacaaagttaagaattcatgggaggtgggaggagccaagatggccga

SEQ ID NO: 26821 - DNA, 120 bp, synthetic construct
  source 1..120: mol_type = other DNA
agttcatcagcacacttctcaatcaacaacctcagcccccactagctatccacacctatctgtccaacccagtgaaaaccctggggagaaaagcagtgtgaagcaagaagccaacagcaa

SEQ ID NO: 26822 - DNA, 120 bp, synthetic construct
  source 1..120: mol_type = other DNA
aaacccacttactatttctgcaatactttgttttacttaaaggccagtagtatcaaaataaaaatcaacttttatagttttatcacttacacatcatagttgctataggagtggctataa

SEQ ID NO: 26823 - DNA, 120 bp, synthetic construct
  source 1..120: mol_type = other DNA
agatcaaaacttttgtgtgcttctctgttgccagaaacataaaataacatcttggtaattatctggctgacagcaaaacaggggtctgggaattcaaatggaacccccaagaggcaaagg

SEQ ID NO: 26824 - DNA, 120 bp, synthetic construct
  source 1..120: mol_type = other DNA
accagcacacatttcataaatcatcagagcaatgatataattgtatatcatgtagcatctcacaaacgtgactatatacttatgaaaaataagagtgaaaaagtcaaataacatttcttt

SEQ ID NO: 26825 - DNA, 120 bp, synthetic construct
  source 1..120: mol_type = other DNA
catatgttacaatatcacactgtaccccataaatatattaatatatacagttattatttgtcaatttatgaaaagatccaggagttaatgtactgaggcttgctgcagctcatggctgat

SEQ ID NO: 26826 - DNA, 120 bp, synthetic construct
  source 1..120: mol_type = other DNA
tatttcttcttcaacaacatctattactgagcttgcagaaccctgtaggtacccctccatccatctccctgcagaacatctaacactcaaccctggatgtctgcttatcaaatattctag

SEQ ID NO: 26827 - DNA, 120 bp, synthetic construct
  source 1..120: mol_type = other DNA
atggtatagaatatttggaaaatgtataagaattaaaaaaaaaaaaagaacaaatctgacctcaggtgatctacccgagtgctgggattataggcgtgagccaccacgcccagcccttgt

SEQ ID NO: 26828 - DNA, 120 bp, synthetic construct
  source 1..120: mol_type = other DNA
cacttcagtttagtagaaagatcatgaactttggaaccagttgttttgaatcccaattctgccatttacctgtttttatgatcttagaattaccaaagactaaattagctaacctctctg

SEQ ID NO: 26829 - DNA, 120 bp, synthetic construct
  source 1..120: mol_type = other DNA
ggacagagtgtataggagcaggcagtgggcaaatggaattttctctgtgcctacttggtaataagtaagaggtttggtttccaaactgtgtcttgaaattgtaattgtccaagaaatccc

SEQ ID NO: 26830 - DNA, 120 bp, synthetic construct
  source 1..120: mol_type = other DNA
tgatgttttgagtacttcagataccttaaagagcaggtgaaatgcccaggtacgttattacaaacttactacactggaacctattctgtaagacccatactacaagtttcactcattttg

SEQ ID NO: 26831 - DNA, 120 bp, synthetic construct
  source 1..120: mol_type = other DNA
aacttagctaacgtgtgagtagtgctgcaatgaagatgggagtgcagacatctctttgacaaactgatttcacatcttggagtaaacacccagaagttggattgctgaaatcacagaaga

SEQ ID NO: 26832 - DNA, 120 bp, synthetic construct
  source 1..120: mol_type = other DNA
acagaaaaccagtgccagccttatttgccaatatttgttaagtgttgatgatttttaagagctgtgacttttcaaatgattggaaattgatatgcttctagctggcaaaccatagcagtc

SEQ ID NO: 26833 - DNA, 120 bp, synthetic construct
  source 1..120: mol_type = other DNA
ggtgggaggtgcttgtccccaggaaagtgggaacggggtgggaggtgcttgccccccaggaaagtaggaacgggttgggaggtgcttgtcccccaggaaagtgggaacggggtgggaggt

SEQ ID NO: 26834 - DNA, 120 bp, synthetic construct
  source 1..120: mol_type = other DNA
aacaatgactattttctgagaattgacagtctctctgatcgtacagaagacaaggcccagaccttcaggaacttagagttcagagaatgaagtgagatgattattattgggcctcctctg

SEQ ID NO: 26835 - DNA, 120 bp, synthetic construct
  source 1..120: mol_type = other DNA
aaactgaaaacagtaggtgacaaagaaccccacactttaaaaaacaggctggacctgataggataccatcaggaaacagatatgtattcctcccatcccttctttcaaacctgttctgtc

SEQ ID NO: 26836 - DNA, 120 bp, synthetic construct
  source 1..120: mol_type = other DNA
ccccacaagagattggaatgtaagcttctctcgctatcttcttgccctctcccttcaagggcagctccaggcagctcccatctctgtggtacatgccccaactctcctaaaaacccttct

SEQ ID NO: 26837 - DNA, 120 bp, synthetic construct
  source 1..120: mol_type = other DNA
atacagaaaactggtttgggttcctgtaatgttgggggaaaagcaggggctcaccatggtccatccagcttttggtagtgttgtattaagaactttgtttgaaccctatcaatttccaat

SEQ ID NO: 26838 - DNA, 120 bp, synthetic construct
  source 1..120: mol_type = other DNA
tccttaagcactgggaccaaacctttgctcttttgtttccctgaaataccacctactccccatgagatttcgacatacctatgtccctactatttttcttaagttgcaaaataataataa

SEQ ID NO: 26839 - DNA, 120 bp, synthetic construct
  source 1..120: mol_type = other DNA
gcaatgatatatcagacaccatccctttggtcctgaaaagacgtgaagaactgtttggccttaagaaaatctttgtatactttgatatagtgcagcgtcttcagaacttaacattctaga

SEQ ID NO: 26840 - DNA, 120 bp, synthetic construct
  source 1..120: mol_type = other DNA
tattcaaatgtcacagaaagatacaaaatataaaatgaaagtcttattcttgtctgttcccaggttagtcctacatcacaaggaggccagagctaaccactgaacaatgctgcaatgaaa

SEQ ID NO: 26841 - DNA, 120 bp, synthetic construct
  source 1..120: mol_type = other DNA
gtgagagtgcaatttggtagtagttgttgaagggaaaaaaagaagagctggcaaattatattccactgtatgtagttcttttaacttgatttctaggaggtggagatgggaacaagacca

SEQ ID NO: 26842 - DNA, 120 bp, synthetic construct
  source 1..120: mol_type = other DNA
agggaatgagagcagttctaggcaagaatgccacagactcatgctgttcttaccagagttcagtagtttccatgaatagatgtttctcagtttgttatgttgtgtgcctttggacagaat

SEQ ID NO: 26843 - DNA, 120 bp, synthetic construct
  source 1..120: mol_type = other DNA
gaagagtgggagagaatggcaagcccagaaataaacccagccatagacagactactaattttgagaaaggtacaaagggaacgtaatgcagaaaggacagtctttttaagaaatgctgct

SEQ ID NO: 26844 - DNA, 120 bp, synthetic construct
  source 1..120: mol_type = other DNA
tttttttaaaataaagatgggtgtgtcaccatgttgcccaggctcatgtcaaactcctagcctcaagcagtcctcttgcctcaatgtctaaatagctgagattacaggtgtgaaccatta

SEQ ID NO: 26845 - DNA, 120 bp, synthetic construct
  source 1..120: mol_type = other DNA
attgtgtccagttttggactattacaaataaagctgccatgaaatttgtgaatagatttttgtgtgaacataattttcatttctctgggataaatgcccaagagtgtaattattggatta

SEQ ID NO: 26846 - DNA, 120 bp, synthetic construct
  source 1..120: mol_type = other DNA
catattgataaagaaagaaagtaatatcaaccaaagcagaagcctatgacacaagcaggagacaaggcctatttaaaccctgggtgaagtgaggaaacaaccctctgagacctgaagagt

SEQ ID NO: 26847 - DNA, 120 bp, synthetic construct
  source 1..120: mol_type = other DNA
ggcccgtggcaggtgtgccgctgatgagtgaacaagtgaatgaatgaatgaataataagcataggtagtagcaaatagcctgatgagagtaacaagaggaaacagaagccataaaaacaa

SEQ ID NO: 26848 - DNA, 120 bp, synthetic construct
  source 1..120: mol_type = other DNA
tacttaccccatctgctaattagtctcctccattgcctccaacctgtacccagtccctacacatatttcaccatagcatgcacatttaaaatagttcatttgtgagggctgtgaacaatt

SEQ ID NO: 26849 - DNA, 120 bp, synthetic construct
  source 1..120: mol_type = other DNA
aacaagaaatcacatcagtttttacatcaaagggcaccttctatgacaaaaaccattgttaatgaggcagatgcctctggaggaaacactgtaaaaagccttccagcagaatggaccgct

SEQ ID NO: 26850 - DNA, 120 bp, synthetic construct
  source 1..120: mol_type = other DNA
acagtagcctcgatagaagctatttttgatgaatttctaggtgtttgggtcacagttcctacaaatacggaaaagggggttaaaaagcagtgctttcatgaatgccatcctacacatatt

SEQ ID NO: 26851 - DNA, 120 bp, synthetic construct
  source 1..120: mol_type = other DNA
gagtgtgtgggtgtgtgtacgtgagttcattttctacatggacaaataggtcatctgcaagcagagacagttttactgcttcccagtctacacattttaaatttccttttcttttgttat

SEQ ID NO: 26852 - DNA, 120 bp, synthetic construct
  source 1..120: mol_type = other DNA
ctaattttccaggcaggggaatacttataaaaccttttatgtcaaagttaggatttcacaacataacacactaatgcaaaatccagtagcacctgaaagatttaagtaaatgctgtcatc

SEQ ID NO: 26853 - DNA, 120 bp, synthetic construct
  source 1..120: mol_type = other DNA
actatgtcaaaatttaaaaatattttattacatcattaaaataattcacttgccatttcaacagcttacactgttttttaaatttttttaactcttcatactaaactccctgatccctag

SEQ ID NO: 26854 - DNA, 120 bp, synthetic construct
  source 1..120: mol_type = other DNA
gattctactaaaactagactctaagtactaaaatgtgcttctataggtttacttagcttattaacagctttcagaaaaccatcccaaatgaccacatattcccaagcttgagaggggctt

SEQ ID NO: 26855 - DNA, 120 bp, synthetic construct
  source 1..120: mol_type = other DNA
tcacttgtatcctcagccaaggttggtgttgcctatggttgagtgtcttttctcactcttgagtctgccttcaccagtggttctcagctattacatatctgaagacattttttattgtca

SEQ ID NO: 26856 - DNA, 120 bp, synthetic construct
  source 1..120: mol_type = other DNA
ctgaactgtctctatagaggttgtagttgtttatttgactctgactagtagtgtataagagtgcttagttctttatacccttgcctaaacattggatgataaaacttttgatcttttgac

SEQ ID NO: 26857 - DNA, 120 bp, synthetic construct
  source 1..120: mol_type = other DNA
tgagtggatgagaagtactaagaagaattggctccctgggaactccacatagctggtggcttttgtaactgaaatagcatcagttaagtccaacattatggaaagacacaaatgttcgtg

SEQ ID NO: 26858 - DNA, 120 bp, synthetic construct
  source 1..120: mol_type = other DNA
aatttgcttccagagaaagaacctagaagagtggaaggaagccatttttcccttctctacaaaggcaaggtcttgctgggaagggccaggtgcatgccagacttagcagtcaggccccca

SEQ ID NO: 26859 - DNA, 120 bp, synthetic construct
  source 1..120: mol_type = other DNA
atacatacatacatgggttttcattgaggaaaatcttggtgatctagaaataggatctggctggaaatacctgggcctgggcattcctgccttgcataaactggctataaagatagagtg

SEQ ID NO: 26860 - DNA, 120 bp, synthetic construct
  source 1..120: mol_type = other DNA
acaggcaagagccaccatgcccagcctgcactgtcattttctgtagctaacttcccccaacactcccacctccacatagcccttaagttaaaggagaacaaggaagccctgtgttcatta

SEQ ID NO: 26861 - DNA, 120 bp, synthetic construct
  source 1..120: mol_type = other DNA
aaactgctgggattacaggcgtgggccaccgtgtctggtcccccttctttttaaaacaaaagatgttatggtatgtcatacaccttgcttcttggttctgttcttttctttgcttttttt

SEQ ID NO: 26862 - DNA, 120 bp, synthetic construct
  source 1..120: mol_type = other DNA
ttaagcaggcttcagattatctgagatgtttaaaaggcagattctgggacccatccctgattcaggaatagcaggtacaacattttcagaaacattgcctttaaggaagcgggtatgtca

SEQ ID NO: 26863 - DNA, 120 bp, synthetic construct
  source 1..120: mol_type = other DNA
ggggctaagcagtcacatcattatgactgtgtacatactgctccttgttgagaaaaacagtgtattatgctcttcctatcctgtacttctttctgccctagaatgattgcctaaccaacc

SEQ ID NO: 26864 - DNA, 120 bp, synthetic construct
  source 1..120: mol_type = other DNA
ctggggactcagttggggtcttggagaagcacttagttatagcaagaatgtctcataaatggtatctgatagagacaagagtagtggggaataaaaactagttgcttagaaataattata

SEQ ID NO: 26865 - DNA, 120 bp, synthetic construct
  source 1..120: mol_type = other DNA
ctaatcaaaagggcaatgaggtttttcacagaaactgacaagctgcttttaaaaagatagatcaaagggccaataataagtaagacagcactgaaagacttagagctatttgccctatca

SEQ ID NO: 26866 - DNA, 120 bp, synthetic construct
  source 1..120: mol_type = other DNA
tctaaggatttagtaaaacaaactaaaataaaatccttcctgggtaaatacctagagtgcagtgcaagttcatgtctatctccagcaccttgttcagtgttgtcatgagagcattggttt

SEQ ID NO: 26867 - DNA, 120 bp, synthetic construct
  source 1..120: mol_type = other DNA
tttaaaaggtcgtacagaatatctgagctacactattttttaaatgtagaaagtaggcaccttctgatccgtggtcagacgcgttacccattgcgctactggccacatgaaaaaatgctc

SEQ ID NO: 26868 - DNA, 120 bp, synthetic construct
  source 1..120: mol_type = other DNA
taggaaagcaattgacttttgtacattaaccttggatcctgcaaccttgctgtaatcacttactaattccagtctgtgtgtatgtttgccaattcttttgaatttcctacataggcagtc

SEQ ID NO: 26869 - DNA, 120 bp, synthetic construct
  source 1..120: mol_type = other DNA
aacagtatgtgacagtaatgctgaaggggtgtgagtaaagatagagaaactggccttgcttaggtaaggtcaaagcaaatgttgctttgataggagctgtactattgtcatccatgcttg

SEQ ID NO: 26870 - DNA, 120 bp, synthetic construct
  source 1..120: mol_type = other DNA
acggctaccaatcgagttctgaacgtcctccgtcactgggtctcaaagcacgcacaggtaagtcagtgccctcattaattacttgcaaggattttttaaaaaatcatctttttaagttgt

SEQ ID NO: 26871 - DNA, 120 bp, synthetic construct
  source 1..120: mol_type = other DNA
ctgaaacagtgccatccaagtgcaattgatagtgtgagttcctagccttgtccacaaaagattgtatagctaatgagaagaaagatatttagtgtctgtatagcacttcatagcccttaa

SEQ ID NO: 26872 - DNA, 120 bp, synthetic construct
  source 1..120: mol_type = other DNA
ataggaattaccacaaacttcttataaaatttgccatacagaacacaatggagtgatacctttgaagtactaaaataaacaaaaaggctaactgagaattctatactcagggaaagcacc

SEQ ID NO: 26873 - DNA, 120 bp, synthetic construct
  source 1..120: mol_type = other DNA
cctattcaagaacagtgggaagtgaagcagactgggggggaaaaattatgctccttacaaaacatacagctctggtcatccttccatctactaaattaacaatgagcacatacaaggatt

SEQ ID NO: 26874 - DNA, 120 bp, synthetic construct
  source 1..120: mol_type = other DNA
gggcaacagagcaagactctgcctctaaaagaaacaaagaaacaaaactcaaataaccaggtctaaaccttgcaatgtagcttcaattacagataatgttcaaaggaacatattttaaat

SEQ ID NO: 26875 - DNA, 120 bp, synthetic construct
  source 1..120: mol_type = other DNA
tgaagaaacaagttttcgtcattatgttaggcttccaactttcctaaaatttctgtgccttctcccacaccatacacagatctgcaaagcatcagggtgcaccagtggttaagactgcat

SEQ ID NO: 26876 - DNA, 120 bp, synthetic construct
  source 1..120: mol_type = other DNA
gccctaagtgacatcaaaaaatgtttacttgaaaaacagagtgaaggtatggtgtaattaggtagtaacctaagaaagaagtattggccccattttgggttagtaactagagagtgagtt

SEQ ID NO: 26877 - DNA, 120 bp, synthetic construct
  source 1..120: mol_type = other DNA
cccctcaaataaccacaatacattagataaccagaaatagaattttcttccctttctaattcttcgctccttcccttccttctttccccccattgatctgctgatcatactatgcctgtt

SEQ ID NO: 26878 - DNA, 120 bp, synthetic construct
  source 1..120: mol_type = other DNA
gcagaagctctttagtttaattagatcccatttgtcaattttgtatgcctgttattttaaataaaaaatattaaaatccttttacctacatttataaaaaggaaaagaaactaaaggtac

SEQ ID NO: 26879 - DNA, 120 bp, synthetic construct
  source 1..120: mol_type = other DNA
actccagacctgctcttccattatgttctctctttgtactttacttgaggtattcttaaccactgtttcttggccatattctttctcagagtaacttgtctctgaagcatgcggtttggt

SEQ ID NO: 26880 - DNA, 120 bp, synthetic construct
  source 1..120: mol_type = other DNA
agaagaagagtactaaacaaaagaatttttctttggttatacaaatgattccaaagaggacagataagaaatattcaatttcagtccaagtggtatatgtacaaatgtctggagtctttt

SEQ ID NO: 26881 - DNA, 120 bp, synthetic construct
  source 1..120: mol_type = other DNA
taaatatgcatctacctactttgtttttctacttcttaattcctattatgtataggttaggtctcttgatggtgctccataatccccataggctcccctcccctcctttcccgttccctc

SEQ ID NO: 26882 - DNA, 120 bp, synthetic construct
  source 1..120: mol_type = other DNA
atccctcattcccctctgccttccccccttctgagtctcagatgttcattatatcactctatatgtctttgtgtaactatagcttagctcccacttgtaagtgagaacatgaagtatttg

SEQ ID NO: 26883 - DNA, 120 bp, synthetic construct
  source 1..120: mol_type = other DNA
ttctctctccctgtctcaagatctttaagctaatcacatccctaaagtcctttttgtcacataaggtaatattcacaggttctggaaattacaacacagacatgggggaggagggctact

SEQ ID NO: 26884 - DNA, 120 bp, synthetic construct
  source 1..120: mol_type = other DNA
tatagctactttgctcctggttttggtcaccatttgaatggaattttttttttttcatcaaccctctttcagtctgtatgaccttacagatgaagtgagtctattgtaggtagacttggg

SEQ ID NO: 26885 - DNA, 120 bp, synthetic construct
  source 1..120: mol_type = other DNA
tgcttttaccaataaaaatactaaatagtatttcaagtgaatactggatgccaaaacaacacacacaccttagagtgagttttttatttaattagctaggactacacaatcttatcacag

SEQ ID NO: 26886 - DNA, 120 bp, synthetic construct
  source 1..120: mol_type = other DNA
aacaggagtttgggagaagttgattccaatccttgtggatgattagggggttcaagactttggtggaagaagtaattggaaatgtggtagaagcagcaggagaactagaattagaagtgt

SEQ ID NO: 26887 - DNA, 120 bp, synthetic construct
  source 1..120: mol_type = other DNA
aaatcctgggcccaactgatcctcccgcctaggcatccaaaagggttgggattacaggtgttagccaccatgccaggctaaaataaatagtaactttctaataacatatatatatatacc

SEQ ID NO: 26888 - DNA, 120 bp, synthetic construct
  source 1..120: mol_type = other DNA
tcctgtgcgcttacccagtcaaaaatcaacccttgaaggtaaccactttcctagctagcatcatcacaggtcacttttgcctgctcctggatttcacatgaattgaatgtattctatcat

SEQ ID NO: 26889 - DNA, 120 bp, synthetic construct
  source 1..120: mol_type = other DNA
ggccttcagaggagttccttaaagctgtatgcaaacttttgtgcatttgtgtgatgctaaccaacccactcaaggaagtctttctgaactgctacttccatcatgttcctttttcataca

SEQ ID NO: 26890 - DNA, 120 bp, synthetic construct
  source 1..120: mol_type = other DNA
gttcaatgttactatatcctacgtgtgtcaaacttttatgcctacaggattgagagtcttctctatccctagaggatcattaaacttagccaactgtctgggaattgacaatgacagaat

SEQ ID NO: 26891 - DNA, 120 bp, synthetic construct
  source 1..120: mol_type = other DNA
ggagagggagagtgagagctctggcagttctttatagcaatatgagaacagactaaacacacttcttaaaacaaaaacaaaaagagtggtgggtggtctttttagttataagacaaagaa

SEQ ID NO: 26892 - DNA, 120 bp, synthetic construct
  source 1..120: mol_type = other DNA
caggtgtaagccaccgtgcccagccagttaaagtactttttaaagcaaacctcaggcgttatgttatttctctgtaaattcagaagtattaaaggtggatttgcactgagaatcctggta

SEQ ID NO: 26893 - DNA, 120 bp, synthetic construct
  source 1..120: mol_type = other DNA
cccaaatctctgtgtctaaacttgcaactgcaattttattattgtgattatagattacccttcaacatggaaattttttgacctgcattttgttttcttgccatttgtgttctctttgca

SEQ ID NO: 26894 - DNA, 120 bp, synthetic construct
  source 1..120: mol_type = other DNA
ctattattagcactcagcaagtcatagtttgagtgtcatcagcctctctcccttccctttcccctgcctcccttttatgtgcattctagggtgaattctactgacattttgcaatttaca

SEQ ID NO: 26895 - DNA, 120 bp, synthetic construct
  source 1..120: mol_type = other DNA
tagtagcatctttagatgctcatcacatacacgtgcttggtatgcacacatgcacatgtgtatatattacattttccattttgggcctaaataatctgtgagaatgttggtctccctttg

SEQ ID NO: 26896 - DNA, 120 bp, synthetic construct
  source 1..120: mol_type = other DNA
ttgctgcattgacctggggctcacacacctcagactcttgtagaagaaaaaaatcaaacaaaacaatacagtcagtgttgcaagctgcaatatagaacagtcccaatcttgccttaggtt

SEQ ID NO: 26897 - DNA, 120 bp, synthetic construct
  source 1..120: mol_type = other DNA
tggtgtttcctaagtgctgactttggtctacttttccccctgtacgttgttatctattcttatggcttgacattttctatatgataacccctgaagttgtgtctctagcctataaaacac

SEQ ID NO: 26898 - DNA, 120 bp, synthetic construct
  source 1..120: mol_type = other DNA
ctctagttagttgatataatataatctgctgtcctgaaatacttttagaggaccaagaagggccttggttgacatgaactaagcacacagattttgaggtgctgtcattgtgcggaggtg

SEQ ID NO: 26899 - DNA, 120 bp, synthetic construct
  source 1..120: mol_type = other DNA
agtctcaataaaaggttaaggttgtttttactcaggctgtgcaaccacctgctgtgcaaccacctgagttgaagtttaagcctggacaaaattcaacaacccttcatgctaaaaactctc

SEQ ID NO: 26900 - DNA, 120 bp, synthetic construct
  source 1..120: mol_type = other DNA
cagaagcaatcttttcagtcagactgagagctgggcatgccagcaacaaggagcctataaaagtcttacacctgaacgaaaaaagtaatactgtctaatgtggagtaactgattaggtag

SEQ ID NO: 26901 - DNA, 120 bp, synthetic construct
  source 1..120: mol_type = other DNA
ccccacatgcatggcatcacttgccatctagaagttagttctctctatgtctatctgtcctaaatttctctccagagccacaaagccaactatttaatggtcatttccttctgtatgtac

SEQ ID NO: 26902 - DNA, 120 bp, synthetic construct
  source 1..120: mol_type = other DNA
ctcccaaattcctcacataatcagtcattaaaattctattgatcctgccaccgtctctcaaatccatctacttttctttcatttaatctggtttagctcaagccaccatcatttcacaag

SEQ ID NO: 26903 - DNA, 120 bp, synthetic construct
  source 1..120: mol_type = other DNA
agggaatgacagaagtttagaaatcatggcctcctgcctatttgcattcctatgtattttacagaggaaaaaacctggcccaagaggtatgatatgacttatccattatatcttgctggt

SEQ ID NO: 26904 - DNA, 120 bp, synthetic construct
  source 1..120: mol_type = other DNA
gaggaaggaaagaaacaaccaacttgggagatgaatgtttccaaaccagtgccagacgataaggaaaaagacatagaagatacagtgccagaaaataagttgacattagacaacgtggcg

SEQ ID NO: 26905 - DNA, 120 bp, synthetic construct
  source 1..120: mol_type = other DNA
aatctgtagtttctgactgaattcatcttcagtagggatttattctaggttgtaaagtgttcctatatggcagtattacgcttgcttctgccaggtgccccaaaggtttcattggtccag

SEQ ID NO: 26906 - DNA, 120 bp, synthetic construct
  source 1..120: mol_type = other DNA
aaagggtggaaggcagaagccagtgtacaagatacagggaagtgggctaaactcatcctttttattaggaacccccttgagcaattactaaatcattcccatgataatggtattaattca

SEQ ID NO: 26907 - DNA, 120 bp, synthetic construct
  source 1..120: mol_type = other DNA
tgggtcaaatggtatttctgtctctaggtctctgagcaatctctgcactgtcttccacaatggttgaactaatttatgcttccaccaacagggaaaattgctcctttttctccacaacct

SEQ ID NO: 26908 - DNA, 120 bp, synthetic construct
  source 1..120: mol_type = other DNA
gcaatacagacctgccctgtaaaatcatgacagattaagaatcaaggaaaagggagggatctgggtgagtggattattctttcttctctcccgtttctctttccttacagattggtgttc

SEQ ID NO: 26909 - DNA, 120 bp, synthetic construct
  source 1..120: mol_type = other DNA
gagttgggtttgttgttgttgttgttgttgttgttgttttttcctttcaacactatgaatgtgtcatcttattctttcctggcttataaggcttctgctgagaaatctgttgtcaccctg

SEQ ID NO: 26910 - DNA, 120 bp, synthetic construct
  source 1..120: mol_type = other DNA
caagcaaccctagatcctgagactgaaccatatttacacatatgagtcaccttcatttcttctcttgttacaggtgagttggatactttgcctattttttagtgtgtgtatgttgtgggg

SEQ ID NO: 26911 - DNA, 120 bp, synthetic construct
  source 1..120: mol_type = other DNA
taatatatttctatattttatttacctgcatagcatgagcccctcttcttcctttataagccaaccagattctgctgaccttcactgggcagttgaagcctcgccatccacacacactga

SEQ ID NO: 26912 - DNA, 120 bp, synthetic construct
  source 1..120: mol_type = other DNA
tatataaagaaaggcacatgacagccttagatctgggtttcaggtctagccgtgccactaattaatgtgtggtagttcttcctttaggattcattttcctataaaacaagacaactggcc

SEQ ID NO: 26913 - DNA, 120 bp, synthetic construct
  source 1..120: mol_type = other DNA
agtcaggtgcctgggggggataatagcctaatgtatgtaccaagtaccaggcatggatccaggcactttactgtgcttacttatgtttattcctcataactcaatgattatcccatttta

SEQ ID NO: 26914 - DNA, 120 bp, synthetic construct
  source 1..120: mol_type = other DNA
ctgtgctaggcactgtttaggtttctatgacatagtagtgaataaaactgacaaagattcctgccattgtggcacatatgtatgaaagtccaggaacgagataatgatgcctaggaccag

SEQ ID NO: 26915 - DNA, 120 bp, synthetic construct
  source 1..120: mol_type = other DNA
agcttcatggctaaaaagtatttagaagaacacaggtgtctgagtgtgtgttgtttggtagttgggtatttccaggaaaaaaggggtgatgacagttactggcaggggaaagatggaaat

SEQ ID NO: 26916 - DNA, 120 bp, synthetic construct
  source 1..120: mol_type = other DNA
tgaacccacagacgaggccttgacttccttcttaggaagagtgagatgttaaagacacagactggctacctgctgtaaacatgtattgcctttttctttatctatcaaaagcgtcaagaa

SEQ ID NO: 26917 - DNA, 120 bp, synthetic construct
  source 1..120: mol_type = other DNA
ttcaagtcctctcaggatgaagtagatgtgttgagctgggtgattgtgggcataacttccttagattttttgaagagctgcttccaatacttgcccaggaatataagatgagaagttatc

SEQ ID NO: 26918 - DNA, 120 bp, synthetic construct
  source 1..120: mol_type = other DNA
tttagcccttcactctgctgatgtttatagttaagtgtcagaaatacttttatacagaagaccttgtatggttcctttgtgtgagtggacagaatttgtggagcaaagacctggaatcca

SEQ ID NO: 26919 - DNA, 120 bp, synthetic construct
  source 1..120: mol_type = other DNA
tctacagtacctacatgcttttctgcagtacctacttgctcttctgcagtacctacatgctcttctgcagtacctacatgctcttctgcagtgctctacctgctcttctgcagtactcta

SEQ ID NO: 26920 - DNA, 120 bp, synthetic construct
  source 1..120: mol_type = other DNA
gacttcactgggctgtctctttctcacacagctcctattattcccccattcattctttcatttagtgaatatttattgattgtctaccaaaggccaataacttgtgcccctcctctccac

SEQ ID NO: 26921 - DNA, 120 bp, synthetic construct
  source 1..120: mol_type = other DNA
gttatttatcaagacattgagaaaaataactgaaaatgcaaatacactggcatgtttatagtagccccagattcagatgacctcagatccagaggaccagctgtgctgcctgagggaaac

SEQ ID NO: 26922 - DNA, 120 bp, synthetic construct
  source 1..120: mol_type = other DNA
ataggtttgctcaggtgtcttatttcttagttaatttggtggcagcagcttgaagtcctcataaaccaccataagcattctttaccaatggtacatcattgtccatactagcaggaatta

SEQ ID NO: 26923 - DNA, 120 bp, synthetic construct
  source 1..120: mol_type = other DNA
gtgctgtttcattttctgtctttgttttacttcatttaatattataatttttatgtatagtacaaataagtgcaagcataatcattaaaaaccatcaggctgcttttgaaatctaataac

SEQ ID NO: 26924 - DNA, 120 bp, synthetic construct
  source 1..120: mol_type = other DNA
gctctgatacaactggcagctgacatctaagcagaaagcttataggctaggagagagtgtgatggcattcaaagtgttgaaggaaaaacaaaacttccaacctagaatattctattcagc

SEQ ID NO: 26925 - DNA, 120 bp, synthetic construct
  source 1..120: mol_type = other DNA
cttaagacagaagatttgtctagggtatccacaatctgattacatatttctcacgagaactaccccaaagtgcaagccctttgtgttgttctacctgagatgacatgacttcagcctcaa

SEQ ID NO: 26926 - DNA, 120 bp, synthetic construct
  source 1..120: mol_type = other DNA
tgatatcatttgcgcaatgtagcctgtgatggcagaaaattaagctggtatttatacagggtattagagaaggaccctccctgcaccaggcttaaagtgacaaaatgtcagcctcaatca

SEQ ID NO: 26927 - DNA, 120 bp, synthetic construct
  source 1..120: mol_type = other DNA
tgcaggcatggaagaacttgaccaatgttgacagctaagtttatatacccttctccgagagctggcagtctatattttaggacccgtttaaaacaacattttcactcataggtgggaact

SEQ ID NO: 26928 - DNA, 120 bp, synthetic construct
  source 1..120: mol_type = other DNA
ccagagacacatctctggacttcaaacctccaaatctgacttcataaggctgacttcggagagatttccaaacatacaaagggcaaggaagggattggatcctattaggattttattgtg

SEQ ID NO: 26929 - DNA, 120 bp, synthetic construct
  source 1..120: mol_type = other DNA
gttcaaagtatttatttaatgtcatgcagataaacccaaggaaagaaacacatttgacagataaattctaggtgactgagtctttacaagcccaagggaatgttttaggataagggtgaa

SEQ ID NO: 26930 - DNA, 120 bp, synthetic construct
  source 1..120: mol_type = other DNA
ataaagagtataatgaattaaatagacacatagcttgctgttttcattaagaacaatgtagcaaacccatggatatatagcattagaatgaaaagctatatttcaacagatacagtgatc

SEQ ID NO: 26931 - DNA, 120 bp, synthetic construct
  source 1..120: mol_type = other DNA
acatactaagttaatttttttaaattttagataatggcagtgttatttcttcgtttgcgccacccccccccccccactttttttttgagtcaagtttcagccaggctggagtgcagtggt

SEQ ID NO: 26932 - DNA, 120 bp, synthetic construct
  source 1..120: mol_type = other DNA
cttaaatgaggaatactcagatggttgctgagcctaagcagaatggcaacagaagggagcctgccgtcaaaaattctcaacttaagatctgtttctgtttcagctttctacatatggcta

SEQ ID NO: 26933 - DNA, 120 bp, synthetic construct
  source 1..120: mol_type = other DNA
tcaggaaccacctgtagagtcagaggaaaaagttcttctcttgccttcaaaactgaaaggaaagactgcagttgtttttattcctgggagacagcaggaaggtagggtcttattcttaag

SEQ ID NO: 26934 - DNA, 120 bp, synthetic construct
  source 1..120: mol_type = other DNA
ttgcgatggcactacatcagcagtatctgtagaacttgatattggagagttttgttcaaagaaatactttgtcttgataggacattaagtgaatgtagaggtatggctcagcataactgc

SEQ ID NO: 26935 - DNA, 120 bp, synthetic construct
  source 1..120: mol_type = other DNA
gctacggaggacggtgggtagataccaaagaatgaaaggaaaaagccaggagtctcatcttttttgctctttgaagataaaggtaccgtctaatccccctttctttttcatattgtcact

SEQ ID NO: 26936 - DNA, 120 bp, synthetic construct
  source 1..120: mol_type = other DNA
cgtaattgaaagcaatctccatggacagttatatatgtaaaaaaagtgatgacaaagcagagctagcataaatgtatgtgaacatgtatatgcatgcatgtgtgtgcacagatggacaga

SEQ ID NO: 26937 - DNA, 120 bp, synthetic construct
  source 1..120: mol_type = other DNA
ctatatctagagatatctatagattagatatctatggtatctagagctgtctatagattagatatctatgatatctagagatgtctatagattagatatctatgatatctagagatatct

SEQ ID NO: 26938 - DNA, 120 bp, synthetic construct
  source 1..120: mol_type = other DNA
tagagactatgaagaacaaaagtaaagttttagtttttttcccaccgttttttcctttgcatcccaacattattagccagaaggaatgctgcattgaaaagctagaaaacaataggatac

SEQ ID NO: 26939 - DNA, 120 bp, synthetic construct
  source 1..120: mol_type = other DNA
ggggtacatctggtattttaatataagcatataatatataatcagatcagggtcattgggatatctgtcacctcaaacatttatcattttcttgtcttaggaatgttggaattctcctct

SEQ ID NO: 26940 - DNA, 120 bp, synthetic construct
  source 1..120: mol_type = other DNA
ccactgcattgtagcagggtttaaatctaccttctccaaagaactattattactaccaagtgacaactgtgcttagaaaatttagcttttgttcttgcgatagtttactgagaatgatga

SEQ ID NO: 26941 - DNA, 120 bp, synthetic construct
  source 1..120: mol_type = other DNA
gaacccatgctcatatggcatgtatcctaatgtatcgtaatatcctataaaactttcaatgcaattttggtagcactttgacaacaaattaagtaattatgcctttatttcaatgcatat

SEQ ID NO: 26942 - DNA, 120 bp, synthetic construct
  source 1..120: mol_type = other DNA
ttagtccatatgacttcatgccccctggccattgctgattttgtcacagtacacatctgatgccagctgggccaattcaggtctctttctaaggattttaaataaaatgatactttaggt

SEQ ID NO: 26943 - DNA, 120 bp, synthetic construct
  source 1..120: mol_type = other DNA
cacatgcatcagaatgtaaagcaaatgggatttttttttcagtcagcagctgtgctgagctatatagaggagtgccatccagactgggtctaactttaatgtaaaacaaatgctattccc

SEQ ID NO: 26944 - DNA, 120 bp, synthetic construct
  source 1..120: mol_type = other DNA
tctagcctagatattgcttgcctcccatcccctctcccttaatctatggtatacatagtctttgtttccatgctgaattgtaaagcacacatatcattcctctctctctagaaggaagag

SEQ ID NO: 26945 - DNA, 120 bp, synthetic construct
  source 1..120: mol_type = other DNA
tgtaaattaaacatttttggaaactgcctaaaattctcggggtcccaattaccttataaatgtatcaaaactggggtcttgagccaagatggccgaataggaacagctccggtctacagc

SEQ ID NO: 26946 - DNA, 120 bp, synthetic construct
  source 1..120: mol_type = other DNA
gggactatcaaaccaggtctcctggaataggaacaggaatatttctatccagtttgtgacaagaatatgtatataagagagcaaaggtgacagggaggaatgttaaatcttggcctgatt

SEQ ID NO: 26947 - DNA, 120 bp, synthetic construct
  source 1..120: mol_type = other DNA
aacaggcctgagtgctgttgcccaaaagatgaatttactttgctggtatgccatccactcaaattatgacatttaaccccttagtacttttataagcattgggcaattggaactaaagtg

SEQ ID NO: 26948 - DNA, 120 bp, synthetic construct
  source 1..120: mol_type = other DNA
ctcttagcctgcctgataaataggaacccatcaaagacaaagaaaaataacaacccatgtaaggggtctccgcaacttgaatgagagagaccaagatgaataaccagaacaaatagggcc

SEQ ID NO: 26949 - DNA, 120 bp, synthetic construct
  source 1..120: mol_type = other DNA
ccaaagtgggcctcctaaaagcgcaaatcagaacaagttattttcctagttcaaactgtctaatggcttcccatcaacattcatataaagtcccaactccttaccagagcctgtaaaact

SEQ ID NO: 26950 - DNA, 120 bp, synthetic construct
  source 1..120: mol_type = other DNA
tgaccacaatcagctcatatttttatttttgtgtagacacagggtctatgttgcctgtctcaaacttttggccataagcaatcctcctgccacaggcttccaaagtcctgagataattga

SEQ ID NO: 26951 - DNA, 120 bp, synthetic construct
  source 1..120: mol_type = other DNA
tctaactgagaagcctgcctggaggatacctgcatgaacaagaggcaacatgaagcctggtgattcagtcagatggaatagggcttgtagctaaaggaaaaaaagactcaatgtatattt

SEQ ID NO: 26952 - DNA, 120 bp, synthetic construct
  source 1..120: mol_type = other DNA
gtaccacaaagccagaaagcctgtggttgcagtgtcttgcctgccataaatttctggaggccattatcattaggagtctagatttgtctcacaactacagactttcagtttgaaaggaaa

SEQ ID NO: 26953 - DNA, 120 bp, synthetic construct
  source 1..120: mol_type = other DNA
ttcttcccaacactatcttggtcctccttactccattaattcaaatgagagcctttgtgtagtgggcactgtagttggaaccaagggggcaaagatacgtaaaacagagttcagtttttt

SEQ ID NO: 26954 - DNA, 120 bp, synthetic construct
  source 1..120: mol_type = other DNA
ataattacttttgactacagaaaatgatacagtttgaaagtttgggaatatacacaggcttcaaaggcgggaagccaaaggagaggcatctgacgatggatcactctgccctcttctgaa

SEQ ID NO: 26955 - DNA, 120 bp, synthetic construct
  source 1..120: mol_type = other DNA
gaagccaagtcatccaaaggaaaagacagccttgagcagcagggtgcagaatacagacattaccatcttcatctgcatagaaatgagtctgactgtgtttacagcttcatcatttgaaat

SEQ ID NO: 26956 - DNA, 120 bp, synthetic construct
  source 1..120: mol_type = other DNA
tatagcagtgaggtagtagtgtgggttttatgatcagtgggaatacatgaaagaatgctctagtaggggtaagctgaagccaagccccatctctactcagtctcatttccaaatacagaa

SEQ ID NO: 26957 - DNA, 120 bp, synthetic construct
  source 1..120: mol_type = other DNA
ggactatagggaacagtgtgagccatagctagagtcaatctggctggaagcaaagaaagaggctgagatctaggagggtaggtgaagttgagtagccattcttttttttttttaatttta

SEQ ID NO: 26958 - DNA, 120 bp, synthetic construct
  source 1..120: mol_type = other DNA
gctcaggtgattctcccacctcagcctccagagctttggatttagatacttctaatatgccccagactgaatacttcatctcttctgcaaaacctgtttctcttcttttgttgaagagct

SEQ ID NO: 26959 - DNA, 120 bp, synthetic construct
  source 1..120: mol_type = other DNA
aatgttacagtagctcaatcattcacttctcatctttttgtttcatttctaaaatctcaaccctcaatttgcaccagaactgaaaatatgtcatatgatttaggaaactctgggcttcat

SEQ ID NO: 26960 - DNA, 120 bp, synthetic construct
  source 1..120: mol_type = other DNA
cagtggtacactgacattattttagtagctttatagtaagtcttgaaatcagttaatccttcaatcaattgtccttcaactttgtttatcttcttcaatattattttggctgttccaggt

SEQ ID NO: 26961 - DNA, 120 bp, synthetic construct
  source 1..120: mol_type = other DNA
acagaacggggaaaacgtctaaggacgaaatcagcctctctgaatcgaggatgcttatatgctgcttttcccataggcaactctaactctaaacagagtgctttagaacacgtaatttta

SEQ ID NO: 26962 - DNA, 120 bp, synthetic construct
  source 1..120: mol_type = other DNA
ttacacagtgaaacttggtgttcccggctagtcattcaaatcgaagctgtcgcagacctctgaacgttagtaacgcaacatgtgtttctccgcgactacagacctcgggagaggagcggt

SEQ ID NO: 26963 - DNA, 120 bp, synthetic construct
  source 1..120: mol_type = other DNA
agagcccaccccgcgcggctgccttcctgccgcccgcggctgcagttagcccgggaggaggaagacggcgtggaactcgttcttctcgcccccctccgccgactcccatcctttccaggt

SEQ ID NO: 26964 - DNA, 120 bp, synthetic construct
  source 1..120: mol_type = other DNA
gattgtcagtgtaacacttgccactatctgatgatgttctgatgtgtgtgtttgttgcttcttccccactaccagtgcttggcacatagtagttactcagagaatagtttaatgaatgaa

SEQ ID NO: 26965 - DNA, 120 bp, synthetic construct
  source 1..120: mol_type = other DNA
acattttgctctaaattaaatcttgcttccctgatgatactacgtgcaaccctttgaagtagtggccattttctctcctgcttctttctgcctttgagcctggaggtgtaatcttagctt

SEQ ID NO: 26966 - DNA, 120 bp, synthetic construct
  source 1..120: mol_type = other DNA
gtcctatgaaggtagtactattgtttttgttttatagcccattaagctcagacttaaggaggttatataactgcctagggcttcacagtagtgatgaaagtggattatgagcccttactc

SEQ ID NO: 26967 - DNA, 120 bp, synthetic construct
  source 1..120: mol_type = other DNA
atgatgagctacacctgagttgtacattttctttttcttttatttgcttctgtatacaggctggcttagcaggagctccagcccgtgctgtatcagctgtaaagaatatgaatcttcctg

SEQ ID NO: 26968 - DNA, 120 bp, synthetic construct
  source 1..120: mol_type = other DNA
tattgcgcaagatgagatctggagtgggggggcgacagtctttctaaaatgtatattgagaaaatgtaaaatcttttttatacaaatagctttaagccttgcctcttgttccttcttgcc

SEQ ID NO: 26969 - DNA, 120 bp, synthetic construct
  source 1..120: mol_type = other DNA
cttgggtaaggtgaggttctccactgtatcactactcttttcttttataaataaagagcagtcgtgggtagatactttgtgactatgtaaacatacaattccacgtgagactttctccac

SEQ ID NO: 26970 - DNA, 120 bp, synthetic construct
  source 1..120: mol_type = other DNA
tacctccttggtgagagcagtaccataaatatcccaggataacacctttgttgttgtcaacagtaaaatgaccagaattgtctaggtacaacttcatttatggaatcagcaaaggctggt

SEQ ID NO: 26971 - DNA, 120 bp, synthetic construct
  source 1..120: mol_type = other DNA
tcaaccatttgaatatctacttttgtgaaagggaaggggaggtgtgcctccaaagtctgtgttaccttttgggctgccatttcttctagatcctggcctgtaaatcatgacttgttaact

SEQ ID NO: 26972 - DNA, 120 bp, synthetic construct
  source 1..120: mol_type = other DNA
ctgacatggactgcactgcagcattaaagagaataagaagttgtcgttgggtttcaagtctgtgaaacaaagtaaggtttttaatttatccaaagttacacaccctgcaagtgacacagg

SEQ ID NO: 26973 - DNA, 120 bp, synthetic construct
  source 1..120: mol_type = other DNA
cctaaagtgaagcttgcccgtatccaaagctacccatgtgcacagagctcctagttaatgctaccaagtaggcaagaagataggtgcaacctgtttttattattatgcttgttcattgtt

SEQ ID NO: 26974 - DNA, 120 bp, synthetic construct
  source 1..120: mol_type = other DNA
gaaaaagaaaaagaaaaccaacaaggaagagggtaaatgttcaagaaactcttctccaaatccaaattccacttggattccacttcggtgagtccccttggtggtgtctgcgccgattaa

SEQ ID NO: 26975 - DNA, 120 bp, synthetic construct
  source 1..120: mol_type = other DNA
gtccccagaaaaggcagaagttccacagactccacaagggaatgcatactgtaaatcaagtatgcatatattatatgctgcctatattcttctgaatcctttccactgtgcattctatct

SEQ ID NO: 26976 - DNA, 120 bp, synthetic construct
  source 1..120: mol_type = other DNA
gttaaactaaaaaaaaaggccgccttgacctattcaccctccacttcccgtctcagaatctaaacgtggtcaccttcgagtagagaggcccgcccgcccaccgtggacagtgccacccgc

SEQ ID NO: 26977 - DNA, 120 bp, synthetic construct
  source 1..120: mol_type = other DNA
tgttcacaggaacactccactgcatgccaatgcactttgccactttcatattgcagccagcatcaacccagccacaggtaatgaaacattgttcaaaacatgtttctgaaattgaataga

SEQ ID NO: 26978 - DNA, 120 bp, synthetic construct
  source 1..120: mol_type = other DNA
gtagagggagagggagaggcctatttttcattgtagcaagctcactgatttctgtttgtttgccctttaaggccatgacttgacttgtgatttaggatcttgataaggcattgaagttca

SEQ ID NO: 26979 - DNA, 120 bp, synthetic construct
  source 1..120: mol_type = other DNA
tttagctgtgtgactgtcttgaatgctttccttgagcgtgagaagggaacctcaacttcagtcttaatgctaacaaataagcagtccatcttagaattagctcattaaagaggttgatag

SEQ ID NO: 26980 - DNA, 120 bp, synthetic construct
  source 1..120: mol_type = other DNA
ggatgacatgtctttgagaagtagttccaatttaaaaagagcagtgagtcgcccttcacggggttgacatgggcggtgatcattgatgtaagaaggtcagtctttggaagaaaatgatgt

SEQ ID NO: 26981 - DNA, 120 bp, synthetic construct
  source 1..120: mol_type = other DNA
cccccgacccccacaccaattgctattaagctaaatgagctgtatttggccaagcaagattacagaattaccttgcccatgactgaagttaaagtgctattagtggaagtgaaataaaat

SEQ ID NO: 26982 - DNA, 120 bp, synthetic construct
  source 1..120: mol_type = other DNA
cttatgaaaagtttctcatctatattgcttacttttttcttgaagagaaaacttaccaagaagtcatgctattagtttgtaattagttttcctaactgaactccattactgccaccacaa

SEQ ID NO: 26983 - DNA, 120 bp, synthetic construct
  source 1..120: mol_type = other DNA
aggggacacttggaatatttaatcattgtaatgggatgccttctaatgcccttgagtttgccattgttcaccttgtgtccttagagcctcactctggggactccatcattcaaataaaat

SEQ ID NO: 26984 - DNA, 120 bp, synthetic construct
  source 1..120: mol_type = other DNA
gctgtattgcataagacagtttctcaaccactggttttcttggcttcctttctctgtcttggtgtattccagataacctgtggctttttaaagaagtgacactcagaactgaatacaata

SEQ ID NO: 26985 - DNA, 120 bp, synthetic construct
  source 1..120: mol_type = other DNA
aggtagataatggtctgccttgatttcgcttagtctttcctgaaaatgtaaccatgaccctttgagagacctttcaagtcttatttttctatgagtaaatttgaagtatttcagatggca

SEQ ID NO: 26986 - DNA, 120 bp, synthetic construct
  source 1..120: mol_type = other DNA
acaatggtttgttcttcctaaattagctccatttttcatttttttcttagtggtttgaagaaaagcagcagcaatttgagaatctggatcagcaacttaggaaacttcatgtcagtgttg

SEQ ID NO: 26987 - DNA, 120 bp, synthetic construct
  source 1..120: mol_type = other DNA
aggctaatcccttggtctacaacccaggctattctctgttcacagccacccccttctctactgccttttgttttcatttttacttttgaaattcttttcctcttcatttcaggaccaatg

SEQ ID NO: 26988 - DNA, 120 bp, synthetic construct
  source 1..120: mol_type = other DNA
ctgttctctgctctagtagagtttattttcttctgcagaggaggaccctctccccagtgagtttggacagttcttagctattcatggtcaaaaaaaatcctagattttccaggattctct

SEQ ID NO: 26989 - DNA, 120 bp, synthetic construct
  source 1..120: mol_type = other DNA
gtaagattgtgtgctaagaagggttgaaatgggtcaaaaatttaatcagagtactcaggcttgactgactgctgctgccacatcaacaaccttacccttttattgcagttttggtaccct

SEQ ID NO: 26990 - DNA, 120 bp, synthetic construct
  source 1..120: mol_type = other DNA
cttctgatgccaggaggcgaacaagtctgtaacctaatgacagcaccttcctttactcagagacgcttagacaggagcattgacagatttactcaagatagaagagtatttatgaataac

SEQ ID NO: 26991 - DNA, 120 bp, synthetic construct
  source 1..120: mol_type = other DNA
cttaggatctaagacagggagaatcagaaaattcaatatttcaaacctaagcaattcctgtttataaaaatagcatctgcactgattggcagcttgcctgcctgcctgtccaccttcctt

SEQ ID NO: 26992 - DNA, 120 bp, synthetic construct
  source 1..120: mol_type = other DNA
tctgtgcagaagatgtaggaataataagtcatgggccttgccctcaaagggtttacagtctcttgaggtagctaagcatatccacaaatacagggatttgtatgatcaatgcactgtaag

SEQ ID NO: 26993 - DNA, 120 bp, synthetic construct
  source 1..120: mol_type = other DNA
attaccaggtgaagacacctcgctgtgttatctgagcagagggcaatgttctctattttgctggtcttacttcctttgattatgtttaatgtttgtagatcactttgctataaaactcac

SEQ ID NO: 26994 - DNA, 120 bp, synthetic construct
  source 1..120: mol_type = other DNA
ccttactcactaggctgcgttcatgggttagaatgaacaaaggggcttgtctgccttcatataaagaatggagtggtggtcctcatgcctataaatcttcttgaatcactttatattgct

SEQ ID NO: 26995 - DNA, 120 bp, synthetic construct
  source 1..120: mol_type = other DNA
gcttgcttgctctcataattattttttgtggattcgctgagcttcttgattctgtggattaatatcttcagttttggaaattctttacaattatgtcttcaaaacttgcttctggcccat

SEQ ID NO: 26996 - DNA, 120 bp, synthetic construct
  source 1..120: mol_type = other DNA
tgaatctgagatattacttctaagtcttctatcactgtagcctctgaaaacagaatgaccctgtccaccaagccagattccacgctgtttggcacctttttcatttcattctcatccaca

SEQ ID NO: 26997 - DNA, 120 bp, synthetic construct
  source 1..120: mol_type = other DNA
tttgaacccatttttgaaattactggaaccatcagggatccgaggacaattggttcacttcctagtatcaccattccagcctaagatattcctcccctaatggcaaacttttgagggtga

SEQ ID NO: 26998 - DNA, 120 bp, synthetic construct
  source 1..120: mol_type = other DNA
ttgcagctttgcggaagtgtgaattcagtgaattttccctagtgttatgtacattttgccataggagagatttaatattactaattaattttaactttggctttaacagtacattttaga

SEQ ID NO: 26999 - DNA, 120 bp, synthetic construct
  source 1..120: mol_type = other DNA
ggaaaggtagccaagactgcctaatacaaggaggcatatgtatttctatttccctcctagtggctgacacactacttttattagcattccataaagagaaggatcacagagacaaagaag

SEQ ID NO: 27000 - DNA, 120 bp, synthetic construct
  source 1..120: mol_type = other DNA
ctgagggattctcccagcaggctacatagagtggttaagagatgcaaatacacaaaggtgcctgagcactacagacatcagaatgagaagaattatcatattcctaaagaagttctagga

SEQ ID NO: 27001 - DNA, 120 bp, synthetic construct
  source 1..120: mol_type = other DNA
gagaagataaataaaaacaaaatcagtaccttgacccatcttcgtgggactgtagaattataaagacggaaagagtgttaaaaaagtaagcagaaagcaaatgcatgaaaaaaaggcaaa

SEQ ID NO: 27002 - DNA, 120 bp, synthetic construct
  source 1..120: mol_type = other DNA
aactcacaaatgctgctgatgagccaagcaagatgtgaattgaaagctaaccattataaagatcaatgtgacttcattggtgaataggcaaaagtattgtgcttaattttaagtcttttt

SEQ ID NO: 27003 - DNA, 120 bp, synthetic construct
  source 1..120: mol_type = other DNA
tccaggcaaagtgaaatccagtcaagaggtcctaagatgtaacgatgcttgctcacatttgagaaatgaccaagagaaagccaaggtagctggaattgaattaatgaacgattacaggaa

SEQ ID NO: 27004 - DNA, 120 bp, synthetic construct
  source 1..120: mol_type = other DNA
tctgcccttatgaagttcagtgatccccaaagtcatctatctatcttcctcttttgactcagcaacttcctgtccatcttttcttttctctacatttggcattagattgtgggtcacacc

SEQ ID NO: 27005 - DNA, 120 bp, synthetic construct
  source 1..120: mol_type = other DNA
cacttaaggtatcatgtaacttgtggaggaaatggcagttggaacaaagacttattgtagcataaaaaccagtatagatacctaactaaatgctgatctgtagctcggtgtggttctatt

SEQ ID NO: 27006 - DNA, 120 bp, synthetic construct
  source 1..120: mol_type = other DNA
tgagactcatatactttctctacaatgttgcctgtgagatcttgctaaaatataaattcaaccctcctatttctcaggttaaatttttttctctgggccaggtgcagtggctcacgccgg

SEQ ID NO: 27007 - DNA, 120 bp, synthetic construct
  source 1..120: mol_type = other DNA
aagtaaagtacagaaacttcattttaatagattaattaagcatcaagtaaccaaagaatttgctgctttcaagtgagtagtaaaattttgctcatcaatagtttcaattggcaaatggta

SEQ ID NO: 27008 - DNA, 120 bp, synthetic construct
  source 1..120: mol_type = other DNA
gaaatgctactgatttttgtctgttgattttgtaccctgcaactttacttcgtttatcagttctaacagttttttggtggaggctttagggttttctacacataagatcatgtcatcagc

SEQ ID NO: 27009 - DNA, 120 bp, synthetic construct
  source 1..120: mol_type = other DNA
agtgtaaacagttttcctgttaagaactgctgtcaggaaaaccaaatcccgcatgttcttacttataagtgggcgctaacaattgggtacacatggacctaaagataggaacaccagaca

SEQ ID NO: 27010 - DNA, 120 bp, synthetic construct
  source 1..120: mol_type = other DNA
taaaaatgttcgtttaagaaacataataaaaactacccacaaacccaccactagtagaaaaacactgttactaactggtgttcttgaactcggatttacattctgtatctacaagtataa

SEQ ID NO: 27011 - DNA, 120 bp, synthetic construct
  source 1..120: mol_type = other DNA
agttcaaaacctgtatccttgagcaagttaactgacctctctaaaccttaatttgttatttgtttaaggggaagaaaaaccctacctaacaacacttaagggaatgtgtgtgtgtgtgtg

SEQ ID NO: 27012 - DNA, 120 bp, synthetic construct
  source 1..120: mol_type = other DNA
ttaactgagttaaacactaaattccttgattttttacctcaggtaatgttgacaatttcccatcaggcagatagtctccagaataaaaaaataccggctgggcacggtggctcacgcctg

SEQ ID NO: 27013 - DNA, 120 bp, synthetic construct
  source 1..120: mol_type = other DNA
aacccacagtaaacatcacattcaatggtgaaagatggaaagcttttcctctaagatgaagaaaaaggcaaggatgtctgcattttcaacatactactgatagttctagccggagcaatt

SEQ ID NO: 27014 - DNA, 120 bp, synthetic construct
  source 1..120: mol_type = other DNA
taatgaaagctactcaaaaagtagctcttgctatatacaaaataaagtccaaatttttccctaaaggcctccagattccagctgggcatgatggctcacacctgtaccaacactttggga

SEQ ID NO: 27015 - DNA, 120 bp, synthetic construct
  source 1..120: mol_type = other DNA
ctctacaatagtatatcaggcaaaaatatcctttaagcaccaaggagaatcacagaccttcccacaaacaaaagctgagggatgtcatgagtgccagacctgtcctataagaaattccaa

SEQ ID NO: 27016 - DNA, 120 bp, synthetic construct
  source 1..120: mol_type = other DNA
agcagacaatgggagctgacttttctccctcaaggcccaaatatgcagataggggtaataaatgggaagatgacattagaagagatgaagagaaagtcaaaagaagagggagtatgtact

SEQ ID NO: 27017 - DNA, 120 bp, synthetic construct
  source 1..120: mol_type = other DNA
agcagctggtgttaattacataacacaccccctcagaagggaaagaaataccagttaacgtatttccactgaagaagtcataaggaaatgggaaacagtcttttgacaggccaagtcatc

SEQ ID NO: 27018 - DNA, 120 bp, synthetic construct
  source 1..120: mol_type = other DNA
cagaaggattttaagtcaatcagggatgtgacatgatttgcatgctaaagggtcactccggctgttgtgcaaataacggactggtgggagagagggaaaaaatgcagggggaccatttag

SEQ ID NO: 27019 - DNA, 120 bp, synthetic construct
  source 1..120: mol_type = other DNA
gtggtttctaatcgtattcagtgagatctcagaatagttctctcaagtacacagaccccgtgtcctcgtgaaaataaataaaacacatcttgtgacaacttcagtcctctttgcagaggg

SEQ ID NO: 27020 - DNA, 120 bp, synthetic construct
  source 1..120: mol_type = other DNA
tgcgactgtaaaggacccataggatggactttgtttgtcaggctgccatgtgactgtaaaggtcccataggatggactttatgtttgtcatgctgccatgcgactgtaaaggacccatag

SEQ ID NO: 27021 - DNA, 120 bp, synthetic construct
  source 1..120: mol_type = other DNA
tgggagatagagtgagaccctgtctcaaaaaaaaaaaatcggccttatagcaaacattgaactctcaaccgactaaaaaatgtacaaactggccagggtcagtggcacatgtctgtaatc

SEQ ID NO: 27022 - DNA, 120 bp, synthetic construct
  source 1..120: mol_type = other DNA
aacaccagcacattcccactgggtttcctgaccctccaaaagcccttcacagtaaccacagttggtatcacagtaaccaacttggctgccaatgctgggaatcttacctcctccttaaga

SEQ ID NO: 27023 - DNA, 120 bp, synthetic construct
  source 1..120: mol_type = other DNA
tcaaactctgctgccctccaggaggaggggatgcctcctctgatgtgacgttgtctgctttggccttccaaagctcaatgtcatcaaatgtcctttccctagattcaaaaatatgtcctt

SEQ ID NO: 27024 - DNA, 120 bp, synthetic construct
  source 1..120: mol_type = other DNA
ggacaaggatctgagcaaacaaatctggctttttggtgacaactatgcttagcctatttgaacaagagttatggctccattggaaagcaggacacttgggtttagcatcataactagagt

SEQ ID NO: 27025 - DNA, 120 bp, synthetic construct
  source 1..120: mol_type = other DNA
cagacagaacccatgctctttattagattatgttgcctatgtttaaaagtgttcaaattcagtcttttacattgaaaataacttttttttttttttttaattatactctaagttttaggg

SEQ ID NO: 27026 - DNA, 120 bp, synthetic construct
  source 1..120: mol_type = other DNA
tggtcacgctcagacagagctgaccagaccagaccgtttgccttttcaagtttcctagtcctgctacaagatgagcttcttccgtggtttccttttggaaactcctccttccaacaagca

SEQ ID NO: 27027 - DNA, 120 bp, synthetic construct
  source 1..120: mol_type = other DNA
aggttgccccaaaccaattaaatcctgggtccagtgtggaatttccatgaagatcttaaattccctcaagaagtaagtggttggtggttgtttatgttttccgtgtcttgctgctcaaaa

SEQ ID NO: 27028 - DNA, 120 bp, synthetic construct
  source 1..120: mol_type = other DNA
gccccaaatgattctcccatctcagcctcccagaatgctgggatttcagtcatgaaccactgcgccctgcctaatttttaaatttttcattatcccaaaaagaaacttttgtccattagt

SEQ ID NO: 27029 - DNA, 120 bp, synthetic construct
  source 1..120: mol_type = other DNA
aggcgtgagccaccatgcccagccaaaatcatttttttctttttttttgagatggagtcgcactcttgcttgctttgtttccagtgagaaacctgttgttatcctttgttcctctctaca

SEQ ID NO: 27030 - DNA, 120 bp, synthetic construct
  source 1..120: mol_type = other DNA
ttggcaccaggattccaacccaggctgcctggcaccagaatctgccatcttaatttcatcttaactctttctgaacaaccttgcataacaaaattttgccctttttttgatattatcccc

SEQ ID NO: 27031 - DNA, 120 bp, synthetic construct
  source 1..120: mol_type = other DNA
ggcattgaaaaacccttgaaggatacacaccaaatttaatagtggctatttctgggatgtgggattgggagaaggctttcagttccgaatttgatgttggtgatttctttgtacatcact

SEQ ID NO: 27032 - DNA, 120 bp, synthetic construct
  source 1..120: mol_type = other DNA
agggttggccaatttgccttaccaggaaagatgaaaagaagaacaaaaatcattaccatacagcagcagtcctcaacagcagcccctttcactcctgaaaattattaaggacctcgaaga

SEQ ID NO: 27033 - DNA, 120 bp, synthetic construct
  source 1..120: mol_type = other DNA
ttgcggggggagggagcaattttggttgcttgtgcatttaaatgggtgtggcgctaagtatatcttgtttaccttatctttctgtggaaaagttttgatgtctaggtttgtcacatcatg

SEQ ID NO: 27034 - DNA, 120 bp, synthetic construct
  source 1..120: mol_type = other DNA
taaatccaatctaaatatcatttctttaaagttttcaaaatgattttgaatatcgtcggagagaatagataagaatacccatgaaaaaatatgaaaaagcggataacttgttaggtgaaa

SEQ ID NO: 27035 - DNA, 120 bp, synthetic construct
  source 1..120: mol_type = other DNA
aataagaaagcttagttaacagtggcataaattcatggggatttactttgtgacacaagaaatcagaagaaaggcagtcacaatgttgcttcagctactccatagtgccactggggaccc

SEQ ID NO: 27036 - DNA, 120 bp, synthetic construct
  source 1..120: mol_type = other DNA
cagacacgtaacagaggaccagagcatgttgccttgcaggtcactgaaaggactttaacttttcctcttaatcttaacaagatggagtgtcttgaacaggggactacataatctgattta

SEQ ID NO: 27037 - DNA, 120 bp, synthetic construct
  source 1..120: mol_type = other DNA
gctcatgggcgactttgaggggtacaagacttcataataggaagtaactacagatgtggaggaaatagcaagagaactagaagtgcagcctgaagatgtggctgaattactataatttct

SEQ ID NO: 27038 - DNA, 120 bp, synthetic construct
  source 1..120: mol_type = other DNA
tacaaaacactccatttattaagaaaggagctagcatcacacacaactaccctacctctgagctgttttcattcacatctctgggcaaataatttgctgtttgtctcctccccatctctg

SEQ ID NO: 27039 - DNA, 120 bp, synthetic construct
  source 1..120: mol_type = other DNA
tgagttctcatcgtggcctctccactaattaacaatatgatctcgaaggcattttacctccctgagtctgtttctctatctgcagattgggactagtgacactcctctgtattatttttt

SEQ ID NO: 27040 - DNA, 120 bp, synthetic construct
  source 1..120: mol_type = other DNA
agggactcaatgaatggtaactataatattgccactgacttaagttgtcacatcagcattagcacatggccagggcacacatacctgtctgctttgtaatatagtcagaagtgtacacca

SEQ ID NO: 27041 - DNA, 120 bp, synthetic construct
  source 1..120: mol_type = other DNA
attctatgctgtgaaataaaaatttccttagagctcgtaagactgtagataggcttagattttgaaagggaagataaaggaagtgcagtaatatacattctaggtgatgtggggaacaaa

SEQ ID NO: 27042 - DNA, 120 bp, synthetic construct
  source 1..120: mol_type = other DNA
aggaaaaaagcaggcccacgtcagtgggtgggttcaagggagtaagcatggataatcattttctacttctcctctaaatactgcacaatctaaccttcattcccttcttctaacatcttt

SEQ ID NO: 27043 - DNA, 120 bp, synthetic construct
  source 1..120: mol_type = other DNA
aaaataaaataaaataaaataaaatattacctccctagtgtgcagagcatagtgggctgctgagaaagccacccaggagaggatcacaggcaccacagaaggcctgcataacagggagga

SEQ ID NO: 27044 - DNA, 120 bp, synthetic construct
  source 1..120: mol_type = other DNA
acattttattagacctactataggacaactcattaagtgcaaacaaaaataagttattgtggaggaaaggggggaccactggctcctgccaaataaggtagtagaggttaagacgggctg

SEQ ID NO: 27045 - DNA, 120 bp, synthetic construct
  source 1..120: mol_type = other DNA
aaccactgtctacattaacaaagaaaaaacgacagaagatccaaataagtacagtcagagatgacaaaggtgacattacaactgatctcacagaagtagaatgattctgagagaccctta

SEQ ID NO: 27046 - DNA, 120 bp, synthetic construct
  source 1..120: mol_type = other DNA
gagccagtgttgtcttggctgtaatgaagaacttgtagcaaagatactgttttgactccttccctttttccagtaatgattaaatattttccttgtagagttctggagttgagaaaccaa

SEQ ID NO: 27047 - DNA, 120 bp, synthetic construct
  source 1..120: mol_type = other DNA
agacacactccagccatggttccatttccaagatggtatagcacagtagttgcatgggctgtagagggcaggtcacagtctcgtccccttcttggagggagcacagcaatgtggattcta

SEQ ID NO: 27048 - DNA, 120 bp, synthetic construct
  source 1..120: mol_type = other DNA
agcgatttttgaccttggaagtataaaattgtgaaggtagaatttggaagtgacgttcgttatcatgtggtctaggggttgacaaattatagttctcaggtcaagtctagcctgccactt

SEQ ID NO: 27049 - DNA, 120 bp, synthetic construct
  source 1..120: mol_type = other DNA
gcgcacacacacatttttgcataggtgtttgcctgatcaaagtgggatcattgttcacaaatgttcacaaacctgcatcatcttattcatcagtaactcatggaaatccttgcaagcctt

SEQ ID NO: 27050 - DNA, 120 bp, synthetic construct
  source 1..120: mol_type = other DNA
cgctatcagaaatattaacctttttgtcaataacgcagtacccatgtgtcctttttaattgcttcattccttgcccacctcctttggctgtgagcagcttaaacagccaaagagcattgt

SEQ ID NO: 27051 - DNA, 120 bp, synthetic construct
  source 1..120: mol_type = other DNA
ttttatgtgctttgtgatgttttggttgtgagctcatgatcataggaagatttttgtttgtggggatgctctgaggcctggatgtgagttcctccaaagaggatttgtttctgcatctac

SEQ ID NO: 27052 - DNA, 120 bp, synthetic construct
  source 1..120: mol_type = other DNA
tggattttgcttatcacatgcattggccagtgggatgctagcaaatgggccgcaaacagatgtttgaaatgtgcttgcatggttgtatcatgttctgctattgtcatgaaaagaacatca

SEQ ID NO: 27053 - DNA, 120 bp, synthetic construct
  source 1..120: mol_type = other DNA
aaaaaaaaaaaaagaaaagaaaagaacatcactgctagccttctggtccaagaaggatgagacacccacggagaagaaacaagtcagggcttcatgtgcacatggtttattaaggggtgc

SEQ ID NO: 27054 - DNA, 120 bp, synthetic construct
  source 1..120: mol_type = other DNA
cttgaaggttgaggacaattttttttcttgctttatgttttctcatcactacaaaaatacacaaacattatttttaaaaaatcaaatgtgttcctatttctccacatcctctccagcacc

SEQ ID NO: 27055 - DNA, 120 bp, synthetic construct
  source 1..120: mol_type = other DNA
aagaatatggttttaacaggtaaaaatgatacaggctaagggacgggggagtggagaaggagagaagagaaaaagctacagggtgaaaagtagcatgaacaaaaacagggaggaaggaaa

SEQ ID NO: 27056 - DNA, 120 bp, synthetic construct
  source 1..120: mol_type = other DNA
ataggatgtatgtatgtcgtgtgtgtgtagtatagggtgtggggtgtgtgtgtttgtgctgtggatgtgtggtgtatggggcatgttgtgtgtttatgatgtatgtgggatgtgtgtata

SEQ ID NO: 27057 - DNA, 120 bp, synthetic construct
  source 1..120: mol_type = other DNA
gtatgtgtgtgtagtgtgggaggtgcagtgtgtggtgtgtttgaggtgtgtgtgagggtggtgtgtacagtataaggtgtgtggtgtgtggtatgtggggtgtgtatgagatgtgtgggt

SEQ ID NO: 27058 - DNA, 120 bp, synthetic construct
  source 1..120: mol_type = other DNA
tgttgatgcacaggggactcagagccagattctccttgtcacccccctggaattcagaggcgcttcccttatacagcatcatatgtagcaggacgtggcagaatgttaaggaaggattcc

SEQ ID NO: 27059 - DNA, 120 bp, synthetic construct
  source 1..120: mol_type = other DNA
aaaaaagagaaagactactaagtctgaagtcagatggacgcctacgttcaaattctaaatctaccacttcacaactctttgatcacgagtagagcccctcacctccctagagctcctttt

SEQ ID NO: 27060 - DNA, 120 bp, synthetic construct
  source 1..120: mol_type = other DNA
ggatttacacaaagatgaaatgggactggaaaagaaagagagagctttttaaaattcattgctcgaaaaatgtttcctcttgaatcctcaattttttttgcggggggggggggggggggg

SEQ ID NO: 27061 - DNA, 120 bp, synthetic construct
  source 1..120: mol_type = other DNA
aatccaatcaaccttggattaactagttggttaaatttgtttctcacaggagatacaggcaaacaattctgaaattgctttatatgtgtatggggataaataaataagtaaatggacact

SEQ ID NO: 27062 - DNA, 120 bp, synthetic construct
  source 1..120: mol_type = other DNA
agttataaaattagggcagctaacatctaatttgaccatggcagattttgacagtttcatgactatttggtattaagaaaataggagttagtggaggctgggcgcggtggctcactcctg

SEQ ID NO: 27063 - DNA, 120 bp, synthetic construct
  source 1..120: mol_type = other DNA
aaattcgaaggcaagttttgctgactagaaaaacaagccaataatttgaaatggtgtgcccgaatggatacgacccagggggccgacatctactgctgtttattataattctagcagctt

SEQ ID NO: 27064 - DNA, 120 bp, synthetic construct
  source 1..120: mol_type = other DNA
gtggatgtaaatgacaatgctccacagttgactctcacttccctgtctctccctattccagaggacgcccaaccaggtaccgtcatcacattgattagcgtgtttgaccgagattttgga

SEQ ID NO: 27065 - DNA, 120 bp, synthetic construct
  source 1..120: mol_type = other DNA
taatttggaggcaattttcactaattagaagaagactgagtatttgaaatgttatactcaagtcgaggagatccagagggtcagcctctactgctctcgcttctgatcctcgcaatgtgg

SEQ ID NO: 27066 - DNA, 120 bp, synthetic construct
  source 1..120: mol_type = other DNA
tggtcattgtacacttcttgtggaagttgtggatgtaaatgacaatgctccacagttgactatcaaaacgctctcggttcctgtaaaagaggacgcacaactggggacagttattgccct

SEQ ID NO: 27067 - DNA, 120 bp, synthetic construct
  source 1..120: mol_type = other DNA
aaaaaaaaaaagaatggatgagaaatcattcaagacaaaagcaaaccagatgtgtaaagatcctgaggcaaaaacaactccaaggagccaggtatggtggcctgtagtcccagccacttg

SEQ ID NO: 27068 - DNA, 120 bp, synthetic construct
  source 1..120: mol_type = other DNA
ttttaagacagaaactggatttcgaatccatccagacatacacagtaaatattcaggcgacagatggtgggggcctatctggaacttgtgtggtatttgtccaagtgatggatttgaatg

SEQ ID NO: 27069 - DNA, 120 bp, synthetic construct
  source 1..120: mol_type = other DNA
tggacgtgagcggcaccgggaccctgtcccagagctaccagtacgaggtgtgtctgactggaggctccgggacaaatgagttcaagttcctgaagccaattatccccaacttcgttgctc

SEQ ID NO: 27070 - DNA, 120 bp, synthetic construct
  source 1..120: mol_type = other DNA
tctccatcaacgcagacaacggccacctgttcgccctcaggtcgctggactacgaggccctgcaggcgttcgagttccgcgtgggcgcctcagaccgcggttctccggctttgagcagcg

SEQ ID NO: 27071 - DNA, 120 bp, synthetic construct
  source 1..120: mol_type = other DNA
tacctaaatatttcctttttgcccaaaactcagttagcattgttgaaagactaacgcaatttctccttcgggcagttgtctgctcagtaacgtccggcgatattaaccgtggtgttgtaa

SEQ ID NO: 27072 - DNA, 120 bp, synthetic construct
  source 1..120: mol_type = other DNA
aaaacaatattgagaactatataatcagccccaactcctattttcgggtcctcacccgcaaacgcagtgatggcaggaaatacccagagctggtgctggacaaagcgctggaccgagagg

SEQ ID NO: 27073 - DNA, 120 bp, synthetic construct
  source 1..120: mol_type = other DNA
ctgagatagtagttgctgttttcagcgtttcagatcctgactccggaaacaatgggaagacgatttcctccatccaggaagaccttccctttcttctaaaaccttcagtcaagaactttt

SEQ ID NO: 27074 - DNA, 120 bp, synthetic construct
  source 1..120: mol_type = other DNA
tctgaaaccgtctgttgacaatttttacatcctaatgactgaaggtgcactggacagagagagcaaagctgagtacaacatcaccatcaccgtcactgacttggggacacccaggctgaa

SEQ ID NO: 27075 - DNA, 120 bp, synthetic construct
  source 1..120: mol_type = other DNA
cttacaaaataaatatacaggcaatggacggtggaggcctttctgcaagatgtagggttttagtggaagtattggacaccaatgacaatccccctgaactgatcgtatcatcattttcca

SEQ ID NO: 27076 - DNA, 120 bp, synthetic construct
  source 1..120: mol_type = other DNA
ccagccctacctgcctctcccggaggcggccccggcccaggcccaggccgaggccgacttgctcaccgtctacctggtggtggcgttggcctcggtgtcttcgctcttcctcctctcggt

SEQ ID NO: 27077 - DNA, 120 bp, synthetic construct
  source 1..120: mol_type = other DNA
ttgtctgctcactaaagtccggcgatattaacggtggtgttgtaaccttacatagtctcggggtgcatacaggcagagttgggaatattacatccattatcattccacaaaatgtaagat

SEQ ID NO: 27078 - DNA, 120 bp, synthetic construct
  source 1..120: mol_type = other DNA
aacgcagtgatggcaggaaatacccagagctggtgctggacaaagcgctggaccgagaggaagaagctgagctcaggttaacactcacagcactggatggtggctctccgcccagatctg

SEQ ID NO: 27079 - DNA, 120 bp, synthetic construct
  source 1..120: mol_type = other DNA
gccagcctttacaccgcttcctcctcggaaaaagaagaattttttcttgaactggaactgcaactaaagtccgttcggagatccaaaaatctgcaatacagaggttatttgtaacccggc

SEQ ID NO: 27080 - DNA, 120 bp, synthetic construct
  source 1..120: mol_type = other DNA
cttggactttggagctccacccctaagcagcactgcacagatacacgttctagtgactgatgccaatgataatgctccagtgttcagtcaagacgtatacagggtgagcctttcagaaaa

SEQ ID NO: 27081 - DNA, 120 bp, synthetic construct
  source 1..120: mol_type = other DNA
tttttattaagtatatggacgtaaaaacttggcttgttaagttaggcacacaaaaacaattactgcactggttaacttgaagccgcagaggctgtagtttcctagtgctgactctgggcg

SEQ ID NO: 27082 - DNA, 120 bp, synthetic construct
  source 1..120: mol_type = other DNA
acgtgccaccaggcaccactgtgttgcaagtgtcagccactgaccaagacgagggcatcaactcagaaattacttattccttctacagaaccgggcaaatctttagtctgaattcaaaga

SEQ ID NO: 27083 - DNA, 120 bp, synthetic construct
  source 1..120: mol_type = other DNA
gagccactcttgatagctgaagactcagctatcattttaggcaaatgtgacccgacaagtaatcaggtgagatttatttctctgcctcctaattgttggtgtcttggcacaagtctttta

SEQ ID NO: 27084 - DNA, 120 bp, synthetic construct
  source 1..120: mol_type = other DNA
attatgaatcatttcatgttttttcaacactcggagtttctaaaagtctcacttaggtccaagtgctaggctttgtgctaggtgcttcagtaggaagcaggtggagtcgctgcctcacag

SEQ ID NO: 27085 - DNA, 120 bp, synthetic construct
  source 1..120: mol_type = other DNA
gcgaaactccgtctcaaaaaaaaaaaaaaaaaaaaaagattgactggtgaagaaatagacagaaactcttaccttggaccagtttggcctccggagctgcacctctggcttataaagctt

SEQ ID NO: 27086 - DNA, 120 bp, synthetic construct
  source 1..120: mol_type = other DNA
cagggactactgggactggaaggaacctaataaactacttaatccaaacttctcatgttacaaatggaggaactgagaggagtcagagagatgacatgatcacctaaagtcacacggctt

SEQ ID NO: 27087 - DNA, 120 bp, synthetic construct
  source 1..120: mol_type = other DNA
acaacaacaaccaaaaaaactcacaaagaattatgggggccacttgcacagctgaccatttaagcccagaaaacctcccacacagaataattctgcttaaaacttctgggaatgtgctgc

SEQ ID NO: 27088 - DNA, 120 bp, synthetic construct
  source 1..120: mol_type = other DNA
tctgtccattcaccagtctgtgtatcctctgacatgttccccacaaaaaaaaccgtagcatttcagccaggatatggaggacaaagtggcatataaagatgtctacattataacaagaga

SEQ ID NO: 27089 - DNA, 120 bp, synthetic construct
  source 1..120: mol_type = other DNA
aatgttctaaactccagctaccatgtagttgactttgtctatttattcatcagaatcaaaggaggattggtacaagcagaggaaatagacacaaagagcaagtatgaggggcagagtggg

SEQ ID NO: 27090 - DNA, 120 bp, synthetic construct
  source 1..120: mol_type = other DNA
cagttgctgaggtgaaagaaacctttctcccagcttcttccagagctgccctgctttcatcttgctggtgtactggggtttcacattcaatttttatctgtctgtctatttttgataaaa

SEQ ID NO: 27091 - DNA, 120 bp, synthetic construct
  source 1..120: mol_type = other DNA
ggtagagatgagtattctgcaaaaataagggctggtggatagaggataagggagaagggagtgattttagatacctggagcaggaaaggtctctctaaagaggtgacatttgagaagaaa

SEQ ID NO: 27092 - DNA, 120 bp, synthetic construct
  source 1..120: mol_type = other DNA
agacccaggtgaggcagggctgaaaactgcccttgggctgacttttgataggccatgccttgccactttacaagttctttttgcatttactagtatttaagagtaaccttgagattggga

SEQ ID NO: 27093 - DNA, 120 bp, synthetic construct
  source 1..120: mol_type = other DNA
ttagttagcagaaaatgcagtacaacatgcatgttacacaagtttataggctgcctacatattagatattgagaattcctgggtaatttcagtctgtaagtttgtttttctcaaccacat

SEQ ID NO: 27094 - DNA, 120 bp, synthetic construct
  source 1..120: mol_type = other DNA
cttcttcctcttcttcttcttcatagctgcgaattgttaggcattgatcactaatgtgagtttccaggtttccctctctgttgggcccaagtactgtgataaactaattcacactgagtt

SEQ ID NO: 27095 - DNA, 120 bp, synthetic construct
  source 1..120: mol_type = other DNA
agagtctacccaagagtgtatttgactcagtcagaaatttcaagtctcaggcctgagtctgtatgtgtgtaacatacttcatgttgataaggacaggtggcaggaaaatactgggtagaa

SEQ ID NO: 27096 - DNA, 120 bp, synthetic construct
  source 1..120: mol_type = other DNA
gcttaataagcaaggaaaaaagacttttgaatcagaaagtcctaaaaacaagcccaggcccagtcaattcccagtgatgtaaccttgaactggttacttagcctctctgtgcctcagttt

SEQ ID NO: 27097 - DNA, 120 bp, synthetic construct
  source 1..120: mol_type = other DNA
tatcacgctgaatggggaaaaaactgaaagcctttcctttaagatttggaacacgacaaagatgcccactgtcaccactgttgctcaacatagtactgaaagtcctagatagagcaatca

SEQ ID NO: 27098 - DNA, 120 bp, synthetic construct
  source 1..120: mol_type = other DNA
ggcccgctgtgactattttcaaaccaaagattcctagtcactggattacaagccccatgagagcagagaccatacatgtccatcatgactatatgtatggaatcctttttaaataagtgg

SEQ ID NO: 27099 - DNA, 120 bp, synthetic construct
  source 1..120: mol_type = other DNA
tcactgtctattttggccacaaactaacccttcacttctcaaaccctcagtttattcttctataacttgggaatggttctacttgcttcttctatcttacagagttatcatgaccctgag

SEQ ID NO: 27100 - DNA, 120 bp, synthetic construct
  source 1..120: mol_type = other DNA
aaccacagatagggcagaagacctgcatgcccggatccattctgtgcaatttagttttttgaaaacaaatttaagattccatgcagaaagcaccctgaacactgaaagtatgcacttcct

SEQ ID NO: 27101 - DNA, 120 bp, synthetic construct
  source 1..120: mol_type = other DNA
aaagaaggccaaacaccattttatatttaacagtgcttcctgtatgattcttataccagataagctaagtttcacctttatattagcaagttgttaaacttaattttaataaaactttgt

SEQ ID NO: 27102 - DNA, 120 bp, synthetic construct
  source 1..120: mol_type = other DNA
cttccctgtcctggaaggctcaacccctcaaaccagggggtggcttgccttgctggtcccgggaggttgacctgtttcccccactctgatggtcctttacacacttcccactcgttctgt

SEQ ID NO: 27103 - DNA, 120 bp, synthetic construct
  source 1..120: mol_type = other DNA
agagatcatttagtctactccttctttttttatgtgaaggaaaatttagatccaccttggaaaaggacttagagtctactatgtgttagaggctgagttcaaggcagaacccaggcctcc

SEQ ID NO: 27104 - DNA, 120 bp, synthetic construct
  source 1..120: mol_type = other DNA
aattgaccaaattttaaagggaaatagacaagaccatagtcgtagtaggagttttttcctaaaacattcatctctgagtaaaacatatccctgcaagatataacatacatcatatcatct

SEQ ID NO: 27105 - DNA, 120 bp, synthetic construct
  source 1..120: mol_type = other DNA
tttcaggcgtgagccagcatgcccgacatggatgacttttaagagaaaggacttttgtatctctttcaagtcaagtggtgtgtttgggagatgtagtttggctttcctactttaaacaaa

SEQ ID NO: 27106 - DNA, 120 bp, synthetic construct
  source 1..120: mol_type = other DNA
tgctgtggcttacactgatagagagtactcatctgtttattctcccttccaaaaagtatttttgaggatctgggttagagcagtcaagcaatagccaaagtctgccgtcagcttataaac

SEQ ID NO: 27107 - DNA, 120 bp, synthetic construct
  source 1..120: mol_type = other DNA
gtcctactagaaatcttttatatcaggttgtttgataatatactctgttgtttctgttttctatggtgttaattcctgtttctttatgtttgttcctgttcattttacaatggggttgag

SEQ ID NO: 27108 - DNA, 120 bp, synthetic construct
  source 1..120: mol_type = other DNA
ggtgaatatatgctcatgattgttatactttcttgttcttgttcttgtcattttttacttcatatattgtccttctttgtcacttatgatacatttttggactcaattctaatttttaag

SEQ ID NO: 27109 - DNA, 120 bp, synthetic construct
  source 1..120: mol_type = other DNA
aggctttcttgggctgccctggaaactcccaaactctctatgaaaaaaaccatcaactgctaaacaactgacttagcaaatgtattaccagagcatacgctgtttgtaagttgtcaacag

SEQ ID NO: 27110 - DNA, 120 bp, synthetic construct
  source 1..120: mol_type = other DNA
gttcctctgttaatttgctttggattatggcctctagcccagcagcccttttaaaatgagcccaatacagagtctcctttggtgactgatgctgattaggtctccaataattattcttta

SEQ ID NO: 27111 - DNA, 120 bp, synthetic construct
  source 1..120: mol_type = other DNA
tttatattaaaaagaagaaacacaaaagtgtccagtagcacctaccacacacccactcctaatctgggccatgtaaaaactgtggagatgatgagtcctttgcaaggcatttccggggag

SEQ ID NO: 27112 - DNA, 120 bp, synthetic construct
  source 1..120: mol_type = other DNA
ggatcattggaagccagggcatttcagaacaattctaatatgatgttgtccttccaataaaacattgctcatcacaactatctgagaaaaagagtgagtggaggccttcttcagccctca

SEQ ID NO: 27113 - DNA, 120 bp, synthetic construct
  source 1..120: mol_type = other DNA
tttacagtgattaagaagcacacatagtaattccacaaatgttgctaggcaacaagggccacgtattagctcaatgaatggattctgggcatctgcacgaaggagaaatatgaggagctt

SEQ ID NO: 27114 - DNA, 120 bp, synthetic construct
  source 1..120: mol_type = other DNA
agtcatcattaaggaacagggcagaattatcctttcacccatcatcttaagagctgtaggggcctaatcatcttgtttaacccatgcactttacagttgggaaccaaggtatacgtgaaa

SEQ ID NO: 27115 - DNA, 120 bp, synthetic construct
  source 1..120: mol_type = other DNA
tagacacagagaggaccagaaagcgttccattctttgtgttgccttcatagtcagcacacctcattaactcacactctgatattatatgagtcttctcaagtggccattaaatgacaagc

SEQ ID NO: 27116 - DNA, 120 bp, synthetic construct
  source 1..120: mol_type = other DNA
aacagccatagcactcagcaaaattcactaactaccctcaacagcttgatacaatggagtgccaaaacctcagcacagaatttctcagtgtggttctctggtctttagtagaaattcctt

SEQ ID NO: 27117 - DNA, 120 bp, synthetic construct
  source 1..120: mol_type = other DNA
atcctcacatcttgccttctttggtcctctctccccatgagaaccacaccacccagggcctctagcttcccaagatggggacacttggaagtagagatttaaaaactgtctttgtaacac

SEQ ID NO: 27118 - DNA, 120 bp, synthetic construct
  source 1..120: mol_type = other DNA
gcaaatgtcaatttctgcagaatgggtagtacagaatattggtgctgagagggaatttttttgctgtaggactccttgtcttccctctgcaaatagtcttgcacaaaagctccttgagta

SEQ ID NO: 27119 - DNA, 120 bp, synthetic construct
  source 1..120: mol_type = other DNA
ttgcgctctcttgtttttgtacacggtcctataccctttacaagacactcattttgtttcttgaacgcatgtttattgagcacctactatgtgccaggcattatgctgggcatttgggat

SEQ ID NO: 27120 - DNA, 120 bp, synthetic construct
  source 1..120: mol_type = other DNA
ttatattttaccacaatttaaaaacatactgataaaaggaggcaggggatagcagagaatgataagtgctaatcgagggaattccagcagggtgctaggtaggccagagacgggatggcc

SEQ ID NO: 27121 - DNA, 120 bp, synthetic construct
  source 1..120: mol_type = other DNA
cataatgcctgcacatacttgtgaatagatgcatgagttagagtgcagggacaagagtgggggccagtttcttcaggctgctttctctctgctttctcagagactaccccgtcctactgc

SEQ ID NO: 27122 - DNA, 120 bp, synthetic construct
  source 1..120: mol_type = other DNA
acgtggtaggatctatggcattttcttcaaagtaatgcttgatggggaagggtgagtgagataatacatgagatgaaaagattggtcacaagttgttaatggttggagctgcctggttct

SEQ ID NO: 27123 - DNA, 120 bp, synthetic construct
  source 1..120: mol_type = other DNA
taaataagcactgagaatcagtgaatatcgatatctaacggggcccaggtggcatggttcagccacctctccactaagaagccatttgaattccaggcaactttctctgtggacctgagg

SEQ ID NO: 27124 - DNA, 120 bp, synthetic construct
  source 1..120: mol_type = other DNA
gtgttttttgtttgtttgtttgtttgtttgtatattacgcagtctgtggtattctgttaaagcggcacaaaacggactaaaacagacccattgggaactgcaaggatgaggctgcaccct

SEQ ID NO: 27125 - DNA, 120 bp, synthetic construct
  source 1..120: mol_type = other DNA
gcactctataaataaattacactcagtgcaattctcaggggagttcgtagttaagtttagcatctgcttttcttcctctttatgcatcttgaacgcctgtcccctggttctggtagagtg

SEQ ID NO: 27126 - DNA, 120 bp, synthetic construct
  source 1..120: mol_type = other DNA
cactgtgccctgcctttatcctatttcactagtttttatactaataccctattctggttccagaatccaatccaggataccacaatgggcatttagttttcacgcctccttaatctcctg

SEQ ID NO: 27127 - DNA, 120 bp, synthetic construct
  source 1..120: mol_type = other DNA
actgtttccggccctggaggagaatgagggaggagagggttttctatgactgtgttagcttttattattagcaagagggctccttttgtaatttgtgcatgaaattcatgtcatttcctg

SEQ ID NO: 27128 - DNA, 120 bp, synthetic construct
  source 1..120: mol_type = other DNA
aaaaattggtaaattagacttcactgaaattagaaacttgagttcttcaacacacactgctgagaaaaggaaaaggcaaggcacagactgggagtaaatatttgcaaaacatatattcaa

SEQ ID NO: 27129 - DNA, 120 bp, synthetic construct
  source 1..120: mol_type = other DNA
aggcatactttaggaagttaatgttagaagggaagccaagatttttttgtccaactgtctcattgtagataagaaaatagagactcagggagggaaaggggctggcctaaggtcagaaac

SEQ ID NO: 27130 - DNA, 120 bp, synthetic construct
  source 1..120: mol_type = other DNA
aatgagtattctcctagtagttaaagatgttcttttgcctgtgtcaagagtttgactgagcaacttgctgcgcttcctgagccattacctctcaccatgaccatcagttgtgtttgattg

SEQ ID NO: 27131 - DNA, 120 bp, synthetic construct
  source 1..120: mol_type = other DNA
aaacatggtggcttgctttcttagatttcctggctgtgtttctctctcctacttttatctgaaattcctctttcctttgtctccattgttcctgtcctgctcagtttggacttacctctt

SEQ ID NO: 27132 - DNA, 120 bp, synthetic construct
  source 1..120: mol_type = other DNA
caacattcaaggggaagagacagtagagcagacaggtctggataaacagtgtgcacatctgagtaacaatttaggatatccttaagtttataaagatggcaaaagaatattaaatcgcat

SEQ ID NO: 27133 - DNA, 120 bp, synthetic construct
  source 1..120: mol_type = other DNA
tgtgcttcctccttcatgtggtatcagaaggacactaaaagcagcctggctcaatatatctataaatgctgtgtcctttgagccctgacatatttcagaaatgtgagactgtcagaacca

SEQ ID NO: 27134 - DNA, 120 bp, synthetic construct
  source 1..120: mol_type = other DNA
cactactagttgatcaggatgggtatccaagatacacacatttgttctttctggaaaaagccaattccaaccccagtttataaattaatgcccaggtctcttatgttcttggagcagcgc

SEQ ID NO: 27135 - DNA, 120 bp, synthetic construct
  source 1..120: mol_type = other DNA
tcacgcatttacagtctatatcaggagtccatttgtatcaataaccagagggtaattgttttagaccttgtgggccataccatgcctgttgcaactactcaactcttgtagcatgaaagc

SEQ ID NO: 27136 - DNA, 120 bp, synthetic construct
  source 1..120: mol_type = other DNA
acaaagagacagagagacagacagacacaaggaggagtgtatattgagcttcttagctgtaggtacttggtatgtggggcagtatgactgataccattgtggaagaaatccgtaaatttt

SEQ ID NO: 27137 - DNA, 120 bp, synthetic construct
  source 1..120: mol_type = other DNA
atgaataaacttggactaatatctccccaacatttacattactgtgtttacattttactgcttctgaggcttcctagaaagccaaaggcaaggccaggcacagtggctcatgcctgtaat

SEQ ID NO: 27138 - DNA, 120 bp, synthetic construct
  source 1..120: mol_type = other DNA
tttaaagtccttgtatatgaatcttggcacttctggcttcaaaggcatggatatctccttgcacatcccagggtaccattcctgcttgccaacctgagggatgaacatatttttaacatg

SEQ ID NO: 27139 - DNA, 120 bp, synthetic construct
  source 1..120: mol_type = other DNA
cttatgagggaaaatgcaagctatgcttaggagaataacttaaaatggactacccatagctgttgccttaggaccttagccagagctgtttgaatcactatcaaaaaaagggccactgag

SEQ ID NO: 27140 - DNA, 120 bp, synthetic construct
  source 1..120: mol_type = other DNA
aaaaacaagtcaaaacactgctgagtagaaataaaaataaaatttccccacccatcctctcttatcccagcacaagctgcagggaaagaaaaaggttcctagccagacatgatggctcat

SEQ ID NO: 27141 - DNA, 120 bp, synthetic construct
  source 1..120: mol_type = other DNA
ttaagcattttgctgtgctatttggctgctgtagttcttggaacgttcttggaacattctcagggagacatcaaagacaggaagttcatacaggccaccttatccagccttttacaagga

SEQ ID NO: 27142 - DNA, 120 bp, synthetic construct
  source 1..120: mol_type = other DNA
aggtttttgaaggaggaatggtctactaaagtggtctttaagaaagttccagcccgtggggtttaatacactgtaaggagaaatgctggaatagagtggccatctagaaaggctctacaa

SEQ ID NO: 27143 - DNA, 120 bp, synthetic construct
  source 1..120: mol_type = other DNA
tcccagggtcatgcatgcacaaaagtattgtgataatcactcactcccttaaaatctccttttggggttcgaaggaccttgaactttaccattaaaagattcagtccttgggttgatctc

SEQ ID NO: 27144 - DNA, 120 bp, synthetic construct
  source 1..120: mol_type = other DNA
aaagtataataataaaaaaaagaagatcagctcctctctcaacccctccaagcttccttatcaataaggaccactgccaccatcacatttgccacatcagccatcctctgatctcctagg

SEQ ID NO: 27145 - DNA, 120 bp, synthetic construct
  source 1..120: mol_type = other DNA
ttggtagccaattttcctaagtggtgagtcaattttctgcttgtgaaatgtaactttaccctggtgaacaccaggccccagggttttcagtgtggcttaacagcaattatacgaatgtta

SEQ ID NO: 27146 - DNA, 120 bp, synthetic construct
  source 1..120: mol_type = other DNA
agtcagtaatctaattaactattgtcaataatgtaacaagcatttatgaacccacttcccacatacaggtgaaggcctggagaataaaccacatctaacgacaggggcaggcctgcctat

SEQ ID NO: 27147 - DNA, 120 bp, synthetic construct
  source 1..120: mol_type = other DNA
tggagctgcaacttcccccatcataggtattggcagattttttccctcccctttctatctccttccttttgattgcatgtaaaacagtatctcactgtagccttcacatttcccttatca

SEQ ID NO: 27148 - DNA, 120 bp, synthetic construct
  source 1..120: mol_type = other DNA
aaacatctggaggagggggctgtttttaaaagaatagatccttggaccccattgtagacctcttgcatcagattctctccttgtagtgccaagaatcttaattttaacaagtttcccagg

SEQ ID NO: 27149 - DNA, 120 bp, synthetic construct
  source 1..120: mol_type = other DNA
ggaagaaacggcaagtgactgcttaatgggtacgaagtttccttttaaggtgataaaaatgttctggaagtagagagagcgtgaaggtgctaaacaccactcaaccgtacacttgaaaat

SEQ ID NO: 27150 - DNA, 120 bp, synthetic construct
  source 1..120: mol_type = other DNA
gaacgaagttgggcagatgatggctgaaggaatcagatcagttttatgagtcatattcagtccatgcaaggtaacagtccaggcattttatagccctatctcctaaatcaaaactttgcc

SEQ ID NO: 27151 - DNA, 120 bp, synthetic construct
  source 1..120: mol_type = other DNA
aaccaaagaactatgcccgagtttgaatctgagctcagttaacctagagaacagggtttcttaactgttcttgcctcatttgttaaatagataataaaagcacctattttacagggtttt

SEQ ID NO: 27152 - DNA, 120 bp, synthetic construct
  source 1..120: mol_type = other DNA
tctaagtgcattaaagacctgcctcattgagggatagggtgaggattaaaacaaaatacaagagcatatccttatggtcttgaggtagggaggaaactcttagggcacaggtatcaataa

SEQ ID NO: 27153 - DNA, 120 bp, synthetic construct
  source 1..120: mol_type = other DNA
acagacaagactattgtataaccaaggtgaaacaggcccaggcatcagcaacagcctgagtatttttggaaaacacattttcatcttcaatttacaccagacttggagtggagctaagtc

SEQ ID NO: 27154 - DNA, 120 bp, synthetic construct
  source 1..120: mol_type = other DNA
taattttatggaaccactgtcatatatgtggtctgtcatgtaccaaaatgtcattaggaggtgcatgactgcatctaaagtgaacaatctgatgagttttgacatatgtatacattcatg

SEQ ID NO: 27155 - DNA, 120 bp, synthetic construct
  source 1..120: mol_type = other DNA
tgatggagctacatgtctgtgtttgtgccagtaccatgctgttttggttactgcacgcttatagtatggcttgaaattgggtagtttgattcctctggctttattctttttgctcaggat

SEQ ID NO: 27156 - DNA, 120 bp, synthetic construct
  source 1..120: mol_type = other DNA
ccttcctttctaaaataaaatctctctggcatgaagtcaccgcctatttcacatccggtttgccctgggacgtattactactgtcttggtaaagagaaatcttttgttgtatagctgcag

SEQ ID NO: 27157 - DNA, 120 bp, synthetic construct
  source 1..120: mol_type = other DNA
ccatatttatttaagacatgatttctcagagacattaggatgttaatgttttcaacagtgttagaaaattagcagagttttccagccacagaaacttccccccttgctgccccgccactg

SEQ ID NO: 27158 - DNA, 120 bp, synthetic construct
  source 1..120: mol_type = other DNA
accctacttcacttgatttgaagccctagtcccagaaattctcagctacagtgaggattagtactcttctaagatgccgggcatttgtgttggtggttttttgttacaaatgaaagtgct

SEQ ID NO: 27159 - DNA, 120 bp, synthetic construct
  source 1..120: mol_type = other DNA
tccccttctgcagtcataagccttgagaatttatcaccagcttcaaggtaagaaacttttttgccatgaatttgtctgctctaacgttccttaactttggtctctcagccaacaacttgc

SEQ ID NO: 27160 - DNA, 120 bp, synthetic construct
  source 1..120: mol_type = other DNA
caaagaaaaagtaaaaaaaaggatgaaagaagtggggaaggaagagagggagggagaaagaaagagaaagaaaaagagaaagacaaaacaaccaaaagaaacagaaaggccgggcgcggt

SEQ ID NO: 27161 - DNA, 120 bp, synthetic construct
  source 1..120: mol_type = other DNA
ggagatggaaagttttggctgggacatccctcactcaatggtgtaactgcccaaaccgtccctggtctggacgccacaaatggagcagaaagagaaagggagagaagccatttcattgta

SEQ ID NO: 27162 - DNA, 120 bp, synthetic construct
  source 1..120: mol_type = other DNA
gaggcgggagaattgcttgaacccaggaggcggagtttgcttcatttataggatacgtggaactcagaggagaaaaagtcttcccaaggctattttattgcaaaaatatgttaatgttca

SEQ ID NO: 27163 - DNA, 120 bp, synthetic construct
  source 1..120: mol_type = other DNA
aaccttatgctacactgatcttaaggggcagggccaacctttctctttgagtgtgggattgtttctttcttgcataaaccactcccattaggcagcatctatgattttctatttcggttc

SEQ ID NO: 27164 - DNA, 120 bp, synthetic construct
  source 1..120: mol_type = other DNA
agggatgtacacaaaggcatgttacggttagatttgccatgaagaggtggaaagggaggatacaccagaaagggaggaaactaaaagtacattgaagttaaccagtgcctctgatggaag

SEQ ID NO: 27165 - DNA, 120 bp, synthetic construct
  source 1..120: mol_type = other DNA
tttatttccttctcctgcctaattgccctggccagaacttccaacttccaactcttttttatataaaacgtgcacatatgacataaacagctatgtagcatatctttggcattaagggag

SEQ ID NO: 27166 - DNA, 120 bp, synthetic construct
  source 1..120: mol_type = other DNA
agttaaggcataactacataatgcattttttttcaagtcagaatcgcacgacttttgctggtaaggttcactgcttttccttctgcctccctggcgatttcattgagcacagcggttgct

SEQ ID NO: 27167 - DNA, 120 bp, synthetic construct
  source 1..120: mol_type = other DNA
aacacagagtaggtgcccagtaaatattgaatgaaagaatgaatgaatgaatgggattttccactgacataatgaaaatctgctccctcccacgtttgcctatgaattccaggtcccagg

SEQ ID NO: 27168 - DNA, 120 bp, synthetic construct
  source 1..120: mol_type = other DNA
ggtgctagacgctcagtaatggcaaaaaggacgaattgtctgattctatttcaaaaaagaaaaaagtactgttgaagcggacagaatcatcccactggcagcgtggctcatcattactta

SEQ ID NO: 27169 - DNA, 120 bp, synthetic construct
  source 1..120: mol_type = other DNA
aaaggttcagttgctgctgcctcgaatccgtttcagagtgagataaagaaagagaaaactaagaaactggatacagtgacattttgttattagaccttccccagcaggccatttagcctt

SEQ ID NO: 27170 - DNA, 120 bp, synthetic construct
  source 1..120: mol_type = other DNA
ccaatgtttactcattcatttgagaaaccttttgctgcacagattgtgtgtgcaaggcaatttggggcactcagaaattaacaagacatggtccctgccccatgacctttaaatctattc

SEQ ID NO: 27171 - DNA, 120 bp, synthetic construct
  source 1..120: mol_type = other DNA
aacagaaggcacaaggtccaaatctagcctactagaaatgtgttcgttccttgagtgctgtttttaaagaaaggtaaactagagagctatcctgcagatgatgacttcataggaaccata

SEQ ID NO: 27172 - DNA, 120 bp, synthetic construct
  source 1..120: mol_type = other DNA
attcactgtttgctttctttccccctccagagttaagcacagcaactaaccggtagcaggtattcaggaaaggatgaataagacaatgatcttgaacaagtcactaaacctctctgaatc

SEQ ID NO: 27173 - DNA, 120 bp, synthetic construct
  source 1..120: mol_type = other DNA
gcaagactcggtctcaaaaaaaaaaaaaaaaaagaagacaagacagattcagagaggaatgcctgctacgggttagttgctgtgcttaactctggagggggaaagaaaacaaacagtgaa

SEQ ID NO: 27174 - DNA, 120 bp, synthetic construct
  source 1..120: mol_type = other DNA
tgctgaccgctctgccaagatgcaatgtctcctctgcagtcctggaatcaggtcacaggactcaccacggcctttgagacataccagctgcacactttcaggcttctactctatgtgggt

SEQ ID NO: 27175 - DNA, 120 bp, synthetic construct
  source 1..120: mol_type = other DNA
taaacataacttcgatatgcactgggaaaccaaaacatttgtgcgacttgcttcattgcagtttgtgctttatggtggtctggaactgaacccacaatatctccaaggtatgcctgtacg

SEQ ID NO: 27176 - DNA, 120 bp, synthetic construct
  source 1..120: mol_type = other DNA
ctcagattgcggctctagcatcatttcaccagggcagctttctcagagcttcatgtctctgtcacacttctcactttgcgtgtcctagcaaccttgtacctctctttttgtagcattttt

SEQ ID NO: 27177 - DNA, 120 bp, synthetic construct
  source 1..120: mol_type = other DNA
tttgtaagagaagttcttgtcttcagttcttgactgaatttctcctcttgtggtttaacaggtgaatagcttgaatgaggggcatttggggtttttgcagttaaaaaccaccacagggcc

SEQ ID NO: 27178 - DNA, 120 bp, synthetic construct
  source 1..120: mol_type = other DNA
atcccttcattcaagcacttacttcagagagtaggacgaattctgaatacaggagaaaaccgaggttcagagaggttgttatgtagcatcaaaaaaggagctcggctagtacatgggaga

SEQ ID NO: 27179 - DNA, 120 bp, synthetic construct
  source 1..120: mol_type = other DNA
cccccaaaaatatatgtacaaggatgttccctggagcactttggatgatggaaaaaattgaaaaccacctaaatttcccaactgtaggagctagttgtcatggcccacctactacaatgg

SEQ ID NO: 27180 - DNA, 120 bp, synthetic construct
  source 1..120: mol_type = other DNA
tttcattgcacctgtccctctacaatcacaatatctggtgtggtcagccttcatctgcaggaagaataaagcctcgggttcccactctacttcccaccatgcaaggctggcagaaaagat

SEQ ID NO: 27181 - DNA, 120 bp, synthetic construct
  source 1..120: mol_type = other DNA
cttttgttttcagatcttatagttctagctaaacaaagaagttctccttctcatccttggtctccaggcagagaaaatgtcaagttcatcagctgaaacgaaaactcccactgtccaggc

SEQ ID NO: 27182 - DNA, 120 bp, synthetic construct
  source 1..120: mol_type = other DNA
ccagatgcatacactttttaactttgtctaaaaaaatagtgtttgtagcactcctctggggctaggtgttatttccctcactttacagatagaaacactgaggcttaagtgacatgacca

SEQ ID NO: 27183 - DNA, 120 bp, synthetic construct
  source 1..120: mol_type = other DNA
cactggtggccaggccttcacacatcatgcagggatcagacaattcttatttgtgaaatcctagcagtccaagaagaaagacttgcatatattgatattggcatctctccaactaaatgt

SEQ ID NO: 27184 - DNA, 120 bp, synthetic construct
  source 1..120: mol_type = other DNA
ccctactcacatgctcagtcagtgctctccagctaaatgtcccaaccagatcaccctgcaataagctcacagaccacaagtcctactcacatgctcagtcagtgctctccagctaaatgt

SEQ ID NO: 27185 - DNA, 120 bp, synthetic construct
  source 1..120: mol_type = other DNA
agggatggcttttgagatttttcttgaaggagatagcccattagcccagtttggctgaagggaagaaggaatcaatgaaaagtgagaaataacttgtaaaagtagctggagcctggaact

SEQ ID NO: 27186 - DNA, 120 bp, synthetic construct
  source 1..120: mol_type = other DNA
agcctccctcggcaaactttccttcatctcctctcactggtgctttctatattttattttattttggtcgtgcgcattatttgaagttactatagcaacgtgtcaccagctggtatcaca

SEQ ID NO: 27187 - DNA, 120 bp, synthetic construct
  source 1..120: mol_type = other DNA
attctccagtacaactttgtggtttcctgattcctttgaaagtcatttttagtgctcagccaataactgggacctctaagagattcagggtcctaaaagtatgtgcctggggcaaacaga

SEQ ID NO: 27188 - DNA, 120 bp, synthetic construct
  source 1..120: mol_type = other DNA
gcctcatggctcataaaggtcttccagaatggaagccaaaaccaaaacaaaaccaggtccactccatgagaattgaaacgtatgtccacacagagatttgtacaaaaatgttcatagcag

SEQ ID NO: 27189 - DNA, 120 bp, synthetic construct
  source 1..120: mol_type = other DNA
aaaaaaaaaaatgaagtactgatccatactacaacatgggtgaaccttgaaagcattacactaagtataagaaatcatacatgaaaggtcacatattttatgatgtcacctatatgaact

SEQ ID NO: 27190 - DNA, 120 bp, synthetic construct
  source 1..120: mol_type = other DNA
tttacacttgcagcacatttctaatggactagccacatttcaagggctcaaaagactcatgcagcttgtagcttccatacagaatagcacagccctagaaaatgagaaagggtttacttg

SEQ ID NO: 27191 - DNA, 120 bp, synthetic construct
  source 1..120: mol_type = other DNA
gttgcctctgggagattggaactgcagtttttttgtaacatgccttagacttatctgattcttggtactatatgcatgtataacatagataaaaataagttaaaaccatataaatcaaat

SEQ ID NO: 27192 - DNA, 120 bp, synthetic construct
  source 1..120: mol_type = other DNA
cttcggttctcatcacaataataatttcagttttcaagcattggaaagtcccatccaattaaaatgtcaatctcacacgcagtttaaacgtttcgcctgcccgtgagctcagacctgtct

SEQ ID NO: 27193 - DNA, 120 bp, synthetic construct
  source 1..120: mol_type = other DNA
gtcgatatttgctgaataaatgaatgtcagataaagtggtgtggggactccaggggaaagatttgtcattctccaccctcccagttcagcttaaagcagagaagtgagaggtgcccaaaa

SEQ ID NO: 27194 - DNA, 120 bp, synthetic construct
  source 1..120: mol_type = other DNA
tacaggttccccctgccccccccaacaggataccacggtacataatgtgcactatttcccaaacatactgtaccacaaaaccatattttctttttggtagaaaacctgattcattagaaa

SEQ ID NO: 27195 - DNA, 120 bp, synthetic construct
  source 1..120: mol_type = other DNA
ctgtagaccggagctgttcctgttcggccatcttcgtggttatgtctttatcagcaatgtgaaaatggaccagtatagtaaatgggtaccaggagagtggggcactgctgaaaagagacc

SEQ ID NO: 27196 - DNA, 120 bp, synthetic construct
  source 1..120: mol_type = other DNA
tgtaaggaatctttgttgaaaggtatgtctgcatagagtagaagttctcaaccttggctgcatgttagcttgaagtagaacatttgggcctagacagggtgtattgatctcattcctgac

SEQ ID NO: 27197 - DNA, 120 bp, synthetic construct
  source 1..120: mol_type = other DNA
ctccttctatgaggcagcatgttttagtcttgtgaaaaacacactgcctgaaagtcagaaaaactaggttgcatctcagttctgtcaactgctagttgtgtgaccttaagcagatcagtt

SEQ ID NO: 27198 - DNA, 120 bp, synthetic construct
  source 1..120: mol_type = other DNA
gaattagaaaccacaatgaaacaccactttacacctatcagaatggctaaaaaacctgacaattgcaagtgctggtgaggacctggagcaactggaactcttgtacctcgttgtgatgta

SEQ ID NO: 27199 - DNA, 120 bp, synthetic construct
  source 1..120: mol_type = other DNA
ggcctcacgagcttaaaactgtgctgttgcaagcatgatttcttgattttccaggacagacaattagaagcagcagtttagtaaaggatttctgccaaaggcaccaaaaacacgaagaaa

SEQ ID NO: 27200 - DNA, 120 bp, synthetic construct
  source 1..120: mol_type = other DNA
gggggaacactgagttcattaaggggggggtgacatttcttcaggataatccgtcctctgtggttcaatcccaggttctattttaatttttttctctggtacaggattttcttatgattc

SEQ ID NO: 27201 - DNA, 120 bp, synthetic construct
  source 1..120: mol_type = other DNA
agttggatatgagtgaaataagcaggggctagattcattcctcaaaggaatatttatggagcacttaccagagattgttctaggacaagattgacgaggcccttgttctcatggagatca

SEQ ID NO: 27202 - DNA, 120 bp, synthetic construct
  source 1..120: mol_type = other DNA
tacaggcgtgagccactgcgcccagcctatggtgaagtctttagggttttctagatacaagatcatgtcatctactaacagagacaatttcttttcctatttggatgcctttccttcttt

SEQ ID NO: 27203 - DNA, 120 bp, synthetic construct
  source 1..120: mol_type = other DNA
aacgttctttattctggatataagttctttggcttggctttttgctttcctcattggcatcttttcctttccttttcctttttcctttcctttttgccttcccttccctcccctcccctc

SEQ ID NO: 27204 - DNA, 120 bp, synthetic construct
  source 1..120: mol_type = other DNA
tttgaatcccctttatgcacaccaatcatcccagctgatttctaatgaagcatctatccatagcttacatgtttagcgctggtggaacagaaaatcagtcactgacacaggaaactgcta

SEQ ID NO: 27205 - DNA, 120 bp, synthetic construct
  source 1..120: mol_type = other DNA
tcctcgtactgtcaaagccagtaagccccgaattggactccatttccttcaacatttattctcctaatagcctaagcagaagtagctccagcagcaacctgtttactaatccttaaaatt

SEQ ID NO: 27206 - DNA, 120 bp, synthetic construct
  source 1..120: mol_type = other DNA
agcagggtggggagagatgaatagagaaagatgagctgaaataattgcctggaatttttgtcatttctgaaactaaggaggccctgcagtcattgtaaagggccacagacttgaaatatt

SEQ ID NO: 27207 - DNA, 120 bp, synthetic construct
  source 1..120: mol_type = other DNA
cagtgtcagaactaagattcatctacattattgtgtgtacctatagtccattcattgttgttgttgtataatagtgcattgtatgaatgcaccacagtttcccgtctcctatgtgaacaa

SEQ ID NO: 27208 - DNA, 120 bp, synthetic construct
  source 1..120: mol_type = other DNA
aaccactaataccatccagtctgtcctaccaggcatacatttggttttggctgtccccccacatcccctgtaagttaacagattaggagttcatagttataatcattgtctccttacaat

SEQ ID NO: 27209 - DNA, 120 bp, synthetic construct
  source 1..120: mol_type = other DNA
agcaaatgagtgttgaattgagttgcggtgaatatagcccagacttgaatcataaaaacagaaaaacggccataaggacaaccactgcaggttacccgagtcagcctgtcagatggcggg

SEQ ID NO: 27210 - DNA, 120 bp, synthetic construct
  source 1..120: mol_type = other DNA
tgttactgttaagccacatctagactaggctaaacttaaacagctgggatgaaaggaacatgggcttcaaactcatatacagaccgtttgaccctggacaagttctctaacctccttgaa

SEQ ID NO: 27211 - DNA, 120 bp, synthetic construct
  source 1..120: mol_type = other DNA
tattcattttctccaaatcccatcctcttttcaaggctacagtatcttctttacaacgctatatccctcccttttagacaatgtgatgagcccaggggacactgaaaaccccttcctaag

SEQ ID NO: 27212 - DNA, 120 bp, synthetic construct
  source 1..120: mol_type = other DNA
aggctgtatcttgtttaatcttcctaacgacccaagaaggggattcattgtctccacttaatggatgagcaaagtgggttcagataaaccactgctggagccagcttcaaatctgattct

SEQ ID NO: 27213 - DNA, 120 bp, synthetic construct
  source 1..120: mol_type = other DNA
gaccttgagagtctgcaaaaactcacacacactgggactccttgctcatggatgtgtgttctcctgttgctacaagtgtcccaccagttaaatgcaaagtttcctcttgtttaagtgaca

SEQ ID NO: 27214 - DNA, 120 bp, synthetic construct
  source 1..120: mol_type = other DNA
aaattttctaccaacactatttctatatgcctcaatatttgctttaacaccaaacaaaattacaatataatgaaaaaccactgctcttaggtaacaaccctccaaacataagcccttttt

SEQ ID NO: 27215 - DNA, 120 bp, synthetic construct
  source 1..120: mol_type = other DNA
ttaagtacttaccagtattaactggtttaatccacctactaatcccatgagatagatacaactattacctcattttacagagaacccccaggcacagagagcccacaagccagtggagga

SEQ ID NO: 27216 - DNA, 120 bp, synthetic construct
  source 1..120: mol_type = other DNA
gatgaaataaaattaatgtacccaacaagggaagtgctgatagagtcacttacctggaaaagcaccgaacacacactaactcatccacatcccagaggctgaccaaagcatctgcacttc

SEQ ID NO: 27217 - DNA, 120 bp, synthetic construct
  source 1..120: mol_type = other DNA
atcacattggtggtagcagcagtaatattgttgttctgagacatctatatgtttaccatgggagataggtaataagtaaccatcggatattctaattctatgatcccctgtgcccttgag

SEQ ID NO: 27218 - DNA, 120 bp, synthetic construct
  source 1..120: mol_type = other DNA
agcagcatctctttacacaacagtccaacacataaacagcatatggaatcagcaaaagccaaactgggagaatctccacaggttaacagtctggtttttcaacagctacgttttcggaag

SEQ ID NO: 27219 - DNA, 120 bp, synthetic construct
  source 1..120: mol_type = other DNA
agtgcttcctacagaaagtatataaaatacgcctctaacctacctctaaccttggggtagcgggggagcttccctgaaggcaaagtgatatttcagttgaaactttaagagtacgaatta

SEQ ID NO: 27220 - DNA, 120 bp, synthetic construct
  source 1..120: mol_type = other DNA
aaggtcaccacatcatccttgttgcctacagcaatggtctgcccatcaggactccagcagatattaatgttctcccctgggaacccagacataatcagcaagataatctgtttgctcata

SEQ ID NO: 27221 - DNA, 120 bp, synthetic construct
  source 1..120: mol_type = other DNA
aaataggtcaggattacttggatgccaacaaagctggtccacactatccccatgtccccgataattgttttctttgacctgaaagaacagaatccagatgtgacttcacatagatgtaac

SEQ ID NO: 27222 - DNA, 120 bp, synthetic construct
  source 1..120: mol_type = other DNA
caacgccgagggccccatggctgcagcggggaccgccatgccgagctccccagcttccaactcacaacactgcagcagcctccacggcgcagtcagtcctggcgccgctgccgcacgcat

SEQ ID NO: 27223 - DNA, 120 bp, synthetic construct
  source 1..120: mol_type = other DNA
ttccccaatcttttccctaccccattgcaaccagaaattcttggaaactacaaagcttttcagactccaagaataccactgaagtctctaaaatcttggagtaggaaactatttggtgtc

SEQ ID NO: 27224 - DNA, 120 bp, synthetic construct
  source 1..120: mol_type = other DNA
tgaagtcagagtctctcaaaggggagataaaattgaggggaacagagtcatgggccattttttaaaactttttatttggaaaaattcaaatttacagaaaagttgcaagaatactaaaaa

SEQ ID NO: 27225 - DNA, 120 bp, synthetic construct
  source 1..120: mol_type = other DNA
gtcagggttcagccagagaagcagaacaactggaagataattagaattatcaggtaagtgaagaaatcaaactaaagaaaggatagagtttcatttcagcagcttaaaattttatatcac

SEQ ID NO: 27226 - DNA, 120 bp, synthetic construct
  source 1..120: mol_type = other DNA
gggtctgagaagaactcaccaccttgaagaagttcttcggctttgggagccgcaggggccggcggtccggggctccctaggccacgtctacaggggttcggggtaccgaatcggaagatc

SEQ ID NO: 27227 - DNA, 120 bp, synthetic construct
  source 1..120: mol_type = other DNA
aggggagaagctcaagaggttgtactttaaaaaactggaatcacaaagtctttcatacttaccttgggttggaaataagaccaggcagtgaatgttatagataaatacatatgttcctca

SEQ ID NO: 27228 - DNA, 120 bp, synthetic construct
  source 1..120: mol_type = other DNA
gtgccacctcccccatactttgcactatgcatctcttcatctgtatcttttgtaatgtcattcatagaaaactggtaaatgtgtttccctgagtactttgagccactctagcaattcaat

SEQ ID NO: 27229 - DNA, 120 bp, synthetic construct
  source 1..120: mol_type = other DNA
tactttaacctgtgttaaacattctggtcaagtgtttctctagatagagaacgtgagactcaaagagattaggatagtttttttatatataggaagtggcagaaaggagatttcaactca

SEQ ID NO: 27230 - DNA, 120 bp, synthetic construct
  source 1..120: mol_type = other DNA
tttacaggcatcctcactgggcccagcccatgtgtccacagctgtcctcagtgggcatagcccgggtgttcatagttttcctcactggacttaatccaggtgttctgagcaattcacatg

SEQ ID NO: 27231 - DNA, 120 bp, synthetic construct
  source 1..120: mol_type = other DNA
tgggcttgtgtgaccttcagtctgtgctgggctggaatctgctctagaggtttccagatttctttttaccctccaccccaacagaccctcaggcctttttgtgctcacttcccaagctcc

SEQ ID NO: 27232 - DNA, 120 bp, synthetic construct
  source 1..120: mol_type = other DNA
aattgaacaatcatacagcactgacaccgtgacaaagctttgtcaaaggactttggctaccagtgtaaaagactcatttattttcatttactgtgaacacttaggtggcaccaggaagga

SEQ ID NO: 27233 - DNA, 120 bp, synthetic construct
  source 1..120: mol_type = other DNA
gtctcagaggactcacaatgggatgtgcttatagttgttgcctcgaaggtatgtatgttcatttccatcttctgactgcaatttcttcagataagccagttttcctgtacgttaaatgtc

SEQ ID NO: 27234 - DNA, 120 bp, synthetic construct
  source 1..120: mol_type = other DNA
tccaatctactacctttctgtaatgtctcatctcaatacaggcatttgcctgcacacttatacgtgcaacccacagtgcaagtctttctgaagcccaactcagattcagggggctttgct

SEQ ID NO: 27235 - DNA, 120 bp, synthetic construct
  source 1..120: mol_type = other DNA
attgtatagagttggaatcatagagtatgtagctacgtataactaacttattttacttagcaatatacatgtaagatcttttgtatcgttttgaagcttaacagcttaataattcttatc

SEQ ID NO: 27236 - DNA, 120 bp, synthetic construct
  source 1..120: mol_type = other DNA
aggaaagataaatgacattataacatttcaacaacaaaagaaatttaccgggcctcaaaatgcacaagggggtgatgggacactgtcatgaaatcagcagtgcatttgtgtgccaccctg

SEQ ID NO: 27237 - DNA, 120 bp, synthetic construct
  source 1..120: mol_type = other DNA
gagctgccaggcctttggtcttaagtgatggggtattcctcagttcctggtcaagggcagagaacattcagagatatattctattatatttaatgagatcatcaccacaaacgttagaaa

SEQ ID NO: 27238 - DNA, 120 bp, synthetic construct
  source 1..120: mol_type = other DNA
cttctgtgtgctggaagaatgaaaacctattcagatcccaaacactatcattatcggatggtctcaatggtcagctaacccagggtttgtttgagtaggtacattgcactgtgggcttta

SEQ ID NO: 27239 - DNA, 120 bp, synthetic construct
  source 1..120: mol_type = other DNA
tcctcctagttgagatgaaacggcaactacggcgactacgggagctccacctatacagcacatggaagaagtaccaagaggcgatgaaggtcaggccacctggatttgtctgagaaaaaa

SEQ ID NO: 27240 - DNA, 120 bp, synthetic construct
  source 1..120: mol_type = other DNA
cttccaatgtttgcagtttatttcatgcacagggcacttcaataaacctaaaagaaatcctgtcaacacaaaggcaaattcttactgcacacccatagaacaggactgtgtcagaatctc

SEQ ID NO: 27241 - DNA, 120 bp, synthetic construct
  source 1..120: mol_type = other DNA
ataacccgattcccctagtcatctttaatctctagaatatagtttcttgtggtactcagggggctttctgctgtgagcgattaaaggtacaaatcagtgttaccaacattggggctctaa

SEQ ID NO: 27242 - DNA, 120 bp, synthetic construct
  source 1..120: mol_type = other DNA
catcttgggccccagtgatgttccgatgcctgcattcctgttctgagatctagcacaagtgtgcaaaaactttctgctcattttctatagtctccgggttcccacacttacccagttacc

SEQ ID NO: 27243 - DNA, 120 bp, synthetic construct
  source 1..120: mol_type = other DNA
cctctaggctttaatttggagcccttgtgttgactattttcactatttccattgggttttctataatgtcaacaatgcagaaaagacctgtgcacacaggccacagtgtggtctgactct

SEQ ID NO: 27244 - DNA, 120 bp, synthetic construct
  source 1..120: mol_type = other DNA
cctcatgtccacaccacccaatacaacccgagggattccctcagcggaatccatgcagtgacacttaccctatttctcctagatcatctagaggagtttatagcagaacatctccctgaa

SEQ ID NO: 27245 - DNA, 120 bp, synthetic construct
  source 1..120: mol_type = other DNA
cagggatcaataagagggcaagttagctcaggtcagattaggaaggaggagccctcagagactgccagggacacacagcctgcactgcgtggtgtgcactgtttgagattggctatttta

SEQ ID NO: 27246 - DNA, 120 bp, synthetic construct
  source 1..120: mol_type = other DNA
gtttccgtactacatatccccggattttctagtgtccacattctcaacagagatttccatcaccgttgcagtcctgttgcaggcacatgaaaaaattaacttgtaagcttccaaagtgta

SEQ ID NO: 27247 - DNA, 120 bp, synthetic construct
  source 1..120: mol_type = other DNA
cccccacctgctgcccccatgatgggctgtcctagtgctggagccagtgtgagcatgagcagcagcaggtcccatggcacacacacactgtgttaaaaggaagagcagaagcacaaacac

SEQ ID NO: 27248 - DNA, 120 bp, synthetic construct
  source 1..120: mol_type = other DNA
gatgtatacatctcaccatgtacactataggtgattgacagaatttcttggtgggcaaatgccagagttcattatcaactaaaaaatggtttcagatggcatccacacttagaaactgtg

SEQ ID NO: 27249 - DNA, 120 bp, synthetic construct
  source 1..120: mol_type = other DNA
gaaatgactttggcagggatcaataagagggcaagttagctcaggtcatattaggaaggaggagtcctggatgctgcagtgaaacactgtgtggtgtgctctgtttgagatgggctcttt

SEQ ID NO: 27250 - DNA, 120 bp, synthetic construct
  source 1..120: mol_type = other DNA
catctccattctcccagaatcacctgggaagcagctgctgtgagtctggcccaggttctgttctctgcacccacctaactcagtgcatttgcatcaaggctggaatctcaggttctcaga

SEQ ID NO: 27251 - DNA, 120 bp, synthetic construct
  source 1..120: mol_type = other DNA
gctctaagggtgctccctgggtcggatgacacagggaatccttcctctgggattcctacgtgtgccccagcatcctggagtcctgagggcagaacacatgattgagcacagttttggcct

SEQ ID NO: 27252 - DNA, 120 bp, synthetic construct
  source 1..120: mol_type = other DNA
agtggttctctcgactctaactctcccctttccttcttatggccaccccatcaccgctgctcctccggacactctgatgcttgcttcacagaattggaagactccaccattacaggcagc

SEQ ID NO: 27253 - DNA, 120 bp, synthetic construct
  source 1..120: mol_type = other DNA
acaacagggagcatcactagttcatcctgaggagacactagggttgacatgaatccccctggttcaggcctcctgggaaaggtgtgagagggatggaggcacccccaggctccttgtcac

SEQ ID NO: 27254 - DNA, 120 bp, synthetic construct
  source 1..120: mol_type = other DNA
aacgtgcagctcttctccaggaagctatgcatattcaacgtgcagctcttccgtctggatggcacagaggatctgggtggcaaggcagggtcaccacccccaccctgtgtcatgagacct

SEQ ID NO: 27255 - DNA, 120 bp, synthetic construct
  source 1..120: mol_type = other DNA
tttacctcatttttaaaacaaatccatagtatggtaagttacatcaatatggagtatttttatgttttgtggtgatttacattctgtatgtattttacatatataaatgttaatggcctg

SEQ ID NO: 27256 - DNA, 120 bp, synthetic construct
  source 1..120: mol_type = other DNA
taccaatctgcttgattctcctttcttgtggcagtagttatgatgccaacttttggggttctttgtcctcctcttttcttcctacctgccagcattcaaatggccacttctattaagtga

SEQ ID NO: 27257 - DNA, 120 bp, synthetic construct
  source 1..120: mol_type = other DNA
attattggaggtgaaatggctaagtcaaaggtgatgagtgtttttgagactcttaatgttaattgcaaaattaacctctaaaaaggtaggccgggcgcactggctcacgcctgtaatccc

SEQ ID NO: 27258 - DNA, 120 bp, synthetic construct
  source 1..120: mol_type = other DNA
tattgttcagtcactaccttagagcctgttttattttttcttaattttattgactcatttatatctcagccctttttattacaaattatttattgtttagtcactgccttagagcctgtt

SEQ ID NO: 27259 - DNA, 120 bp, synthetic construct
  source 1..120: mol_type = other DNA
caaacactctaggggattctgatgctcaccaaagtgtgaaaaacactgcattagacagtgcttggagagcacctgataaccattcctttaggaacaaattcccctcctattaaacacatt

SEQ ID NO: 27260 - DNA, 120 bp, synthetic construct
  source 1..120: mol_type = other DNA
gcaggtggggaagtccccgcggcctcggcgtctcgcacgcctggccccaacacctgccgaagccggctgcgactccatttttctttttttttttcctcctgggaaacggaggacccgcgc

SEQ ID NO: 27261 - DNA, 120 bp, synthetic construct
  source 1..120: mol_type = other DNA
ctgaaggaatagggaaggaaacctcgcgcgctatttctgtttccctcagaaccccttcgtctttgtcgttcatgaggtggtgaattatctgcctttcgagaatcctgcatcgatgtttat

SEQ ID NO: 27262 - DNA, 120 bp, synthetic construct
  source 1..120: mol_type = other DNA
ttgagatgaaggagatgctgaattcaggttggacctgttggatttacagtgttaataggaaatgtagatggatgtggccagctcagtagttggagaaaaggcaagaatggagatatttgg

SEQ ID NO: 27263 - DNA, 120 bp, synthetic construct
  source 1..120: mol_type = other DNA
gggaagtaacttgcttgaacttgagaaagccatgtctaatgctgaagttgacatttctgaactcttgattcttaacctgggctttagtcttcactgagtcgatgaggtgtgtttctgtgt

SEQ ID NO: 27264 - DNA, 120 bp, synthetic construct
  source 1..120: mol_type = other DNA
gtctgtttacaagataaatcatctgtctgaaataggggacaaccacagctgcagacctctatctacggtacatctcaagcgattcagcttttcttatgtcatgacttttctctgtttctt

SEQ ID NO: 27265 - DNA, 120 bp, synthetic construct
  source 1..120: mol_type = other DNA
gctgcctagtcacccctaggtattgttacattattccataaatatttattgaacacttattatataccaggcactcttagaggtgctgggaatacatctatgaaaaccaagtccctgccg

SEQ ID NO: 27266 - DNA, 120 bp, synthetic construct
  source 1..120: mol_type = other DNA
ataaaggagtgtgctcacatgcagtacagccagacatcttgcttatgtttattggaaacacatagggtatgtgtgcaaattccctatgcttgtcctttgcccatttttctgttgcagtgt

SEQ ID NO: 27267 - DNA, 120 bp, synthetic construct
  source 1..120: mol_type = other DNA
tttcgattttgtttttttaattacagaagttttacatttttatatagtcaattctaccactccttttctttatgatttcttagttgtcatgcttatgtcaacctaaataacagacagcga

SEQ ID NO: 27268 - DNA, 120 bp, synthetic construct
  source 1..120: mol_type = other DNA
cctggaaatagctcagttttgatatccctcagtgccaggatggacctatcctggattgttggtctcattccatgttgtagggagtcattgacaactaggagtcagcgtcaaaactctttt

SEQ ID NO: 27269 - DNA, 120 bp, synthetic construct
  source 1..120: mol_type = other DNA
ggttatggcactggatggtttggtgaactttctgtgtgactcatcatcagccatgagacttgccccttaaaatttatctagttttagcttttaggatttcaggaacagagcagttcctgt

SEQ ID NO: 27270 - DNA, 120 bp, synthetic construct
  source 1..120: mol_type = other DNA
gataacaacaaatctaagacttgctgtcattttaaaaacaccttttctaaaaagaaacactaccacatgaaatgcacacattaattataggatacatcctggttatatatgtattatgga

SEQ ID NO: 27271 - DNA, 120 bp, synthetic construct
  source 1..120: mol_type = other DNA
gaatagctggcatttatgccaggtaccatgtcaagtgctttacttggattaactcataatcttcactgcaaccccatgaggtaggtagtattattatccctgtttggtaaatgaggaaac

SEQ ID NO: 27272 - DNA, 120 bp, synthetic construct
  source 1..120: mol_type = other DNA
aaaaaatacgtaatagacatttaaaaaattcatacctcattcagaccattattcattttgcttgcaatggtattcccagtgcacaacatggtgcctggtacattgtaagtattcattcaa

SEQ ID NO: 27273 - DNA, 120 bp, synthetic construct
  source 1..120: mol_type = other DNA
ttcagagaatagaagcagagggactacttgctaactagctctatgagaccaacattacactaataccaaagcaagacaaattataagagaaaactacagaccaatatcttttatgaacac

SEQ ID NO: 27274 - DNA, 120 bp, synthetic construct
  source 1..120: mol_type = other DNA
ggtgacagagtgagactctgtctcaaaaaaagaaaaagtatgtggattgggaaggaagaaataaaattgtctttgttcactgaagacatgatttgtctatgtagaaaatctcaaagaatc

SEQ ID NO: 27275 - DNA, 120 bp, synthetic construct
  source 1..120: mol_type = other DNA
ccactatcaatttaaaaaatgcaaaatctcatctgagactgaaggctaatttcttccagctgtgagcctgtaagatgaaaagcaagttattgaattctaagatacaatgattgtgcaggc

SEQ ID NO: 27276 - DNA, 120 bp, synthetic construct
  source 1..120: mol_type = other DNA
ttccttccctaccacaggactgggttgcaaatttttcagacttttacagtctgctttccttttaattttaagttcaaaccttagatcagcccattgctcccacatttgattgtggactgt

SEQ ID NO: 27277 - DNA, 120 bp, synthetic construct
  source 1..120: mol_type = other DNA
gggttaattaggaggcctgttggagttatttcctagtttcactctgcagatgccaaatatcgggatgccttagtaatctgtgtttctcctccctctggcaatacaactgttaaaattaga

SEQ ID NO: 27278 - DNA, 120 bp, synthetic construct
  source 1..120: mol_type = other DNA
atatctactagaacaacaaaaaccccacaacaattcttagaagaacacagttaaacccagtgtctaggcatgcaaagaaacagaagtgtgactcatactcaaggagggggaaagggcagt

SEQ ID NO: 27279 - DNA, 120 bp, synthetic construct
  source 1..120: mol_type = other DNA
agtgactgaaaaagtatagtactactgtgctgatgtgtttacaatgtatacagataatacacaggacaacaaaaatacaggatgaggcacaggtgagtggaatattttgtaaggtttcta

SEQ ID NO: 27280 - DNA, 120 bp, synthetic construct
  source 1..120: mol_type = other DNA
cactgagagtaaaaggatagaaagaaatataccatgcaaatagtatgcacaagaaatttgtagtaactctattcttaccagaaaaacaagacatcaatacaaggaagatttctggagact

SEQ ID NO: 27281 - DNA, 120 bp, synthetic construct
  source 1..120: mol_type = other DNA
acacaagaaggcagataaaatattaatagccctatgtctactaaagaaattgaatttgtaattttaatttgtacctttcctgcaaagcaaatttcaggtgcaaagaggttcactggtgaa

SEQ ID NO: 27282 - DNA, 120 bp, synthetic construct
  source 1..120: mol_type = other DNA
agaaccctccagcatttgtcccccaagcaagaacaccaacttgaacaactatccacacaagaaagcactttcagaagaactaaaactcaggtgagcaatcacagtacctggttttaacat

SEQ ID NO: 27283 - DNA, 120 bp, synthetic construct
  source 1..120: mol_type = other DNA
agatgtgttacattcacctggagacatgccacactcatcaggggacgtgacacactcacctagagacatccctcacttaccaggagacaggcctgactttacccagaatgatgtacagaa

SEQ ID NO: 27284 - DNA, 120 bp, synthetic construct
  source 1..120: mol_type = other DNA
ccatagtagtagaatcaggaaagataagcacagcgttcagttttgttcagcaccatacacaagctcctagctgggcaaaggaaatctaaagctgcatgaagttccattacgtgtttttgt

SEQ ID NO: 27285 - DNA, 120 bp, synthetic construct
  source 1..120: mol_type = other DNA
catggtagtagtggtagttatggtggtggtggtgatggtagtgaggtgatggtgatggtagcaatggtgacagtggtgatgatgacaacaatgatggtggtgatgatggtgttggtgttg

SEQ ID NO: 27286 - DNA, 120 bp, synthetic construct
  source 1..120: mol_type = other DNA
tggtgttgaggtgatggtgatggtggtggtgatagtgattatgatgatagtggtggtggtggtgttggtgttgaggtgatggtgatggtgctgatggtagtgatgatggtagttgtgatg

SEQ ID NO: 27287 - DNA, 120 bp, synthetic construct
  source 1..120: mol_type = other DNA
tggtggccacacagaagcccgttcctcatccttctgttgccccaccccccacctccgtgcctcgggtcaaacccctccctcacctaccccagtgaaaggaaaataactagaagcttttat

SEQ ID NO: 27288 - DNA, 120 bp, synthetic construct
  source 1..120: mol_type = other DNA
ctgctagaatgtccttgctagagggcatagctgctagaatgtccttgctagagggcatggctgctagaatgtccttgctagagggcatggctgctacaatgtccttgctagagggcatgg

SEQ ID NO: 27289 - DNA, 120 bp, synthetic construct
  source 1..120: mol_type = other DNA
tatgccccttattggtcacagtacatttatttttcattagcagttaaatgcagacatgagggattgtgctgggttcaccaggcggctgacgcaagcagtgcttggcgtgctgatcgatag

SEQ ID NO: 27290 - DNA, 120 bp, synthetic construct
  source 1..120: mol_type = other DNA
ctcccatgcctcctgagacgggcacagatttgaaccttgattcatgcacacccattgcccacacttacccaacaccacagcttcacatctgcccacactcaccaacaccacagcttcaca

SEQ ID NO: 27291 - DNA, 120 bp, synthetic construct
  source 1..120: mol_type = other DNA
aacctagcagccaggcaccaggttatccgctctggggaagtagctcttcccctcctgcatcctccaggcagcagactcagctgggatctcaagcccacgaggaatgtgatttgctcagag

SEQ ID NO: 27292 - DNA, 120 bp, synthetic construct
  source 1..120: mol_type = other DNA
cccacctctcgcaggtacgggctgatgcgtgagtgctggcacgcagcgccctcccagaggcctaccttcaagcagctggtggaggcgctggacaaggtcctgctggccgtctctgaggag

SEQ ID NO: 27293 - DNA, 120 bp, synthetic construct
  source 1..120: mol_type = other DNA
tagttgtgatcagaaaaaggtatctgcactgcactgtcagagtctcctttcactatgttgtgtgttaaattaccgtagctctttgtttcatgaaataaactgtgaatttggggggggcgg

SEQ ID NO: 27294 - DNA, 120 bp, synthetic construct
  source 1..120: mol_type = other DNA
tactgaatccagtactgggaatggagcccagcactgttttaacagcctccacgtggttctgttgcctgcttaaatttgagaggcccagatctaagccatgttaaatgctagattggctcc

SEQ ID NO: 27295 - DNA, 120 bp, synthetic construct
  source 1..120: mol_type = other DNA
aggcagggagcaccctggggacacacacatgtctgcatcctcagctcagaaaccaccatcatcagagctaatgtctgttggtacctccacaccctttgcatgattagcttcatcttcacc

SEQ ID NO: 27296 - DNA, 120 bp, synthetic construct
  source 1..120: mol_type = other DNA
tattgacactgaatcttccaacaaccttgtggagtaatctgggattttacccattttgcacttgcaaatgtacacagagaggttaaacaacttgcctcaagtcacccagctagtaagagg

SEQ ID NO: 27297 - DNA, 120 bp, synthetic construct
  source 1..120: mol_type = other DNA
ccggagtgcccccaacaggccatatctgaaagtcatctccatcagggaagaaactgaggttcaggctccccagacacactgggccagcactttcccagggagcaggacgtcaggtaggtt

SEQ ID NO: 27298 - DNA, 120 bp, synthetic construct
  source 1..120: mol_type = other DNA
taaccccagcacacgttactcatggaggaggaagagcatgaattttggggacgagacacacagttgtgagttcaaatcccagttgccattttcaatatgatcttggaatattactcaatt

SEQ ID NO: 27299 - DNA, 120 bp, synthetic construct
  source 1..120: mol_type = other DNA
gaatgggcaggcaagccagtcttctgtcttcctttgctaacttagggttttgagcaggttggggtatggtgcctgtcatacccacctgccaccctgggaacctcactgttctctctttca

SEQ ID NO: 27300 - DNA, 120 bp, synthetic construct
  source 1..120: mol_type = other DNA
tgtctgtaaatcacaagttaggtgatgaagggctggtagtttcccatgaattaataactttccttcttgcccccgtgttatctccctcacctgacccccgccaataaaacatccttaaaa

SEQ ID NO: 27301 - DNA, 120 bp, synthetic construct
  source 1..120: mol_type = other DNA
aatgtacctactcaaacaaaccctgggttagctgaccattgagaccatctgataacgatagtgtttgggatctgaatagcttttcattctcccacatgcacacagaattgctggaataac

SEQ ID NO: 27302 - DNA, 120 bp, synthetic construct
  source 1..120: mol_type = other DNA
actacctttacaacactaagatttcacacctaaacaaagagatgatcccagaatacgtacgctttgccagtgtggctgggtccacctgcatctagagaaaaagaaaacactatgagggtc

SEQ ID NO: 27303 - DNA, 120 bp, synthetic construct
  source 1..120: mol_type = other DNA
aataattatcctaccatttaaagatgacccctacttagcatgtggtatttgttcttccactctcccttttcaacagaatttgtgtgcaccatgatgttcactgctcctcatgctcacact

SEQ ID NO: 27304 - DNA, 120 bp, synthetic construct
  source 1..120: mol_type = other DNA
actctgatgtaccaccccaccttagatgacactgctgcttccagggatgacagtagcatggttagagtactggactcccagtttgttgggttttttttttttttttttttgagacagagt

SEQ ID NO: 27305 - DNA, 120 bp, synthetic construct
  source 1..120: mol_type = other DNA
gaagtacatccctgatcagaactaggaggatacaaagtgaccatcagcaccttggtggtggtgctcatgaacaattcagtaacactgcttgaggtgggtttgggaggagggtagcaggca

SEQ ID NO: 27306 - DNA, 120 bp, synthetic construct
  source 1..120: mol_type = other DNA
aggtaaatgcctgctgacacacagtttgtaaatgtggatgccatctgaaaccactctttagttgataatgaacgctgacatttgcccaccaagaaattctgtcagtcacctatagtgtac

SEQ ID NO: 27307 - DNA, 120 bp, synthetic construct
  source 1..120: mol_type = other DNA
atatgcacacataggtgctaaaactctctggcataacaacaaattatacctgaaccatgtgattacttcagagtagtagcccatggcatcaaccttccacccactcctgagttcacctct

SEQ ID NO: 27308 - DNA, 120 bp, synthetic construct
  source 1..120: mol_type = other DNA
attcccctttcagacaaaaaaagaacaacttacatgggcaacagtgaggagactctgattggatgcttcagggagatgttctgctataaactcctctagatgatctaggagaaatagggt

SEQ ID NO: 27309 - DNA, 120 bp, synthetic construct
  source 1..120: mol_type = other DNA
tgtctcatcattcccctatgcgttttgaggcctgggaaatttccactttcctgttgaaatgtgacaatgtcatttatctttcctgggtctacatatgcctctcttgcactttccattcat

SEQ ID NO: 27310 - DNA, 120 bp, synthetic construct
  source 1..120: mol_type = other DNA
tctgggctaagttgaacatttcaggaactcactcctgttctctgtctctcactaatttctggtggtgccattgctgtcaacacacagggagatggagaagacaagaaacaagaaagtagc

SEQ ID NO: 27311 - DNA, 120 bp, synthetic construct
  source 1..120: mol_type = other DNA
actaggctgagggatagaaggctgaaactctatatgaccctggaattatccattctgggccccattatcttatggtcaatatgaggcctcaatggagaaagttggggtgatttcacccca

SEQ ID NO: 27312 - DNA, 120 bp, synthetic construct
  source 1..120: mol_type = other DNA
tatctttccttgatctacatatgctcctcctgtacttatcatccatttaattggctttaaaatcagtattgtggccaaaatacatcgtatttattattttaataatcaagtgcacacttc

SEQ ID NO: 27313 - DNA, 120 bp, synthetic construct
  source 1..120: mol_type = other DNA
tgagtgaaccaactaaccctgttcgatgaaaccaatggactattgttcactgataagaattattaagctgttaagcttcaaaacgatacaaaagatcttacatgtatattgctaagtaaa

SEQ ID NO: 27314 - DNA, 120 bp, synthetic construct
  source 1..120: mol_type = other DNA
gacaaataggagctggggaaattaaaaaaatcagaatgacatttaacatacaggaaaactggctcatctgaagaaattgcagtcagaagatggaaatgaacatacataccttcaaggcaa

SEQ ID NO: 27315 - DNA, 120 bp, synthetic construct
  source 1..120: mol_type = other DNA
gtgttattcctgatgtctttactgtgattatttttaaataaaaaaaactaatacccccaaatgctggtagaaaacaaacatttcaatttgctaatgcttcacagggacaagaattcaggt

SEQ ID NO: 27316 - DNA, 120 bp, synthetic construct
  source 1..120: mol_type = other DNA
cctgggctggccccaatgtggacagctagaaaccgctggtatgcgctcaggagttctgttcattttggctgagccaaaggaagacacgtgtgaacatctgcactgggcctaattaagaca

SEQ ID NO: 27317 - DNA, 120 bp, synthetic construct
  source 1..120: mol_type = other DNA
cagatgttgcaatggctttatgggatgataaatgcatagcacacaataggggtttagcccagaatacaacactcaacagatatgaatctcttccatctatatttccttagttaacatatt

SEQ ID NO: 27318 - DNA, 120 bp, synthetic construct
  source 1..120: mol_type = other DNA
gcagatgacacaaactgggcatcctctaagtcaattctcacactctatctgcagatagcatcagattgcacaggtaaagggctcagtcccatgaaactgcctccctacatcagttgtagg

SEQ ID NO: 27319 - DNA, 120 bp, synthetic construct
  source 1..120: mol_type = other DNA
ggtacatgtgagggagagtaacctccatataaaacacttgggtactgagtctctaatgagattctggtactggtagacatcactgcacatgggttgtcaaaatgtgaggctgggggaatt

SEQ ID NO: 27320 - DNA, 120 bp, synthetic construct
  source 1..120: mol_type = other DNA
atcattcaagtaacttgcataactggaaaaaaacataaccattgaatatagtataatagtataactactgatcatagagttccttttacttgcttctaatcttttcatttcttataaaac

SEQ ID NO: 27321 - DNA, 120 bp, synthetic construct
  source 1..120: mol_type = other DNA
taagatccattctatgggttctttttaaaataagtgctgtgaaaaacaaagtgcatgtatctctatttcccaagggtattttagtataatggaattgaagggtaacgggcatacgcattt

SEQ ID NO: 27322 - DNA, 120 bp, synthetic construct
  source 1..120: mol_type = other DNA
acccaaataatttttaaactttttattctatcatgcctatagacagcttcatatattaaccatttctgctttcgtggtcctttgagaatggtatcttagtatgtaagtgcaataaataaa

SEQ ID NO: 27323 - DNA, 120 bp, synthetic construct
  source 1..120: mol_type = other DNA
gggagaagaatcgctttaagctgggaggtggaggttgcagtgaaccgctattaaactccactattctttattgggcacaacccaggaggtcaacaaatgtattttcctgtttttatttta

SEQ ID NO: 27324 - DNA, 120 bp, synthetic construct
  source 1..120: mol_type = other DNA
ggcctctcactgagcttgtcctgagtgtgttccctctgtgctttgtggggactgctgtgcagtgggcaggaacaggagggcactaggaagggatgagcattgtgccagacatgtacaggc

SEQ ID NO: 27325 - DNA, 120 bp, synthetic construct
  source 1..120: mol_type = other DNA
tcagtgggagaccactgcccccaagccatctttctggaatctgagaagcaggcagtagacagagattctctctccataggcattctcttcttctttttcctttcttatttcttaaaaaaa

SEQ ID NO: 27326 - DNA, 120 bp, synthetic construct
  source 1..120: mol_type = other DNA
catagttctcaaaatgcagatctgatcctgacacttccctcctcactgtcttgttcctaagacaatggcccgaacccagtggtgccttccacgtggtgatctgcctccccaaatcactac

SEQ ID NO: 27327 - DNA, 120 bp, synthetic construct
  source 1..120: mol_type = other DNA
gtgtcttttttgtcatgtgcagctactgacttctctgcttgtttagcttagtggtcaggttagacagagatttccttgaatgccttgatccaacgtctcccactctgtgctggcgggctg

SEQ ID NO: 27328 - DNA, 120 bp, synthetic construct
  source 1..120: mol_type = other DNA
ctggggctccaagacaggtttttaatggacatgtacatagctgatgtgccttccagataccctagaataagctggagcttttcaaagctcctttgaacatctcattccctatatttttat

SEQ ID NO: 27329 - DNA, 120 bp, synthetic construct
  source 1..120: mol_type = other DNA
agaaattaactcatttcaaaagccacgatgttccggcctcaacatggtgttcacagctaaactgtgtggcctgaaggttcacatctttgggtaaactgaaaatcatccttagctagcatt

SEQ ID NO: 27330 - DNA, 120 bp, synthetic construct
  source 1..120: mol_type = other DNA
tctgggcattcggctctcagctccaaacgtccaggcttggttccggccccggctgtcctccgagagtctctccccggcgggcaggcgctctgggcattcggctctcagctccaaacgtcc

SEQ ID NO: 27331 - DNA, 120 bp, synthetic construct
  source 1..120: mol_type = other DNA
ggttccggccccggccgtcctccgagagtctctccccggcgggcaggcgctctgggcattcggctctcagctccaaacgtccaggcttggttccggccccggccgtcctccgagagtctc

SEQ ID NO: 27332 - DNA, 120 bp, synthetic construct
  source 1..120: mol_type = other DNA
atttaacttgcctgaagttctaacacttgttttcagtctcagggaaaagctgaaccaagaactgttttcagcaagtctgagtttctaccgcagtctcgtcacttatcagccacacggctt

SEQ ID NO: 27333 - DNA, 120 bp, synthetic construct
  source 1..120: mol_type = other DNA
tctaggcttgtgagtacactcgctgatgtccacacaatgacaaaattgcctactgatgcattactcagaatgcatcccagttgttaagctacatgtgaccatatctggaagagaaaaaga

SEQ ID NO: 27334 - DNA, 120 bp, synthetic construct
  source 1..120: mol_type = other DNA
ttagtgctagtcgcagtccgttttgttctgccataacagaatacccgagactgggtcatttgtaaggaacagaaatttatttggctcatagttctggaggcttggaattccaagatcgag

SEQ ID NO: 27335 - DNA, 120 bp, synthetic construct
  source 1..120: mol_type = other DNA
caaaagccacttaaattgcgtttggtaacacaatttcacagattgttggaggcagtgctgtgattatcatcctcagactgctgcatgtgtatcatggaataaagcaagtgagttaggtgc

SEQ ID NO: 27336 - DNA, 120 bp, synthetic construct
  source 1..120: mol_type = other DNA
gggaaacgtaaatcaaaaccacaagataccacttcatacccattagtatagctatgattaaaaagagggaaaatgacagcatggatgagaattcggggaagttggtgcatgactgctggg

SEQ ID NO: 27337 - DNA, 120 bp, synthetic construct
  source 1..120: mol_type = other DNA
ttaaaagaaaacatttttcttcttaatcaatacccagtgctggagagattgccctgaaactggcactcacacgctgcagttaagttgacagaattagaacacacattggcgcctgggcat

SEQ ID NO: 27338 - DNA, 120 bp, synthetic construct
  source 1..120: mol_type = other DNA
cagcactctgcgggactccatttacacacgcaccacccacctaaactgcgtaactctttatgctacgtgttttcattttaagatgaagaaagaaactagggcaacaagaggttaaataac

SEQ ID NO: 27339 - DNA, 120 bp, synthetic construct
  source 1..120: mol_type = other DNA
aaggctcataggaaaaacttcattaacatgaaaaatgaagatcaggtaaaatgtatccacaggcaaagcacggcctaggccagaagcactggagaagagcccaaaactctttacacctca

SEQ ID NO: 27340 - DNA, 120 bp, synthetic construct
  source 1..120: mol_type = other DNA
tctgctcaattcaggcaatttgggaagtaaaacaggaaatgtcagctgcaaaaggtagagaaggcttttcagggaaggtatttccaaactatttccccgtagggaatacatttccgtgac

SEQ ID NO: 27341 - DNA, 120 bp, synthetic construct
  source 1..120: mol_type = other DNA
ttttgggccatttaatccaagggctgattgcatatctcctctcatatgtcccacagtcatgccaaaattaacagatctcaacaaactcttaatcgtccccatcctggtcctgctctcatc

SEQ ID NO: 27342 - DNA, 120 bp, synthetic construct
  source 1..120: mol_type = other DNA
tgacttcttgatctgtgaatggagtcattcccttgtcaaatcctctttctcgtattaaaatctcagaggtcctataaaggctagctcaagctcaaccataaaattcttctcccacctggc

SEQ ID NO: 27343 - DNA, 120 bp, synthetic construct
  source 1..120: mol_type = other DNA
agagtctatgataatttgaataattcagacctcattgcctgtttccttcctctgcctccaccgcaagaaatgaaaacaagaaggctacgtccactatttatctaccttctgcacgtctga

SEQ ID NO: 27344 - DNA, 120 bp, synthetic construct
  source 1..120: mol_type = other DNA
cagaaattttgtggttgaagaatgttcccaaaatgtggtccttgggaaacaccaaagcagaaggaaggcccagttatgagaacttaggcgggccagtggatgactgaacccccgctctgc

SEQ ID NO: 27345 - DNA, 120 bp, synthetic construct
  source 1..120: mol_type = other DNA
ctgacagacccaggatgcgctgaccgtcttccaagcttctcctgtagtgtgtgctaagaaaggacactcagatattctgttacttcccatcaaaagcatatttaccatcctgtacttttc

SEQ ID NO: 27346 - DNA, 120 bp, synthetic construct
  source 1..120: mol_type = other DNA
tggaatgtgtccttctgtgccttgtgtgcaatgagtgtgttcaccttgtcccccactagatcgtgcactccagaagcaggagacctgtgtccctttctgcccaatgctatacaaagctgt

SEQ ID NO: 27347 - DNA, 120 bp, synthetic construct
  source 1..120: mol_type = other DNA
aggttaaaatggtaacatagatggtaacatgcatacacaaacacacacacacaaataaatgtgtacagaaaatgatttattcgggctgggtgcagtggcgcacatctgtaatcccagcac

SEQ ID NO: 27348 - DNA, 120 bp, synthetic construct
  source 1..120: mol_type = other DNA
ttctgagtcagtccccaggacggccactcctcctgcctcgggacacccagcgctttcctcttcaaagccgttttccgtggagtcgggagacgattcgttggcgggagagagaggaaccgg

SEQ ID NO: 27349 - DNA, 120 bp, synthetic construct
  source 1..120: mol_type = other DNA
actttctcttttcacccctgagaatcctcataacaccaccccttccccaggcttctccaacgcatcgttgttagttttttgtccctcttaactttgtgaatcatattctttgcttgtatc

SEQ ID NO: 27350 - DNA, 120 bp, synthetic construct
  source 1..120: mol_type = other DNA
tttcacaaagagaatatattcatgacgttgctatgtgattcgaatttaatacagatggtcactttgggagtatcgtgattgaaagtgaggcaaaactagaggcaggaagccttgcagagc

SEQ ID NO: 27351 - DNA, 120 bp, synthetic construct
  source 1..120: mol_type = other DNA
gaggcacagtttaataaaataacccaatttaagcatagaattcattgagttttgacaaatttatgcaccaacatagccaccacctcagtcaaggtacagaacttttgcatcaccccagcc

SEQ ID NO: 27352 - DNA, 120 bp, synthetic construct
  source 1..120: mol_type = other DNA
gtaacaaacagctaaactgttttccaaagtatatgtaccattgtacattccctcctgcagtatttgagaattccagtcgctctacatgctcttccatacttggtgtatccatttccaaga

SEQ ID NO: 27353 - DNA, 120 bp, synthetic construct
  source 1..120: mol_type = other DNA
tctaagggacagcaaagcactgggttggggacacacctttcacatgcaagccagccagtcttcagtctataccccaagcacctcctttatccaggactcacataccaaaccaagattctt

SEQ ID NO: 27354 - DNA, 120 bp, synthetic construct
  source 1..120: mol_type = other DNA
gaaggtcaagccagagtcagcctccacgactcctgccatcagtcctgtctacacaagccctaagcagagacttccggttgttttcgggggagcctggcagggacaagtctatgttcatgt

SEQ ID NO: 27355 - DNA, 120 bp, synthetic construct
  source 1..120: mol_type = other DNA
atgcacatatggcactattttaattatcttcactttacaagatgtttggaggaagtctcttacttgcttgggtcccacagctgtctcggccattcttgaccgttcatgttcctttggagg

SEQ ID NO: 27356 - DNA, 120 bp, synthetic construct
  source 1..120: mol_type = other DNA
tgcgggaatgagaattgtagaaacaagtatgattagactagagaagagaaaacctgggactgagtctgcaacctcgggagcatcgtgggatggtgcgggctctgagggtgggtacagtgg

SEQ ID NO: 27357 - DNA, 120 bp, synthetic construct
  source 1..120: mol_type = other DNA
ggggcagggatgcttaaaacctgaggaccacactgttcagtgacacggccgactgctgtcccctctccatgggatggccgccccctcattgctctcttccttcaggtgtctgctgaaatg

SEQ ID NO: 27358 - DNA, 120 bp, synthetic construct
  source 1..120: mol_type = other DNA
gatcagtgtccacaagtaagacacatagaaaacctgaggcccagagaagccaaggaagtccttacaggcttctgtcagagaatcggaggaaaggaggggacgccagagaatctgggctta

SEQ ID NO: 27359 - DNA, 120 bp, synthetic construct
  source 1..120: mol_type = other DNA
gaatgcaggaaaatacacttgtggcagcaggcaaggtgccctctctgagcctcagtctccccctaagcagtagagctgctaatgctattattcccccatgatttggggagcagtattatt

SEQ ID NO: 27360 - DNA, 120 bp, synthetic construct
  source 1..120: mol_type = other DNA
cagccagaagcctccaagcggtggcattctccaacacagacgttcaacatgctcctcacagccccgcccgtctctgttgaccaccgtgcgatgcgcacaacgcatgctggacgatgaaca

SEQ ID NO: 27361 - DNA, 120 bp, synthetic construct
  source 1..120: mol_type = other DNA
ggctgaccccccacccgagaccaaaggctgacacccccccgagaccaaaggctgacccccccgagaccaaaggctgaccacccccgagacaaaaggctgaccacccccgagaccaaaggc

SEQ ID NO: 27362 - DNA, 120 bp, synthetic construct
  source 1..120: mol_type = other DNA
gccagtgctccagtcaagagggcagaagagagagcaaccataaacctaaagatgttgatacaaatagcatgagtgacaagatctcacttctgagtgtgacatatatgtaacaagatggaa

SEQ ID NO: 27363 - DNA, 120 bp, synthetic construct
  source 1..120: mol_type = other DNA
gatttcagcctccagaaccgtgagaggatacaattctaatgtttcaaaccagcaagcttgtagtaatttgcaggcagcctcagaaaccaatacaatggggaactctgatatggactaaaa

SEQ ID NO: 27364 - DNA, 120 bp, synthetic construct
  source 1..120: mol_type = other DNA
gagggcctggccggagcaggggtgtcagcagaggggacgcacacgcattcacactcgtgcacacacacactcacatcgagacagaggagggcctggccggagcaggggtgtcagcagagg

SEQ ID NO: 27365 - DNA, 120 bp, synthetic construct
  source 1..120: mol_type = other DNA
ccaaggagaggagacatgaattccccttttcagcaattcaccctgcttgtacaggtggggagttatctgtacctctgaggaggtacagatttcatctggtgctccagctgcagtgaaagg

SEQ ID NO: 27366 - DNA, 120 bp, synthetic construct
  source 1..120: mol_type = other DNA
gatctgttttcactcacaatgcttctgacaccaaacatgtggtttccctcacaccaaccagttctccaacctccagacgctagctgggtgccccacagttgagtgcaatgctcatgccaa

SEQ ID NO: 27367 - DNA, 120 bp, synthetic construct
  source 1..120: mol_type = other DNA
gaatggcaggggtttcttggacatctccatgtttacatggtctccagcattgtggcttcagggaagtcaagactttttacatgaaagctcagaacttcaaacgcatatgcctcaagagaa

SEQ ID NO: 27368 - DNA, 120 bp, synthetic construct
  source 1..120: mol_type = other DNA
ccaactcgggggaaaaaaaaaaaaagtcatttagtattgtcttttcaaactttgccgctaagttaatctttctgagtcttccgggccacataggtagctggttgcctctcctgtgtcatt

SEQ ID NO: 27369 - DNA, 120 bp, synthetic construct
  source 1..120: mol_type = other DNA
atgcagttctgaaaatgtttttctttaggcaaactccagagccaggaatattaattgtaggagtttctaaaacttaacatgcagaccaggaattaaggcaggtgtgacacagagaggggg

SEQ ID NO: 27370 - DNA, 120 bp, synthetic construct
  source 1..120: mol_type = other DNA
gcataccgttttacataaggtgttcaaaatggtcaagaaatgcatctctaagaaggtaacgtttgagcacaaacaggaagatatgaagaagcaacccacatggctgtctaggggaagaac

SEQ ID NO: 27371 - DNA, 120 bp, synthetic construct
  source 1..120: mol_type = other DNA
cctgctatggcacaggcagatgctacgagacggaatttgagagcatggatcctgcaatgacacaggcagatggtaagagatggaatttgagaccatgggtcgtgctatggcacaggcaga

SEQ ID NO: 27372 - DNA, 120 bp, synthetic construct
  source 1..120: mol_type = other DNA
ttctattctattccctatttctatctacttctaagaggatactcttagatccatttcttttctggcaggaagctaggaagctaggaacgggtcctgccctggctctgagctgtcacctta

SEQ ID NO: 27373 - DNA, 120 bp, synthetic construct
  source 1..120: mol_type = other DNA
gccagccaatgctcctgtactttaattggccaaagcagtcagtctgtggtgctgcgacccaatgtccttacagtgtcctacaagcctgcaggagggctgggaatgtggaaacaatggagg

SEQ ID NO: 27374 - DNA, 120 bp, synthetic construct
  source 1..120: mol_type = other DNA
ccaggtatggctataaagtaactgagacggatcccacaaacgacatatgacaatcagtctcattgctttataatcacaccaggtacaaacggttttagaaatcagttgaggctccctctt

SEQ ID NO: 27375 - DNA, 120 bp, synthetic construct
  source 1..120: mol_type = other DNA
cttgcaaaggactggagttttaggtcttaaatcttttacagaatctggcgaaagttatataggagtcccctcctaggagaaagggccttctccccatactccacccctaaagcctgatag

SEQ ID NO: 27376 - DNA, 120 bp, synthetic construct
  source 1..120: mol_type = other DNA
ctacccccagcccctctctgggctatagatgaagacccatcttacacagggagagactgaggctcagacagagcagtgactggtgactggcccaggacttacggctccttggagttggaa

SEQ ID NO: 27377 - DNA, 120 bp, synthetic construct
  source 1..120: mol_type = other DNA
atggacggagggatcggggatggatggagggatccgggatggacggagggaccggggatggacggagtgaccggggatggacggagggaccggggatggacggagggatcggggatggac

SEQ ID NO: 27378 - DNA, 120 bp, synthetic construct
  source 1..120: mol_type = other DNA
gccagatttctggggaagtcaacctaaaatgaaagaaagtgactgttcaggaccccaaagatctcagcaacatgctacctctcacagacaattttcagagtacttaaaaacaagagacag

SEQ ID NO: 27379 - DNA, 120 bp, synthetic construct
  source 1..120: mol_type = other DNA
tacagagtatctggaagctacattactgtgatgagaacagtcctcttttgcatttgctggagtcatgggtgaggtggtatgtgtgggacacaaatgcttggaaaggataaagtgtctgat

SEQ ID NO: 27380 - DNA, 120 bp, synthetic construct
  source 1..120: mol_type = other DNA
ggaaataaggataatagcattcctcctttgtcagctcaaaatttctggttaacctgttgagtaaacttaaatgcctgcctttgcagccatagtagaggtcagtacacacacgggtctctc

SEQ ID NO: 27381 - DNA, 120 bp, synthetic construct
  source 1..120: mol_type = other DNA
tttctttctcaacattgtcgataatggaggtgattaggtagaggatcactgctaagagggtttggaagaaatgactccagggccaattgatgaatggtattttggtgtgcagatcacaca

SEQ ID NO: 27382 - DNA, 120 bp, synthetic construct
  source 1..120: mol_type = other DNA
tgcctgagctccattcacaagacactccgcctcctgagttccacatactgcaccaagcgggtccatctccaggacagacaccacagaatgctttgcactctcaggctccatagggcaggc

SEQ ID NO: 27383 - DNA, 120 bp, synthetic construct
  source 1..120: mol_type = other DNA
gccccgctggtcacctcccttctccacttccttttggagcactgggccccgctggtcaactcccatctccacttccgaaatccacttcctttcggagcactgggccccgccggtcacctc

SEQ ID NO: 27384 - DNA, 120 bp, synthetic construct
  source 1..120: mol_type = other DNA
gagtttcctcctctgcaaagtgggagagacactgatggaccacagagccattgcagggtgaggccagtaccaagcacttcttggcgactggtggggatgcacccttttcccgtctgaagg

SEQ ID NO: 27385 - DNA, 120 bp, synthetic construct
  source 1..120: mol_type = other DNA
cctctcctgctcctcagcctctgggacacccacgtcctactccagaggaccctctcctgcccctcagcctctgggacacccacgtcctactcccagagcagtaaatactgttgctctgtg

SEQ ID NO: 27386 - DNA, 120 bp, synthetic construct
  source 1..120: mol_type = other DNA
acactctcccatgaaagcccccgctgaggaccccaggctggggtgcctgatcacgggatataaccgggcccgtcaggcactaggaaaagggaagaggccaggctctcaccttcttggtct

SEQ ID NO: 27387 - DNA, 120 bp, synthetic construct
  source 1..120: mol_type = other DNA
ggctccatcctagcctcctggctgcttacggcatctttcctgtcccaacttggaattatttatttatgtgtttgtttgtttaagttatatctgtccatgtcctccaataggcagtaagtt

SEQ ID NO: 27388 - DNA, 120 bp, synthetic construct
  source 1..120: mol_type = other DNA
gttccactggaaaagatgcttcctgttttataggatgggctccctgggcagattcaggcctgcagcctgccacgtccagaggctctgtgactgcccagcccccacctgcagccctgaaga

SEQ ID NO: 27389 - DNA, 120 bp, synthetic construct
  source 1..120: mol_type = other DNA
gtgtgcctgcttcctcactggtaaaacaggagcaaaacagtacccaccgcctaggcttgctctgaggatcaagtaagttggtacttatcctggagcactaagtaagttggtacttatcct

SEQ ID NO: 27390 - DNA, 120 bp, synthetic construct
  source 1..120: mol_type = other DNA
tcactacaaagggttttgatgatttatcttttgtatgtcttcccacagggcagtggcaggtgtttgggccagacaagcctgtccaggccttggtgggggaggacgcagcattctcctgtt

SEQ ID NO: 27391 - DNA, 120 bp, synthetic construct
  source 1..120: mol_type = other DNA
aaaatgtcatgagactatcgtagttctcccttatccacaggggttacattccaagatccccagtgaatgccacaaaccacgtacagtaccaaaccctatatatgctatttttcatgtctc

SEQ ID NO: 27392 - DNA, 120 bp, synthetic construct
  source 1..120: mol_type = other DNA
acatccctttattttgagcctatggatgttgttgcgtgtgagattagtctcttgaagacagcataccatttggtcttgtttctttatccagcttgccactctgtgccttttaattggagg

SEQ ID NO: 27393 - DNA, 120 bp, synthetic construct
  source 1..120: mol_type = other DNA
ctgaagggaacacaaacaaatgaaaagataccccatgttcctgatgtaagagaattaagattggtaaaatgaccacactacccaaagtgatctacagagtcaatgcaatccttatcaaaa

SEQ ID NO: 27394 - DNA, 120 bp, synthetic construct
  source 1..120: mol_type = other DNA
tgacagtgggacagaatctcaggtggacatgagagggggaactgaacagggacagatacgggaacacagagtgatgctgagacccatcctgcctgcagatggagaaactggatgcttgat

SEQ ID NO: 27395 - DNA, 120 bp, synthetic construct
  source 1..120: mol_type = other DNA
accactgaatatactgtttctgtttcagggaaaatccaggcggaactgggtatgtgtcatgtcctgagcctcccacacatggttctcccgggtccctccctgatccacagtttgagcctc

SEQ ID NO: 27396 - DNA, 120 bp, synthetic construct
  source 1..120: mol_type = other DNA
tgggcatggagtaggaagatgaccagtgacagatatggagcccatccagcttgtagacagcaaatctgtgatgcccgaatccaccccagggtgcagctgcctctaaatacacttcttggc

SEQ ID NO: 27397 - DNA, 120 bp, synthetic construct
  source 1..120: mol_type = other DNA
ggaaaattagaagcagctctcccctctggccatggaagaagccaagcgctgaggcttgtaaggaatttgagaactagacaaaaataactgaggccacaacagacttcaggtctgatggag

SEQ ID NO: 27398 - DNA, 120 bp, synthetic construct
  source 1..120: mol_type = other DNA
tccaccatctctccagcccccaacacctcctccaccatctccccagcctgtagtgttcctccaccatctctccagcccccaacacctcctgcacacttcccagcactccgaaatccacag

SEQ ID NO: 27399 - DNA, 120 bp, synthetic construct
  source 1..120: mol_type = other DNA
ttccacgtaccacaaaccacctcaaaacttagcagcttaaaacaacaaacttaaaaaaaattgtggacttgtattagtgcaagcagggcttagctacatgattctgctccgtgtggtatt

SEQ ID NO: 27400 - DNA, 120 bp, synthetic construct
  source 1..120: mol_type = other DNA
ttttggagctttaagatttgactgtcccactggatttcggacttgcttggagcttttagtccctttgttttgggtaaattttaccatttggaacggctgcatttacccaatgcctgtact

SEQ ID NO: 27401 - DNA, 120 bp, synthetic construct
  source 1..120: mol_type = other DNA
ctaaaggtatttgttggtttatatagtagtgggaaaatgagaacttttaaaatattcaacttttagcccttgacatgcaaaatgagttcattacatggtaaggatgagggagaaagaaaa

SEQ ID NO: 27402 - DNA, 120 bp, synthetic construct
  source 1..120: mol_type = other DNA
ttatggttgcaattttacatttgtgtgattgtttgattaatctctgtctcctccacgaaaactccaagatgcaggaactatatcttactggcattcagcacaatacctggcacataggtg

SEQ ID NO: 27403 - DNA, 120 bp, synthetic construct
  source 1..120: mol_type = other DNA
cctttaaccattagattcaatgttttcttcatttcagaaaagttttcttttatctttgaattttttaaccagatattgtgagctctttcacactaatttctcatttgttggacctgactt

SEQ ID NO: 27404 - DNA, 120 bp, synthetic construct
  source 1..120: mol_type = other DNA
tcctcagtatacacacctcttttagggatttctgggcttcttgactagctcaagctcttcagaggcatgcactttatcttggtgttcagtcttgactggtttaaacttttgatgtccaga

SEQ ID NO: 27405 - DNA, 120 bp, synthetic construct
  source 1..120: mol_type = other DNA
gtctggcattctcagatctccaaggcatcactttggccactaccctctggggctgtgattagcagctctcttcctgttttatgcagctctgtgtgtatgtctgcagtgatgccgtactgg

SEQ ID NO: 27406 - DNA, 120 bp, synthetic construct
  source 1..120: mol_type = other DNA
ttcttgtatttcttctcctttattctaccatcccacttgatcttctgccacagaagttctcttctctctctctttgttctctcttctcctcctttattcttgatacctgcttctgtgttg

SEQ ID NO: 27407 - DNA, 120 bp, synthetic construct
  source 1..120: mol_type = other DNA
attgtaatatttatcctcttttatggctatactcaaatgccacatcactatagtgccttccctcatcactgtagctatctcttttcactctacttatattgtagaggatttgttacactt

SEQ ID NO: 27408 - DNA, 120 bp, synthetic construct
  source 1..120: mol_type = other DNA
gaacataaaagctggtaccaaggggaggaggagacagtgatgaattaaaacattatcttaactaatccaagtgctggtcttcaatactttcatgtgtatagacaaagagaaactgcagag

SEQ ID NO: 27409 - DNA, 120 bp, synthetic construct
  source 1..120: mol_type = other DNA
aaattccctatttctatctcttcctgaggagggtaacctcctgtagcaggggtcagactgtgacttgggaatcaagcttaggtctgcaggttgcctgttcatcttcttgtaaaatattgt

SEQ ID NO: 27410 - DNA, 120 bp, synthetic construct
  source 1..120: mol_type = other DNA
tttgcctctttctcaaaacagcttctagagtatgatcccagagggaggatgtggtgttcggctggagggatcatccgtgctgtttagaaagggcttcctagatgctgcagattgtgtcca

SEQ ID NO: 27411 - DNA, 120 bp, synthetic construct
  source 1..120: mol_type = other DNA
tacctgctggtgcctggagtcatctgccctgggcttccgcatcctcgtgtgtgcagtgctgtacctgctggtgcctggagagtcatctgccctgggcttctgcgttctggtgtgtgcagt

SEQ ID NO: 27412 - DNA, 120 bp, synthetic construct
  source 1..120: mol_type = other DNA
gattgcccttgagggagagtcactggcaaatcctgtctactaccatttattgagcatctactgtgttctggcactgcacttagtatttttcacatgtcacattgactttccttgtttaaa

SEQ ID NO: 27413 - DNA, 120 bp, synthetic construct
  source 1..120: mol_type = other DNA
cactttggtgggtaaaagaaggcaaattcccctgtggtacttttggtgccaggtttagccatatgacgaagctttacataaaacagtacaagtatctccattgtcctttatgatcctcca

SEQ ID NO: 27414 - DNA, 120 bp, synthetic construct
  source 1..120: mol_type = other DNA
agcttgtgaaaatggtaaggaggataccagtgcaggaaatagaagagctaattgctaatgtggccatgggccatggcgaatcctggtctgtcctgggcagcaccaaagctctttcccctt

SEQ ID NO: 27415 - DNA, 120 bp, synthetic construct
  source 1..120: mol_type = other DNA
agaacttgtaggctgtttcctgtaagccagccggtgtaacccagcatattctccagcaacgaagatcttgttttcatgcatcaaaatagtagagcagccttctttcttggtatatttgtc

SEQ ID NO: 27416 - DNA, 120 bp, synthetic construct
  source 1..120: mol_type = other DNA
aagattattgacttaggcttccctcttcagagatgaagtccactcaactggtatccgttttgatcaaaagcagaagtcgtaaagtgccaagtactcaatgacaaggacacagaaccgcgt

SEQ ID NO: 27417 - DNA, 120 bp, synthetic construct
  source 1..120: mol_type = other DNA
gagggatgggtgggtgacagggaaaccatcacccaccgagcgccgacactcaccgtccacactcggagacgaaaaccaccacccaccgagcgccgacactcaccgtccacactcggagac

SEQ ID NO: 27418 - DNA, 120 bp, synthetic construct
  source 1..120: mol_type = other DNA
gaaaacaaccacccaccgagtgcctacactcactgtccacactcggagatgaaaacaaccacccactgactgccaatactcaccgtccacactcggagatgaaaaccaccacccactgag

SEQ ID NO: 27419 - DNA, 120 bp, synthetic construct
  source 1..120: mol_type = other DNA
tctttcttctttagggctactaataagaaaacaaaactattgaagaaaaggggtgctcttcacatgtgaggctgatgtcacagataacgccaccaggaaggcatcaacaaaggtcatccc

SEQ ID NO: 27420 - DNA, 120 bp, synthetic construct
  source 1..120: mol_type = other DNA
cgtgtacgaatccacacacattctcacaccaagaacaccccgtgtgcgaatccacacacattctcacaccaagaacaccccgtctgcgaatccacacacattctcacaccaagaacaccc

SEQ ID NO: 27421 - DNA, 120 bp, synthetic construct
  source 1..120: mol_type = other DNA
gagcatggttacccaacaaaccggtgaggtccagatgcttacagacccttcttcaaagggaaagggaggataggcgaaatgtggccatttggaggggtagtaaataatttttagggggaa

SEQ ID NO: 27422 - DNA, 120 bp, synthetic construct
  source 1..120: mol_type = other DNA
tttcatttattcaaatgatcaaggaaggtcagtgatagtgcgcagacatgcaggagtacatgaagagacgtgttctccattctaaaagaaatgggcgccccatcaacccattgctttaaa

SEQ ID NO: 27423 - DNA, 120 bp, synthetic construct
  source 1..120: mol_type = other DNA
ggttccccatactcttcaacattacggaaaggacaggttcctctggtgactctgcggttccccatactcttcaacattacggaaaggacaggttcctctggagactctgcggttccccat

SEQ ID NO: 27424 - DNA, 120 bp, synthetic construct
  source 1..120: mol_type = other DNA
attacggaaaggacaggttcccctggcgactctgtggtttcccatattacactttatagggattttgaccccttcattagtgggttgaagtttttgtgtttagtgcacagttagcatttg

SEQ ID NO: 27425 - DNA, 120 bp, synthetic construct
  source 1..120: mol_type = other DNA
tcatttttattaattgctgctctggtttttattagcttgagagatcaaaaactcttggtggccagccttaggagggaccccacaacttgcgtgagttttaccccttagtaggttctcaag

SEQ ID NO: 27426 - DNA, 120 bp, synthetic construct
  source 1..120: mol_type = other DNA
attttatgacaaatacaaaggaaggagtaaaaggaatctatgtcccaaaagataggtacacttcataacaccttcagacagaaagaggcagcagtgtctgagcccaaacgagctcctctg

SEQ ID NO: 27427 - DNA, 120 bp, synthetic construct
  source 1..120: mol_type = other DNA
atttgggtgaaatttactgacattttaattcaattaaagaaagcacttctattggcctagttggtcctagaagcccccaatataagacccgtggctgggtcatggagacggggtaaaacc

SEQ ID NO: 27428 - DNA, 120 bp, synthetic construct
  source 1..120: mol_type = other DNA
gttatgtttaactatgtctatttgactgttactttttcaccctggtgcttttgtgctttacgtgctactgtcacaaaaaccttaaaactacacacacacacacgctcatgcgtgtgcgcg

SEQ ID NO: 27429 - DNA, 120 bp, synthetic construct
  source 1..120: mol_type = other DNA
tgtgcaatcaaacactagaacttatttcttctagctacctctatgtacgtactcattaaccaacctcttttcatccctcgacatgacctgtccaatgctgaatgatccctagacagcctt

SEQ ID NO: 27430 - DNA, 120 bp, synthetic construct
  source 1..120: mol_type = other DNA
cacatggttgacaaagggcaacgtcaacaattctcagaggcaacgttaagttccttaaaagggagataatggtaggaaaaatgtgttgcaaaacaaagaagaggggaagcagaagaaagg

SEQ ID NO: 27431 - DNA, 120 bp, synthetic construct
  source 1..120: mol_type = other DNA
ggagcgcccaggtggctgttgagtccaagccatctgacatgctcaaatggaaatggaaagtacccaccgagactttcttcacagatccacacagaacagctgttccaaaaaacgatacaa

SEQ ID NO: 27432 - DNA, 120 bp, synthetic construct
  source 1..120: mol_type = other DNA
tattagaaacccaggagagtccttaatacacaagacccacttgtattatagaacaaatcaaggcttggatggcaaggagaatgacctaactttctatctgtctctccatggaatctgacc

SEQ ID NO: 27433 - DNA, 120 bp, synthetic construct
  source 1..120: mol_type = other DNA
ggtgggaaaaagaaccaaaagaaaatgatagaaatgaaaacactgacagaaatgagttcccctggcatgaccacagaaaaagtcagtgagcttgaagatatatcaatagatgcatcgcaa

SEQ ID NO: 27434 - DNA, 120 bp, synthetic construct
  source 1..120: mol_type = other DNA
attctgacagggcgaagctcagagacactggcccccaaaaatttgcatagtaataaatatagtcttctaaatgaaagtaggactgccccattctcaacattggtattagaatctaccttt

SEQ ID NO: 27435 - DNA, 120 bp, synthetic construct
  source 1..120: mol_type = other DNA
ccacgcttacctgcaactcctacttttccatttctgttccttctgcagttcttccaattcctgaacacagatatgtccaaaggattcccatcagagtgtatatcataaaaccagtatcct

SEQ ID NO: 27436 - DNA, 120 bp, synthetic construct
  source 1..120: mol_type = other DNA
tccccagggtccaaaataaataaatgaatgagcaagaacacagaagaacagtccctctctgctgtttgctctgggtttttaataggctaccccctatccttactgtaattacacggtaaa

SEQ ID NO: 27437 - DNA, 120 bp, synthetic construct
  source 1..120: mol_type = other DNA
tcagatattattctaggcagcagagactccagcagtaaacagaacactctacactgaggaagtttattctgtagacaagggacacagacgagaaacaaatacatgtgccaggtgatgaaa

SEQ ID NO: 27438 - DNA, 120 bp, synthetic construct
  source 1..120: mol_type = other DNA
taggcagtgagggcagcatgttagcagagagatgaaggatgaagacagagcaccacatgggcatccgagatgaaccaatctaggcagtgagggcagcatgttagcagagacgtgaaggat

SEQ ID NO: 27439 - DNA, 120 bp, synthetic construct
  source 1..120: mol_type = other DNA
cattcttcaaagacctaagcagtaatctcaggtttcctggatccatccctaagccctccactaacagcgatgtcctatatagagaatctgctaagatttctagttgggctcccaattatt

SEQ ID NO: 27440 - DNA, 120 bp, synthetic construct
  source 1..120: mol_type = other DNA
cagtttaggaggcctgaggtgggcggatggcttgagctcacaagtttgagatcagattgggcaacgtggcaaaaccccatctctacaaaaagaaaaatacaaaaagtagccagatatggt

SEQ ID NO: 27441 - DNA, 120 bp, synthetic construct
  source 1..120: mol_type = other DNA
caatgcagggggcagctccatggattcagagtatttccgttttttagatggtgaacttaaaacataaaggcatgtttagtaaatctgtggaaagccaaggctggaagtgagagcttcaga

SEQ ID NO: 27442 - DNA, 120 bp, synthetic construct
  source 1..120: mol_type = other DNA
ctaatgatgaagtcactcactctcctctctttttcctttaagataatccctttccagacccgccattttggctcaccctgtaagttacagccccacttctcactgccaagtgtgggtgtc

SEQ ID NO: 27443 - DNA, 120 bp, synthetic construct
  source 1..120: mol_type = other DNA
aaggctgactgagccctaacatcatcccacagtccagctgggaagagagccagcgacaaagccagagggagctagctcccacacctcccagccccagctgagttcgcttcttgagggtat

SEQ ID NO: 27444 - DNA, 120 bp, synthetic construct
  source 1..120: mol_type = other DNA
tcttcaattgatagaacgagcaaacaaaaatcagtaaggatatagaagacagaaagaacatgacgaacacacttgacgtaacggaaacacaggatacgctgcacctaataaccgcagcgc

SEQ ID NO: 27445 - DNA, 120 bp, synthetic construct
  source 1..120: mol_type = other DNA
tggaaaatcttatgtggttagaagtaacgaaatatacttttaaatatcccttggatcaaaaaaaataaatcacaatggtatttagaaaatatttttcactgaaggctaacaaaacactac

SEQ ID NO: 27446 - DNA, 120 bp, synthetic construct
  source 1..120: mol_type = other DNA
attcatatctctaacagctgctaacgtgaatgcaattcttcccatgttgaacactccaccgcctatcccaggatgtggtctagagcatctgaacatgctcagtgcatgttgaaagagaga

SEQ ID NO: 27447 - DNA, 120 bp, synthetic construct
  source 1..120: mol_type = other DNA
gggtggagtgctggttcagggtggagtgctggttcgggtcggagtgctggttcggggtggagtgctggtgtggtttggagtgctggttccagttgagtgctgatttgggtcggagtgctg

SEQ ID NO: 27448 - DNA, 120 bp, synthetic construct
  source 1..120: mol_type = other DNA
tcattgtagtacacgttgattctctccagctgcaagtcactgtctccatggtaactgcctgtggggtcgatcccatgctcatcgctgatgacctcccaaaactgaaatgaaaaaagaacc

SEQ ID NO: 27449 - DNA, 120 bp, synthetic construct
  source 1..120: mol_type = other DNA
cattcaaaccgtagagaaaaatatacaaattaaattcacatgaagctagcgcaataaatatgaccgtacccccgacccaagtttctgagacaaatacacccaggggaatgccaaccgcgt

SEQ ID NO: 27450 - DNA, 120 bp, synthetic construct
  source 1..120: mol_type = other DNA
tacattgatgtcatcaatattacaaaaaaggaaaaaaaaagtgacaggcaacagtgaagagcaccagagacccagcgcacacctaaagtagaccatgcttctttccttccactgccaggt

SEQ ID NO: 27451 - DNA, 120 bp, synthetic construct
  source 1..120: mol_type = other DNA
atgacgctgaaggtgttcatgatgcggtctgggtactcttcccggatcttgctgatgagcagggtgcccatcccggaccccgtgccgccccccagagagtgggtcagctggaagccctgg

SEQ ID NO: 27452 - DNA, 120 bp, synthetic construct
  source 1..120: mol_type = other DNA
agggcacaatagctttgtcatgttggaggcagcatttaaaccaggtagtttgactccagaatctatgctctttgatgctgttcctaaaaataacattcttattagcagccctctcagctc

SEQ ID NO: 27453 - DNA, 120 bp, synthetic construct
  source 1..120: mol_type = other DNA
gaactcttgtagtgatctgaagtaggcatgcagcttctaaccacactctgatagagtgatcagtggaggcatggctttgattcttcattgtgtctaggaaaccaaatagtagagatttaa

SEQ ID NO: 27454 - DNA, 120 bp, synthetic construct
  source 1..120: mol_type = other DNA
tgcaccaataacaacttaaactccttccctctattgtctgtcttatgccgtcctttgctttatctgaagacgagttgagaaatgaaaggatcatgttgattagctgtcactatggtgacc

SEQ ID NO: 27455 - DNA, 120 bp, synthetic construct
  source 1..120: mol_type = other DNA
ttatactgttggaggcctgccttcaggatagtttcttagatgtgggattgccagtttttaagagtactttgtatgatagggatattatattagtccttggtgatcctttgtatggtaggg

SEQ ID NO: 27456 - DNA, 120 bp, synthetic construct
  source 1..120: mol_type = other DNA
caaggtgtgcgtaagcaccatccctgcaactgtgagtctgtgtaaaagggcttatcaccgcactacccatttaaacaattggcgctggcttatgattcttctaattatataataaacagt

SEQ ID NO: 27457 - DNA, 120 bp, synthetic construct
  source 1..120: mol_type = other DNA
ccctctcgtgtgttagttctttcaaaatgaactgcagccctcgccagatccacattgcgctttcaccacatgtgaaacaattcgcaacaagaaccttcattcctttatatttcttatata

SEQ ID NO: 27458 - DNA, 120 bp, synthetic construct
  source 1..120: mol_type = other DNA
aaagtcttcgtcattgcaactaacaaattggggaaaatgtcatcaaatgtctatttaagagatctcatccctattccttctccttcctctcccttggtaacggcactcctagggctgtgg

SEQ ID NO: 27459 - DNA, 120 bp, synthetic construct
  source 1..120: mol_type = other DNA
tggcattaagtacattcacattgttgtacaaccatcaacagcatccttctccagaatcttttcattttcctccactgaaaccctgtagccattaaacactaactctccattctccctccc

SEQ ID NO: 27460 - DNA, 120 bp, synthetic construct
  source 1..120: mol_type = other DNA
tctccatcatccactacccagtgcctcaatattcactgaaacgtaaaagcaggaaggagaagcaaagacctttatgagcctcaaggctatgtgacacccacagatcagcagggtatgcag

SEQ ID NO: 27461 - DNA, 120 bp, synthetic construct
  source 1..120: mol_type = other DNA
gtgctaaaagggcaaactaaagctgttctctaattaaccaacaatctaagttatcaagagaccatgttgatggctgagacagatgaacagccaaagaaagcaggccagagatcctgacaa

SEQ ID NO: 27462 - DNA, 120 bp, synthetic construct
  source 1..120: mol_type = other DNA
tatattttattgtacaagctgcacatttggtcactagtctttacatttaggtctttgctgtatcttgaatggatgtatgtgtgtgctgtgagataggagctctgcctgcttctggccact

SEQ ID NO: 27463 - DNA, 120 bp, synthetic construct
  source 1..120: mol_type = other DNA
cctcatagagcaaagtgacagtggttgctttaaatacatgttgaatatccattatccaaaatgcttggaatgagaagtgtttcagatttttggattttggaatatttgcattatacttac

SEQ ID NO: 27464 - DNA, 120 bp, synthetic construct
  source 1..120: mol_type = other DNA
ttactcaccttctagcgttgactgatgaaagtataatggtataaaggtaccctttttttctgtggctcaggatcatcacacaccctgagctgaaggcatacaggctgcacttgccttgat

SEQ ID NO: 27465 - DNA, 120 bp, synthetic construct
  source 1..120: mol_type = other DNA
ttccggttaattcctgatgcgcttttctaaatggtcacagtaacatacttccggttaattcctgatgcacttttctaaatggtcacagtaacatacttacggttaattcctgatgcgctt

SEQ ID NO: 27466 - DNA, 120 bp, synthetic construct
  source 1..120: mol_type = other DNA
ttcatgctgacaatttctggcagagccattgctaccagataactctaagtttgtgtgtatatactgatgtaaaactctccatggctccatggctgggcttttagtcagatttcaccaaat

SEQ ID NO: 27467 - DNA, 120 bp, synthetic construct
  source 1..120: mol_type = other DNA
aaatgatgttatttagattgaataactttagaatactcttcccacaagaccactcggaggatattcagatcacttctgctgcctcaggattcccacgtgaagggtgaaaatgatgccgga

SEQ ID NO: 27468 - DNA, 120 bp, synthetic construct
  source 1..120: mol_type = other DNA
gtccagtttaggacattttatgttcaactaagcctagctgtgaaagtgcctccccagtaaccattcattcaaatcatctcatgctgttggaaaccccataatgttccaaacaccgtgcta

SEQ ID NO: 27469 - DNA, 120 bp, synthetic construct
  source 1..120: mol_type = other DNA
tgatcccctttttctatccctacacttgaagggttatcatcacacaaaatctgggcattggtgcatgaaattggatatttttttcacaacaccacacccttgcctcttaagtacaggcac

SEQ ID NO: 27470 - DNA, 120 bp, synthetic construct
  source 1..120: mol_type = other DNA
aaaaattttttccaagcaattctgtttattcagtgcttgctctatgccctgcacactgttacatgctgacaaaacaacaaaaataaaatagatcagacactgctccccctgtgggtgggt

SEQ ID NO: 27471 - DNA, 120 bp, synthetic construct
  source 1..120: mol_type = other DNA
caggaactggttagaaatgcaaattctcaggccaggcctcagacctactcaacctgagggtgctgcacagaagtggctgaacaagccctccaggtgattctgatgtgttccaagcgtggt

SEQ ID NO: 27472 - DNA, 120 bp, synthetic construct
  source 1..120: mol_type = other DNA
acattgaaattgaaggtgacggtcaagtttctcacttgcagcagcacaagtgtgagtaggactcctagaggcagaggcagccatgaagtcagaaatccctaaagaatttgcagagatgtt

SEQ ID NO: 27473 - DNA, 120 bp, synthetic construct
  source 1..120: mol_type = other DNA
ctgagccgcagccatgatgggatgggaggtggtacacacctcactatattccctttccttttgctgtttagacaaaattgaacagaatcaatgttaaaatagagatcataagactgacac

SEQ ID NO: 27474 - DNA, 120 bp, synthetic construct
  source 1..120: mol_type = other DNA
gagcttgaaggatccatggcttgaacccaggcaggctgactccaatcttagctttaatgaatgaatgaataaaagaacaaacaatacaacaaatgagtgtgtcttgcttttggccaaggg

SEQ ID NO: 27475 - DNA, 120 bp, synthetic construct
  source 1..120: mol_type = other DNA
aaaaattcagtgcaccagtcctaccagccatatttcaagctcctaatagccacacatgcctggtgactactgtatttgatggcgtagacacagaacattcccatttttgtggaatgttct

SEQ ID NO: 27476 - DNA, 120 bp, synthetic construct
  source 1..120: mol_type = other DNA
agaaagaactataagtgcctgtggtgtattttcaacagctctgtgaatttcattattatgtttctgaaagtgccgtggtgacctcacccacatgattgacatggtgtcccatttgtgagg

SEQ ID NO: 27477 - DNA, 120 bp, synthetic construct
  source 1..120: mol_type = other DNA
caacattttaaaaggttgcagggcatgcaaaagtgaaagagaaagaggcagagagggagaccgaaggagagagcgcagagagggagaatgtgtctgcgtgcgtgtgtgagaaagaaagtg

SEQ ID NO: 27478 - DNA, 120 bp, synthetic construct
  source 1..120: mol_type = other DNA
atttgggcacacaggtgatgtcatggtaaaatgaatatgtgaaaagtgctttgggcatcatatggtccatgaataattaaggtgaggatgatgggattcttgtctgtagaaaggaacccc

SEQ ID NO: 27479 - DNA, 120 bp, synthetic construct
  source 1..120: mol_type = other DNA
atcccagaactcgcgctgctctttttagtcagagaagctctactttcctctcttgaatattggagttctctggaagctcttaggtaaaaatactgccattgctaaaagtaatttggaagc

SEQ ID NO: 27480 - DNA, 120 bp, synthetic construct
  source 1..120: mol_type = other DNA
taatttaaaaaataagacaaccattaaataaaaggtatacatgttagtatttggtactctgtattctttatggggaggccctggctgcctgagagaccaagcaggggatggcagggtctg

SEQ ID NO: 27481 - DNA, 120 bp, synthetic construct
  source 1..120: mol_type = other DNA
ttcaccagttcacctcctattcaccactccgctaattcaccagttcacctcctattcaccactccgctaattcaccagttcacctcctattcaccactccgctaatgcaccagttcacct

SEQ ID NO: 27482 - DNA, 120 bp, synthetic construct
  source 1..120: mol_type = other DNA
tcacttggaaagataaaacttttaaaaataattcaagtggaaaaagtgctgttattttaaaataccaatacctgggattctggcttgatctagtttttggcatatccttcctattctgac

SEQ ID NO: 27483 - DNA, 120 bp, synthetic construct
  source 1..120: mol_type = other DNA
ttcaatgacttggaattcaatttgtggctgtgtacagcaaatatgagaagaatggaaagactggtagcagggagagccttatttaactctggacccctgattacttaccacagttggtag

SEQ ID NO: 27484 - DNA, 120 bp, synthetic construct
  source 1..120: mol_type = other DNA
acacaaaaattacatactgtatgtttccatttatatgaaattctagaaaatataacttatagtgacagagaggagatcagtggttggctggggactgcagaagaagagaccagaatagcc

SEQ ID NO: 27485 - DNA, 120 bp, synthetic construct
  source 1..120: mol_type = other DNA
ggaagggtacaaagaggtttgtgccttcttgatcaggatagtatacttctattacagttatcataagattgcattcagacactacatcagctagtccttgccaacaaacatcaccaggtt

SEQ ID NO: 27486 - DNA, 120 bp, synthetic construct
  source 1..120: mol_type = other DNA
actgttagcaaaatgacttatagaggaaagttgtacaagttcctccttaagtcttaaaaaaaaaatcagtttccaatgggttggtttcttcctatccacttgaaataaaaggtgagagaa

SEQ ID NO: 27487 - DNA, 120 bp, synthetic construct
  source 1..120: mol_type = other DNA
tgtctggagatggtctgttgcttccgttagaccaatagtgagaattgatttaatctacttaggagttgagctgaatttgaattttgttgttgtggttaccttcagtgcactgcacgcttc

SEQ ID NO: 27488 - DNA, 120 bp, synthetic construct
  source 1..120: mol_type = other DNA
tcagtcgtagtattttcttactctctttcatttctgctgggtgtgtagttatgtctgttttttattgcttctatcattgatttgtgcctctcctcgctttcttgattagtgttgccagtt

SEQ ID NO: 27489 - DNA, 120 bp, synthetic construct
  source 1..120: mol_type = other DNA
tggtataactagataagatctgtgttatagtgatagttgaatttctggtacagttttatttctgttctaacttacctttttgaatgatgagattatgatagcagtcacctacagaaatgt

SEQ ID NO: 27490 - DNA, 120 bp, synthetic construct
  source 1..120: mol_type = other DNA
ttgtaccattaaatatctatatgattcctctcctcttgaggtccctagataacctggggctgctgggcctgtcagaaagtgttattcttagggatcaatgcaacaagaagagctaactat

SEQ ID NO: 27491 - DNA, 120 bp, synthetic construct
  source 1..120: mol_type = other DNA
atcaatgcatgatttataagagggaaagtggagaagtgccctcagttatttcggtctcttttcttcttcaccagatctcttgatgcataagtgttacccatcacataggccagcagatct

SEQ ID NO: 27492 - DNA, 120 bp, synthetic construct
  source 1..120: mol_type = other DNA
cggaattgtgcacatgcgtccctgcaatgtacgttatcttattccttttaaaaggtgatttgtctcaccagaaggcagtattctcttaggctcggcaagagtaactttgacttctttgtt

SEQ ID NO: 27493 - DNA, 120 bp, synthetic construct
  source 1..120: mol_type = other DNA
tcagtgtgctgaaggcaaataccattagccaacagttttgtgcctaggtaaaccagcattcaggtaaaataaagatgtgttagccataggaatctgaaacagctgaccatgaagagatag

SEQ ID NO: 27494 - DNA, 120 bp, synthetic construct
  source 1..120: mol_type = other DNA
atagtcaatatgtcagagtggcatattttgggggtggtatgttcttaagcccttcaacacccacacttttttctggatgcccatttgattcacagtgcttcagtattcttgtttgccctt

SEQ ID NO: 27495 - DNA, 120 bp, synthetic construct
  source 1..120: mol_type = other DNA
attctatgttgatgattactgactgatcagggttgctaaaggttggggcggctgtggcaatttcttgaaataagacaacaatggagcttgtagcattgattgacccttcctttcatgaac

SEQ ID NO: 27496 - DNA, 120 bp, synthetic construct
  source 1..120: mol_type = other DNA
agcatctgaccacagttagagattactgacacttcagcaaagaaaggaaactgaggcttatccttgaaaacaagtcctactgataatacacacctacccaggacttatttgcacagtggt

SEQ ID NO: 27497 - DNA, 120 bp, synthetic construct
  source 1..120: mol_type = other DNA
agggcattatgggaacacagaagtcaagtgcagggcattatgggaacacagaagtcaagtgcaaggctttatgggaatacagaagtcaagtgcagggcattataagaacacaaaagttaa

SEQ ID NO: 27498 - DNA, 120 bp, synthetic construct
  source 1..120: mol_type = other DNA
catgactagtggggatattttctcagaagggggaaaaaagttaacaattgctatggtgtggctgttgtccagtgcttctgtattgatgtagaatgttcactgagcagcttgtaggagaaa

SEQ ID NO: 27499 - DNA, 120 bp, synthetic construct
  source 1..120: mol_type = other DNA
acaaaaacactcccttctctcagtaaagacccaaatcaatccactagcaaactagaacaagagaagttagtgctgggtatccttaaatgtgttctgagaatgattttatttgcgggggtg

SEQ ID NO: 27500 - DNA, 120 bp, synthetic construct
  source 1..120: mol_type = other DNA
gtgcagaggttactgtttgtattattagtgtaaggtgccttctttttagttcacctgggcgaatcctggctgcaagtttaataatcggtaatcttgaaaccagcattaaacccagggcat

SEQ ID NO: 27501 - DNA, 120 bp, synthetic construct
  source 1..120: mol_type = other DNA
gccctgcctatctcctttctcattttgcccttttattccactcagttcttcttgtaaagtgtgtatttgccccatcagtctctcagtatgtgtagaaaccagaatggatggattttggtc

SEQ ID NO: 27502 - DNA, 120 bp, synthetic construct
  source 1..120: mol_type = other DNA
aattgcacatacattctgaagtggactgattttccccttgcgtgtatagtgtggaggaggaggataaaaggcaggaacaatagcttgagtatcacagcaaagaaactcatcttatgtgga

SEQ ID NO: 27503 - DNA, 120 bp, synthetic construct
  source 1..120: mol_type = other DNA
gattaacttctgtataaatgagaaaaatgtaagcccctgtgctgacgtaagcgctctgaaagatagcacagatgaacacggcaataggatctacccacaaggagctaatgggagatgatg

SEQ ID NO: 27504 - DNA, 120 bp, synthetic construct
  source 1..120: mol_type = other DNA
cagagtactctgcaagcattttgcttctttactaagaggcagcctcatgcagtagaaagatcacaggctctaaagccaagactgaaaaacaaacataaaattcttcacgcctgtaatccc

SEQ ID NO: 27505 - DNA, 120 bp, synthetic construct
  source 1..120: mol_type = other DNA
agagcaagactccatctcaaaaaaaaggggggtgggggggagaaatttaaaacagtatgagtggaaatgttctcacattcagtgcatcctccaacaggatttgtaagctaaagttgaaag

SEQ ID NO: 27506 - DNA, 120 bp, synthetic construct
  source 1..120: mol_type = other DNA
ttagtcccttcctctagactattaatccctggctcctggcaaaaactccttgcatttgtacagaaatggaatcggtttttggccacattaagcgatacttctttccttaagcacatcaac

SEQ ID NO: 27507 - DNA, 120 bp, synthetic construct
  source 1..120: mol_type = other DNA
ttgagtcaacagcaatctgttatgaagatgcaaggtccagggaatactgttatttggaatttgcttcaaaataatccaggtgcagaggtggagtagagaaaacgatgttggctctgctgc

SEQ ID NO: 27508 - DNA, 120 bp, synthetic construct
  source 1..120: mol_type = other DNA
gctgttttaatgggattattttggaatctgctatttctgtctcactccttttccccaaactgtcatataagtactgcagcttgactacttcccagctgccaaatttcactccagagatgg

SEQ ID NO: 27509 - DNA, 120 bp, synthetic construct
  source 1..120: mol_type = other DNA
attgactatgtgccaggccaggcaatgttctcaggtttatatgtatacaattctgacagtggctctgtggctcccattttagagagagagagagagagaagaatgattattttggaagag

SEQ ID NO: 27510 - DNA, 120 bp, synthetic construct
  source 1..120: mol_type = other DNA
cagctctacctcttggtgggccccagtgtacttcagcatgatctcagttctttctttctctaccagtttccatgatacatacatcctgaaaatcacagcatcaccattcaatagacaaaa

SEQ ID NO: 27511 - DNA, 120 bp, synthetic construct
  source 1..120: mol_type = other DNA
atcatcgcatcttgaaagtagagaggaaaggaatggaagggagaactgttactatcagaggcttctggaaatccccgcttgatggtacatgactctttcttaagaatggttctcttttac

SEQ ID NO: 27512 - DNA, 120 bp, synthetic construct
  source 1..120: mol_type = other DNA
aatgtttgcatgggttaaaaaattgaagccaggaaaagcaccacgtgtactttgtgtagtaacgtgtactaatgtacgtgttcatcccatttccctccatacccctgaaggtgatgactt

SEQ ID NO: 27513 - DNA, 120 bp, synthetic construct
  source 1..120: mol_type = other DNA
ctttgtatcacgcttagttatgtttcagtttagccatttagccgtggtatttcccagtggtctggattgacagtttcaggaaggagtagcaccttagaatctaaaccagtgactcacttt

SEQ ID NO: 27514 - DNA, 120 bp, synthetic construct
  source 1..120: mol_type = other DNA
aaaagcctgctttttcacacaagtttaggtgtgtgaaagagaaagcaagaaaatacagagaaagagacaggaaagagactgtaactgtcaatggtgggagttgttagaagtggggacagg

SEQ ID NO: 27515 - DNA, 120 bp, synthetic construct
  source 1..120: mol_type = other DNA
tctgtatacatgggttttatgtcccccgaatactgtattttctaactgcgtttggttgaaaaaaatttgcatataagtggacctgggcagttcaaacctgtgctgttcaggggtcaactg

SEQ ID NO: 27516 - DNA, 120 bp, synthetic construct
  source 1..120: mol_type = other DNA
attgagtattttaaaaatttaaaagtaggtcagtttataacgagtaaatacctaacacaccaagaatgtgcagtgaacctcaggcatttaagacacctcccccaccgcccgccccccgcc

SEQ ID NO: 27517 - DNA, 120 bp, synthetic construct
  source 1..120: mol_type = other DNA
ggaagaggagaggacaggagaggagaggggagtgtatttggttgtttcatatcactaaggaggcagtaagtacaaatatcatcggggttttcccaatgggtaaaataaagaggttaaaca

SEQ ID NO: 27518 - DNA, 120 bp, synthetic construct
  source 1..120: mol_type = other DNA
atgcatcattgatggttccagctctccttcccctggatgactagccatttctcctgataccatttattaatttatcttttctcctttaattcgaatgcatctaccaaaagctaacttact

SEQ ID NO: 27519 - DNA, 120 bp, synthetic construct
  source 1..120: mol_type = other DNA
agatttcaggcgtgagccctcgcactggcctctattctctacttctgtgtgatcacattttttaactcccacatgtaagtgaggatatgtgatatttgtctttttgtgcctgccttattt

SEQ ID NO: 27520 - DNA, 120 bp, synthetic construct
  source 1..120: mol_type = other DNA
ccttacagagctcaatgcagacttacttgaggatgttttccaaactcaatgagtaagtgattgagcttagatatgtagcatggtatatctgggagggtattggaccacaaaagcacatct

SEQ ID NO: 27521 - DNA, 120 bp, synthetic construct
  source 1..120: mol_type = other DNA
ttagtttccccacgttaacaataggattgcagctttacttatttgtattctgtacatctacatacattatttctaggatgaactccttgttattcattctctctctcttagatagcattt

SEQ ID NO: 27522 - DNA, 120 bp, synthetic construct
  source 1..120: mol_type = other DNA
caaggttgttgaacaactggaattctcatacattgttgctgggaatgggggtttccacccactttggaaaaatgtctggcagtttcttattgaagtcaacatgcacttatcctgtaatcc

SEQ ID NO: 27523 - DNA, 120 bp, synthetic construct
  source 1..120: mol_type = other DNA
tatggatatcaaatgccctctttgttcatttagcagctagaatgctggcagtcacacacgcctttccttgtttgggaaacctgatcagttcaatacttagagatgttgacatcagaggtt

SEQ ID NO: 27524 - DNA, 120 bp, synthetic construct
  source 1..120: mol_type = other DNA
tggctggggacacagccaaaccgtatcagtagacaaattcatacctatcactgaaagatgcaaagtaatgatgaagacagctaatgttctgtggagcacacaactgaagtttaatgtctg

SEQ ID NO: 27525 - DNA, 120 bp, synthetic construct
  source 1..120: mol_type = other DNA
agaggtacctctatattttcaggaaagtgtttgaggtgagcagtcgcaatagctctgctttaatcaactgtgtcttttattaagccagctcttcctaacaaaggccaggaatagaagagg

SEQ ID NO: 27526 - DNA, 120 bp, synthetic construct
  source 1..120: mol_type = other DNA
accacaattattattatctctataatcgctaccaccactatcatcactaccaccagtccaaccactaccgccaccaccaccatcatcatcagtatcatcataatcatcatcaccattacc

SEQ ID NO: 27527 - DNA, 120 bp, synthetic construct
  source 1..120: mol_type = other DNA
ttgatctgtatccaacttctgaaggacactgtgtacttccactgcctgtaaaatacttttaaagaaagggagttgacacagagggccacagattgtgaaccttattattgctggggtgaa

SEQ ID NO: 27528 - DNA, 120 bp, synthetic construct
  source 1..120: mol_type = other DNA
gaggttcagtaacttgaccaaggttaaacttccactagtatgtggcacatgtgtgattctaatcaagggaggctggctgcaaagcctctgcttctgttattgctagaatctaataagtta

SEQ ID NO: 27529 - DNA, 120 bp, synthetic construct
  source 1..120: mol_type = other DNA
aataataaaataaaataataaaaaagaaaatagctaaaagatgtgaagttggctagtctaaagattcaaaagtaatgaatgggagaaagagaaattagactcaccatgtcctacttattt

SEQ ID NO: 27530 - DNA, 120 bp, synthetic construct
  source 1..120: mol_type = other DNA
gattttctcagatgtatgcctgtgtttgtgactggcttggattttcatacagggaagaagtacaatgggtaagaatgtctgtgtacatgtgcatgagcacacacactcctggagaatatt

SEQ ID NO: 27531 - DNA, 120 bp, synthetic construct
  source 1..120: mol_type = other DNA
gacttttagttcagagtttatgaattgggcattggtagggtgtatatgtgtatgttggtgaaaatcagtttgccagtatctgccatgtgatagtgataataaagtcatgaaacctgttac

SEQ ID NO: 27532 - DNA, 120 bp, synthetic construct
  source 1..120: mol_type = other DNA
ttttttcctgcttagagcagttctccttcttcctataagtgaggcaactttatactttcaaatttagacaagatgtttcctgtgtagctcataaaaaagtgaactgagaaagaaaaaggg

SEQ ID NO: 27533 - DNA, 120 bp, synthetic construct
  source 1..120: mol_type = other DNA
tatacaagtattgtacctagggtggatgccttcctcctcttactttcgggaatgtcctgctccgtctatggagtagttgtcgtttcaccactttactttcttagtaaacttgcatttact

SEQ ID NO: 27534 - DNA, 120 bp, synthetic construct
  source 1..120: mol_type = other DNA
tctaaaacttgtcttcgctaacattccagttgatcctctagaactgaaacagaatagcagcagcaccaccttaagaaattgtggttatagctctccttgtgacaaagtaggtggctctga

SEQ ID NO: 27535 - DNA, 120 bp, synthetic construct
  source 1..120: mol_type = other DNA
agatcatcaagcttgtgacttgtagagcctttacctattgtctaccctctttgtgttcctaactctaccatagtgggtccagcccattgtgggtgctcagtaaatatttgttgaataact

SEQ ID NO: 27536 - DNA, 120 bp, synthetic construct
  source 1..120: mol_type = other DNA
catttatgtttctgaagcagacaattatctcaattacctaattaagcagacaattacctaaatgccctcttagaacctttaactcattcccatacctggaagtccatcccaacctgaagg

SEQ ID NO: 27537 - DNA, 120 bp, synthetic construct
  source 1..120: mol_type = other DNA
atactcctgtagtagaactagctgtatttcttacgtgttgcagtgaggaagaacacacatcatggggagctgtggcggggtctcagtaagaaggtgttagagcagacttggtatacaatt

SEQ ID NO: 27538 - DNA, 120 bp, synthetic construct
  source 1..120: mol_type = other DNA
gacaattacctaattatgtcctcataggacttttgactccttcccaaacctgaagtccatcccgatctgaaggttcacccgtcactaagagacaaatggtgcttctgttaagatcagttt

SEQ ID NO: 27539 - DNA, 120 bp, synthetic construct
  source 1..120: mol_type = other DNA
tgtttcttacttgttgcagtgaggaagaacacatatcatggggagctgtggtggagtctcagtaagaagctgttagagcagacttagtatataatttgggcttgtgttaggggatttggg

SEQ ID NO: 27540 - DNA, 120 bp, synthetic construct
  source 1..120: mol_type = other DNA
aatggttttgtcccatgaacaagatcacacagcttgtgaatcttagagcctttacctattgcttaccttctttatgtccttaacactaatatagtaggcctcacccattgtgggtgctca

SEQ ID NO: 27541 - DNA, 120 bp, synthetic construct
  source 1..120: mol_type = other DNA
ataggaaacattagaaatcatctctttagtgactggtacacagtcattttggtttagtcatgtaacagacggcttctgttgtgtctccaagtgcacgttaccgtgggtcctgggaggtgg

SEQ ID NO: 27542 - DNA, 120 bp, synthetic construct
  source 1..120: mol_type = other DNA
tcactcacacaaaaaaaccatagatggttttgctgctaatgaatttcagcagggcctcaaacatggtcagttcaaactattagccccatttatggaatgtggtgcagaggttccaaaagg

SEQ ID NO: 27543 - DNA, 120 bp, synthetic construct
  source 1..120: mol_type = other DNA
aatattatcatgatcatcaaccagtcattaggatcaaagcttagagccatacacaaggtagcagtgtagcagttcgccaactccatgaatccaaatggcaatactctctgaagttcaggg

SEQ ID NO: 27544 - DNA, 120 bp, synthetic construct
  source 1..120: mol_type = other DNA
ggagagttttgatctaggatagctactccctagcttcttaagttcatttcactgccagcaaaaggctgccatgttactatcaacactctagtcccatcctagacaagcataaaaatatca

SEQ ID NO: 27545 - DNA, 120 bp, synthetic construct
  source 1..120: mol_type = other DNA
tcagtgcatttctaaggtttcccacttgtatgaatcctcttgtgagtgatcaaatttgagctcagacggtaagttttcaaaacctctgggcatctgtagatttctcgttggagtgaggat

SEQ ID NO: 27546 - DNA, 120 bp, synthetic construct
  source 1..120: mol_type = other DNA
cactacatagatatggtttctcgccagtatggcttcgctggtggacaagcagatcagaactctgaccaaaattcttgccacaaatgtcacatgtatagaattttttacctgcatgtgttc

SEQ ID NO: 27547 - DNA, 120 bp, synthetic construct
  source 1..120: mol_type = other DNA
ctgctcatgaagaaagcaaatcaaaagggacagtgaatgagtatctctggagtcctttctgcagaaagcttggaagaaagtagttaatgatcattagaattccaagtgaccagagagaaa

SEQ ID NO: 27548 - DNA, 120 bp, synthetic construct
  source 1..120: mol_type = other DNA
tatgtggcttctccttagccagactcgattacaagcactgcatgcattactcagtgtgataagatcatgataatccctttaaaaagatcgcccgaatttaagcctggattaggaacacgt

SEQ ID NO: 27549 - DNA, 120 bp, synthetic construct
  source 1..120: mol_type = other DNA
atttcagacactgttaagtacataaggaaagatccattaggaagagagactggaacaaatgaggaattgagaataagtcaggactctcacagtgccatttcttcttccccatcccacctc

SEQ ID NO: 27550 - DNA, 120 bp, synthetic construct
  source 1..120: mol_type = other DNA
tgtcagtaagctctggagcacctgaaacaagttgtgttgggtattttatttactggagagcgattagtgactgatgcctacttacagcgactagagacgcatgctccgatagcagcacaa

SEQ ID NO: 27551 - DNA, 120 bp, synthetic construct
  source 1..120: mol_type = other DNA
tagaaccgggaggaactccacttctgcctctaccacagaagtttgaagagtaccttgggtagtggtaataaattacaaaactgaagttacttcaaactggtcatgacagtcattagtctt

SEQ ID NO: 27552 - DNA, 120 bp, synthetic construct
  source 1..120: mol_type = other DNA
gtgtgcgcttttttcttgtactaataccaacagctttaattatatgggctttaaaatatggtgtagtatctagtagggccagttctccctcagagctcttctttcacagtgtagcctacc

SEQ ID NO: 27553 - DNA, 120 bp, synthetic construct
  source 1..120: mol_type = other DNA
tgttttttttttgcaaatggaaacagcatgttctcttctaatatgtcttctagtggctgctatctggcatatgaaggctgctgatttctgtatgttaacttctttcccaatttgtatacc

SEQ ID NO: 27554 - DNA, 120 bp, synthetic construct
  source 1..120: mol_type = other DNA
gacctgcgctcttggaccgcggcggacatggcggctcagatcaccaagcgcaagtgggaggcggcccatgaggcggagcagttgagagcctacctggatggcacgtgcgtggagtggctc

SEQ ID NO: 27555 - DNA, 120 bp, synthetic construct
  source 1..120: mol_type = other DNA
atgtctcttagggaaagcaggagcctctctggagacctttagcagggtcagggcccctcaccttcccctcttttcccagagctgtcttcccagcccaccatccccatcgtgggcatcatt

SEQ ID NO: 27556 - DNA, 120 bp, synthetic construct
  source 1..120: mol_type = other DNA
gacacagctgtgctatggggtttctttgcattggatgtattgagcatgcgatgggctgtttaaggtgtgacccctcactgtgatggatatgaatttgttcatgaatatttttttctatag

SEQ ID NO: 27557 - DNA, 120 bp, synthetic construct
  source 1..120: mol_type = other DNA
tacccataaggctagggttattgttcctgaagagaaatatatggttttgtgctgaagtgtgcaggagggttggtgtgggaggagggaggacatacaagcagccctggtgagaaaagcact

SEQ ID NO: 27558 - DNA, 120 bp, synthetic construct
  source 1..120: mol_type = other DNA
atctttaatgtcatattcagtccgacatctttgaagtagaaattggcggaaggtgctactctctgtgctaactgtcagatgatgtcaggtaattacacaggtgagctcccatgtaagaga

SEQ ID NO: 27559 - DNA, 120 bp, synthetic construct
  source 1..120: mol_type = other DNA
attcacagacagctcagacattaataaagaagctacaaccacctaaggtttaaccactgctaactcagttctgctatgggattttatcctgtgaactagatgaagctctcagggcctcgt

SEQ ID NO: 27560 - DNA, 120 bp, synthetic construct
  source 1..120: mol_type = other DNA
ctgactccactaccacacataaagaatccgctggaaaaaaacatataacgccagcacccaagagcaaaataaactgtcgtaagtccacaacaggcaaatcaacggtaacaagaaaatcag

SEQ ID NO: 27561 - DNA, 120 bp, synthetic construct
  source 1..120: mol_type = other DNA
aatgacaaaaccacatcatcctcagcagagtctacagaacatggagaaaggaccccactggccaacgagaacaccacaccatccccagcagagcctacagaaaatagagaaaggacagcc

SEQ ID NO: 27562 - DNA, 120 bp, synthetic construct
  source 1..120: mol_type = other DNA
atagagaaaggacagccaatgagaacaccacaccatccccagcacagcctacagaaaatggagacaggactccattggccaatgagaagaccacaccatctctagcagagcctacagaaa

SEQ ID NO: 27563 - DNA, 120 bp, synthetic construct
  source 1..120: mol_type = other DNA
gtaaagcctacagaacatggagaaaagactacattggccaatgagaagatcacactatccccagaagggcctacagaacatggagcaaaaactacgtcggccaatgagaagatcacacca

SEQ ID NO: 27564 - DNA, 120 bp, synthetic construct
  source 1..120: mol_type = other DNA
agtatatacacacaatatatatttgtcattatatgatttcttcagcaacaaattccaatgagactagcacctctgccaacactggatccagtgtgatctccagtggagccagcacagcca

SEQ ID NO: 27565 - DNA, 120 bp, synthetic construct
  source 1..120: mol_type = other DNA
tctgagtccagcacagtgtccagtgggatcagcacagtcaccaattctgagtccagcacaccctccagtggggccaacacagccaccaactctgagtccagtacgacctccagtggggcc

SEQ ID NO: 27566 - DNA, 120 bp, synthetic construct
  source 1..120: mol_type = other DNA
aagtgggagaagattccagaaggcgtacgtggtaaaggcgtgggagacagggatgcaattctgaaactattgactcttctttttttagagaaacagcctgtccctgagaaacacctttaa

SEQ ID NO: 27567 - DNA, 120 bp, synthetic construct
  source 1..120: mol_type = other DNA
ccaagggaaagactttctggcctgctgaggtcgaatcttccaagaggctcttgcaaagacccgagattctcataaatccccgcccagaagagctgcacgtatccctttcatgagtccagg

SEQ ID NO: 27568 - DNA, 120 bp, synthetic construct
  source 1..120: mol_type = other DNA
aacctctcacaaagatgcttatctaacctccccagcagtcatgggtttcagcaagaaagtctgtgatgtgaccagttgcacatgttttcccctaaaagcttactctagaaaggatatttt

SEQ ID NO: 27569 - DNA, 120 bp, synthetic construct
  source 1..120: mol_type = other DNA
ccccttcctgtgtgctgttctctgatccatttctagggtgtcctctgccctcatcccctgtccccgccaccgaaggtccctcctgcaccccttatgggcctttcctacaagcagccttca

SEQ ID NO: 27570 - DNA, 120 bp, synthetic construct
  source 1..120: mol_type = other DNA
ttattgttgactgtactcaccctgctgtgctatctactagatcttattcattctaattatatttttgtacccattattaaccatccctgctcccccactccccactacccttctcagcct

SEQ ID NO: 27571 - DNA, 120 bp, synthetic construct
  source 1..120: mol_type = other DNA
cggaggtggtgcttcttgctgctgtggggactgtggggggtcctgactctcaagctgaggggttggagtctgcaggctccgggcagaggattcttcctgcgacttctgtcatccccagct

SEQ ID NO: 27572 - DNA, 120 bp, synthetic construct
  source 1..120: mol_type = other DNA
agcattactccttttggcaggtccttcctcaggctgagaatctccccctctaccttggttttctctctctggccagcacccccaccccttgctttgtttttaatttttaacttttgtttg

SEQ ID NO: 27573 - DNA, 120 bp, synthetic construct
  source 1..120: mol_type = other DNA
gtgccagccatagaatagaaaagcagctcccaccttactcatgctcagcccctaagatatttataccctcattattctctcccacatcacacatgtgatttcctcaataaaagtgtactt

SEQ ID NO: 27574 - DNA, 120 bp, synthetic construct
  source 1..120: mol_type = other DNA
gactaagaattaaaccatctacaggtttacaggaaaggtatcagtaagtggtgttaaaataccaaattcagagcagcagatacacttttaagggacaggatctcaccatgttgcccaggc

SEQ ID NO: 27575 - DNA, 120 bp, synthetic construct
  source 1..120: mol_type = other DNA
caacattcctaccctgtaattatccctgccagctttactaccttggaggaaagaaataaccacgggtggggctggagggcctgctgatgtgcttgcactggggagaaatcactagaaagg

SEQ ID NO: 27576 - DNA, 120 bp, synthetic construct
  source 1..120: mol_type = other DNA
aggtagaggcggtcctgacacgggcagactgcgatgaaaccccagtttgttgggatcttgctcagctccctgctaggggctgccttgggtaaggaggcggccagctagcttctcacacag

SEQ ID NO: 27577 - DNA, 120 bp, synthetic construct
  source 1..120: mol_type = other DNA
aaaaaaaaaaaattaaaaataaataaataaaaataaaataaagggtttagtgtctatccctctccacaccgcagattcctaggccgcactccctttcccccgcttcccagttaccccgcc

SEQ ID NO: 27578 - DNA, 120 bp, synthetic construct
  source 1..120: mol_type = other DNA
gattggctcagaagggaaaaggcgggtctccgtgacgacttataaaagcccaggggcaagcggtccggataacggctagcctgaggagctgctgcgacagtccactacctttttcgagag

SEQ ID NO: 27579 - DNA, 120 bp, synthetic construct
  source 1..120: mol_type = other DNA
gaaggccacggccggggacacccacctgggtggggaggactttgacaacaggctggtgaaccacttcgtggaggagttcaagagaaaacacaagaaggacatcagccagaacaagcgagc

SEQ ID NO: 27580 - DNA, 120 bp, synthetic construct
  source 1..120: mol_type = other DNA
gtcccgggcctgggggcttcggggctcagggtcccaagggagggtctgggtcaggccccaccattgaggaggtagattaggggcctttccaagattgctgtttttgttttggagcttcaa

SEQ ID NO: 27581 - DNA, 120 bp, synthetic construct
  source 1..120: mol_type = other DNA
ctccgtctcacacacacacacaaaaaagtaaagtttgttgatgctgattgggtttagcctgagggtacagaaaaagtttaacacctgggagggtagccttaaagtgatgtttgtgtaaga

SEQ ID NO: 27582 - DNA, 120 bp, synthetic construct
  source 1..120: mol_type = other DNA
gctcctattcccagttgttctatccttgtaggttaaagattatgtcaaaaactatattgcattatctctttccttctccttcccattaagacggaaaaaacatccgggagagccggtccg

SEQ ID NO: 27583 - DNA, 120 bp, synthetic construct
  source 1..120: mol_type = other DNA
cagctacgtggccttcacggacaccgagcggctcatcggggatgcggccaagaaccaggtggcgctgaacccgcagaacaccgtgtttgacgcgaagcggctgattggccgcaagttcgg

SEQ ID NO: 27584 - DNA, 120 bp, synthetic construct
  source 1..120: mol_type = other DNA
aagcgcaactccaccatccccaccaagcagacgcagatcttcaccacctactccgacaaccaacccggggtgctgatccaggtgtacgagggcgagagggccatgacgaaagacaacaat

SEQ ID NO: 27585 - DNA, 120 bp, synthetic construct
  source 1..120: mol_type = other DNA
tgttaatatgtgaagataatggatatttgcggagggatagtgtctgaataccatctatctttatagtctgaaaagaacagtactgctgaagagttatacgtgtaggagttagagctacac

SEQ ID NO: 27586 - DNA, 120 bp, synthetic construct
  source 1..120: mol_type = other DNA
cgccctgcccccacgctcagagctccgtggcacgcccccccagccccacgaccctgagtgcacgctcctctcacctggcccggttccgcgcgctgtttttttaatcccttattttcccca

SEQ ID NO: 27587 - DNA, 120 bp, synthetic construct
  source 1..120: mol_type = other DNA
aggattgatcccaacttcttgccaaggcagtcgccctccgcttgtgctatcgatgaccttgcccatttcacctttagtatataattaaccctaggactaattttaatgatgtgatttatt

SEQ ID NO: 27588 - DNA, 120 bp, synthetic construct
  source 1..120: mol_type = other DNA
atgtacaaatcttaactattcagctcaatgatttgttacaatgcatccactcatctaatcaccacccaagacagaatgaggttccctcttgtcccctcccacaaggtaactgctcttctg

SEQ ID NO: 27589 - DNA, 120 bp, synthetic construct
  source 1..120: mol_type = other DNA
aaacccagaactgaaatctgtccattggatttagcaggtagaaggttaatagtgatctttcaagaaaagaggaaagaaaaggaaggcagtctagcactcacttgaggtgagctagtctcc

SEQ ID NO: 27590 - DNA, 120 bp, synthetic construct
  source 1..120: mol_type = other DNA
tgaagccacagcctgcatcttaatcactattttatcttagtgcctggtcttagaaattatattgactctttgatagaccatatataaggcaggtggatgagaatgtgggtagctagttgg

SEQ ID NO: 27591 - DNA, 120 bp, synthetic construct
  source 1..120: mol_type = other DNA
gtttttttggtgaacctgccagaaaagctgccaaaaagctgactcttcttgttaataaaatgacccaagtttgtattcctccccacaagagaggaggcctatcttacctgggccttagaa

SEQ ID NO: 27592 - DNA, 120 bp, synthetic construct
  source 1..120: mol_type = other DNA
aagtactttgttaaaggtatcccatctgcagctcaagcctgcagcccctcaccttttggtggctcctcaggcctctaggccttattcacctttcccctttcctgtgccacttctcctcta

SEQ ID NO: 27593 - DNA, 120 bp, synthetic construct
  source 1..120: mol_type = other DNA
aaaattgccaaataaagtacctctgcctgtgatattttctggatgtcctttatttactgtgacgtgtgtttgggtgccttgtttaggggtagaggtgaagtctgagctttgcctcattca

SEQ ID NO: 27594 - DNA, 120 bp, synthetic construct
  source 1..120: mol_type = other DNA
aggacaggtagtgaaaggatcagtgttcctgagaaacccatctcgtaataatgtcccctgctccccaaaggtggacttcacccttagctcagaaagagacttcgcactcctcagtctcca

SEQ ID NO: 27595 - DNA, 120 bp, synthetic construct
  source 1..120: mol_type = other DNA
cactgtacagatgggctgagccccttccttgtccattctcaggccagggacctggaagatctcagcccgattctcagatggcctggaatccaacagcagcacccagtttgaggtgaagaa

SEQ ID NO: 27596 - DNA, 120 bp, synthetic construct
  source 1..120: mol_type = other DNA
acttctcacatctcatctcagactcaaaaccaggaaacacccaggagacctggtttctctccaactctgtctctgtgactcggcccttttccctggctgagtttatttatttctttgctc

SEQ ID NO: 27597 - DNA, 120 bp, synthetic construct
  source 1..120: mol_type = other DNA
tcctttaatggtcttaatctgtttaagaggatttatgtttgaaagtccgtcagtagctccaatgagaatgtcagtctcaggcaggagggttaaatgagcctgagatgctttaaaaacctg

SEQ ID NO: 27598 - DNA, 120 bp, synthetic construct
  source 1..120: mol_type = other DNA
gagcacgtttttcagtgtaagtagtgttacctttttgatagtatagtttctgttttagttttgtcttgtatttattattttgatgggtacaattaactgtaaaggtcccctcaggggacc

SEQ ID NO: 27599 - DNA, 120 bp, synthetic construct
  source 1..120: mol_type = other DNA
gagctgtgggctcgaatgtgtgtaataaaagtaggatgtgtaccttggtctagtaattgttgaagttgaagaaaaagaccacacagagtgggctccagagcaaacttaaggctgtaatag

SEQ ID NO: 27600 - DNA, 120 bp, synthetic construct
  source 1..120: mol_type = other DNA
ctgcacaaatctggaaactgatctctaacaggctggatagttctgcctacaaaagtttgacaaactgtgggactatttaacataccctggggcaaaactttccaatgatatttggctgca

SEQ ID NO: 27601 - DNA, 120 bp, synthetic construct
  source 1..120: mol_type = other DNA
tgaaacaaatccataagattttccgtatcaacttttaccccaccatgcatgcttgaagagctgccgtaggaagctcaaatacgtggtgtacttactttcagtttttcccattgtgtccct

SEQ ID NO: 27602 - DNA, 120 bp, synthetic construct
  source 1..120: mol_type = other DNA
cccacctctctctgtcctttgtcttgcaggtggggagatggaggaggcagagctcacatcctggtattttgtgtcatctcccttctccttggatcttagcaagaccaagcgacaccttgt

SEQ ID NO: 27603 - DNA, 120 bp, synthetic construct
  source 1..120: mol_type = other DNA
agatcctatcccgagggcagatcgtgttcatgaatcgagagcccaagaggaccctgacctcggtctcggtgtttgtggaccatcacctggcaccctccttctactttgtggccttctact

SEQ ID NO: 27604 - DNA, 120 bp, synthetic construct
  source 1..120: mol_type = other DNA
ctttctctctaccaggactaagctgtcccaaggagaagacaacccggaaaaagagaaacgtgaacttccaaaaggcgattaatgagaaatgtgagttgcgggtgcctaggcagtagcttg

SEQ ID NO: 27605 - DNA, 120 bp, synthetic construct
  source 1..120: mol_type = other DNA
gtccagctccgggtgttccgcgagttccacctgcacctccgcctgcccatgtctgtccgccgctttgagcagctggagctgcggcctgtcctctataactacctggataaaaacctgact

SEQ ID NO: 27606 - DNA, 120 bp, synthetic construct
  source 1..120: mol_type = other DNA
aaaccatgatctacttggctccgacactggctgcttcccgctacctggacaagacagagcagtggagcacactgcctcccgagaccaaggaccacgccgtggatctgatccagaaaggtt

SEQ ID NO: 27607 - DNA, 120 bp, synthetic construct
  source 1..120: mol_type = other DNA
gccattgaagcagagagtggtaagttcagtggcgtttctgccctctgctggcccccagctctctccctttttcctcaggaacccaggggtccaggcccaagaccctcctcccgttttctt

SEQ ID NO: 27608 - DNA, 120 bp, synthetic construct
  source 1..120: mol_type = other DNA
ctactggattgcctcccacaccactgaggagaggggtctcaatgtgactctcagctccacaggccggaatgggttcaagtcccacgcgctgcagctgaacaaccgccagattcgcggcct

SEQ ID NO: 27609 - DNA, 120 bp, synthetic construct
  source 1..120: mol_type = other DNA
aagcctgtccttatgtccctagtgactcctcctctgctcccctgctgcctgtggcccttggtgctgcatcctagattctgtgctgagacggccttctccctacctggaacttctctctac

SEQ ID NO: 27610 - DNA, 120 bp, synthetic construct
  source 1..120: mol_type = other DNA
attccacgccctgcgtgctgacctggagaaggtgtggtcagccacccagggcaaccccctctgtcccaggtactgagccctgtcatgtgcagggcctgtgaccaactccccttttccaca

SEQ ID NO: 27611 - DNA, 120 bp, synthetic construct
  source 1..120: mol_type = other DNA
ggtttgggggcaggcagagtgccttggagaacttacaggtcctgccacaatcctaatgcaaggatggagctgcaagttcagtttgggaatcatcagcctggattggtttggtggaagcca

SEQ ID NO: 27612 - DNA, 120 bp, synthetic construct
  source 1..120: mol_type = other DNA
cttacaggtcatgcacgcagcctgtttgctctgacaccaacttcctaccctctcagcctcaaagtaactcacctttcccccttctcctcaccccctcttaggcttccaggttaaggttct

SEQ ID NO: 27613 - DNA, 120 bp, synthetic construct
  source 1..120: mol_type = other DNA
aaccatgaagctggaagcactgctgtgtccgctttcatgaacacagcctgggaccagggcatattaaaggcttttggcagcaaagtgtcagtgttggcagtgaagtgtcagtgtgtgttg

SEQ ID NO: 27614 - DNA, 120 bp, synthetic construct
  source 1..120: mol_type = other DNA
agaaggagaatatacaaaggcccagaggccgggggcaggacagggtacctttggggacattgcatgtaattgaccacattcggagtttggatttggaagtggtggaagagatggagatgg

SEQ ID NO: 27615 - DNA, 120 bp, synthetic construct
  source 1..120: mol_type = other DNA
gttgtgctgggaatccatactttccctggctggagtagaacctgtggactgtagtcctgagggcagtcatgttctgcctgtgcctggaaacacaagaaacttgactgcagagagaagaaa

SEQ ID NO: 27616 - DNA, 120 bp, synthetic construct
  source 1..120: mol_type = other DNA
ccccatccgtagttccccagtccctgtgaggcactgacccagccagaactctccagagatgttcccaaaaccatgggcatagtcctcccagtccctccagaagtctgtctgtccatccat

SEQ ID NO: 27617 - DNA, 120 bp, synthetic construct
  source 1..120: mol_type = other DNA
cacagaccctacctgtggtgaaggtgatgctggctggggaagtgaggttggggccccgcaggccacgcactgtggcggtgtagttggtgtggaggacaaggtcatgcagggggtagtcca

SEQ ID NO: 27618 - DNA, 120 bp, synthetic construct
  source 1..120: mol_type = other DNA
gaagtacaaagacccccactttggggcagagtgtgtgtgggtccttacctgggctgagggtgcgggcggttccctggatgctgtcggccttgtggggtcctcgcagcccatacagtgtca

SEQ ID NO: 27619 - DNA, 120 bp, synthetic construct
  source 1..120: mol_type = other DNA
gtcctcttctggggctgcgtgggagaagcccaggggagaatctgagtgaggggcgccatggggtgctccatttttatcttccaggcttggcccaaggctgaggtgggaagtttataggtc

SEQ ID NO: 27620 - DNA, 120 bp, synthetic construct
  source 1..120: mol_type = other DNA
gtactttgttaaaggtatcccatctgcagctcaagcctgcagcccctcaccttttggtggctcctcaggcctctaggccttattcacctttcccctttcctgtgccacttctcctctagg

SEQ ID NO: 27621 - DNA, 120 bp, synthetic construct
  source 1..120: mol_type = other DNA
tacctgaaggtggggtcaagggaggccccaaaacagtctacacagcaggagggatggctggggctcttgagctataagtggcacctcagggccctgacgggcgtctcgccatgctgctcc

SEQ ID NO: 27622 - DNA, 120 bp, synthetic construct
  source 1..120: mol_type = other DNA
tgatgctaccggcctcagcattgctatgaggcgggttcttttgcataccccagttatgggcctgttgccactctgtactcctctccccaggccagccgctcagcccgctcctttcaccct

SEQ ID NO: 27623 - DNA, 120 bp, synthetic construct
  source 1..120: mol_type = other DNA
tgaaaatgtggtggaggctggtccccgctgccgctgaacgcctccccacccacctgtccacccgcccgcagatcgcttcctggagccaggcaagaactccagagctctggccttcggctg

SEQ ID NO: 27624 - DNA, 120 bp, synthetic construct
  source 1..120: mol_type = other DNA
ttggcgtagtggcagttcctgtaccaccaggcccctcggtaggagacagcgcaggagatgagcaagctgttggggtcccgatcacgggcagagaagacactgccgctgtggtagctcatg

SEQ ID NO: 27625 - DNA, 120 bp, synthetic construct
  source 1..120: mol_type = other DNA
caggaggctctggccccacatggcctggagccgtgcattgtaggaggtggagggaaagaggccaaggagctggtgagatgtgatccctcctgggagcaggatctcctgtgggacagacaa

SEQ ID NO: 27626 - DNA, 120 bp, synthetic construct
  source 1..120: mol_type = other DNA
cctcgttctctctcaactcccacccatgccgttttcttggctcccacctcttgccccgggtcccagtccatctcacccgtggtgaggaagcctgtgagaggctcactctcctcaaagcct

SEQ ID NO: 27627 - DNA, 120 bp, synthetic construct
  source 1..120: mol_type = other DNA
ttctctatctgtaaccagggacttgcagccacaggggggtcctgtggggcagagctaaaggccactcgcatccagcccatccatcctctctccctggtacccgcctcacgctctttccct

SEQ ID NO: 27628 - DNA, 120 bp, synthetic construct
  source 1..120: mol_type = other DNA
agaggagcctgtaccacaaatgcagccactgctgttggtttctgtgtccccgctcattttgttttccagtgatgttcctcttaagaaaatgctcctgactcatccacggcagggaggttt

SEQ ID NO: 27629 - DNA, 120 bp, synthetic construct
  source 1..120: mol_type = other DNA
ccttccctgctgtgatcgaggatgcgccaaattcattacagatcatctcccgagggatgggtggctgggggtgcagagagggcctttgtttaccctgacccccagcccctgagcaagaat

SEQ ID NO: 27630 - DNA, 120 bp, synthetic construct
  source 1..120: mol_type = other DNA
attgtagggcggcggagaagtgtgagggactgagtctgggagtcctgggggaggtgagtggaggagagtataagaggaaagatgacacagtgatgagttgaggagggggtaaggggaaac

SEQ ID NO: 27631 - DNA, 120 bp, synthetic construct
  source 1..120: mol_type = other DNA
tgaaatagaaccacagctgaggaggggtaagggagggggttggggcaagggggacggagagtctggagacagtggagggggtgggaggttttgttattgtttttacctgacttttcggat

SEQ ID NO: 27632 - DNA, 120 bp, synthetic construct
  source 1..120: mol_type = other DNA
gtatgacttaactgctcatttctggcagctctgttggtaatgtgtgcttgttcccccactttccctttgcttttgaggctgcttagagtctctgggctggtcaatgttcagatccattcc

SEQ ID NO: 27633 - DNA, 120 bp, synthetic construct
  source 1..120: mol_type = other DNA
atcacacttccaacctgtccccagtcctgcccggatctttaatgggaggggttccccactctgacagtcttgtaaaatcctgagaatgtctgaggggatcagatggtagctagttcaggg

SEQ ID NO: 27634 - DNA, 120 bp, synthetic construct
  source 1..120: mol_type = other DNA
ggaagggaaagtgggggagcccaggagagaaacagaatagttgcaagtgggagtatgtgtgtgtgaggtgtgggagagggagagagaaagacagaggagaaaaaggggtctgagaaatag

SEQ ID NO: 27635 - DNA, 120 bp, synthetic construct
  source 1..120: mol_type = other DNA
gttttgggttgggggatagtgggaagtgattgctaaacagagtttttctggggggtgatgagaatgttctaaaattcattgtggtgatggttgcacaacccagtgaatatactaaaaagc

SEQ ID NO: 27636 - DNA, 120 bp, synthetic construct
  source 1..120: mol_type = other DNA
tggctgttttgcacctccatagcaggcctgtgcatgttgtacttgttccttttgcctgaagcacactcccccttctataccatctttctttagtctgttactcttcttatttttctacat

SEQ ID NO: 27637 - DNA, 120 bp, synthetic construct
  source 1..120: mol_type = other DNA
cctttgttcctgaggcaaagctgtcatctctattttttcatcccctcactgttcccaccaagagcttaactttagcttcttcttgcaatgtgttcctatattcaatttctgctccttgga

SEQ ID NO: 27638 - DNA, 120 bp, synthetic construct
  source 1..120: mol_type = other DNA
ctgtacattgggtctacataacgtatttgtcataaaactgcaagtttgtaccctttggccaacttctgcccatttcttccaccccctaacttctggtaatcacctttctgctgagttcaa

SEQ ID NO: 27639 - DNA, 120 bp, synthetic construct
  source 1..120: mol_type = other DNA
agcaatcctggagacaaccagcattggatctaacggctatgtgagatcatgggttaaaaaaaaataaagcctgctagatgggatttcctgctattagcagcagaaggcattttcattgga

SEQ ID NO: 27640 - DNA, 120 bp, synthetic construct
  source 1..120: mol_type = other DNA
atgcaatttacagttatggatacgcagtatttagaataggttaaggaagagttctgattgacttgctagctggtttctcatctcatgttggccaagttgtttcagttgttataatctgtt

SEQ ID NO: 27641 - DNA, 120 bp, synthetic construct
  source 1..120: mol_type = other DNA
ttcctgctatttctgtctcatgccttatcacctctgccatcattctaggaaaactgaatctgtttctaaaagaggattaaaaggtattacctgttgggtgaagtccagagtgccctggga

SEQ ID NO: 27642 - DNA, 120 bp, synthetic construct
  source 1..120: mol_type = other DNA
cctgatgtaaggcacggcttcaacatctgataaacagaaagcctgagactcaatgaggttaaatagtttgtctagagtgacagagctaataaaaggcagagctgatattggactcccctc

SEQ ID NO: 27643 - DNA, 120 bp, synthetic construct
  source 1..120: mol_type = other DNA
gccatgaggcctcacagtgtcatcagcctggaatttagtctttatagtgggggctcatcagatttgagagatgtgaaaaattgtgtttgtttcttcatcacttgaaattgggatgcattg

SEQ ID NO: 27644 - DNA, 120 bp, synthetic construct
  source 1..120: mol_type = other DNA
ccagaatgacatttggatcaaggcaggcagggtctgggactcattacttggggtgcttatgcctaggaaaatccctaacactagcagactctcaataaatacattttttttaagaaggaa

SEQ ID NO: 27645 - DNA, 120 bp, synthetic construct
  source 1..120: mol_type = other DNA
ctccgctgggggagcttaaagagcagtaaaagtgaggccaaaaaccaaacacacaagagcttagacaggaatgagaaatgtctgaagtgtggagttccagaacacagagtaataggatga

SEQ ID NO: 27646 - DNA, 120 bp, synthetic construct
  source 1..120: mol_type = other DNA
agaaatctcaggcatgttagtgaaaaataattgcagagcatcactatttgtgacttataagggcaagttgttgaaagttaatagaggtagtgctgaccaacaactcatgaaaatgttgaa

SEQ ID NO: 27647 - DNA, 120 bp, synthetic construct
  source 1..120: mol_type = other DNA
caggcatcaaattaccagccttggccagagatagaactcttggttttgtagtcaagtcccctcagaaagtcagaaaccaagaaaatgacgttctcatacagacagtttacaaaacatgag

SEQ ID NO: 27648 - DNA, 120 bp, synthetic construct
  source 1..120: mol_type = other DNA
cctcacaggatttttgtaagtgtgaaatttaataaagagtcttcttagcagtgatcacataataaacactcaaatgtattcccattttaattttttgatccctataactggagctcacat

SEQ ID NO: 27649 - DNA, 120 bp, synthetic construct
  source 1..120: mol_type = other DNA
atctatttttcttgacttacacatatgatgtaatcttggttttttcccaacatccctgggctctttcttagtcccctttgctggcctgtgcccttttcttttttctccagacaatctccc

SEQ ID NO: 27650 - DNA, 120 bp, synthetic construct
  source 1..120: mol_type = other DNA
ggaactttcgtcccttagatcttcacgactgtctacttattttgttttctcagctggatgtcactttctcaagtagggctctctagacatatgaactaaagtaggtgaatccatttctct

SEQ ID NO: 27651 - DNA, 120 bp, synthetic construct
  source 1..120: mol_type = other DNA
cctatgaaatttaggacaagaccccagtaagacaatgagttcccaggacttgatcattaactttcagccctatgagatgtgaacaatgtccacattctctctgtaaccccacacagagta

SEQ ID NO: 27652 - DNA, 120 bp, synthetic construct
  source 1..120: mol_type = other DNA
ccatgataaagatgggcaatctctgaagaaaatgtcacaatttcttaaggcacctggcctgggcacaatgttaacaaaactccctattttccccaccccatagtagctcagcacccacaa

SEQ ID NO: 27653 - DNA, 120 bp, synthetic construct
  source 1..120: mol_type = other DNA
ttaatctgagtaaaaatatctttttcaagtgtgtctcctgatgctgtccccaagttcagtggcacctccagaacacacacaggcaaggggcttgcaggggccacctatgtgcaatggagg

SEQ ID NO: 27654 - DNA, 120 bp, synthetic construct
  source 1..120: mol_type = other DNA
ctttgacaagccatagattatttagaaatgtattattttacttccaaaaatttaggccgttttctcaatcctactaatttgtaatttcataagattgtgttcagagaatatactctgtat

SEQ ID NO: 27655 - DNA, 120 bp, synthetic construct
  source 1..120: mol_type = other DNA
tttctgtggttataccacagtttaccttttctctatctaaatgtagatagtgtttcttttctcccctgttacattttttatatgtcatcatggacatatgaggaaaaattcaccgagact

SEQ ID NO: 27656 - DNA, 120 bp, synthetic construct
  source 1..120: mol_type = other DNA
gattgattagttaacaatttttcataagaaagcccattgtctgccttatgtgatcaaaatttttcctgagcatcatatacttcttttaattttgttattttcttcatgcaaagaaatcag

SEQ ID NO: 27657 - DNA, 120 bp, synthetic construct
  source 1..120: mol_type = other DNA
aattaccaggtatttgtagactcatacactcccaccagcaacacataaggaattagaaagtctatttgtcttcaaacataattataatgatgatgatagtattagaaatagcatctgtct

SEQ ID NO: 27658 - DNA, 120 bp, synthetic construct
  source 1..120: mol_type = other DNA
agtatccttttcctgcctttgggagttgttgtgaaagaataacaaacctaaagctgctgcaggggtcaccctaccatctcaggaaagctgacatactgtgtgtgatagagagatgagcta

SEQ ID NO: 27659 - DNA, 120 bp, synthetic construct
  source 1..120: mol_type = other DNA
accttcctctcgtctctgcaggccacaagctattatgctttcacatagtaaccatgcactgatgatttctggattagcaggacattagagccgtttggggaaagaaaggctttattcagg

SEQ ID NO: 27660 - DNA, 120 bp, synthetic construct
  source 1..120: mol_type = other DNA
tctctcccgcctggcaggcgagactgcttctccaggaggtacaggtgtttctagaaacacctacagggctacccccagtgacctgtgctgatggagatgagaacatggagcaaattaaaa

SEQ ID NO: 27661 - DNA, 120 bp, synthetic construct
  source 1..120: mol_type = other DNA
atgcatagataaagggacagagttgggtacatgaggaaaccaagtatgaattttaggaatactactcccatgcactcacaccttagaacacaacagaaattgttctgcccctgggaaggt

SEQ ID NO: 27662 - DNA, 120 bp, synthetic construct
  source 1..120: mol_type = other DNA
cttcagaggtgcctcagaggtctactcagttcctctagaaattaatctattgcttttacaaacaaacagcacacacttttaattcagagattacacgaagggtgtatgccagggagagtc

SEQ ID NO: 27663 - DNA, 120 bp, synthetic construct
  source 1..120: mol_type = other DNA
cgctccgtcccattgaagaaatgacactccctcttaggctgccacaggaaacgtgctgtggggacacgaaccatccggtcacagggcggcctcctgagaagacacggacagcgacgccac

SEQ ID NO: 27664 - DNA, 120 bp, synthetic construct
  source 1..120: mol_type = other DNA
tcctcacaggattaccgttaagtgtaaaattaaatgatgacacttcttagcactgatcacataataaacactcgaatacattcccattttaacttttctgatcctataactgcagctcat

SEQ ID NO: 27665 - DNA, 120 bp, synthetic construct
  source 1..120: mol_type = other DNA
ccaaacccagcacttgcttctctatcatattctcacttgcccctcctcttagtggtactcaccacaattggcctctcccttctccttgaaaataatctattttcctggacttacacacat

SEQ ID NO: 27666 - DNA, 120 bp, synthetic construct
  source 1..120: mol_type = other DNA
tttaatttttttttactgtggacatcagagcctataatgatgaggctcctgaattcctctctgtgtcctaccctcatcttctgcctctccatttccttgctttctatacatcagcccctc

SEQ ID NO: 27667 - DNA, 120 bp, synthetic construct
  source 1..120: mol_type = other DNA
agactgggtgacagagccaggccctacctcaaaaagagaaaaaaagtctctttcaatgaatctcatagtgctaaggttctgtgcaagctttagagatttctggaaatgatgacaacatag

SEQ ID NO: 27668 - DNA, 120 bp, synthetic construct
  source 1..120: mol_type = other DNA
gtgcaaaggccccttacacaagtctcatgaagagggcaagtacccaagctccttttatggaggaaataatttgggatccaatgataaagatgggcaatctctgaagaaaacgtcacaatt

SEQ ID NO: 27669 - DNA, 120 bp, synthetic construct
  source 1..120: mol_type = other DNA
gtgcaatggagagtccgaagttgcttttgtatagcacttaccctatcaatgtgttaaggtcaactgtgtaatcaaagtatgcagggggctgagatgatcgatcaaggactcaaagtcagc

SEQ ID NO: 27670 - DNA, 120 bp, synthetic construct
  source 1..120: mol_type = other DNA
cttttcatccttacaagtggagagaataaaatgatggagtttaaacaacttttgcaaggatgcaaggctagtaaacagtaactcggcctcccaaagtgctgggattataggtgtgagcca

SEQ ID NO: 27671 - DNA, 120 bp, synthetic construct
  source 1..120: mol_type = other DNA
ggctggaaatgtccacagactgtgccaaaaaatgaagcccataatatttgaaagtcagtttcttccatcattttgtgtattaaggttctttcttcccctgttctccgccttcctgcttgt

SEQ ID NO: 27672 - DNA, 120 bp, synthetic construct
  source 1..120: mol_type = other DNA
agaaggtgtttctgagaccagcttcctctccaagagtgatcattccttcttcaagatcagttacctcaccttcctcccttctgctgatgagatttatgactgcaaggtggagcactgggg

SEQ ID NO: 27673 - DNA, 120 bp, synthetic construct
  source 1..120: mol_type = other DNA
catgcctggggtaagccacccggctacctaattcctcagtaacctccatctaaaatctccaaggaagcaataaattccttttatgagatctatgtcaaatttttccatctttcatccagg

SEQ ID NO: 27674 - DNA, 120 bp, synthetic construct
  source 1..120: mol_type = other DNA
agccactgtaggactttgatctcagggggacaagctgacacaggcagctgggaattctgggcaggcataagcaggcatcacagaagagtgataaccaatcctagttaaaatagtctcagg

SEQ ID NO: 27675 - DNA, 120 bp, synthetic construct
  source 1..120: mol_type = other DNA
cttcagcaccctaatttaaaatcccctaaaacaaaggaaattgtcactagaaagaaaggaagctgaggctctgaccctcttaatggaggaagcttttggaaaggagccagtgagacaatg

SEQ ID NO: 27676 - DNA, 120 bp, synthetic construct
  source 1..120: mol_type = other DNA
atttccagcatcaccaggatctggaaagtccagtcaccattcctaataaggggggtggacacaacgccggctgtctcctcctgatcattccgaaaccaccggactttgatctggcctgga

SEQ ID NO: 27677 - DNA, 120 bp, synthetic construct
  source 1..120: mol_type = other DNA
tcatccggaaggaatcatggtttctgcttggacttgaacttttctttaggttctccttcctggaggccaactgaaatcagagtcagctatgtggccttataagatttgttcatcttcaac

SEQ ID NO: 27678 - DNA, 120 bp, synthetic construct
  source 1..120: mol_type = other DNA
actggattggcagctgagtacatttattcatgaatttaacagaagatcattgagctcacaccacataccagtcaatgtgtcaggtaccaggcatgcaataattaaacagtctctcgcctc

SEQ ID NO: 27679 - DNA, 120 bp, synthetic construct
  source 1..120: mol_type = other DNA
gcggcgtcaccgcgcggtacacccccacgtcgctgtcgaagcgcgcgtactcctctcggttatagatgtatctggtcacaagacgcacgcgctccgtcccgttggtgaagtagcacatgc

SEQ ID NO: 27680 - DNA, 120 bp, synthetic construct
  source 1..120: mol_type = other DNA
aatatgtgttatttcccttctttacatcctccttcctactaaattcagtccaccattaactcgggtctctgaatcccactcaagtcaccatttgcccataaatcagtgaaacccgaagac

SEQ ID NO: 27681 - DNA, 120 bp, synthetic construct
  source 1..120: mol_type = other DNA
cagcacgcctgctgtgaggaaggtccctccttggaaccagaatagaaagatacctggagtccaagtcttggattaaggttccttcaacaaatataaatttgacaatcactgagaatccaa

SEQ ID NO: 27682 - DNA, 120 bp, synthetic construct
  source 1..120: mol_type = other DNA
ctttaacaaggctttacttcccttaggctgtgtagacgagtattgaagaacataaaagaatgctgtgtatttgggggaggcttcaggtcctggtgcataactgtgggttgattacttaaa

SEQ ID NO: 27683 - DNA, 120 bp, synthetic construct
  source 1..120: mol_type = other DNA
gtagaaaaatcctccatgaaatattgctataattacaatacagccttgggaaggaagctcaggggctgtgaatggaatcctaatctgcctgaaatcttgatccagacagaccaaatctct

SEQ ID NO: 27684 - DNA, 120 bp, synthetic construct
  source 1..120: mol_type = other DNA
tggaagggacaaatatccaaaccatatcaatgacggcaatgaacgaaggatacttgctcacattgtgtatactgctctttgaaaggatttcaaaaaccaaggtaaattttctaaaatgac

SEQ ID NO: 27685 - DNA, 120 bp, synthetic construct
  source 1..120: mol_type = other DNA
tataatgaactgagaagttcttaaccttttgtacctgaggtccagcatgaataacaataataataatgaattagatgtggtcatctgcatggaagttcactgtctaatgctaagagaatt

SEQ ID NO: 27686 - DNA, 120 bp, synthetic construct
  source 1..120: mol_type = other DNA
gttaattggatgttaggacgaggagaggactgagacccagccagtgcggaaagctggtgcagaggacaccaggtctttggaatagaggatgccaggagattatggagagaaaagcagttg

SEQ ID NO: 27687 - DNA, 120 bp, synthetic construct
  source 1..120: mol_type = other DNA
ctcatcttcatcaaattcaaacataaactcccctgttggtctatgcgtctgtacaaacgcggcataagttgacacatggtccgctgcataaagacagtagagaaaaacacgacaaaatgt

SEQ ID NO: 27688 - DNA, 120 bp, synthetic construct
  source 1..120: mol_type = other DNA
ttttcactgagaatgactccctgacacagtaagtggccaagcaaagagtggtatttgaaactaaacaaaacaaatcctataggtatttcactaggaaacttagcttgctcctcagtttaa

SEQ ID NO: 27689 - DNA, 120 bp, synthetic construct
  source 1..120: mol_type = other DNA
ggattatagtgcaaatgttattagtaactcaagtcagaggcactgagaagaacccactgaatttgaccttctgtagaggttcctgatggccaagatgagaggatcctcagggatgtacca

SEQ ID NO: 27690 - DNA, 120 bp, synthetic construct
  source 1..120: mol_type = other DNA
tggggaaggcagtgtatgaccctcagagctgggtctggacttcaaacttggctcgttgatctgctgtgtaaccttggaaaacttattcatctttttgagcttcagttttttcaaaataat

SEQ ID NO: 27691 - DNA, 120 bp, synthetic construct
  source 1..120: mol_type = other DNA
aggtggctgcagcagtagtgatggtggtggtagctgaggcccggccttctcggagtagttcagtgcacttgtccacaatgtgccacatttggagcacagaccccactgtaaggaagttga

SEQ ID NO: 27692 - DNA, 120 bp, synthetic construct
  source 1..120: mol_type = other DNA
cagctctgctactgaaaaccaacgcttgctccatctcccctcaggctatgccccccaagctctctcgccgaccacgccccctttcgccccagcttctctagccccgcccctttccaggcc

SEQ ID NO: 27693 - DNA, 120 bp, synthetic construct
  source 1..120: mol_type = other DNA
aaaaaaaaaaaaaaaaaaaaaggccaggctagaaaggacagagcgggactaccccggggatactgggctaaccctgagcaaggggacagctaatgccaatctgtaacagtagaaggacaa

SEQ ID NO: 27694 - DNA, 120 bp, synthetic construct
  source 1..120: mol_type = other DNA
ggagaattctccggaaggtgtttcaagacaaatggagggagaaaagagggtgggacggcaaagaatgagagagagagactgggggagagaagggagagatccagtcaccaagtgtggagg

SEQ ID NO: 27695 - DNA, 120 bp, synthetic construct
  source 1..120: mol_type = other DNA
cctctttagtcatttaaaaaaagatttttgtcttcctgagaagttcgcttaaaaggtttccatgggaacagtgaggggagatgaaggcagagaacagagatctgcagccaaggtgcagag

SEQ ID NO: 27696 - DNA, 120 bp, synthetic construct
  source 1..120: mol_type = other DNA
gggggtgaacgtttagggtcttcaggcagacatggaatgtgtaaagggcatggaggatgtgcagtggacataggggtcgttgggaccttggggacttggcaatgccaaggtgtttgctga

SEQ ID NO: 27697 - DNA, 120 bp, synthetic construct
  source 1..120: mol_type = other DNA
tatgggattctagaggcctagtgtgaggttttattcagtaataagccagatgtatgccaggcgtgcccaggttcccacagtctggcctgatggaaagaggggtagcagagaatacaaaaa

SEQ ID NO: 27698 - DNA, 120 bp, synthetic construct
  source 1..120: mol_type = other DNA
taaacactttctggggagaagtggctcccagtctcttgcctccccaagttatcagtctccccagcgcctagcagacagggctaaggaggtcccagagagctgagggaggagacggccaca

SEQ ID NO: 27699 - DNA, 120 bp, synthetic construct
  source 1..120: mol_type = other DNA
atatttgcatccaattataatttcagacaacccctagccacacacagacacacacctatacatcaccacacagatacacaccacacatacccacacatcaccacacacatacacacacat

SEQ ID NO: 27700 - DNA, 120 bp, synthetic construct
  source 1..120: mol_type = other DNA
acgatcaccacacatcacacagataccacacacacatcacacagatacacaccacacacacatcaccacatggatgcacaccacacacacatccttacatcaccacacagatacacagca

SEQ ID NO: 27701 - DNA, 120 bp, synthetic construct
  source 1..120: mol_type = other DNA
caaatacacattacacaaacacccacacatcacacaaacacacatcaccaaatacatgccacacacacacatcaccacatagataccacgtcaccacacagataccacacacacatccac

SEQ ID NO: 27702 - DNA, 120 bp, synthetic construct
  source 1..120: mol_type = other DNA
gtcaataatactatcttcttttctggcttaacattgtcatctaccccccatctcatccctgcccccactaaatctgacaggctttaatatatatacatagagagagagagagcgagagca

SEQ ID NO: 27703 - DNA, 120 bp, synthetic construct
  source 1..120: mol_type = other DNA
gtttatccatatttataactcatttagtcctcttagtaagctcatggggttatccccattttacagatggggcaactgaagttaagtgacttgcctgaggtcacacagtaagtggctgag

SEQ ID NO: 27704 - DNA, 120 bp, synthetic construct
  source 1..120: mol_type = other DNA
ggcaaagcctttttgcgctgacagtgctccagcaaacataatgaacattcctaaaagccaccagactttctataagaagtatggcaaacaccaaccccacaaagtgatacagtataagaa

SEQ ID NO: 27705 - DNA, 120 bp, synthetic construct
  source 1..120: mol_type = other DNA
tgttagcatctaatatatgtaaagactaagtatagttaaggttggtggacaaaataccattcatgattggggtgaaaatagtgactatgagaggcagcagcagtgaattacaggagtgag

SEQ ID NO: 27706 - DNA, 120 bp, synthetic construct
  source 1..120: mol_type = other DNA
tctttccttggtgctctcacccgctggttttggtcaaagattttattcagatgaagtttgctttttggcaacagtctggagtgtgctcaagacactacattatccacattagctaccttt

SEQ ID NO: 27707 - DNA, 120 bp, synthetic construct
  source 1..120: mol_type = other DNA
cttcccttcccctttcctttctttctttcattttaaaaagggtctccctctgttgcccaggctgaaatgcagtgattggcctgctctttaaattctgttttctagtcttcagaataggaa

SEQ ID NO: 27708 - DNA, 120 bp, synthetic construct
  source 1..120: mol_type = other DNA
cacaattcatcccaatcttgttgctcagcttggaaacttcattaacggtttctgtcagacctgtgacagaaagaactgatggtggacaacaatgagcccatgcaagtctgaatttctatt

SEQ ID NO: 27709 - DNA, 120 bp, synthetic construct
  source 1..120: mol_type = other DNA
ttaaggttccacgttccttttcctgtctctgatgctatacatgatgaaagctaaactctccctacagataatactcagatgttactgaatagtgccaaagtcatttggtcttctaaagcg

SEQ ID NO: 27710 - DNA, 120 bp, synthetic construct
  source 1..120: mol_type = other DNA
tatgtgttgttgttattatcatcattattgttatttttattattattagtgctactggtagtgctagcccactagcccactgggcagcgactgcacccgtatcagagtgtggaaagcctt

SEQ ID NO: 27711 - DNA, 120 bp, synthetic construct
  source 1..120: mol_type = other DNA
tttaaaaaaaaaaaaaaaaaaaaacaaatgggtaacttgctgcctgccagggactcctgtggcctggcatgaagataattgactgtgttttgaacgcattataaggcccctgcgaggcct

SEQ ID NO: 27712 - DNA, 120 bp, synthetic construct
  source 1..120: mol_type = other DNA
gccttatgtgtatcatctcactccatcctctttctcctttatgagtcctctttgccttttgttctcacgatgcactttctactcctagttattttttaggggatccttgtgtctcactac

SEQ ID NO: 27713 - DNA, 120 bp, synthetic construct
  source 1..120: mol_type = other DNA
cagaaacgcatgctgaaaagctaactcgcaagctttttgttttctgcacattttagcttttgtgaaatcctgctgcgtctcccagctgatctgcccatttagtgtaggatttcatttcaa

SEQ ID NO: 27714 - DNA, 120 bp, synthetic construct
  source 1..120: mol_type = other DNA
agcccccaaagcattctcacttggagtgagaacatcactcaaaatgtggcaagatcagtgaaatcagcagtttcctcccaaatctctgccctcaaacctgagctgggctgaccagccggg

SEQ ID NO: 27715 - DNA, 120 bp, synthetic construct
  source 1..120: mol_type = other DNA
agttctcagttaccatgccagactcctggtactctgggtcgcccactgggctcccaccagccactcagtcagtgccctcatgagagtcacggtgtcatctaagaacaaataggtttcctc

SEQ ID NO: 27716 - DNA, 120 bp, synthetic construct
  source 1..120: mol_type = other DNA
ctcaaagtcacccttggctgactcaaactcgttcatgagcagctgggcttcacccctcctatacaagcctttctcattggcactgtccagtccaagggcctaggaatagatggtctatat

SEQ ID NO: 27717 - DNA, 120 bp, synthetic construct
  source 1..120: mol_type = other DNA
tgtgtgtttgttttctttttgtagttggggctacaggctcacaccactagactcagctgtttttatttttttgtaaagacaaggccttgctatgttgccttggttggtcttgaactcctg

SEQ ID NO: 27718 - DNA, 120 bp, synthetic construct
  source 1..120: mol_type = other DNA
gtgatactaagaaacagatttcatgaatgaatcctaatgccatttgcactggaacttttctgctgagagtaagacctgccgttttgaaaaaatagtgtaggtgatgttaggattctcctg

SEQ ID NO: 27719 - DNA, 120 bp, synthetic construct
  source 1..120: mol_type = other DNA
ccatctgaggaattgtgccaaacacttgcttgaatcttcaatctggattaagttggtctcgggaggcagggcctcagcaatctatattttgaaaaaactccctaggtgcttttctttctt

SEQ ID NO: 27720 - DNA, 120 bp, synthetic construct
  source 1..120: mol_type = other DNA
caggtattggggaagaagagaagggctgggtccctgtgtacccctctttcacccgtacccccctaactccctgggtttgggcaataagtgaggccaagaaattgaggaggggtcttcaga

SEQ ID NO: 27721 - DNA, 120 bp, synthetic construct
  source 1..120: mol_type = other DNA
aattcaggtgatgggattaaaggtgttcattaaacccttctctaatgagattatttttaaaacacaatgagagcgatgtccagctgggtggctgcaagtgttttctgcagtgcccacacc

SEQ ID NO: 27722 - DNA, 120 bp, synthetic construct
  source 1..120: mol_type = other DNA
acgcccggaacaatatgcaggccttttcctccccaatatgaagtcaagtcaaagtcaacagaattatttaaagaaatccttctgggagtcctttggtgagacaaagaatccttttgtcat

SEQ ID NO: 27723 - DNA, 120 bp, synthetic construct
  source 1..120: mol_type = other DNA
gaggagaggagagcagattgggggggctcatgttctgagagaaaggaataatagcatttgtctagtacattccagtttacaaagtgcctgatatacatgatctcctttaatcttcaccca

SEQ ID NO: 27724 - DNA, 120 bp, synthetic construct
  source 1..120: mol_type = other DNA
ggttcaattataaagatggtaaaatctgacacccacctgcctcaactcaaatcttggatgggtctccaattcaatttttaccttcctccccccaagcttcttaactggaaaattctggcc

SEQ ID NO: 27725 - DNA, 120 bp, synthetic construct
  source 1..120: mol_type = other DNA
acaagttgagtcattcataacctcgtctatcctcctttctgcagaatgtcagcatctcattagatggtgcttggccctgagaccatcagataggccaaccttcgaagaaatccagaacca

SEQ ID NO: 27726 - DNA, 120 bp, synthetic construct
  source 1..120: mol_type = other DNA
agcctttgtcttgtctctgtccctctacctgcagggtgaaggaggtgtacagactggaagagatggagaagatttttgtcaggtgagtgacttgaccggtgaagctcagattcaagagga

SEQ ID NO: 27727 - DNA, 120 bp, synthetic construct
  source 1..120: mol_type = other DNA
gagactacataggctaaaatgcccccccccccctttttttttaagaagtaggctgacctgaaattgagtcacttaattatggttgtttcatgcttaacagaagctctgcagttatatatg

SEQ ID NO: 27728 - DNA, 120 bp, synthetic construct
  source 1..120: mol_type = other DNA
tcagtcaaacaatggaataacttgctaagggagttcagtgagaatctttcaccagagatgtcctgaagttgactagaatgagccagttggaatctgaagatcaagttggaaaagtcctcc

SEQ ID NO: 27729 - DNA, 120 bp, synthetic construct
  source 1..120: mol_type = other DNA
ctatgatagtctttaaattaaagacctagttgggtggctggcaagactgtcagtcattattaatgccagagatctggatttgatggtctgttctgtctttctgcttaggccagcaggagg

SEQ ID NO: 27730 - DNA, 120 bp, synthetic construct
  source 1..120: mol_type = other DNA
cattttagggagcaatatcacaaaagtaatgtgtgtctgtagtgcatagtatcaggaagcatgtgattaaggtagtgtgctcatgtctctccactataaaattcctgcattcccttacta

SEQ ID NO: 27731 - DNA, 120 bp, synthetic construct
  source 1..120: mol_type = other DNA
tgctgcattaaaaaggttatgcatttaaaacaatgcatggactaagtaaatcacacttttggccattttgaggaggaaaataaaagtatgcatgtcacatataactccttcttgagcttg

SEQ ID NO: 27732 - DNA, 120 bp, synthetic construct
  source 1..120: mol_type = other DNA
cagaacaaacaattccacttaactcaggatgtagcatttacctgtacatcatgaaatctcatggcacctctcatgaaaagagacccttacctcatttgctgtgttgtgtgtcccaacgat

SEQ ID NO: 27733 - DNA, 120 bp, synthetic construct
  source 1..120: mol_type = other DNA
ctttcctgcttccaaaacgctgcccccgacactgtctattcttaagactggcctgactctgtctgggtggtttcgaaagcatccccgatattttcaaggcaattcctcattgatcagcat

SEQ ID NO: 27734 - DNA, 120 bp, synthetic construct
  source 1..120: mol_type = other DNA
gaagggaaactttggttatagatattgtcttgtactggtcaagatctgtagtgagaaatttggagcagataaactctgcacagagtactgggtacatgggcaaagtggagaaagcagatg

SEQ ID NO: 27735 - DNA, 120 bp, synthetic construct
  source 1..120: mol_type = other DNA
ccaggcactatctaggtgctgggttggccaccatgtctaagtccctagctgatattctagactggggataaaacagacagttattgataaacaaggtagtacataatatcctaagaagaa

SEQ ID NO: 27736 - DNA, 120 bp, synthetic construct
  source 1..120: mol_type = other DNA
gaagaagacagagaggctgtggctcacactcatgtgttaatactttttgagcctatcactttccctcattgatctattgaacatttgtgtgttcttccgaaataagtggggctcgatatc

SEQ ID NO: 27737 - DNA, 120 bp, synthetic construct
  source 1..120: mol_type = other DNA
tagatggtaaattaggagttcagaaaaggctgaaaaatttaaatctgaccatgtcacacctggctagggaaatcttcagtggctgcccattgcctttagggtggtgttcagaatcctaca

SEQ ID NO: 27738 - DNA, 120 bp, synthetic construct
  source 1..120: mol_type = other DNA
aggaatgggggcaaatttatagaaggaaattcagggtttatatctaggagctgttatggactgaatgtgtcctctcaaaatccctatgtggacaccctaattcccagtgtgatggcattg

SEQ ID NO: 27739 - DNA, 120 bp, synthetic construct
  source 1..120: mol_type = other DNA
aatggcctgcagctgtattcatgttgccgcaaaggatgtgattttgtttttttttatggccgtgtagtgttccatgatgtgtaccacattttctttatccaatctgccattgatgggcac

SEQ ID NO: 27740 - DNA, 120 bp, synthetic construct
  source 1..120: mol_type = other DNA
tccaaacaatctttaccccaggtacataaaaatttcagtgtccaaatgcggtttgtcttttcatacctttgtaatactgcttccttggcttagaataccctttccaacatggcaggcttc

SEQ ID NO: 27741 - DNA, 120 bp, synthetic construct
  source 1..120: mol_type = other DNA
aaaaacagtttttttcttttaggatagaaggagatgacaaaatatttgggagccaaggatttgtggagctgttgcaggcagatgcagaaggtcctgaccttcctaataggcctaatctgg

SEQ ID NO: 27742 - DNA, 120 bp, synthetic construct
  source 1..120: mol_type = other DNA
taacacatctcccttggttcttgataaatcaaacagaaaaaaaattcacatggatatagcaaacctggaccacaaagtcaacaggtttgatccaaatggataaacgtggaatattgcagg

SEQ ID NO: 27743 - DNA, 120 bp, synthetic construct
  source 1..120: mol_type = other DNA
agcctcccgaagtggtggaattgtaggcatgagccaccaaggcagtcaggatctttctgttaataacacaaattcctttaagaaagttagacttatttgcagtgcttgatatacagctga

SEQ ID NO: 27744 - DNA, 120 bp, synthetic construct
  source 1..120: mol_type = other DNA
gtagaatggaattggagggagacccagtcctgctctatcattgctaaatggcccagcacacattatttgggctttgtgaatctcttaatttctaatgggaaatgggaatgaggttcacat

SEQ ID NO: 27745 - DNA, 120 bp, synthetic construct
  source 1..120: mol_type = other DNA
attacactgtgcgacactgtccctgacctaagaagatcacaacccagggagagtggctgtaattcaggaaacaatagatctgcctgatgtttgattatgggagaaacacaggatgctaag

SEQ ID NO: 27746 - DNA, 120 bp, synthetic construct
  source 1..120: mol_type = other DNA
gatttcacatcgttcacaacttgaggagggagaactgagaaaaggcttctgaaggggtgacaggatggaaaaaggtgacacacagcaggcactttccaggatgaggtgggtaagtggctt

SEQ ID NO: 27747 - DNA, 120 bp, synthetic construct
  source 1..120: mol_type = other DNA
ctttctacttagatttggaagtcggtacaagcatgtgtgtttgctttttggagatggacacatatatgcataccatacatgcacacatacatcacctacacccctccaccacacatacat

SEQ ID NO: 27748 - DNA, 120 bp, synthetic construct
  source 1..120: mol_type = other DNA
atgctttgtcctgaaaactccgtttcacagctcccattcctagtcctctttgccatctcgtctgcctctaataaatttctggagtgtgacctaggctgtgagtgccctgttcttatccac

SEQ ID NO: 27749 - DNA, 120 bp, synthetic construct
  source 1..120: mol_type = other DNA
atatagaaaagtacacaaatcataagagtcctacttgaagaattaaaaaagggaaccacatgtgtaatcaacacccaggtcaagaaatacagcttccaaccccccagagccttcttcatg

SEQ ID NO: 27750 - DNA, 120 bp, synthetic construct
  source 1..120: mol_type = other DNA
acgaatttaacaatattccctgggtgcccatcttagagtgcacctggagggcaaggaaagagaaaggtgtggctcttgcccttgtcaaggccatcatcttgtggaagacacaagatttcc

SEQ ID NO: 27751 - DNA, 120 bp, synthetic construct
  source 1..120: mol_type = other DNA
tgtttccctctctggaaaatcaaggaaagggaccctgtggtctaaggtacctttgagccaagacaccaatcctctggaattgggaggaacggggaggatgacttaaggtgatgggactag

SEQ ID NO: 27752 - DNA, 120 bp, synthetic construct
  source 1..120: mol_type = other DNA
ctaacctaccaaaacaaaacacatgcagattttaaaatgtagaaaaatcccatcagagtcaattcagttatccccctgcctctaacaggtgtcccataaccaggacagatcacctggatg

SEQ ID NO: 27753 - DNA, 120 bp, synthetic construct
  source 1..120: mol_type = other DNA
aaaaattggagggcaggatgtataagagccaggaccatctagcagaggacgtagatcccaaatcattatagaaatcgctaacattaatccaacttacaagggatgtgaaggacctcttca

SEQ ID NO: 27754 - DNA, 120 bp, synthetic construct
  source 1..120: mol_type = other DNA
agtactctttattagaggccttccctgccctgtcccactcccccaccttttttccagtgttcatataagacgcaaatccctgactcagagtcagtttctctagaggaatccaaattaaag

SEQ ID NO: 27755 - DNA, 120 bp, synthetic construct
  source 1..120: mol_type = other DNA
tctcttatcctccccccttatccctcatccaccagctctctcgcagtctctccatgcttcctgtctcttgatgtctctctgtctcttttgttttcctttgcacaatctgcccttttttcc

SEQ ID NO: 27756 - DNA, 120 bp, synthetic construct
  source 1..120: mol_type = other DNA
atagaatgggtgtgatttggagtgatcccagagcctcctaactcctcttgcctcgatttcccatattaaagatcgaacctctgctctttctctgcaagtgcctatatacatatatatgca

SEQ ID NO: 27757 - DNA, 120 bp, synthetic construct
  source 1..120: mol_type = other DNA
cagatggaccacagtcctgtcaagatacaaacttctgacaaactcacatgcaaataatgcagtgataaaataggggtaaatccaggtctgcctccattgacccaaacctgatctttaaat

SEQ ID NO: 27758 - DNA, 120 bp, synthetic construct
  source 1..120: mol_type = other DNA
tatgctctccttaagcacacgactgtgctggcactaatggaagcacaaatgagtaacagatgaatgaaaaacctaatgctgtgcatcactgacatggaaaatccagctagtatgtgaaac

SEQ ID NO: 27759 - DNA, 120 bp, synthetic construct
  source 1..120: mol_type = other DNA
tgtctgttgttttaggaaaatctacagataaatcaaaataacaaaactatagtctgttttgggaaaccgtggccttctgtttttgtcagaaggccagactgccaaagccccagatggggc

SEQ ID NO: 27760 - DNA, 120 bp, synthetic construct
  source 1..120: mol_type = other DNA
cttcagacaaaattgcatagaaaattccctcccaacaattacaccagtgaccccacaatcgagttgtgcaagaggagcaagaatattacacttctcagtcacattctcccactataaacc

SEQ ID NO: 27761 - DNA, 120 bp, synthetic construct
  source 1..120: mol_type = other DNA
ccgtctccaaacaaaaacaaaaacaaaaacggtggtctcaaagtgtagtctgaggacgtctgtggggtctgagacactttcaggggatccgggaaatcaaaactattttcataaaaccaa

SEQ ID NO: 27762 - DNA, 120 bp, synthetic construct
  source 1..120: mol_type = other DNA
gttgctgacccccaagtcctgacggcttatgagaatcttccccccagttctccatcagtttctcttcttttgaggacttgatattacaccataaaggtttttttctgtacttttctagtt

SEQ ID NO: 27763 - DNA, 120 bp, synthetic construct
  source 1..120: mol_type = other DNA
gctcagagccaagctgtcatggggcaggcactctgaaaacattttctgaagtaagcagaccttttttttttcaaaggtcctcaaggtaagatttctgacaaagctgacatttagacttca

SEQ ID NO: 27764 - DNA, 120 bp, synthetic construct
  source 1..120: mol_type = other DNA
ccactgctactagaacgaggccagagcctccacatggcttgagtgttgtccaaaaatacaaacaagaagacatcactgaagtgcaaagaaacaaactcctatttgtttctatttcatcca

SEQ ID NO: 27765 - DNA, 120 bp, synthetic construct
  source 1..120: mol_type = other DNA
aatgcacttaaccagtgagaatcccatatccaggatggcccgtgccagagaaaagtagtagctttttaaacgaactatttgagaagattctggaaactgatatgaactgccacaatccca

SEQ ID NO: 27766 - DNA, 120 bp, synthetic construct
  source 1..120: mol_type = other DNA
tgggcggggctcccagcatatcttctgcacttctatatttttgtgtgtatttgtttagcgcttaccatacattcacacaggttcagaattcaaaagggatctttacagtgaaaagtctcc

SEQ ID NO: 27767 - DNA, 120 bp, synthetic construct
  source 1..120: mol_type = other DNA
tggccagcttagtatatgctggatacatgttaaataaaggaatctgtgcttttgtgtttcttagggaagtttggcgtcatttgcttggaagacctcattcatgaaattgccttcccaggg

SEQ ID NO: 27768 - DNA, 120 bp, synthetic construct
  source 1..120: mol_type = other DNA
atcttaactctttgaaattactttttattgctgttgtcatactcttaggtgccaaactgcggtaaattttttatcagtgaagtggaagcatgtgttttgttttggaaatttttatcaagt

SEQ ID NO: 27769 - DNA, 120 bp, synthetic construct
  source 1..120: mol_type = other DNA
tggctttgagaattctcaaacttgactggctctaagtgtatctggtggcttttgtatcgtaacctgaaactggcttagtactttttcctaaaagctcaggatttgagaatgaggacccct

SEQ ID NO: 27770 - DNA, 120 bp, synthetic construct
  source 1..120: mol_type = other DNA
agacactgagaagtggaactccctgagcctggtgaagaccttgtctaaaaaaaaaaaaaaaaaaaagaccttgcctccctccatgttttgttcctgtatttttgcctttctgtcctccag

SEQ ID NO: 27771 - DNA, 120 bp, synthetic construct
  source 1..120: mol_type = other DNA
ccttatgattttaaaagaaattaaaacattttcatggaccccctaaaggtatcggggcctagtcactgtgtctcatggataagtcagccctagctgtggtgcaagggagaagggttgttg

SEQ ID NO: 27772 - DNA, 120 bp, synthetic construct
  source 1..120: mol_type = other DNA
ccttcgtgatccagagactctttaataaaagagactgcgattcggagaacatggaaggaagaattaacatgcaaaccctttccgaaaacttttctgagccctaggacaggtttagtgtct

SEQ ID NO: 27773 - DNA, 120 bp, synthetic construct
  source 1..120: mol_type = other DNA
ggaccctgatattatttcctagcataaatccaccctatggacacagaccctgaatcacttcagacctagtctatatacaatggttgttttacaagcaatgtcactctggatcttgtgcac

SEQ ID NO: 27774 - DNA, 120 bp, synthetic construct
  source 1..120: mol_type = other DNA
tggggcttctagagttcaagatcctgtggaaaaaactcaagaaatggatggtaaagggcactaaaggggcagcctccaggggtgaggaaaagagggtcttaggagagatggaactaatga

SEQ ID NO: 27775 - DNA, 120 bp, synthetic construct
  source 1..120: mol_type = other DNA
agctaaatctaaccattctgggtaggagctccttccacctgccctaatgggaacacgaggaagatgctgtaggtttgcattctcaccttcttgtgcatcacagttctggtcctcaactgt

SEQ ID NO: 27776 - DNA, 120 bp, synthetic construct
  source 1..120: mol_type = other DNA
ggaaggaactgtcagtttagtgcccgccacgttctcagttgctcaattcatcaacaaaccagcagggcccaatttaaattagaggtcattgttaatgaaagaagtaatagcaaagaaggt

SEQ ID NO: 27777 - DNA, 120 bp, synthetic construct
  source 1..120: mol_type = other DNA
agtcctgggttcttggctgcacttgtgtggagtggaatctccattcctctgagctggggggaaggagggagtgggtcttggtttaaatatatatatttttctcttttttaaatttaattt

SEQ ID NO: 27778 - DNA, 120 bp, synthetic construct
  source 1..120: mol_type = other DNA
atattttgcatttcagtgttgggagacctggatcacacagggtctctgtaacatcctgaattccaccataagacccagaggggagcagaactaaaattcaggacttaggaataaaatttc

SEQ ID NO: 27779 - DNA, 120 bp, synthetic construct
  source 1..120: mol_type = other DNA
ctccaatgtgacattataggctaagtcatagctgaagcactgggtaccatacatgggagcagtttaacgtaatttcatgaagtgcctagaatataacatatggccaacaaatatttgttg

SEQ ID NO: 27780 - DNA, 120 bp, synthetic construct
  source 1..120: mol_type = other DNA
tcttaaataaccaatggatcaaaggagaaacatcaagggaaattagaaaatactttgagatgaatgaaaatgaaaacacaaaagcaaaactgtgcttaaaatacatagttgtaaaagcct

SEQ ID NO: 27781 - DNA, 120 bp, synthetic construct
  source 1..120: mol_type = other DNA
aggcctgtgtgcctaaaggttgcatatgtacacacagaaggcatctcatctcacttccttctagttgcctatttataatatataaaggcattctggaaaaataataaaaatgtatttttt

SEQ ID NO: 27782 - DNA, 120 bp, synthetic construct
  source 1..120: mol_type = other DNA
aaattcttaagcctgactcaaaaccatccagactgattccaagcagcctttaagatatttccctattaaaccatcacctggccttgagtcttttcctctgtgtgtctactcctactcctt

SEQ ID NO: 27783 - DNA, 120 bp, synthetic construct
  source 1..120: mol_type = other DNA
gtatgtcggtgctctggtagcgtgtgaaagtactcttccgattacttcttttttctcagtgcaacaagatgaagtgaatctggagaatgagtgaactaggaatgaagctggaaaagggaa

SEQ ID NO: 27784 - DNA, 120 bp, synthetic construct
  source 1..120: mol_type = other DNA
cactggaaggtcttcaagggcaatagcatgcatggaactgtcagctcccttgataactgcttttttattggtatatctcatgaaggaacaacctcaggtggttcacagttaagtgttttt

SEQ ID NO: 27785 - DNA, 120 bp, synthetic construct
  source 1..120: mol_type = other DNA
aaaattataattctgagacactaacaaatattacagccaagacacactaaatggagcatcaaagcggatcagccttctaaagagtacactgtaggggtgaggagccaagatggccgaata

SEQ ID NO: 27786 - DNA, 120 bp, synthetic construct
  source 1..120: mol_type = other DNA
agatcatgtagctagtgtgcttggctcctcatagtgtgtggacttcacactcattttgcctcttcagtctcagtctcccaattgtaacatgttgccacactttaaccagcttaacctggg

SEQ ID NO: 27787 - DNA, 120 bp, synthetic construct
  source 1..120: mol_type = other DNA
aactgaatttattttgtatctcccaagcaatgactcaatctgattgctcaccttggtccatgattggtatttaaaactatatcttggggggaggagccaagatggccgaataggaacagc

SEQ ID NO: 27788 - DNA, 120 bp, synthetic construct
  source 1..120: mol_type = other DNA
tacagaaatgcagaatggatacgtatccaccaaccaattatctgctgccttcaggagactcacctagctaacatataaagactcacacaaacttaaggcagaggggtggaaaaagacatt

SEQ ID NO: 27789 - DNA, 120 bp, synthetic construct
  source 1..120: mol_type = other DNA
atgggctctggataccaactgactggatttgcaatcatggctccacttagcagctgtgtgacattgggcaggttacttaacctttctgagctccaatttctttatctctaaaatggatat

SEQ ID NO: 27790 - DNA, 120 bp, synthetic construct
  source 1..120: mol_type = other DNA
ttacatggctatgtagtattccatgatgtatatgtaccatgttttgtttattcagtacactgttgatgggcacccaggttgatttcatgtctttgctattgtgaagagagctgtcataaa

SEQ ID NO: 27791 - DNA, 120 bp, synthetic construct
  source 1..120: mol_type = other DNA
tgatctgggctcttttttgcaaaccacggaactcactctagctaaattaagcaaaagagaagtggggttagaaagccagttcttgatattagccctttgtcagatgagtaggttgcaaaa

SEQ ID NO: 27792 - DNA, 120 bp, synthetic construct
  source 1..120: mol_type = other DNA
tattatgtgtgtgtatacagttgacccttgcaaaacacaagtttgaactgcacagatccacttatacatggataagtataagtgggtcttccacctctgtcactcccgagagaataaggc

SEQ ID NO: 27793 - DNA, 120 bp, synthetic construct
  source 1..120: mol_type = other DNA
ttcagcaaaccatttctagagggccctttgaatttatattaactttaaaatacaaatcttgccaaagatagcagtcctttgttgagcaagccctctaacataagagctacctgcacaaga

SEQ ID NO: 27794 - DNA, 120 bp, synthetic construct
  source 1..120: mol_type = other DNA
ccagcaacataattggctagttgccttatcccacactataggcacaacagccttggaatcacaatattaatgcaaccagaaagagtttaagatttttttctagttatttttgtccttaga

SEQ ID NO: 27795 - DNA, 120 bp, synthetic construct
  source 1..120: mol_type = other DNA
ggttatggagggcacctttggaaatactggagctttgagaaatcacattcctctttgactgagatatgtcttttgagtgtagtgttagagtgtcaagagtagagaaacaagaacctggct

SEQ ID NO: 27796 - DNA, 120 bp, synthetic construct
  source 1..120: mol_type = other DNA
agagagagagagaatgatgcagagacatttgaagaaataatagccaagattttcctcaaatcgattaaagatattaatgcataaatccagaaaactcatcaaacttcatgataaccacac

SEQ ID NO: 27797 - DNA, 120 bp, synthetic construct
  source 1..120: mol_type = other DNA
tttgtccttcaagtgtcttcttgaacactacttccaccaggaggcctttcctaaccccatgaatagctttgagcccactattttctttatgttagtattcgtgctccttctataacacac

SEQ ID NO: 27798 - DNA, 120 bp, synthetic construct
  source 1..120: mol_type = other DNA
tcacatttcaatgcactcacctggagggcttaccacaacaaagatggccggacccctgcccagagtttcagattctgtaagtctggggctgagcacaataatttgcatttctaacaagtt

SEQ ID NO: 27799 - DNA, 120 bp, synthetic construct
  source 1..120: mol_type = other DNA
ggagggtggggaactttaggtaagatttcagattgaaaacaaaagctaacaggatcagaaatcatatgaaatgactgagagacaaacaggtctgcagagagagagggataaagctggagg

SEQ ID NO: 27800 - DNA, 120 bp, synthetic construct
  source 1..120: mol_type = other DNA
tattgtactcctgtgccccggcttgtcctatagagctcagaagaacagaaaataaagcctttaactggtaacacagaaaacaattgatagaataatatttggggggggggaagagagtgt

SEQ ID NO: 27801 - DNA, 120 bp, synthetic construct
  source 1..120: mol_type = other DNA
gccttcagtgagtcaccatctttttgctggtggaggattttgccttgatgttgatgactgttgacttagtggttgctgaaggctggggtggctgtggcagtttctttttttttttttttt

SEQ ID NO: 27802 - DNA, 120 bp, synthetic construct
  source 1..120: mol_type = other DNA
ttatgtaatattttgaatcctgcattgtcatttcaacaatactcaccgtgtcttcaccaggagtagattccagctcaagaagccactttctttgctcctccataggaagcaactcctcat

SEQ ID NO: 27803 - DNA, 120 bp, synthetic construct
  source 1..120: mol_type = other DNA
ccagggatggttcctacctggcaccctgaattggtggggataggctctggccactggaaaccctgaactggaataggtgcataaatagttatcttactggtttttattaattttactaaa

SEQ ID NO: 27804 - DNA, 120 bp, synthetic construct
  source 1..120: mol_type = other DNA
gtctactgacctgaggtagtgcctatacttcctactgctggagaggctgcctctagataatctcttttaaaatgtgcacttgggataatgaaaaccacaacatcattaatcttctccttc

SEQ ID NO: 27805 - DNA, 120 bp, synthetic construct
  source 1..120: mol_type = other DNA
gcagataagcttttttctttttttaagatgctgacagttatttttagagttttgtgttccctcttccctccccgctggagtgaattgaagaggaaataaatggtgaaggtgctgctggcc

SEQ ID NO: 27806 - DNA, 120 bp, synthetic construct
  source 1..120: mol_type = other DNA
aattcttttgagtacaaattctatttagtttttctttaaatataattttcaacccacaatagccaagtagaaagagtgaatcagatgggttgggtcagggtgggagtttgctgagaaagg

SEQ ID NO: 27807 - DNA, 120 bp, synthetic construct
  source 1..120: mol_type = other DNA
tatactgaaatatttatagataaaatgataggatatctaggatttgaaatagcacaggggaagcaggagaagcagatggagttaaaggtgtgacaggatggccatgggccaggcgtggtg

SEQ ID NO: 27808 - DNA, 120 bp, synthetic construct
  source 1..120: mol_type = other DNA
gctaggaccatatttgaaagcagtgccatgtttaataccctttagaaacctggaggcttgctaattttaattttatacttggcctgcacacaacacatccttgatgtgttgtccccatac

SEQ ID NO: 27809 - DNA, 120 bp, synthetic construct
  source 1..120: mol_type = other DNA
ctaagcagaatctctgtccctttggaactttggtctcaatggaggacccagcacacggacagtagacaaacaaataaatacatagatactataaagccagggagtgataagtgcataaag

SEQ ID NO: 27810 - DNA, 120 bp, synthetic construct
  source 1..120: mol_type = other DNA
gtagcctgcaggcagaaggacctacagccaaactttaaaaaatgggggagaaaagttccctccattcatcccagtttttaccattatttaatagcttccaatacccagttaggtatgtga

SEQ ID NO: 27811 - DNA, 120 bp, synthetic construct
  source 1..120: mol_type = other DNA
accgcgcccggcctatctctcttgttttaaataggctagataaggccaaatattctatatgtgccacaaggggacttgaaatataaaatgattttggacaattttgtactctgaaagaaa

SEQ ID NO: 27812 - DNA, 120 bp, synthetic construct
  source 1..120: mol_type = other DNA
cagtcattgtgaaagaggtgcaaactcagtctttctgttactttagtgcttatacaatgtgagggaaccattccataaaagtaggtacaaagatatcaattcaaaatttggagtgggaat

SEQ ID NO: 27813 - DNA, 120 bp, synthetic construct
  source 1..120: mol_type = other DNA
tacattctgcctacaatattttagatgtacaagtatgataataagtgttacctcctatccatactacccccttaaaaacctacaacagcttcacaatgctcttagggtaaaaactaaaat

SEQ ID NO: 27814 - DNA, 120 bp, synthetic construct
  source 1..120: mol_type = other DNA
atgatagactggattaaaattcttgatattgccaatgtatgtggccctgacacttaaccaactccttggaaccctgtcatgatcagcccctactctccacatcaaccatcatggtattct

SEQ ID NO: 27815 - DNA, 120 bp, synthetic construct
  source 1..120: mol_type = other DNA
cttgtgatacccaccaaaatgatcatggcaaagcccaggcaacatttcaaagtaaaaaagactatgtctgtttcttcctactttcgagtgcccatccatctctgataaactactgacctc

SEQ ID NO: 27816 - DNA, 120 bp, synthetic construct
  source 1..120: mol_type = other DNA
tgtgactcacagataattgtatgccaccaattatatatgagtggaaagtctaacaatggacaggccaaattctttaaaagtcttaattcctggccaggcgcagtggctcacgcctgtaat

SEQ ID NO: 27817 - DNA, 120 bp, synthetic construct
  source 1..120: mol_type = other DNA
tacagggtacacataggttatagtgaagcaaatcaacatatctattatctcacagttacttttctgtgacaagagcagccaaaatccacttatttaacaaaattccctgacacaatacaa

SEQ ID NO: 27818 - DNA, 120 bp, synthetic construct
  source 1..120: mol_type = other DNA
gctacagcgtttataacctatttggaacacatgcctgcctctaaaaaggaatcactataaaccctcacaagaaacctctgacacaagatcccctgataaacactcaacctgcatgctctt

SEQ ID NO: 27819 - DNA, 120 bp, synthetic construct
  source 1..120: mol_type = other DNA
gacattgcttaagcagggcccaggaagcctttgcaagacaaaggaaggaaacacagtgaagtgtaccgttaacaaaacccaaaatcaaaaggaagtccaagtcgttgtcaaatttgtaat

SEQ ID NO: 27820 - DNA, 120 bp, synthetic construct
  source 1..120: mol_type = other DNA
tatgcatgcaggcacacctgcaggggtgtctctatgtgcacgtgtatgtgtgtagaaaggaagaccagagagttatcacagaattgaacctgcacaattcaccacaaataaattaataat

SEQ ID NO: 27821 - DNA, 120 bp, synthetic construct
  source 1..120: mol_type = other DNA
ccttgtgcagatgttgcctctcccaacactgataatatctgctcccccagtccttttgctttccttgtttggcatatttctttgttttattctggtggacatcttttcataataaatcag

SEQ ID NO: 27822 - DNA, 120 bp, synthetic construct
  source 1..120: mol_type = other DNA
cacaatatatccctgtttctcaaagcagcagacagatgcccacaagagagaaaaattcatatttaaatgcatcccattgtgccctactctccgaccttgtctaatgctgttgttttgagc

SEQ ID NO: 27823 - DNA, 120 bp, synthetic construct
  source 1..120: mol_type = other DNA
aaagttgtcaccccaattgaaggagaaaagagagagtgcagagcagcagagcatagggcagcgtggagtattcagaaggaaagccatgcaatggagtgctcttcattggggacgtactga

SEQ ID NO: 27824 - DNA, 120 bp, synthetic construct
  source 1..120: mol_type = other DNA
gagaagatgtgctacagttacaatatgagcggatttcagtcaggaataaacaaatctgtattaagttttgttggaactggaatttcttccttaggggttgtgtgatcactctgcaatttg

SEQ ID NO: 27825 - DNA, 120 bp, synthetic construct
  source 1..120: mol_type = other DNA
ggaaggggcagaaggaagctggggtgctgtatcttgatctaggctagagctgcattaaacctcaaaacacatttttagaaagttgatgacgctctctgcatattgatatgaaatgatatc

SEQ ID NO: 27826 - DNA, 120 bp, synthetic construct
  source 1..120: mol_type = other DNA
tccctgtagtctctttcagggagatgcaaatttcaataattgttccaggcagaaaagcctccaagtggaacaaagacctacagacattacttccaggtaataaacagattccactcagac

SEQ ID NO: 27827 - DNA, 120 bp, synthetic construct
  source 1..120: mol_type = other DNA
aatttaataaaggaattagggtcccacactagcattatttttaaggaaaacctctggtttctgatgtggttttgtggcattggggaatgcttgtgtgttctagaagcctcctcccctcat

SEQ ID NO: 27828 - DNA, 120 bp, synthetic construct
  source 1..120: mol_type = other DNA
gtccctttttatttaaggcacaatgcttcagttagtaatcatctcatagtttctgtgggaaaagtatgtgataacgcaatcgtaaatctgacttaagatgacctaactcagaacctacct

SEQ ID NO: 27829 - DNA, 120 bp, synthetic construct
  source 1..120: mol_type = other DNA
ccatctttagaaggaagaaaaaaaaggagagtgaagtgtctatgaaacccacccttttgggatgaacaaatggttgtggaaatgactaaatttgtaaaatggcaaagaaattactgcctg

SEQ ID NO: 27830 - DNA, 120 bp, synthetic construct
  source 1..120: mol_type = other DNA
gccaggagccaccgggtggactccattctgccccgtgcattgaagtagtggagcttgggcttctctgccatgatagcagtctcctggaggtttctctaagcctgaatgaatgaatgaatg

SEQ ID NO: 27831 - DNA, 120 bp, synthetic construct
  source 1..120: mol_type = other DNA
aactgtgagctcccgggaagcagagaagttgtcatagtctttaagcacagtgtagtgcattgctcaaagttcagtccgtgctttataggatataacatggctagatatctcaagagcaat

SEQ ID NO: 27832 - DNA, 120 bp, synthetic construct
  source 1..120: mol_type = other DNA
ggggagaggggcaaacacacacacctcttaaacattcaaggaaatttcttccccactgggagacaaagatgtattctagtcttgaaaggcaacacacaaatacacttgatcttaaaaact

SEQ ID NO: 27833 - DNA, 120 bp, synthetic construct
  source 1..120: mol_type = other DNA
tggggcggggggcggggaggcaatcatattttttcaaacatctctcaagctgaaataaaacctcgtatcaagatagagatcagttctcatatttttcaaacactgtgtgacatggtacac

SEQ ID NO: 27834 - DNA, 120 bp, synthetic construct
  source 1..120: mol_type = other DNA
ggatgggattaccggtaggttttagagtttttaaaaataatgttcttacaccttgaacaatgagcctcttgagtttgtaggaagggcagcatgtcctctaacgctttgaaacctttagag

SEQ ID NO: 27835 - DNA, 120 bp, synthetic construct
  source 1..120: mol_type = other DNA
ctctagccctgactatgatgcccctgtgtgcatttacaataaagactccaacggagggaaaaaaaaaaaaaaaatgttctaatgttcaaataagggcatcctaagtggaatttaatttat

SEQ ID NO: 27836 - DNA, 120 bp, synthetic construct
  source 1..120: mol_type = other DNA
agatgatccaaatatgagagatattcattgggcatgctgtctatgttgggaagtcctggaatcacatgatcatgaacggtaggaaacttttcctctggggacatctaattactacccagt

SEQ ID NO: 27837 - DNA, 120 bp, synthetic construct
  source 1..120: mol_type = other DNA
ctgttcctttatctgaatgggtgagtgatataggctggaaagagtctatgaatccaggagatgatgctaagattgggagtgaataaaaagatgaaagttctggaggtatatgtgcacatg

SEQ ID NO: 27838 - DNA, 120 bp, synthetic construct
  source 1..120: mol_type = other DNA
aggaagaagaggaaacaggaaggaggaaaagaacaaggagaagaagtaggagacaaaagagggaaggtagaggaggaggaggagaaagaggattaagaaaaagcagaaaacctctgttta

SEQ ID NO: 27839 - DNA, 120 bp, synthetic construct
  source 1..120: mol_type = other DNA
cgaatcaaatgattcttggccatcttataggagaagtataagatgtaattatgtaaagaaactttcatgatttatgctttaactgggtatatacccaaaggactataaatcatgctgcta

SEQ ID NO: 27840 - DNA, 120 bp, synthetic construct
  source 1..120: mol_type = other DNA
aaaggatcctggcaagccaatagatatttctttcaataaataccattgataaaaggaaaataatcacatttgtcattggcttttatttttctttgccctcttaaccttttacaatttaga

SEQ ID NO: 27841 - DNA, 120 bp, synthetic construct
  source 1..120: mol_type = other DNA
tgtcttaatttagtcagtaaaggcaagtaagtaaagagttttaggaaatcctgatagagtatcattttattccaatgaataaaaaagggcaggttccaattcaaggtacaaagtccttgc

SEQ ID NO: 27842 - DNA, 120 bp, synthetic construct
  source 1..120: mol_type = other DNA
agccccagggaacctgtgtgcttagtcatactgtgtaatgaacaaacagttcaagatgaccatttcatgttattactccagttttcctagctgaatccttctccattgtgtaactgggat

SEQ ID NO: 27843 - DNA, 120 bp, synthetic construct
  source 1..120: mol_type = other DNA
tcacttcttaaacaggagcagtcaccctgtaccttgggaaatacttgagtgctacactgatttcaggtctgctttcatttgaaatatggcaaaaatgtcctaatcaattctgcaaggctc

SEQ ID NO: 27844 - DNA, 120 bp, synthetic construct
  source 1..120: mol_type = other DNA
agaaaggaaggaaggaagagaaggagggagggaaggaaggagggaggtttcagtcaagcaagatgaaaaagttccaaagatatgctgtacaacattgtgcttatgattcacaatactgta

SEQ ID NO: 27845 - DNA, 120 bp, synthetic construct
  source 1..120: mol_type = other DNA
catgagatcatttcagatactggtaagtgtataatgaaaacagtaatgtatcacttgaggccaggaggagaggaagggctctgttagatttggaggtcaaagaaggcctctctaaaaagg

SEQ ID NO: 27846 - DNA, 120 bp, synthetic construct
  source 1..120: mol_type = other DNA
gaaaagaaatctatccttacaagtcagactaatttttcttctgtttcagcagccacagtaatccagcttcctctcagtgcacctactgccaggaaaatggctgcacatagataggtcatg

SEQ ID NO: 27847 - DNA, 120 bp, synthetic construct
  source 1..120: mol_type = other DNA
taagcaacaccatgaattaggataaaaacaaatcaaaattgtccaggttatcatggtacagaactgaggcagaaatattgcaagaggattacaggtctgagggcctactggtgcccagag

SEQ ID NO: 27848 - DNA, 120 bp, synthetic construct
  source 1..120: mol_type = other DNA
tctattacaattcgcagaaaaagaagttgtactatataggactaaaacttcttgatccctactgtcagataattaaaactgtgaaacaagataatgggtacagaacacactgggctcacc

SEQ ID NO: 27849 - DNA, 120 bp, synthetic construct
  source 1..120: mol_type = other DNA
catcacccaagcagtatacattgtaccatactgttggcttttatccctcgccctcctcatactcttcctcccaagtccccacagtccattttatcattcttacgactttgagtcctcata

SEQ ID NO: 27850 - DNA, 120 bp, synthetic construct
  source 1..120: mol_type = other DNA
aatatttggttgtgaaaaagtgagagaaagaactcggctattttattatagtagagcaacaccgaagggagacgacttcgctgtagctcagagtctttttccattcttcacccacgcgcg

SEQ ID NO: 27851 - DNA, 120 bp, synthetic construct
  source 1..120: mol_type = other DNA
gtttttatagataatagaatctgtccctccagctggccctgaggcatctgagtcaacaacggatgaaaatgaagacgacattcagtttgtcagtgtaagtagcaatgatgattggggttt

SEQ ID NO: 27852 - DNA, 120 bp, synthetic construct
  source 1..120: mol_type = other DNA
actcgtcttttggaatgccgtagttagttgcagtttggtattcaggctgtagaatttttctttaatggagtgtctgtctaatgtttctgtgttttttagtttttgtaggtttagggcgac

SEQ ID NO: 27853 - DNA, 120 bp, synthetic construct
  source 1..120: mol_type = other DNA
acagaaaaatcaatgagctgcgcttcacaaccataccaaaaccaaacaaataccaactcaaaccctccttcacatcctcccacatcttcccagtgcttcgctatctcacaggacccagct

SEQ ID NO: 27854 - DNA, 120 bp, synthetic construct
  source 1..120: mol_type = other DNA
cagtttggtattcaagctgtagaatttttcgttgagtgtcagatgtgcatttatggtggatgctgggaaaccttgtaaaattggttattaaacagtttctttcccagcattagggccatt

SEQ ID NO: 27855 - DNA, 120 bp, synthetic construct
  source 1..120: mol_type = other DNA
ccaccgtgcccagcctgtttatcttatttttttccagcccattttactttttaccttgcatcctgtcatctttcatcttcttctttactttctgtgcatgggaactctgcctctgtgtat

SEQ ID NO: 27856 - DNA, 120 bp, synthetic construct
  source 1..120: mol_type = other DNA
ctatgatctgtagcccaccctgggctacagaacaagaccctgtctctcaaagaaataagaggataataacgattttcacctcacagattagtgaggtttaaatgaggtagtgcgtataga

SEQ ID NO: 27857 - DNA, 120 bp, synthetic construct
  source 1..120: mol_type = other DNA
tagcaggattctcactgaaactgaattagcaggccttatcaagaagaggtttcaggagcttgacaagagttaggtcaaggagagagtctttgtcaagtgtcaaacataacttctgaatag

SEQ ID NO: 27858 - DNA, 120 bp, synthetic construct
  source 1..120: mol_type = other DNA
ataattttactgagatgtttcattttagctgacagttgttggcaggaatggaaaccaaatatattaaatataccattggtagctttctcggtataatattgccatctctagggaaaacat

SEQ ID NO: 27859 - DNA, 120 bp, synthetic construct
  source 1..120: mol_type = other DNA
tgactttttatattcatgtgaacaacaacagaaacccagaaaccaaaaaactaaactgtttctaattatctgaatctacaactaaacactgttctataaatcaacacaaaatatttttcc

SEQ ID NO: 27860 - DNA, 120 bp, synthetic construct
  source 1..120: mol_type = other DNA
aaggagtatgtttttgggttaggatagtatatttgatgtgaagatattgcttgtgagtgctatgggccagtagagatagacagtgggcagttcaaaatgttaggttgagttcaggagatc

SEQ ID NO: 27861 - DNA, 120 bp, synthetic construct
  source 1..120: mol_type = other DNA
atcggtagtcttaggaaaagtctattttggaatttcactgcctcttttttatttttttattttttggtgagaggttgctagagcagaggggctgtctccaagaccatgtcttcatcagaa

SEQ ID NO: 27862 - DNA, 120 bp, synthetic construct
  source 1..120: mol_type = other DNA
tacaggcatgagccaccgcacccggcttcctctgtcagagcacttgtacttgagggttatcacccgcctgtcttgaaatgggctctaagtctcctgaaagcaaaggaccctgaatatggt

SEQ ID NO: 27863 - DNA, 120 bp, synthetic construct
  source 1..120: mol_type = other DNA
taataggaaataaatgttttgcctcccaggagatcatcttagctggtacagtggattaaaaatggcctcaaattatttgatattttctcattgagaagtgggatctatgtcaccacccct

SEQ ID NO: 27864 - DNA, 120 bp, synthetic construct
  source 1..120: mol_type = other DNA
gctagagcttctggcttcttgagtttgagctgaaaatagcaatcagtgtatcctaaatacctcaaaacaactgtactatgatttggaaagactatataaaatgtaatgaaagatactatt

SEQ ID NO: 27865 - DNA, 120 bp, synthetic construct
  source 1..120: mol_type = other DNA
gggcatcgaatgaaaatggccacatttaggtagggtaggagaacaggctttggaaggagcgggtattttattacagtgtgaataaaataaatatttagaacattataagaatgatggctg

SEQ ID NO: 27866 - DNA, 120 bp, synthetic construct
  source 1..120: mol_type = other DNA
ttaatgtaggaaggcgtcattgagctgacagctgtgaacagcatcttaaaagataaggcagaaaggaggtagcagagatactccaatggatggaatatcatgtgccaactgcaactttaa

SEQ ID NO: 27867 - DNA, 120 bp, synthetic construct
  source 1..120: mol_type = other DNA
ccttgagactgaagatctgaagtatgaggagatggcatttactaatgtcctcagagcaaaaatggcattagttctcctgggtttgcctcaaaatttggccaacaagttcccttttaaact

SEQ ID NO: 27868 - DNA, 120 bp, synthetic construct
  source 1..120: mol_type = other DNA
gcatcgtgaagacatgaagatttcttctcctttcaccctatctccccaatcagtttcttccttcattaattgctgtttgagaattataacttggctctaaaacttaaaatagctacttcc

SEQ ID NO: 27869 - DNA, 120 bp, synthetic construct
  source 1..120: mol_type = other DNA
ctgggattatagacgtgagccaccgtgcccagccttttgcttttaaaaaaaaaatcactttttatagtttccacttcatacagattgtgcttgtcttttatttctgtacacatggtagca

SEQ ID NO: 27870 - DNA, 120 bp, synthetic construct
  source 1..120: mol_type = other DNA
tgaggctaactcacacatcagatgatgtaaatatttccctcagtttgtcacttatatttcatcttcatttacaaaaatatatatatgttttggtatagaagtttaacgcttgtactaatc

SEQ ID NO: 27871 - DNA, 120 bp, synthetic construct
  source 1..120: mol_type = other DNA
actgggctatcccctgccaggaaaccctcatcacccatttggcccaacactctgtttggattgctgccttgcgtggaagccccctttcgcttctcttgacctctgacatcgtggtgtctt

SEQ ID NO: 27872 - DNA, 120 bp, synthetic construct
  source 1..120: mol_type = other DNA
atgaataggcaatttgggaatcatttttcacctaattttttaacctcgttttttaaaaaagaaaaattctattggagagtaagaatgatttttacagtttactaatatcatacttcgctc

SEQ ID NO: 27873 - DNA, 120 bp, synthetic construct
  source 1..120: mol_type = other DNA
agtgtggcctgtggtagatataactcctagatttctgttctgaattagtatttggtatcagtagaagacaatatagaagaaaatcttaagtactaacactgtgatatgctagtgctgcaa

SEQ ID NO: 27874 - DNA, 120 bp, synthetic construct
  source 1..120: mol_type = other DNA
aatatcaccgtgcatttcagaaaacttctggcatgttaatgctactattaatctgatcatagtcatttccttcttaccaaatttttaatttatgcctgtgacaatgtcattgtggctaaa

SEQ ID NO: 27875 - DNA, 120 bp, synthetic construct
  source 1..120: mol_type = other DNA
cccaagattgtgctaagtatatctcctttgtgttcccacagcattctgcacacgaccaaattacggtgaaattattctcattatgtgttttcctcctcaattaaaatgtaagttctttga

SEQ ID NO: 27876 - DNA, 120 bp, synthetic construct
  source 1..120: mol_type = other DNA
ctacggtagagtgctaccatgtgaggctgcaatggctaggtgtagactctgtgagactttgaggtagagtcccagggtaaagagtttgatttttttttagcctaatgtagttgaaagaca

SEQ ID NO: 27877 - DNA, 120 bp, synthetic construct
  source 1..120: mol_type = other DNA
atccatacagtctggcatcaaggtctatgttcttgaccattatattacactgcctagaattttggcttgaataatttattagggggtgatgcctttgccaagatgtagaagactccgaga

SEQ ID NO: 27878 - DNA, 120 bp, synthetic construct
  source 1..120: mol_type = other DNA
ataattgaaaggcaggtaagtggctcttacttggagtcacagagaaaagcaaggattttcttttttgaaaaggatttcctttttcacatttagaaagtaccagttgggtctgtggctcac

SEQ ID NO: 27879 - DNA, 120 bp, synthetic construct
  source 1..120: mol_type = other DNA
tccttcctcccaacctccaccctcaggtagaccccagtgtctgttgttcttttctgtgtgtgcaagagttctcatcatttagctctcactaagtgagaacatgtggtattaggttttcta

SEQ ID NO: 27880 - DNA, 120 bp, synthetic construct
  source 1..120: mol_type = other DNA
ttctattattattgcatggtggtccgtgagtgtgtttgttatgatttatgttattttgcatttgctgaggatattttatgtccaattatgtggtcgcttttagagcatttgctgtgtggt

SEQ ID NO: 27881 - DNA, 120 bp, synthetic construct
  source 1..120: mol_type = other DNA
gcctttgaagtgggacatgtagtccatttacattaaatgtttgtattgatatgtgtacatttgatcctgtcattgtgttgttagctggttattctgctggcttgtttgtgtggttgcttt

SEQ ID NO: 27882 - DNA, 120 bp, synthetic construct
  source 1..120: mol_type = other DNA
aggtgaaagagaggagtagcctgagagctgtattacctaagttcagagaagtttgagaaaagatagagttgatactggctttaaatgatttgggtaaatggagatgtgcagcttacagag

SEQ ID NO: 27883 - DNA, 120 bp, synthetic construct
  source 1..120: mol_type = other DNA
ccagggtacagattgtgttatattcaacttagtgatctctgatacccagcacaatgccttatggagtagatgctcaggatctgatgaattaccttgtgagagctgcatgtttgcatactc

SEQ ID NO: 27884 - DNA, 120 bp, synthetic construct
  source 1..120: mol_type = other DNA
gcacaggggagctgggcatatgtaaatgttacagggttgataaagtgctgagagtgtaatttttaacagtgactggacattgtaaagtaatgattatgtatatgcctttgagtttcagtt

SEQ ID NO: 27885 - DNA, 120 bp, synthetic construct
  source 1..120: mol_type = other DNA
gaggcttgacatctatcttcctgcctgctccattcagacagatgagtaccgtccatggtttctaattctgtaccttcaattttcactgcttgtctgtttaattgcacatatacgtttagg

SEQ ID NO: 27886 - DNA, 120 bp, synthetic construct
  source 1..120: mol_type = other DNA
tggattttggcggggcaactataatctcaaagaaagagaataacaatttgcatttataatcttttcttctaagtagcttaaagttttgtaagtatattttcattaatcctttggactata

SEQ ID NO: 27887 - DNA, 120 bp, synthetic construct
  source 1..120: mol_type = other DNA
cactttggatacgtgttggtgagcataaatgtgccaatcattgtgatatggcttcgatgagtggaagaacaccagggctcttgtctcatgcccaattagataagatgacatgggtgcatg

SEQ ID NO: 27888 - DNA, 120 bp, synthetic construct
  source 1..120: mol_type = other DNA
taggtagtattccattgtatgaatataccacaatttgtttatctagtccccaattcaaatgtccacttgatggacatttagattgtttccagttcttggctattatgaataaaactgctg

SEQ ID NO: 27889 - DNA, 120 bp, synthetic construct
  source 1..120: mol_type = other DNA
ttgtatttaactctatgacccatgttttggttaggttttagacatgttgatttttttttccttgttggtttccttgttggttttggcactattagtagaaaagactgggccgggccagtg

SEQ ID NO: 27890 - DNA, 120 bp, synthetic construct
  source 1..120: mol_type = other DNA
agattttttgagaacatagggaaaaagctctgtggttttaacaaatatataagtatgctaattttaaaacactaagcctttttgtagaaaatttggagagtacaagactgcatgaagaca

SEQ ID NO: 27891 - DNA, 120 bp, synthetic construct
  source 1..120: mol_type = other DNA
tttgtggcttctatcattgttgaaagtttctggggagtagctacctgttaactaaaaataggtatctggagcatggcaaaagagaccacttcagccttgcaactatgatattgatccact

SEQ ID NO: 27892 - DNA, 120 bp, synthetic construct
  source 1..120: mol_type = other DNA
tgtgtatcttgggatttatgtatttatctcatctatgcagtattcagtgagaagctactatacacttagcattcttaccagggctttgaagagtacagatgctttaactagtcccacatt

SEQ ID NO: 27893 - DNA, 120 bp, synthetic construct
  source 1..120: mol_type = other DNA
gagaaagtaattgtagttgtttgtagatagctgattaactttgaagcatatacatatattcctctgtgcccatgactgaagagttttctttgggtttcaagctctgcagtattctcacta

SEQ ID NO: 27894 - DNA, 120 bp, synthetic construct
  source 1..120: mol_type = other DNA
ctcaattagttggaaatctgcaagttaacaggcaattcagtaagtctgagactttaatcaaaggtaaactgtgtggtgcattgagtacttttgcttggagtgccttttgcctccccatat

SEQ ID NO: 27895 - DNA, 120 bp, synthetic construct
  source 1..120: mol_type = other DNA
atacaatgtggaataatgaaatcaagctagttaatatgtctgtcacctcattggaatttactcttagcaagttttgaaatgtgcaataccctgttattaactatattcatcatgctgtgc

SEQ ID NO: 27896 - DNA, 120 bp, synthetic construct
  source 1..120: mol_type = other DNA
tggctgcacttgtgcaggtttatttctgggctctgtatttggccaatttttattggccaaaattacttatatatttaaaaatttgggtgattcaaacacctctcaaagtatatatgttgg

SEQ ID NO: 27897 - DNA, 120 bp, synthetic construct
  source 1..120: mol_type = other DNA
aaatgaccaaaaccacaaaaacatgtatgtatgctttgataattaattgaaggaaaattctgtatttgggatgcataaccttttgtttttggtattatcctaatagagagaaaaatattc

SEQ ID NO: 27898 - DNA, 120 bp, synthetic construct
  source 1..120: mol_type = other DNA
ttacagcactttgcctaacaacatttgtgagaatataaggttggaattgtatgaaatttttttaaaacaatctttaaatcaaattgaggtttatgtttcattttgatcagggattaattt

SEQ ID NO: 27899 - DNA, 120 bp, synthetic construct
  source 1..120: mol_type = other DNA
gttactggctgtcttgttgtttagctgtcagaaaagattgtgctgcttcctacatctgctctcacatgctccttcacctgctctgtcttactgagatggataaaccttgtagttcaggac

SEQ ID NO: 27900 - DNA, 120 bp, synthetic construct
  source 1..120: mol_type = other DNA
gtctaacatgaaagacagctctagagcagtggttaaaagccctggctctgggaccagactatgtggagttagatacctttgcctttattatttaagcactccaaacatttctttttctgc

SEQ ID NO: 27901 - DNA, 120 bp, synthetic construct
  source 1..120: mol_type = other DNA
agttttcgcccttgattcagaataagcaatgagagtcaaggtcttatgcagtaaatttgaagttatgttaagtagtatatactttcaatattttaacagaagggatcatcagttttctca

SEQ ID NO: 27902 - DNA, 120 bp, synthetic construct
  source 1..120: mol_type = other DNA
tgtagccttttgttggtagatattctaatttggtaggattaaaacacattgtcctttaaaagcttactagttatagctagttttagttacagcctacatcttgtattttcatttttatgg

SEQ ID NO: 27903 - DNA, 120 bp, synthetic construct
  source 1..120: mol_type = other DNA
ggttgcattattttttcctgagcttctgtgatagtttcattctatatttgggggacaaatatttccctggcaaccctcttaagttttgtaactttaccttccaccacccctgcgccctat

SEQ ID NO: 27904 - DNA, 120 bp, synthetic construct
  source 1..120: mol_type = other DNA
tactccccactcccttaccagattgttttcattatagcagttaattatatctgacagtcaattttgtatttgtttccaccattagaagacagggactttgccttgttcatgtctctgtcc

SEQ ID NO: 27905 - DNA, 120 bp, synthetic construct
  source 1..120: mol_type = other DNA
taggaaatctgagcatctgtagtagtccacatatcattatcaatggctagagaatctatccacttatctggttggcatttaacgagtgtgtaccatgtgtaggacattttccttacatac

SEQ ID NO: 27906 - DNA, 120 bp, synthetic construct
  source 1..120: mol_type = other DNA
cactgtttagtaatatttaggtaaaatggtaagattgccagtgtaatgggcaggttatatgtctggaaataggctcagcaggaagttaaaggaatcatggcctatactgctgacagaaga

SEQ ID NO: 27907 - DNA, 120 bp, synthetic construct
  source 1..120: mol_type = other DNA
ttcatcatcttaggactcagtactacaagattggttattatacaattttacatttagaagtttttccatttttatttacaaagataatagtctcataagtgaatgctttttcatgaactc

SEQ ID NO: 27908 - DNA, 120 bp, synthetic construct
  source 1..120: mol_type = other DNA
gttttttattccttctataaaataatgctatatgttaacctttatttgtattttagatcattttcttagggtaggttttcagaattggaattactttgtcaaagggtgtgaaccatttta

SEQ ID NO: 27909 - DNA, 120 bp, synthetic construct
  source 1..120: mol_type = other DNA
aggaagtccgaacttcttagcctggcataagaggtccttctggaagaggcctgggctgtctgtctctttggactcctgttttaacactgagatcctaatttcaccaaatgctgtgaagtt

SEQ ID NO: 27910 - DNA, 120 bp, synthetic construct
  source 1..120: mol_type = other DNA
cttgttataacgcctttcaagaatactgaattgttgcttttgcttgtctaaatgtaatgtttttattttatcttccttttgcttagttctaaataggaaataatattatttggcttgaga

SEQ ID NO: 27911 - DNA, 120 bp, synthetic construct
  source 1..120: mol_type = other DNA
aagacaaggcaattagggaatgaatatgattgcttagatggtaatttcagtagtttcagacattttaagcttgagatacctgtggggacctatgtgggggatgtttagtgagcagttgaa

SEQ ID NO: 27912 - DNA, 120 bp, synthetic construct
  source 1..120: mol_type = other DNA
cattatttctgctttcaccaaattgcatatgattagatatgtaatctaaggagcctgcatctcattgtggctttactgtcattatcatggttatatatcactgcattttctagggtgaat

SEQ ID NO: 27913 - DNA, 120 bp, synthetic construct
  source 1..120: mol_type = other DNA
taaaggcatcttccttcagttggtattattactagttttgtaaaattccttttccgaaggcagtacattttgttaatatgcacacatttctacttatttttctaaagaatatgctttcac

SEQ ID NO: 27914 - DNA, 120 bp, synthetic construct
  source 1..120: mol_type = other DNA
aaaattttcacttaatataactaggtaataaagtagaaaattgattttcatgactccaattttaagtatctgcataatagtcaatcaagaatagatatatctacttagccattgccattt

SEQ ID NO: 27915 - DNA, 120 bp, synthetic construct
  source 1..120: mol_type = other DNA
ttaccgtgtaacctaacacattcagaggatccaggaattagagcatatgtggagggtcactgatttggcctcttatagtgaaggttttcttttgaggtgggagtatggagtgaaaacagc

SEQ ID NO: 27916 - DNA, 120 bp, synthetic construct
  source 1..120: mol_type = other DNA
tcactgagggtcatgaggctcctaagtcagggcagctctcacatctactggtggggattttgcctctgtacctgaatgagctgtccacctgtgcaggactgtggtaaggattccatggaa

SEQ ID NO: 27917 - DNA, 120 bp, synthetic construct
  source 1..120: mol_type = other DNA
ggacataggactcttctttatgcaatcaggaactaatcatggaggacagagagtactttctattcctctgtgtgacctcagaagtgctccctctttttcttaccaatgacttattatcgg

SEQ ID NO: 27918 - DNA, 120 bp, synthetic construct
  source 1..120: mol_type = other DNA
gcagttattggggaacaaatgtgaggggataatcctagaatgccataaatgtgtaatagctcatctcagtagcattccacattgtgtaaattatttgtgggggaatgggaagatgttgtc

SEQ ID NO: 27919 - DNA, 120 bp, synthetic construct
  source 1..120: mol_type = other DNA
caccgcaggaaatgatatattgtagctttggttcctttgatttcctacccacccaacaaatccaaagtgcagggactgtgctttctaaatgtctgagtggcttagtttatgtggttaggg

SEQ ID NO: 27920 - DNA, 120 bp, synthetic construct
  source 1..120: mol_type = other DNA
cctaattacagcctgtattttgtttatgacttggcagagattgatcttagtgtagcaaatagaagtcagggcaagtcatctggctattctataggtatacctagtcctccagagaactat

SEQ ID NO: 27921 - DNA, 120 bp, synthetic construct
  source 1..120: mol_type = other DNA
caacaactttttgagagcagcacttttgtgatctgttttataatccctgttttaccagtgattaagatgaaagcaattaagaaatctttgcaaaatcacacaggtagtgactgtatgcaa

SEQ ID NO: 27922 - DNA, 120 bp, synthetic construct
  source 1..120: mol_type = other DNA
ataattttctgtttgctgtgattttaagctatattggaaaactagccatgctggcctcttatgtttaatgagcgagataatatgagacggaaaagttcctcaggtgtgactgtgttttaa

SEQ ID NO: 27923 - DNA, 120 bp, synthetic construct
  source 1..120: mol_type = other DNA
atcctccctggactatgtctggatccttcactgcttggacccttccttggtcacaaaggtgcttaataagtgtatgctgagagataggggggttgtacagggattcctgaaggtgtgtgt

SEQ ID NO: 27924 - DNA, 120 bp, synthetic construct
  source 1..120: mol_type = other DNA
actatgttggtgacagtgaatgtctctcaaaataaagctgtgagtattttaaatggacagaaaactgttttctgctgggtttgcatgtgtttatagatgttgaagcaattagaaatgttt

SEQ ID NO: 27925 - DNA, 120 bp, synthetic construct
  source 1..120: mol_type = other DNA
tgatgtttattatcacctcctctaatgcagacataagtaagcctttctgattatagatgagtagaggagagatgtcattcctaattctgatacttaacatcctcatttctatcatattca

SEQ ID NO: 27926 - DNA, 120 bp, synthetic construct
  source 1..120: mol_type = other DNA
atggcatggcctagtacttcccagctggatgatggctcctctacaggatcatgctgttgtctctcttacaatcctgttatttctgtacttattggtcaagactgcaattgctgtttgtgc

SEQ ID NO: 27927 - DNA, 120 bp, synthetic construct
  source 1..120: mol_type = other DNA
gaaacaattatctggttatgctgtgtactaaagtctaaaacattaaagttaaatggcagctatcaatttaactttgcatgagttttatatgccattgtgctactgcaattaatggaatgc

SEQ ID NO: 27928 - DNA, 120 bp, synthetic construct
  source 1..120: mol_type = other DNA
agcaataaatttctagagaagtgacatggcaaaggaaaaggactttgagtctctggtggcagcaacttgtgagaaggcaaataaatgggagataaagaccagttggtaaagcttgttcat

SEQ ID NO: 27929 - DNA, 120 bp, synthetic construct
  source 1..120: mol_type = other DNA
agttatgtttcctaatttgaagataatcatgcaggaaaatttattatagggaagaggatgatatggtgcggtgaaaaaatggggaattaggaatcaaaaggtttgagttcccactgcact

SEQ ID NO: 27930 - DNA, 120 bp, synthetic construct
  source 1..120: mol_type = other DNA
cttagaactttatcaatggagggaacatagattttcttaaatcaaagacttttgggtgaggagatagaatattatttcactgcttgctgattaattttaaagaaaatcccatgtcccact

SEQ ID NO: 27931 - DNA, 120 bp, synthetic construct
  source 1..120: mol_type = other DNA
tctgctccattccggctcattcacttgctctggtcacatggatcttattctctcttttagcacaccacatttattccttctcaggatcttcatttcactagaatccaacttactttgtct

SEQ ID NO: 27932 - DNA, 120 bp, synthetic construct
  source 1..120: mol_type = other DNA
tctcagctatatcgtttacatgttttttcaatgacatgtaataaactaaggcatactaaattacaatattctctaattgaaccattgtatctatttgttaagtgatacatacaattaaaa

SEQ ID NO: 27933 - DNA, 120 bp, synthetic construct
  source 1..120: mol_type = other DNA
cctagatatactgcctggaacaaaatatttctttaccctaacttctaatgcagctctgttcttgaattgactgcctgatcggtatctgtctcttcctcccatctttacttacctgtgcct

SEQ ID NO: 27934 - DNA, 120 bp, synthetic construct
  source 1..120: mol_type = other DNA
tgtgtatatgtatatacatagatacatacatatgtacatattccatctacttggcatagttcagccgatttttattgtgtgtttatcatgaacatataccattctgaagatactgaaata

SEQ ID NO: 27935 - DNA, 120 bp, synthetic construct
  source 1..120: mol_type = other DNA
tagctcccacttatacgtgacagcatgcacaaacctctatttaaagtatgaataccatgaaaatattcttttacttggcacttggatattaaatcacttcggcgactagctttgttaagt

SEQ ID NO: 27936 - DNA, 120 bp, synthetic construct
  source 1..120: mol_type = other DNA
aactttagagaacacaattaacaatagagatttttcagttcttgaggacaatagtaatgtctgctaaaatattgcaaagaattaagtatatatgtgaaatactatgtaatctataatgta

SEQ ID NO: 27937 - DNA, 120 bp, synthetic construct
  source 1..120: mol_type = other DNA
attcaaattaaattatgtattgggttaagtctatcattagaataaaacaggtgttattatccttctcctaacactattctggcaaaaattagctttagtaaatttaattgctcttgatgt

SEQ ID NO: 27938 - DNA, 120 bp, synthetic construct
  source 1..120: mol_type = other DNA
ggggaaatctagatggttactgttctgtattgataagaatgtcacctgttaagtgaagtcagccttttaattcagaataagttcagagaaggagacacaaaaactcagatttaaaaaatt

SEQ ID NO: 27939 - DNA, 120 bp, synthetic construct
  source 1..120: mol_type = other DNA
aggaaggtggtttcagacccttcattttggaggggctgtcatttaaaacaaggtaccaggctctgtctgtgactctaggactgataaggcagatttccttgctctcaagtctttgatccc

SEQ ID NO: 27940 - DNA, 120 bp, synthetic construct
  source 1..120: mol_type = other DNA
acatttcacaggaaatgtgtggattaaagggatttttatttgtttaaatatagtcgctttgtaatttagatagaataatactgttaaaccaatttgaagataaggtgtgctttctatgtt

SEQ ID NO: 27941 - DNA, 120 bp, synthetic construct
  source 1..120: mol_type = other DNA
attgtgccttgaggcctcttacataaaggatgcaatttgaataatgccttggtaaaaccatttaatctctgtttacaactatattatgtttcatcccaaacagtaatgatgactcctttc

SEQ ID NO: 27942 - DNA, 120 bp, synthetic construct
  source 1..120: mol_type = other DNA
gcttttctgactgttgagtatagataggcttgtccttagagaaagcagactgtgagtgccacagtgaatgccttgtattattttctctttacaaagataaaccaaagttctaaaagagca

SEQ ID NO: 27943 - DNA, 120 bp, synthetic construct
  source 1..120: mol_type = other DNA
ctagacattgctgaacacctggctaaattaattattctacttgagccctaactttagccaagggggatagaaaaagtccgtgattctcatttttggaaagaaatataattttcttggaca

SEQ ID NO: 27944 - DNA, 120 bp, synthetic construct
  source 1..120: mol_type = other DNA
tgccagttatttgccatgtgactttggttaagtcagcctctctggacttagttttctcatctttcaaataaggatagtgatgggattgatatgaaggttacgtatgataataacccttag

SEQ ID NO: 27945 - DNA, 120 bp, synthetic construct
  source 1..120: mol_type = other DNA
cttaaagaaaaaaaaaaaaaaagttttgggctttgaggtgatacaaagatataagatcagtgcctctcaaactttttatgtttgtcatacattttttgaatatttgaatttttggtagca

SEQ ID NO: 27946 - DNA, 120 bp, synthetic construct
  source 1..120: mol_type = other DNA
cattgattgacgtttcctttcataaaagatttctttgtggcatgcagtgctgtttgatagcattttacctgtaacagaacttctttgagtattgcagtctatcctctcaaccctgatgct

SEQ ID NO: 27947 - DNA, 120 bp, synthetic construct
  source 1..120: mol_type = other DNA
gaatataatgaagtgtactcaccactgaaagtctactgaacataatctttttaatcatttagaatgaacttcaggatttggaacatgcttctggctgatcattaggaacatcaattatca

SEQ ID NO: 27948 - DNA, 120 bp, synthetic construct
  source 1..120: mol_type = other DNA
gctgccaaagaatgtgtttaaactattaatccaaaacatacagtttatagttagaaaaaaatggcccatgggtttacagtgttcttcgctggattgacatggaggaaattccagccttgt

SEQ ID NO: 27949 - DNA, 120 bp, synthetic construct
  source 1..120: mol_type = other DNA
tgtcatcatactaaacagttatcagtcttttccatattttatttatttatccctttttattctttgtgttttagctatttttgaagcaagtttcagactaagtcatatgccgctctctct

SEQ ID NO: 27950 - DNA, 120 bp, synthetic construct
  source 1..120: mol_type = other DNA
ccagatcatgttccgatttctccaattgcttaaaaaatgttttgtttttgtttttacatctggtttgtttgaactaggatttacatcaggtcacatgttagatttggtgttgtctcataa

SEQ ID NO: 27951 - DNA, 120 bp, synthetic construct
  source 1..120: mol_type = other DNA
ggataagccgctttcctgttttattttctgcataaattcaggaaagaataggtaatttcatctgacaaactacagatgtagttttcagagcaattaagtgcttggaaatacaattacttg

SEQ ID NO: 27952 - DNA, 120 bp, synthetic construct
  source 1..120: mol_type = other DNA
ttttctatttcacagttttgattgtcaaaggaaaatgtatagaaaattctattcttacaaagatattaagggaataataaaaatggtgagcaaccatgtggttaaatgtgaagattggag

SEQ ID NO: 27953 - DNA, 120 bp, synthetic construct
  source 1..120: mol_type = other DNA
ggtaggaatctaagttaactgatgtgaaagagctgtgtatacatctctttattgtgctgttttatataggtctataatgaaagccaaatgcctttgtttcgtctttttggtttgatgcct

SEQ ID NO: 27954 - DNA, 120 bp, synthetic construct
  source 1..120: mol_type = other DNA
tgttcctctagttccctcatattgaggtatctaaaacccaaataaaaaatacatgaaaagcattttctcatcttttttaccttttaatcatttccctttagaacacctgtcatttctgtc

SEQ ID NO: 27955 - DNA, 120 bp, synthetic construct
  source 1..120: mol_type = other DNA
atatgcttgagccactgcagctgccctatactttcatttatttagaagcaagttaatttgtcaacttgtcttggggattattattattcaacaaattactctttaagctgcacatcaaaa

SEQ ID NO: 27956 - DNA, 120 bp, synthetic construct
  source 1..120: mol_type = other DNA
gaaactttagctataaaatgataactgtagtagtgaggcaaaagaataggctctgaaggcagggaacctaaggccaattcatgcaaacttcctggaactaaattctaggaccttcatttg

SEQ ID NO: 27957 - DNA, 120 bp, synthetic construct
  source 1..120: mol_type = other DNA
gcattgttgtgggtgcttaaaggtatagaacttaacaaaatagacaaaatccctgttttcctggagtttgcattctcagagaacctccagccagactgctcttcgtaccctagagtcagg

SEQ ID NO: 27958 - DNA, 120 bp, synthetic construct
  source 1..120: mol_type = other DNA
caggcgtgagccaccatgcccagcctaaattgtctgatttagtctgtgctcagcttgtttttcccaactgttgttgggaaaacatgttcccaacatgttgggaaggcatgttcatgataa

SEQ ID NO: 27959 - DNA, 120 bp, synthetic construct
  source 1..120: mol_type = other DNA
gaagagattacttgtgtttcttgggtaggtacaggcctgtgcagatcctcataacatggtagaaggaatggagactttgaacatgtcataacaaggtttcagtcctgacacatcttactg

SEQ ID NO: 27960 - DNA, 120 bp, synthetic construct
  source 1..120: mol_type = other DNA
tttctcgtgattagattgaggtcatgcatttttggcaggacaggcgtgatgttcgcttctcatcgtatccctctaagggcatgtgatatcaacacttattacttattattaataattata

SEQ ID NO: 27961 - DNA, 120 bp, synthetic construct
  source 1..120: mol_type = other DNA
ccacaagatgcttcagactcatcttgtattttccctgcctcagtcctgaatcaaccacatctccaaaaagtcttgtaaattctcttaaaaaaataaattagccatctgtcagctaacata

SEQ ID NO: 27962 - DNA, 120 bp, synthetic construct
  source 1..120: mol_type = other DNA
ttttcttaacatttgtaggattaaggagttatattttgcagtcttcttggtagctcttcaaaaccctagactttgctgggtgcagtggctcatgcctgtaatctcaatgaggctcaaagg

SEQ ID NO: 27963 - DNA, 120 bp, synthetic construct
  source 1..120: mol_type = other DNA
tcttctctgtatccctgtgtcttcagcgataaggacatttctttcctccagggcatctctggaatgaagttcttactgagaagagaggtcaaagaattctttcaaggttttataacctgc

SEQ ID NO: 27964 - DNA, 120 bp, synthetic construct
  source 1..120: mol_type = other DNA
tttatcattaatatatcgttaatagtaggcatacgtgtctgaacagatagctgatgaaaattatctcccgtagaactccccctgaccgtttcctccaggttgaactgttgaaggcctcta

SEQ ID NO: 27965 - DNA, 120 bp, synthetic construct
  source 1..120: mol_type = other DNA
ttctaaagttctgttaaattagaaactggataagtaatatgagtgacttgttagagttactatttctttaaatagtagataacttttctctggttttcattgaaatcagaaacactttgt

SEQ ID NO: 27966 - DNA, 120 bp, synthetic construct
  source 1..120: mol_type = other DNA
ataaggttattctatttaatacttattctgtggatttttggcatttcactatttccattttctgaaaacaatgtggtcaatgaaaattttaaaactgtgtcttgaccttgccccatggga

SEQ ID NO: 27967 - DNA, 120 bp, synthetic construct
  source 1..120: mol_type = other DNA
aacaattgatggtaaaattatgatgggagtggacatgacccttgcaaggatagactggagtatattcagaggtttttctcacaatgggtatttgtctggtttaaaatggtggaagaaaag

SEQ ID NO: 27968 - DNA, 120 bp, synthetic construct
  source 1..120: mol_type = other DNA
ccccaccactggtaaagtttggtgactgtggggaagggggcaggaagtgaggtcatgttgagggtagattgtgttgtcctggtatcgatgagagacgtggagaccctttaacttgtagca

SEQ ID NO: 27969 - DNA, 120 bp, synthetic construct
  source 1..120: mol_type = other DNA
tagcctcacttggcaacaggtactggctgatcctgggcttcatctgaaggagatggaggccagtgaaccttttggttacagggaggtgagggactggaggagggggcagatggtggaaga

SEQ ID NO: 27970 - DNA, 120 bp, synthetic construct
  source 1..120: mol_type = other DNA
catggaccaaaaactgttaaagaaaaataagagatagtagttaaaatggtaaaaacagattttattcaggaaaagctgcaatagaagaagggattccagtatagaactgggcttaattcc

SEQ ID NO: 27971 - DNA, 120 bp, synthetic construct
  source 1..120: mol_type = other DNA
atgcctacaacatcactctggttattaaaattatacattagactttaaggtagtgactcaagacaacataatcaataggtcaaaaaattatcgcaagaatatgtgctaagaaaaggccat

SEQ ID NO: 27972 - DNA, 120 bp, synthetic construct
  source 1..120: mol_type = other DNA
cttgggtgatgggatcattaaaagccctaacagcttcacacaatataacggtataacaaacctgcatgtgtaataaatttaaaaattaaaaatttttaaatgccatatccttatgctgat

SEQ ID NO: 27973 - DNA, 120 bp, synthetic construct
  source 1..120: mol_type = other DNA
actggcgtgagccaccgtgcccggccttcctacctcttttcatacccaatgcttagaggttttcctttgagtcgtggatatgaagacctagaaagtatttgctaaaaaatatctccaagt

SEQ ID NO: 27974 - DNA, 120 bp, synthetic construct
  source 1..120: mol_type = other DNA
tattggcaaaaggacagacatatagatcagtggggtccagttggatctgatccagtcagatccagttccaaatatagacctacacatatgtggtcaaatttgatgaggatgctgaagtga

SEQ ID NO: 27975 - DNA, 120 bp, synthetic construct
  source 1..120: mol_type = other DNA
tcatcagggaaatgcaaagtgagataccattggctacccaccagaatggctaaaattagcaatattgatcataccaaatgttggggagaatgtggaactgttagtgattgctggtggggg

SEQ ID NO: 27976 - DNA, 120 bp, synthetic construct
  source 1..120: mol_type = other DNA
cttttcctggaggatggcatagtgtggctgaaagttccaggcttctaattatggcttggtctttctggtgaccagcccccatctaggagcccaccaagagtcacctcattagaacaaaag

SEQ ID NO: 27977 - DNA, 120 bp, synthetic construct
  source 1..120: mol_type = other DNA
atttgctctttcattcaagtgaaggttattgagcacctcctatgagtagatgttttatcagatactgagtaggcatgctacgatgagtacgcaaccaagtccctgcccttaacagcattc

SEQ ID NO: 27978 - DNA, 120 bp, synthetic construct
  source 1..120: mol_type = other DNA
cttaaagtatcgtgtaggaacatttgatgtgctccacagccactcacagcttctgataattctgtttgtgccagccttgagagatcaccgagtggtagtttaagattgtgctctagtata

SEQ ID NO: 27979 - DNA, 120 bp, synthetic construct
  source 1..120: mol_type = other DNA
acagctaatatttaatttttttgtagagatgggttttggaatcagacttgtctgtacatgtctaccatttaataactgttgtacatcacattgcttcattctttgaacttcagttttctc

SEQ ID NO: 27980 - DNA, 120 bp, synthetic construct
  source 1..120: mol_type = other DNA
gttttctgtaagttttgtacctttttttaaaaaagaaattatttgtatcataaaggacctaaataatatacatggcatgaatgtacatctgcccgtgaatgctgagtttattctagaaaa

SEQ ID NO: 27981 - DNA, 120 bp, synthetic construct
  source 1..120: mol_type = other DNA
aaagacattctatgtgaccaaatcattaaaaaatgcctatacattcattagttaatagatgaagaagtggccagcactcgtcatatagatagacagataagatagatctatatataaaca

SEQ ID NO: 27982 - DNA, 120 bp, synthetic construct
  source 1..120: mol_type = other DNA
agcttaaaaagaacattatatattttagagttagaccatctaaatcatcatacatctttaaattgttatttttatttaaagaaaattgttactctagacaactttacggctgcttctgtg

SEQ ID NO: 27983 - DNA, 120 bp, synthetic construct
  source 1..120: mol_type = other DNA
tccctgaactccactctactttagagcttattgtcatgagtttgctggagggagagaagaggtagggagtcaaaagctgtgtttgaaaatgtaatcttggctaatccttctctttgtcaa

SEQ ID NO: 27984 - DNA, 120 bp, synthetic construct
  source 1..120: mol_type = other DNA
gaaaatgggtacccctgcatttattctcctctcctccccgaaaagagaaatacacagcagtcaattcaccaacacgatataaaaattataaatatttatgccccaacaacatagcttcaa

SEQ ID NO: 27985 - DNA, 120 bp, synthetic construct
  source 1..120: mol_type = other DNA
tgggcaacggatttttaaacaaaggtgccagggcaatttaataaggaaatggtaatgtggagttccagaacaagtccagagttctagaacaagtagatctagaacaattggatatctaaa

SEQ ID NO: 27986 - DNA, 120 bp, synthetic construct
  source 1..120: mol_type = other DNA
tcaatagaaaggaataaattactggtatacccattaacatgtaaggttctcaaatacattataccaagtgaaagaagtcagactcaaaagcactatagtgtataattctatttgtatgac

SEQ ID NO: 27987 - DNA, 120 bp, synthetic construct
  source 1..120: mol_type = other DNA
tgtcttctacgaaactggtccctggttccaaaaaggttggagaccattgtgttacatgaacatctttgaaaaaatggtctgaagtaaaagccgttgttgcctctatttgcaaaatgttca

SEQ ID NO: 27988 - DNA, 120 bp, synthetic construct
  source 1..120: mol_type = other DNA
gaagccatggtggtttgttttatttttggcctgcttatgcaaagcattgtgatggaggctttacacaaataaactgtatctcatttgattcccaccactacattatccctattttacaga

SEQ ID NO: 27989 - DNA, 120 bp, synthetic construct
  source 1..120: mol_type = other DNA
gtcttctcaccatctttgctctgtgcattctttgtctagtttcctctttttaggaggacaccagtaatattggattagggcttaccttaatgacctcattttgattacctctgtaaataa

SEQ ID NO: 27990 - DNA, 120 bp, synthetic construct
  source 1..120: mol_type = other DNA
aagcatggaatcttccaattttgttctttttcaatattattttggctatctggagctccttgcaattccatatgaatttgaggatcaacttttttatttctgcaaaaacagccattagaa

SEQ ID NO: 27991 - DNA, 120 bp, synthetic construct
  source 1..120: mol_type = other DNA
tgagagcactgctttaagtatcgagcacttgagaatgttgagtattcgagtgattaggttctgtttctacagtgtattttaatgtttgcttctgctgtaaaattgtgttagacctattac

SEQ ID NO: 27992 - DNA, 120 bp, synthetic construct
  source 1..120: mol_type = other DNA
aatgttttaaagaaatgaaagtacatcttcaatagagggaaacttggccctgatctgccagtcagtgaaggtcacagcaaggcagcagcaggctaagctgtgctgagtgtatgagaaatg

SEQ ID NO: 27993 - DNA, 120 bp, synthetic construct
  source 1..120: mol_type = other DNA
cactgatattgccaccctggtccatggatctaccatctattccctgaattcctgtaatgagctccctgtttctacctctctcctttccaatctgttcccagcacagcaggcaaaaatgaa

SEQ ID NO: 27994 - DNA, 120 bp, synthetic construct
  source 1..120: mol_type = other DNA
tcatagcatgtttcccaaacatatacatactagattgtatgtatgtatgtatatcatgttacatatttactttttatatggttgagcttttttatttctgtgaatccatttcttcttcag

SEQ ID NO: 27995 - DNA, 120 bp, synthetic construct
  source 1..120: mol_type = other DNA
aaggacaaatctgactgaaggtaaaagcattccctcttcacagatacttgtccaaaagggtttacattaaattttcctgatgggcacacagcagtattttatgctgtatctgtataaacc

SEQ ID NO: 27996 - DNA, 120 bp, synthetic construct
  source 1..120: mol_type = other DNA
catggtattaagtaacttacagcatttattgaacgaccagacaactaagcttggatgctgcagaaccaggaatattttgtaattaggagaagctacatcatgagaaaatctttactacag

SEQ ID NO: 27997 - DNA, 120 bp, synthetic construct
  source 1..120: mol_type = other DNA
agttgcatttgttgaaatcatcatcagctaccatgctaaagttttacaattatttttatgttttttatttggttgttacaaagtagtttttctattatggttatataattgcagaatttc

SEQ ID NO: 27998 - DNA, 120 bp, synthetic construct
  source 1..120: mol_type = other DNA
aattggcattttcctgtttatcttcatagcatggtaaacaggtagggactctaacttgccttacatgctgtaattgattaatggaagatctggagctagagccccagtctgttgtgggtc

SEQ ID NO: 27999 - DNA, 120 bp, synthetic construct
  source 1..120: mol_type = other DNA
gctttcattccttcaaaatctacatttgcagtggcagaaatatgagacccatgtttgtgtgaaggtcattgtgtgcagaatgtgctgattccaagcaaatgtttgagattcatttagtag

SEQ ID NO: 28000 - DNA, 120 bp, synthetic construct
  source 1..120: mol_type = other DNA
ggggagggatggcattagaagtccctaatgtagataacaggttggtgggcgcagcaaaccaccatggcatgtgtatgcctatgtaacctgcacgttctgcacatggactccagaacttta

SEQ ID NO: 28001 - DNA, 120 bp, synthetic construct
  source 1..120: mol_type = other DNA
gaattactataaaattagcctaacatgtattaacaactagcaaaagagaatcagagattcctagggtgcttagataagtattaccagaaaagactcatgtttctgtctgctggtccgtcc

SEQ ID NO: 28002 - DNA, 120 bp, synthetic construct
  source 1..120: mol_type = other DNA
ttcagtcacagtgaaatttacaagaagagattttctgtaaaaagaccaaggaaaggccaagattagaatgaagaattacattgacttaggttgctttttcagtttatatcatactaaatg

SEQ ID NO: 28003 - DNA, 120 bp, synthetic construct
  source 1..120: mol_type = other DNA
tatccaaccagaaactcctcaacccaaaccaagtgtccagaaaaccaaggatgcatcatctgctctggcctctttaaattcctctctggaaatggatatggaaggactagaagattactt

SEQ ID NO: 28004 - DNA, 120 bp, synthetic construct
  source 1..120: mol_type = other DNA
gatccatgttttaccaaaataacaaagaaactagaatatgcttataaaaatgattcaacatgaattttaataatgtcaacacatacacaattcatgtaccattcattctgctataaataa

SEQ ID NO: 28005 - DNA, 120 bp, synthetic construct
  source 1..120: mol_type = other DNA
ctggggtttttatgagctcaaaatggagaaaatgcatgctgattggtccatggacagccatgggaaggcctggaaaaagtaccatccaaccagccaaaaggcatcaatgaagttctcact

SEQ ID NO: 28006 - DNA, 120 bp, synthetic construct
  source 1..120: mol_type = other DNA
caggcaggctgctgctgccatcaacagcagttttctcatcagaaacaatgaaacaagactgataccagtagtgaaagaaataaaattgtcagcctataattctattaaaagtgaaatagc

SEQ ID NO: 28007 - DNA, 120 bp, synthetic construct
  source 1..120: mol_type = other DNA
gaataggtggttcttaaaggaattggaggcgatatagtttgaatatttgtcccctccaaaatcttatgttaaaatgtgatccacagtgttggagttggagcctgctgggaggtgtttgga

SEQ ID NO: 28008 - DNA, 120 bp, synthetic construct
  source 1..120: mol_type = other DNA
ttattgagcagatgatcaaatatacaaataggagcaatatttggatttgccaggtttcttcacttaaaattctgtgttttcccatttgtcaattttggcttttgttgccattgcttttgg

SEQ ID NO: 28009 - DNA, 120 bp, synthetic construct
  source 1..120: mol_type = other DNA
gctggagaatttaatgccagcaaaggatggtttgttgattttagaatgtagtatggcttaaaaaacatcaggataacaggaggagtagcttcttctgatgagttcgcagatgccattaag

SEQ ID NO: 28010 - DNA, 120 bp, synthetic construct
  source 1..120: mol_type = other DNA
tctaattctgtgaagaaagtcattggtgactttatggggatggcagaaagtggccatactgtccaagggataatctgttaaggtactaaagacattacacctccaatatgaggaattgtt

SEQ ID NO: 28011 - DNA, 120 bp, synthetic construct
  source 1..120: mol_type = other DNA
gtggcacttttttttttgcaagttttaagtgtttgctgctgtagttgtcattattctttatttttccttgtaaaagtaatttccaaagataatatatcacctaggtctcagggcgtgacc

SEQ ID NO: 28012 - DNA, 120 bp, synthetic construct
  source 1..120: mol_type = other DNA
tattctccatatcctcagctccttttgcaacacctttttcaattcatagcatgttttaagatatactatcttgctcattaattctcttcacagctttgtctaacttctgtttagtatgtc

SEQ ID NO: 28013 - DNA, 120 bp, synthetic construct
  source 1..120: mol_type = other DNA
aattatctgatagacttaaaggcactatctactgtaccaagcagtgtctgttgtatagctgaatgcctttgggaattaaaggccaaggaggttttctctctgacaggatgagctcagcat

SEQ ID NO: 28014 - DNA, 120 bp, synthetic construct
  source 1..120: mol_type = other DNA
ctgaaggccataataagcatttgaaagactgccatctgtaaataccaaaagcagatattgaaaatatagatgcctgaggggactagaggatatgactcttatcagtgtcaccacagtttt

SEQ ID NO: 28015 - DNA, 120 bp, synthetic construct
  source 1..120: mol_type = other DNA
aatagtaaggtaagactacattccctgtaataaaatcctgcatcacatgtcgtcttccaaggaccatctgtccagatgagccttgctgtaataatcaagtaaacggagccaccagacaaa

SEQ ID NO: 28016 - DNA, 120 bp, synthetic construct
  source 1..120: mol_type = other DNA
ttaaaactcttctatcttttcaaaatatgtatgtgttgggaggccagaatttctccaactacttcagcaaaataattacaggacagattgaatgcagaagcacatatgagaatccagctg

SEQ ID NO: 28017 - DNA, 120 bp, synthetic construct
  source 1..120: mol_type = other DNA
tgtttgtcttatgttatttactaattctaggattcaaagctggaatacgagcagtgaccagcatgcctgacaggcctgttgctacacacatctgtactcttcaatcaacaaagcctgatg

SEQ ID NO: 28018 - DNA, 120 bp, synthetic construct
  source 1..120: mol_type = other DNA
agtctaccctttttccaaattaatctttatattttctccccaaaatttgggtaatgcatagggctacatcctacttgcttgaaaagtgaatggaaccattcatatagttataagaatctc

SEQ ID NO: 28019 - DNA, 120 bp, synthetic construct
  source 1..120: mol_type = other DNA
tggcttttctctcaaaatttatcgccctaatatttaactttgccttctatagctgctcaaagttacttattagacttccacttaacacataatctctcttgtagagtacacttaagtatt

SEQ ID NO: 28020 - DNA, 120 bp, synthetic construct
  source 1..120: mol_type = other DNA
ccccgccccctcccccccaaaaaaagaaaaagaaaatctttgaattcagctatgacccagaagttccctccctacccacttcaagttgtcccgactttctgtacagattcaatcaatgta

SEQ ID NO: 28021 - DNA, 120 bp, synthetic construct
  source 1..120: mol_type = other DNA
caccagccatgttagattgaggcccaccttcatgacctcattttacctaacttaccttaattacctctttaagagacctgtctccagtcacaaccttaaagcaggtcttggaaaattaca

SEQ ID NO: 28022 - DNA, 120 bp, synthetic construct
  source 1..120: mol_type = other DNA
tattgtcccgtgggacagcaagcagatatgcatctcatccagcaaatattattctgaaatgcctttattaaactcccagtgaatacacaactcttcaaatgctctctagtctgtttgtat

SEQ ID NO: 28023 - DNA, 120 bp, synthetic construct
  source 1..120: mol_type = other DNA
actaattcctagaaaaacacaattttcctaaatgagaaacatttgaatagaaaaccagagtagtcctcatatgtattaaagaaattggtttcactggcatattctatgaaacatttaacg

SEQ ID NO: 28024 - DNA, 120 bp, synthetic construct
  source 1..120: mol_type = other DNA
agaagtcaattattttaagtctacagatcattgaaagttctgaagtcaaatcaaacagtttgaaattttatatgtgatgatatcactggggttaacctcactttatattcacatgagcta

SEQ ID NO: 28025 - DNA, 120 bp, synthetic construct
  source 1..120: mol_type = other DNA
atataataataaaaaaaagaaattgtatttctctttcacttaccttcaattttttttttatatctgacagtctatttcaagatacaggtttctgttggggatcatactgtttctggagga

SEQ ID NO: 28026 - DNA, 120 bp, synthetic construct
  source 1..120: mol_type = other DNA
cttcctaattaacttcactcatcattttataaccacagaagtctaacattccccatgctcctccttttacttcttcaacctacattaattaattgagcgccagacattagtcatgtaccc

SEQ ID NO: 28027 - DNA, 120 bp, synthetic construct
  source 1..120: mol_type = other DNA
tgaagtcgaaggaactcctccctaattcactctatgaaccagtattatcgagataccaaaacctggaaaagatacaacacaaaaagaaaactacaggccaatacaccttatgaccctcaa

SEQ ID NO: 28028 - DNA, 120 bp, synthetic construct
  source 1..120: mol_type = other DNA
gaagtactattcagtcataaaaaagaatgcggtcctatcattggcaacaacatgaatgaaactagaggtcataatgttaaatgaaataagccaggaacagaaagacaaacttcttttttt

SEQ ID NO: 28029 - DNA, 120 bp, synthetic construct
  source 1..120: mol_type = other DNA
tgtgtgctcataaagctttcaaccaattctttgattttcagctttaccatggtcccaccctcaggaatgactgatgagtacaatgcctgtctttcgagtattcggcttatttagtggctt

SEQ ID NO: 28030 - DNA, 120 bp, synthetic construct
  source 1..120: mol_type = other DNA
ttttgtttttcagattatattgttcagctatggaagatggattttttttcatgatcctttgactctcaagttcatctttaaatgaactcttttttttgttttgtttttgaggagataact

SEQ ID NO: 28031 - DNA, 120 bp, synthetic construct
  source 1..120: mol_type = other DNA
atgttcctagccccaagcatccaccagttgtaattaatgctgcagatgatgatgaagatgatgatgatcagttttctgaggaaggtgatgaaaccaaaacacctaccctgcaaccaactc

SEQ ID NO: 28032 - DNA, 120 bp, synthetic construct
  source 1..120: mol_type = other DNA
gcgaatcaccaaaagaacatggaggaaagaagagaagaaacttcaggaaggaaatgaagttgattttctgagccgtgttagaatggaagctacagaggcttcagttgagaccacaggagt

SEQ ID NO: 28033 - DNA, 120 bp, synthetic construct
  source 1..120: mol_type = other DNA
tcgccaaaaaactggacttagtttcatctattgtaacatttacctgagatgatcatttctttagtctagaatttgccccaaatcagaagtatacctctgaattatctgtatgtgtcctgg

SEQ ID NO: 28034 - DNA, 120 bp, synthetic construct
  source 1..120: mol_type = other DNA
atcccagtagctgtttttgcctggcctcacagagtttcatttcatgcatatgtagcctaatattcaatgaaggactcaggatagctgcctgtatagatttctggagttctttctctctgt

SEQ ID NO: 28035 - DNA, 120 bp, synthetic construct
  source 1..120: mol_type = other DNA
aattgcacccatacacttccttagaaggggaaagtttgcaggcctctgaaatgacatttgtacttccatagcagaattcaaaaccaacactatagaaagcatctatagctgccttaaaga

SEQ ID NO: 28036 - DNA, 120 bp, synthetic construct
  source 1..120: mol_type = other DNA
tgtgggaggagacttcacaagagtgtgggtactcggaggcaggcagggtcattgagggtcatcttggaggctggtcaccactgatcctggttatatacatattttatatatatattatat

SEQ ID NO: 28037 - DNA, 120 bp, synthetic construct
  source 1..120: mol_type = other DNA
ctattttagcaaaacatgggttttgttcattgaatctgaaagtcttcagttttccatagaagaaccgaaaacatttaaatgtactgtcctgatacttggccttacttcttattcctctta

SEQ ID NO: 28038 - DNA, 120 bp, synthetic construct
  source 1..120: mol_type = other DNA
tgatataggaggaatccagacggataatggaggaaggagatgatgagtatcagttgcagccctgggactggtgcagaagcaggggtggagttcctcctattaacttcccctattgtagat

SEQ ID NO: 28039 - DNA, 120 bp, synthetic construct
  source 1..120: mol_type = other DNA
gtgtcaacctggatgtgaggatgaagacaagccagctagaataaatattgattccaagattgagggcagaggtttctgggagtgtcactgatgggaacagacaaaatggaaaaagactta

SEQ ID NO: 28040 - DNA, 120 bp, synthetic construct
  source 1..120: mol_type = other DNA
ataacagtgagattgctgctttgcacctgatctcagtcagacctcagaggctcagccactggggctggttatgcagcaggaatatatccatgcgaccagcagggtgtaagaagtccaggc

SEQ ID NO: 28041 - DNA, 120 bp, synthetic construct
  source 1..120: mol_type = other DNA
tcccagcttttattctataaataagactctcatgattcacttatccctcacttgtctaactattttatactttttgacgcactaagattctaaaatgaaccataaaagctggcacatatt

SEQ ID NO: 28042 - DNA, 120 bp, synthetic construct
  source 1..120: mol_type = other DNA
aaaacagatcctgggcccactaaggaaaatttgttaatgaatgacggaaaggaaggagccagatttccagttcacatcttcaccctaagtccaggctatttcctctatgcattctgaata

SEQ ID NO: 28043 - DNA, 120 bp, synthetic construct
  source 1..120: mol_type = other DNA
agaacaccaaaatttattctttctatctaattgtatctattgaccaagctctcctcaacctctcctctcccctcccccctacagtctctggtaaccattgttctactctaagcttctaag

SEQ ID NO: 28044 - DNA, 120 bp, synthetic construct
  source 1..120: mol_type = other DNA
ggcttctataacagcacacaggatcaaaggaaggaccctccactcaagaataatctgtcatgactgcggctaatatcaacattatccaagaccttatttaggttccttgaaagctggtat

SEQ ID NO: 28045 - DNA, 120 bp, synthetic construct
  source 1..120: mol_type = other DNA
cagagaaattttaaattatatctcagctgtttctcagagctcctttgtggaaattacatcctggtttctgttccatacttgagtagactacaggctttccagtacattgtccattggacc

SEQ ID NO: 28046 - DNA, 120 bp, synthetic construct
  source 1..120: mol_type = other DNA
cagcaggttgacaatataacaagagcctgtgaacgaagctattgatttacttatgagggacttaaaatatctagtttactagtgacagtcagaatgcaaattaatagagaaaaagaaact

SEQ ID NO: 28047 - DNA, 120 bp, synthetic construct
  source 1..120: mol_type = other DNA
tgagatgaaatgaacgttaactccgctgtggaaaaattgtcatttttaaagaggtgaccatcatgtaaacaacaaccactgccattattgccgctgctaatgcttagatttactaccagc

SEQ ID NO: 28048 - DNA, 120 bp, synthetic construct
  source 1..120: mol_type = other DNA
gcatttctggtctgctcacaaacagatgaaaaattattttcctgccttctttgattttactttctcgtatgcactcatttgagttatatctcatctgtgttaaaatggaggtagctgtat

SEQ ID NO: 28049 - DNA, 120 bp, synthetic construct
  source 1..120: mol_type = other DNA
gatcagcccatttaagacaaggttgttgcaggaagactttttaaaagacctgttcctttcaaaggttcatgattttaaaccaaaataaccacatccattctttataggaaagatcatatg

SEQ ID NO: 28050 - DNA, 120 bp, synthetic construct
  source 1..120: mol_type = other DNA
ttgctgtgataatcaagttaagaggaaaatattttcctttgttataaagtgtaaactctatacaggaaggttttttttttcctttgctctctgcagtgtcctcagcaccaagcacagtgc

SEQ ID NO: 28051 - DNA, 120 bp, synthetic construct
  source 1..120: mol_type = other DNA
caaatgctctgggtgcagatagctgtgcctcactgatatcccctcaatgccttaatgacaatccaccacaagcatcagtttgggtaaaaatgaagcatttactttctttctttctttcct

SEQ ID NO: 28052 - DNA, 120 bp, synthetic construct
  source 1..120: mol_type = other DNA
acttcaatctcagtcctattgtagtcatgctaaggcacacttagggataaaccaaacaactgatccaaatcggtgttcatgtagctggtgggagagtggttagataaagggaagatattg

SEQ ID NO: 28053 - DNA, 120 bp, synthetic construct
  source 1..120: mol_type = other DNA
agttgtgacaaatataccatagtaatgtaagatgttaacattagaggaaactgcttgtaggttatatgggaactttttgtacgattttctcaacttttatgtgaatgtaagactaatcta

SEQ ID NO: 28054 - DNA, 120 bp, synthetic construct
  source 1..120: mol_type = other DNA
gctctggataccagcatgctatgccctctgtctatataggaggctgtgtgtgagaaagagaggtttaacaattaaaaagaaagtgcacatttagaaggtatcaaacctgattcagcagtg

SEQ ID NO: 28055 - DNA, 120 bp, synthetic construct
  source 1..120: mol_type = other DNA
taaccagctaacatcataatgacaggatcaaattcatcttatttatgttccataaaagaaattttggtagaggcaaaatttcaaaggtatgtggttgttaagggtgaaaatgttagagag

SEQ ID NO: 28056 - DNA, 120 bp, synthetic construct
  source 1..120: mol_type = other DNA
gtacaagttttttttatttgtctgtgacatagttcaattcacagttttcagccaaaacccttttggtaaattcaaatttcaaggaacattgtgttttcctagtaaggaattactaatttc

SEQ ID NO: 28057 - DNA, 120 bp, synthetic construct
  source 1..120: mol_type = other DNA
atgagtgagaacatgcggtgttaaggacaccagtcagattagattagggcccaccctgattcactctttctaacttaatttcctttttaacagccctatgtccaaagacaatcacatctg

SEQ ID NO: 28058 - DNA, 120 bp, synthetic construct
  source 1..120: mol_type = other DNA
cattttgggtttgagttttcttttctttttcctcttctcttctcttctcttctctctctgtctctctctcaagaattctagagtttcttacgagttaacacgtagacttagccacaaaca

SEQ ID NO: 28059 - DNA, 120 bp, synthetic construct
  source 1..120: mol_type = other DNA
tgagaaatggagtactattaaggctttaaatgcaaatattagatacagtaagtatcgtgtgtgtgtgtgtgtgtgtgtgtgtgtactgcagaacagtgagcaaaaaaggagaatacaaga

SEQ ID NO: 28060 - DNA, 120 bp, synthetic construct
  source 1..120: mol_type = other DNA
tagaagcatttctgtttaaaaattatcaggcagtgacagtaggaaaacttgtaggcaagctaattaacaactagatccttcctatcattcaaggttttcacggatgctctcagtatttaa

SEQ ID NO: 28061 - DNA, 120 bp, synthetic construct
  source 1..120: mol_type = other DNA
ggagggggagagggagaggtgcagttatctttttacaactgtttaaattttgtttgcagtctctaggcttgtttctcttacttcacaaagtagggatgggatctctgagttttatagaag

SEQ ID NO: 28062 - DNA, 120 bp, synthetic construct
  source 1..120: mol_type = other DNA
ttcaagacgtaaaataagacatttacctatctgttattaatacagcctggtcctttttactaacacagtaatcgcatgagcatgcctattacttttttttccaatactagaaaggattct

SEQ ID NO: 28063 - DNA, 120 bp, synthetic construct
  source 1..120: mol_type = other DNA
ccgtccattcatccataactttggttgttcagaaagcaaaggattagaagccagaggttttaggagaggagatagaacagaaagttggataacagtcagaaagctgctgaagtaatccag

SEQ ID NO: 28064 - DNA, 120 bp, synthetic construct
  source 1..120: mol_type = other DNA
gcccttgtaaaaaccaatccacctaaagcatagttaattctccagtaggcatctttagtaaaattatcagaatatgtaataaaatattcccccagacagcaatcagaatctacaatgccc

SEQ ID NO: 28065 - DNA, 120 bp, synthetic construct
  source 1..120: mol_type = other DNA
cagaggccagtgtgaagtggactcccaggcagcaattttcccttgacatgcctggagcacttcgaccaactttagtttgactgtatgatgtttagttagccatattttgaaaatattgat

SEQ ID NO: 28066 - DNA, 120 bp, synthetic construct
  source 1..120: mol_type = other DNA
tgtagattcgtatatatatttatatgaatgaacttagcaagtaaggatcagcgatatttttcttactgggagtatcactgaataagcaatggataggatttcttataggaaattacactc

SEQ ID NO: 28067 - DNA, 120 bp, synthetic construct
  source 1..120: mol_type = other DNA
aaaatgcaaattaaagccacaatgaaatactatacatccactaaaatggctataatcaaaaagattgacaaaattggtgagaatatgtggaaatcaggaaccctaatacactgctgatgg

SEQ ID NO: 28068 - DNA, 120 bp, synthetic construct
  source 1..120: mol_type = other DNA
accacagaaagaattggagacacttccctttatgtctttcttttccatgttcttactttcccttcctgtaattttttctgacagctgttactcctctttgtttagaaatcccaaagagaa

SEQ ID NO: 28069 - DNA, 120 bp, synthetic construct
  source 1..120: mol_type = other DNA
catgcatacacgtgtaaagcacaaatacagaaaacaaacctgaagagtctaataaagcacaaacaaacaggggaaagccaggggtggggagagcacatgatttaggagagattttgaatg

SEQ ID NO: 28070 - DNA, 120 bp, synthetic construct
  source 1..120: mol_type = other DNA
ggaggtatgagagaacatgaccttttaggtcagaagaagcttggaaggtattttggtccaaattgcgaagggttttcagtatgatgtagagtagtttagacctcatttcattggcccaag

SEQ ID NO: 28071 - DNA, 120 bp, synthetic construct
  source 1..120: mol_type = other DNA
aggaggtgcgtactccagactctatagagagatcaaggaatactttgaatatttcccagaggaagcagttttaactcaaaattaaaggatgagtaggaactaatagaagcatgggtttct

SEQ ID NO: 28072 - DNA, 120 bp, synthetic construct
  source 1..120: mol_type = other DNA
gctggcctatacagccaccagctttaaagtacttttaagcatattataattagctaaactgagcaagtactaagagcaaaaaaattaaaactaacctaagcaattttcctttggccacag

SEQ ID NO: 28073 - DNA, 120 bp, synthetic construct
  source 1..120: mol_type = other DNA
ggttggctaccacatttcaagaaaaacagcaacattttattatttgttcagcatagagaggcagtgtattgggcctgaaagagcacagatgttgaatctgatggctctactttccacctc

SEQ ID NO: 28074 - DNA, 120 bp, synthetic construct
  source 1..120: mol_type = other DNA
cactagccatttggacagtaggtttctgatttctgcggcttcctgattgaggaatttggtatttttgttttgttttgttttttgtattagacagggtctcaccctgtcaaccaggctgga

SEQ ID NO: 28075 - DNA, 120 bp, synthetic construct
  source 1..120: mol_type = other DNA
aagaggctttcttgaagaggtaaagcctgagcataaaaacacaaataaatcaggataagtacacaaggaaggactttgcacaactgagggaagagtacttttttttcattttctgaatta

SEQ ID NO: 28076 - DNA, 120 bp, synthetic construct
  source 1..120: mol_type = other DNA
atgatgacaggcaagaattttctaggtagaaaattgaattttaattcagctaccatacaattcactcttttaaagtatgaaagtcagccatcccattacagggtatatacccaaaggact

SEQ ID NO: 28077 - DNA, 120 bp, synthetic construct
  source 1..120: mol_type = other DNA
acatttctgaatcaaagtagttggtttagaaagagccctgtagtctgcatagaggaatcctcttaaggtccaagaactcatgtctcaccaccagttgaaaatagagcagaggcctgaatt

SEQ ID NO: 28078 - DNA, 120 bp, synthetic construct
  source 1..120: mol_type = other DNA
aattcagtagatgccatagaggttctaggagaaggaatgtttctggaccaaggatcagaataacattcagggaggaggtggcaagcatacaaaaggtggaatgaatagatgtttgagaca

SEQ ID NO: 28079 - DNA, 120 bp, synthetic construct
  source 1..120: mol_type = other DNA
atggtgagtatgtattcatttagccacaaaaatccatcaaatgtaaaaggcataaatgaaggactttcttctcagtaatactgggtttccattgctatactgcttccttttgccagcata

SEQ ID NO: 28080 - DNA, 120 bp, synthetic construct
  source 1..120: mol_type = other DNA
aatttatttttctgtttattttttaaccttgcttccttctatctgcatgcataggatgggtgttgcctaacctggcctgaatcttatctgtctggagagtctccccagccctgctcatct

SEQ ID NO: 28081 - DNA, 120 bp, synthetic construct
  source 1..120: mol_type = other DNA
ttctcctcattgctgcgtggtgaaagccacaagttccaaaatagatgctgaggctttcaaattcctgaggacagaatttgattcttattcccttaagttatttttctcttgccctcatcc

SEQ ID NO: 28082 - DNA, 120 bp, synthetic construct
  source 1..120: mol_type = other DNA
gtacaggaacaaaaaaacaaataccagatgttcttacttataagtggatgctaaatgttgagtacccacggtcgtaaacatgggaacaatagacactgcagactactagaggggagggga

SEQ ID NO: 28083 - DNA, 120 bp, synthetic construct
  source 1..120: mol_type = other DNA
tgaagctttctatgcaacacaaggactcagtttttggcctgttttagtgacaggcaatcagcaacatgctgcatttctctccagtgttgtaatcaaagcaaccctcccatagctttaaat

SEQ ID NO: 28084 - DNA, 120 bp, synthetic construct
  source 1..120: mol_type = other DNA
aatacaggggcatagccggcgcttatttggcctggatggttcaggataatcaccttggaaaaaagatttgcattcagtgcaaatccaaagtctcaaatgactttagcctctgcaataagt

SEQ ID NO: 28085 - DNA, 120 bp, synthetic construct
  source 1..120: mol_type = other DNA
caacaccagcagcaacaatcaggacagcacagtcagcctttaaagaaagcaaagacatatccctgtcaactctccaaatgacaaaaccagtgtacaaagcaagccttttgggataaagaa

SEQ ID NO: 28086 - DNA, 120 bp, synthetic construct
  source 1..120: mol_type = other DNA
aggcacagtgggttagaatgggtgctcaggaaccacactgaaattgaaccctagcatcacctaatagtagtacccacctcgtagcattgttgagaggattaaatgagataatacttaaga

SEQ ID NO: 28087 - DNA, 120 bp, synthetic construct
  source 1..120: mol_type = other DNA
agggaccaaaggagattttttgtttggttttgttctgctcagaatacttgtgttttctgtgtagactgaatttacccaatagtttttttgccttaaagtgacattaaactgtgaagcaga

SEQ ID NO: 28088 - DNA, 120 bp, synthetic construct
  source 1..120: mol_type = other DNA
tgcaccaggtggttaggtcctctgggatatttgtagagatccagcagttggaatttcctgtatagagttgcccatgtaaaattatccctgtttatacacatttgtggattggtcgtgttt

SEQ ID NO: 28089 - DNA, 120 bp, synthetic construct
  source 1..120: mol_type = other DNA
aggtattttgtagtcagtatactgggcacttcaggctgacacgttatgccaaaccatctataagtaagtcatgttacgttctcactcataggtgggaattgagcaacgaaaacacatgga

SEQ ID NO: 28090 - DNA, 120 bp, synthetic construct
  source 1..120: mol_type = other DNA
gtcatccgtggagttagccctccctgatttcttaacaaccctgcaaaggatgaaggaccaatgagttctcagaagagcaatctttttactattagagaggaaacaaagaaggaagaaaat

SEQ ID NO: 28091 - DNA, 120 bp, synthetic construct
  source 1..120: mol_type = other DNA
actcccttggcttattgggaagtattatacctaacccgtttcttctacctctgtttttctacctatttcctttcctctgtacaggtgagtataaaaaacaacagaggccggacatggttg

SEQ ID NO: 28092 - DNA, 120 bp, synthetic construct
  source 1..120: mol_type = other DNA
cgctagccatctgtaatttaaaagtcatcccccccccccacttttgttattgaatatgctacctagcattaagtaacctccttacctccaaaaaagctcctgaagaaagaaaggaagcaa

SEQ ID NO: 28093 - DNA, 120 bp, synthetic construct
  source 1..120: mol_type = other DNA
gttaaggaaatgagagaccttgctgatacacagctggccatttttgagcaaagcaattaagaccaaaaagctacatggaaaattgccacttagaccgcttatgaaaagtatagattctgc

SEQ ID NO: 28094 - DNA, 120 bp, synthetic construct
  source 1..120: mol_type = other DNA
tgcaaaaaggagtgtcaggaaaaaatgtgaaaaacttcagtgtcttatctagtgcaccttccaggctaactgattcatagggacctctgccttctatattgtctttgcaacctcttagtg

SEQ ID NO: 28095 - DNA, 120 bp, synthetic construct
  source 1..120: mol_type = other DNA
tactgaacagggagtgttatagataggaatgattgatggctaaaagctccataaaggcagagatagacttgttttgttgactgttatatccctgtgtctaccacagtgcctgacaggttg

SEQ ID NO: 28096 - DNA, 120 bp, synthetic construct
  source 1..120: mol_type = other DNA
aattcattgccctgggattggcaaaaaaggggagtaacttgggcaagggtagtatcagtcgggatggtgaacaatggtgagaataaaagttggcaaaaggtaagtagaaaaggtgaatta

SEQ ID NO: 28097 - DNA, 120 bp, synthetic construct
  source 1..120: mol_type = other DNA
gagcatcaataagcaggggtttctacaacccaggaagggaagaacatcctgaggtttggatttagtatgtccagggcacaaaatatgattgttcttatgaggtttgccctaagacattaa

SEQ ID NO: 28098 - DNA, 120 bp, synthetic construct
  source 1..120: mol_type = other DNA
aataatggaatccaaagagagatggtttcctcttatcagctcccagtttttccctactaactcttttctttcagagcaattattttgctcatttattcagtcccttttaattcagtattt

SEQ ID NO: 28099 - DNA, 120 bp, synthetic construct
  source 1..120: mol_type = other DNA
agtgaaaggctttctgggcaaaactgaggaacatggagaactctgtcctgtaaggtatgggtagcctgtgggagattttaaggagagaatttctgttatcaaagtagtattttagaaggg

SEQ ID NO: 28100 - DNA, 120 bp, synthetic construct
  source 1..120: mol_type = other DNA
caatagctcgaattagaattctgaagcttttactcaatagctatgaccttagacaagttaactaacctccaagttctacatctgtaaaatgtaggtaataaatgtgaccacttcatcggg

SEQ ID NO: 28101 - DNA, 120 bp, synthetic construct
  source 1..120: mol_type = other DNA
atgtatacatttgatgcaaaaaaggtagtaaagaaggaagagtggaataaaaaataaatgagaaaaaatgaaaaagcaaaacggcaggtctaaatcctaacgtattgattattattcaaa

SEQ ID NO: 28102 - DNA, 120 bp, synthetic construct
  source 1..120: mol_type = other DNA
gtttcctttctgtagaaataaaaatgccatctaagcctggtagctttgctctaagaacttaaatgtccctctcttagctgagcctcagcctctctgtatcagaaaaccttagagggtcat

SEQ ID NO: 28103 - DNA, 120 bp, synthetic construct
  source 1..120: mol_type = other DNA
gaagatcccatatcaagaacccactttctttgcttatccattagaaaccagtatgtatccattcaagttttattatgagattgcatcaattcagtcacattttcaggctgcacctctaat

SEQ ID NO: 28104 - DNA, 120 bp, synthetic construct
  source 1..120: mol_type = other DNA
tgacatctagaatggtgaatcccttccggaaggtttccaatttactttgcccatattcatcagaggaatcaatatccatgttagctatagccttataaaataagtttcttaaataagact

SEQ ID NO: 28105 - DNA, 120 bp, synthetic construct
  source 1..120: mol_type = other DNA
taaaatgctaagtttttagtaacattttgggatagccactatcccatactttcattctattcattaataccattattgcggggaggggccaagatggccgaataggaacagctccggtct

SEQ ID NO: 28106 - DNA, 120 bp, synthetic construct
  source 1..120: mol_type = other DNA
cacaacaatgtggtaatgttctgtgctcttcaagtcgtatgaggcaagtaggatttttaaataaattctttcagactgttctttagaatcactctagcattaaaaagtttttgttttctt

SEQ ID NO: 28107 - DNA, 120 bp, synthetic construct
  source 1..120: mol_type = other DNA
gtctgggtgacagagtgagaccctatctcaacaacaacaaaaaagatccttcttctccccaaacctgatgaattagagctaggccatgtagggcctttcatattacattaaggattttag

SEQ ID NO: 28108 - DNA, 120 bp, synthetic construct
  source 1..120: mol_type = other DNA
atgctatgccattattccatggaccatccccttttgagcagtaacaaactacatgatcatttaggtttattttaacttctgaaaattgttacttttaaaaataattattaggaggaagaa

SEQ ID NO: 28109 - DNA, 120 bp, synthetic construct
  source 1..120: mol_type = other DNA
aggaaggctgttaaaatcagactaaaatatactgtgttcttaggtattcttaaacagtagcacataacaccatttaatacaaccccaatttgaattccaaaggggtttttaggttgtttt

SEQ ID NO: 28110 - DNA, 120 bp, synthetic construct
  source 1..120: mol_type = other DNA
gctgcaaaactaccatgggggtggggcaagttgtgggaaggagtaaggaggagaaaacagttgttaaacaaggtgagcttgcaaatcaaaattccaaaacacatgaagacatctaattta

SEQ ID NO: 28111 - DNA, 120 bp, synthetic construct
  source 1..120: mol_type = other DNA
tatttaagttcatatttattgtgagttcttcagagtacttcaaaatactgctttatgtttgatttgctgctctgagtccaaagcatgaagggacagtagtgtccctccccccccccccac

SEQ ID NO: 28112 - DNA, 120 bp, synthetic construct
  source 1..120: mol_type = other DNA
tccaggcagaatgctgacttggcttcttgtggctatataataaagtctaaaacagagaagagctagagaagaaaatgttcagtttgtgagcaaaattgaaggaatatagaggacacagga

SEQ ID NO: 28113 - DNA, 120 bp, synthetic construct
  source 1..120: mol_type = other DNA
caatatcatcttccaatgagacccacagtgtccactctgtttaaaattacaactgcctcctgcaaagcaactgacactcctgatcccccttttcctgttctctttctccataacacttat

SEQ ID NO: 28114 - DNA, 120 bp, synthetic construct
  source 1..120: mol_type = other DNA
ttggagggaggagccaaaacggtcatcatctctgcaccctctgctgatgcccccatgttcgtgatgggtgtgaaccatgagaaatatgacaacagctcaagattatcagcaatgcctcct

SEQ ID NO: 28115 - DNA, 120 bp, synthetic construct
  source 1..120: mol_type = other DNA
ctatcaaatgtttcatacctaagaatggagggcagctccctgggctggagtgctacttgcacaagagagtttttctaagaaagtagtgggaaagtgggactaaagacttgtagcaaacaa

SEQ ID NO: 28116 - DNA, 120 bp, synthetic construct
  source 1..120: mol_type = other DNA
taaaaattaagcaactcctttggaacaataatgagaattattgtggggaggggggtgggaaagaaccacaaagcagtgaggagatgcatatgttaaacagttggtcacagcccactcatt

SEQ ID NO: 28117 - DNA, 120 bp, synthetic construct
  source 1..120: mol_type = other DNA
ggagggtaatacaaatttaaaatagagatggcttgtgctctcatagaattgacaatctgctcggggaacagaaagtgttaatccagtctgttaggtgttgttaaggaggtgtgctgtgct

SEQ ID NO: 28118 - DNA, 120 bp, synthetic construct
  source 1..120: mol_type = other DNA
caagaggttatgtaatttgcccaggatcatacattacaggaaagataaagatgaacaacaaatatcttggtttctgctgattgtaattttctggggggtggggggagggttccatatggc

SEQ ID NO: 28119 - DNA, 120 bp, synthetic construct
  source 1..120: mol_type = other DNA
ccatgtacatcaatgtccaaaagcagccattctctgtggggaaaggtgagtgttggctcttcctagagacaagaggtccttcataattaggttcacaggcactaattttagagtataaaa

SEQ ID NO: 28120 - DNA, 120 bp, synthetic construct
  source 1..120: mol_type = other DNA
tcgccggcctatacgccacacttcttatcgccctccttgtctgcaatttatttaagaaactgggtgatttaacccgtgaatttttttacagtttggattccaatgattgcataatcaaaa

SEQ ID NO: 28121 - DNA, 120 bp, synthetic construct
  source 1..120: mol_type = other DNA
gccagatgagactcagattgtcagtactcaggctgtcgccagcaaagcctttccccttttttcagagacagtactacatccaagaggtggaaagatacttttgttttgttttgtttattt

SEQ ID NO: 28122 - DNA, 120 bp, synthetic construct
  source 1..120: mol_type = other DNA
attttggacatcaggtgtggagtgagttcatcctcctcaattcctggcacattatcatccacacaaagtatatgtaataaactatgctctgaggacccttctgtgctctgcaatatgaac

SEQ ID NO: 28123 - DNA, 120 bp, synthetic construct
  source 1..120: mol_type = other DNA
gccaaaagacattccccagtctctctcaggaaatgtttcaagatgaaaagcaaaagtctgaagtcccttggaatcttgggttgatttcttcattattctcaaggctaggttgttttcccc

SEQ ID NO: 28124 - DNA, 120 bp, synthetic construct
  source 1..120: mol_type = other DNA
agatcacctgactcatttgaaactttatctttcagggtgtgggacagcctcaaaataagtgagaacttatggtttagaatagaaagcctccactggctccacaaaggagctatagtgtag

SEQ ID NO: 28125 - DNA, 120 bp, synthetic construct
  source 1..120: mol_type = other DNA
gaaagacatcatatgttcatggataggaagactcaatgtgttaagatgtcaatactcccagaacaatctacagattcagtgcaatctctaagaaaattccaacagcgttttccacagaaa

SEQ ID NO: 28126 - DNA, 120 bp, synthetic construct
  source 1..120: mol_type = other DNA
ttacaactgtaattgttttggagtgccatgaacaacacccataagatggcaaacttaataaataaatgctgtatgtgttctcactgctccactgagcagccattcctccgtctctctccc

SEQ ID NO: 28127 - DNA, 120 bp, synthetic construct
  source 1..120: mol_type = other DNA
aaaaacccaaattgctgttgtgaaaccaatgcttttcttggttaatatgaatgatctgcctttcttcctacctgagactatagagcactttcccatcaggctggacccgcaacatgacgt

SEQ ID NO: 28128 - DNA, 120 bp, synthetic construct
  source 1..120: mol_type = other DNA
gtggggtataagttgggttgacgtaacattctggaaagaaatttgcccgcatatatctggagctttcaatgttcttgtgccatttgatccagaacacttccaggagtctaacctgattaa

SEQ ID NO: 28129 - DNA, 120 bp, synthetic construct
  source 1..120: mol_type = other DNA
ggtcgctagggccaaggactgcccaacacatagcagcagctcaaaaaatacatatgtgtcttatgaaaaaaatcattttggttggagaacctgacctactttgttgtctccattttttcc

SEQ ID NO: 28130 - DNA, 120 bp, synthetic construct
  source 1..120: mol_type = other DNA
ccagcctctatcaactacttttaaacaccattccacaggaagtccctcttggagaaataagatgggaatgaggacatagtccacaacaatattgaggatattgagggacatctttgctca

SEQ ID NO: 28131 - DNA, 120 bp, synthetic construct
  source 1..120: mol_type = other DNA
agatggcaataagtgctaagactgcagttttaaatagggtagtcagagaaggcatcactgattaggtaacatttgtacaaacacttgtaggccctaagggagaagcctgtttcactagct

SEQ ID NO: 28132 - DNA, 120 bp, synthetic construct
  source 1..120: mol_type = other DNA
atatagatgtgtttatttatccaataagcctgtattgtttccatgccacgtattgttcgtgtgacaggctgtgtggttgcattgaacttacatagtggaatgagacacagcccctgtgct

SEQ ID NO: 28133 - DNA, 120 bp, synthetic construct
  source 1..120: mol_type = other DNA
gaataaaccatgcctttgagttcactcaggagggagaagtctgggatatagagacagcttttggcacagaaaatgttatcaccaagtacttgctcttctatctgctatttcacaatcctc

SEQ ID NO: 28134 - DNA, 120 bp, synthetic construct
  source 1..120: mol_type = other DNA
accccggccaataaaagaaaaatacaaaaacaaaacttgcatcaaaaataaaggctctcgtgccctttgttcaagtgtactctcatggcaactggccaaaaaaacacccctctgcacaaa

SEQ ID NO: 28135 - DNA, 120 bp, synthetic construct
  source 1..120: mol_type = other DNA
gtgtatttataggtaactgaagaagatgacaagaatgtcacatgacctattcctttactgccacatggctccaccacaaagaaagaaatggtgaaatcaatgcagagttgacccctgccc

SEQ ID NO: 28136 - DNA, 120 bp, synthetic construct
  source 1..120: mol_type = other DNA
tttgttgcctttcacgctctaaataggctttagttaggcttgcttattctgccctccaaacttattaacctctcttccttatagttccatctctttgtctgtgctccattgcatgaaact

SEQ ID NO: 28137 - DNA, 120 bp, synthetic construct
  source 1..120: mol_type = other DNA
aggcgaggaacacacagggaccaacccccactgggattgctaatgttccattccttaagctgggtggtgggttcacaagtgctcattttattttcataacttatacattatatacattct

SEQ ID NO: 28138 - DNA, 120 bp, synthetic construct
  source 1..120: mol_type = other DNA
ataaaaccaagagcaatgttaatctgatacattgagtctgttcatggtttgcataatcgtgatggtgcagatgattattagacataaatgctaagtaattcacataaatgactatcagta

SEQ ID NO: 28139 - DNA, 120 bp, synthetic construct
  source 1..120: mol_type = other DNA
aaactgatctccactatgattctaagatctttttcctcttagactcatgtagctgcccatctaagccttgtaagtcctgttcttcattcaagtggtgtctagctacttttcattgttagc

SEQ ID NO: 28140 - DNA, 120 bp, synthetic construct
  source 1..120: mol_type = other DNA
tagttacacatttttctccctaataccttgatatgtatctgtggttggagaattacaactctaatctttttctatttcaagttatcttccattctttaacattcagtagagtgttctttt

SEQ ID NO: 28141 - DNA, 120 bp, synthetic construct
  source 1..120: mol_type = other DNA
tttgagaagtgtctgttcgtgtccagtagagtgttcttaaagaacgactggaggtaatctcttaacagaaaattgaatcatgcataccaagtcttgttaagcagcacttttaacccagat

SEQ ID NO: 28142 - DNA, 120 bp, synthetic construct
  source 1..120: mol_type = other DNA
tatttgccacctgtcttctttggtgaggtatccgctcagatcttttacacccccctcccgcccccatttcaaaaaatcagatggttcatttttttcattgttgagtgttaagatcttgtt

SEQ ID NO: 28143 - DNA, 120 bp, synthetic construct
  source 1..120: mol_type = other DNA
cctaccagagatttgattaaagacatgtaattccatgccctctgattaaagattgtttttagtaagccataaggcctgtgggcctcttttccacaaagccttaaacctgactggctcaag

SEQ ID NO: 28144 - DNA, 120 bp, synthetic construct
  source 1..120: mol_type = other DNA
aatacccttccataacctttataaaactaaaaattacttctgtgatctcagaaaacaatgaggcttttaaaaagcaggcagcaaaagatgaaaaatctttctcatatgaaaacaataatg

SEQ ID NO: 28145 - DNA, 120 bp, synthetic construct
  source 1..120: mol_type = other DNA
attcctaaaaaactggtgaataatcagatgagggaaaatgtctctgagttttacctaccgcttaagggctccgctgcagaggtaggattctccagaaaaatgttttcctcctcctctgtt

SEQ ID NO: 28146 - DNA, 120 bp, synthetic construct
  source 1..120: mol_type = other DNA
aggaaaaaagaaattggtaaatctctctaagtaggaacctagacacacatgtccagaggagtcatgtccacagaaaatgtttgagatgtcccctgaatctgtagctatgctgcttggtga

SEQ ID NO: 28147 - DNA, 120 bp, synthetic construct
  source 1..120: mol_type = other DNA
gtccacaaagacaacagaaaattttgaaagcagcaagagaaaaatgattcaagggacttccaatacatctgttagtggatttcttagcagaaaccttgcaagccaggagagagtgggatg

SEQ ID NO: 28148 - DNA, 120 bp, synthetic construct
  source 1..120: mol_type = other DNA
ctagacagacagtaagaattgtgcacccatgaaagtttggccaaataacttggtaaacccattcctaatgctgcatctcagcccagggattttatggctataagcagtgaataaacaagg

SEQ ID NO: 28149 - DNA, 120 bp, synthetic construct
  source 1..120: mol_type = other DNA
gaaatgtttggtaaaagtgaatagatgttttaatattctttttttttccaatttatgattaccttctagcttattgtttttgtgcctacaatcatcacaatgcaacatattcagaagacc

SEQ ID NO: 28150 - DNA, 120 bp, synthetic construct
  source 1..120: mol_type = other DNA
cctgttaatctgttataaacttaaaaacgttaacactacccagtgctggcaaagttatgtgggggtaaagcacagtcttcccatggtatccatgggggattgattcaacaaacaccttct

SEQ ID NO: 28151 - DNA, 120 bp, synthetic construct
  source 1..120: mol_type = other DNA
gtggctactgtattgagcagtactgctctatttcctagtttaataaatgagggatacgtggcaggtttgtgtgtctagtctttttctatcaatcagtaaccttttagtcttttcccatca

SEQ ID NO: 28152 - DNA, 120 bp, synthetic construct
  source 1..120: mol_type = other DNA
ggagtgcaagatttgcaaatgaattaataacagctagaagcctcactatttgcacttttataacattctttgctgttatcattacaaggtaaaattatatagtaataggtggaaaaagtt

SEQ ID NO: 28153 - DNA, 120 bp, synthetic construct
  source 1..120: mol_type = other DNA
tcaatcaatcaaccttttagtgatggaattggtgagtattggtgagccttagtctcatgtcaagattttcgctgggagaagaattgactgaggaataccatgccttggtgtgttcagtct

SEQ ID NO: 28154 - DNA, 120 bp, synthetic construct
  source 1..120: mol_type = other DNA
gtggaaatatgacattttgcagttttgattgtcacattttaaataaggtgataacatttttgttccaccagatgggaggataaagctgaaaaaaaatgctgaacctactatacatcttgt

SEQ ID NO: 28155 - DNA, 120 bp, synthetic construct
  source 1..120: mol_type = other DNA
atagttcaaaatgactggagaagaggcaggttgaggtgtgcaggggcggggaggatcagggtacaattcaggataaatgtagaaaggttatcaagagccataaatatctttatgttcata

SEQ ID NO: 28156 - DNA, 120 bp, synthetic construct
  source 1..120: mol_type = other DNA
gttaaacaggttaaaagaatagtttcttatggactccactgacaacctatggagagacaatgcttttgtactgggcccttataggtgttgagcttaatcttcagagcctcctgtcctggg

SEQ ID NO: 28157 - DNA, 120 bp, synthetic construct
  source 1..120: mol_type = other DNA
ttctgttttgccctggacatttctggttgtcatagggtagtagttaataataccctctttcacttttcaaaatacctcagtttgaatgataagttatatgtccacccttgccttaggtat

SEQ ID NO: 28158 - DNA, 120 bp, synthetic construct
  source 1..120: mol_type = other DNA
ttgagtcttccatgaagaattataggttgaatttttggggaggcattactccattgcctttttctgctgttgcagttgttcacaggtcattctgattcttaaccttttgtatgtggcctg

SEQ ID NO: 28159 - DNA, 120 bp, synthetic construct
  source 1..120: mol_type = other DNA
aacattgaacatatttaaagcagggttcactccttagcagagctgcaaatgacagtgataccatagtgaagatttcttgattctggttctgaatcttagttatataggtccccaatgctt

SEQ ID NO: 28160 - DNA, 120 bp, synthetic construct
  source 1..120: mol_type = other DNA
aagtgctaaagacagttaggactgatgttccttcgttgtgcaaagatgtcacccaggactctggaaaagagtgggtgaaggagttaaaagaggagatggaaatcatctatgagatgaaga

SEQ ID NO: 28161 - DNA, 120 bp, synthetic construct
  source 1..120: mol_type = other DNA
aggaaaaggtactagctctccttcatgcattgtgacttccagaacaattataatgtaacatgtgtttggaacttgaattctaacaccacccctcctgcatcttgaatggaggagtaagta

SEQ ID NO: 28162 - DNA, 120 bp, synthetic construct
  source 1..120: mol_type = other DNA
aggatgaacaggaaaggtcagatgaattagggtagatgtatcagaccatccaaccacaccttattagccagattgatgtttgatcacttggtcctctcttcaagactttcatgcatctct

SEQ ID NO: 28163 - DNA, 120 bp, synthetic construct
  source 1..120: mol_type = other DNA
cagagatctacctctgagtgaaggccagcaggctcaagtttcagaactatagacaatcccttagtttttctgtactcagtggacctttcccttctataaagagaaaacaactaactccct

SEQ ID NO: 28164 - DNA, 120 bp, synthetic construct
  source 1..120: mol_type = other DNA
ctagtgtgctatgctctgatgagacagtgtccagcagacactatatttcctcctgcaagctcctacatcatccaatggcttttgggtcataattgaattttcacataaaaggaagtgcaa

SEQ ID NO: 28165 - DNA, 120 bp, synthetic construct
  source 1..120: mol_type = other DNA
cacatgctggatttaaggactgaaatgtaagctctgtgagggcaggaaactggtctgttttgttctcaggaccgtctcatgtatctagaacattaacgcacagcagcttcttaatgaaaa

SEQ ID NO: 28166 - DNA, 120 bp, synthetic construct
  source 1..120: mol_type = other DNA
aaatttataaagagaacaactaccaaaccttaccagccatagaattaaatcatgagaggtagataaggtacacttgccaccccatgctggtcttcatggtgactgaggtctcagcccttc

SEQ ID NO: 28167 - DNA, 120 bp, synthetic construct
  source 1..120: mol_type = other DNA
aatgtacattggagatatcatgacccttcattccacataggattcagcctgactctctttctaatggtattcccctgcataagtatcattattacacttgagaaaattcacaaagtgtcc

SEQ ID NO: 28168 - DNA, 120 bp, synthetic construct
  source 1..120: mol_type = other DNA
ctcaaagtcagtaccttcatatttaatttttcaagtatccagttggtttctgtgaatggccaatattcatgtacagccatgtctagggaacacaacttaagatccatctggaagtgctgt

SEQ ID NO: 28169 - DNA, 120 bp, synthetic construct
  source 1..120: mol_type = other DNA
tagtaggtgacatttcaggctgttctgtaggcatgtattctgatgtgcttttattatagggcatgttattctataccttattttccctttccttataatagctttgtatgggatttaacc

SEQ ID NO: 28170 - DNA, 120 bp, synthetic construct
  source 1..120: mol_type = other DNA
acctggaagttccttctcatgtacatataaatagaatcatggaagctttttatattacctgttttatggccttatagaattaatgaaccaaatgaaaactgaatctccattccacaatcc

SEQ ID NO: 28171 - DNA, 120 bp, synthetic construct
  source 1..120: mol_type = other DNA
tcacagctacctccatgtactctcatataaaattaaagtaggtgatatattcttagattgctctcttaccattgttctcttacccaacatcattaacttctgaattcttgctcaacccac

SEQ ID NO: 28172 - DNA, 120 bp, synthetic construct
  source 1..120: mol_type = other DNA
gactttttgagggaggttttttcttctaagcattgtactaaatgtcactcataaaacaagttgtcaacattgatagacgcctgcctgtgacatgctgttagcatcagggctccccacttt

SEQ ID NO: 28173 - DNA, 120 bp, synthetic construct
  source 1..120: mol_type = other DNA
ggccccttttacctttcattagtttcaaaataagacaaatcattaggttctctgcaaagtaacagctatagctttctctgcttatattctgtccttaaccaagtaggcaatcttcatcaa

SEQ ID NO: 28174 - DNA, 120 bp, synthetic construct
  source 1..120: mol_type = other DNA
catccactcacaccaccactattcaatatcatactagatctttcagcaggtataataaaagaaaagaagacacacgggctgaaaatgaaaaaatgaagctttatatttacaaatgtcatg

SEQ ID NO: 28175 - DNA, 120 bp, synthetic construct
  source 1..120: mol_type = other DNA
taacatacacttgggattccttagatgggcttaggtgggtaagtgtaggtcatgaagttgactgtggaactgtgtgtatatcatatgtgcacaatttaggaaaggctgtttttttttttt

SEQ ID NO: 28176 - DNA, 120 bp, synthetic construct
  source 1..120: mol_type = other DNA
tgtggatccttttggcattcactgaaacatttgcaaaccagcagtgtaggggattaaagcatactatagcaacaggacaggagagttgaatttttccttcttttgtcccctgggtagata

SEQ ID NO: 28177 - DNA, 120 bp, synthetic construct
  source 1..120: mol_type = other DNA
gttaaatggagaagacttagttgattaacttgaccaaggagagtggtcataatgatcccagtatgttctggggcttttcactagtgtttccctctaaggcaactttgttctcaaaggcag

SEQ ID NO: 28178 - DNA, 120 bp, synthetic construct
  source 1..120: mol_type = other DNA
tgcctttggctcacacatatacacatttgtgttgagcacatacctaagatagaattattgccttggctccctccattcccccactgggtatccaacacccaaggtgcacctagtaaggat

SEQ ID NO: 28179 - DNA, 120 bp, synthetic construct
  source 1..120: mol_type = other DNA
ttgtagtacaattatttatgaacttctctataacctctagttagatttttatttcctaaggatgagagctaagtttgagagctcttccttgtctctcatccaagatataatcaccaagag

SEQ ID NO: 28180 - DNA, 120 bp, synthetic construct
  source 1..120: mol_type = other DNA
ttgattgagcaccttttctgtaccaggtgctaggtgaagcgtttggtgaaaaatacaaatgtgatcctctcatgacaggggttataatcattgactcctccatggctcagagtacatata

SEQ ID NO: 28181 - DNA, 120 bp, synthetic construct
  source 1..120: mol_type = other DNA
tcacaattgtaatgaaattagtgtaataatttgttgacatttgtctccctggagttgcaaaccctcagagaacagggccggtgtccatcttgttcacagctctgtcctcagatgtgagaa

SEQ ID NO: 28182 - DNA, 120 bp, synthetic construct
  source 1..120: mol_type = other DNA
gagaatgcccaggatcctagagggatatatgaaacctctgaatttttctgctttcaattgtggacttcagtgcagtgaatactatctcagttcaggtcagatttgaaagccatcttgaag

SEQ ID NO: 28183 - DNA, 120 bp, synthetic construct
  source 1..120: mol_type = other DNA
agcctgcaggattcggaaacgctttagaacattttgaagcatgagcaataggcatgccgcagaggtaggaaaagttttcctggcctggctcagctgtaccctaaatctacgtattctctg

SEQ ID NO: 28184 - DNA, 120 bp, synthetic construct
  source 1..120: mol_type = other DNA
ttgcctgatggcaggtgctggtctgagtttgcctgatgggaggtgctggtctgagttagccagatggcaggtgctggtctgagtttgcctgatgggaggtgctggtctgagtttgcctga

SEQ ID NO: 28185 - DNA, 120 bp, synthetic construct
  source 1..120: mol_type = other DNA
agtgcccagtctcttgttttggctcatcactgtgcgaccatttcctgcattaaatactcaatgccttaaatactaaagagatttcctacttagaccccaacagacagacatgaaaaggac

SEQ ID NO: 28186 - DNA, 120 bp, synthetic construct
  source 1..120: mol_type = other DNA
attagattaagggggatagagcatgatggcagtgagcatgttatttgacattgatggtccagtctcactaaggtatgtttgagcagagacttcaaggaacttaaagctatgggcatatgg

SEQ ID NO: 28187 - DNA, 120 bp, synthetic construct
  source 1..120: mol_type = other DNA
tgtggagtcactgggcatttctgagctgagcagaaatgtgatctgactcatttaaaaaggctcactctggctgctagttggagagcacagctttgtgaattctgtactaatttgctaatt

SEQ ID NO: 28188 - DNA, 120 bp, synthetic construct
  source 1..120: mol_type = other DNA
aatccattttactaaataactggtctctaatctttaaagcagagggaaaagtgaataactacttcagactaaaggagactaaagaaacacctgcctctgcctctgcccctgcccctgccc

SEQ ID NO: 28189 - DNA, 120 bp, synthetic construct
  source 1..120: mol_type = other DNA
ataaagaacatcactgagaaagtgacaaaacccaaatggagtcagacgatgagatggcggtaatgttaattttctgattttcatggtttagagaacacttttgaaaataccactagtgat

SEQ ID NO: 28190 - DNA, 120 bp, synthetic construct
  source 1..120: mol_type = other DNA
actatgtttatactgcattcatcattgtatcatctgctgtacctgtacggtcaaacagtgaacgcttaatcagtaactactaaaactaaacaaaaatctaggccgggcgcggtggctcac

SEQ ID NO: 28191 - DNA, 120 bp, synthetic construct
  source 1..120: mol_type = other DNA
acaggcgtgagccaccgagcccagccgagaacatctttttaaaagaatgaacagcatcgcctttcaaagaaacaatgtgatggtgaaatagtgtaacaacatttgtcatcaataaagtct

SEQ ID NO: 28192 - DNA, 120 bp, synthetic construct
  source 1..120: mol_type = other DNA
ttaaacaaatgagttgaataattccatccacttacactaacaccccatctggtagtaaggcctttagactccaaagacaatctagaggcaaagtggaagctattgttggctgagcctcag

SEQ ID NO: 28193 - DNA, 120 bp, synthetic construct
  source 1..120: mol_type = other DNA
acttggttcatccgtaacatgcagagtgttgggtgaattaacgagtggaaggcacgtaatgatgtgtggcacttatgtagtattttgatgatttcacctagaatcttgccatctggaaac

SEQ ID NO: 28194 - DNA, 120 bp, synthetic construct
  source 1..120: mol_type = other DNA
agcagaggtttcccacttggagtttagattttgctgaaagcaccaaaatccaggcctgaaagatctcaaagtggatcagggcctggggaccagctgtgcattattgagattggagcccaa

SEQ ID NO: 28195 - DNA, 120 bp, synthetic construct
  source 1..120: mol_type = other DNA
acagtttgctgatagttcagaaatctactgctcgtgaagagaacacgtacgcattcagagatcgcattctttttttgcatccagttgtcctcactggcctgtgacgcaggttgccctact

SEQ ID NO: 28196 - DNA, 120 bp, synthetic construct
  source 1..120: mol_type = other DNA
cttccagcattagggtcctgagaacttctgagttcagagaaacatgcaaagtgactaacaaaatagctacttacctttgcagttttacagaccctgggagctgctttgggagtgagaaag

SEQ ID NO: 28197 - DNA, 120 bp, synthetic construct
  source 1..120: mol_type = other DNA
tgagaaattagaagagtacctaatgttgaaaacatgacatgcgctcttgggatctgctgttctctccagggctccagaacctgatacctgttaccaaagctaggaaagagctttatcaca

SEQ ID NO: 28198 - DNA, 120 bp, synthetic construct
  source 1..120: mol_type = other DNA
cagagtactactagaggaagtgaagttctgatggaatcatgcctgtcaaatgaggtcttgaagcggatgcccaaataaaagagtatattttatctaaatcttaagtgggtaacattttat

SEQ ID NO: 28199 - DNA, 120 bp, synthetic construct
  source 1..120: mol_type = other DNA
taaatgaacctagtaaacgttttctctggcccgcttctgacctccacagacaacagacaacttaataaaggaagatttatggcatagttcatggtggctgatagccacttttggtgtgtt

SEQ ID NO: 28200 - DNA, 120 bp, synthetic construct
  source 1..120: mol_type = other DNA
aaacagtggtttcttagttcctcagagtagattttaaacttcatcagggcaatgccatgcacattctttagctcaataagatttgactctggactgcttagacaagtgattactgactca

SEQ ID NO: 28201 - DNA, 120 bp, synthetic construct
  source 1..120: mol_type = other DNA
gcccacctgtctgtgagctccttgagaatgagacctttgccttatctgtttctccagtgtctggcatggaatgttacacagagtagataatacatgtttctgaaataaataaatgtgagg

SEQ ID NO: 28202 - DNA, 120 bp, synthetic construct
  source 1..120: mol_type = other DNA
caacattcactgaaacagtgacaagaagaatgaccttcacaaatgccctcccttaatcttttgtcttccaagatcacaaaggcctcaataaacattcagatatctccaactgaccctgct

SEQ ID NO: 28203 - DNA, 120 bp, synthetic construct
  source 1..120: mol_type = other DNA
aaagagaatggttctcaacgtagagcgagaaaagaacatgatcctagaacaacaggtgagcatattttctataaggaatgataatataattttgtatgtttttgaagaatattttaattt

SEQ ID NO: 28204 - DNA, 120 bp, synthetic construct
  source 1..120: mol_type = other DNA
aaccaatcaggatggacttacccctataacaattctctgagtgtgaaccagtcaacagcagcatcactagagtaatcttacttccatagatgtcaacccacttatgcctctgaaagttca

SEQ ID NO: 28205 - DNA, 120 bp, synthetic construct
  source 1..120: mol_type = other DNA
tctcccaaatgcctctttctctccttcattttatcttcaccctagaaacggtattcaaagtttggagaacattaaactaaaaaagtattttgatgcagataattttttaaaatgcttctt

SEQ ID NO: 28206 - DNA, 120 bp, synthetic construct
  source 1..120: mol_type = other DNA
cattctccaagcttcctgtctgttagaactcctaagtctttttaacatgtgccgctgccactctgccacatctgtaccattcttgtcatgttcgtatatgctttgcctacttccaaaaaa

SEQ ID NO: 28207 - DNA, 120 bp, synthetic construct
  source 1..120: mol_type = other DNA
tgaacagaaaaaaaatctttttataccagacatttccaataaggaaattacttgcctctagaagagattacaggtaggactacattatttctaaagtgccttcttttttttttttttttt

SEQ ID NO: 28208 - DNA, 120 bp, synthetic construct
  source 1..120: mol_type = other DNA
aggatcctattcggccatcttggctcttcccctaaagtgccttcttgtttacaatcttatataaaaggagaatcttagggaatgaggaaccctcacatgagcttctttgaccccaagata

SEQ ID NO: 28209 - DNA, 120 bp, synthetic construct
  source 1..120: mol_type = other DNA
tttgggactggaagaccacaaaactctacagtcgatttaaagctcatgataaagtgtgtataggtgcagtgtggcatcctcatgaaacttctaaggtcataacatgtggttgggatggtc

SEQ ID NO: 28210 - DNA, 120 bp, synthetic construct
  source 1..120: mol_type = other DNA
ctcctcataggagataaagtacgaggggtagagtccaagatgtcaacttgtaatttctttgaagtcatatgttttatctttaaaattattcttattttacctgtgaatatatacaacaga

SEQ ID NO: 28211 - DNA, 120 bp, synthetic construct
  source 1..120: mol_type = other DNA
caaagaaatacaaacattgcctagctgctgccatttctgtaactgcccagaagggtgacagatttctgaaggggaaaggattcagatatgaccttttctttagtcccaaccactagtttt

SEQ ID NO: 28212 - DNA, 120 bp, synthetic construct
  source 1..120: mol_type = other DNA
ttaatatccctctatgccaagaatctctctgcaccaggagtgcccagaaaagcacaactggtgttttctaaattaacttctgatcaataccagtttgcacattaatacaaattcagatcc

SEQ ID NO: 28213 - DNA, 120 bp, synthetic construct
  source 1..120: mol_type = other DNA
ttaacccaggacaactaactcagggatccaggttcagatcctcccaacacaggtgcctaaatttcagtcttctcaatttcttttcatatggagcttaagctgtgaagtttatggaaacga

SEQ ID NO: 28214 - DNA, 120 bp, synthetic construct
  source 1..120: mol_type = other DNA
tcaaaatccacagatccaaaactgagtatcacttgcccaactttacctcctagtgtgtttactatacctgcaatgatgccaacatttcccaatcatcaaggcaggctgaaaaccttatca

SEQ ID NO: 28215 - DNA, 120 bp, synthetic construct
  source 1..120: mol_type = other DNA
gagggagagggagagggagagggagagggcaattgtggttcttgagataagtgtgtgacttctcttttttaaggcgttggtactggctgacagagcccacagtttcctaaagaatacact

SEQ ID NO: 28216 - DNA, 120 bp, synthetic construct
  source 1..120: mol_type = other DNA
ctctagtaatttctgcttcattaaaaatttctacaaattagtgtatgggagacattcatttgaacgttcttgaaaaacacctcaaattaaaatagctcttgaaagatgacaaaccatcat

SEQ ID NO: 28217 - DNA, 120 bp, synthetic construct
  source 1..120: mol_type = other DNA
atatttccccccactaaatatacaacttgtgtaaacaaaagggaggaagaaagaatttacctacttttaaataacccagaaacttaaaaggcaaaacaaagcataatatataacagtttc

SEQ ID NO: 28218 - DNA, 120 bp, synthetic construct
  source 1..120: mol_type = other DNA
cggttctatttgaaagttactctgacatgctattaaaggcagtgtggaattgtacatggctcccataacctttgtcttggtgttactactattattgcagtacatttacaaggcaaaaga

SEQ ID NO: 28219 - DNA, 120 bp, synthetic construct
  source 1..120: mol_type = other DNA
tgttgcatgttttgcttcctgcgtattgagactgtcttgctcaggttccctgaaactacattgtaagttttctttaagaaactgcaacttaaaaacatagtctgataaatacaccaatga

SEQ ID NO: 28220 - DNA, 120 bp, synthetic construct
  source 1..120: mol_type = other DNA
aagtaatggaaagaggtattaagcagatttgttcttttaaaatctaagtctgagctttcaaaatgaagagaaaaagacacaatcctcaaaatttagaaatacttcaccaaacctagtaac

SEQ ID NO: 28221 - DNA, 120 bp, synthetic construct
  source 1..120: mol_type = other DNA
atgacatctaatcctattacaatggatagaaaaaggtttgcactgacaggcataatactggaggaaattgagtgacacacatttcctactttgaagggtgcagtagcctcagtactgcct

SEQ ID NO: 28222 - DNA, 120 bp, synthetic construct
  source 1..120: mol_type = other DNA
gagctgagaataagagacacctaaatcataataagggactttgttcttaattgttacaactagtttggcctatggtcaaatataatatagtggggaatccccccactaccacccccccca

SEQ ID NO: 28223 - DNA, 120 bp, synthetic construct
  source 1..120: mol_type = other DNA
gaagactgtttcagagcactccttcatggccatgctggttatagctccccagctgcagagtaaaggaaacccaatctcaactcagctagtaatgtaacattaaatattaatttttgcctg

SEQ ID NO: 28224 - DNA, 120 bp, synthetic construct
  source 1..120: mol_type = other DNA
ctgccagatgaaaatgctgaaactgaattcctgcactagtaaatttgcacttcagtggacacatctgtcagcagccccatggaggctaacatttattaagaacttgctgcatatacttta

SEQ ID NO: 28225 - DNA, 120 bp, synthetic construct
  source 1..120: mol_type = other DNA
tgaactacttcaaggtagcagcttgtacaatattcaggatgttgacttcaaaacttttaagtattccacagcactcttgtgaattcaccatggtgcccccatgagccttggcacacagtt

SEQ ID NO: 28226 - DNA, 120 bp, synthetic construct
  source 1..120: mol_type = other DNA
agcactctgtagatattattctcatcaaccaataacgtagacaggactgatgctacaactattttatagatgatgaaactgaggctcacgcagtggatgcccagagcttctgttccaatc

SEQ ID NO: 28227 - DNA, 120 bp, synthetic construct
  source 1..120: mol_type = other DNA
ttagactgacccatgtgaatataactttcctggctcctgcttccttaccatcaaggagggtatggaaatgacgtgagttacttggggagaatatctgctttcctgataagatacttatgt

SEQ ID NO: 28228 - DNA, 120 bp, synthetic construct
  source 1..120: mol_type = other DNA
aaagatgaaccttcaaactagcctcactctactccaacctccaaatatctaacccaccaggggatactgaatacttaccaaatctgatgccgtagaaagggtcaagcctttgataaatca

SEQ ID NO: 28229 - DNA, 120 bp, synthetic construct
  source 1..120: mol_type = other DNA
ttcattcagcaaacgtctattgagtgcttagaatatgctgaacactgtgcccagtcaacgctaaagaacaagacaagtgtgttccataacctcatatacatagcttgcaaattgggggga

SEQ ID NO: 28230 - DNA, 120 bp, synthetic construct
  source 1..120: mol_type = other DNA
tggtagcgtggtcaacatgtttgtggaagtaaagcaatgtggctacacccacaccaggaggcattgggcttaattttattctcaagggttgcgtgttttaaaggaaaaccttaaatctaa

SEQ ID NO: 28231 - DNA, 120 bp, synthetic construct
  source 1..120: mol_type = other DNA
tattcttaagtctttccctaatttccctaaacatttaaggttgttaaatgtttaatttgggaaggctaaaaatttaccttgaagtaccatttcagctgcattccacaagttattcagctc

SEQ ID NO: 28232 - DNA, 120 bp, synthetic construct
  source 1..120: mol_type = other DNA
tgggaggggctgccatggaggtctctgaaattcctttgaagtcttctcattgtcttggctattaacattcaacttctctttatttaatgcaaatttttgcagccagcttcaattcctccc

SEQ ID NO: 28233 - DNA, 120 bp, synthetic construct
  source 1..120: mol_type = other DNA
tccatccctaggttctttccggcatttgtaatttccaatccacttaggacacttctactcctcagaaaccgtttctgtcggggccgtgagaggagacagtataagacttcctggacccaa

SEQ ID NO: 28234 - DNA, 120 bp, synthetic construct
  source 1..120: mol_type = other DNA
ggcctctctgcaaatcacagcgctagcgctttcgaggaagggagatcagctttattgaacacctactaattctctggatttgactcagtagctttttaacattttaaaaatatcccttgg

SEQ ID NO: 28235 - DNA, 120 bp, synthetic construct
  source 1..120: mol_type = other DNA
tttttggtccttatcttctggttcccccctacattacagtgtatatctaattgcttttctccccccgtgttttcttttcagctctttgccttcccacctaaacatcagttatgaggactt

SEQ ID NO: 28236 - DNA, 120 bp, synthetic construct
  source 1..120: mol_type = other DNA
gttctgaagtctggtattctggtattctgggttcaaaagtatgacttgagagtgttgctctggtattctgagagttgctctgtattctgggttctgaagattatttgaaaaataactcct

SEQ ID NO: 28237 - DNA, 120 bp, synthetic construct
  source 1..120: mol_type = other DNA
tttggattatgaaaccccatttatgattttttaaatacacttgaaataaaaatgattaaactaaattttggtccagtgacattactttgcactgcataatccattatacgttgtacgact

SEQ ID NO: 28238 - DNA, 120 bp, synthetic construct
  source 1..120: mol_type = other DNA
gcaatttaatctttgaatgtatgttactggattagctccctcctcctgtgtgatggtaccatgcatagagtcaatcaaatccttgtgatgttttgtatggactttgacaatatgtaaata

SEQ ID NO: 28239 - DNA, 120 bp, synthetic construct
  source 1..120: mol_type = other DNA
ggcagacagcccatgcagagtttagaaattaaacgtcttgtgtgctaaagctaagctccgaagaaggaattattagataccccagtatattgcgataaccttgcaaaagtgggttcagtt

SEQ ID NO: 28240 - DNA, 120 bp, synthetic construct
  source 1..120: mol_type = other DNA
acatgcatatgtatatacacacataggtacacatgcatatgtatatatacacatacgcataacacatatatacacatacctatatgtgtgtacatatatacatatgtatatacgtatata

SEQ ID NO: 28241 - DNA, 120 bp, synthetic construct
  source 1..120: mol_type = other DNA
gcacaaacttttgaaatcctagggtactagattagtacaaaaggaaaaacttgcacaattgtgctaaataagaatttcttgagtggcagccaaggtggccgaataggaacagctccggtc

SEQ ID NO: 28242 - DNA, 120 bp, synthetic construct
  source 1..120: mol_type = other DNA
cagtgcaataagggcagtaacagaatagcagagagaatgaaagcctaaaagaggagtggctaactttgactgtgagaaagaggcacaggagcagagaagaattattgaagtgatagctaa

SEQ ID NO: 28243 - DNA, 120 bp, synthetic construct
  source 1..120: mol_type = other DNA
attccttcctattgcaccacatcctacccagcagcacccagtcctacttcccaggtatttaactattgtagctgtttcttcttgtagttaccagaatatttctaaataatatgtctttct

SEQ ID NO: 28244 - DNA, 120 bp, synthetic construct
  source 1..120: mol_type = other DNA
aaaagaataaggtcacatatcaaaaaggataatctttgacatggaaaccagaagaggcagatggcgtgaaaacagccacttaagaccatagttcaaagaaagaccactccagcccttaga

SEQ ID NO: 28245 - DNA, 120 bp, synthetic construct
  source 1..120: mol_type = other DNA
cccctcactaacaagagactgctgactttcctggacctagtgtctcatcaataaaggaaagatacaaacagtgctctccttagaggcttttgttaggattagatggattaattcatgtca

SEQ ID NO: 28246 - DNA, 120 bp, synthetic construct
  source 1..120: mol_type = other DNA
acatgactaagcaatatctactcaacacatttgttactctctttctaatatttcactagattgttattgatccattcatagaatatttattgagtgtcccctatgtgagaggcaaggtgc

SEQ ID NO: 28247 - DNA, 120 bp, synthetic construct
  source 1..120: mol_type = other DNA
gggggccctcagtcttttttttcaagaccttcaactgattgggtgaggctcaccccacccacattatggaaagtgatctgttttactcaaagtctactgacttaaatgtcaatctcattt

SEQ ID NO: 28248 - DNA, 120 bp, synthetic construct
  source 1..120: mol_type = other DNA
tgtgtgtgtgtgtgtgtgtgtgtgtgtgtggcggggggggggtgtgaaactccgtctcaaaaaaacaagttagaaaaagaagaacaaatgaaacccaaagtaataaatagccctatgtat

SEQ ID NO: 28249 - DNA, 120 bp, synthetic construct
  source 1..120: mol_type = other DNA
tcagctacctagaatagaagtagtttccacaatctaaaaaaggcaactacgaaaaacagctaacatcacacttaatggtgaaaggctgaagactttcacctaaaacaaactagggacaag

SEQ ID NO: 28250 - DNA, 120 bp, synthetic construct
  source 1..120: mol_type = other DNA
aggggaaagggaaggggaaaagaggaagaaaagaaaagaagagaaaagagaagagaagaaaggaagtctacacagaaagcaatgacaatcaacaaaaccaaaagctggtttttagaaaag

SEQ ID NO: 28251 - DNA, 120 bp, synthetic construct
  source 1..120: mol_type = other DNA
aaatgtatttaaactttaagcccaatattaaaatccttttgtaaataattagcaatattgtccgcccccccccccaggaacagcgtattacctcgctaagctcactcacccaggctggtt

SEQ ID NO: 28252 - DNA, 120 bp, synthetic construct
  source 1..120: mol_type = other DNA
gtgttgaatataatattctttacttacctgaacattgttctctgctatggcaagtgccgtctgaagcttttggcatttgtcaagaagacttccagcttcatcctgtaccatctgtaactc

SEQ ID NO: 28253 - DNA, 120 bp, synthetic construct
  source 1..120: mol_type = other DNA
aatgttttaggtatatatagcaagagcaaaaattggccaaggaagagtattcctttacactacatgcaattcattgctatatttaaatttcttattaacttcagaaagtttaaaatagga

SEQ ID NO: 28254 - DNA, 120 bp, synthetic construct
  source 1..120: mol_type = other DNA
acacaactagcataacctagttataatcaaaagagcagtctaaggacaagatatacatataccagctcatactaaccatactgtgagccctccctggggttttcccatcagtcctgaaga

SEQ ID NO: 28255 - DNA, 120 bp, synthetic construct
  source 1..120: mol_type = other DNA
aaactgtaagatgagggactagccttttcatctgttttgggacatattttggatatggtgaatcctctaggagtttacttaaaacccaaaccaaatctcaccagaaacatgataactctc

SEQ ID NO: 28256 - DNA, 120 bp, synthetic construct
  source 1..120: mol_type = other DNA
ctacaatgagaattacaaaacatggcttaaagaactcagagatgatacaaacaaatggaaacacattcgatgcttatggatagaatcaatatcattacgatgggcatactgcccaaagca

SEQ ID NO: 28257 - DNA, 120 bp, synthetic construct
  source 1..120: mol_type = other DNA
ggaaagccttgtttgttggcaaaagcagacctatctcaggaccactactggctgcaacatcctcttaccttaaatctgaactaggaatcactgaagataagggatcttggtaatgttaaa

SEQ ID NO: 28258 - DNA, 120 bp, synthetic construct
  source 1..120: mol_type = other DNA
ttagttgtgctttttgtctccaaggtatgcctgtgcacacaatatcctttgtcaaccagactcacttatatggtaatagtataatggctattacattaacaaacagaccatactatttaa

SEQ ID NO: 28259 - DNA, 120 bp, synthetic construct
  source 1..120: mol_type = other DNA
tgtcatcgtacatctaaagttctatttcttcataaaaagtagaaaagatttagctatgattgcaggattgaatcatctaaaattaagtaaaataactaatagctaacagagggaatacaa

SEQ ID NO: 28260 - DNA, 120 bp, synthetic construct
  source 1..120: mol_type = other DNA
gctctatcataattgcatgtttggcaatctatgtttgattgacaacaatattgcccttaggtcagataaactagattacactacaaaaccacaggacaacacattaccaggaaacacagt

SEQ ID NO: 28261 - DNA, 120 bp, synthetic construct
  source 1..120: mol_type = other DNA
aacatgtttcacagagtttttcttttggaatgattattagtaagagatgggattctcttaatggctgaggtgggtaggatttctgtcttggaatcaaacagaggaagttcagtgactcag

SEQ ID NO: 28262 - DNA, 120 bp, synthetic construct
  source 1..120: mol_type = other DNA
agaagttttcctaacttaaattgttccctaacatgccaatatgagccctattttttgccttcactgtatttcagtgtatttatctgcccagaggtactgctttataaaatatatgttccc

SEQ ID NO: 28263 - DNA, 120 bp, synthetic construct
  source 1..120: mol_type = other DNA
aaatgcaagaccaggaataaaaagaaaataagaaagggaaggaagggtgaagaaaataaagagtcaggaaaagaagcatggagaaatgttgatttcttcagcatttttgggacttggaga

SEQ ID NO: 28264 - DNA, 120 bp, synthetic construct
  source 1..120: mol_type = other DNA
aattttacataagctgaagataagttcaattacacgagtgattattagagttgtcccattgttatctacagaggggtgtggagcacgagagaaagcacaggtgctggcactgatgacctt

SEQ ID NO: 28265 - DNA, 120 bp, synthetic construct
  source 1..120: mol_type = other DNA
ccataaaaggcagagaaatgagtagaatgtgtttgagtcccctttcacctgtttattccttatttaccaagtgaaatatgcatcatcttgcatttattttctaattttcctgggaatggg

SEQ ID NO: 28266 - DNA, 120 bp, synthetic construct
  source 1..120: mol_type = other DNA
gcaacatggtaagagtacctcccttcacattgtaattaggttgctatgacagaaaagctttttaaattaaggacttcacttgagttatgtggcataactaagctggcctttcaggctctg

SEQ ID NO: 28267 - DNA, 120 bp, synthetic construct
  source 1..120: mol_type = other DNA
gtggaaataattttccatggaatggccaactaaagaaaagaaatatgataaattcagatcatatcattgttccatttatccttgtaccctgtctgtgacagaatacctgatgtttgggat

SEQ ID NO: 28268 - DNA, 120 bp, synthetic construct
  source 1..120: mol_type = other DNA
gggatttcaaattttcagtgataaaactgcctagaacttggctaatttcagtcaatcctcaaagcttagctcttttagcccttcttggactcccctctacccattcccctgaaaacactt

SEQ ID NO: 28269 - DNA, 120 bp, synthetic construct
  source 1..120: mol_type = other DNA
agtgactgtactctttttagatttgttctgcctatactctaggagtagttctcaaagggcaacttaaacacgagaaagagagaggagttgtcaaaatacagatttttgggctccatcatc

SEQ ID NO: 28270 - DNA, 120 bp, synthetic construct
  source 1..120: mol_type = other DNA
gtataggttatatgcaaatattagtcccttttatataaaagacttgaacatctgtggattttggtacctgcagggaatcctgaaacctatcccccacagatactgtgggacaactgtacc

SEQ ID NO: 28271 - DNA, 120 bp, synthetic construct
  source 1..120: mol_type = other DNA
aaaagaatcaaactctgtaaaataaatgaatggatttattctgagccaaatataagtgaccaaggcccaaggcacatctcaagaggtcccaagaacatatgccaaaggtgaatgggttac

SEQ ID NO: 28272 - DNA, 120 bp, synthetic construct
  source 1..120: mol_type = other DNA
tgtaatgtattgaaatatagaggaatctgaaagcaagcaccctcatgtctggtaatgctagaacagaattggatccttcacctgcctctctttactagcctagccactcattagggtaag

SEQ ID NO: 28273 - DNA, 120 bp, synthetic construct
  source 1..120: mol_type = other DNA
ttggcaggagtgggggattgattatattagagtttgtaaagaaagcctttgttgcatttcgcagaggcatgggatttgtaatgtccattcatggtggaaagacatatccttatacatctg

SEQ ID NO: 28274 - DNA, 120 bp, synthetic construct
  source 1..120: mol_type = other DNA
aatgccggtgagtctttggtctctgccctgatttcagttccacagttcgctggtataagcagccattttaatttcaaatctcacatatatatgtatagaatgttagaaacaatttggaat

SEQ ID NO: 28275 - DNA, 120 bp, synthetic construct
  source 1..120: mol_type = other DNA
acacattcatattggactattcattaagaggtctaagaagaaaggtactcttaaattcacaagtggggactacaaagcaatatgaaaatgatcaggatttccgttttaatgaaataatgg

SEQ ID NO: 28276 - DNA, 120 bp, synthetic construct
  source 1..120: mol_type = other DNA
taataggcaggaatggtcagccctgaattaaaacttctactagtgagaaaatatgaatgaatgtaattctacattttattcaatttccttttttgctatattttcccaatataccagttt

SEQ ID NO: 28277 - DNA, 120 bp, synthetic construct
  source 1..120: mol_type = other DNA
ctccaaggagctggggccatttgggaagtgattaggtcataaaggaggaagctctcaaaatgggattaaagcctttataaaagaggcgcaacggagtttctgttcatccatttttttttt

SEQ ID NO: 28278 - DNA, 120 bp, synthetic construct
  source 1..120: mol_type = other DNA
aagagagagaaaaaaaagaaataaaacgataattaaggtagaatgttaccagtaagagttgttgttacccagcaaagcagactagaataaagggccagaaatgatgctaaagatggagct

SEQ ID NO: 28279 - DNA, 120 bp, synthetic construct
  source 1..120: mol_type = other DNA
tcatacaagttgccaatgagatgactagttctgaatgcctcttcacgtcctcttagctttctgctactttgtgtcacctgtgagaaccaaaaaccttttgcaaggctgcatataatctgt

SEQ ID NO: 28280 - DNA, 120 bp, synthetic construct
  source 1..120: mol_type = other DNA
aagcagaatagagtaagggaaattgatagtgcagggctagggaatgagaattttacaaagagaaggcaacatttccatcgaaacttgaaagagatgaggttatttgagggtagaacatat

SEQ ID NO: 28281 - DNA, 120 bp, synthetic construct
  source 1..120: mol_type = other DNA
gcagatagaaaagtctcagtataaataagtggtcaaagagcagcaagtcacttagaacatggatgccacaacaacatggcacctaatcgtcatttgactccactgcttaatctggcatgt

SEQ ID NO: 28282 - DNA, 120 bp, synthetic construct
  source 1..120: mol_type = other DNA
catttggcatttctgaaaacttccaacaaagcattcagagctagcataattccagccagatgaggacttttaaccatgatactgacatggcttagaaatatgaaacgttggccgggcgcg

SEQ ID NO: 28283 - DNA, 120 bp, synthetic construct
  source 1..120: mol_type = other DNA
agaatgtggaagtttcatgaaaatagagacttattttatacactttatcatagctattgctactcatctgctcacttttcttctaagaagctatctggaactattctgtctctacataac

SEQ ID NO: 28284 - DNA, 120 bp, synthetic construct
  source 1..120: mol_type = other DNA
gtggagcctaatgagaggtgttgaaagcatgatagtaaaagtaaaatagtgcttatcggagaaaacattcacaagcagagaagtggcagagtacacatgatccatgtgccttattagccc

SEQ ID NO: 28285 - DNA, 120 bp, synthetic construct
  source 1..120: mol_type = other DNA
tacacgtgagtgtggttttattgtacttttccctgatgacttatgaagttgaatacattttcatatgctcactggccatttggacattgtcttttgtgaagtacccataaagtctcgact

SEQ ID NO: 28286 - DNA, 120 bp, synthetic construct
  source 1..120: mol_type = other DNA
aaagaaaagaaaagaaagaaagaaagaaagaaagaaaaggggaaggggaaggggaagggaagccacgctcattcacttaggtattcgctgtggctacttcctacaagaactgatttgagt

SEQ ID NO: 28287 - DNA, 120 bp, synthetic construct
  source 1..120: mol_type = other DNA
gggacaaggagtccaagcaggatggagattcaaattctaggtcctgaaaatggaggactaaataggcagaggaaaggaaaacaggaagattaaacatttcgcaacctactcatctgacaa

SEQ ID NO: 28288 - DNA, 120 bp, synthetic construct
  source 1..120: mol_type = other DNA
aaaaacaaaaaaaaaacatttccttcttcctggggaaaaggttggccctgagtgaagtgctgatctcttggaagtttatcttttgcatcttcccctctccaacctcctagtgactctccc

SEQ ID NO: 28289 - DNA, 120 bp, synthetic construct
  source 1..120: mol_type = other DNA
ctggtgtcatctctaggggcctttcttccttgagattctgtaaactcatggagccttctgcatgaaacttagtgtcccaagtaggcttccatactaggagtaattttctatattagctat

SEQ ID NO: 28290 - DNA, 120 bp, synthetic construct
  source 1..120: mol_type = other DNA
catgagttcagctattcagaagctctctaaactctgttctctggggccttttatggagtcttcattggataggcctgactgacaattctgtattaatgtgactggacaaaaagggtatga

SEQ ID NO: 28291 - DNA, 120 bp, synthetic construct
  source 1..120: mol_type = other DNA
acctccatatggtgttgtctaattgtatactgcagatttaaaactaagcaaaggctgaaccatgcattcttaatggggcagatgacactcccaaaggggtgaaaattggttcttggtggt

SEQ ID NO: 28292 - DNA, 120 bp, synthetic construct
  source 1..120: mol_type = other DNA
cttagtgtttgaggcttgcaggagagttaacaccagcaataaatagtccaggtgagcccgaggataatgttacaaacatggtttagaaaccccaagcactggtcacaatttcaggaatta

SEQ ID NO: 28293 - DNA, 120 bp, synthetic construct
  source 1..120: mol_type = other DNA
agacagtggaaaaagagaagcaatggtgaatgaaaagcgtgactctgtcacattcaataaagcagaaaaatgtgcgttaaaaaataaaataaaataaaataaaattcatgttttttttgc

SEQ ID NO: 28294 - DNA, 120 bp, synthetic construct
  source 1..120: mol_type = other DNA
aatcaaagagaaccatgaaccaaatcagtctgcttgatataatggtgtagactgccattgaataagaaaatctttacggaaatacttggacacagggtggggaacatcacacacgggggc

SEQ ID NO: 28295 - DNA, 120 bp, synthetic construct
  source 1..120: mol_type = other DNA
ttgggaggctgaggtgagattgcttgtatctgggaggctgaggctgtagtgaaccagtctaggtgacagagagagaccctgtcaaaagtaaaataaataaataaaagttttctaatgcta

SEQ ID NO: 28296 - DNA, 120 bp, synthetic construct
  source 1..120: mol_type = other DNA
caggctctgcctagattctaacaaagccatgctgaaatcaaggttgagtgcacatccatgcacatgtgagtgtgcatgagtgtgtgcgtatgtttacagtagtacatcagaatctaaaaa

SEQ ID NO: 28297 - DNA, 120 bp, synthetic construct
  source 1..120: mol_type = other DNA
taagatgcaacatcttctgctacaatcacctcaagattgaactccagacgaaaacgtgtaagtgtcctgggccaagagtcctttcatttgagattcaggaatgaaatgtctagggttatc

SEQ ID NO: 28298 - DNA, 120 bp, synthetic construct
  source 1..120: mol_type = other DNA
gcctttaccctggctcttctagtagatacctattcagaatataccctcgtcttcttcacatctttgctcaaaaatcaactcaatgaagcccactcagactactcaattccaacctagcaa

SEQ ID NO: 28299 - DNA, 120 bp, synthetic construct
  source 1..120: mol_type = other DNA
tttatgctggtccattccagaataaacttgaataaatagagctatttcacttcaggaaaggaatttagctgggtacagtggcttatgccagcactttgaaaggccaaggtgggaggatca

SEQ ID NO: 28300 - DNA, 120 bp, synthetic construct
  source 1..120: mol_type = other DNA
aactacatcctaaccgtaagaaaacttacagatctgtgtcattgaaaccactttgtctaaggtcactgatgactttcatatcaccaacgcgaagcatgtttgcagccctcactcttcttc

SEQ ID NO: 28301 - DNA, 120 bp, synthetic construct
  source 1..120: mol_type = other DNA
atccacaagccaagcaatgccaaggaaagaagcatggacattttttcttactgtgtctagaaggaaccaactaggctgacattttggtttcagagttacagcctcctgaactgtgaaatg

SEQ ID NO: 28302 - DNA, 120 bp, synthetic construct
  source 1..120: mol_type = other DNA
gcatcaaagaggagcaaagttgatgcacaacctatctctagatcttgaaggtcttatagaatattgtttctaagtcagaagtatgatgacagggggaggagccaagatggccgaatagga

SEQ ID NO: 28303 - DNA, 120 bp, synthetic construct
  source 1..120: mol_type = other DNA
aaccaatgaacatagcatatctctccatttatttctatcttctttattcatgtcagtgttccagtacagagatcttgcatgtcttttgttaaattaatctttagaattttgctttgcatg

SEQ ID NO: 28304 - DNA, 120 bp, synthetic construct
  source 1..120: mol_type = other DNA
atttatcttcttaaggctttcacagaaagcaccgttttatgaacaggcaattcagtacccagagcttgactggagacactaatcaggattgaagtcttgatgcagttcataaaaacccat

SEQ ID NO: 28305 - DNA, 120 bp, synthetic construct
  source 1..120: mol_type = other DNA
gagttaagacaccgtaataatgtcctgcagtatatatgtcaaaatacatgggtcaaaaagacactctaaaatagcagtctccaagaacccaggaagtatgtgatccataggagtgtacat

SEQ ID NO: 28306 - DNA, 120 bp, synthetic construct
  source 1..120: mol_type = other DNA
aaaattcagcatgtcagggttatgctgcagggtaacggggtggtgaggattgtatagatagttgcaaacattgctcatgttcaacttcttgggttgggtagttggcttttatcactaaca

SEQ ID NO: 28307 - DNA, 120 bp, synthetic construct
  source 1..120: mol_type = other DNA
ccctaaattatgcatagatcaggtggtctgattgtgtctgtccagatagggcacccttttctaatttatgtgaagtgccatgtgggatagctatactttagggaaataagaacaccactc

SEQ ID NO: 28308 - DNA, 120 bp, synthetic construct
  source 1..120: mol_type = other DNA
tacttacccaattagaagtttactaggatagaaacagagctttctagaaggtagcatgctaatgagccagggcagagttgctaagtggcaacgtgaaactttagtcaaaggaaggaagta

SEQ ID NO: 28309 - DNA, 120 bp, synthetic construct
  source 1..120: mol_type = other DNA
tggcaccactgcactccagcctggacagtggagtgagatctatctcttaaaaaaaaaaaatcgcacacttgcgcctaagcagcttgtaccctcttttgaaacgaaattgttgataatgaa

SEQ ID NO: 28310 - DNA, 120 bp, synthetic construct
  source 1..120: mol_type = other DNA
aaacataaataaattaggtagtgtattttgagtggcatcagtctcactcatcttggtgccccggtgtttacaagagccagatggtgtcagaggagtacgcagttgtatgcagttatggtt

SEQ ID NO: 28311 - DNA, 120 bp, synthetic construct
  source 1..120: mol_type = other DNA
gaacaggaaagtgcctaacatacccaatgttctaatcgcatcacaaaaaaaaattatctatagagaccactgatgtgcatcataagcaatgcactgaataaagaagaccccccccccagc

SEQ ID NO: 28312 - DNA, 120 bp, synthetic construct
  source 1..120: mol_type = other DNA
tctaccatgttttctcttccctttatcatgaaaccagcatatcccaggtagaggctattctttcagtcttgatcagaaataaagatggtgtggaaaagagccataacaaacccaccaagc

SEQ ID NO: 28313 - DNA, 120 bp, synthetic construct
  source 1..120: mol_type = other DNA
gcatttgtgtctgtcaataaaggcatgggttataatggcactggggagaccaccatctgataaatttagcaattaactttatcaatttaaacatacaccttctttctcttacctccaccc

SEQ ID NO: 28314 - DNA, 120 bp, synthetic construct
  source 1..120: mol_type = other DNA
tctcagaaaagctttttttaaattccttcctattaggccaaaatgattcctagtatagggacttactcaagcctcaccacttttaagccttgggcctctgttgtattcctgcacagcgct

SEQ ID NO: 28315 - DNA, 120 bp, synthetic construct
  source 1..120: mol_type = other DNA
gtgtgtgtgcgtgtgtatgtgttttgaagggaagattcagaagttctgaaggcaggatgatcaatttgggaaattgttcaaggggcttattagaacctacctgaagggaacgtttttcta

SEQ ID NO: 28316 - DNA, 120 bp, synthetic construct
  source 1..120: mol_type = other DNA
tagaggctcactttgcaaggaaaaaagaaatcattctgccctagaagggggctgtaggaagtattcacaatgagtcaattaatatcaagatctcctgttccaggaaactgttactaagta

SEQ ID NO: 28317 - DNA, 120 bp, synthetic construct
  source 1..120: mol_type = other DNA
acagccaagatttcacaaaaaaagtgataaattttctggggcctacagaagggtaaaggtagaagtaacacaagatgaatcaaggataaaaggactccagtggtccaggaagtcaccgcg

SEQ ID NO: 28318 - DNA, 120 bp, synthetic construct
  source 1..120: mol_type = other DNA
tggagataggaaggatgagcaataatcctccatttaaatgtccataaaattataaatttaatcctgcaaaaccgactaaaaagtatttcatttgcattggatttttcctaccaccattcc

SEQ ID NO: 28319 - DNA, 120 bp, synthetic construct
  source 1..120: mol_type = other DNA
cttttgagaagggaaggtgttattaagtcatcacctccacagagtaccttccaattatcatgagagctttgtgtgacgcatgagaaaataggcttcacttgcaccagcatgatttccata

SEQ ID NO: 28320 - DNA, 120 bp, synthetic construct
  source 1..120: mol_type = other DNA
acctaggagactgtatgtataagctgagagagaggcatcagtgatatagggatctgggccaactgttcattcagcctacttttgtcttttgcattttctcttgccctaaaacatattgca

SEQ ID NO: 28321 - DNA, 120 bp, synthetic construct
  source 1..120: mol_type = other DNA
gaggaaccattcagtttttcaccactaaatatgatgttagtatagctatgtcctacataacactttggtcggtgatggactgcatatatgagagtggtcccacaagattataatgggggt

SEQ ID NO: 28322 - DNA, 120 bp, synthetic construct
  source 1..120: mol_type = other DNA
ttttgtagatgctttttatcaagtggatgaagtttcctctattcctgctttatagagagcttttatcatgaatggatatcgaaatgtgttaaatgtttattatgcatcaactgatataat

SEQ ID NO: 28323 - DNA, 120 bp, synthetic construct
  source 1..120: mol_type = other DNA
tcctggaggaggtggggggaaaggaggtcctcttctcatgaatgggccccttgtatccactggaaacaatggaccgctgattggagcaagaggtggaggaataaggccagggccagttgc

SEQ ID NO: 28324 - DNA, 120 bp, synthetic construct
  source 1..120: mol_type = other DNA
gtggtttctttctccttctaagctttttaaagaaacatttaacttagcagcatgaatcagtttcttcaaagctcctttcggaggatcatctaagttagcaccattttcccattgactgtt

SEQ ID NO: 28325 - DNA, 120 bp, synthetic construct
  source 1..120: mol_type = other DNA
gatgaactagaactggtctgtgtgtgttatttttgggtgacccagcctacttccttgagactgtggtgtagcagggccttctccattctacacataagcagatcgccaagcatttaaagc

SEQ ID NO: 28326 - DNA, 120 bp, synthetic construct
  source 1..120: mol_type = other DNA
tgacagatagaatcaactcattttccaagtgccagctatcattgttccatatgtaacttccaaagctaaattaatgattagacatgaacatgaggaggtagagagcaaatttccaaagtt

SEQ ID NO: 28327 - DNA, 120 bp, synthetic construct
  source 1..120: mol_type = other DNA
aaatgaagtgacatccttaggatatcaaacttaatttccttctgaatcaggacttgtcttgctttccccattccaggtacttacctggcctctcttttcttccctctactgggtagagtt

SEQ ID NO: 28328 - DNA, 120 bp, synthetic construct
  source 1..120: mol_type = other DNA
gttttaatgttttgcataaaaagtctttagctttgcatggacaaagctgtgttcttcccagcaggcctgtggcctttgaagtttaaatacagccctttgttggccagtgatgatgagcat

SEQ ID NO: 28329 - DNA, 120 bp, synthetic construct
  source 1..120: mol_type = other DNA
ctgatggaaggcagtgagatatatagacacatgccaatttgagggacttttttaggcaaatggagtattgaacgctggaatcattagttatgtgttccctcctcaatagtagaggcagga

SEQ ID NO: 28330 - DNA, 120 bp, synthetic construct
  source 1..120: mol_type = other DNA
cacaaagcttaatgctaaggaagtgaggatccctgataagttatttcaccgattatgtgcctagtctcattccctttcccatctaacccatttcattcagttagagtgtcctttagctcc

SEQ ID NO: 28331 - DNA, 120 bp, synthetic construct
  source 1..120: mol_type = other DNA
ttatgctgtatgtcaactggaacatgaggtctacatttctactacacacgggtcaggttcctcaaaaagaaagtattgtgaaaggagtcaattaacgcataagaaaaatatgcgtgccgg

SEQ ID NO: 28332 - DNA, 120 bp, synthetic construct
  source 1..120: mol_type = other DNA
tgtacagtaatcaagagagtgcaaaaggatagacacatagagcaatgaaacacaatggagagtccagaaacagatgcatatatatgctagaaaatggatttttgaatcaggatacaaagg

SEQ ID NO: 28333 - DNA, 120 bp, synthetic construct
  source 1..120: mol_type = other DNA
aatttagaggaataagagtggacacaagttgaccacttaggagacactatgcagtaagaatggccatgccttagataggaacagtgcttctgaaacttgagtgtgtgtcacaataacctg

SEQ ID NO: 28334 - DNA, 120 bp, synthetic construct
  source 1..120: mol_type = other DNA
cttttgcaccaacccaatagttttcacaaaatgcctggaatgtcagaaaaacagatgctttgttgaattatgtagtagaacccctagcaaaattaacttaccctctgaccctaattattc

SEQ ID NO: 28335 - DNA, 120 bp, synthetic construct
  source 1..120: mol_type = other DNA
cccacctcccaacaaaacaatgtataaaaactactctaccgtgtagagtatatacatgtataaaactactctaccgtgtatgtactctacattgttttgttgggagaggggaataatagt

SEQ ID NO: 28336 - DNA, 120 bp, synthetic construct
  source 1..120: mol_type = other DNA
gccctcccataagtattctgaagtatgattcaccctaggttttcaaatctcttccttgccctagaaaacaaacttggactcatgtgtttgcccactttattcaactcctctgtcttctac

SEQ ID NO: 28337 - DNA, 120 bp, synthetic construct
  source 1..120: mol_type = other DNA
atcaaactatgcaatcccatctacctacctatttaaaaataggtttccagtgaatactagcagtgctagggatggggctgagttctgcacttcattcctacaaggttctgtacaatctgg

SEQ ID NO: 28338 - DNA, 120 bp, synthetic construct
  source 1..120: mol_type = other DNA
tcattctccactagaaggtaagctacacaaagatgtggagttttaccagttttgttcactgatacgttcagagcatgtataaaagtgcctgggacactgtaagtatgcactgggtactta

SEQ ID NO: 28339 - DNA, 120 bp, synthetic construct
  source 1..120: mol_type = other DNA
atctaaatgtaaaacccaaagctgtaagacttctagaaaaaaacagagaacacctttgtgagcttgggttaggcaaagatttcttagacacaacactaaaatgcataaaagaacaagctg

SEQ ID NO: 28340 - DNA, 120 bp, synthetic construct
  source 1..120: mol_type = other DNA
tcctctgtttgtagccctattttcatgtttgattgcttgttttgccatgattacttaggtatggttttctctgcatttatcccaattagggcttgtatggtttcttaaatgtgtgtcgtg

SEQ ID NO: 28341 - DNA, 120 bp, synthetic construct
  source 1..120: mol_type = other DNA
ctggttctgtgaagaatgtcatttgtagtttgatagaaataatattgaatttgtaaatttctttgggaagcatggccatttcaatgatattgattcttcctatccatgagaatgggatgt

SEQ ID NO: 28342 - DNA, 120 bp, synthetic construct
  source 1..120: mol_type = other DNA
aaacctgccaaatgctgacacaaaagctttgaaagccgtagtagcctggagccatttagcatagcagcaaatagcctgaaaccctcaaatagtccttgaagtacagtaattgatatcatc

SEQ ID NO: 28343 - DNA, 120 bp, synthetic construct
  source 1..120: mol_type = other DNA
agagctgcctgcaaggtaatggttctcaaaccttagtgtacatatgaatttattaccacaagcctatcaaatcagaaccataatgactgcgactcaggagtctgaatgtgtcaccagcta

SEQ ID NO: 28344 - DNA, 120 bp, synthetic construct
  source 1..120: mol_type = other DNA
aatactgactgcccacagattatttactgggcatcaatatggaattacctgttagaatcatcaagaggaacaggtgccattttgagtttgacttcaggacggtgagaatcactcgctatc

SEQ ID NO: 28345 - DNA, 120 bp, synthetic construct
  source 1..120: mol_type = other DNA
acaaagccaatcacaaaaacctgtcctatttagtcacaatccacaattctgcactaacacgaacttctagagattgcctaaatttaatttttgaaactaagaaccactaatagataatac

SEQ ID NO: 28346 - DNA, 120 bp, synthetic construct
  source 1..120: mol_type = other DNA
cctcccgcctcagcctcctgagtagctggataaattaatttttattaaaacacttagcttccaaagttcaccagataagagtaaaaacaatttggaattatcttaaaatgaaggaagtca

SEQ ID NO: 28347 - DNA, 120 bp, synthetic construct
  source 1..120: mol_type = other DNA
tacatacgatctctactacgagaccttgaatatgttctggaacgagacctagaactaaaaatgaaataaatatcaatgcaagaaaaataaagtattccatgctaccattctaaatactct

SEQ ID NO: 28348 - DNA, 120 bp, synthetic construct
  source 1..120: mol_type = other DNA
cactaaaataatggagttttgctaaacagggcaatggttgtccttggaatctttctgttacagccttaaccctaagtactttcactcctcaaagaatgtagccattctcttcacctgggg

SEQ ID NO: 28349 - DNA, 120 bp, synthetic construct
  source 1..120: mol_type = other DNA
ataatgagttctaaaaagaaataaaattaatccctcaagaaatgttgccatttaaggtggcaattttcaactcttgatggtaatagtttctctgtccacggccacccaccaccaccaccc

SEQ ID NO: 28350 - DNA, 120 bp, synthetic construct
  source 1..120: mol_type = other DNA
aagtcctatgctacactaacagtgactaaaagactgctactcagtttgcctcttcctgcaatggaaggggagaccatgttcaaaataggtttcaaaatatttggctttataatggcctcc

SEQ ID NO: 28351 - DNA, 120 bp, synthetic construct
  source 1..120: mol_type = other DNA
tatgaaatgtttctatgcaaatgtgttccttcctaccctactgtggtaagcatggcacagaagaccctgtagaagatatcatcagaaacagcagtcaatactgtgcacctctctgtatac

SEQ ID NO: 28352 - DNA, 120 bp, synthetic construct
  source 1..120: mol_type = other DNA
aggtcttgagttttgttttacaacactgtttcagaacctgtgagacacgcatctgcttgtcaatgagcaggttgagcttggagctgagaactctggcctcatgaataaaaattgtatcat

SEQ ID NO: 28353 - DNA, 120 bp, synthetic construct
  source 1..120: mol_type = other DNA
gctcgtaatcacaattactctgcacttcagaaaagccaccctcaacatttgttttctaggaaatgtcaataagcaggtggaaataaaatgctccgaagaacaaacccgtacgaagagacc

SEQ ID NO: 28354 - DNA, 120 bp, synthetic construct
  source 1..120: mol_type = other DNA
agagagagagagagagagacaaagaaaaaagaaaggcaagcaagcaggaacaggaagcttctgaagtttaggtcacattttgacctaggtaatggttatacaggtgttcactctatttct

SEQ ID NO: 28355 - DNA, 120 bp, synthetic construct
  source 1..120: mol_type = other DNA
acaagaaacagagaaccaaaacagatgtgtacatcctgaatttggctgtagcagatttactccttctattcactctgcctttttgggctgttaatgcagttcatgggtgggttttaggga

SEQ ID NO: 28356 - DNA, 120 bp, synthetic construct
  source 1..120: mol_type = other DNA
tgctttcccctcaaataaaacatctgcattattctgaaactcaaatctcagacgccgtggttgcaacttataataaagaatgggttgggggaagggggagaaataaaagccaagaagagg

SEQ ID NO: 28357 - DNA, 120 bp, synthetic construct
  source 1..120: mol_type = other DNA
ctctaacccacgatactcgttccagctacttctggctccaccccccggaaccacatcaactcattggccctaagttattatgaacacacaggaagtcaaactgcaattaggcagcaacag

SEQ ID NO: 28358 - DNA, 120 bp, synthetic construct
  source 1..120: mol_type = other DNA
cgcgggggagtggtggccagggagaaagataatgttactttttttgggggtataatttggtggcaaaattaaaaagcactaattgagtcagtgaacatttactgagggtctatagggttc

SEQ ID NO: 28359 - DNA, 120 bp, synthetic construct
  source 1..120: mol_type = other DNA
gggagccactgtgcctgaccaaaaccataatcttttaaagctcctactattgctatcaccctcatagagtttttgcccttcaagtattatctgcccttgcttgtcaatgtctttgtcagg

SEQ ID NO: 28360 - DNA, 120 bp, synthetic construct
  source 1..120: mol_type = other DNA
tacaaaggttctcttactcctcactgtcaccactcattgtcagggttttcatttgcttgtttcgtttggttttaaggcctgtatcagcttcgaaaataccacctagcctgtgttttcttg

SEQ ID NO: 28361 - DNA, 120 bp, synthetic construct
  source 1..120: mol_type = other DNA
gaatgtattatttaggccttcttgaaagcattgtagcaatgggttttagcatcatagcgatatctgtaggaaaatagccccttgcatggcaagagtgatgccatcgtaaagcaaacctgc

SEQ ID NO: 28362 - DNA, 120 bp, synthetic construct
  source 1..120: mol_type = other DNA
gaaagagttttcagcccatgcacaaggataaggaatccacagtgagcctggaagtctctcttacttgagaagatggaattggaatcagcagaacagagaaaagtgagtcatacagagaaa

SEQ ID NO: 28363 - DNA, 120 bp, synthetic construct
  source 1..120: mol_type = other DNA
cctcgacttaggatggggctacgtcctgataaacccattgttaaagtcaaaatattgtaagttgcactattgtaaactgggggctgtctgtgatgtttaaactatgtagaacgcaacaag

SEQ ID NO: 28364 - DNA, 120 bp, synthetic construct
  source 1..120: mol_type = other DNA
ttgcatctgtactcttctgggatgttgccctgtagttttcttgtggtgtttttgtctgactctggcaacagggtgaaaatggcttcataaattgagtttggcagtgttcctcttcaattt

SEQ ID NO: 28365 - DNA, 120 bp, synthetic construct
  source 1..120: mol_type = other DNA
gaaaggaatgagtaatcatgtactgcagtagggaaagttgccgaattcctctctcacttagactgaagtacaatgtttccaagtttttgtgaccagcccaagtgaaactgataacggtgt

SEQ ID NO: 28366 - DNA, 120 bp, synthetic construct
  source 1..120: mol_type = other DNA
attgtaagtacaatgagatgttatgagttccacattatcaaggtcattggacagttccttttattagtgaggtgttagcacctaaatttttctattatctgggccatatgttccaattga

SEQ ID NO: 28367 - DNA, 120 bp, synthetic construct
  source 1..120: mol_type = other DNA
acatgagtctaccaacaattgcttgctgcccaggcttgtgccaaaacttcttaggatgctatggaaatttacttaatggtttttattgttgagtcattttcagaaccttccaagagaggc

SEQ ID NO: 28368 - DNA, 120 bp, synthetic construct
  source 1..120: mol_type = other DNA
cattccagcaaaaatcatgatgtggtccctctgcctcatggaatttatattctagtaggggagacaggttaattaaatatattgctctatagaaattaccttgtgacgttgagaatgtgt

SEQ ID NO: 28369 - DNA, 120 bp, synthetic construct
  source 1..120: mol_type = other DNA
acgccagattgtgaggtatatacccttcaagatgaactagatgcaaaacatacaccaggtataataaaagaaggagaagatgggctgtaaacaggggagtaattacatgggctggcaagg

SEQ ID NO: 28370 - DNA, 120 bp, synthetic construct
  source 1..120: mol_type = other DNA
ttgcaaaaggtcatgcaactagaagcagttttcctgaatactattctactgttttcccctttgcatcgtagagccactgtgcctctcataggcaaaaattcaatcatggctagcaagagt

SEQ ID NO: 28371 - DNA, 120 bp, synthetic construct
  source 1..120: mol_type = other DNA
ctacttgactggcctgctttcctcagtgcacatgtagaaaaatggttggcaaggatcaaagttatgtttggtcctattaaaggataatattctcttgtaaccatagagacctaatgttgc

SEQ ID NO: 28372 - DNA, 120 bp, synthetic construct
  source 1..120: mol_type = other DNA
tggtaactgttttaagagttgttagtgtgtacaggaggggatgcttcccagtgccgaaatagacacaaaataggcaacatttagatgttggccccaaagccttgtagattatcctcaatt

SEQ ID NO: 28373 - DNA, 120 bp, synthetic construct
  source 1..120: mol_type = other DNA
ctcttgttcatgcaggttcccctctgttaaatgcttctgcacccaccattatatggcagcctgcacatttttcctcagtttaaatggagccttttcagagaagtcttttctgattaatct

SEQ ID NO: 28374 - DNA, 120 bp, synthetic construct
  source 1..120: mol_type = other DNA
agagggagagggatctgtttcttttctctttctttttttctcatgtcagagggagagaaggaacagatacatgtgaattgcatgtgccctgatgggtctgcgtgtattagagagagggtg

SEQ ID NO: 28375 - DNA, 120 bp, synthetic construct
  source 1..120: mol_type = other DNA
aggggtgttgggacaggatctgcaatctaagaaaaaaaggataatgagacaagcaattaacataatggtcaagataataagatggagaaggacaatgaggtgagttaaactacaaggcaa

SEQ ID NO: 28376 - DNA, 120 bp, synthetic construct
  source 1..120: mol_type = other DNA
aatttaaaggatgtggctgaagaaatactcattataccgcaggagcttgtaatacagacagcccagcctacaaaagttctacgtttccacacacttgaatgactgagctgcagtgtcttt

SEQ ID NO: 28377 - DNA, 120 bp, synthetic construct
  source 1..120: mol_type = other DNA
ctataaagtcttcccaacccctttcttcctcctgaattcccacccagaagaacttcttccacaacattgcatatgggtaccattccttctgaaactattccaatcaatacaaaaagaggg

SEQ ID NO: 28378 - DNA, 120 bp, synthetic construct
  source 1..120: mol_type = other DNA
gtttagtcgacttaacattcagtgttattactgacaactaaaaacctactcctgccattttgttatttgttttctggttgctttgttcccttcccttcccttcccttcccttcccttccc

SEQ ID NO: 28379 - DNA, 120 bp, synthetic construct
  source 1..120: mol_type = other DNA
tatgtacctcatttttctttattcagtccaccattgatgggcatctagcttgattctgtgtttttgctgttgtgaatagtgccatgatgaacacatgaatacatgtgtcttctgtgaaga

SEQ ID NO: 28380 - DNA, 120 bp, synthetic construct
  source 1..120: mol_type = other DNA
gtggggagtgattaaatgtgttactgaaacacatttgttgcaccagatctttcaagttttcatttccctttctgttgtctgagccaccccctcctataagaatatgtccatctagagcag

SEQ ID NO: 28381 - DNA, 120 bp, synthetic construct
  source 1..120: mol_type = other DNA
gaaggtggaagctaatttctctgtatttttgtgattcacagaaaatgctattatcagtgaagctccaaaggcttctgccaggagtgctttttgtgtaatagagagggttgacgtggcagt

SEQ ID NO: 28382 - DNA, 120 bp, synthetic construct
  source 1..120: mol_type = other DNA
ctgtggcctattacaaccacatttacatgcaaaattaaatagttaaggaaaggggggtgggacctggggaataggagagtgagaacttgacacatcctctcccaaaaaaagcaagaagca

SEQ ID NO: 28383 - DNA, 120 bp, synthetic construct
  source 1..120: mol_type = other DNA
accatttcagatgtaaaggataactcctttagccgatcacggagttcaagtgtaacaagcattgacaaagaatcccgagaagcgatctccgctcttcatttctgtgaaacgtttactcga

SEQ ID NO: 28384 - DNA, 120 bp, synthetic construct
  source 1..120: mol_type = other DNA
acaggacatctcaacaggagagaagatggtcttggaggcgggcgtcatcatattgggaaaaattttgcccatgttcagatcaagacagtttggtccactctgtttcatttgtatgaattt

SEQ ID NO: 28385 - DNA, 120 bp, synthetic construct
  source 1..120: mol_type = other DNA
tgagaacttttcctttgcattcccaacttaactgttggatgcaaaaggcctcgcttttagcttaccctggctttcaacgtgccctcctcactaagcttaatcattcctagcttttgattt

SEQ ID NO: 28386 - DNA, 120 bp, synthetic construct
  source 1..120: mol_type = other DNA
tttttccttgtggtgaataggagatttgcttagagctgatgacttatgcctttcttgcgagttatgcagttagcaagcgactggggaatcagtcagcaagcagaaagaagctaattgaat

SEQ ID NO: 28387 - DNA, 120 bp, synthetic construct
  source 1..120: mol_type = other DNA
atggaattctggctctgaactttaatttatctgggcacaaatcaggcttcacagatggaagatggatttagtgaactcaaatcctaaggtacactctggcatctgatgagtcagggtgct

SEQ ID NO: 28388 - DNA, 120 bp, synthetic construct
  source 1..120: mol_type = other DNA
ataggtacagtaagagacatttccttggcctcctgctcaacaagctcagagccaatgtacagtacttggtcagcaaaacaagagtcttctttgaagacttagactgtgcagtataagaaa

SEQ ID NO: 28389 - DNA, 120 bp, synthetic construct
  source 1..120: mol_type = other DNA
gggagggatgtgggttggcagtctgactaatatgtcccctgatgataggccagcacattctgttatttcggttggaggctgaagttattttgctgggcaggctgtatttaaattgcttgt

SEQ ID NO: 28390 - DNA, 120 bp, synthetic construct
  source 1..120: mol_type = other DNA
gtatgactctacactcccactaacaatgtgtgagtgttctaattcatatctttcccaatatttaaaaagttttatgctactttaaaatagtcctctttcatttatgcagccaaaaaacac

SEQ ID NO: 28391 - DNA, 120 bp, synthetic construct
  source 1..120: mol_type = other DNA
gtcctctttcccatttgactttgagcctgtcaaggtcaggaaacatgtaccattcatttctgcatccaccatgcttagctcagtgtgtggtgcaataaatatgatgcacatgaaactata

SEQ ID NO: 28392 - DNA, 120 bp, synthetic construct
  source 1..120: mol_type = other DNA
gaggctccttttcaccatccctcttgcataagcgtgattgtgtctgattgtggctatttaaaatacacagcaccctgatcattcatttcatagtcctttctcttgtcagcaattctacca

SEQ ID NO: 28393 - DNA, 120 bp, synthetic construct
  source 1..120: mol_type = other DNA
gtatgagtgggtcgtgtatgagtgtgaggggtcgtgtatgagtgtggggtcgtgtatgagtgcgaggggtcatgtatgagtgcagggggtcatgtatgagtgtgaggggtcgtgtatgag

SEQ ID NO: 28394 - DNA, 120 bp, synthetic construct
  source 1..120: mol_type = other DNA
atgagtgtgggggatcgtgtatgagtggggtgtcgtgtatgagtgtgggtatcgtgtatgagtacagggattgtgtatgagtgcggggatcgtgtatgagtgcggggggtcatgtatgag

SEQ ID NO: 28395 - DNA, 120 bp, synthetic construct
  source 1..120: mol_type = other DNA
cctgtcatggagctgacatcctagtgaggtgaggcaggtagtaaacagacagataattaatatatatcaggtggtgaccgaaagctaagaaaaataagaggacaatgagtaactgcggat

SEQ ID NO: 28396 - DNA, 120 bp, synthetic construct
  source 1..120: mol_type = other DNA
tagagaatgcttgtcttgattagataacatttgagcaggtacatgaatgaaaatagaggcagtagcaaatgcagtggcctttaagtgggatgtccttgccatcttctaagagcaggaagg

SEQ ID NO: 28397 - DNA, 120 bp, synthetic construct
  source 1..120: mol_type = other DNA
ccccttgaggtccttccaaattgttgcatttatcaatatttattcctttttaatgctaaagagtttaccattgtatggatataccacaatttgactttggaatttccaactttgggttgt

SEQ ID NO: 28398 - DNA, 120 bp, synthetic construct
  source 1..120: mol_type = other DNA
gccattctcttcaccaagaattgttgttgttgtcgttgttgttgttcaagttctacatattctatgaaaaccatcaggccataccttcctcattaactcagtcctttcttcggtagccta

SEQ ID NO: 28399 - DNA, 120 bp, synthetic construct
  source 1..120: mol_type = other DNA
ggattgagatgactggtatgaatttcagaactttaaatgctacaaatgtaactttttaaacatttattagtttaaacaaatgtgtatagcacttgatacattgtgctatatatcaaacat

SEQ ID NO: 28400 - DNA, 120 bp, synthetic construct
  source 1..120: mol_type = other DNA
cagttgtacttggacgattaccatgtgatttagggtcactgtactgagaagattggcgttttctaggtcctggtgagggtctaatcaaacaaaaactcattaatatcataatcaactcca

SEQ ID NO: 28401 - DNA, 120 bp, synthetic construct
  source 1..120: mol_type = other DNA
tttcccataatttaggaaaataaaatattgtacacagagcacacatatatagctctgtcatatttgcataattttactctcagaacctcaaaacacctcgcatttcaggcccttttacaa

SEQ ID NO: 28402 - DNA, 120 bp, synthetic construct
  source 1..120: mol_type = other DNA
atatttggaccaacattagccattattataatcatttaatgagggtctttagaccctagggcggcaagcagatcgggtatgggtggctctcaagctgttctctatttcagaaaagcctaa

SEQ ID NO: 28403 - DNA, 120 bp, synthetic construct
  source 1..120: mol_type = other DNA
agtactctacaggagccactgcttaatgttgcgatttccttgctgtgagtggcattgccttgtctctgaatattcacatggaatctctgttgtgattctccaattagacattgtgaccac

SEQ ID NO: 28404 - DNA, 120 bp, synthetic construct
  source 1..120: mol_type = other DNA
cattccattctggtgccttctcatggggccttctttatatgctgggtaaacaggagtcctccaggtttcccataagcacagtggatggacattgttctggattttcacacttagacccct

SEQ ID NO: 28405 - DNA, 120 bp, synthetic construct
  source 1..120: mol_type = other DNA
ttagttcttgagttcagcttcaatcatcccagtatacacattcacgttaaaatgacctcctcgtggggcgctcctcctggggttactggcatgcctgtgctctcccaccgtcctcttcct

SEQ ID NO: 28406 - DNA, 120 bp, synthetic construct
  source 1..120: mol_type = other DNA
tgggcagtcctcttaattgggttaggtgcatcatggtagctttacatgaggtgtgacaggggaagggggattccatctctgaggctaagagagatctgggtgtaatcccaggaggagggg

SEQ ID NO: 28407 - DNA, 120 bp, synthetic construct
  source 1..120: mol_type = other DNA
tctccgaacatcgccctctctccgagcaacgcgatctccccgaacatcgcggtctccccgaaaatcgcgatctccccgaacattgccatctcaccgaacatcgcgatctcgccgaacatg

SEQ ID NO: 28408 - DNA, 120 bp, synthetic construct
  source 1..120: mol_type = other DNA
agcagcacccatagttctgaaggtgactgtccctgttccaccttttccattccttatccagcccagtggtgcccgtggaaccccagcagcagctcagatgctccttcctctgagtccact

SEQ ID NO: 28409 - DNA, 120 bp, synthetic construct
  source 1..120: mol_type = other DNA
ggcgagtggtgctgaaatggaaacacaaaagtgacaacccttgtccaggccccaaatctgaggagacacctcctcagttcctgccaccctaggtcatcctggaaggcaaaagttttgtcc

SEQ ID NO: 28410 - DNA, 120 bp, synthetic construct
  source 1..120: mol_type = other DNA
gcccccatcagagagagatcagctctgatcttgacaaattttgcacccccatcctgttccccttacaatttgctggccttactctctctgctacatcttggccttgcctctagactcttg

SEQ ID NO: 28411 - DNA, 120 bp, synthetic construct
  source 1..120: mol_type = other DNA
ccacagtcatagtgaagaaaagtcttttcatccacctggccttgaaccgcacaccaccgtggtccaggtctgaacttagggatgacggtgatgtcatagcaaagagagtgagggtctgtg

SEQ ID NO: 28412 - DNA, 120 bp, synthetic construct
  source 1..120: mol_type = other DNA
gaacaattctgaaattccaaattccaggtggaggctgtcaactgtcaggagcaaggagggtgcaatgatggaaatgattagagaagtcacaatgccagctggggacctcagttatacaaa

SEQ ID NO: 28413 - DNA, 120 bp, synthetic construct
  source 1..120: mol_type = other DNA
tcttgcatggagaggtaagaaatgtttgagttgaactgaatattcgctgccggcctggggtcggtgagattagtgagaagggaacaggtggcgtaaaagctaatgggatgctttaagatt

SEQ ID NO: 28414 - DNA, 120 bp, synthetic construct
  source 1..120: mol_type = other DNA
ggtgtgcatggcttgttcccctgccagaatgtcccattccttgacattttgaccagtcttgccacattctatgggttaagacctggatgattacaaaagttgtggaagatggttttcttg

SEQ ID NO: 28415 - DNA, 120 bp, synthetic construct
  source 1..120: mol_type = other DNA
atggtaaaataagtattgtaggccattctagcatgagttaaggaaaatatgggtacccatccaacctcctgcagctctgattcacaaagaattcctactgcatgttcacaggtcagagaa

SEQ ID NO: 28416 - DNA, 120 bp, synthetic construct
  source 1..120: mol_type = other DNA
acagtctccctttgcaaaccagccaaggttggtgtcctgttaataccttgtttgtctacagttagggtccaagaaagaagagttgctgaagtttatctcaaagaaataagtctcagattg

SEQ ID NO: 28417 - DNA, 120 bp, synthetic construct
  source 1..120: mol_type = other DNA
caacttacctgtatttgggactctttaagccttttgaagcttgtctatccataataggaagtaaattaatatgaatgggtgtcttttaggggccatgcatgcaccatgatgaatgttgac

SEQ ID NO: 28418 - DNA, 120 bp, synthetic construct
  source 1..120: mol_type = other DNA
ctgaaggcaagatgactctaatttagcttagaatacaaaacacaatctgtgagttatttcttactcctagtgtacatgtgcggttgcacatcagccacactgatgcaatcctggtgcaca

SEQ ID NO: 28419 - DNA, 120 bp, synthetic construct
  source 1..120: mol_type = other DNA
gttgcacattacactgatgcaatcctggtgcacatgtgcggttgcacatcagtcacactgatgcaatcctggtgcacatgtgcagttgcacattactcacactgatgcaatcctggcgta

SEQ ID NO: 28420 - DNA, 120 bp, synthetic construct
  source 1..120: mol_type = other DNA
aagagggaaacctcgagtcacgactgaaaggcagtggagggtgagagctgagttctattctctaggccttagggaggtcccttttacactgagaactttttgccacatgggaagaagcag

SEQ ID NO: 28421 - DNA, 120 bp, synthetic construct
  source 1..120: mol_type = other DNA
gatgcaggaggagagtgtgcggtttgaagatctttcatcccaacacagcaaggcggtgaagaaccagttttcatcctgtctccaccactaactagccatgtgtccttgagctcataccct

SEQ ID NO: 28422 - DNA, 120 bp, synthetic construct
  source 1..120: mol_type = other DNA
tattaatttgcaaaaggttgtatgtcttaacggaattaacataaaattaggatcctcaaagcttcagaaatttctggtaaaggctgggtgatgggcaattcagacacagaccaaaactgt

SEQ ID NO: 28423 - DNA, 120 bp, synthetic construct
  source 1..120: mol_type = other DNA
aacatcacttgcacacctttaatttttagtttattaattcatactgcaaacgaactcagttcttatcatgtgccaggtattgtcctagttgctgacaatacagctgaaaataaaatagac

SEQ ID NO: 28424 - DNA, 120 bp, synthetic construct
  source 1..120: mol_type = other DNA
gttgccacaagccatcttcaaacctttgttcatcttgcaaaactgaaactctgtactcattaagcaataacttcacatttcctcctccccacagctcctaacaaccaccattctactttc

SEQ ID NO: 28425 - DNA, 120 bp, synthetic construct
  source 1..120: mol_type = other DNA
tataagtggaatcagaccgtatttgactattttaggcacgctgcataagtggaatcatgctgtatttgactattctacgcactctctctgtataagtggaatcagactgtatttgtcctt

SEQ ID NO: 28426 - DNA, 120 bp, synthetic construct
  source 1..120: mol_type = other DNA
gctcaggcctacctatacaccactagctatgttgccattttatattatttctataaggtgccaacagaagctgctcatcagatcagacagacatagcccaggcaagtattgatttacaga

SEQ ID NO: 28427 - DNA, 120 bp, synthetic construct
  source 1..120: mol_type = other DNA
aaattccagaaatgtgaaacagtattgagaaattgagtaagccagctttgagagaacacacggcttattgtcctctccttctgttttgctcctcagctctctaaagtgggcattctctag

SEQ ID NO: 28428 - DNA, 120 bp, synthetic construct
  source 1..120: mol_type = other DNA
ttacatttcagttggggacgtttctgttgacttatctttcagctcactgattatttccttggccgtgttgaatcaattgattagtcctcaaagacatttttcatttctgttacaccattt

SEQ ID NO: 28429 - DNA, 120 bp, synthetic construct
  source 1..120: mol_type = other DNA
aaagtaccattcctgaagctaagaacaaatttagatactgtgataccaccagcttttcatgtgggcagctgtgttccagaacttgtagaacttctggcacagacagcaaaaggtagcaaa

SEQ ID NO: 28430 - DNA, 120 bp, synthetic construct
  source 1..120: mol_type = other DNA
tccataaaaggactttgctcatgaaggattggttaaataatagagtgcaattatgaattacaatttattttaaaatggcattactaatactattatatattggtatctggtcagaatgta

SEQ ID NO: 28431 - DNA, 120 bp, synthetic construct
  source 1..120: mol_type = other DNA
gaagagtgaagctaggcattgggatggaattggagaatttgatggacattcatgggctgtataccaataaatagtccctgcaccatctccaaatttttccaggggaaggaactaagatta

SEQ ID NO: 28432 - DNA, 120 bp, synthetic construct
  source 1..120: mol_type = other DNA
ataagaatagcactaatattgaaacccactattgaataaaatttttagtcatgaataaatttcagtttcccttctattcaagtcttttgctgaagagagttcacatactgtttaatttta

SEQ ID NO: 28433 - DNA, 120 bp, synthetic construct
  source 1..120: mol_type = other DNA
aatttcagcctcatttattcaaaatgtttttagctccatccaccctttcctctgtttgggggattataattgcacatttgttaaatatttttatatagttccacaaggcctagaggcttg

SEQ ID NO: 28434 - DNA, 120 bp, synthetic construct
  source 1..120: mol_type = other DNA
aatttatgttgcaagcgcacttaaggtactaaagaagaaaatgtgtacgtttcttttctcatgtgagctggcccttttccagtccttagtaacaatgacctttccatcccaggggctttg

SEQ ID NO: 28435 - DNA, 120 bp, synthetic construct
  source 1..120: mol_type = other DNA
aaagaccctctggatgagaaccatggctgtaggggatgtcttctgaagaaatgggcacaaaggaggcctacaacataaagaacaaaataagggaaagggtaaatgcagttgcatttatca

SEQ ID NO: 28436 - DNA, 120 bp, synthetic construct
  source 1..120: mol_type = other DNA
ggggaaggggagaccctttcaagggtattctttcctggggtactctcagtcctaggacatcatagctctctttcatccctcttaaaagttaataccattatcagttaacagtttttatat

SEQ ID NO: 28437 - DNA, 120 bp, synthetic construct
  source 1..120: mol_type = other DNA
ctgtatatagagaaaaagatgagatgcagctagattcagggcaatttaaacctacaaatttaacttatttggagacttaagttcttgatttataacatgaatcaaatgcgagaaccaggt

SEQ ID NO: 28438 - DNA, 120 bp, synthetic construct
  source 1..120: mol_type = other DNA
taaattctcagaaatgtacctcagaatactaggaaacaagtttggcaggcaaatggcagaaatggcacagggatgaagatgaaacaggcattcattcctgggaaattcctggagggaagt

SEQ ID NO: 28439 - DNA, 120 bp, synthetic construct
  source 1..120: mol_type = other DNA
aaagaaagaaagaaggaaagaaaaagaaagaggaaggaaagaatgagagaaagaggaaagagagagagggagagaggaagggagggaggaaggaaaccatatcgtctatgacttctactc

SEQ ID NO: 28440 - DNA, 120 bp, synthetic construct
  source 1..120: mol_type = other DNA
aattcaagttttctatacctaagtcccttgaagtgtaaaaagtaaatgatttattatgatgaaatggattcctttaagatgtaatagaaaagcaaatcctatgaaagatgatattaagaa

SEQ ID NO: 28441 - DNA, 120 bp, synthetic construct
  source 1..120: mol_type = other DNA
cacctccctcccagactgtaaatgagtctttatatcaactcctagccaaagcctcctaccgcagccacattgattctcttatttgttcctcttatttatgctccttgtaattattcacat

SEQ ID NO: 28442 - DNA, 120 bp, synthetic construct
  source 1..120: mol_type = other DNA
atacagtatgtggttttgtgtgattggcttctttcacttagtatcaagtttttgaggttccttaaagccttcttaatgcacaacttcaatgctcttcccttgctccaagccctactggct

SEQ ID NO: 28443 - DNA, 120 bp, synthetic construct
  source 1..120: mol_type = other DNA
aaaaacatagcatatatagggtttggtgctagctctggtttcaagcatccactggagttcttggaacacatctcccaagcataagtggggacactatagtaacttagttaattgaggagg

SEQ ID NO: 28444 - DNA, 120 bp, synthetic construct
  source 1..120: mol_type = other DNA
tgaagttctttaagccttaaacgtgacttagtgaggaggagaaatcctatcgccacaccacctcttctttcttctcacaaacctttggaaaagcccattgatgtcttgaaacaccctgtt

SEQ ID NO: 28445 - DNA, 120 bp, synthetic construct
  source 1..120: mol_type = other DNA
aggttttccctgttgctcacctaatggcctcttgagctgagattcgatgtcaggtaggaaactgaacaaatagatgagcacctcaataaaatgctgttgaaagtaagacgtgcatgcttt

SEQ ID NO: 28446 - DNA, 120 bp, synthetic construct
  source 1..120: mol_type = other DNA
tacctgaacatccagattaacatcactaagcaacaccacacactaagggaagctaaagtaatttctgcttaaagataaatgaaaacatgatctgtgaccttacccccaacccggtgctct

SEQ ID NO: 28447 - DNA, 120 bp, synthetic construct
  source 1..120: mol_type = other DNA
ttattttttctgcctcagtagggcccagcaatgtgttcagaacagcaaagagaataaaccttttgtccccctatgctgtggatgaggtggtgaagatgaacagagtaagggaaatctagg

SEQ ID NO: 28448 - DNA, 120 bp, synthetic construct
  source 1..120: mol_type = other DNA
cttagttcagactggttttcctttaacccccacaaaaaacctaatgggttgtttcatccattaagacaaatgtttatcaagctactcactgccatgggtgcttgagatcccatggtaacc

SEQ ID NO: 28449 - DNA, 120 bp, synthetic construct
  source 1..120: mol_type = other DNA
gtttcagctcctgtgaggacaacagctataaattatctgtaaattcctactatactaggcatcatgaatgcattctctagaggccccagtaaaggttagcaatgttcattctgccagtcc

SEQ ID NO: 28450 - DNA, 120 bp, synthetic construct
  source 1..120: mol_type = other DNA
ttcatcataatgccccagtgtgaactcaactagcctcatcatagtgccacagtgtgcactcacctggcctcatcatagtgtcccagtgtgcactcacctagcctcatcatagtgtcccac

SEQ ID NO: 28451 - DNA, 120 bp, synthetic construct
  source 1..120: mol_type = other DNA
acatcacagtgtcccagtgtgcattcacctagccccatcatagtgtcccaatgtgcgctcacctggcctcatcatagtgtccccgtgtgtgctcacccggcctcatcacagtgacccact

SEQ ID NO: 28452 - DNA, 120 bp, synthetic construct
  source 1..120: mol_type = other DNA
gatttctccccattgtcaatgctgggcaaacttacctgccttggtctaacaagacatcttctgctacctctccttctttagatcctctggttaaatgatataacagtgtgtaaaatacac

SEQ ID NO: 28453 - DNA, 120 bp, synthetic construct
  source 1..120: mol_type = other DNA
ttggaagattaaataacataagatctgtcaaatgcttgccactgagtccacacgcagtgaagcatgtgcttggtaacagttggctattgttgttatcctgaattcaccagacaatgggag

SEQ ID NO: 28454 - DNA, 120 bp, synthetic construct
  source 1..120: mol_type = other DNA
ttttcctgaagttcaaagttcccatccctccgtggaaggcctaatagaacaaagaccacccacctgcagttgcttttctttcttttttgtgcttcaactctaaagaatcatgcactatga

SEQ ID NO: 28455 - DNA, 120 bp, synthetic construct
  source 1..120: mol_type = other DNA
tccctatttcccacttttatgatcgtagagaaataactcacataggaaatacaggctcaggaaacagaaagcacagcaaacttttagtggtatgggttggtccccaaaactacaagaccc

SEQ ID NO: 28456 - DNA, 120 bp, synthetic construct
  source 1..120: mol_type = other DNA
tcctcctctactccctctccctccttctcccctatcttcggtcatcacccaataaactttcttgtagtacgcagaaccaatcactttactaagagtaaagcttatcttttgttatttcct

SEQ ID NO: 28457 - DNA, 120 bp, synthetic construct
  source 1..120: mol_type = other DNA
caaatcgccctggttgagaaccactgccctagatgatcccgatcatcagccaagtttaagatctgccatgagtatgatttgtctgcacacttaaattattaaaaaatacagattctgggt

SEQ ID NO: 28458 - DNA, 120 bp, synthetic construct
  source 1..120: mol_type = other DNA
gcagattatctacaatctcaagcaattccttgcctctaccaaaataacatgttctaaggacccataactaaccctaagtagagccttgtctattgaaaaatgaacatatctcggcccccc

SEQ ID NO: 28459 - DNA, 120 bp, synthetic construct
  source 1..120: mol_type = other DNA
tctgactgctttcactaagagccaaagatgtaaaatactggatacactcatctagctctgtttgaggtaaggaagccagcaactgtctgagctcttcttcagtggaagaatcctgaaata

SEQ ID NO: 28460 - DNA, 120 bp, synthetic construct
  source 1..120: mol_type = other DNA
tgagatcatggcagtacaatccaggcttggcaagagagggagaccgtagaaagaaaggaagaggggagaggggagatgggagaggggagagcttttttttttttttaaagaagagtcttg

SEQ ID NO: 28461 - DNA, 120 bp, synthetic construct
  source 1..120: mol_type = other DNA
acaaatattcaaaccataccatcccatgtttccctgggttgatctgtaaaatttcagcagtgattccagtggctcactccttggaacagtcactgtcagtagaagtatggaagacctggc

SEQ ID NO: 28462 - DNA, 120 bp, synthetic construct
  source 1..120: mol_type = other DNA
tcgtagttcaatgagaaaatatatgcaataatgttagtagagaaccaagcagagtgtttgtacctagtaaatattagctgccattattattattgttgttctttgtatttcctctcccca

SEQ ID NO: 28463 - DNA, 120 bp, synthetic construct
  source 1..120: mol_type = other DNA
atcctggagcagcacttctaacgttttgcaaccatatgtgcaatataggtagaaggatatgttaggtaagttggggaggtgacccaaagtagccctcccaaatgtgaaatttttttcctt

SEQ ID NO: 28464 - DNA, 120 bp, synthetic construct
  source 1..120: mol_type = other DNA
ctaccttgttctgataggtgtagtggcatctcatttcagtttaattctgatatctccagtgatggatgctgcttcgtttgcatgtttcttggccacttggctgtcttcttcttttgtgaa

SEQ ID NO: 28465 - DNA, 120 bp, synthetic construct
  source 1..120: mol_type = other DNA
ctgttgtatttataagcaccacctcttatatggcaagccctcttctgggtaccagggacagcgagatgcagaagatgaggccatgtcctcaaaaaggggagagacagatgcatattgatt

SEQ ID NO: 28466 - DNA, 120 bp, synthetic construct
  source 1..120: mol_type = other DNA
aattaccccagtctctgccctgatggtcacggggctgtctccacattgtctcccctctgtgcccatctgcctgtgtgtctagattcccccttcccttcttgtttttgagacagggtttta

SEQ ID NO: 28467 - DNA, 120 bp, synthetic construct
  source 1..120: mol_type = other DNA
ttcagaccacgccatagggagtcactgaagggttccaggtggtagtgtgatagcctcagattctctaagagggatgtggctttttggtgactgtgcctcaggatactgttgccacaacca

SEQ ID NO: 28468 - DNA, 120 bp, synthetic construct
  source 1..120: mol_type = other DNA
taacagtgagatctggaaagtcacatagagcaggagggactcggggcagggtgacagtgagggctgtaaggtcacatagacctggggacagggtgacagtgagggctgtaaggtcacata

SEQ ID NO: 28469 - DNA, 120 bp, synthetic construct
  source 1..120: mol_type = other DNA
agtgatcttgcagaattgcataggagctagtccatttcgccccaagcaatttgtgttaaagaatgagatcgtgtaacatttattgctaggcaaaaactgtatctaggcaagagagggcct

SEQ ID NO: 28470 - DNA, 120 bp, synthetic construct
  source 1..120: mol_type = other DNA
aaacaacgtaactaatgcgaggcaattaagatatctcctgcagactcccagcatttagctcaagtgtctacacgtacaggctattgtttacagcttttcaagtctctcatcacaccatca

SEQ ID NO: 28471 - DNA, 120 bp, synthetic construct
  source 1..120: mol_type = other DNA
aggctaaacttaaaatgtcaaggctaaattcttaatgtgcagcagacgttaacagggcagagtattgacacagaagtgggggctgggaatttcctagtaactgacttttcacgtatctac

SEQ ID NO: 28472 - DNA, 120 bp, synthetic construct
  source 1..120: mol_type = other DNA
tgcaaagtactggcttctagttgggtctctgttgcctgccaatggaaggcatgagcccttcccaactataggcatttgctctttagggcctgttatttcttatgattgttataaataaat

SEQ ID NO: 28473 - DNA, 120 bp, synthetic construct
  source 1..120: mol_type = other DNA
cgggactgtcccatggtttaacaaggttatggacacatagccttgttccattttccactttgctgtcatcattctcaagattgtcactccatgttttaagttggcagctgcatcaccagg

SEQ ID NO: 28474 - DNA, 120 bp, synthetic construct
  source 1..120: mol_type = other DNA
ggttagaggcagactagattcaaaaacttaagtatagagaggctgtaaacagtaaagtcttaaaaataggattaggccccagagtgtaatggagagagctccgggctaagatcaggcacg

SEQ ID NO: 28475 - DNA, 120 bp, synthetic construct
  source 1..120: mol_type = other DNA
aacgatgccttagatatgagaccgtgtgataacagccatagctggggtcatgagacacacgctagggggaggataatttcttttccttgagcttttttttttactgaagcatattgctaa

SEQ ID NO: 28476 - DNA, 120 bp, synthetic construct
  source 1..120: mol_type = other DNA
gaagggtaagagattttatatttgtaagaaggatgaaaggaaactggcctaaatgttaggatgtaggttaaaatcaaccaggacgcacatagggcagagtccagggtgtgaaggaaggtt

SEQ ID NO: 28477 - DNA, 120 bp, synthetic construct
  source 1..120: mol_type = other DNA
tgaatccttcagtcattcagaatcagatgttgcatgtcacaggttgtgccttctcttgctgtcctctttcccagtgctcggtaaatcttgattaaaggaaggaaggaaggattgtttcag

SEQ ID NO: 28478 - DNA, 120 bp, synthetic construct
  source 1..120: mol_type = other DNA
aagtagctttagttttaagacatcttttcatctttcatgaagaaatgaagtttctatctcttcctgaggcttgccattccttcgggagggcagagctgtctctcatcaggacgtggagct

SEQ ID NO: 28479 - DNA, 120 bp, synthetic construct
  source 1..120: mol_type = other DNA
cgtgggtaagaattgtctcccactttaaccccaacttccttggccccagctcctcctccaaaactgaaaattattgttggggaatcaatcttagttattcatttctgcagaactaatttt

SEQ ID NO: 28480 - DNA, 120 bp, synthetic construct
  source 1..120: mol_type = other DNA
attttcctggcttttgactctcccaacaagaggatctcctctggtgctaagatcacgaggtccactcgggggagatgtgggcattttcctggcttttgactctcccaacaagaggatctc

SEQ ID NO: 28481 - DNA, 120 bp, synthetic construct
  source 1..120: mol_type = other DNA
ttgactctcccaacaagaggatctcctctggtgctaagatcatgaggtccactggggagggatgtgggcagtttcctggcttttgactctcccaacaagaggatctcctgtggtgctaag

SEQ ID NO: 28482 - DNA, 120 bp, synthetic construct
  source 1..120: mol_type = other DNA
aggaaaagaaccacagccaaaaagagttatacatcgggtgggtgacctgggaggcgctccatggagaagctgtgttttaagctgaattttagaggaaatcaatattgggattggcagaaa

SEQ ID NO: 28483 - DNA, 120 bp, synthetic construct
  source 1..120: mol_type = other DNA
attagtcttgcaatgtgttctgagtggtggttctcacaaagaaaatggacagaacttgttgataactcatgtcgacagagttattcctaaaattatcttgttgaattggtactggcctaa

SEQ ID NO: 28484 - DNA, 120 bp, synthetic construct
  source 1..120: mol_type = other DNA
acaatagcaacagaatcaacaccatcacaattaagagcaacaacagcagcaacaatagccacagaaatagcaaaatcagcagtagcaacaacagaagtcgcagcaataacagcagcagca

SEQ ID NO: 28485 - DNA, 120 bp, synthetic construct
  source 1..120: mol_type = other DNA
tccagttgtcagtggggttaataataataacgcctatttcatagggttgctgcaaggattcaatgaggtaatacaggcatacctcagagatattggggattcacttccagactaccacaa

SEQ ID NO: 28486 - DNA, 120 bp, synthetic construct
  source 1..120: mol_type = other DNA
ttcacacggacacgagtgaaagttatttcttcctaagagggacgcttgagagcggataggactgctggaaaagatcccttcgctaccgacaagtggtcacctgaacagtgttactgtaat

SEQ ID NO: 28487 - DNA, 120 bp, synthetic construct
  source 1..120: mol_type = other DNA
tcagctctttgcaagtttacatcagaaaagcatgctcttggccacctagaagttatgaaaatgtccccattccccactgacagataagattcctataggaaatgggctgatttcctcttt

SEQ ID NO: 28488 - DNA, 120 bp, synthetic construct
  source 1..120: mol_type = other DNA
ctttggagattgtgacattagaatagaggaaaatactttcaggactctcagggagaggtgaaatgttcatgtatatcaaacaaagcaggagttaactgcatggactgaataaaagaccga

SEQ ID NO: 28489 - DNA, 120 bp, synthetic construct
  source 1..120: mol_type = other DNA
ccccaactggcaaggaatccagttagccatcacgctgcccagctttctcttcctcctttattactggtaatgtggttttggttatcatcatatttatactgattctgcagaaattagact

SEQ ID NO: 28490 - DNA, 120 bp, synthetic construct
  source 1..120: mol_type = other DNA
gctgagaacacccattgatctgatgtcattattaacatgtagaaagttgataagcaggcctgagttatgtatgtggctcctcctggtctagttggtgttctgaaaatccttttctcagtg

SEQ ID NO: 28491 - DNA, 120 bp, synthetic construct
  source 1..120: mol_type = other DNA
ggcgatgatgttgatggggatgatggtggtagtggtggacggtgatgatgatgattatgtgtaatcttaatcctcacaattatctcatatgtaagatgagaaagcggaggctaaaagaga

SEQ ID NO: 28492 - DNA, 120 bp, synthetic construct
  source 1..120: mol_type = other DNA
cctttcaggccactggtacttaggaccaagagattttctccctattggaatacaggtagaaatagaaacagatcaattcacctgtccataagtaagcacataaactttcctcatgagccc

SEQ ID NO: 28493 - DNA, 120 bp, synthetic construct
  source 1..120: mol_type = other DNA
ggaaattttgcatgtttccctagatcgttgatcatgaaagccaaggcctctggcttccaggccatggggcagaaaacgatcctatatatctgactgaaggcaaagacactttgcttctca

SEQ ID NO: 28494 - DNA, 120 bp, synthetic construct
  source 1..120: mol_type = other DNA
caggggcaccccacactctctcctttgtgctgcaacaaggtcattaccggtgcctttctaatattcccattaaaagtaccatatgattgccaccagcaaaaatggctctcgatcactaat

SEQ ID NO: 28495 - DNA, 120 bp, synthetic construct
  source 1..120: mol_type = other DNA
aatgtattatgggccatggggttccaacactgtctctctagagactctagacttgtggcctagtctcaaccccagaccctccattccaggaagctggttcaatgagcaactggatgtata

SEQ ID NO: 28496 - DNA, 120 bp, synthetic construct
  source 1..120: mol_type = other DNA
aaactcccttgctctttactgtgacttgcttcccacatgcaggaaatcttttcatattttcctacatgtctgtgaggctcgcttaattttatatttcactgtttcttcaggggtgcgcgt

SEQ ID NO: 28497 - DNA, 120 bp, synthetic construct
  source 1..120: mol_type = other DNA
aaaacacgggaaatcaagctgagtatctctgagcatagagaaacatgtgaagccatttgtgacacaaccagaaaggagtctatgagaattacgaccgttctcttttccttatccataggc

SEQ ID NO: 28498 - DNA, 120 bp, synthetic construct
  source 1..120: mol_type = other DNA
gacaaagcccaaccacgttgcaccagaaatcactccgctggctcccccagagagtgcacggaggcttcctcctacatggtagaactcaggcaacactcgagcatccgtttaccattgaag

SEQ ID NO: 28499 - DNA, 120 bp, synthetic construct
  source 1..120: mol_type = other DNA
ccgttccaggtcaaccctcacactctatgtactcaatacgtagtgaaaaggctctacctttcccacagaaaagcattgtgcaaatagtattactgtctgtcaggtttagtaggtttgttt

SEQ ID NO: 28500 - DNA, 120 bp, synthetic construct
  source 1..120: mol_type = other DNA
tatctacatttgccaattgctggattcttcattacgtgggctgcagaaagttcctttcttgttcaattcttcttctacctaattccttcgggtcacctctcttgttacataagcctgctg

SEQ ID NO: 28501 - DNA, 120 bp, synthetic construct
  source 1..120: mol_type = other DNA
ggtcatgggtcacacgaaacgcttttctacatgtagtcagattttaaatttaggactcactctgcggataccgcatagctgaggcaatcgactttgttgtttacttctaaagagagttga

SEQ ID NO: 28502 - DNA, 120 bp, synthetic construct
  source 1..120: mol_type = other DNA
tctcttgctgggaacctgtatcccttcaggccactggtacttaggaacgagtgtttttctgacaatcggaatatacgtagatatagaaacagatcaattcacctgtccataaataagcac

SEQ ID NO: 28503 - DNA, 120 bp, synthetic construct
  source 1..120: mol_type = other DNA
tatgtatctgactgaagacaaagacactttgcttctcagggatgtgtgcacgccaaaagcttcttcccttggaggagagagggaatcctctcatgccctgcatcctgaattgtagtaaag

SEQ ID NO: 28504 - DNA, 120 bp, synthetic construct
  source 1..120: mol_type = other DNA
ccattccaggaagctggttcaatgagcaactggatgtataagagcctgagctcttgaaagacttctagttcttccttggcttccctcttttgaatgcatggactattcttattataccaa

SEQ ID NO: 28505 - DNA, 120 bp, synthetic construct
  source 1..120: mol_type = other DNA
aacgactggaggagacttctatgcgtatttgtagagctcttttcctccacaaaccagttcttatttctagcagacctagaaaaatttcagctaccacagtcatcccaaactccaatccct

SEQ ID NO: 28506 - DNA, 120 bp, synthetic construct
  source 1..120: mol_type = other DNA
tcttcctgtgacagtggtggagtatgtgcctcgataactctgtccattaccatggtagcactcctgcaccccaggcctttgctcagtcggtgctgaaatgaaaacacgggaaatcaagct

SEQ ID NO: 28507 - DNA, 120 bp, synthetic construct
  source 1..120: mol_type = other DNA
acacctgacagcatgttacaataaaaattttggctgggacactgaggtagcccgttttacaacaaggtgaattttgaagtcgatccccctggagggtttgtgcccatcctaaagacaaag

SEQ ID NO: 28508 - DNA, 120 bp, synthetic construct
  source 1..120: mol_type = other DNA
aacgatacacgtcacaagaggtgggacaacatgcaggggcaccccacactctctcctttgtgctgcaacaaggtcattaccggtgcctttctaatattcccattaaaagtaccatatgat

SEQ ID NO: 28509 - DNA, 120 bp, synthetic construct
  source 1..120: mol_type = other DNA
cctgtaagtgagaagcaccagggacggaaagggaaagaaaggcttgaaataccagcaactgtggggatggatgctaggaggcaaattaatactagtgagacctggttggtggactagtac

SEQ ID NO: 28510 - DNA, 120 bp, synthetic construct
  source 1..120: mol_type = other DNA
catgtgtgatgtatgtgtggtgtgtgtgtatgtgtgatgtgtgttatatatgtgtggtgtgtatgtgtgatgtgtgcgttatgtttatgtgtgtggcatgtgtgacatatgtgtggtgtg

SEQ ID NO: 28511 - DNA, 120 bp, synthetic construct
  source 1..120: mol_type = other DNA
cattcctccactcattcattccttcctcacccattccttcctcattcattccttcctcactcattcctccactcattcattcactcattcattcctccactcactcattccttcctcatt

SEQ ID NO: 28512 - DNA, 120 bp, synthetic construct
  source 1..120: mol_type = other DNA
atttatttctggatttttttttccctaaataaaacctgtatctacatgaaaactcctccaggatttcctttcctcatgaagtgtgtggtttcctcaaggactgcctgggaggccctgagg

SEQ ID NO: 28513 - DNA, 120 bp, synthetic construct
  source 1..120: mol_type = other DNA
ggttaaatttttaatgatttgtaatgtcctggtaggttcctgcattcatgaactgcttgggtgaatggctgtgatttggaagtgaggatgggagagaaagagagaaaggcatgatgggaa

SEQ ID NO: 28514 - DNA, 120 bp, synthetic construct
  source 1..120: mol_type = other DNA
acaaggattgagtttgttggagtcactttagaacattagtgccacactggtccataaatatgttcattttgcggggggtgggggagactgcaacaacatcatactgtatcaatgatgaat

SEQ ID NO: 28515 - DNA, 120 bp, synthetic construct
  source 1..120: mol_type = other DNA
tgtgacttcttatagttagaggtcaaaaagccataagatattcaataacttagaggcttgaagaaagatcccaaagggtctccaaggctggaaggatgggctgaaccgaaccacaagaaa

SEQ ID NO: 28516 - DNA, 120 bp, synthetic construct
  source 1..120: mol_type = other DNA
tcagaatgtgtattctggctgtctcctaagatacaagtgaaaggactgatgttgatgatagctcgtatataaacatctttaacagaagactagataattacttgaaacacctggtaggtt

SEQ ID NO: 28517 - DNA, 120 bp, synthetic construct
  source 1..120: mol_type = other DNA
ataatggcactgtgccctcttcaaagtcattatacagatgaaatcatgccaacatgtccagtagaaacagtcttgaaaagggaaataagttagaaaaggccgctgtctcagccatgccag

SEQ ID NO: 28518 - DNA, 120 bp, synthetic construct
  source 1..120: mol_type = other DNA
acaacccaaacaggattgggatcttgagtttaggatcttcagactcctttagttctggtcccctacaatttgtactgatggttccattgctgttctagaatcctgggcacttttaaaaaa

SEQ ID NO: 28519 - DNA, 120 bp, synthetic construct
  source 1..120: mol_type = other DNA
ctgtcacaggttgtacagccaatggtcaccacattgcagagtatatatctggtgtttcaagtgggttttagggttccccagatttagaaatatgtacacctgaacataaaactgggttca

SEQ ID NO: 28520 - DNA, 120 bp, synthetic construct
  source 1..120: mol_type = other DNA
atttttgtggtcgtgggacacagaaccccgtccatggctgaactaaggaaaagtcctgcaacatcagaaccttcagttccgcataattaaagctcaatgcaaaagaatcatgagcataag

SEQ ID NO: 28521 - DNA, 120 bp, synthetic construct
  source 1..120: mol_type = other DNA
ttcttcctggcctgtgaacttgctaagggtatggcgttgtagggactgtgaaagatgaatgggacctacagactggtttatcaggtatgagggaaacatttaaatatttacacaaaatgc

SEQ ID NO: 28522 - DNA, 120 bp, synthetic construct
  source 1..120: mol_type = other DNA
gtcacaactttgctgagaaggaggctgtcagtttatggtacatgtcttcaagaagtctaacttaaaacaaaagttggctaatataacaacccacatccgccccttctctgcctgattgta

SEQ ID NO: 28523 - DNA, 120 bp, synthetic construct
  source 1..120: mol_type = other DNA
ggtttgcagtcattactgacccttataaaatgcgtgaaaactaggaaaactaatattctctttcccagctcaaggtacttgctccaataagctcagatggctgtacctccttttcccctc

SEQ ID NO: 28524 - DNA, 120 bp, synthetic construct
  source 1..120: mol_type = other DNA
ttaacaaaggctttcaaataattggtcagtacaaattcaaggtcatccaatccctttatgctttatgaagactagaatctgttcctctcatactttttgatgtcccggcattacagggaa

SEQ ID NO: 28525 - DNA, 120 bp, synthetic construct
  source 1..120: mol_type = other DNA
agagaatcttcttaagtgtctcacatcagttaaattaccctccacctgttggaaataagcactgtggtcaatgaagggagagggatatgtagtacatgtgttacaggatttgcaagagtt

SEQ ID NO: 28526 - DNA, 120 bp, synthetic construct
  source 1..120: mol_type = other DNA
acaatcatattgaaaatactaagaaaaagatttaaacaaacacttcatcaaagaaaatacttgagtggcaaataagcatgaaaagatgtgcaacatttttagtcattagggaaacgcaaa

SEQ ID NO: 28527 - DNA, 120 bp, synthetic construct
  source 1..120: mol_type = other DNA
actttgataaataactctgtactaggacagtggcccgggagacagaaggagaagaagcatttgctcctgacttcaaggttcttaccatctccaggagagacaaatgtacaattataacca

SEQ ID NO: 28528 - DNA, 120 bp, synthetic construct
  source 1..120: mol_type = other DNA
atttcgtgagaaccaagaaaatcagaaaagctctctaattctatgcattttgtcccaattactcagtttctctatttcaagtaaattggatataacacttgaataggattctgccttgat

SEQ ID NO: 28529 - DNA, 120 bp, synthetic construct
  source 1..120: mol_type = other DNA
ttactacaccaggcaatgcttctctcccagacagcttgaatattaaatgtgtaaacatactagacagcaaagtagtgccgaaaccaagaaatggacacacggagagagagggggaaaggg

SEQ ID NO: 28530 - DNA, 120 bp, synthetic construct
  source 1..120: mol_type = other DNA
atctattgtgatatagtgatcacagaaactagtttcaccttctggtgtatttacaaggaagtaatcagcctgtgctcagaccacacttaagactactgtgtttgaaggcacgcaccacac

SEQ ID NO: 28531 - DNA, 120 bp, synthetic construct
  source 1..120: mol_type = other DNA
atgacacttaataagcatccttgctgggcacctggtccataagaacattgagaataaatactttcctgacattcagtcagattgattgatgcacatcaagtcaatgacactggggaacgc

SEQ ID NO: 28532 - DNA, 120 bp, synthetic construct
  source 1..120: mol_type = other DNA
acattctgcctgggaattagacagcaaagtgcaccagaaatgatgaaatgatggcaaggctataatttagagcacggacatacgtgactctcaagcggccatttatcactgttaagattg

SEQ ID NO: 28533 - DNA, 120 bp, synthetic construct
  source 1..120: mol_type = other DNA
ggatgaggttactcacatgtaaggacagcatgggtgtgacaactgtttcagaaagcaaagtcccaaatgccccaaaattgtatttatgttcttttgtttgctggtggagagaatgtgagg

SEQ ID NO: 28534 - DNA, 120 bp, synthetic construct
  source 1..120: mol_type = other DNA
atcagccaatcacatagccatgaataacttcaaagaaggctgggaaatacagtccagctgtgtacctcaaaggaaaagggaaatggtctgaacagtgagtctttcccacactagttatta

SEQ ID NO: 28535 - DNA, 120 bp, synthetic construct
  source 1..120: mol_type = other DNA
gtggtggaaggtttgttccaggacccctttcagatgccaaaaaccatggatgctcaagtacctgacatgaaatgacatagtatttgcatataacctacacacatcctcctgtatacttta

SEQ ID NO: 28536 - DNA, 120 bp, synthetic construct
  source 1..120: mol_type = other DNA
caagatgttcactcctatacgttgatcttcccaggtcagcctgcacttcagactatacttaccaaattgttattcaatcatctctatttcccttgatgcctaaagtgtccagtccagact

SEQ ID NO: 28537 - DNA, 120 bp, synthetic construct
  source 1..120: mol_type = other DNA
actgctttatgaaagaacaggacaatggcatctcaacatccatacattcctcttcagactcaagtagtggcatacccagtattccactgcaggataacactcagaatatggaaaatcggt

SEQ ID NO: 28538 - DNA, 120 bp, synthetic construct
  source 1..120: mol_type = other DNA
atttaaaaagtgaaaagccaaggccacgtctatgtgcggcctcgccctccttccctgcgaaccctggagaacacggccttgtgatgaagcaaaccccagtctcctcgctttgcatgggct

SEQ ID NO: 28539 - DNA, 120 bp, synthetic construct
  source 1..120: mol_type = other DNA
ttcccaaattcctgcctctttctgagacctggttcttcacattgttctttgattcagttcgctacctcctacctttccagtaggttctctttatgttccagttatctgaagttagtttcc

SEQ ID NO: 28540 - DNA, 120 bp, synthetic construct
  source 1..120: mol_type = other DNA
tcaatgggagagcacttaagctagtgccttccacacaatggtcacttaaaaatgtccttagttaaatgaaatcggatgcgcatgagttcagcgtgaggtccgggtcagggagaggaaggg

SEQ ID NO: 28541 - DNA, 120 bp, synthetic construct
  source 1..120: mol_type = other DNA
ggtgattcagagatcaaggcaccttcacagattttcataagcagagctggggaaggaactccagcaggaagaaatgactcaaggccagatgaggaggtggggaggccctgactcttgtct

SEQ ID NO: 28542 - DNA, 120 bp, synthetic construct
  source 1..120: mol_type = other DNA
tcacatgtctttatatcataccagataactggtgtagtgtatccttttactgtttcaataacctctgcctcccccaccccttaactttaaaagaatgtgaaaaactagcatcatagtgca

SEQ ID NO: 28543 - DNA, 120 bp, synthetic construct
  source 1..120: mol_type = other DNA
tttttgctgcaggtctatagtacaggtaacacgttactgaacacttcagatagaacaagagcagcccagatttgcccccttcatttgctgttttctaacctaagaaggagagtttctttc

SEQ ID NO: 28544 - DNA, 120 bp, synthetic construct
  source 1..120: mol_type = other DNA
gccacattcttgtaatatatgccatgaatccccatcgtggcaataaatattttaatcattttcccatctgaaaacattgtgtgtgtctgtgtgtgtgtgtatcctgcctctctgcctgag

SEQ ID NO: 28545 - DNA, 120 bp, synthetic construct
  source 1..120: mol_type = other DNA
tcattcagtttataaggatgaaatgcagcacgtgtttaacagcatcaactttagacagctctacatcacctgtgtatctgctacaatccagaatccagatctgaggttcaagtgggccct

SEQ ID NO: 28546 - DNA, 120 bp, synthetic construct
  source 1..120: mol_type = other DNA
attcactctctgataacaattcctaggtctaaagactaacagcctgatgctgtatcataccccaaaccggcacattcaataatcatgaaagaggcatttgggaatttccagaggtggcca

SEQ ID NO: 28547 - DNA, 120 bp, synthetic construct
  source 1..120: mol_type = other DNA
ccagtgtagtgtagtgtagtccagtgtagtgtagtgtagtctagtgcagtgtagtctagtgtagtgtagactagtgtagcatagtctagtgtagtgattggtgtgtcatctcaggaatca

SEQ ID NO: 28548 - DNA, 120 bp, synthetic construct
  source 1..120: mol_type = other DNA
ctgaggctctattttgggaaccagaactaagacatctacactcatttaagacaaagtgagggtgtggacaggagcatttggactgtcagggtctgacatctgggatatgctcactaaatg

SEQ ID NO: 28549 - DNA, 120 bp, synthetic construct
  source 1..120: mol_type = other DNA
ccagaataatctctataacaaatgttcctaactagccctcatcttctgttagtttcccatagacttagcttcccacagtctgctgccttagaaacacagtcctttttctttgtcttcttt

SEQ ID NO: 28550 - DNA, 120 bp, synthetic construct
  source 1..120: mol_type = other DNA
aaccatcggaggagaaacaggattgaattcagccctgaattatttgctcatttcctgccttgggggcatagatttcattagcaccgagttactcttcaagccattttcagaaatgaaaag

SEQ ID NO: 28551 - DNA, 120 bp, synthetic construct
  source 1..120: mol_type = other DNA
aggggtggaggccagggtgtgcagaacccagccacccataacagccccaccacacagcatcgcgcaggtgccacccagggtgaaggtgggagaccctggccctgcctgcttccttctcta

SEQ ID NO: 28552 - DNA, 120 bp, synthetic construct
  source 1..120: mol_type = other DNA
cggcttcgagtatgcggggcagtgggtgggtatttcgctgtgtccattttccttatattcactttctatttgaatgacagagaattatacccagaaacagactagtttagatttgaaagc

SEQ ID NO: 28553 - DNA, 120 bp, synthetic construct
  source 1..120: mol_type = other DNA
tgcaatgaatttttatcaaattcataacatagatgcatacatcttattttggaaaatgaaatggcatttattttctccacagaaaaagtgccaaaaaatgggcagtaataaaatttccat

SEQ ID NO: 28554 - DNA, 120 bp, synthetic construct
  source 1..120: mol_type = other DNA
cgtgtggtgacgatgttgctacaacgatgtggggtgcaggaagctcgagtttcaaaagaagatcataagtaacacatttttccttctagccagaatgccctgaaatacatgaaaaaagat

SEQ ID NO: 28555 - DNA, 120 bp, synthetic construct
  source 1..120: mol_type = other DNA
gaccaacagaagacacccaaacttttctcatggtaacagagtaaatgcttttactaaaagctgccaacatttctatcagtagtaaccgtaaggaggccgctggttgtaaccataatgtcc

SEQ ID NO: 28556 - DNA, 120 bp, synthetic construct
  source 1..120: mol_type = other DNA
cctagtacgggatctggcacacaggaagcactaattgactacttgctcttagactacatgtattttcagcccatttgacctcctacatcgctgatggtttatgtatgacttctagaaatt

SEQ ID NO: 28557 - DNA, 120 bp, synthetic construct
  source 1..120: mol_type = other DNA
tttgcctcactggtgtgcttcatttctttcaatattagacttaaaagcaagccctcctccagtactggattaacagttttgtttgaaagatgtgttttaccctcgggaaccggccatact

SEQ ID NO: 28558 - DNA, 120 bp, synthetic construct
  source 1..120: mol_type = other DNA
tctccgagatgtcctagggcacgatatgattgagtgtgcaaattgggctacttccgtttgggacaatgcaaaggtgttcctactgctacacaacaaggaagccaggactactctgaggag

SEQ ID NO: 28559 - DNA, 120 bp, synthetic construct
  source 1..120: mol_type = other DNA
gggttccagtaacacaggggactctaactgcaatgcagatggtgagtctcgtgggcacctaggcagatgtcaccaatggaccgaaagctgcacctcgcccaccattaggaggtgggtatg

SEQ ID NO: 28560 - DNA, 120 bp, synthetic construct
  source 1..120: mol_type = other DNA
ggttccttctcccagattgactaaagaactgcagggacatgggtgcaatgggcttgcgtctcctgttacaggctatgggtctgcattttacccacaggtacactttgatccccacctcca

SEQ ID NO: 28561 - DNA, 120 bp, synthetic construct
  source 1..120: mol_type = other DNA
aggctctccttccggaggaaacttctctgctccagatccctcccaggcaaggctgccaacttagcaagataaaaagcacctcagcaggtagaatttgaatttcagataaaccacaaatgt

SEQ ID NO: 28562 - DNA, 120 bp, synthetic construct
  source 1..120: mol_type = other DNA
ccctggatgtgtggcagagccggtgtttcactgagctccccaaatgcacatcccattaccagaagtgcaccatgacttatctgaacttacatgaattttaaaatgtatttacacattaaa

SEQ ID NO: 28563 - DNA, 120 bp, synthetic construct
  source 1..120: mol_type = other DNA
gtagtctgtaggctgttccttaattttggtttgtttgctgttttctcatgattaggctggggctgtgggtttgcggaggacagctccctggtgaggcactttcttgtcccgtcatatggg

SEQ ID NO: 28564 - DNA, 120 bp, synthetic construct
  source 1..120: mol_type = other DNA
gctcttttcacaaacagggtcactgtggggcccatggcagagctctcactccgctctctcctctgcagctctctacggcgttctgtttgagaagagcaaggaagctgccttcgccaatta

SEQ ID NO: 28565 - DNA, 120 bp, synthetic construct
  source 1..120: mol_type = other DNA
tctctcccttgttcttcctagcagcactgccgcctgcccatctccaaggcttcttccttgtccactgcactcaggtccccaggccctccccagccctcccccattactagcaccaccttg

SEQ ID NO: 28566 - DNA, 120 bp, synthetic construct
  source 1..120: mol_type = other DNA
cttggtgattagtacaacagtaagttacagtttgtttaccctcccgttagctgacagctcactgtgtatgaaggaacctttagacccaacttataaggaggcaatgttaggcgaaattca

SEQ ID NO: 28567 - DNA, 120 bp, synthetic construct
  source 1..120: mol_type = other DNA
ggaccttgggtattgtgactgtgccatagtaaacacaggtgccgttgcctcttggatgaactgtttcctttccttcctacagatgtccagtgtgggggcagctgaggatcatgggggttc

SEQ ID NO: 28568 - DNA, 120 bp, synthetic construct
  source 1..120: mol_type = other DNA
ttaattagattatgtatgagggattacctgatttaacaaataggggcggtgaggagggtgctgtgtcttagaagtatttttccgtagtgtgtcttaggtccctagattcaaggaaaccca

SEQ ID NO: 28569 - DNA, 120 bp, synthetic construct
  source 1..120: mol_type = other DNA
gacacagagggatgtaggtgtgagggtggaaaccatccacaggagagatgtgtggacagacacagagggatgtaggggtgagggtggaagccatccacaggagacgtgtggacagacaca

SEQ ID NO: 28570 - DNA, 120 bp, synthetic construct
  source 1..120: mol_type = other DNA
gaggtgtgtggacagacacagagggatgtagggatgagggtggaaaccatccacaggagaggtgtgtggacagacacagagggatgtaggggtgagggtggaaaccatccacaggagagg

SEQ ID NO: 28571 - DNA, 120 bp, synthetic construct
  source 1..120: mol_type = other DNA
tgaaccccaaagaccacccactccgccatgcaggcagtcagtgagtattgactcaactgatacttttgacttagagaaagttttgatggtattcatggatacagcaaaattatctgaagt

SEQ ID NO: 28572 - DNA, 120 bp, synthetic construct
  source 1..120: mol_type = other DNA
ctgaccctcccgccactccaaggtgctgcgcttcccggctgtcccaacgccatatggggttggccgtatgcaccagtttgctaggggcactgggtcccactcctgactttgctttgctca

SEQ ID NO: 28573 - DNA, 120 bp, synthetic construct
  source 1..120: mol_type = other DNA
agaagacaccttcaggcgtggcctcgggcaggtgagaagacacctgaggcgtggcctcgggcaggtgagaagacacctgaggcgtggccgcgggcaggtgagaagacaccttcaggcgta

SEQ ID NO: 28574 - DNA, 120 bp, synthetic construct
  source 1..120: mol_type = other DNA
cttctcagagcttcctaagaagctccataaacgtgtgtgtggactggcacattgtttgtgttcatcggcttttggttttgaaacatgttgcattttttcagattcatgatggcttgcaga

SEQ ID NO: 28575 - DNA, 120 bp, synthetic construct
  source 1..120: mol_type = other DNA
gtctgcacttttcctcccccttagctctcccttccttctccactgtttttggttttcatctgtaattcttaaccctcgttacgggtcctgaaaaacaggaagagacagcattcctcagga

SEQ ID NO: 28576 - DNA, 120 bp, synthetic construct
  source 1..120: mol_type = other DNA
tggttgctggcatgttggcactttcagatgctgctcttctttccagcttgcatgttgtttttctattttaaaggaggcgatgcgaagttactggtgattctctgcatttctcccagccag

SEQ ID NO: 28577 - DNA, 120 bp, synthetic construct
  source 1..120: mol_type = other DNA
ccaggtggacacatggtcctagaacactctgaatggctctgtcttctcactcctactcaactgagtataaaaagacatgagtctaacccaggctttctgatgggagggaagctggtagga

SEQ ID NO: 28578 - DNA, 120 bp, synthetic construct
  source 1..120: mol_type = other DNA
ctggaggacggctccttctcatggagcccgtggacctccaagggcacgtccacagacatctctctggattccctgagccaggagttggccttgatgcctgacgtgtaggaactgccgtgg

SEQ ID NO: 28579 - DNA, 120 bp, synthetic construct
  source 1..120: mol_type = other DNA
atgtgtgactggtgtgtgcatgtgtgtggtgtatgtatgtgtacatgtgagtagtgtgtaattgtgtgcatgtgtgtggtttgtgcatgtgtacatgtgagtggtgtgtaactgtgtgca

SEQ ID NO: 28580 - DNA, 120 bp, synthetic construct
  source 1..120: mol_type = other DNA
cactcagtggaataggcctccatcctgccgctgctttctgtggtcttttctttcttttaaacccttggttatagatagaacgttgtcctttacacttaagctctacatgataagagcaaa

SEQ ID NO: 28581 - DNA, 120 bp, synthetic construct
  source 1..120: mol_type = other DNA
tggaactgggaggctctggatgaagcaaggtgctctgagagctggaacattgggggctctgaatgagttgaagcactgctttgaaagctgaaactggggtgctctggatgaagcgaggtg

SEQ ID NO: 28582 - DNA, 120 bp, synthetic construct
  source 1..120: mol_type = other DNA
aagatctccttatgcccagacttgcagcaggtgaggttgacaagtaaggggtccatttgaggtaaagaactttcaactcaatttcctcaaacagcacagcttcccagcttccttagagtc

SEQ ID NO: 28583 - DNA, 120 bp, synthetic construct
  source 1..120: mol_type = other DNA
agaaaactaacattttcgcaggaggcagagatcaggacccaggttctcaatcgaatcgtctgggtccccttggatcacactgttttagagtggaatatattgagtcatctgggtcccctt

SEQ ID NO: 28584 - DNA, 120 bp, synthetic construct
  source 1..120: mol_type = other DNA
aggttctcaatcgaatcgtctgggtccccttggatcacactgttttagagtggaatatattgagtcatctgggtccccttgcatcacacagttttagaaggaaatatatcaaatcgtctg

SEQ ID NO: 28585 - DNA, 120 bp, synthetic construct
  source 1..120: mol_type = other DNA
tgtccggcgggtagtttagctgtgccagaaaatgtcgaggctatcagcgaatttgtgaattatatactgtaataaaaacagagctacttcttcagtaaaagaggtcaggtcattggggtt

SEQ ID NO: 28586 - DNA, 120 bp, synthetic construct
  source 1..120: mol_type = other DNA
atacttctcatttaacctctgtaatcttgtcactgggtaatcactccccaggtagcatgtttgcttttgctatcagtaaaggtcggagtttatctgatcttttgtgcgttgcagcccaga

SEQ ID NO: 28587 - DNA, 120 bp, synthetic construct
  source 1..120: mol_type = other DNA
agaactcagggactgtgtaagaatctttgtccctggcagcatcctccaggtgggaagtgactggcctgcttctagcactggaaacggtttcacgtgagattttcaataggatcccagatg

SEQ ID NO: 28588 - DNA, 120 bp, synthetic construct
  source 1..120: mol_type = other DNA
atatgccctcggtcctctggcaggacaccctccctgccacggccagtcttgcagtctaaggagtgcagaggagtctcaggtggctggagcccacagggtggatggatgcagttctgtcag

SEQ ID NO: 28589 - DNA, 120 bp, synthetic construct
  source 1..120: mol_type = other DNA
gaccgctgctggaatatggtggagtggggtgaccgctgctggaatgtgagggggagtggggtgaccgctactggaatgtgggggagtggggtgacccctgctggaatctggggagcagag

SEQ ID NO: 28590 - DNA, 120 bp, synthetic construct
  source 1..120: mol_type = other DNA
gttcaatgtccaggaagagtccttgatgttcaggacatcccgcagttcatggagcccctcagtggaaatacttctttgctttatttagggatgataatttttgttatatcggacatatta

SEQ ID NO: 28591 - DNA, 120 bp, synthetic construct
  source 1..120: mol_type = other DNA
actgacaaacagtcttcaaggtcatatttattttttaaaactctttcaataactgaagaagaatgcgtcctctgtgcccacctttctggccctgagatgtgaggctctcactgcgttctt

SEQ ID NO: 28592 - DNA, 120 bp, synthetic construct
  source 1..120: mol_type = other DNA
aggtactgttttcctctttacatatgaaaaaatgcaaacgttcacccaaacaagaggcgagggctagatgacccgcctgagcttcagcttgccttgtttattgtcagagggtgcgtttct

SEQ ID NO: 28593 - DNA, 120 bp, synthetic construct
  source 1..120: mol_type = other DNA
ggtgtgtatggttctgtttagacggttgcatgatggaacatagttgaccaaaccgagttctgaggaatagattcgtatactgtgtgtagtattttggtagggacacttccatgaggaata

SEQ ID NO: 28594 - DNA, 120 bp, synthetic construct
  source 1..120: mol_type = other DNA
tccttggacgcgatgctcatttccttcccacatccccgggtgctgggaccagggctgcgtggtccctgaatgcgatgttcacttcctccccgcatccccgggtgccgggaccagggctgc

SEQ ID NO: 28595 - DNA, 120 bp, synthetic construct
  source 1..120: mol_type = other DNA
tgaacgcgatgttcatttcctgcccgcatctccgggtgctgggaccagggctgcgtgctccctggggacttggctgaaaggcagctctgctcgggctcccaggcgagcctgctgctggtg

SEQ ID NO: 28596 - DNA, 120 bp, synthetic construct
  source 1..120: mol_type = other DNA
taaggtgttggctgacactaaataacaatgttatgcatttctttaaaaacaaggtatgtctggggcagcatagtgttcccagagcagactggatgtggagaaaagggattcagagttcct

SEQ ID NO: 28597 - DNA, 120 bp, synthetic construct
  source 1..120: mol_type = other DNA
gcattagtttacggggcagccggtctggtggtggtcaggtgtggcatgagtttagggggcagccggcctggtggtggtcaggtgtggcatgagtttagggggcagccggcctggtgttgg

SEQ ID NO: 28598 - DNA, 120 bp, synthetic construct
  source 1..120: mol_type = other DNA
ttatagtaatatgattagtttaaaacttgaactttggttccttgtccccacttaacagaaccaagtgtctctgtcttgacatttccaccttggtgtcctgtgtctaccggtccctgtgtg

SEQ ID NO: 28599 - DNA, 120 bp, synthetic construct
  source 1..120: mol_type = other DNA
ctatagatgcagtatgttcctggataaagcacagaaagtatgtcgtgtctggatcatcaaaccataaattctgtgcactaataaaatttctgaagaagcgctgcggcggtgctgagtctt

SEQ ID NO: 28600 - DNA, 120 bp, synthetic construct
  source 1..120: mol_type = other DNA
ttcctcgttatcgttgaggcaaaagcctctttactataacccagaggtaggttttgttttatgcacctgtgcatttgctgagcaaaacctggagcccacacagaacttataagacacaat

SEQ ID NO: 28601 - DNA, 120 bp, synthetic construct
  source 1..120: mol_type = other DNA
accacacacacacccccacactgtttcacacacactcatacccacacacaaccactcacacgcacacaatcataccacacacacccacactcacacacacactgacacacacacattcat

SEQ ID NO: 28602 - DNA, 120 bp, synthetic construct
  source 1..120: mol_type = other DNA
gtcaccgttttggcttttgaaggttcttctttcattgtgtaggtttcctcctgggactatcacatcctgtgtagcagaaattctaaaaagaggcacaaaaccacaccttcttaaaccaca

SEQ ID NO: 28603 - DNA, 120 bp, synthetic construct
  source 1..120: mol_type = other DNA
gaaggatgtaggcagttttcttttcctactagaagactttttggctaagtgatactggtaagctttgacttactagccatgtggttttgcttatctagggccccgcagcactggtcttga

SEQ ID NO: 28604 - DNA, 120 bp, synthetic construct
  source 1..120: mol_type = other DNA
cagtctaagaaatggtctttattttggtcaaacagcctctcacccaagtgtttctggaagctctatggacccagcagacttcatgaatggtcaaggcctctccctaaagggcatggcaca

SEQ ID NO: 28605 - DNA, 120 bp, synthetic construct
  source 1..120: mol_type = other DNA
acctacagccagcacagggggcctcttcacacctacagccagcacagggggcctcttcacacctacagccagcacagagcctcttcacacctacagccagcacatggagcctcttcacac

SEQ ID NO: 28606 - DNA, 120 bp, synthetic construct
  source 1..120: mol_type = other DNA
ccagcacacggcctcttcacacctacagccagcacagggtctcttcatcttcatacttacagccggcacagggcctctttacatctacagccagcacagggcctcttcatacctacagcc

SEQ ID NO: 28607 - DNA, 120 bp, synthetic construct
  source 1..120: mol_type = other DNA
agattgtgtttatggcctgggagtgcaaaaaatcaaatatgctgtttaattgttgggcgtctgtttgcagaaataataatgataattggcgactcatcacatgccacttgcccaggagag

SEQ ID NO: 28608 - DNA, 120 bp, synthetic construct
  source 1..120: mol_type = other DNA
tccaaccaaatgttaggaactcaccaaccctgctcctgagctccaaccaaatgttaggaactcaccaaccctctacctgagctccaaccaaatgttaggaactcaccaaccctctacctg

SEQ ID NO: 28609 - DNA, 120 bp, synthetic construct
  source 1..120: mol_type = other DNA
ccgtaaaatcattgctgtggcccagaccagttattccaatggttatagcagttttaacaattgaaaatacttttttttgtgggcctggcctacccaaccgtgacaggaagtaagagaaac

SEQ ID NO: 28610 - DNA, 120 bp, synthetic construct
  source 1..120: mol_type = other DNA
atgtattgataagaattttgaggtgtcatttggcaaacagatcaggagacaattgaaaagataatttgttactcacagatcccaaggagaagaggccatgctgtgctgtcgggggccaca

SEQ ID NO: 28611 - DNA, 120 bp, synthetic construct
  source 1..120: mol_type = other DNA
ctgaataggaaaggctgctcctcacggtctctggggatgggctagctctgagagggcagcctcttcagcctcttcagatgtcaaagcattagataaagaaaatgaaagtcatggttaata

SEQ ID NO: 28612 - DNA, 120 bp, synthetic construct
  source 1..120: mol_type = other DNA
gatggatggataagatggatggataagtgctgggtggatggatggatgatgagtgggtgggtaagtggatgagatgagtggatggatggatgagtaggtgggtggatgagatgagtggat

SEQ ID NO: 28613 - DNA, 120 bp, synthetic construct
  source 1..120: mol_type = other DNA
cgctctgtaactcacaccctagtctgcacagacgcagggaaaggctatttcagagagacacagttctgtgcatctgcggcatcctctgtccacactcactactcagtccaaactcactcc

SEQ ID NO: 28614 - DNA, 120 bp, synthetic construct
  source 1..120: mol_type = other DNA
atccacactcattccccatccacactcactctatccacactcacttcccatccacactcactccccatccacactcattcccatccacactcgccatccacactcactcccatccacact

SEQ ID NO: 28615 - DNA, 120 bp, synthetic construct
  source 1..120: mol_type = other DNA
tcttgaacacatcccccatatgttctgacggctcctctcgactcttcatcctttttttttcatccccaaacaccctttcttatggctccttgctctgctttaaagaaaattcactatcct

SEQ ID NO: 28616 - DNA, 120 bp, synthetic construct
  source 1..120: mol_type = other DNA
ggtgaagatcccatctttgaaatgcctgacttctctcggacagtccattattgaggaaagacttagacattttacagcgctgtcaggcattccgtgattgagtttttaatcacttggtta

SEQ ID NO: 28617 - DNA, 120 bp, synthetic construct
  source 1..120: mol_type = other DNA
tgctctaggttgaagggaagactgagaccccaattcttcccatatttagaatatcaaaggccgttaacttctcattgttaatccaaggactctccctctccagaaacaacatttggtaac

SEQ ID NO: 28618 - DNA, 120 bp, synthetic construct
  source 1..120: mol_type = other DNA
aggctggcatcaaaaacgagtaacagatggttggccaacccacaggccagccactgcccatctcctgttaaaagaattttaaaaaaagacttcttagaaaagcctaattcataggagtca

SEQ ID NO: 28619 - DNA, 120 bp, synthetic construct
  source 1..120: mol_type = other DNA
tagttcacaggagtcacactgtggaaaagcctagttcatatgagtcacactgtagaaaatcctagttcatacgagtcacactgtagaaaatcctaggccgggcgcggtggctcacgcctg

SEQ ID NO: 28620 - DNA, 120 bp, synthetic construct
  source 1..120: mol_type = other DNA
catccatccacgcacacatccatctctcatctctcgccatccatccctcacacatccatctctcatctctctccatccatcccccccatcaattgagccactcatccatatctcatctct

SEQ ID NO: 28621 - DNA, 120 bp, synthetic construct
  source 1..120: mol_type = other DNA
catccccaccatctatccacttattcatctctcatctctccatccctccaccccaccatccatgcacacacgcatccatctctcatccctccatccccttctgtccatctctccatccat

SEQ ID NO: 28622 - DNA, 120 bp, synthetic construct
  source 1..120: mol_type = other DNA
gtttcctttatgtggcataggcaaagtttttgatacttaccatccacatgcagaatttgggatgagtgagagatcacagggtgcaagtctcagtacaggaaatgttacttcaacctgctc

SEQ ID NO: 28623 - DNA, 120 bp, synthetic construct
  source 1..120: mol_type = other DNA
atttcctaaaactaagtttaagatttccttcagcagtagatattatcaaataaataacaaaaaccaaggtttaaaacatcaggaaaaaattggtatactggataaaagtaatttcagacc

SEQ ID NO: 28624 - DNA, 120 bp, synthetic construct
  source 1..120: mol_type = other DNA
accatattgaacccacagtgacgctgagacccacagaaggtcacgttctcagcactgaggtggacaggttttttcaaatcgcaggaaaatacaaagtagcatgaagacaaagacctttgt

SEQ ID NO: 28625 - DNA, 120 bp, synthetic construct
  source 1..120: mol_type = other DNA
ggccctacccctagaatttctaattgagtaagtctagggtgggactgaagaatttgcatttctgagttcccagatgatactaaggctgttggtctaataaaagatgtgggagagagaaaa

SEQ ID NO: 28626 - DNA, 120 bp, synthetic construct
  source 1..120: mol_type = other DNA
cagagtcctcctgcatagcagacttgatgctggtcttccttagggcttccctccagtgtgctcctattgcacttgggacatttcccttccctgaacttccccttttcttctctcgtcttt

SEQ ID NO: 28627 - DNA, 120 bp, synthetic construct
  source 1..120: mol_type = other DNA
tgagatcatcttttgaggcgttcgaatgtgaaccgaaaatctggactagccagatgggaacatggagaggaaggaggagcgcctgcttggtaagaaatagaagtctgagtgcttggcaca

SEQ ID NO: 28628 - DNA, 120 bp, synthetic construct
  source 1..120: mol_type = other DNA
acaggctcacgctgctcggtgctgtgcacacgcgtccctaatcccagacgcctgggagaacacaggctcacgctgctctgtgctgtgcacacgcgtccctaatcccagatgcctgggaga

SEQ ID NO: 28629 - DNA, 120 bp, synthetic construct
  source 1..120: mol_type = other DNA
gagtcagccttagagaccacagaggctgctgaatgccaggcaagtcgtggcttttctacccacctcatactggggaggttttgaagttttttgaggtgatgtgatgagaaatctgttagt

SEQ ID NO: 28630 - DNA, 120 bp, synthetic construct
  source 1..120: mol_type = other DNA
ccatcaggcatctggcctggataaccttgagtgtcctttctagctctggaattctgtgactttctattctatttattgaatggtgggtgagacattagtaaagtgtaactcttaggagtc

SEQ ID NO: 28631 - DNA, 120 bp, synthetic construct
  source 1..120: mol_type = other DNA
gaactatgtcataacttaggagtgagtggggaaggtagaactatgtcataactcttagaagtgagtgggaaaggtagaactatgtcataactcttaggagtgagtgagaaaggtagaact

SEQ ID NO: 28632 - DNA, 120 bp, synthetic construct
  source 1..120: mol_type = other DNA
gaggaaggtagaactatgtcataacccttaggagtgagtgaggaaggtagaactatgtcataagccttaggagtgagtggggaaggtagaactatgtcataacttaggagtgagtgggga

SEQ ID NO: 28633 - DNA, 120 bp, synthetic construct
  source 1..120: mol_type = other DNA
taattaatgtttaataaccccattattctccgaaggcatctgtctttgcacacctgacctgctgttccaccaagaaagttccacaaacacttagcagcagccagcctaacctgtttttct

SEQ ID NO: 28634 - DNA, 120 bp, synthetic construct
  source 1..120: mol_type = other DNA
gggtgctgcatataaatctttgaaggtctgtgtccttcccacaaaatgaagacgactgtttttgtcataaatggatttttctacctaaatgaagtgggttctatatgtaacagtgtagta

SEQ ID NO: 28635 - DNA, 120 bp, synthetic construct
  source 1..120: mol_type = other DNA
gcacgttaatcacattaactagccatgttaactagtgacgtagattaataatgatgaatcaataggaatgagtcctgtatactgacggatatccgggcgataggattcttcagcgaggcc

SEQ ID NO: 28636 - DNA, 120 bp, synthetic construct
  source 1..120: mol_type = other DNA
ttccagaagaaggactgaactgaccagatttgcatgatatgtttttattgcactgggaattggggcctagaggcccactggggtttgattgtgctgttggtttcatgatggcctggattt

SEQ ID NO: 28637 - DNA, 120 bp, synthetic construct
  source 1..120: mol_type = other DNA
ttccttccatgacattccctctctggccgtccccctgctccacatcccacgtcactccaccagatacctctcagatcctcagatatttcttggatttttccatttttccatcttcctcca

SEQ ID NO: 28638 - DNA, 120 bp, synthetic construct
  source 1..120: mol_type = other DNA
actgtgacgcgtcggtcactgtcccctcggccccgcacacgtatccactgtgaggcgtcggtcactgtccccttggccccgcacacgtgctcactgtctccttcagggcccgagtttgct

SEQ ID NO: 28639 - DNA, 120 bp, synthetic construct
  source 1..120: mol_type = other DNA
gttggctacaaattccatcttgcgtcttggaaagaagcttccaggcatgcggcggctgcccatgacactggctgtgaccacctccaggtagaaatattcatttagtcattccacaaactc

SEQ ID NO: 28640 - DNA, 120 bp, synthetic construct
  source 1..120: mol_type = other DNA
cgtggtgtatggagaggatggggctgggtggggggggcagggcccctggtgtatggagaggatggggctgggtggggagcagggcctctggtggtagattcccagcctgtggggtgacat

SEQ ID NO: 28641 - DNA, 120 bp, synthetic construct
  source 1..120: mol_type = other DNA
acgtttcagagaggggtgatgcgtggagggactgaaacgaaggagcatggcagagacgggcttggtgaagggggcgttgttccactgaccttctggggtctctcccacaaactgagttaa

SEQ ID NO: 28642 - DNA, 120 bp, synthetic construct
  source 1..120: mol_type = other DNA
agtgagagcccggatggtgggcccagggcacagggcggagcctcgtctctagcagggcagggggctgcaggagccgttcttagcatctgggcacagggcggaggctcgtctccagcaggg

SEQ ID NO: 28643 - DNA, 120 bp, synthetic construct
  source 1..120: mol_type = other DNA
tgttgtgttttgtttcttagaaagcttctcagtgggtgttatgggtcagtggagagtgagcgccctgtgagagtcagggcaggcctggtccagcccccggcagtgaggatggagggactt

SEQ ID NO: 28644 - DNA, 120 bp, synthetic construct
  source 1..120: mol_type = other DNA
ccttgccggccccaggtagaggacgttcacgttgcttccagtttcctggcttatttttatagtcagaagaaaaatgaacttttttcatttgaagaacaatcctgaaatgagctttcgaga

SEQ ID NO: 28645 - DNA, 120 bp, synthetic construct
  source 1..120: mol_type = other DNA
tcacggggtcgcatggcggctgtcccctgagccttctctcacggagcagaatggcaccgtcacgggggtcgcacggcggctgtcccctgagccttctctcacggagcagaacggcactgt

SEQ ID NO: 28646 - DNA, 120 bp, synthetic construct
  source 1..120: mol_type = other DNA
gcggctgtcccctgagtcttctctcactgagcagaatggcaccgtcacggggtcgcacggcggctgtcccctgagccttctctcattgcgcagaatggcaccctcatggggtcgcacggc

SEQ ID NO: 28647 - DNA, 120 bp, synthetic construct
  source 1..120: mol_type = other DNA
tggaacctgtaaatgtcaccttctttggaaaagcggtctttggaggtgtggttaaattaaagacttcgagatgaggactttccctgggcccaaaatgcaatcccctgtcctcataagagg

SEQ ID NO: 28648 - DNA, 120 bp, synthetic construct
  source 1..120: mol_type = other DNA
ctcagaaggccccattctcagagctgcactgcacaccactagccaggtgtgcccattagatttaagataaaatcagacttaaaactcagtttctggaggctctggtcacatttcgagtgt

SEQ ID NO: 28649 - DNA, 120 bp, synthetic construct
  source 1..120: mol_type = other DNA
gacctgggcgccgcctctgcagtggatgtcccaggagctcagtttcctagcggctttatcaggcacccagtggtgcaggcctttgctccaggggcctacagtgaattctgactgcccaac

SEQ ID NO: 28650 - DNA, 120 bp, synthetic construct
  source 1..120: mol_type = other DNA
taattttgttttaaatttagccctggaatgagggcaggctttagctatgcaggcagttggtgctgtgtgcccatcagtgaggcatcgccagccccagtccctcaggggcctctcccaccc

SEQ ID NO: 28651 - DNA, 120 bp, synthetic construct
  source 1..120: mol_type = other DNA
ttcaaggtgccaccatcagggtttaaccaatgtccttctgtgcacagagagactgtttcttccatttctttgtttattttaactggtgaaacgattcacttttgggaggtcctagcctct

SEQ ID NO: 28652 - DNA, 120 bp, synthetic construct
  source 1..120: mol_type = other DNA
cccctaataagcaaagcatggaggcgagtaactcgggcaggaggacgtccattcccaggctcggaggcctcagagagatggactttgggcacttcaatagctaaactgtgggctgacgct

SEQ ID NO: 28653 - DNA, 120 bp, synthetic construct
  source 1..120: mol_type = other DNA
tgcctggggtgtcgggtacaggcaggtggacccatggcccagctcccagcccagcagcctgttaggaaccttgtacaggggcccttgacaattctgcttttcttctggaaggtttgggaa

SEQ ID NO: 28654 - DNA, 120 bp, synthetic construct
  source 1..120: mol_type = other DNA
atgtcttgctaggagacatttcccaagctcccttgcagtggagggatggcagctgagaaaaacacaaaagtcactgggtgggatttccaggatagctctctaagggtgttattttgccct

SEQ ID NO: 28655 - DNA, 120 bp, synthetic construct
  source 1..120: mol_type = other DNA
ttgtggcctcccaggagggaccctggcaacccagtaggggcgaccctcaggcctgcgtggggcagggctcacctggatgctgcagtgttggatgcgtgagggaccctggctgcttggtag

SEQ ID NO: 28656 - DNA, 120 bp, synthetic construct
  source 1..120: mol_type = other DNA
tcgttgctcctggggacccagacctggccctgggacttcaatttgggggaacaggactgagccttctgttgcagccacactggggctcagccaagccccactacaaggccccagggaagc

SEQ ID NO: 28657 - DNA, 120 bp, synthetic construct
  source 1..120: mol_type = other DNA
ccaccaccacgtcaccacccaaacccccacctcccacccaggtccttctccagagctactgccatcaccacgtcaccacccaaacccccacctcccgcccgggtccttcccgcagagcca

SEQ ID NO: 28658 - DNA, 120 bp, synthetic construct
  source 1..120: mol_type = other DNA
catgatcatcaccatcattatggccaccaccatcaccatcattgtcatcaccttcacatcaccattaccaccattaccttcatcaccattgtcatcacatcaccttcatcactatcatca

SEQ ID NO: 28659 - DNA, 120 bp, synthetic construct
  source 1..120: mol_type = other DNA
atcagtggtggcagcagcagcagtagcagcaaaataaaaaacaggcttggctggataaacacaatgtgggccactcaaacaacggaatattattcagccttgaaaaggaaggacattctg

SEQ ID NO: 28660 - DNA, 120 bp, synthetic construct
  source 1..120: mol_type = other DNA
aagggagatggattgctgtggaaggaaaacagctcaagggggaagggctggaggaaaggcacgtgatgttaaacgcctgtccctggaaaactatgacaaaaatgcaagctccagtgaaat

SEQ ID NO: 28661 - DNA, 120 bp, synthetic construct
  source 1..120: mol_type = other DNA
ggtgatggtaatggtggtgatggtgatggtggtgatgttggtgaggatagtgacagtggtggtgatggtgacggtggtgatggtgatggtggggatagagatggtggtgatggtggtgat

SEQ ID NO: 28662 - DNA, 120 bp, synthetic construct
  source 1..120: mol_type = other DNA
attatctccactctatggaagaaacagaggctcagggtcggtgtggcctgcctatgcccaccgagctgctaagtgctgaggccaagaactgaaacgggacaatcttgttccagaatggat

SEQ ID NO: 28663 - DNA, 120 bp, synthetic construct
  source 1..120: mol_type = other DNA
ctcccactttgcctaaggttttgtcaaaaccagtttatggaggcagaacttgcaaataggaacgtgcccaactcttgcagcacagtgagtttcacatcgctcagatcggggcctcacaaa

SEQ ID NO: 28664 - DNA, 120 bp, synthetic construct
  source 1..120: mol_type = other DNA
tcagggaatgaggacaccaccccctcgaatggctgcccaggcaagtggcaggacatccccctgccttggcaaagaggatgggggctctgggagcagagaagggtgagtctccacagagcc

SEQ ID NO: 28665 - DNA, 120 bp, synthetic construct
  source 1..120: mol_type = other DNA
agccctgaccctcctgattccagggtccataaataagtcattcttaaaatagtggttgttttctctctatttaagaagtgcttcttttttgagtccttgttcccaacttccctggcaact

SEQ ID NO: 28666 - DNA, 120 bp, synthetic construct
  source 1..120: mol_type = other DNA
aaaatatttcaacttataatggtaaaatattccattaaatgccttaagtaatcaaatggacactgtgtaccccccaccacccagctcaggaccctgctgcctccaccactctctcctgga

SEQ ID NO: 28667 - DNA, 120 bp, synthetic construct
  source 1..120: mol_type = other DNA
tcctcagcacaatatggatggttggatgggtgggtggatgaacggatgagtgaatggacacatggatgtacaggtgggtgagtagacgaatgaatggatggatggatggatggatggatg

SEQ ID NO: 28668 - DNA, 120 bp, synthetic construct
  source 1..120: mol_type = other DNA
tgggtggctattagaggagaggaaggaagggaaaagtgaatgaaaaaacggatgcctggaaggatgaatggaaggatggcactgcctctttaagggcattgcaacaaatatcaaaagctg

SEQ ID NO: 28669 - DNA, 120 bp, synthetic construct
  source 1..120: mol_type = other DNA
gccattgctacaccacctgtgtgtcggacattacagccgatggtgacagagcccgctccgtgcagaagatgagaagccctggagacattcccaagcctggctgccttcctcagccatcac

SEQ ID NO: 28670 - DNA, 120 bp, synthetic construct
  source 1..120: mol_type = other DNA
tgcaatacttgttttctttccacggctgctgcttcaaagcacaggccgggccttggaagtggagcgcagtggaagagccaggcacacccccacctcccccttccaggaccagggcacttg

SEQ ID NO: 28671 - DNA, 120 bp, synthetic construct
  source 1..120: mol_type = other DNA
agcatgatccatgttgactgacaaagccagcctgaaaattcatacgagttccatgttcctcggaaaggaccccgaaacacatgatgccttacagagctcttccacgaggctttagcaatc

SEQ ID NO: 28672 - DNA, 120 bp, synthetic construct
  source 1..120: mol_type = other DNA
aaacccctctcggaacacagttcacacccgcacagcgctaggaacctggggaaacccctctcggaacacagttcacacccacacagcgctaggaacctgggaaaacccctctcggaagac

SEQ ID NO: 28673 - DNA, 120 bp, synthetic construct
  source 1..120: mol_type = other DNA
ttaaggaagagaagggggaggaggagctgcccccagtcctgtagatctccccagtgagcagaaaatgtttgagcccttgaggcacgaggagccagtggcctctctccctttagtgacaaa

SEQ ID NO: 28674 - DNA, 120 bp, synthetic construct
  source 1..120: mol_type = other DNA
cctactccaacgggtccaaatacctactctccccccatggcacaggtccccaacccaacgggtccaaatacttactcttcccctccatggcacaggtccccaccccaacagatccaaata

SEQ ID NO: 28675 - DNA, 120 bp, synthetic construct
  source 1..120: mol_type = other DNA
tccttcctaacattttctgatgctttcaaacagactgaaacccagaaaagatctaagagtgttcaatgaacagacaggacagagtcctgaaagaggccccaagacactcaggaacttagt

SEQ ID NO: 28676 - DNA, 120 bp, synthetic construct
  source 1..120: mol_type = other DNA
ttccaggaggctcaatatctgattaacagcagttccagaaagtaaaataaaatagaaacttgtcagaaataaaagaaaaatttctctaaactgaagaacatgagtgtcttggttgacaga

SEQ ID NO: 28677 - DNA, 120 bp, synthetic construct
  source 1..120: mol_type = other DNA
gtaaaggatttgttcaggggaacccaaccattcagtggcaaggttggaagagaaacgcaggtcttcaatcatttactgagcacctattgtgtaccaggcctcacatagagagtatagcaa

SEQ ID NO: 28678 - DNA, 120 bp, synthetic construct
  source 1..120: mol_type = other DNA
tgagtgtcttccacttgcacgcggtcaagtgctttcatcacttgagtctatctgcggggcatcttcttaaaagtaaataatagatacgcactgacgaggacaaaaagtaggtgaagcgca

SEQ ID NO: 28679 - DNA, 120 bp, synthetic construct
  source 1..120: mol_type = other DNA
gtttgctgtttttagtgtgtcggttggtgtgcagtgttggcacacggtgttggtgtccagtgttgacacacggtattggggtttgctgtttttagtgtgtccagctggtgtgcaatggtg

SEQ ID NO: 28680 - DNA, 120 bp, synthetic construct
  source 1..120: mol_type = other DNA
ttactttgcgattccctaatgagaggacattggggccttttcctgtgctgtggtgtgcttctgtgcacccgtacgtcgtctttggtggccattcagaactgccatccattaaatcgagtt

SEQ ID NO: 28681 - DNA, 120 bp, synthetic construct
  source 1..120: mol_type = other DNA
tctcatatggcgatggcttcgaaggcatgtctctctgatcatatggggacggcttcacagacgtgtctctcatcatatggggacggcttcacaggcgtatctctgtcatcatatggcgat

SEQ ID NO: 28682 - DNA, 120 bp, synthetic construct
  source 1..120: mol_type = other DNA
gagctatgattgcgccactactctccagcctgggcgacggaatgagacgctgtctcagataaaacaaaaaaatctaaatcattgtgactgatttaaagtaaatgttccaggttccatgtt

SEQ ID NO: 28683 - DNA, 120 bp, synthetic construct
  source 1..120: mol_type = other DNA
tgagcaacagagcgagactccgtccaaaaaaaaaaaaaagtgcatgtgcatgtgtgactgagtcgagagaagataccgtgatttcccgctctcattgcagcacagcgttcagaagtactt

SEQ ID NO: 28684 - DNA, 120 bp, synthetic construct
  source 1..120: mol_type = other DNA
ctcctcatatattccagtgattaatccttgtcaggcggcggttctaagatacagtctcccatcccgtacccgcgggctgtccctgcggctgtactctgctcattcttccctttgctgtgt

SEQ ID NO: 28685 - DNA, 120 bp, synthetic construct
  source 1..120: mol_type = other DNA
ccctcacacaacgtcagaaactcgatcttcctggcgtggccacctcccctccggcggcatcagaaactcggatcgtcctggggtggctgctcttgttacgcaacgtcagaaactctcctg

SEQ ID NO: 28686 - DNA, 120 bp, synthetic construct
  source 1..120: mol_type = other DNA
ataaaaataataaatagcaaaggaggagattctggtgctccagtgtcccattcttaagctggtgggtcagaggtacgaagcaaatggctgtttggcagtatctgaatgtcgtagtgtatg

SEQ ID NO: 28687 - DNA, 120 bp, synthetic construct
  source 1..120: mol_type = other DNA
gccgtctccgggatcccctgggggttactccgcagtccaggctccgggatcccctgggggttaccccgcagcgccctctctgggatctcctgggggttactccgcagtccagtctccggg

SEQ ID NO: 28688 - DNA, 120 bp, synthetic construct
  source 1..120: mol_type = other DNA
tcagcatggactcggttagtgttcacgggtcgtaggtccacagctccatggaacttcgtaagatgaacacgtctgtggaactggtaccacaagaagtggcagcgttcccacaccgaggag

SEQ ID NO: 28689 - DNA, 120 bp, synthetic construct
  source 1..120: mol_type = other DNA
tgaagaaaaatccaataattacttgtatgtggaacaacgccaagacggctttcactaggaaaacacaagtccagcctgaaagaattcatgaagtgcctgtgacctgacgttgaggatcac

SEQ ID NO: 28690 - DNA, 120 bp, synthetic construct
  source 1..120: mol_type = other DNA
cagtaaatccacagctggcatagaggagaagccggcgggtacgtgcccatcgttcaccatctcttctaaacacgaatgaaatgcgtgtgtcgtcctcacacactgaaggcaggctgcgtg

SEQ ID NO: 28691 - DNA, 120 bp, synthetic construct
  source 1..120: mol_type = other DNA
ctggtcgttttaacttttatacaacatatgggttggagatagtggccctctgaggagtgaattacaaatgcctttcccagcttatcttcggattttgctcatggcagtttctaccatgta

SEQ ID NO: 28692 - DNA, 120 bp, synthetic construct
  source 1..120: mol_type = other DNA
atgacacttgggctatgtgcttccctggtgcttccctcctggggatgaaatcacacccataggtaaaggtttgggagtggagggagacagcaggagacaaagcaaggggacgaggactct

SEQ ID NO: 28693 - DNA, 120 bp, synthetic construct
  source 1..120: mol_type = other DNA
gtgtgtgttcatgagatgttgagggttggttgttgggtcagtgtggtgagaacatcaggctggtttctgctgttgatctacatccgaggtgcactggcctgggccctgattatattgcgc

SEQ ID NO: 28694 - DNA, 120 bp, synthetic construct
  source 1..120: mol_type = other DNA
tgtgggtatatgcatagggtatgagtgctgggtgtagacgtggcataggtgtgtgtgcaggtctgttgggtgtagacatggtagtgcgggtagctgtgtgggtgtatgtgcaagtgtaga

SEQ ID NO: 28695 - DNA, 120 bp, synthetic construct
  source 1..120: mol_type = other DNA
gtttgtgcaggtgagtgttgggtgcgggcatggtggttgcaggtgagtgttgggtgtaggcgtggtggtgtgtgcaggtgagtgttgggcgtaggcgtggtggttgcaggtgagtgttgg

SEQ ID NO: 28696 - DNA, 120 bp, synthetic construct
  source 1..120: mol_type = other DNA
gactcacatcatttctgttgaaatacttcagagcaccctctcgttctgtcagcacaaacttccggctcaaaaactgcccgttgtcccggccacgcttccagagaaaaccctcacggtacc

SEQ ID NO: 28697 - DNA, 120 bp, synthetic construct
  source 1..120: mol_type = other DNA
aaggagaaagggagaaaggagaaagggagaaaggagaaagggaaaggagaaaggagaaaggagaaaggagaaagggaaaggagaaaggagaaagggaaaggagaaaggagaaaggagaaa

SEQ ID NO: 28698 - DNA, 120 bp, synthetic construct
  source 1..120: mol_type = other DNA
atggtgatggtggatggttggtgaggggatatgacagtggaccagcgctgttggctgcaaccctggcccaagccagcctgaggacggcctggatgagcgggactccagctgtcctttact

SEQ ID NO: 28699 - DNA, 120 bp, synthetic construct
  source 1..120: mol_type = other DNA
cctccaaggcgtgcgtgtccgtgtcaccaatgcagacgacaagtttgggccacctcgcccacgggggtggagctggctgggtccagtgtgtcggttccacagacccctgcccaggacaca

SEQ ID NO: 28700 - DNA, 120 bp, synthetic construct
  source 1..120: mol_type = other DNA
ggactcgaccagtatttatcaaacagctaccgcgtgccgcgccctgctgtgagctggtcccgctgtgtgtcgggtcctatggtgtggggtggggggggttctactgcacaccaggcccta

SEQ ID NO: 28701 - DNA, 120 bp, synthetic construct
  source 1..120: mol_type = other DNA
tgcgtggagctctctctccaaacagccaggacagggaggcttccctgttcccaggggtgaggccagagggtggacgagggctcctggggtcagctctcaccctgttcctattctcatata

SEQ ID NO: 28702 - DNA, 120 bp, synthetic construct
  source 1..120: mol_type = other DNA
gccctgtgacatttacggcaacggtcggcccatccctgcctggtaccaccaggaggggccgtcctgaaccacaggggaaccacagaagctccgacaggagcacggggtccggagcctaga

SEQ ID NO: 28703 - DNA, 120 bp, synthetic construct
  source 1..120: mol_type = other DNA
accagatggacacctgctccctcatccatccagcaaagggcagaacctagggttccaaatagcagcgggcagctaggtctgtgggagaggtgccctggagcccctgaacacacaaggaga

SEQ ID NO: 28704 - DNA, 120 bp, synthetic construct
  source 1..120: mol_type = other DNA
cctccaacccctgcccgagggtcacacgggaggctttagctcatctcaaatgctctcaagggaatatctcagacaacagcaaaggcaggaatgggattccagtggggcaggaacaggatt

SEQ ID NO: 28705 - DNA, 120 bp, synthetic construct
  source 1..120: mol_type = other DNA
gtgctgagcaggtccaggtgcccgcgtgttcatcccctgaccgtttcttgctctctccctcacacacacagggattcttgagaggaagaaattgctgtctgggtagacagtaattgaatc

SEQ ID NO: 28706 - DNA, 120 bp, synthetic construct
  source 1..120: mol_type = other DNA
taatttttgtattttttactagaaacagttttgccacgttgaccagattggtctcgaactcgtggtctcaagtgatccatccgcccgcctaggcctcccaaggtgcttcttttattcttg

SEQ ID NO: 28707 - DNA, 120 bp, synthetic construct
  source 1..120: mol_type = other DNA
agatagagagaggatgagatagacgtgaagagagaggaagagagacagagaatgagagacagacatgaagagagagtaagagaaacagagacacagagagataaagagagacagaaggag

SEQ ID NO: 28708 - DNA, 120 bp, synthetic construct
  source 1..120: mol_type = other DNA
gacacaggaagagacgggtcccggcctctgagtcacaggctggtgctgaagataaagagggcacacgagaccctctgccctcccctgcgggtgcagcctcccctcttatagctgggcaaa

SEQ ID NO: 28709 - DNA, 120 bp, synthetic construct
  source 1..120: mol_type = other DNA
agattacacagcaggtccacactgcaccccctgccctccaggtccacgctgcaccccccgccctccaagttatactgcaggtccacactgcacccctgccatgccccagcatccacggct

SEQ ID NO: 28710 - DNA, 120 bp, synthetic construct
  source 1..120: mol_type = other DNA
gtttttggtatctcagattaatttctctaacataccagcaacccctagaagatgaaaacagctaacattgcagcagaaaggcaggcaaaggtgtgaagagagttcacaggcaagaaaaca

SEQ ID NO: 28711 - DNA, 120 bp, synthetic construct
  source 1..120: mol_type = other DNA
ccatgcaccaaggctgcctgttagaagcaaatgagctactcccaaccaggggcaggggtcagtggtgctggagagccgggggccggggtcagtggtgctggagagccgggggccgggggc

SEQ ID NO: 28712 - DNA, 120 bp, synthetic construct
  source 1..120: mol_type = other DNA
tcctgccgcctccagcatgcgtggcccctccctgcacgccagggcttcctggttggctcacacccgtctccctccccataggggcgtctctagggccccacgaagcatctgtggctggtg

SEQ ID NO: 28713 - DNA, 120 bp, synthetic construct
  source 1..120: mol_type = other DNA
gttttcttctggctcccaacgacccttcacaataagtcaagggagtggaatggctgaaaggcaccctagagagaacagtctctctgggggagatgagtcatctctgaactgcttttattt

SEQ ID NO: 28714 - DNA, 120 bp, synthetic construct
  source 1..120: mol_type = other DNA
ctgggatttgggggtcacgctgcacatctgggatttgggggtcatgcccggcctctgggatttgggggttttctgtcacagctgttaggctccctgattaatgaagcctgtctccccatt

SEQ ID NO: 28715 - DNA, 120 bp, synthetic construct
  source 1..120: mol_type = other DNA
ggaatctagaaataaacccacacatatgtggacaactaattatcggcaaagatataaagccagttctggagagagcgaacaatctttcctaccaacggtgctggaacaatccggtatcat

SEQ ID NO: 28716 - DNA, 120 bp, synthetic construct
  source 1..120: mol_type = other DNA
gaggaagagagagtaggaggaagagaggaggaggaagggagagaggaggaggaagggaggaggaggaagggagagacgaggaggaagggaggaggaggaagaggaggaagggagagagga

SEQ ID NO: 28717 - DNA, 120 bp, synthetic construct
  source 1..120: mol_type = other DNA
ctgaagactgtaggctcagcacgggggagggccctgtgcctgttgtgagcgctgcccagcttgcctgaccccactgccatgtgggtgagtggagtcctgtgggtgtggagccctgtgggt

SEQ ID NO: 28718 - DNA, 120 bp, synthetic construct
  source 1..120: mol_type = other DNA
gagtggagccctgtgggtgagtggaatcctgtgggtggggagtcctgtgggtagggaatcctgtgggtgtggagccctgtgggtggggagtcctgtgggtgaatggagtcctgtgggtgg

SEQ ID NO: 28719 - DNA, 120 bp, synthetic construct
  source 1..120: mol_type = other DNA
gttttactgctgcagggcagaagttggcatctcagctctgccactttctaactctcccaccttgagctgctgctttccaccagcctgtttcctccttgggaacgtggagtggtgacccca

SEQ ID NO: 28720 - DNA, 120 bp, synthetic construct
  source 1..120: mol_type = other DNA
gcatccacgccgctctggactcagggtttagaaaaagtcatctgttccagccagaccttcctgtttccccccaagtctaagggagcagagccttcacctaagaaaggagggcagagtggg

SEQ ID NO: 28721 - DNA, 120 bp, synthetic construct
  source 1..120: mol_type = other DNA
cacacagcagcgcacgccagcacatagcagcacagcagcacacagcagcgcacagcagcacagcagcgcacagcagcacacaccagcacaaagcagcgcacgccagcgcacagcagcgca

SEQ ID NO: 28722 - DNA, 120 bp, synthetic construct
  source 1..120: mol_type = other DNA
gtgggtgaaggggtcacctggcctggaccccgtccagtagccatgcaggggatggtgtgcatgaggcaggcgctgctgtcctacgatgtcagccgggtgacggggccagggctccagtgt

SEQ ID NO: 28723 - DNA, 120 bp, synthetic construct
  source 1..120: mol_type = other DNA
atagagtgagactctgtctcaaaaaaaaaaaaaaaaaacgggggggggggagtgaaagggagggaggaagagggtgagggtttggaggggcccaaccaggcccacctgtggttgcatgga

SEQ ID NO: 28724 - DNA, 120 bp, synthetic construct
  source 1..120: mol_type = other DNA
gcgcagggcccctgccagctgcacgtacttgcctctgaccgcccccacccagcccctatcgtccccctacttccctcatctcccccatctgcctccattatcctctcatctcccccaatc

SEQ ID NO: 28725 - DNA, 120 bp, synthetic construct
  source 1..120: mol_type = other DNA
acatatctggacagaacaagacaaagatgcgtgcccattgagaggctatgctgaggctgtaataatactgaggagaaaagttaagggtaggctgtttttctgagatttaaaatggttggg

SEQ ID NO: 28726 - DNA, 120 bp, synthetic construct
  source 1..120: mol_type = other DNA
accccaagaccatgtggaacattctgagtcattcaaaaaagacataactatgtctgacgcattcttttaattaactgccctgctcaggtggtcagtgggccccacttcccagacacacca

SEQ ID NO: 28727 - DNA, 120 bp, synthetic construct
  source 1..120: mol_type = other DNA
gtcctaaatcaattcctcaaagtgtgcacaaaactaaagaatataaataaacaaaagaaaggtgtgttaggatttctgactgaataccagagctgaagggcccccaggggacagagggct

SEQ ID NO: 28728 - DNA, 120 bp, synthetic construct
  source 1..120: mol_type = other DNA
gggattttgtaaaacatctactttaaaatgtggccgtgagaaaagcccccattcctccccaccatctgttcgcctctccccgattttctaggattaaagtataggcctgcaatcccctac

SEQ ID NO: 28729 - DNA, 120 bp, synthetic construct
  source 1..120: mol_type = other DNA
ccctgctcaacagcctttcccttccctacaaactgtcccaggatcccgggccattccttccagtaagttgggaagtccaggaccagacctcaacgtggaaaaagctggaggagagaaggg

SEQ ID NO: 28730 - DNA, 120 bp, synthetic construct
  source 1..120: mol_type = other DNA
cacagtcttcacacaggctggagtgcaccccagaggtgagggtttggggcacagtctgttggtggaggctggagtacatccagaggtgcgggtttggggcacagtctgttggaggctgga

SEQ ID NO: 28731 - DNA, 120 bp, synthetic construct
  source 1..120: mol_type = other DNA
ccatgaccttggacaaaccacccctcagacctagagccctcatgcacatccccatggtcactgccacccggcagggagcaggacagccccgggggtctgtgactgtccccgggacatcag

SEQ ID NO: 28732 - DNA, 120 bp, synthetic construct
  source 1..120: mol_type = other DNA
aataggtgatgtccgggaagactgtgaccccagagtactcagcctgtgaggaaccgggggaggggcctgcgtactgggggataaatggcttgttgtgaccgtgctgggtgtgcctgccca

SEQ ID NO: 28733 - DNA, 120 bp, synthetic construct
  source 1..120: mol_type = other DNA
acacatatacacacaacgcgtgcacacggacatgcacacgggtgcgcacacgtgcacatgcacacacgtgcacacacatgcacgcacacacacagcacgcacagacacgcacacatgcac

SEQ ID NO: 28734 - DNA, 120 bp, synthetic construct
  source 1..120: mol_type = other DNA
gacataacacaaccacagtgagcccagtaaaacctctctcctcccgtctgtgggacatgaagctgtgtgtcggtgggtgtgggaagcctgggtctctcaggcaggtggggcctgtattct

SEQ ID NO: 28735 - DNA, 120 bp, synthetic construct
  source 1..120: mol_type = other DNA
acatgccaaaagctcagtcaacaagacagaactactggacagggctctgaactctttttgacaatcttatgaacactaggggttctctccccacaactgtaccaccgtgacgtacagtct

SEQ ID NO: 28736 - DNA, 120 bp, synthetic construct
  source 1..120: mol_type = other DNA
tgcaaatctgcctggggttctgattctgtgcggatggctttctatccaccccagcttccctgccatgtgtctccgccagctaaaaggattttgtacctcccattttaaggacaagtggct

SEQ ID NO: 28737 - DNA, 120 bp, synthetic construct
  source 1..120: mol_type = other DNA
gctgttttttaggagtgtttcttggggagagggaagaaactgtttgattttcatcatgtctgggtgttaaatttctccaaacacttcttgggcattcactgagatgagaaacggccccgg

SEQ ID NO: 28738 - DNA, 120 bp, synthetic construct
  source 1..120: mol_type = other DNA
gctctagggaccggcttccatcaccaatgcccatgcaggatgacataactacagctctacggaccggcttccatcaccaacgcccacgcaggatgacatcactacagctctagggactgg

SEQ ID NO: 28739 - DNA, 120 bp, synthetic construct
  source 1..120: mol_type = other DNA
ccgagaacaaagcatcactgggtcatggattagcggcagccatctctagaatgtgggcatcagctgccctgaggagtctagtgaagtttcaacgaatggacttcagccgactgcagaaac

SEQ ID NO: 28740 - DNA, 120 bp, synthetic construct
  source 1..120: mol_type = other DNA
atggaacgggtggcaggtgctcacggaattatgagcacacccgtctacagcccgagctgggagagtcacaggtggtggtgcttcctcatttggtcaaatgaaataaagtattagtaaacg

SEQ ID NO: 28741 - DNA, 120 bp, synthetic construct
  source 1..120: mol_type = other DNA
ccaactacagatccgctgctttactattagctcccggtgcccgacacacagcaggcgttccgaaattgttttgttcaaggaattcacaagagtttgatgtgaatccccaaatgattttgt

SEQ ID NO: 28742 - DNA, 120 bp, synthetic construct
  source 1..120: mol_type = other DNA
gatctgagagccgtctgggccttggggtttccgggcgcgccccgacaacgtcacccgcagaccggccaatcccgccaggccgcggcccagtggcgccggcgcacaccgaagacgacacca

SEQ ID NO: 28743 - DNA, 120 bp, synthetic construct
  source 1..120: mol_type = other DNA
tcccaatgaccaccctggcaaggcacaggccacagacacctgtttctggcatgagcatatgctgtggttgattctcctcccctgtgaaatccagtgttggctgagattaaaatatccacc

SEQ ID NO: 28744 - DNA, 120 bp, synthetic construct
  source 1..120: mol_type = other DNA
acaaccatgtccttagaagagacagaagaggagaagacagacagagagaaggccacatggaaacggaggcagagactggagggaggcgaccacaagccaagaacgctcagagccgctggg

SEQ ID NO: 28745 - DNA, 120 bp, synthetic construct
  source 1..120: mol_type = other DNA
tcggtccccacgcgctcacctgccaggcgccggagcgccagcctcttccagcgctgagagggcctgcttgaggaagttccgcgcctgctccttgctgctgtccttggatagaacaagtga

SEQ ID NO: 28746 - DNA, 120 bp, synthetic construct
  source 1..120: mol_type = other DNA
ggaggttcagtcaacagagatccacaaagccccgtccgcaaaacaggccaccccggcaggctggctgcgagttggctgcagggacctggcatctctgtgatccaccctcactgtgccttc

SEQ ID NO: 28747 - DNA, 120 bp, synthetic construct
  source 1..120: mol_type = other DNA
ttcagattccctctcgcccattgattggtttgtggacctcagctgtgacctctctggcatcctatcctggacagaagggtcttgggcctctgccctcatttctcttcctgagaatctcac

SEQ ID NO: 28748 - DNA, 120 bp, synthetic construct
  source 1..120: mol_type = other DNA
ctcagccaattattcctgcctaattgtaccgaggaaagcatctaaatactgcctgtgctaattataccagcgttattggggtttatcttcccggcgagggtgacctttccttcaagagtg

SEQ ID NO: 28749 - DNA, 120 bp, synthetic construct
  source 1..120: mol_type = other DNA
gcccatgctgctggcagtgacgtttcgtggagcgccacgcttagggcaatgtgatgctggggatgcggggtgaggagggccggagatgcaggcccgccctcctgtgaggctgcccctctt

SEQ ID NO: 28750 - DNA, 120 bp, synthetic construct
  source 1..120: mol_type = other DNA
ctgctcaaaaccagtagtacagatgaaatcttaaaagcagtcagaggaagaaatgacaactgaccgacagaggaacaaagatgagaatgacagcagacttctcagaggaaatactggaat

SEQ ID NO: 28751 - DNA, 120 bp, synthetic construct
  source 1..120: mol_type = other DNA
cttcatgtctgtgtcgtatatatttccaactttttcattactagtatatcttttatggtactctgtcatctgtgatctttgatgtcaccattgtaatggtttcggagctccacaaacagt

SEQ ID NO: 28752 - DNA, 120 bp, synthetic construct
  source 1..120: mol_type = other DNA
cgaccttaaggaactaaagaagggcaaattagacaaagtaagcagaagaaagaaaataaagatcaaagcaacaatggtgaaagaaaacaaaaaagcagtagaaataataaaacccaaagc

SEQ ID NO: 28753 - DNA, 120 bp, synthetic construct
  source 1..120: mol_type = other DNA
cgtacagagaataccacacttaatggctgaagattggatgcttctccctcagatctgaaacaggacaaggatgttcactctcactgcttgtattcagcatcatcctgaaggttccagcta

SEQ ID NO: 28754 - DNA, 120 bp, synthetic construct
  source 1..120: mol_type = other DNA
tcccacctggaagccccacaagtgggatctgagtggccccaggtgccaggactttatgtttttctctggggaccttatggcacccatgatggggaccttgccagcaaggagtggatgcca

SEQ ID NO: 28755 - DNA, 120 bp, synthetic construct
  source 1..120: mol_type = other DNA
agcctctgtttccctaaatgtgacaacctgcagggtggcctctgtttcctgtccctcgtccctcacaaaacgctttgttcttccccagtgaaggtctggaaaacgaagctgcccagctct

SEQ ID NO: 28756 - DNA, 120 bp, synthetic construct
  source 1..120: mol_type = other DNA
gtcactgggacacccagtctgtaccgcacaagtcccagcacgcaagcccagaggcggccgctcaccctgcccctgactggacaactgcctccatattcaaaccacaaccaccaaagacgg

SEQ ID NO: 28757 - DNA, 120 bp, synthetic construct
  source 1..120: mol_type = other DNA
gactagagaagtgagtctcttgaaggcctcctagacctgcagagcctctggcatcagccatggctggacacccccacccatttcctccacagagaaactcggggagctgctcaggggtgt

SEQ ID NO: 28758 - DNA, 120 bp, synthetic construct
  source 1..120: mol_type = other DNA
cggcaggaaggctgtgcaggtggcagctcacgatgtgtcacatccggcctagttggtgcccaacatatgcctgccatgctgaacccaacatatgcctgccacgctgaaccgaccataaca

SEQ ID NO: 28759 - DNA, 120 bp, synthetic construct
  source 1..120: mol_type = other DNA
ccacgatgaacctaccgtaacacctgccacgctgaacccaacatacgcctgccatgctgaacccaccgtaacacctgccacgctgaacccaacatacgcctgccatgccgaaccaaccgt

SEQ ID NO: 28760 - DNA, 120 bp, synthetic construct
  source 1..120: mol_type = other DNA
gggaaggtgcggttccatctccaggccccccgccctggtcctcctcccactactgccagaagcagtaaatatgtgaatacagttcacgtatttaaataggtgaatacacttcaacaagca

SEQ ID NO: 28761 - DNA, 120 bp, synthetic construct
  source 1..120: mol_type = other DNA
cacagagaaaatgccaagcccagatgacctcactagtgaattctatcagatatttagggaagaaatatctcacacaaattcttccagaaaaaagaggaggagggaacccttcccaattca

SEQ ID NO: 28762 - DNA, 120 bp, synthetic construct
  source 1..120: mol_type = other DNA
ataggcatgtgtgtgcatacatgcatgtatgtggcttcctgtgcatgtgtccatgtgtgcatgtggctgcctgtgtgtgtgcatgtgtgcatgtatgtggctgcctgtgtgtgtgtgcat

SEQ ID NO: 28763 - DNA, 120 bp, synthetic construct
  source 1..120: mol_type = other DNA
tccaggcagcgaggacgcagtagcctatggaagatgctcttgtggaattcatgattggtgaagcactgttccaggtgcttggaatagctctgtgggcctgggctctgtgacctccctctg

SEQ ID NO: 28764 - DNA, 120 bp, synthetic construct
  source 1..120: mol_type = other DNA
ctcctccccaaagacacctctaggatcagctgtgcccacacaggcagtgacaaatttgatcaccttcaatgtgctgctaagattattttaatattaatgcattccctaattaagctgcaa

SEQ ID NO: 28765 - DNA, 120 bp, synthetic construct
  source 1..120: mol_type = other DNA
ccactgccacgtcccctcgcacagtccccgatgccacgtcacctcgccccatcccccaatgccatgtcccctcgccccgtccccagtgccaggtcccctcgccccatcccccagtgccac

SEQ ID NO: 28766 - DNA, 120 bp, synthetic construct
  source 1..120: mol_type = other DNA
ccacgtcaagggtctgctgacaccacgggaacacccccaactcctcaccccacccacggtcacaggagcgagggcgcatcatggggtccatgtcaagggtctgctgatgctgtgggaaca

SEQ ID NO: 28767 - DNA, 120 bp, synthetic construct
  source 1..120: mol_type = other DNA
tctcctctgaggttcctggctgggatgagactgggagcccgtgtggccatgttcccatctcttccctaccagcctggaaggtgccccgtgccacaagagaaacaaggtcaaccacacaga

SEQ ID NO: 28768 - DNA, 120 bp, synthetic construct
  source 1..120: mol_type = other DNA
ccaccacattctgtctcctgggagtagacacaggttactcaaacagggttcaggaagtgctggccgtaaaagaaaaaaaaaagagtacaactgaccttatagaaattaagaacttcatcc

SEQ ID NO: 28769 - DNA, 120 bp, synthetic construct
  source 1..120: mol_type = other DNA
catacacacacacatacacacacacacaggccagggctggagccagcggcgcacacacacgcacacacacgggccagggctcccgccaagtgctgagattctgcagcttgtggctgtgag

SEQ ID NO: 28770 - DNA, 120 bp, synthetic construct
  source 1..120: mol_type = other DNA
ctcacccagacatttcctcgtgagcacagatgtgcgcctgagctgggaaatgctttctcctcagaaaaaaacagcccagccggagggcatgtcccggccgaatgttcgcctgatgcaccg

SEQ ID NO: 28771 - DNA, 120 bp, synthetic construct
  source 1..120: mol_type = other DNA
gcctcacgagcgccgctgggtgcctgagcacccgccccaccagagcgccactgctggcctcacgagcgccgctgggtgcctgagcacccgccccaccagagcgccactgctggcctcacg

SEQ ID NO: 28772 - DNA, 120 bp, synthetic construct
  source 1..120: mol_type = other DNA
aaaacgtgtgcaagtaacggaaatgtgtatgcagcctcaagcgctttgtggagaactgagcacctgccctgggatgctggataaagagcccctgcttagaaacaagcctgaatttgaaag

SEQ ID NO: 28773 - DNA, 120 bp, synthetic construct
  source 1..120: mol_type = other DNA
agcatgccaagcacgaagcactccagtcagaagtagcacttcgtcgtggagcaggatgggtccggaaggtgaaatgaggtactgtcagttaccacaccaggaggctctcatgatcattca

SEQ ID NO: 28774 - DNA, 120 bp, synthetic construct
  source 1..120: mol_type = other DNA
agaggggccacaaagggaaatcagcaatcaaggaagatgctgcttaatcagagctgagagcggcgtaattccctctgaatcggaaaataaagcttcactcctcactccccaaagtctata

SEQ ID NO: 28775 - DNA, 120 bp, synthetic construct
  source 1..120: mol_type = other DNA
gagtcaaggtctttttcaatggcctctttatactttttgatcagtccccaagctttgcacatgtccagtgtcacagtcaaagagggctgcatgttttaagagtccagtggtcagagcact

SEQ ID NO: 28776 - DNA, 120 bp, synthetic construct
  source 1..120: mol_type = other DNA
tcgggacagagctggggtccaggctcccaggcatgagcgcgggagcactgacaagttgggacagagctggggtccaggctcccaggcatgagcgcgggagcactgacaagtggggacaga

SEQ ID NO: 28777 - DNA, 120 bp, synthetic construct
  source 1..120: mol_type = other DNA
ttaaacacacacagattttcaaagaggcggtaggaggaaggactcacctagtccgcccaggggcctcctgcagaagcaagatctgtgcctggacctcacagacacctgggtccagcagca

SEQ ID NO: 28778 - DNA, 120 bp, synthetic construct
  source 1..120: mol_type = other DNA
tgtggcttgacctttctggcagctccgttgaagcacccacagaaccatggagaccacaagccaacagtggcctatcaccggcctggagaaagtccagacacttcacaccttctgactgag

SEQ ID NO: 28779 - DNA, 120 bp, synthetic construct
  source 1..120: mol_type = other DNA
aagaagttggggaatgaaacattaatgatcgagtgagtgaactgagtctgggtttctccttctcaatcccttttcagctggccagtccacctgtattatatgctttgtatgcgttaaatc

SEQ ID NO: 28780 - DNA, 120 bp, synthetic construct
  source 1..120: mol_type = other DNA
gccaggggagaggcgcagggctggagagggagtgtggccagaggagaggagaggcttgaggctggagagggagtgtggccaggggagaggagaggcgcagggctggagagggagtgtggc

SEQ ID NO: 28781 - DNA, 120 bp, synthetic construct
  source 1..120: mol_type = other DNA
agaagagaggcatggggttggtggggaagcatggccagcatctctcagagagtatgagtgtgcacgtcaaacaccagcatcagagcaaggttgtcatgtgcagggtcaatgtgcaggacc

SEQ ID NO: 28782 - DNA, 120 bp, synthetic construct
  source 1..120: mol_type = other DNA
gttggtgttaaagtcgtatcatttctgtaacagtgcagttattaacgaagcctcatttgcacgtgtcaggggaagagaaaaatcacctaattaaccactttccccatcagcaagaggatg

SEQ ID NO: 28783 - DNA, 120 bp, synthetic construct
  source 1..120: mol_type = other DNA
gtgcagtccagtgcacacagggggctctgcagctgggaagaccctgactggaggtctgaatctgccatgggtgggagtgggcagatcacacagcctcgctgaccttggaccctcctgtct

SEQ ID NO: 28784 - DNA, 120 bp, synthetic construct
  source 1..120: mol_type = other DNA
atcattcctaactgacgctcagctatgcataacaatgcaaataactggcactataaatggggcagcaatatatcactgcaaggtttcctacccagaatcatcaagacgataatggagccc

SEQ ID NO: 28785 - DNA, 120 bp, synthetic construct
  source 1..120: mol_type = other DNA
agaggaaaacacaaagaataaaaataaagttatctataatccaccactcacaaaaaaaaaaaaaaaaaacgtaatggatcccagaagttggctaagtgaggaatcaaatgatgcgtgtat

SEQ ID NO: 28786 - DNA, 120 bp, synthetic construct
  source 1..120: mol_type = other DNA
atgaggaaaccatgcgacagatgtcagcataatccctgccacgcagaggaggcaaaatcactttgaagggttaaaacttgtttctctggttaaaaagggatgtactcttcaaagttagaa

SEQ ID NO: 28787 - DNA, 120 bp, synthetic construct
  source 1..120: mol_type = other DNA
actcactcacactacggagtcgacgccggactcactcacactacggagtcgacgccggactcactcacactacggagtcgacgccggactcacactacggagtcgacgccggactcactc

SEQ ID NO: 28788 - DNA, 120 bp, synthetic construct
  source 1..120: mol_type = other DNA
attgttagggtggtgactgggggataaaaacgtgacatttgcaaggattctttgaagagacgcaggaacagtgagaactgaatggaatagaacagctttaggatagtaacttgaggcttt

SEQ ID NO: 28789 - DNA, 120 bp, synthetic construct
  source 1..120: mol_type = other DNA
gttctgtgaatgaccctgggtgtcaaggaggaaggagcaggcgcgagcgctcctgggaagccgtgttgtgtgaatgaccctgggtgtcgaggaaggagaaggcgcgagcactgctgggat

SEQ ID NO: 28790 - DNA, 120 bp, synthetic construct
  source 1..120: mol_type = other DNA
tgttcacgccattgcactccatcctgggtgacgcgcaaaaaccctggctcaaaaaaaaaaaaaaagaaaaagaaaaactgactactacaaactaggccacagttgaagaccttcaaatac

SEQ ID NO: 28791 - DNA, 120 bp, synthetic construct
  source 1..120: mol_type = other DNA
gtgactgcctgagcccaggagatcgaaaacagcttgggcaatacggtgagaccccatccttaaaaaaaaaaatacaatataatttaaaaataaaaagaataaaagaacacggtaaaccaa

SEQ ID NO: 28792 - DNA, 120 bp, synthetic construct
  source 1..120: mol_type = other DNA
tttgcctttggccaccatccaaataaaagaaacgctgccagaagtgtaaacaggatgcatttctttacattgatgaatccagcaaacaaagacagcgcctcttagttcctctcgaaaact

SEQ ID NO: 28793 - DNA, 120 bp, synthetic construct
  source 1..120: mol_type = other DNA
ctacctctggctctagagactcagcctaggaatgtgaattggtgagaatatgtcagaacctggcttcctattgtaggaactcagtgcacttatttggttgatactgagtcgctataaaaa

SEQ ID NO: 28794 - DNA, 120 bp, synthetic construct
  source 1..120: mol_type = other DNA
cgggggacgtgctatcctaatctgcagaggtgctatcctaaatcactgaccaattccagctttaaggttcacagaaccttttgaaaaacatgatctggttttaaaattgtttccgtgttg

SEQ ID NO: 28795 - DNA, 120 bp, synthetic construct
  source 1..120: mol_type = other DNA
tagagggtgaatgttaggaggtaaggttggatgatagtcagctagggggtgagtggtgggaggtgaggctggatgatagtcagctagagagtgaatggtaggaggtaaggttggatcatg

SEQ ID NO: 28796 - DNA, 120 bp, synthetic construct
  source 1..120: mol_type = other DNA
attgcattattgttttataggccctgtggctattatgctttcaagaagttctattatggtgcataacaaccttttgtttcagaattcagaactccttttagcatttcttgtagggctggc

SEQ ID NO: 28797 - DNA, 120 bp, synthetic construct
  source 1..120: mol_type = other DNA
taagatgtttttcttacacccagagcaaatggtcagcagcaagtgtttgctcttgatggaataaacatatcactctggcgacttaacatgtactgagcattcagggactcattagtgcca

SEQ ID NO: 28798 - DNA, 120 bp, synthetic construct
  source 1..120: mol_type = other DNA
aatattctgcatcttcctgcacgctgaccttctgttaatgtacttgaaggtcaattgaaactagtcaaatgttactttaaagttcgtagtggtaaaactatagactcaaattatgcttct

SEQ ID NO: 28799 - DNA, 120 bp, synthetic construct
  source 1..120: mol_type = other DNA
ctctctccgatattctggaaaatcccactgctttagggcatagacttttcctgaaaatagaaggctgtgttttttaatgaggtgctgagatctttgtaacaaaagtgggggagcaactgt

SEQ ID NO: 28800 - DNA, 120 bp, synthetic construct
  source 1..120: mol_type = other DNA
tctacaccctccgcttccgtcccacctcccttctacaccctctacactgcaccattcatgggcttgaatgagtgttggcctcagtttccacatccataaaatggagatggatgtagatgg

SEQ ID NO: 28801 - DNA, 120 bp, synthetic construct
  source 1..120: mol_type = other DNA
gttcctctcaacacccctccgtgtcgatggcttcatctacaacgagaaaaatagctccttatagggtggttgaaagcacgaatacacaagaaaatgcctattaaaatattggcattctag

SEQ ID NO: 28802 - DNA, 120 bp, synthetic construct
  source 1..120: mol_type = other DNA
gtgggtacacccaggctcacagctacctgatctggacgtatccagtgagtacattcagccccatggctacctggatgtaatcagtgggtacacccaggctcacagctacctgacctggac

SEQ ID NO: 28803 - DNA, 120 bp, synthetic construct
  source 1..120: mol_type = other DNA
tccaggaaagattctgtattcaaaatcattccccacaaatagaatttgaacactccgagtataggagccgtgactcattgatccctgaatcccaagactccagctgaggggattaaaaat

SEQ ID NO: 28804 - DNA, 120 bp, synthetic construct
  source 1..120: mol_type = other DNA
tccagagaatcactgagggtcccggggctgaggctgccacgtagagggtcctccagagaatcactgagggtcccggggctgaggctgccacgcagaggatcctccagagaatcactgggg

SEQ ID NO: 28805 - DNA, 120 bp, synthetic construct
  source 1..120: mol_type = other DNA
tccactgtctctgcggttgggtgctgtcatccgtgggcttccccggaggtctcctgatcatgcaccccttagcattcaacgacagtagcacttcctgcggttcagttaccaggatgctgc

SEQ ID NO: 28806 - DNA, 120 bp, synthetic construct
  source 1..120: mol_type = other DNA
ctgacttccagtcaagtatcccttttcttctggttttgatcggctccctgtcaagatgaatgagatttttgttaaacacgggattttgttgtgacttgggatggggttcatctcaaaaag

SEQ ID NO: 28807 - DNA, 120 bp, synthetic construct
  source 1..120: mol_type = other DNA
aataggtcattagatggactcccactcacatcacccaagcagggtggggattgagctatgcccaaagagtgtgatttacttgatcagccaccacttggagggtgacctcaacaaactcta

SEQ ID NO: 28808 - DNA, 120 bp, synthetic construct
  source 1..120: mol_type = other DNA
aaatggttaaacaaaactcagttttagggaagatacacaaaatcaataaactgctagctagacttaagaagaataaaagacagattacttaaggaaacaaaatcagaaatgcaaaaggag

SEQ ID NO: 28809 - DNA, 120 bp, synthetic construct
  source 1..120: mol_type = other DNA
atatatttaagatggacagtttgacagcttttgacttagctacacatatacacacacctgggaagctgtgaccacagatgagataatgaacaggttcctcaccctcaaaggtgtccttgc

SEQ ID NO: 28810 - DNA, 120 bp, synthetic construct
  source 1..120: mol_type = other DNA
agcatctctgctcatccctcagactatttagttactctcaaatgcaggaaggcagaataaatgcttaattcttttcccttaattaccagtttccagggtgaggaattggtcccctggtta

SEQ ID NO: 28811 - DNA, 120 bp, synthetic construct
  source 1..120: mol_type = other DNA
acacatggcagtcccgttgaggggattcagtgaccaaaacttcacaccacattcctggggccccgagaaacgcgcttgctgtgctattttcaaacacctccctgctgatgctatccttta

SEQ ID NO: 28812 - DNA, 120 bp, synthetic construct
  source 1..120: mol_type = other DNA
caggtcttctggggcaggaaaccagcttccatggctggaaaacccagggggctgctggctcctgtggcaggaagcagagtgttgtctgtgttcataatcgagtctttgttttagtggctg

SEQ ID NO: 28813 - DNA, 120 bp, synthetic construct
  source 1..120: mol_type = other DNA
cctcaaggtctgttcgtggggcacccaccctagggccaaaggtgatttcatgggtttttttttcctgctttttttgggtggcttttatacaaaagaagcatctatctatctgtatgtata

SEQ ID NO: 28814 - DNA, 120 bp, synthetic construct
  source 1..120: mol_type = other DNA
actctggaagtgtgacctccagagtgccttgtccccctgtcaccacctccctgggagcacacaggttcccttcctcgtgctctggctgctgcagacagtggcgctgctcctgcaggcctt

SEQ ID NO: 28815 - DNA, 120 bp, synthetic construct
  source 1..120: mol_type = other DNA
ggacctccacatgactttcaatattttgctcatggagtctgtgcgtgtcccagggaaacagttgcaaacgcagtgaaacatcaggcatccttgaagtatattgtgatgacaaaatatttt

SEQ ID NO: 28816 - DNA, 120 bp, synthetic construct
  source 1..120: mol_type = other DNA
ctggagcaccaggccacttgagcactcagccatgtgcttgggaatccgattttatggcagagctatttttacattttttaaaatgtttttaatggtggtggtttatgggattgtaccctg

SEQ ID NO: 28817 - DNA, 120 bp, synthetic construct
  source 1..120: mol_type = other DNA
ttggcatttgaaataaatcagaaaattttaaagttttccaggtcatggggaagaagcatgtaccttcccacttatccaactgttctgccctttgtttaaagacaggaaggcgtgggctgc

SEQ ID NO: 28818 - DNA, 120 bp, synthetic construct
  source 1..120: mol_type = other DNA
atgagaatattcacactgaatagccctacatcagctcacctaggggtaagctgccaggttagctcaagtcagctcagccttcgccaccaaatgagttataaaaaaaccttttgagtttca

SEQ ID NO: 28819 - DNA, 120 bp, synthetic construct
  source 1..120: mol_type = other DNA
ggtctctgcatgtgtgggaggatgtgttcatcgtcacctgatggagaagctggctgctccggggtctcggtgtgtgtgggaagatgtgtcttacgtctgcaattctcctaaatgcagagg

SEQ ID NO: 28820 - DNA, 120 bp, synthetic construct
  source 1..120: mol_type = other DNA
ccacccaaagtccactttctcctttaacggtccttccaatgacttcacatcaaaccgaaagaccataaaatagaggtttgctttcagaaaatgaacctagaaaacatgcagggtccatgt

SEQ ID NO: 28821 - DNA, 120 bp, synthetic construct
  source 1..120: mol_type = other DNA
tccctgtacctggtcacctccagaatccttttgttttggtctgtagcagcccacatcttagtctcaggcaagccaaagacccagatcttccccacccctggggctcttctatgttctgcc

SEQ ID NO: 28822 - DNA, 120 bp, synthetic construct
  source 1..120: mol_type = other DNA
gagtggggaggccgcgtagacctctcctgagtggggaggccgtgtagacctctcctgagtgagggaggccgcgtagatctctcctgagtgaggaggccgtgtagatctctcctgagtgag

SEQ ID NO: 28823 - DNA, 120 bp, synthetic construct
  source 1..120: mol_type = other DNA
aggtgcccgtcaaggaccacgtggtgcataccctagggagaggaagggtgacagctcaggtagaggagtggccaggtggacacagcactcgggcaactgggcagcctgcagcagaagggc

SEQ ID NO: 28824 - DNA, 120 bp, synthetic construct
  source 1..120: mol_type = other DNA
atggaccccctctctgggcacctcagggaatgctggctggaccccctccccgggcacctcggggcactctagctggggggccccctccccgggtacctcggggcatgctggctggacccc

SEQ ID NO: 28825 - DNA, 120 bp, synthetic construct
  source 1..120: mol_type = other DNA
aggaggctgggatcctggccacagtgactggccccaccctaggactcatcccttctgaattcccgccgaccacccggtgtgacatccgagcagttcaggactgagaacaaggccttgtag

SEQ ID NO: 28826 - DNA, 120 bp, synthetic construct
  source 1..120: mol_type = other DNA
gggtggttctgtttgattgtgagttcctagaaccttctctactctcacttctgtgcttggtccgggaccagaggtcggggccaagagatcagcttcaagggaacagaactctcctccttc

SEQ ID NO: 28827 - DNA, 120 bp, synthetic construct
  source 1..120: mol_type = other DNA
tttttatgaagctataagtgactctttcactaagcttctccttgaattgtctgtttcaggggtcatcaaactagggccagcgaggcctatttttatagggcccccaagctagaaatggtt

SEQ ID NO: 28828 - DNA, 120 bp, synthetic construct
  source 1..120: mol_type = other DNA
agtgtcgctgctgcctcctttccgtgcacacaggaaaccacacatctgacacgcacaagccaacgaatttcccccgaggaacacgcttgtgtgtccagcccccaaaacaagaacaagaac

SEQ ID NO: 28829 - DNA, 120 bp, synthetic construct
  source 1..120: mol_type = other DNA
actcatgacttcagtgacctgcttctccccctctaggtctaccagccacagtctctgcacgtttccaagagcagcagaaaatgaacacattgcaggtgagttttcatgcttgtgtatatg

SEQ ID NO: 28830 - DNA, 120 bp, synthetic construct
  source 1..120: mol_type = other DNA
ccttacttcagttttttcttttgtttcttttcgttgctttgttcttttgttactttgtgcattgcattttgttcagttctgtgttcaacaagccaagaacctgggcaatccacggtcaag

SEQ ID NO: 28831 - DNA, 120 bp, synthetic construct
  source 1..120: mol_type = other DNA
ctgcagcggcggccggggccgggagcgggccctgggcggcccaggagaagcagttcccgccggcgctgctgagtttcttcatctacaacccgcgcttcgggccgcgcgaaggacaggtat

SEQ ID NO: 28832 - DNA, 120 bp, synthetic construct
  source 1..120: mol_type = other DNA
ttgagcccaagtgattgaggctgcaggtgagctgtaatagcgccactgcactacagcctgggcagcacagaccccatctccagaaaaagaaaaaaaagcaacttgtcagttcaaatggct

SEQ ID NO: 28833 - DNA, 120 bp, synthetic construct
  source 1..120: mol_type = other DNA
tttctctcttacccatcaacatatggatagaactgttgtcctgagtacatatcatttagacatgattttagtataagatggcactcttggctgggtgtggtggcttacgcctgtgatccc

SEQ ID NO: 28834 - DNA, 120 bp, synthetic construct
  source 1..120: mol_type = other DNA
aaatcttgtagctccattttaagaagagaaacaagttactgtaaagaaatttgaatccagttaataaacaacttggtgggtttccacatgaactttatctcctaggaagacaacagaaat

SEQ ID NO: 28835 - DNA, 120 bp, synthetic construct
  source 1..120: mol_type = other DNA
tgaagcctggagtcacaggacaatctggcgcccagctctggggatcctgttggcatcgtcatcttggaatagcatctgaggggttgagcagggcacagctctggtggctgcacagaactg

SEQ ID NO: 28836 - DNA, 120 bp, synthetic construct
  source 1..120: mol_type = other DNA
tatttcagtgatcttgaatagaaaacgcccagatccagcctcattgtctgtctccttttaaaaaaccggttccagagtctgatacctgctagtttctctgtgctttttccatgtgctgct

SEQ ID NO: 28837 - DNA, 120 bp, synthetic construct
  source 1..120: mol_type = other DNA
gagaagttttcatttataaaggctcagaaatgatgccgtgggggaacaggaaggagcgggatgtgtcaggatgagggagtcctgtccctctctggaaggtagacgggacttgtaaaccat

SEQ ID NO: 28838 - DNA, 120 bp, synthetic construct
  source 1..120: mol_type = other DNA
gttggaggtgtaattcagagcaggaattggagtaggaagaatgtccgtttgtgtatcgagtgaaagtttgagaccccatctcaagaaaaaaatcatcctcctttgaatgacccaggtaat

SEQ ID NO: 28839 - DNA, 120 bp, synthetic construct
  source 1..120: mol_type = other DNA
tctactgcaataaaagtcatgtgaatgcggtttgcttcccccttccctcaatattttattatactgtccctcacataacagaaaccatgggaaacaaaaccagggggaaggaagaatggc

SEQ ID NO: 28840 - DNA, 120 bp, synthetic construct
  source 1..120: mol_type = other DNA
gatttgtcggcacgtggtttttcatggtattgtaggtaaagccggatactccttcgtttttcctgtaaagtcagtagtgatgtctcctctttcattcctggttttagtaatttgagtctt

SEQ ID NO: 28841 - DNA, 120 bp, synthetic construct
  source 1..120: mol_type = other DNA
gctttcatcatcaggcctggtgttctgctcagcctctcttaaccatacattgctttgataacttttaaacatttttggttatctgtggtcctggttgttgtcggttgctaggtctaatgt

SEQ ID NO: 28842 - DNA, 120 bp, synthetic construct
  source 1..120: mol_type = other DNA
aatgataaatgtgttgtcataagcaatatagaggcatagagaggagccctgttccccatctgggacccccctgtctccttaactagccagtgctcatattttttaagtcctagttttccc

SEQ ID NO: 28843 - DNA, 120 bp, synthetic construct
  source 1..120: mol_type = other DNA
catttcaccagcccagattgttacgttcacttggacagtagtcatcggcgtggtcttggtgtgcacagactgaaagcattttgcctctcgttgtgtgaaaatgtgtaggggaaactggct

SEQ ID NO: 28844 - DNA, 120 bp, synthetic construct
  source 1..120: mol_type = other DNA
gggcctctaagagcgcagaagcgagcaaaggtgaaagcacctctaggttttgtacaacagtgtgtggattactgctgtcaacagcttacatctttgttgctttttgtttttattttttga

SEQ ID NO: 28845 - DNA, 120 bp, synthetic construct
  source 1..120: mol_type = other DNA
gaaaacaaattctggttttataagaagtttctttacatgttcctggaaactcaatcctccacgttctttctttgcctggacgtagagtatttcatgagtaccccattggtccggaggtcg

SEQ ID NO: 28846 - DNA, 120 bp, synthetic construct
  source 1..120: mol_type = other DNA
ttcagcctaaaagcaaacatgagaaggtggtagctttttttatccccctccaaactgcaaaaccagttttaggctatttatagtatacagcccttcatacctgcatttcaacagcatgtg

SEQ ID NO: 28847 - DNA, 120 bp, synthetic construct
  source 1..120: mol_type = other DNA
gggtccaatatgtagacctgattaagtcactggctattagttattgaactcaatctccagcccctctcccttcctgggaggttgggctggagctgaaagtcccaaccttctaatcttgtg

SEQ ID NO: 28848 - DNA, 120 bp, synthetic construct
  source 1..120: mol_type = other DNA
cggcctaggtcttggggacaaaatattcgaaagcttttatttattcagagtttgaaacccctttagagacaaggatagctgtgtatcccaagtgaatcctctctcctagagaactagaca

SEQ ID NO: 28849 - DNA, 120 bp, synthetic construct
  source 1..120: mol_type = other DNA
aaaatgacacaacccacagatttgcaccagagggagaagaaacctaggatgacgaggggtcacagaggccgaatctctgtgaagagtatttcaagaagctgacgcttttcctgactatgg

SEQ ID NO: 28850 - DNA, 120 bp, synthetic construct
  source 1..120: mol_type = other DNA
aagggcccgggatggaacctttaaaagtccaccattgagtgggcggccggccatagagagacaccgtcagaaaagggggagggccaggcgcggtggctcacacctgtaatcccagtgctt

SEQ ID NO: 28851 - DNA, 120 bp, synthetic construct
  source 1..120: mol_type = other DNA
gtgttgtttttaatttgagcacctttaaaaatccgagagaatgagacccttgagagagaaaagttgcctgtaagaaaacaatgtagtcaacggcatcagactctgagatgggcgtgcagg

SEQ ID NO: 28852 - DNA, 120 bp, synthetic construct
  source 1..120: mol_type = other DNA
ttaagcttaacttgtccaaaatcaaccacttaattttgctcccaaaactcagccccctgcctccgtcttccacatcatcataaatggcaactccattctgccaatgctcagccaaaaaat

SEQ ID NO: 28853 - DNA, 120 bp, synthetic construct
  source 1..120: mol_type = other DNA
aggcatttggacgaatgttctcggtcatcagttttgtaaaacacaagaagagggatgggcttctctttctgtgataatcatcaaaagataccatagttacttctcctccaaaagagggaa

SEQ ID NO: 28854 - DNA, 120 bp, synthetic construct
  source 1..120: mol_type = other DNA
aaaatgactgctgaagaaaagagggcattatgacaataatacagcttagctgtgccccatcccccaacaagggtccagaaatagtacttactggaattcttcatgataaatgtggtacgc

SEQ ID NO: 28855 - DNA, 120 bp, synthetic construct
  source 1..120: mol_type = other DNA
tgcccggcctggtcctctgctttaaaccaaaagatgtgaaggatctggaacactcaccacttaatatcctgtccatatcagcaagagttagtttgtggtgatgaaatttgcaatctttta

SEQ ID NO: 28856 - DNA, 120 bp, synthetic construct
  source 1..120: mol_type = other DNA
attttattctttccacccaccccccttggtcaataaaatgccatctccgaccaacagtaaaaacaaaacaaaacaagttatctggaaagtagacttcctttcacatggcaatgggctggc

SEQ ID NO: 28857 - DNA, 120 bp, synthetic construct
  source 1..120: mol_type = other DNA
attcatgaaaagcaccctcagcaaattaggaatagaaaggaatccctcaacctgataaacagcatgtacaaaacacatgcaactcacaccacacatagggctgaaagtctgaaagaagca

SEQ ID NO: 28858 - DNA, 120 bp, synthetic construct
  source 1..120: mol_type = other DNA
aatgtaatttaatcgagaatgacatgccttttgtcaaaaagagttctgtagatggatggtgatggttgcgcaacaatgcgcatgtgcttaatgccactggactgtgcactcagaaatggt

SEQ ID NO: 28859 - DNA, 120 bp, synthetic construct
  source 1..120: mol_type = other DNA
actggcataataaaacttgccacgtccgtgacgatatccatttacaaactcccctatgtattcatttctcaaaggatactgggaactgcggattctctttagaaaccatgtgtgtgttcc

SEQ ID NO: 28860 - DNA, 120 bp, synthetic construct
  source 1..120: mol_type = other DNA
cacttgagcctcagagttcaagaccagcctgtgtgataaagtgagacctcgtttctaaaaaaaaaaaaattatttttttagttagccaggcatggtggcagtgggcacctctgtagtctc

SEQ ID NO: 28861 - DNA, 120 bp, synthetic construct
  source 1..120: mol_type = other DNA
tcctcccctccccgtggcgcatgttgtcttcccactggccttcgtatatatttccagatttataactaggatgaaagaaaccaaagaaaaacaatcagttacctcctacacaacatttac

SEQ ID NO: 28862 - DNA, 120 bp, synthetic construct
  source 1..120: mol_type = other DNA
cccagccctttttgatgttttgtacccagtctccctcgtaccaacacgtaccctcttgattgtaataaatggagccctgaaacaaataatgtcatctttaaaactatcaagcctcatgac

SEQ ID NO: 28863 - DNA, 120 bp, synthetic construct
  source 1..120: mol_type = other DNA
gcaaaaatgacctccccccctgccgggagtttcccgagacaacgaggcacagggcggttcttggtaagttgtcacttaaggaccagaaactggcccagtgcggtggctcacacctgtaat

SEQ ID NO: 28864 - DNA, 120 bp, synthetic construct
  source 1..120: mol_type = other DNA
atttgtagttaaaatttcagttttacaacacaatgtcattatcattctcctgacaaagtctgaaaaattagttaccagggccgggtgtggtggctcacacctgcgatctcagcacgttga

SEQ ID NO: 28865 - DNA, 120 bp, synthetic construct
  source 1..120: mol_type = other DNA
gccgcaaacaaattaccataaatttagtggttcgaagcaacacaaatttattaccctacagtatgtaaattagtcccacagtgctggttccttccagaggctgagggagagaatgcgttt

SEQ ID NO: 28866 - DNA, 120 bp, synthetic construct
  source 1..120: mol_type = other DNA
actcagcagccagtgattacttttaaagggctgtcaggttattcattccacttcacagctctccccctcacctgaataaaagcccccgtctgtcccctgacttggccctcgctgggctgt

SEQ ID NO: 28867 - DNA, 120 bp, synthetic construct
  source 1..120: mol_type = other DNA
ctgagtcacactaaactcaggacatcaaaactgcccggctatgagctcagctccacgctctcactcacagactccaagactggaagatccatattatgtcttttattttggtgaggtcag

SEQ ID NO: 28868 - DNA, 120 bp, synthetic construct
  source 1..120: mol_type = other DNA
tctgcagaatcgtgtccaatgtcgccgagtcctggcagcagcaaatctttatctcccaatgttgttatgacccataaggtccatagacgaacaaggtacctcaaacgctaactgcgttgg

SEQ ID NO: 28869 - DNA, 120 bp, synthetic construct
  source 1..120: mol_type = other DNA
agtttagccctttcagtgactggagctaaaagaatacaattttgagaaaaatccatgacttgacaaacacgtttcacttgaaagctacttaggatgaacatctgaggccgggcgtggtgg

SEQ ID NO: 28870 - DNA, 120 bp, synthetic construct
  source 1..120: mol_type = other DNA
agattttctatcagaacagcttcattaacagcagttaagttgagagtctgaggtctgaaaaacacaaaaatgattcaaaccatatcctgaagtcaaacatttagctttacagcagaaatg

SEQ ID NO: 28871 - DNA, 120 bp, synthetic construct
  source 1..120: mol_type = other DNA
aatacctgatacttagagaacatgttaaccacgtgaactggggcaggttactcaacctctctgcatgtgcctcagttttatcgcttgtggaatggtgatggtaacagtaacaaccccata

SEQ ID NO: 28872 - DNA, 120 bp, synthetic construct
  source 1..120: mol_type = other DNA
tggcctctattagatcttcaatttgagggggagtctgggaatgaacactaaacacactcacgctatgagcctctgcccctggagcacggtgtgctgctgcagcatctcgaagttatactt

SEQ ID NO: 28873 - DNA, 120 bp, synthetic construct
  source 1..120: mol_type = other DNA
ggaattgtctgaatatgccctggttcccagtacatagataatctgctcaaaagctggtgctggcctaaaagacccaagtcttccatgtgtttggagtctgtgtcctgccacagagaacag

SEQ ID NO: 28874 - DNA, 120 bp, synthetic construct
  source 1..120: mol_type = other DNA
gccgcatactcgctgctgcagtgactgcccgtgtctgggatgctgaacccctcagaatccacggaagtgctgccgtgccccgagtccttctccacctccgctctgtccgtagggtcactg

SEQ ID NO: 28875 - DNA, 120 bp, synthetic construct
  source 1..120: mol_type = other DNA
tggggagtgaattccctaggatgaggcatcagaaaggtgccctgtaatattctacaactgcggcttgttctgggttgcagttatgtgagtgtattaatttataaagattcttcaagctgt

SEQ ID NO: 28876 - DNA, 120 bp, synthetic construct
  source 1..120: mol_type = other DNA
aaaaaaaaaaaaaaaattctcaatagaccaaattcaattcttctaccactctctcctaaacctctccaatcaggatttcccttacagatccagccacagggcctcagagagtcacatgac

SEQ ID NO: 28877 - DNA, 120 bp, synthetic construct
  source 1..120: mol_type = other DNA
ctgcataccaacacagcccaaattttaaacatctgaaacctaattctggccttttctcaagcctgctttacccacagtcttccccatcccagcttcaggcaacctcattttcgtagtagc

SEQ ID NO: 28878 - DNA, 120 bp, synthetic construct
  source 1..120: mol_type = other DNA
aggccaaccatgagacacatcgccaacctgggtgtcatttctcagaactgaccgtagtcactgtatggaataattggttttatcgcagatttttatgttttgaaagacagagtcttcact

SEQ ID NO: 28879 - DNA, 120 bp, synthetic construct
  source 1..120: mol_type = other DNA
taggaaacgcactgagaaacgaaattggcttgatttgtagttcacttatttgtagatcactgacagaagaccgaaaagctcgtagtaaaggcccctctaaatttagaggtgagagcacct

SEQ ID NO: 28880 - DNA, 120 bp, synthetic construct
  source 1..120: mol_type = other DNA
cctgtacttagggatttttctgtgtgtcatcggtttaattcttatgagacaaggttctgttatttctatttgtgaggcagaggagattaagcagcttgcttcagaacacagcacttggcc

SEQ ID NO: 28881 - DNA, 120 bp, synthetic construct
  source 1..120: mol_type = other DNA
gaccaaattgttcgccaagagattgtaccaggctcaattcccacccacaaagtgagtgagcacctgaaatgctattctaaaaatcccaaatgcagagttgctaacagatggtgtttataa

SEQ ID NO: 28882 - DNA, 120 bp, synthetic construct
  source 1..120: mol_type = other DNA
agctgtgatatgcaaattatcaggtgaagatctgggctgggttttcaggaccattaaatgtttactgagtctcttggcagaacagtggtctgtggtcgtggaaggaacagaaacagctgt

SEQ ID NO: 28883 - DNA, 120 bp, synthetic construct
  source 1..120: mol_type = other DNA
ttccttttaaaattttattttatgtgttttgagacagggattcactctattgtccaggcttgagtgcagtggtggaatcatgcctcactgtagccttgacctcctgagctcacacgttcc

SEQ ID NO: 28884 - DNA, 120 bp, synthetic construct
  source 1..120: mol_type = other DNA
ctgtgcctgattcggttcactctcttgactgaggcgatggtttcacaggtatagatgtgtgaaaacacatcaaagggtacagtttatgtgtagttcattgtaaatcagttacagcccatt

SEQ ID NO: 28885 - DNA, 120 bp, synthetic construct
  source 1..120: mol_type = other DNA
gattacaggtgtgagccactgcgcctggccctcccccttttctgacggcgtctctctatggccggccacccactcaatggtggacttttaaaggctccgtcccggggccttgtcttctca

SEQ ID NO: 28886 - DNA, 120 bp, synthetic construct
  source 1..120: mol_type = other DNA
tccaaaaaaaaaaaaacaaaaaagaaaaaacgaggtagcaggaaactcaaagggaaggctgacaatcccagccagggtctgctgagcccctgccttgttccaggtggtcatggaagcagc

SEQ ID NO: 28887 - DNA, 120 bp, synthetic construct
  source 1..120: mol_type = other DNA
aagaaaaagtagagagacacgaggacacacacacaggcttaggatggcacgtgctgtaagatttcctgagcattacagttcttagcactgaactcgtcacagtgttttaacatacccctt

SEQ ID NO: 28888 - DNA, 120 bp, synthetic construct
  source 1..120: mol_type = other DNA
agaaaaactgtttggaaagagttgtaaatttagttgtctgggtagacaaggaacttaaatcgggtgtaagcttctatcctcaaaacactctgtgaggccaggagcagtggctcacgccta

SEQ ID NO: 28889 - DNA, 120 bp, synthetic construct
  source 1..120: mol_type = other DNA
catgcagccagttttaaactcctctgcttggaaatttgaacccaaatcaccctagttctgctttaaataatcactgctttattttgacaatatctatgaagatgcttcctacccatcctc

SEQ ID NO: 28890 - DNA, 120 bp, synthetic construct
  source 1..120: mol_type = other DNA
ttcaaaatacttacccgatggaagaatttctctaatctttctttcagaagcttgacgcctccgtcttccatggctttcagaaatgtaccattaaaaagctagtgaggtaaaagattgcag

SEQ ID NO: 28891 - DNA, 120 bp, synthetic construct
  source 1..120: mol_type = other DNA
gttggactctgagttgagaaagaacgccacgcttaccttgtacatgctgtagcactgccgcagcaccgagctataaaccttgtcctgcagacgcgaaaacacagcacacagctcagttca

SEQ ID NO: 28892 - DNA, 120 bp, synthetic construct
  source 1..120: mol_type = other DNA
cactgtgtgtgtaaataccatgaccatccagaaattttcttctggttcattgaagaactgtctgttcttctgtgtatgtaaagattttgcaggttttgatgggctaaatgtcctacaaag

SEQ ID NO: 28893 - DNA, 120 bp, synthetic construct
  source 1..120: mol_type = other DNA
ctggaagaattaggtaacgcccctaggtgcccgttagaggtctccgattggttacaccctctgaaggattggcctgtgaccaatcagaggctgaagtggagacgcgcacccgcccccccg

SEQ ID NO: 28894 - DNA, 120 bp, synthetic construct
  source 1..120: mol_type = other DNA
ttttttagaattacatagtaatgtttagatgccaaatttgtctactgagacatgagagaccctgagagtcccagcatgctggacaagcttgttgctgctgacgcagaagcaaagtgacat

SEQ ID NO: 28895 - DNA, 120 bp, synthetic construct
  source 1..120: mol_type = other DNA
aagaagatcgaagaagaaacaacgttaagtattactactctcagctgcattcttacttcagtctgaccaggactttcatgctgcctataagctacttcctattttacttagagtgcttcc

SEQ ID NO: 28896 - DNA, 120 bp, synthetic construct
  source 1..120: mol_type = other DNA
ccaggactagacggattcacaacaaaattctaccagacattcaaagaattatcaatcctattgacactattccacaagatagagaaaaagggaaccctccctgaatcattctatgaagcc

SEQ ID NO: 28897 - DNA, 120 bp, synthetic construct
  source 1..120: mol_type = other DNA
agcctcacctgtgaaactcacataaaactgacaatctagggtgaaatggagagtgagaaagtaacataacctagaaaccccaacaaactctcctgtattgatgcttcgcatggttgtctt

SEQ ID NO: 28898 - DNA, 120 bp, synthetic construct
  source 1..120: mol_type = other DNA
ctggctttccttccaaaaacactgggaagagacatctcacaggaatccactttactactggccattttcattaaatacaggcactctgatctccttaaaaatacaaatgcaggaggacag

SEQ ID NO: 28899 - DNA, 120 bp, synthetic construct
  source 1..120: mol_type = other DNA
attaagtactcaagagccacacggggttagtggataccatattgaacagtacaagtttcgcagtaaagacagatatataatttccagaatcagtagagccttgacatttgcaagggacat

SEQ ID NO: 28900 - DNA, 120 bp, synthetic construct
  source 1..120: mol_type = other DNA
ttcccatttcccatcttcaatcattttcacccccacctgtgttcagtaagcccactgacattgagagaccatggatggagggcagaaagtttggccagaagaaatatagaatttttttat

SEQ ID NO: 28901 - DNA, 120 bp, synthetic construct
  source 1..120: mol_type = other DNA
agtgtggggagcagtagctatcacctttctacttggcaacatgccttactactctgaagaccagtcattctttagctactgttaatgctgattacacagaaaattgcacaacacttcact

SEQ ID NO: 28902 - DNA, 120 bp, synthetic construct
  source 1..120: mol_type = other DNA
gaacatctgtatgtatattattaataccagtggctaataggtacaaatgtcttacatatactattctgaaaatatggttggaaggtaagtcaatccttcctcgtttgcttctttttcttt

SEQ ID NO: 28903 - DNA, 120 bp, synthetic construct
  source 1..120: mol_type = other DNA
ttcacacagacatatatatatgaatacatacatactaagacaaatacagaacagtccttaacctagttgctccattagaagtacttccttctgattacaaaatgtcatctaggttacctt

SEQ ID NO: 28904 - DNA, 120 bp, synthetic construct
  source 1..120: mol_type = other DNA
attaggaaaagtagaattaggacctgataaaaattttgatagcatcattcatgactgtgtgagggaaactgaaagtgagtggtaaagagcagagctgtttgccggagtgagggcattcgt

SEQ ID NO: 28905 - DNA, 120 bp, synthetic construct
  source 1..120: mol_type = other DNA
ccacaaggtgctccaaagtaccatggtactacatgcatacctattagagatgccatgtacattccagaacagagctgcatgcactctgataaacaattgcttgctattattgtctttgac

SEQ ID NO: 28906 - DNA, 120 bp, synthetic construct
  source 1..120: mol_type = other DNA
ttttccttggtctcaatttagacagttttgggtgagcagtgaaaataagaatggaaattgaaggcctcggtctgattccaggctgttatgtaagtctagaataagacctcctgtgggtga

SEQ ID NO: 28907 - DNA, 120 bp, synthetic construct
  source 1..120: mol_type = other DNA
taactggcagccctgaatcaattatagaccagcatctacaacaaatgcattttaatataattcagagtctctacccatgtggacatatcatctcccttactggggtcccagagtagggaa

SEQ ID NO: 28908 - DNA, 120 bp, synthetic construct
  source 1..120: mol_type = other DNA
catatatatttttaatgaattgtactgggttaatagtgccaacagaaataaagctctatgtatttagtctctagtttttgaaatcaaactaaatggaagctaagaatggtagatggcaga

SEQ ID NO: 28909 - DNA, 120 bp, synthetic construct
  source 1..120: mol_type = other DNA
ctgtacacagaagggactccttccagaaccaaattgttttaagtgaaccttctccttaggagagtttttattgtcagaattggagaaagaagcagagaagaactgaaactccagattaca

SEQ ID NO: 28910 - DNA, 120 bp, synthetic construct
  source 1..120: mol_type = other DNA
caaatcacctaaactgtctatctattggtttccttatctggaaatgcagatgataacaactgaatctacatcatagaattactgtgagcattaaatctgctaaaagcacttagtaatgta

SEQ ID NO: 28911 - DNA, 120 bp, synthetic construct
  source 1..120: mol_type = other DNA
gtagaaaatgccacctagctgtgtaattgaaatggaacatgtcagctttcctagtatatgctatgtgtcactcactatggtagaaaatgccacctagctgtgtaattcaaatggaacatg

SEQ ID NO: 28912 - DNA, 120 bp, synthetic construct
  source 1..120: mol_type = other DNA
tggggcagagagaccctggggttgtttgtgagttaactttaccacatatcatcttgtgaccaggtttcaatataggaatttacaagagggcgtaacttaggtttatccacgtttctcgtg

SEQ ID NO: 28913 - DNA, 120 bp, synthetic construct
  source 1..120: mol_type = other DNA
ggtcccatatcttcacgctgctaaaatcaaagggcttcatcatcctaatagctattcctgcagtatttgaaacgtgtgaccattacttcctcatgaagtctctttccttagcctctacta

SEQ ID NO: 28914 - DNA, 120 bp, synthetic construct
  source 1..120: mol_type = other DNA
gtgatatttactctcatgttttgtgattttactctcgtgttttgtgattttactctcatgttttgtgattttactctcatgttttgtgattttactctcatgttttgtgattttactctc

SEQ ID NO: 28915 - DNA, 120 bp, synthetic construct
  source 1..120: mol_type = other DNA
ttactcctatttcctaatatatgcatctcattgatttgaccatataggtatactctgccctagcagggctcctaaaatatactgccattaggtgggtgctacaaagttgaaaaagacgtg

SEQ ID NO: 28916 - DNA, 120 bp, synthetic construct
  source 1..120: mol_type = other DNA
gggatcctgagactaaaagtttgagaaccagtgtactctttggctaattgggctagatgagcaataaatgatatgtaggctgtagatcttataagataatgacttgccagggtgtgaaag

SEQ ID NO: 28917 - DNA, 120 bp, synthetic construct
  source 1..120: mol_type = other DNA
aaggtactactgaaataattttgtcactatctcttattgccattgtggtgggctcaagtgttgtgagtatctgcttaaaactccacgtgatgctaatcatcccgagggagcagttccttt

SEQ ID NO: 28918 - DNA, 120 bp, synthetic construct
  source 1..120: mol_type = other DNA
aactataagccaaaacactctgataccacaactaacaaaatctgtattcacactcaaatgtctcaggtattcttccatcaatttttctgaccttttaattacactaaatatatatatata

SEQ ID NO: 28919 - DNA, 120 bp, synthetic construct
  source 1..120: mol_type = other DNA
atttgtaggacacagtgctcagggatttatgttaaagaatttttgtttgttttgcattgctggttcttgaaggttatgtacgtaaaggctgagaaaactaaaaggtattaatacctcaaa

SEQ ID NO: 28920 - DNA, 120 bp, synthetic construct
  source 1..120: mol_type = other DNA
aagaaaactttgtaaaacacggcagtagctgcaacatttcccaccgagctaactgtttctggtgaaagcctaaccatccagttgactcaccattgttcttctattccatgatgatgtttc

SEQ ID NO: 28921 - DNA, 120 bp, synthetic construct
  source 1..120: mol_type = other DNA
ttcttttccacaaaaattctgatatgtctaattaagatgtaactataaaaataaaacattttaaaagctacacatattgtaatcttatccagggtcccttgactacttctcacctgactc

SEQ ID NO: 28922 - DNA, 120 bp, synthetic construct
  source 1..120: mol_type = other DNA
aagaggttataatggaatttgttcttgtcttttgctcctttaaatatccattgatctcatgccaaagtattttctaaccaggttaaagtccaattctgtactcacgttaggctaagattc

SEQ ID NO: 28923 - DNA, 120 bp, synthetic construct
  source 1..120: mol_type = other DNA
acaagagagtgtattccaggaagaacacaccataactggtctaaagggctatggtgctgaacatattcattgtttcacatcctatcatttcctgctaatggacagtaataatatggttaa

SEQ ID NO: 28924 - DNA, 120 bp, synthetic construct
  source 1..120: mol_type = other DNA
tgtttgccaatcttttcttctcctattacaaaacaaaatgaaaaacaaaccaaaataacactgctggatttctaatgagattgtactgaacctatagatctgtttgggggagaatcttta

SEQ ID NO: 28925 - DNA, 120 bp, synthetic construct
  source 1..120: mol_type = other DNA
ccatgatccaccctactccaatttactatccacagagtcaatctcgtacagtttatcacttacttatgaagctgttgctgttctctggtatggggatgctaatacgcctagatacttggt

SEQ ID NO: 28926 - DNA, 120 bp, synthetic construct
  source 1..120: mol_type = other DNA
gctatagctaagacttccagtactatgttgaatagaagttgtgaaagtggacacttttttcttgttctggttcttagggaaaatgcttttacattttccccattcagtgtgatgttggct

SEQ ID NO: 28927 - DNA, 120 bp, synthetic construct
  source 1..120: mol_type = other DNA
aaagaagaagaaatgcaaagctttattatattaacacaaaaatatcaaagaggatctgctaataaccccagtgtttacgttttacgctattccctgaattttttctcgtaattcacgaga

SEQ ID NO: 28928 - DNA, 120 bp, synthetic construct
  source 1..120: mol_type = other DNA
tagctcagtaaaactcttctaactttggttctttattttctgttgggaaagagtcactacaacccagcagattctcaaaggagggtgtgatcctaaaattgttagcgacaagggtgccag

SEQ ID NO: 28929 - DNA, 120 bp, synthetic construct
  source 1..120: mol_type = other DNA
tcagaagactcaaaaggcccctttgtttggaatacacacgcgcacacacacacacacacacacgtatattccatataagtacacatgtacacatgtgtgtgtatatatatggaatataca

SEQ ID NO: 28930 - DNA, 120 bp, synthetic construct
  source 1..120: mol_type = other DNA
attgctgttctttagcacctagatttaggacccttccttctcacctcagctatgactacaaaaatgtctccagatacttccaagtgtttcctggggagcaaaattttccccagttgataa

SEQ ID NO: 28931 - DNA, 120 bp, synthetic construct
  source 1..120: mol_type = other DNA
agggcaaatgccaccagccttataaatattccctcagtttaataccttttttaaaaaaatatgctatctttcttgtcaactccagtgaaaatggaaataggcattaagataccaagatct

SEQ ID NO: 28932 - DNA, 120 bp, synthetic construct
  source 1..120: mol_type = other DNA
cagccatttcaaagtggcattcttgatgcgttttccttttatggcaaggcaaacacacaaagttccctgtgtaagacagaatgcatttattatatggctggtaacgattagggcagtgct

SEQ ID NO: 28933 - DNA, 120 bp, synthetic construct
  source 1..120: mol_type = other DNA
accaaactgctccaatagcatgaatatcagctgcacaatagtctaatgagatttgaactgtcagcagaacagaacttttgaatgatactagattcaaaataaaagaatagagacaaaagg

SEQ ID NO: 28934 - DNA, 120 bp, synthetic construct
  source 1..120: mol_type = other DNA
aggaaaaccgagttatgaaaccaagccacacacctgggaatcagggtggagaatgaggactaggttgatagggacacaatggctttccactgtgtacaagtatatgtgatttaagtttaa

SEQ ID NO: 28935 - DNA, 120 bp, synthetic construct
  source 1..120: mol_type = other DNA
ggggattttaaatgtcctcccacctaccccttcatgctcccttaaaaatgatcagtcacttctgcaaaactcagaaggaagctccactctttaccctatcagtagttactaaataaaatc

SEQ ID NO: 28936 - DNA, 120 bp, synthetic construct
  source 1..120: mol_type = other DNA
tagaatgaataaagcagatggcttttcacagtatagtaagcctcatccaatcaaatgaaagcctgagacatccactcttcagattttggacttaccagcctccataagttcatgagccaa

SEQ ID NO: 28937 - DNA, 120 bp, synthetic construct
  source 1..120: mol_type = other DNA
ataaaagaccagagtcttctactgccctcatgtagatcacagagtagggagtttactccaaaaaaaatagtgcactgtgcccacccacagttttaaagcagtgatgtggtgatttttcct

SEQ ID NO: 28938 - DNA, 120 bp, synthetic construct
  source 1..120: mol_type = other DNA
cctcctctcccctcctttcccctcctttcctgtcctttctttccaggcatataaaaaccctgttaaacaattatcacggtgcctgataagaatttcagtttaagttctcataacttatta

SEQ ID NO: 28939 - DNA, 120 bp, synthetic construct
  source 1..120: mol_type = other DNA
tcacactcacaccacgtttctgtttttgttattggtgttgcctctggtgtaccttgggcattattgcccagggataaatgcataactatccctgcttgttccctgatacaaaaaaatgat

SEQ ID NO: 28940 - DNA, 120 bp, synthetic construct
  source 1..120: mol_type = other DNA
atcccctgtgaagaaaagaaggtctctaacaatataaacctgtatcaggaaaccctgtgattctgattctgtgcacagaaggatacatggaattctcagaccttttctagttgcaacctt

SEQ ID NO: 28941 - DNA, 120 bp, synthetic construct
  source 1..120: mol_type = other DNA
ttattaaataaatatgagccagtaggctaggtgcctgagtgtttttgccttcgcggttgtcaggtttctaatacataccaacccaacaacagtttctgggactctcttttaaagggctgt

SEQ ID NO: 28942 - DNA, 120 bp, synthetic construct
  source 1..120: mol_type = other DNA
aaaaaaaaaaaaccgactgacttgaaaagagcatgagatggacttgtgggtgctggtaatgatgggattcttgacctggataccatgatacgggcaaattccgtttgaaatgcactgatc

SEQ ID NO: 28943 - DNA, 120 bp, synthetic construct
  source 1..120: mol_type = other DNA
gtcggactacaatcgtggtagcacaccgactttctactattcgaagtgcagatttgattgtgaccctaaaggatggaatgctggcggagaaaggagcacatgctgaactaatggcaaaac

SEQ ID NO: 28944 - DNA, 120 bp, synthetic construct
  source 1..120: mol_type = other DNA
ttgaatatctgaatgggatattcagaccattttcatttaatgtggttatcaaaatgattaggtttaagtctctcattttgcaatttgctctttattccatatgttctttgcacagttttc

SEQ ID NO: 28945 - DNA, 120 bp, synthetic construct
  source 1..120: mol_type = other DNA
aaagcgttaagcttgatagtgactaattatttcaggttttttatgcctgaaaagtctttatttcaccttaatttttttgaaatatatttccaccagttatgaaatttgaggttgacagtt

SEQ ID NO: 28946 - DNA, 120 bp, synthetic construct
  source 1..120: mol_type = other DNA
ctttgcttttaagatgctctctttatcactgactttgaaatgtgattgtgatgggttttgaaatagcttcctacttgtttcttatgcttgaagttcactgaaattcttagatttatgggc

SEQ ID NO: 28947 - DNA, 120 bp, synthetic construct
  source 1..120: mol_type = other DNA
gggcagagacagtacaagatgaaactggaaaatcattttgtgtcagaaagtaaggacatattccaaaactgataggtatatgtcaaaggacaaagccaacgtgaagggacttccactggc

SEQ ID NO: 28948 - DNA, 120 bp, synthetic construct
  source 1..120: mol_type = other DNA
tgaaatgtgtgattccaatgtagatatcctttcactataaaatacattattgagacaactgataaaacttgaaggaagtctaagcattaaacgatagttatgtagtttcctgattttgat

SEQ ID NO: 28949 - DNA, 120 bp, synthetic construct
  source 1..120: mol_type = other DNA
aaataaaaaaaaagaatccactttcttaatatcactaactcactaatgagggcagagccctcatggtacctcttaaaggtctcacctcaaacactgttgcattgttgattaagttgcaac

SEQ ID NO: 28950 - DNA, 120 bp, synthetic construct
  source 1..120: mol_type = other DNA
actaaaattggtacacctgcatagaacacctatcgcgaatggagcatgcagaactagaaattgctctggtttagtcagtgagtgaatgtgaaggcctaggacattactgtatacaactgt

SEQ ID NO: 28951 - DNA, 120 bp, synthetic construct
  source 1..120: mol_type = other DNA
atggtttcataggcaacatgcagttaatgccagcccaaggagatactaggtggtccattaatttcaacagtgactctaagaagagagctagcctcactacacaggtgaatactatttcaa

SEQ ID NO: 28952 - DNA, 120 bp, synthetic construct
  source 1..120: mol_type = other DNA
ctgccagcaaatgcggcctgactgctcataggacatttcagtaatcaactggaaaatgaaaaatagaaaaacacagggggaagaatgagaagaaagagaatcccagaatctaacagaacc

SEQ ID NO: 28953 - DNA, 120 bp, synthetic construct
  source 1..120: mol_type = other DNA
aacgtaccagccacgtagtaaacgcttggtaatagttaccattactgtgctctactaatggccaaaactcagactcccaaagaaatggaaagctaagctgttgcctttctcacaatacta

SEQ ID NO: 28954 - DNA, 120 bp, synthetic construct
  source 1..120: mol_type = other DNA
catgctcaatccaggcatcttctttattttgttggacctaccagaaggtaaataaagaaagaagaaatgcaaacaacagttatttcctgaatgtgaatctccttctacactcttccctgt

SEQ ID NO: 28955 - DNA, 120 bp, synthetic construct
  source 1..120: mol_type = other DNA
accaggattggaattttataaaaatattgttgatgggaagttgctaaagggtgaattacttccctcagaagagtgtaaagaaaagtcagagatgccataacagcagctattttaattggc

SEQ ID NO: 28956 - DNA, 120 bp, synthetic construct
  source 1..120: mol_type = other DNA
ctatagagtgttagaaagaattggaagggccttggggatgatctggtccaaggctttcatggtataaacaaactaagaccccagattttcagtaacgtattcaaggttattcagctaagt

SEQ ID NO: 28957 - DNA, 120 bp, synthetic construct
  source 1..120: mol_type = other DNA
ccttagcaaactcacagatcctcatccaggattggtgtaacattttttagggaaagaaaacatatgtcacagtactattcattgtttttattagttctgaatttatttccagaggaacac

SEQ ID NO: 28958 - DNA, 120 bp, synthetic construct
  source 1..120: mol_type = other DNA
gcattagacactgaggaaagttcacaactcccaactacgatccctattttaatgtgggaattgaggctctgagatagttatatatcatttaagtgggtagagtgcgatgtggcctaagtg

SEQ ID NO: 28959 - DNA, 120 bp, synthetic construct
  source 1..120: mol_type = other DNA
atgctgctgctttttctaaggccagtacttctacctaggctttggcttcctggatgctgggcttctcagaagtattatactgttggttattccatctttgttgagcatctttaacttttc

SEQ ID NO: 28960 - DNA, 120 bp, synthetic construct
  source 1..120: mol_type = other DNA
tcaacacctaactggccttacaccaacacatgcctccttctatcttgtcatctcataataggaatgctgcatcccctacatgaaatgacaaaatgtattctgcatagaaatccctctagg

SEQ ID NO: 28961 - DNA, 120 bp, synthetic construct
  source 1..120: mol_type = other DNA
tatgcctctctagctgaaattcctttggagactaataggcagtagttcttctagtacctttggctgagtgaaagcttctctgcctgctagttgctgctattgctgttgatagttacttta

SEQ ID NO: 28962 - DNA, 120 bp, synthetic construct
  source 1..120: mol_type = other DNA
ggccctcaactgctctatccccttaagaaaatacatctcagatcttctgcagtgggggaggttttggagtggtgcacagaatttaaggatgaattgcttcatagaaaatagttaatgcat

SEQ ID NO: 28963 - DNA, 120 bp, synthetic construct
  source 1..120: mol_type = other DNA
agccatctatagaaaccatttatccatagcctttcattactatacaaataagctagtcaatcaaaaatatttattgaatggacctcttttgagctgtttatcctattttttccagttggt

SEQ ID NO: 28964 - DNA, 120 bp, synthetic construct
  source 1..120: mol_type = other DNA
gctccaccccctgacttgttctttttcaatttggattccttttatttttcttgcctgattgttctgactaggacttccaggactgtgttgaagagaagtggtgaaagtggagatccttgt

SEQ ID NO: 28965 - DNA, 120 bp, synthetic construct
  source 1..120: mol_type = other DNA
gccctatttttaaaaggttggactatcttgtgagacaaagtagtctcagtttgccatcaccaaccaatccttagcattaagctcttgaaaacaactaggtagagaaattttccgtgaagg

SEQ ID NO: 28966 - DNA, 120 bp, synthetic construct
  source 1..120: mol_type = other DNA
aggccatatttgtatcagctgcaaatactcaatgccagtcatagaatgttcttccaaccacttgtggcaagtgaaatatatttttattgagttatgctagtgttgcaatagtgctcttta

SEQ ID NO: 28967 - DNA, 120 bp, synthetic construct
  source 1..120: mol_type = other DNA
cctgacccccaaccccttgccattagtctttccacattcctacttctcctcacccaatttggaagcattaggttaatacacatactaaggaatggagttttcaagtcattgatcatttct

SEQ ID NO: 28968 - DNA, 120 bp, synthetic construct
  source 1..120: mol_type = other DNA
aacatttctctaagaattaagattccctcagcatggaggtagaggtaatacatgtgcatatacatatttatttcaagcagcgcattcccctatatggtttcactgtaggacttcaccgaa

SEQ ID NO: 28969 - DNA, 120 bp, synthetic construct
  source 1..120: mol_type = other DNA
aaggacagacatacattatttttgtctgcccaaccaactccccattttggtaccagcacatcaaccttcctgttgtttaataaagagacattcagtggctcacacctgtaattccagcat

SEQ ID NO: 28970 - DNA, 120 bp, synthetic construct
  source 1..120: mol_type = other DNA
caatcacgggagcccgaggcagggaggttgcagcgagccaagatcacggcagtagagtccaggctcagcaatggagggagaccgtcgaaaggagggaaggagggaggaagggaggaagga

SEQ ID NO: 28971 - DNA, 120 bp, synthetic construct
  source 1..120: mol_type = other DNA
accccagctgtgatgtcattatctctccagtttctctttcatcactttccagcctccattcttaaagaaccaccaaatgtagtaatatttcctaggttcaagtacgaggagggagccatt

SEQ ID NO: 28972 - DNA, 120 bp, synthetic construct
  source 1..120: mol_type = other DNA
aacaaatgcactgtaatcttttggcgaaatacagaaaaaaaggaagtaaaaatcagtcataatcctaccacttagaaatgactactgttaattcttaattttattgtgcataagctccag

SEQ ID NO: 28973 - DNA, 120 bp, synthetic construct
  source 1..120: mol_type = other DNA
ttcattttgagattaaatgttctcatatcaactttatgctctttagtgattgctgcccaaatggggcaggcttgttcttgctccataggaaaacccaggtgctaaggaggtaggtgacta

SEQ ID NO: 28974 - DNA, 120 bp, synthetic construct
  source 1..120: mol_type = other DNA
gtcctagtcaaaatatttggatgtgagagaagattaaatggacaagatttgggattgtcctttgatttcaattatccaggctaaacctgtttttccattgttgtagaaaagaaaaaaatc

SEQ ID NO: 28975 - DNA, 120 bp, synthetic construct
  source 1..120: mol_type = other DNA
tagcaggtttggatgcaatgccacctggtggcacagataaattcttagctggacttaggtttttggaaactgagctgttctatgaaatactaaccaactcttctgactactctaacctcc

SEQ ID NO: 28976 - DNA, 120 bp, synthetic construct
  source 1..120: mol_type = other DNA
agctgaagatgtgaaaaactttcagtaactctatcaaccattacctgaattacaacacttctaagggtacaaagcgttcatattctaaaatgcagtgtttctgctacagtgggtcatatg

SEQ ID NO: 28977 - DNA, 120 bp, synthetic construct
  source 1..120: mol_type = other DNA
gggctcctgtatttttttttgacatgctccacccctctcttaattcctttttgtggactgctactttgctttaaagcgccacaagaatttctcttatcttatagattgtctgcctctcct

SEQ ID NO: 28978 - DNA, 120 bp, synthetic construct
  source 1..120: mol_type = other DNA
agtttaaaaacaaataagcaaaaaatccaggattctcaggctgagatgttagagttcagttaccaaggtgtgaatgggacggtgctttctgcctcagtgtcctgaagactaagacgtggt

SEQ ID NO: 28979 - DNA, 120 bp, synthetic construct
  source 1..120: mol_type = other DNA
taagggcctcactcttgcagataaactatgtcagctcctctactccctctgtatcatctcctttgtcttaagtcttttgttgctgtgacaataggaaagacattatatctggtggtatgg

SEQ ID NO: 28980 - DNA, 120 bp, synthetic construct
  source 1..120: mol_type = other DNA
tgccctccaagcctgtggtgatgatgccataagaacagataaaaatatctggcatatagcaaaagtcctcaatgacattatcatcatcgttatcactaactacctgctcaatgtgtggtt

SEQ ID NO: 28981 - DNA, 120 bp, synthetic construct
  source 1..120: mol_type = other DNA
tttctgtattggtttgttagcgatatcccaacaacataccgcagactgagtagcttaaaccacagaaattcatttctccagtctcaaaattctggagggtggaagtccaagatcaaggtg

SEQ ID NO: 28982 - DNA, 120 bp, synthetic construct
  source 1..120: mol_type = other DNA
aagaattaaatgccatatcgctgggtgaaaggtttccgtttagattctctaggcttcttccaaacaaatatcaaggcagtttttccctttccccattaaccaacaaacgaagccacttgg

SEQ ID NO: 28983 - DNA, 120 bp, synthetic construct
  source 1..120: mol_type = other DNA
tggaatgtcattcaaagaaagtgaaactcattgaaacaaaactagtactaaatcctgtctgccctattgttccccagattgatataccctccctggacagcatcacctttgccctgagtc

SEQ ID NO: 28984 - DNA, 120 bp, synthetic construct
  source 1..120: mol_type = other DNA
tgctttggacactattgctgaatgacaagccgcctcaaagcttagtagtataaaatatccattgtcttacggttgcatgttctgttgggtcagaaattagaacagagtacagcagggatg

SEQ ID NO: 28985 - DNA, 120 bp, synthetic construct
  source 1..120: mol_type = other DNA
taatacctagcatttctttttgtgagggaagaaccaggtccccagcctcccaatacacctagaatgtgctggcaacattgtggcaagaagatgcttccttctttttctgaatttaatgct

SEQ ID NO: 28986 - DNA, 120 bp, synthetic construct
  source 1..120: mol_type = other DNA
tagaaactaccactatgttttaagtggtagggagcatgtgtgctgcttcttcacaaaagaatatcatgtctttgcagcatgggtcttgggttctgagaattgataacatgtcggggagta

SEQ ID NO: 28987 - DNA, 120 bp, synthetic construct
  source 1..120: mol_type = other DNA
cagatggaaaatcagtgtccagggttagcctaagaccaggaatcgtgagccaggctctttgcccgtcttctttcagagggaccttagtgaagtcctttctgcagaactcaacttcctgca

SEQ ID NO: 28988 - DNA, 120 bp, synthetic construct
  source 1..120: mol_type = other DNA
tgttcatctctgggtccgctgggacatctctctgctggcctgcgtggctgtacatttagagatataaccctgtgtgccctttctaataaaatgtaaataccaactgctctgagttgagag

SEQ ID NO: 28989 - DNA, 120 bp, synthetic construct
  source 1..120: mol_type = other DNA
ctaatgttggatccatttttttcctaaatagaaggttcaaccatgtaagaatggacctgtaccatccatgagcatgcatgcatacacacacacacatccacacacacacacatccacaca

SEQ ID NO: 28990 - DNA, 120 bp, synthetic construct
  source 1..120: mol_type = other DNA
cctccctaaattaatctgtggagtcaatatgacagctatcaacatataaatagggcttttggagaaaatctgacaaaaaatgatcttgaggtccatctgcaaaggatatgtgggattagc

SEQ ID NO: 28991 - DNA, 120 bp, synthetic construct
  source 1..120: mol_type = other DNA
catttgcattctcacaaagttgagtctacctggcttgggagtaattacagtgaacatggagaagtgtaactctttttggacaacacggagggcatttgttaggtacacagtgtgaaactt

SEQ ID NO: 28992 - DNA, 120 bp, synthetic construct
  source 1..120: mol_type = other DNA
aaccacaatgagacaggacctcacactcattaggatgggtactgtcaaaaagagaaaatagcaagtgttggcaaggatgtggagaaactagaatgaactgttggtgggaacataaaatgg

SEQ ID NO: 28993 - DNA, 120 bp, synthetic construct
  source 1..120: mol_type = other DNA
gaaacagacttttgacattcattgaggaatcatgaagaaacttctcagatagatgaatacctcctaatggcgcttctcaagctttggcatgcatgtggatcccccagggatctagttaaa

SEQ ID NO: 28994 - DNA, 120 bp, synthetic construct
  source 1..120: mol_type = other DNA
ggtaaaggcccatctaggggttaaaaagatgagtctactgcagaactatactaacatgataaggtaaaaatttccaagagaatctcacttagctatcaacttggacaagatatgccttcc

SEQ ID NO: 28995 - DNA, 120 bp, synthetic construct
  source 1..120: mol_type = other DNA
caaaacatatagaaaaagcaataggttcgaaagtctgtcttgtccatcttttaccaaggctcaacctcttctgctgaatatctttggttcccctaatgcctatatagtctgggagtggga

SEQ ID NO: 28996 - DNA, 120 bp, synthetic construct
  source 1..120: mol_type = other DNA
aagcccttatcaaaatgcacaaaaaccatccaggagttttgaactgcaagggactggaatgttaacgtgagccccactgaggatgggacaatatgagatttgatcctgtgattttcattt

SEQ ID NO: 28997 - DNA, 120 bp, synthetic construct
  source 1..120: mol_type = other DNA
acataaatatttatttattcattcattcatttattttgtcatccagagtgggaaggaagaggcctggaagccagattctagcaacacggcagatgcctgcagtctgagctggcagaaatg

SEQ ID NO: 28998 - DNA, 120 bp, synthetic construct
  source 1..120: mol_type = other DNA
gggtgatttaagagctcttgagaccaaacatcatcattattaatggtctggcaatagcaatgttattatagtacaaccagatcccacagggcagaggaggatgctgaaaagctgaggtat

SEQ ID NO: 28999 - DNA, 120 bp, synthetic construct
  source 1..120: mol_type = other DNA
tataattaatgacagctgattaagatggccacacttgaaaaacattcaacattgggtgtcttttgtgtgcaggcactgggagagataggctctaggaatacaaagtggggaaatgcagtg

SEQ ID NO: 29000 - DNA, 120 bp, synthetic construct
  source 1..120: mol_type = other DNA
atgtgaagaaaactataaagttctactaagggatataaaatgaatattgaagaaagtgagatccacatcatatttttggatggaaaagcttaccattttaaagatataaatttctcctca

SEQ ID NO: 29001 - DNA, 120 bp, synthetic construct
  source 1..120: mol_type = other DNA
ctaagcagcacaggaaaaaatggttgcttttgtaaattgctgatgggtctataaattagtatgatcttcttggtaggcatttggcaatatttgccagaaacttgaaaaatgtaggtatcc

SEQ ID NO: 29002 - DNA, 120 bp, synthetic construct
  source 1..120: mol_type = other DNA
caaggaatctgatcatggaaaaggggtccttgtaacttactgaggctgaatgttggtttaccatcttacattttctacgtccattaaatcagccttctgggaatccacagtcctggcaat

SEQ ID NO: 29003 - DNA, 120 bp, synthetic construct
  source 1..120: mol_type = other DNA
aggaggaaagccatctctccaaggtgagatttgtgagctgtcaggtctggctgagagaatgcacagtcctggcaattctgaactgccccagtatgagggaaaccatctccccagggtaag

SEQ ID NO: 29004 - DNA, 120 bp, synthetic construct
  source 1..120: mol_type = other DNA
ggtttttgtagtttctgacagaaagtatgaaaacatgtttcttgggtgaatggttataatataatgaaagtccaggattcaaagatgtatttattataatcccaaatttgaagaagaaaa

SEQ ID NO: 29005 - DNA, 120 bp, synthetic construct
  source 1..120: mol_type = other DNA
tgtgctttcctcctctttataactgtgcaggtgggtgtgcagagaaatagcagagtgatggttcgatgatactgaagcagtttaacatgaatgtgtctgtagggcaatactttcaaagaa

SEQ ID NO: 29006 - DNA, 120 bp, synthetic construct
  source 1..120: mol_type = other DNA
agggtggggcgacaggctcagaaaggtgagaggacagtggccacccagctaatataactgaccttcagattctggactggggagctctcatgcctcacacaaagcagccagcatgcagtg

SEQ ID NO: 29007 - DNA, 120 bp, synthetic construct
  source 1..120: mol_type = other DNA
ccaatataatgtgagcttttgtgtaggcagtttagtgtgttgactatgatgtctcttgtcttagtggtccttgggttaataattttaaagagcatcatcagagggtgctacagacaactt

SEQ ID NO: 29008 - DNA, 120 bp, synthetic construct
  source 1..120: mol_type = other DNA
cctagctgccctctctgtctctgtcattcaagctcaggtgtgatagcagcattccccacccagccacagaggtactatcccttgtgttttgctgtgttctgtacacacctttgcacacac

SEQ ID NO: 29009 - DNA, 120 bp, synthetic construct
  source 1..120: mol_type = other DNA
gtctatggacatttagattgcttctagcttttggctattgtaaatcgtgctgagttgaacatgtgtgtgcaaatatctgagttgttgttttgtttttgttttagtttagacagagtggtt

SEQ ID NO: 29010 - DNA, 120 bp, synthetic construct
  source 1..120: mol_type = other DNA
tagccttagcccttgtcaaagatcatttgaccatataggcaaaagtttatttctgggctattttgatctattggtctatgtgtctgtatttgggtcagtaccatgctgccttgattatga

SEQ ID NO: 29011 - DNA, 120 bp, synthetic construct
  source 1..120: mol_type = other DNA
tccattgtagtcttttgcctccttggttaggtttaatcctaagtatttcattcttcttgatgctattgtaaatagaattattttgttcatttccttttttaagattgttcattattagtg

SEQ ID NO: 29012 - DNA, 120 bp, synthetic construct
  source 1..120: mol_type = other DNA
tgccatagagcattttattttatgtcttctgaaaccctgtgggtctctatcagtatataaggtacttgtaggcaaagtccatgccttgtactttatatcccccaaagcacctggcacagt

SEQ ID NO: 29013 - DNA, 120 bp, synthetic construct
  source 1..120: mol_type = other DNA
ttaacacagatgtactgaatgataccctcaatgagaagaagactgttttttctcttttctttcaatttcatttggaggaaagagggaggaagaatgggtcattttgggattgtatagcgg

SEQ ID NO: 29014 - DNA, 120 bp, synthetic construct
  source 1..120: mol_type = other DNA
ggccaatatggtaaccactagctacatgtggctattaattagctaaaatttaaaattcagttccttggtcacactgctacattttaggtacccaatagcctcacgttgctgaggaccacc

SEQ ID NO: 29015 - DNA, 120 bp, synthetic construct
  source 1..120: mol_type = other DNA
tggcaggaacatccaagagaagcagtactacccagaagtgagatagaagtgatttgaggactatttatttatattttggattgtgggtgccatttttttctctgttattctgctttcatc

SEQ ID NO: 29016 - DNA, 120 bp, synthetic construct
  source 1..120: mol_type = other DNA
acaagtagtgacagcaacctccctgtctctgaggtgatagacttctagttaatgtagtcatccaaaaccattacagaagaatttgtatatggcattatttcatttgaataattcattctt

SEQ ID NO: 29017 - DNA, 120 bp, synthetic construct
  source 1..120: mol_type = other DNA
tcccattgggtgagtatattgtatttagataaccattcccctattgatgaatatttgagttgtttttatctttttctgttaccaaaaaaaaatcatttagtgcatatgtgtattattctt

SEQ ID NO: 29018 - DNA, 120 bp, synthetic construct
  source 1..120: mol_type = other DNA
gaggctggccttgctggctgtacatttattttgttagttctgttctgtttttttgttgatacatcatatgtatcttgagagttttcccagtagtgttcatcccagaggatccaagaaacg

SEQ ID NO: 29019 - DNA, 120 bp, synthetic construct
  source 1..120: mol_type = other DNA
aatatttgtggaaggaatgaattgtgggctgaccgtgtgctctcagcctctatcagcatttcattctgtcacagccattttcccctgcaagattggtggaggggaaagggtaggcctcct

SEQ ID NO: 29020 - DNA, 120 bp, synthetic construct
  source 1..120: mol_type = other DNA
ttctcatctgtatctcttctgagggaggcatcctcatggtgagaacagaatgatgacttctgcattggttaagggtttatacagagaggaggttggtgttggagccacgttggactattt

SEQ ID NO: 29021 - DNA, 120 bp, synthetic construct
  source 1..120: mol_type = other DNA
gggaaggagcctgcaccccactccacccacaccagcagcccctgttttgagtgagtagcaggcacctgtgttctgctattaaagcacacgcttctcaaattattacctttaactttggcc

SEQ ID NO: 29022 - DNA, 120 bp, synthetic construct
  source 1..120: mol_type = other DNA
aaaattggaaattatggaaaagttaataaataatttagtatagaacaaataggatgtattctaaaagcaccttgtgactgttaggtgtatgatcataaggggccaattttgggggagagg

SEQ ID NO: 29023 - DNA, 120 bp, synthetic construct
  source 1..120: mol_type = other DNA
gctcccaccatcctcctctcttgggtagatgctggttgagagcttttatctccatgctgccccactgcatagctcgtggctgcatcactgctcaggtgcattgtgttaagagtttcctat

SEQ ID NO: 29024 - DNA, 120 bp, synthetic construct
  source 1..120: mol_type = other DNA
gcttttgtggatcaagtgagctcctaagagtgaaaatggtccatgaggttagaagggtctgtaaggtccgtggctgctgtcactgctcctgctgatgttcatattcctgtccgctgatcc

SEQ ID NO: 29025 - DNA, 120 bp, synthetic construct
  source 1..120: mol_type = other DNA
ggcgagaaacggacagtgatcattccgcctcacctgggctatggggaagctggcgtgggtgagtaagcaacgctattcaagggtgttgggggcccgcttactatctgaattttgtgcttt

SEQ ID NO: 29026 - DNA, 120 bp, synthetic construct
  source 1..120: mol_type = other DNA
tgtctgtttctttcattgctttccttcctttacagcaaaaacttcaaaagaattgtgtgtcctttctgcctccaattcctctcctcccattctctcctaaacccactcctttctggcatt

SEQ ID NO: 29027 - DNA, 120 bp, synthetic construct
  source 1..120: mol_type = other DNA
ctgctcgctgtaacctctttgccggctgtctccctctgcccactttacccggccacacctgcccccagtgctgtctgtgaccacccaggcatgcgtccaccttgagccctggcaccggct

SEQ ID NO: 29028 - DNA, 120 bp, synthetic construct
  source 1..120: mol_type = other DNA
cagtgttggccaccgcaggaggctgctaccaccagggcctgagagctcaagaggaggcagtgggagcagcacaggaagggctacctggaggcgtaacagagggatgcagccagctgcatc

SEQ ID NO: 29029 - DNA, 120 bp, synthetic construct
  source 1..120: mol_type = other DNA
agttggtcctggatccaaccccctcagatactgaccactgtaaggttcatacttctaagtttaaaatgtaactatgtgtgagtgaatgtggatagcatttgctaagaaaagccctgtact

SEQ ID NO: 29030 - DNA, 120 bp, synthetic construct
  source 1..120: mol_type = other DNA
ttttacctgttttctcattcttctccacctgaatgcctactttacgtgactgaaaccagtgtacaagccactttgtattctttttattgtcctagacatttctgcatgtttccacagtcc

SEQ ID NO: 29031 - DNA, 120 bp, synthetic construct
  source 1..120: mol_type = other DNA
taggctcagggagattttagtgacttgcccaaagtcacggatgaattagtcagaaagccaggactagaacttggatttctttattgaaagaaatagcacttagggaaggacctcagatct

SEQ ID NO: 29032 - DNA, 120 bp, synthetic construct
  source 1..120: mol_type = other DNA
gactcagtctttcagttataagacctaagacagcatgacagatcctatctctttttcctcctcctttttttcctttttgcagtttactcaacgcataaatgaaaatattttactgtgtct

SEQ ID NO: 29033 - DNA, 120 bp, synthetic construct
  source 1..120: mol_type = other DNA
acccagttttttgaggatttttgtcatgagaggatgttgaattttctcaaatgctttttttagtatcaactgaaatgatcccctccccccgccccttctttctttggtctccctctgttg

SEQ ID NO: 29034 - DNA, 120 bp, synthetic construct
  source 1..120: mol_type = other DNA
tgatgtgcctgcctcggcctcccagagtgctagacttactgcgcccagctgttttcatttcattcattgtattttttcagctccaaaacttgttattcttctgggttttgtttctctttt

SEQ ID NO: 29035 - DNA, 120 bp, synthetic construct
  source 1..120: mol_type = other DNA
ggatcctgtcacccaggtagtgaacatggtacccagtaggtagtttttcaactcacacctccctctctccccactctaatactcccagtaccacattttctttttttttttttgagtttt

SEQ ID NO: 29036 - DNA, 120 bp, synthetic construct
  source 1..120: mol_type = other DNA
tgcactgcagccgaaccttctgaaggtctcttagcttgtatttgttaaggaggttttagattttcatccaataggaggcagtgtgcttgattttccacaaaatggtgtggataaacttgc

SEQ ID NO: 29037 - DNA, 120 bp, synthetic construct
  source 1..120: mol_type = other DNA
ataatctgaacctagatgtttcctgaaaaggccctgtactttccaagatatttaatttagaactaaagtaccaagttttatttgttctggggtttacaataacccattatacgattagct

SEQ ID NO: 29038 - DNA, 120 bp, synthetic construct
  source 1..120: mol_type = other DNA
gacatgctggctggtaactaattacaatgtgatgaccaaagaccagcttcttggaagtagggttgttaatacaggaatagaataccaggggagtttgagtaatttccttcttagcagatg

SEQ ID NO: 29039 - DNA, 120 bp, synthetic construct
  source 1..120: mol_type = other DNA
cgatttgccaaaagatagagtatctcaagaacactggagtatccctcaggaagatatttagctctgaggttttgtatcacatcaaaaataacttttctcacatattctactggcatttgg

SEQ ID NO: 29040 - DNA, 120 bp, synthetic construct
  source 1..120: mol_type = other DNA
gtgttcctgcttctgtactttttgtattaagcaatccagactatgtattggtaaatctctttgcctagtgggcttctaaggatacagtgactataggcatcgccaagtgtgtcttcctag

SEQ ID NO: 29041 - DNA, 120 bp, synthetic construct
  source 1..120: mol_type = other DNA
gtgtttagtgtcctttcacatattggattatagggctgtgttgactttagggatcttttccccaccagttggggtgatgaatgtgattggcaaatgctaggagtgactcttttttgacat

SEQ ID NO: 29042 - DNA, 120 bp, synthetic construct
  source 1..120: mol_type = other DNA
accttgcagaacaggagagactagaagaacatatgtaaggaaggaaaaacaaactgccaaccaaaaatatttacccaacaaagctgtcctttaggaatcaagtagagagaaagatttccc

SEQ ID NO: 29043 - DNA, 120 bp, synthetic construct
  source 1..120: mol_type = other DNA
aagtatacatgttaatttaaaaatacttaatggctaaaataaaaagattaacagtcatctgagccttcatcaaatattggcctttttactgttggaaggtcttgctttgatgttgatgac

SEQ ID NO: 29044 - DNA, 120 bp, synthetic construct
  source 1..120: mol_type = other DNA
cttggggagctctgtttgccttgtgcaacactatttagtcctcatctgagtttcccaaggtttccccaggccagccatctgcaaatagcattagtgaaaatctgaataatttccttctaa

SEQ ID NO: 29045 - DNA, 120 bp, synthetic construct
  source 1..120: mol_type = other DNA
tctcaaaggctcattgttagcttggagaaaaaaggttacgaaaattatttttatgttccagtaacttacagttgtttcaagagagtgaagcccaaagaaataaagaagatccccattctg

SEQ ID NO: 29046 - DNA, 120 bp, synthetic construct
  source 1..120: mol_type = other DNA
taaggataatgtgacccctggtgctcagctgcctgacttcaccaaaagagactccccattacttggtttcagaccctggaagtcttttgaaagaaaatacatccaactttaaataaaagt

SEQ ID NO: 29047 - DNA, 120 bp, synthetic construct
  source 1..120: mol_type = other DNA
gaagctagagaaaaatgactgtatagagcttaaaattcgatctttaatctattatctacagttttcctgcgttaaaattttagtgacatagaaggaccaataaaaaaagagattaagaaa

SEQ ID NO: 29048 - DNA, 120 bp, synthetic construct
  source 1..120: mol_type = other DNA
aggaatcaccatatgtaaatgtctatgactgatttgacatatctgatttatctctgagccatgaggtatataacattttcagaattttggacagtagtcatacaggcataagattttcct

SEQ ID NO: 29049 - DNA, 120 bp, synthetic construct
  source 1..120: mol_type = other DNA
ggatgggctggcagagaagtggaaggacgccagagatactctgaagcaggacagtaataataggattttgtgactccttggattacagaggaaagaggaaagtcatggctatctcttaga

SEQ ID NO: 29050 - DNA, 120 bp, synthetic construct
  source 1..120: mol_type = other DNA
gtgggtgctgaaacccaggaaaactggaagaagatgatacccaggagctgagagacaaattatcagatgttgtaaaggctgaccctgtaaggaaaaacactcattagactggaaacactg

SEQ ID NO: 29051 - DNA, 120 bp, synthetic construct
  source 1..120: mol_type = other DNA
tcctttgggagtttgctttcaagatattttaagtaggactggaacactatttagttgagggctaattcttcctcactactgaagcaaaacccttctgaatagtctaccaaatgccttcta

SEQ ID NO: 29052 - DNA, 120 bp, synthetic construct
  source 1..120: mol_type = other DNA
gcagagtgcatgtcctcaccagatgctaaacctgccagtaccttgcttttggactttccagcctccagagttgtaagaaataaatgttgtttataagctaccttgtttatggtcttttgt

SEQ ID NO: 29053 - DNA, 120 bp, synthetic construct
  source 1..120: mol_type = other DNA
taagttcagtaaaatggcacaatgccagagacacaggaatcaacagctttttgcagactaaattaggcagatttctaatttaaaattctctttacaaaagtaagcatctccaaaaatctc

SEQ ID NO: 29054 - DNA, 120 bp, synthetic construct
  source 1..120: mol_type = other DNA
tctaggatagaaatcaaagaacgagagcaacagatttggtgataaaaccatctatgtatcaaaagcataaataaaaagctaattttcaaactggtaaaatgattccaacatatatgaaca

SEQ ID NO: 29055 - DNA, 120 bp, synthetic construct
  source 1..120: mol_type = other DNA
atctgatttgtcccatccccaaaggctgtttatgaaaaattcagacttaaatatctggaaatgaaatccaaaacctcggccaatttcacactacttaggtcatcttgcaaactttcagct

SEQ ID NO: 29056 - DNA, 120 bp, synthetic construct
  source 1..120: mol_type = other DNA
gcagggcttctggccctcagaaacaggaaataaagtcatgcctaaatgaagttgccttttgcaagtggactcctttgtggtccatactgctggtaccacattctcagtgacttgtatccc

SEQ ID NO: 29057 - DNA, 120 bp, synthetic construct
  source 1..120: mol_type = other DNA
atcaagagaaaacactaacaagcaaggttagtagtatgtgcttaagaaatgctactgtttagtgtgggtctacatatatccaagttactaattcagtccaaaacacaaccctgctttttc

SEQ ID NO: 29058 - DNA, 120 bp, synthetic construct
  source 1..120: mol_type = other DNA
gtgaaagagaaaagtgaaaaattgatcagatttatgtcttcataaacatctgataatgagaattttgaagaaaagtttgtgtgttttgagaaaaatgggcaacagtgtgggagattgaaa

SEQ ID NO: 29059 - DNA, 120 bp, synthetic construct
  source 1..120: mol_type = other DNA
ggagtgtagctagaaatagcttttctgtcacacagtttgaagaggcttaactatgtacaaatcttttgacccaataggtccacctctggaaatccagcttaaggagatcgtcagaaatgc

SEQ ID NO: 29060 - DNA, 120 bp, synthetic construct
  source 1..120: mol_type = other DNA
gtattttaacttaaaatgaccagccatttgcctaaacattacttggttttaggtagacagccttcccatttttagacgtgccaaggttttcctgttttctgcagagcccagagccagctc

SEQ ID NO: 29061 - DNA, 120 bp, synthetic construct
  source 1..120: mol_type = other DNA
cagaaatccacttattcatttatctgtggacagctagcatttactgcaggcctaaggcttgggttttagagatgaacgtggtgtgttcttccttccagaaagtctcagcctagtaaggta

SEQ ID NO: 29062 - DNA, 120 bp, synthetic construct
  source 1..120: mol_type = other DNA
gtgagattttagtagttagagaaaactaggactgatccagtcactgcataaagtccccagcattttaatgtgttctgagccttctaaggtggacacgaacttcactcatcccgctgcgta

SEQ ID NO: 29063 - DNA, 120 bp, synthetic construct
  source 1..120: mol_type = other DNA
cacataaatacgtcacacacacacacaccacacactacacacaccacacgccacatacacaccatacacacaccacacagatacatcacacacacaccacacacagatacaccacacaca

SEQ ID NO: 29064 - DNA, 120 bp, synthetic construct
  source 1..120: mol_type = other DNA
gaactaagagttatcagttgttactgcccttttgacaccataaaacttacactcttgaatttgttatctgatgttttctctcattcagatggcatatactttttaaaatacaggtaaaag

SEQ ID NO: 29065 - DNA, 120 bp, synthetic construct
  source 1..120: mol_type = other DNA
agtggtacctcattttttagcatctaaaaatctaaacctaactacagtgctgacaagtctagagctacaagagaggggggacctgaacatcaaaaaggtagaataaaagtaggtggacaa

SEQ ID NO: 29066 - DNA, 120 bp, synthetic construct
  source 1..120: mol_type = other DNA
acattcttcaaagaattttactgtgtacacattgtaggttgattattattttcactcatttttttaaagatagtagtcgactgtcttcctgcttccactgccacttttaagaagctgttt

SEQ ID NO: 29067 - DNA, 120 bp, synthetic construct
  source 1..120: mol_type = other DNA
tgaatgacagagacacattacctaatgttgcctatattggcagaaaagaaagggaaaggctgcttagggttctgaggacatctgtacagaaccccagcaaagtgatgtttgaatttagtg

SEQ ID NO: 29068 - DNA, 120 bp, synthetic construct
  source 1..120: mol_type = other DNA
tcttaccttggatgttcaatttgatgtcatccaattaaaataccatggacaaaagtcaacttttcatttttttaaatttattttgcttattacggaaaaacacaccacataattcaacta

SEQ ID NO: 29069 - DNA, 120 bp, synthetic construct
  source 1..120: mol_type = other DNA
acattcccaactattaaaaagtaaggttgcattgtggaaaatcaaagaaagtggttaatccagatttgctgatgtgttaggtagttgtggcacactcacctgtctttcctaaatgcctct

SEQ ID NO: 29070 - DNA, 120 bp, synthetic construct
  source 1..120: mol_type = other DNA
tgtagcaaagcttctgattttcatacaaaattagtaaacatatacagaaatattaatttgtgagcatgctataaatttaattaggcataatgtgctcatcttaatttcatactctttgct

SEQ ID NO: 29071 - DNA, 120 bp, synthetic construct
  source 1..120: mol_type = other DNA
tcctgagacatatgaacagaaccctaaactaattggctataaatcttaggaccaatatgttggtgttagaaatgatatcaattaagataaaggattaagtaaagcacatagaacaacaaa

SEQ ID NO: 29072 - DNA, 120 bp, synthetic construct
  source 1..120: mol_type = other DNA
aagtctctcctaagttttctacatcaaatccccatccaattcctcttttttctaaacattattacattattccagtttaataatttcctgctttccctctattaccttggaaatgttgta

SEQ ID NO: 29073 - DNA, 120 bp, synthetic construct
  source 1..120: mol_type = other DNA
aagaaacatggctttcacacgcccaatctttaataggttatcctttgccttacctaccgtgttaagaaagtcaaagggaacattggctaaagtctaatatatgcagtcagtgtatgggaa

SEQ ID NO: 29074 - DNA, 120 bp, synthetic construct
  source 1..120: mol_type = other DNA
agagatagcttaaataaataacaaagagtttgtgcatttagcatgtttctcctttgcccccaggagttgatggttttgtaaggtcaagctcaaataagacacaaggaatggagactatgt

SEQ ID NO: 29075 - DNA, 120 bp, synthetic construct
  source 1..120: mol_type = other DNA
gcattggagctccaaaagtggagacggagaggaggctgaaggttggaaaattatctattgggtataaagttcactatttgggtgatggtttaatagaagcccaaatcttaccattgcaca

SEQ ID NO: 29076 - DNA, 120 bp, synthetic construct
  source 1..120: mol_type = other DNA
ggaacctctttcttgcacagacaccagagacaatgctaaagttcccagtataactctattataaagacacatgcatttgtgcgtttgtcgcagcaatattcacaacagcaaagacatgga

SEQ ID NO: 29077 - DNA, 120 bp, synthetic construct
  source 1..120: mol_type = other DNA
ttttatctctatccctaaaagttgtatatattcaggttgtttaaatcctctctgggggagagaagaggtcttctttaggcacatacagtgaggtcctaagcaggccacagagatgtcaag

SEQ ID NO: 29078 - DNA, 120 bp, synthetic construct
  source 1..120: mol_type = other DNA
tcaaaaacttactctgttcaaaaaccagtaaaaggaggaaagcacataatataaaagaaactcagctgagaacggtggctcatgcctgtaatcccacctgagggatcccacctgtaaatc

SEQ ID NO: 29079 - DNA, 120 bp, synthetic construct
  source 1..120: mol_type = other DNA
tttggggggaagttgggtcagtaatacccacagtttccttatgaagaaagtgggaagaaaatttcagtggaatgtattctgtcttgaaggaacagaaaacttgaaaggagacctaggtca

SEQ ID NO: 29080 - DNA, 120 bp, synthetic construct
  source 1..120: mol_type = other DNA
tatattattccacttaagcctgagaagtaggcattctctgcactttacaaatggagaaactgaagccagaaaggaaaaaggcccaatggttggtgaaagagccaggattcctgtttaggt

SEQ ID NO: 29081 - DNA, 120 bp, synthetic construct
  source 1..120: mol_type = other DNA
ttttgagtaatgggcaaaggttaggtggagagtgcatttggaaatcatactgtgaaaccagaagtttgactggggctcaacttggtgtgatatcggattaggtatagagcttgatgcaat

SEQ ID NO: 29082 - DNA, 120 bp, synthetic construct
  source 1..120: mol_type = other DNA
ctaactaggtccctcctccctttacctcagtagattgcaatttgtcacctactttctcaatgtaacactttagttgcttcagaaaagttaaaggcactgccttagagaagcctatgttgg

SEQ ID NO: 29083 - DNA, 120 bp, synthetic construct
  source 1..120: mol_type = other DNA
tagagtaggccatgctttttgaattgaagcaaaagttagtgaatcaagcaaatcctatgccaaggagtcattgaggcattttgcttcacacttggacactaagcagcatcctaggtctac

SEQ ID NO: 29084 - DNA, 120 bp, synthetic construct
  source 1..120: mol_type = other DNA
tgttgttttaagccactaattttgtggtaatttgctgcagcagaaacgggaaactaatacattgtggaacctgttaactaaacatacaagggcaggattccatagcctcagcacctagca

SEQ ID NO: 29085 - DNA, 120 bp, synthetic construct
  source 1..120: mol_type = other DNA
gaggcgagagtatcagaatcattacaatagtctctccttacctgtgggggatacattttaagatccccagtggatgcttgaaaccatggttagtaccaaaccctataaatactgtgtttt

SEQ ID NO: 29086 - DNA, 120 bp, synthetic construct
  source 1..120: mol_type = other DNA
gactgaggagcaggtgcattcttgctcaaataacggaaaagattcaatgcaagtaaccacgcattttgtcctccaataatttataattcaaatccatattgatttgtcatgaaaaggaaa

SEQ ID NO: 29087 - DNA, 120 bp, synthetic construct
  source 1..120: mol_type = other DNA
ggaggacaaaagagttacaaacggaaatacattttggttgtcttttatatttacctatgtagttatcctacaagtattctttatttatgtggattttagttactatatagtgtcctttca

SEQ ID NO: 29088 - DNA, 120 bp, synthetic construct
  source 1..120: mol_type = other DNA
caaagtaatatggtacccagaacatgactacttcttcataaagaactggtaaggactgctttcctcaaaaaggggcagtggctgtggaagatgcttcatgttttaaagcctgtatcatgg

SEQ ID NO: 29089 - DNA, 120 bp, synthetic construct
  source 1..120: mol_type = other DNA
caccctagttatattgtaataggaaagagaaattgcatatgtaggggagaaaatgattgatagactgaggtccctgaggagctgcaagggaaccttgtagagcactgttttttaccttac

SEQ ID NO: 29090 - DNA, 120 bp, synthetic construct
  source 1..120: mol_type = other DNA
cttgaatgtggtgcctgtgcacttatagacattttctaaaggtaaaaatgactgtcactcataaatatgccctgcttctccaatgtggccccagattggacttttaaaggggaaggtttg

SEQ ID NO: 29091 - DNA, 120 bp, synthetic construct
  source 1..120: mol_type = other DNA
ggggaactcctcactataatccagcaacttgccaacagaaatcctctcagccaaagcaagggcatcctggcagcaaaagttgttgtgattgcctttttaaaaggccctgcttttcctccc

SEQ ID NO: 29092 - DNA, 120 bp, synthetic construct
  source 1..120: mol_type = other DNA
tcaaaaggaaacatcctcattcttcaaagtgccttaagggccctgctatggtctgaatgtgtcacccctgaaatccatatgttgaaacttaatcaccagtgtgggtgtattaagagatgg

SEQ ID NO: 29093 - DNA, 120 bp, synthetic construct
  source 1..120: mol_type = other DNA
gactctggaatgtgtcttgcctgtgattccacatatatgcatccaacatttttgttgttttcagctttcctgccaggataagagagaagaaataaccagagggaaaggcagcaaagagaa

SEQ ID NO: 29094 - DNA, 120 bp, synthetic construct
  source 1..120: mol_type = other DNA
atttcccttagatttcatattgggcttcaagtcgttgtcactgtggtcaatggtatttgtttacggaggtaggagctaggctttcctagagcttgaaaactgacattatcaccacaagag

SEQ ID NO: 29095 - DNA, 120 bp, synthetic construct
  source 1..120: mol_type = other DNA
ttccactttcaatcaggctagtgccttcctgaggaagaaacagtatttcctaacattgagaagggaaaaatgggtctctttctcacatctgtaagttcccattcattctgtctctgtgtc

SEQ ID NO: 29096 - DNA, 120 bp, synthetic construct
  source 1..120: mol_type = other DNA
tagtaagtgtcatagggatttgcaatagagggccctatttttggcccagattctaagcagaaatagctgcttattagatgttggacactggtctaagaccactagctgtattagctcaag

SEQ ID NO: 29097 - DNA, 120 bp, synthetic construct
  source 1..120: mol_type = other DNA
ctagctcagattatttctggtgaagtggaaactacaagggctccatagaagatcaaggtgaaagccacatccctgtcttagtctgcactgaaagtgtggggtctggaaccaaggaggtga

SEQ ID NO: 29098 - DNA, 120 bp, synthetic construct
  source 1..120: mol_type = other DNA
ccggcctctaattacctttgaactgtgcaagcaatagccccagggatcaaaaactctgtctgggggtggtgacagtaatcaacactgaaatgaaaacaaaatgcattttttgattgtttt

SEQ ID NO: 29099 - DNA, 120 bp, synthetic construct
  source 1..120: mol_type = other DNA
cattgtatctttgaaacttcctgagagagcaaagaatggtaagaaggacagtaaggagataatgggtccaaccttttgaccaacagtcacaggtatgtgacttagagaccacgggaaaag

SEQ ID NO: 29100 - DNA, 120 bp, synthetic construct
  source 1..120: mol_type = other DNA
cagtttctccctccaacctcacatgcttagatgaaaagagctaactcttgtcactcctgcatccttaactagacttggtgataaaggacaaaacgcagttctggaaggacaataattaca

SEQ ID NO: 29101 - DNA, 120 bp, synthetic construct
  source 1..120: mol_type = other DNA
cggctttgcgttacttcctttgtagttgctttagggaccataaaataccttcctatattttcatgatctacattgagttaattttgtaccactttacataaaatgcagtaactcttcaac

SEQ ID NO: 29102 - DNA, 120 bp, synthetic construct
  source 1..120: mol_type = other DNA
aaaccaccactggtcatttctctactaccttcaattcaagatggcgacatcagcatacccactgcattccctgccacatcaattccccagaatggaagaaaagtatacagaaatatctat

SEQ ID NO: 29103 - DNA, 120 bp, synthetic construct
  source 1..120: mol_type = other DNA
gaaaaaggtggggagcggaatgtgacagtcacacttaatccacaccaggctgccatatgtcactttttgtcctttactggttcattgactattcatgaattaatacctgaaaagtgttat

SEQ ID NO: 29104 - DNA, 120 bp, synthetic construct
  source 1..120: mol_type = other DNA
aaaaaaaaaaaaaaaaacaaaaagaaaagaaaattggccaggcgcagtagtacatgcctatatatagtccagctactctggaggctgcagtggaaggattgctccctgaggccaggagtt

SEQ ID NO: 29105 - DNA, 120 bp, synthetic construct
  source 1..120: mol_type = other DNA
gccaggatggtccccaaaccagacaccccatcttcaccctctgccattttccttctccaggtcagccctggggccctggcacaagctcaggaggggagagaggccatgcaaagtgatcac

SEQ ID NO: 29106 - DNA, 120 bp, synthetic construct
  source 1..120: mol_type = other DNA
atttttatagtctgctttgttctgtaaatgatccctctcgagtgtaactcactagtgggctgtgtccttctttggtgaatgtctttttcccattaaactgtaactctctgagggtgggga

SEQ ID NO: 29107 - DNA, 120 bp, synthetic construct
  source 1..120: mol_type = other DNA
aaccgctctcacatacccttggtccgtaagcgtcggttccagttacgccgttgcatgaacccgagggccaggaagaaccgctctcagatagtcctgttccagaaacgtcggttccacttc

SEQ ID NO: 29108 - DNA, 120 bp, synthetic construct
  source 1..120: mol_type = other DNA
cattgacgtgggccatggagaggcctaaacagatgactgcagtccactgctaaggtcatcaaaggggtgactctgaaataataaatttcagacgccacggcccaaatagctgcatgagct

SEQ ID NO: 29109 - DNA, 120 bp, synthetic construct
  source 1..120: mol_type = other DNA
ggatttagatacctcctggtgcttattgatatctttaccagttgcacgggggcttttccatgccagactgaaaacgcaggagatcaaggatcaaccttcaactatttactagcagaacac

SEQ ID NO: 29110 - DNA, 120 bp, synthetic construct
  source 1..120: mol_type = other DNA
ggtcttgaactcctgacctcgtgatcaccctgcctcggcttttctttgctgtggctctttcccctctaaactgttctagattcccaggcgccctgccaggaacaggtgtgggccaccctg

SEQ ID NO: 29111 - DNA, 120 bp, synthetic construct
  source 1..120: mol_type = other DNA
gaagatggtggacctgggccgacagaggggatataggggaaagaaggggatgtgggggatggaggggagcttgggggacagagagggaaacgggaaatggaggagacgtgggagacagaa

SEQ ID NO: 29112 - DNA, 120 bp, synthetic construct
  source 1..120: mol_type = other DNA
atgtgaggggcagagcagagtttggggaggaaaatggaaatgagggaaagaggggaatttgggggacagagggggatgtagggatagagcgtggacttagggggacgtggagaggttgta

SEQ ID NO: 29113 - DNA, 120 bp, synthetic construct
  source 1..120: mol_type = other DNA
ggatcagagcctaaagacacggtgcctaaatctggtctccttggtggcgcagggtcttgaggtgttcgaggtcccatctctaggaagagaacagagatgacaggcagaagggaggtctct

SEQ ID NO: 29114 - DNA, 120 bp, synthetic construct
  source 1..120: mol_type = other DNA
actgttcaattccttggaaagataaataattacactaaatctaattgaacattttcttaacgactcaggtctcaagagcagtcactgtgcttgggcggccactgagctgcgtcttcgctt

SEQ ID NO: 29115 - DNA, 120 bp, synthetic construct
  source 1..120: mol_type = other DNA
catgaccccagtggggaggtctgcattaagcaaagagcaaaataaatacagagatgaagacaggagggaggaccacccaggaacacctgtagcccactgtgcccatgctcttccaacaga

SEQ ID NO: 29116 - DNA, 120 bp, synthetic construct
  source 1..120: mol_type = other DNA
gaaggagcctgtgggaactctgaggggaacgctgagagctgacccttgttgaatttgttttcctgtttttacccactgaaagctttcatttatttttctgtgagctgttgctgctgtcat

SEQ ID NO: 29117 - DNA, 120 bp, synthetic construct
  source 1..120: mol_type = other DNA
ctggttctcaacctccagggtctccttttggggtgagtcaggcttagccccatcacctgtgtgcgctcgcgcttccagacatgcttcccgtccaggcctagaaagggcttctgctatttc

SEQ ID NO: 29118 - DNA, 120 bp, synthetic construct
  source 1..120: mol_type = other DNA
gttctgtgtcttgtaggggcagaggcggtgtcataacggagtcctggggtaaggtgaggccctcttcagcctgctgggacacaatcgtggctgcagccacaggctttggggctgatgaga

SEQ ID NO: 29119 - DNA, 120 bp, synthetic construct
  source 1..120: mol_type = other DNA
ctgcagagtgtgaggggtcacagtggcagtggactcctggcctaaagcaaggccctcttctgttacttctgagatcaattcctgtctctgggacagataggcccctctgtctgaggtctg

SEQ ID NO: 29120 - DNA, 120 bp, synthetic construct
  source 1..120: mol_type = other DNA
ataatggtgaaggtggggaggtgatgacagaagtggggaagggatggatggaggtggggaaagaatgggggtgtggaggtaatggtgaaggtggggaagtgatgatggaagtgagaaggt

SEQ ID NO: 29121 - DNA, 120 bp, synthetic construct
  source 1..120: mol_type = other DNA
ctataattatagttggagtttccaacattcctttcgaaaagcgatagaatcgctggacagaaaatcagtgacagattacaacacttaagaaccctgtcttgcatcccagggatgaagccc

SEQ ID NO: 29122 - DNA, 120 bp, synthetic construct
  source 1..120: mol_type = other DNA
cacactatccaacagcaacagaatacgcattctattcaagagcacataagtatgaacagtacagcaagtctcaagaaattcaaaaggattcaaatcatacaaagtatgttccttaactac

SEQ ID NO: 29123 - DNA, 120 bp, synthetic construct
  source 1..120: mol_type = other DNA
tatttgcaaacatatgtcgaactcttcctgcatgccagggaaaaaaaataatgagcacttccctcaacaggtttactggctggtgtaagagtgtgagtttagtggaattaggacatagcc

SEQ ID NO: 29124 - DNA, 120 bp, synthetic construct
  source 1..120: mol_type = other DNA
ggcaatgctattcccaactctctaccacaagtggtggtctttctcataatgaggacataatctgcaaatagtgaaagattctggtaacttcaggatgctgaggtctctgtgacaaacctt

SEQ ID NO: 29125 - DNA, 120 bp, synthetic construct
  source 1..120: mol_type = other DNA
ggggtgatgctacttaactattaaggccactcttgtgggctgatttctgcaaacttgtacaggacaacatacaacttgagccaattcctctgattcctgtcggattcgaaaagtaacgaa

SEQ ID NO: 29126 - DNA, 120 bp, synthetic construct
  source 1..120: mol_type = other DNA
agctacaatggccggaaaagcctattaaaatgcctccttttccaagtagatatgtttatggggctagattgtctttgacgcttcaaaccaaacattgcagaagactgcatgcaagggtaa

SEQ ID NO: 29127 - DNA, 120 bp, synthetic construct
  source 1..120: mol_type = other DNA
gaagatggtaccaatccctcaaaaacatcttaagtctaactcaggaaaccctcttagtaattgtctccttcaaatacacatttggaaggaaacaagtcccccacctcactcagtgtgtga

SEQ ID NO: 29128 - DNA, 120 bp, synthetic construct
  source 1..120: mol_type = other DNA
ccctcgggccatgtaggaacaagcatcgactttcacatctgagcaattctttgtaagttccatgtcatttgcatgttcagaaaagcaatatttcgccatggtacattgacatacctatca

SEQ ID NO: 29129 - DNA, 120 bp, synthetic construct
  source 1..120: mol_type = other DNA
agagggtgaacacctctgaggctatggggtggccgggctggctgctggactggaagtgagatggagcccaagagagaactcagagacaatgccactgggcttgctcggcctgtgcacact

SEQ ID NO: 29130 - DNA, 120 bp, synthetic construct
  source 1..120: mol_type = other DNA
gggattcacccataatttgtctaaataatgaacgtgttcacctttctgagatggaacttagctgctcaaactcaacttttcagagacaccacttgcaggtggtgtgggcttctatgaaag

SEQ ID NO: 29131 - DNA, 120 bp, synthetic construct
  source 1..120: mol_type = other DNA
gtctgtgggctcctgtcccaaatgactgttctgagacacacagcagggattaaaatgacctccttcaagagatgaaaatattgtaataccttacaatttattcaggtgattttttttttt

SEQ ID NO: 29132 - DNA, 120 bp, synthetic construct
  source 1..120: mol_type = other DNA
gactattagactgtagtgggaaaattgccatgatgggattttatacagggagccatgtgagcacacaagagggtcagccaatccattctaaagaaagccttctcaggcactgtgcaactt

SEQ ID NO: 29133 - DNA, 120 bp, synthetic construct
  source 1..120: mol_type = other DNA
ggacaatgcctgcctggcatgttttcttatatcctagccagagctcagatttgagcagtagttcttaaccttggttggtgggagtttggaagtgtatggggtgttttgatggtaacagtg

SEQ ID NO: 29134 - DNA, 120 bp, synthetic construct
  source 1..120: mol_type = other DNA
tttttagcaagaaaatcatctaatggaaaacaccattttagaaggatgtatcttgataagtatggggggtggtgaagtgaattggagagaggaaagctggaggtagggaaactttggagg

SEQ ID NO: 29135 - DNA, 120 bp, synthetic construct
  source 1..120: mol_type = other DNA
ccttaataagattccttactgctgactttcactcttttaagtgctgggggaaatcctatcaattgagatttgtcagtggcagaagcacgagagccagaagctgttttactgctttaggaa

SEQ ID NO: 29136 - DNA, 120 bp, synthetic construct
  source 1..120: mol_type = other DNA
ttttgtactattgctaaatgcttctctcctatatattttatagctggtcttcctggtataagaaaatactgatttttgttagaatggcaatcattaaaaagtcaggaaacaacaggtgct

SEQ ID NO: 29137 - DNA, 120 bp, synthetic construct
  source 1..120: mol_type = other DNA
tgaaagtggttaccaccaacattctcccgagacttatattcaatattttaagaatcacaatgttactaccattattcgtctgaataaaaggatgtatgatgccaaacgctttacggatgc

SEQ ID NO: 29138 - DNA, 120 bp, synthetic construct
  source 1..120: mol_type = other DNA
aaaacctgtgaccagaactgaaggaagactctaggaactgaaaactgcaacagaaattagcacaatttgaaaacaaaacaaaattgcaaaagacttagttgctttccacctaagaagcta

SEQ ID NO: 29139 - DNA, 120 bp, synthetic construct
  source 1..120: mol_type = other DNA
tctgttcagcttgtgaccctgtgtcaaaatttgtaaagatacaaaaggcattactgaaatggtactttctgtaatttgatactatttggctttaccatcttcacttgactgtttgtaata

SEQ ID NO: 29140 - DNA, 120 bp, synthetic construct
  source 1..120: mol_type = other DNA
ttcatacagatggaatcccattgtgtaaattatttaaaaacttaccttgtttccttagtattctcttccagagattcatccacattgacaaaggttgaaggtatatttatttcatggccc

SEQ ID NO: 29141 - DNA, 120 bp, synthetic construct
  source 1..120: mol_type = other DNA
caaggaaagatgctgtagtggtgtgagaatcaagtgagaaaatacattggaagacacgtatctctttcctgacacatagtctcagtgctcaaaaatatttatttggggccgggcgtaatg

SEQ ID NO: 29142 - DNA, 120 bp, synthetic construct
  source 1..120: mol_type = other DNA
tctgagattctcaaaaacagtgactgtcactcgtgctaactggcatgttcccaagcaactcactaggatctaggaaaaggaatggcctcctcttttggtgcccaggtccgggagcaagtt

SEQ ID NO: 29143 - DNA, 120 bp, synthetic construct
  source 1..120: mol_type = other DNA
ctgtgatgtgtaaactagtctttgatgaacgaatcaaaaatagtaactacagcaacgtttcaagacatagtcaatacaataagatataaatagaaaaaacagaagttaaaaagcaggggg

SEQ ID NO: 29144 - DNA, 120 bp, synthetic construct
  source 1..120: mol_type = other DNA
ggtatgttaactctaagtgaactgtggagagttaagcatgcacattgtttcttctagaggagtcactaaaacgcaatgtaaagaagtatagttaaagagtcaattgatggcttaagttgg

SEQ ID NO: 29145 - DNA, 120 bp, synthetic construct
  source 1..120: mol_type = other DNA
agaacttccatttaccacaacatggatgaacctgaaggacattgtaagtgaaataaaccaggcacagaaacagaaatattgcatgattttacttatatgtggaatcttaaaaagtcaagc

SEQ ID NO: 29146 - DNA, 120 bp, synthetic construct
  source 1..120: mol_type = other DNA
cagccatgagttctaagactgcagtgggaattgtaagaggattaccatattttaaattggctattctggtgccaaatctccccttcattttacagtttcaggcagaagaccagcacggta

SEQ ID NO: 29147 - DNA, 120 bp, synthetic construct
  source 1..120: mol_type = other DNA
ttttattgccaatctggcttctctgatgaaaactgtattagtgtcaactagaatctctgcctaattttctaccctctgtaaaataagaatagttcctactttctctcagagctatgacca

SEQ ID NO: 29148 - DNA, 120 bp, synthetic construct
  source 1..120: mol_type = other DNA
tgttgtatgttttcatttatacaaatgtccagaatagacaaacctacagagacagaaaacagattagtagccctgaggatggggaaagtggcatgactgggtgtggggtttcttttaggg

SEQ ID NO: 29149 - DNA, 120 bp, synthetic construct
  source 1..120: mol_type = other DNA
cctccgaaaaatgcacaacccacttgtcacacaactatgcaacacacacacagtatgacgaatcagaagcaactgtgaacagcagagaaatcaagttcaaagtcaaagcgaatgtcaagt

SEQ ID NO: 29150 - DNA, 120 bp, synthetic construct
  source 1..120: mol_type = other DNA
accctgtgttcggcaaagctctggactctgccgtggcataataaatgaggaaatttcttgcttcagaccttttgattttaaaaatggcagacaatgagctataggaccctactaacggag

SEQ ID NO: 29151 - DNA, 120 bp, synthetic construct
  source 1..120: mol_type = other DNA
acctagtgggtacaatgtgttactaggtcaattggaagactctaaaataaataaaattttgtctctgaactcaaaacatttgcagtctccctctccctctccctcgcacttgccccatgg

SEQ ID NO: 29152 - DNA, 120 bp, synthetic construct
  source 1..120: mol_type = other DNA
actgaaccataaacccacaggcaaacccaatcctacaagaatccctaaagtgccctctttctcatgccaatgctacaagaaaagagcatcaataatgttctcattgatacaaacaacgct

SEQ ID NO: 29153 - DNA, 120 bp, synthetic construct
  source 1..120: mol_type = other DNA
aggcacagagaaggagaaagagacggagagagggaagggggaaaaaggggagagacggaagggaaagagaagggagggagaaagaaggtagaagagaaggagagagggaaggggaaaaga

SEQ ID NO: 29154 - DNA, 120 bp, synthetic construct
  source 1..120: mol_type = other DNA
aagtaggggaatggggagtgtggaggggacggagggtgacttgggaagagacaggagagagggtggtgaggtggggaaggagagggagaaaggaggagatgaggaaaaggaaaatagcgg

SEQ ID NO: 29155 - DNA, 120 bp, synthetic construct
  source 1..120: mol_type = other DNA
ttaattttcttaagtgaaatgtttttggtctttaaggtttggaggccatggaggcatgaggagaaatgggatgagggagagagagctaagatagataaagacagagatggggagatccac

SEQ ID NO: 29156 - DNA, 120 bp, synthetic construct
  source 1..120: mol_type = other DNA
agctcaccgagcattctgagccctgatccttacactaattgtattatgcaaccataaatgatgtctgctgtaccagcggggacagtttattttaatagattggtataacttggcagaatc

SEQ ID NO: 29157 - DNA, 120 bp, synthetic construct
  source 1..120: mol_type = other DNA
ccagttagttgtgtactctgggctgtccctatactggagtcctaaaacacttacgactgcagatagggggaggtttttcaaaaccttggtctgaaaagccatagaagggagataggaaag

SEQ ID NO: 29158 - DNA, 120 bp, synthetic construct
  source 1..120: mol_type = other DNA
attattttttggtgaaaagggcccatgcgttatgaaatttgagatccatcactttaagtgaatgtaggccctggatacagtgggagctcagaagagcaaatcagttggtcaccttgctca

SEQ ID NO: 29159 - DNA, 120 bp, synthetic construct
  source 1..120: mol_type = other DNA
ctgtatgagttgtgtgcccttgggcaagggtcttaccttctctgtgcctcactttcttttctgtaaattgggataataatgctgcatagctcacaggatttttatgaccatgagttaaga

SEQ ID NO: 29160 - DNA, 120 bp, synthetic construct
  source 1..120: mol_type = other DNA
cacaatggtggtggtgatgacggtgttgacagtggtgacgaggcgggagtcacaatggtgtcggtggtgatggtggtgaggaggtgggagtcacaatggtggtggtggtgatggtggtga

SEQ ID NO: 29161 - DNA, 120 bp, synthetic construct
  source 1..120: mol_type = other DNA
tcgcctttgggtataccaacatgccagctctgttggccactttgtgagctcgatgaagcatggtataaaagatgctttgctagtgtttcacgtaatctatttctataagcaattttggag

SEQ ID NO: 29162 - DNA, 120 bp, synthetic construct
  source 1..120: mol_type = other DNA
tgaaatgggaaatgaatcctgcatataaacaaagcagtctggattgaaataccctactttgaatcgctgatgcgtaactctgccacataaaccacaggcagtggatttctaagagtccag

SEQ ID NO: 29163 - DNA, 120 bp, synthetic construct
  source 1..120: mol_type = other DNA
tgaaaaacagccctagctcaaggttaacttacagtatcaacagtacattacttcagcgatgcttctgtcttcctacccactggggacaattgtctccatagcttgtatcttacattctca

SEQ ID NO: 29164 - DNA, 120 bp, synthetic construct
  source 1..120: mol_type = other DNA
gtgcttgcaactgcattcccagggtgtctgttttgttcccaagtgtctcccacaaaattccccaggaggttctccgattaaatgtcctcagagtgaaaagcatggacaccaaatcactcc

SEQ ID NO: 29165 - DNA, 120 bp, synthetic construct
  source 1..120: mol_type = other DNA
aaaatgcaatgtctcagtttggggcaggaagtgatttcccatgaatttaaataaatttgcttagtggatgtcagatcactgtcaggcctccaaggcaagcctgattctaggccccatcct

SEQ ID NO: 29166 - DNA, 120 bp, synthetic construct
  source 1..120: mol_type = other DNA
gtgacaagcaacacaataggcaggtccctgccctctcggggctttgattctactggactacattccacgttaccagttcacacattagggtggaggaaactgggccacagtaaggtgagg

SEQ ID NO: 29167 - DNA, 120 bp, synthetic construct
  source 1..120: mol_type = other DNA
tagaaagtctttatcatttcataaagtgaataaatgctatccctacatttctgacaccgcgtcctcaacgccacagattttggctagctcatcgattccttcttctctgatgaccgtgct

SEQ ID NO: 29168 - DNA, 120 bp, synthetic construct
  source 1..120: mol_type = other DNA
cctatggttagtaataattcaattgtacatattaaaataaaactgtataatgagcttgtaatacaaaggataaatacgtgctcgagttgaggaatacctcatatacgctgctgtgataat

SEQ ID NO: 29169 - DNA, 120 bp, synthetic construct
  source 1..120: mol_type = other DNA
aaaaatttttaaatttattgcattttattacataaacgtacaattgataaaaaacaatctctcctatctctgatgaaacaactgatcaaatactttcacaaacaatgggaagagtcaaca

SEQ ID NO: 29170 - DNA, 120 bp, synthetic construct
  source 1..120: mol_type = other DNA
tctagtataaatgctttcctgtaccataaggtgtgagaatttgttaaaagttttgccacattcttcatatttgtaggagtcttcttcagtataaactatcttacctaccataacgtgtga

SEQ ID NO: 29171 - DNA, 120 bp, synthetic construct
  source 1..120: mol_type = other DNA
gccacattcttcacacgtgtagggtttctctccagtatgagttctcttatgtctagtaaggtttgcagaccagctaaaggctttgccacattcctcacatctatatggtttctctccagt

SEQ ID NO: 29172 - DNA, 120 bp, synthetic construct
  source 1..120: mol_type = other DNA
ggtgtagaacgtagttactgaccactaagaagaaatatgaagaagtcttttaattgaaaaataaatacaaattgcagacaaaacacatcctgagaacatgtttgtgagaatcccagaatc

SEQ ID NO: 29173 - DNA, 120 bp, synthetic construct
  source 1..120: mol_type = other DNA
agagtgagaactctatgattgtgccaagtcattcatgaggggatttgtctccatgatgcaaacagctctcattaggccccaatccaacagtggagattacatttcaacatgcgatttgga

SEQ ID NO: 29174 - DNA, 120 bp, synthetic construct
  source 1..120: mol_type = other DNA
aaatttttaaattttattatgaaccaaatctagagaaacacacatgaaaaacacagaggcactatacttcataatttcaaaacataataaaaagctgcaataacaataactatgtggtac

SEQ ID NO: 29175 - DNA, 120 bp, synthetic construct
  source 1..120: mol_type = other DNA
aggatggccactataaatttttttaaaacaccaactgttgatgatgtaaagaaattgaaacctatgtaagttgttttttatgagaaaaaagatacagccatcataaaaacatcataagcg

SEQ ID NO: 29176 - DNA, 120 bp, synthetic construct
  source 1..120: mol_type = other DNA
actcagtactactgaatcaaaaattggtggcagcaactgaattctaatgtgtgggcaacgatcttttatgccatggcatttttggaattcccactaacctagagcaaaagatacataagc

SEQ ID NO: 29177 - DNA, 120 bp, synthetic construct
  source 1..120: mol_type = other DNA
cagtagacactggattcaggcatccaaggagtggccttgggcacactgtgtgcacttgaaagaatgtttacagagagaaaaagcagaatacagaaaggtgttataaaaaaaaatctgtgc

SEQ ID NO: 29178 - DNA, 120 bp, synthetic construct
  source 1..120: mol_type = other DNA
tcaacccgacttccatttctcagaggtacattgctggtcagccaatcagatgctggtattgagaggaaaactcagaaataatttctgccccctggattctctaagatttgtgaaagaaaa

SEQ ID NO: 29179 - DNA, 120 bp, synthetic construct
  source 1..120: mol_type = other DNA
tggtctggagacccaaagggataaactaattgcttgcatttcctatggccattagaaaaatagatgaagcagtcatgatccctaccatccaggaactgttagtcttgactagcaactgaa

SEQ ID NO: 29180 - DNA, 120 bp, synthetic construct
  source 1..120: mol_type = other DNA
agagggagagggagagggggagggggagagggagagcgtatttctgtttcttatgccttgctaagaatacttatttggcttccaataaaattactctagaaaaccctaagagatttgttt

SEQ ID NO: 29181 - DNA, 120 bp, synthetic construct
  source 1..120: mol_type = other DNA
tgtttcctccattctttcaatatgtactttacatatttggaaacttaatgtgagatacacaaactcaaacacacacacaccacacacacacatatgtagaaatttgtcataggttcccag

SEQ ID NO: 29182 - DNA, 120 bp, synthetic construct
  source 1..120: mol_type = other DNA
gcaggacagttttgctgctggtattattctcacttgacagctgttttcttcaggactttgattatgtcacacagttttcttctggcctgcaaaactttcatgaaaaattaactggttatc

SEQ ID NO: 29183 - DNA, 120 bp, synthetic construct
  source 1..120: mol_type = other DNA
tttgcatttcttctggatattgcctgttcatacctttgcccattttttccctttctgggttgtttatcttttcttcttattgctttataggagttctttagatgtcacaatggttaatct

SEQ ID NO: 29184 - DNA, 120 bp, synthetic construct
  source 1..120: mol_type = other DNA
agatagtattagagtaaattagttgagggaaaagccttatatcatctatccctgttttcatttctcttttcacctttacttttggtctaaagagactttatcatgatatatggtatatgt

SEQ ID NO: 29185 - DNA, 120 bp, synthetic construct
  source 1..120: mol_type = other DNA
aagtcagaaacctgggacttgtccatgattctcttcctcccctcccccaccaaattcaatcaatcaccaggccccattgattgtttttcacgttcttttattgtgaactataacttacag

SEQ ID NO: 29186 - DNA, 120 bp, synthetic construct
  source 1..120: mol_type = other DNA
ctaaggaaaatttctgagtagttcttttggtgtggctttttgtgccaaaataaacttttagggcctccctccagtactaggtatatgggagagtttccaaagctgccaaaacacagagct

SEQ ID NO: 29187 - DNA, 120 bp, synthetic construct
  source 1..120: mol_type = other DNA
gttaacagacatcaaagtggatgcctctgggatgagaactgacttggggagggctggaggagggaacatctctgtattagaaggctttgattttattttattttgaaaccttatgcatgt

SEQ ID NO: 29188 - DNA, 120 bp, synthetic construct
  source 1..120: mol_type = other DNA
tctcttccctaaatagaatttaaggtccacaagggcagcacctcgtctggctcgttcacttctggatccccggcacgtagcgtcagtgcacacagtacatgctcaataagtatttagatg

SEQ ID NO: 29189 - DNA, 120 bp, synthetic construct
  source 1..120: mol_type = other DNA
ttgatgttaaagcatgtgttatttatagaaccactagcgtgtacaacatttttgtgttatgaaaacttgattcactgagatttttattatattattgttgaatttatgtcaattgctgtt

SEQ ID NO: 29190 - DNA, 120 bp, synthetic construct
  source 1..120: mol_type = other DNA
tgctcctatgcttgccaagcttggatatgacccatatgccaacccacctaactacggaaaacctgatcccaaaattattgaaaacactcgaagggtaagtgagattttttaaagcaactg

SEQ ID NO: 29191 - DNA, 120 bp, synthetic construct
  source 1..120: mol_type = other DNA
ataacttgcttggaagcatctgggtttccccagtgggctatcagctgcctccaatgctgagaaaacaaagtgtcacatcgctctgcagaactataaaaagatgtttgtttgcgggctgtt

SEQ ID NO: 29192 - DNA, 120 bp, synthetic construct
  source 1..120: mol_type = other DNA
ggcattttacctgctctgcatagctacagaataatactagtggcaaggatggggaacacctagaactcttctgcattgctgttgggaatgtaaaatgctgcaaccactttgttaaccacg

SEQ ID NO: 29193 - DNA, 120 bp, synthetic construct
  source 1..120: mol_type = other DNA
catcgttcttttgcatgtggctatccaattttcccggcactatttggtgaaaagactcttcttttctccattgagtagtcttggtacttttatggaaaatcagttgacagaagacgtatg

SEQ ID NO: 29194 - DNA, 120 bp, synthetic construct
  source 1..120: mol_type = other DNA
gtctatttcattctgtagactgtcctgatactcagaccacttgatagaaggatcatgtcacacagctccatcattcaagagaacagccccgacttagtcccatttccaaaactcgaagca

SEQ ID NO: 29195 - DNA, 120 bp, synthetic construct
  source 1..120: mol_type = other DNA
atggataagcttttgcataaaatacttgaagtagaaggatagatttgagcactgcagtgtgtgcatgtatatgggtaactagttgacagtaacaagggctgcagtcaaggtgatcacaaa

SEQ ID NO: 29196 - DNA, 120 bp, synthetic construct
  source 1..120: mol_type = other DNA
tcaaatgaagacaataacaaggtcctagcttttcctcacatgatgcaattaaccagacgcgactatcctgcatacaactcaaagagtgctaatccttttgccagaattcagctttcagaa

SEQ ID NO: 29197 - DNA, 120 bp, synthetic construct
  source 1..120: mol_type = other DNA
tgaggcaggagaattgcttgaatccgggaggcagagtttgcaaaaagagggcggggggggtgggcaaagaacctgaacagagatttctcaaaagaagacagacgaggcaccaataagcac

SEQ ID NO: 29198 - DNA, 120 bp, synthetic construct
  source 1..120: mol_type = other DNA
gtgcagatactttgcttcattttacagtcgaaggtcagttgttaagttaaaccttaagcagtggaggtgggaaacctgaaaaaaagcaaaaaggtgtctgagcagccaaagcaaagtcct

SEQ ID NO: 29199 - DNA, 120 bp, synthetic construct
  source 1..120: mol_type = other DNA
ttcactgctactcccctggtccatgccattgtcaacctaaataccatagagaggctctccaaaagaaaagatgtttgtttgggaatagcacgtacattgcaatggggatacaattgccat

SEQ ID NO: 29200 - DNA, 120 bp, synthetic construct
  source 1..120: mol_type = other DNA
ttagttcccaagagagcttgttggtaagaagagcctggaacctctcctgcactcttgtttcctctcttgctatgtgatctttgtgctcgccagctccctttcacttctactctgccagga

SEQ ID NO: 29201 - DNA, 120 bp, synthetic construct
  source 1..120: mol_type = other DNA
agcgctgggattgggattacaggggtgagccactgcacctagccaaaatatataaatataatttaaagagtttatttgagccaaaatgagggcagctgtctcagacacactttgcagctg

SEQ ID NO: 29202 - DNA, 120 bp, synthetic construct
  source 1..120: mol_type = other DNA
aagcaagattggttaaatcattgggcagttgattaagctgaatctccagtgtatttccttttctcaaaggtcaggctggccctaaattctaatcctctaatcactggtttctttctggtg

SEQ ID NO: 29203 - DNA, 120 bp, synthetic construct
  source 1..120: mol_type = other DNA
gatttgatgagtatctcccctaaagtgtaacacagatctcgtgtgttgtctctgaaattattactcagcactctgccattcccaaaaagatagggagatatccctaaaaatgtacacaaa

SEQ ID NO: 29204 - DNA, 120 bp, synthetic construct
  source 1..120: mol_type = other DNA
aattcagccaagtatagaaagaattatatgccataaccaagtggaatttttcccaggtatgcaaggcaggttcaacatttaaaaaccaaagcaatccaccatatcaaacatgctaagaag

SEQ ID NO: 29205 - DNA, 120 bp, synthetic construct
  source 1..120: mol_type = other DNA
ggccagtcctgagcagctttggaagataattcctgatgttttcaatgcttgtcttttgtgttcttaattctgagggcaatcattgtcttttcagttatttcactgagttataaaaatatc

SEQ ID NO: 29206 - DNA, 120 bp, synthetic construct
  source 1..120: mol_type = other DNA
ctggagccaaacactttgtagaaatcattgaaccctctcactttctcataccctacatccaatccatttgaaaatccctcttgatgataccttgaaagtagagccagctgattgactttg

SEQ ID NO: 29207 - DNA, 120 bp, synthetic construct
  source 1..120: mol_type = other DNA
tccatctttaggtccgtgtgtacccattggttagttcccacttaaaagtgagaacgtgtgatatttgatgttctgttttttagttcacctaggatgatggcctccagcttcatccatgtt

SEQ ID NO: 29208 - DNA, 120 bp, synthetic construct
  source 1..120: mol_type = other DNA
aaatcactttctgaaaactgaggcacaactgagcagtgaaatttaactttatttcgcccacgttctttgttactgttgttaaggtgacagtgactgggatcgaatcagtttcataaatga

SEQ ID NO: 29209 - DNA, 120 bp, synthetic construct
  source 1..120: mol_type = other DNA
aaggacttttaggacagcatatcttgtaatgccttctacattgagtcaagagcagtacctgacaaaccaagctgcatgctggaatcacacggagagccctttagaaatcctgatgcatga

SEQ ID NO: 29210 - DNA, 120 bp, synthetic construct
  source 1..120: mol_type = other DNA
cacaatttcctgcggaaatcaggtgagttctccagcctatggagagatgctgcttgaatctatgtttcactgcaaagtaaaactaataggcattaatgcaatcaaataggatttattgat

SEQ ID NO: 29211 - DNA, 120 bp, synthetic construct
  source 1..120: mol_type = other DNA
cctctgaggaacctcagagaactggtttgttcttatcttgtggacatttgaatcctgtaacagcatctcccacttcatgagtgtgccagagttcagagtcaaatttgtagtcatttgtag

SEQ ID NO: 29212 - DNA, 120 bp, synthetic construct
  source 1..120: mol_type = other DNA
ccttcagagatcagctttgactttgaccttgttacgtcttttgtatgattttgccaagcaaaatcaactcactcctccatttatacccattacattttccccaccttagtcatggcgctg

SEQ ID NO: 29213 - DNA, 120 bp, synthetic construct
  source 1..120: mol_type = other DNA
agttaaggaagcatagcttgtcttttattaaagaggcactcagcaaaggggtgatgagacagaatgctgttattactgatgcttttgttttacattttcagtaattaacgtgctttgctc

SEQ ID NO: 29214 - DNA, 120 bp, synthetic construct
  source 1..120: mol_type = other DNA
tctcctgagctggattccttccttatgtctgaattctgcacaatgtctagcatagtacactttaaggtatttgataaatgcttccatttttttcttggagactgggtcttgctctgtcac

SEQ ID NO: 29215 - DNA, 120 bp, synthetic construct
  source 1..120: mol_type = other DNA
taccaattttttctctcatgggtcatgcctttggtttgctatctaaaaagctattaccaaatccacggtcatctagactttctcctgtgttatcttctagaactcttacagttttgcctt

SEQ ID NO: 29216 - DNA, 120 bp, synthetic construct
  source 1..120: mol_type = other DNA
tgtgacttatttttaaaaaggacaactgtcagaagccacccctaagaagatcatttttctaaggaataataacctagaaagctagtattttctattttgtaggttatttttctggggaaa

SEQ ID NO: 29217 - DNA, 120 bp, synthetic construct
  source 1..120: mol_type = other DNA
atgaatttctacttttctgtttctttcttgcaactaaaatttcagattctcctacagcatccacgtgataattataaatttgttttgtcctgtgtttgtgcatagtaaatacaggccttg

SEQ ID NO: 29218 - DNA, 120 bp, synthetic construct
  source 1..120: mol_type = other DNA
tctaagtattatattacctcaagtttaaattgctgcatattcattagttgggtttgtcatgattttcttaacccatctactattaaatagcactgcaaaaatttatgtacacctttgcac

SEQ ID NO: 29219 - DNA, 120 bp, synthetic construct
  source 1..120: mol_type = other DNA
ttgttttagctctttgagcagttttgagttaattttggtggacaatgtgagaggttcatttgcctgtgaataactagttgtctcagtaccatgtgttgaaaagactattttttccccatt

SEQ ID NO: 29220 - DNA, 120 bp, synthetic construct
  source 1..120: mol_type = other DNA
aagcttttatttgttgggagttttttgattgttcaatctcttgacttgtaggtctgttccgattgtccatttctccttgagtcatttttggtaatttacatatttctaagaatttgtcca

SEQ ID NO: 29221 - DNA, 120 bp, synthetic construct
  source 1..120: mol_type = other DNA
tgatcagaagacattgtgaaaaaaaggaagccataaagtggatgaaattatttctaatacgtttataacagagcttttctttccagcaaatgcaaataatttattgaaaatcagttggaa

SEQ ID NO: 29222 - DNA, 120 bp, synthetic construct
  source 1..120: mol_type = other DNA
caggcaaaactaaactctggtgttcaaagagataaccacattgttttataatagctaaaacctggacataatccaaatgtttagggaatggttgaataacttgttgtatattcatgcaac

SEQ ID NO: 29223 - DNA, 120 bp, synthetic construct
  source 1..120: mol_type = other DNA
ggctgagtaattgcaaactcctgctattatttttatggttactgttgccagtttatttgttcagatgaattgtaaactctcattggaattacattatatttataaatccatcatggctct

SEQ ID NO: 29224 - DNA, 120 bp, synthetic construct
  source 1..120: mol_type = other DNA
gaccctgtctctaaaaaaataaagaagaaaagaaagcaagccagtccctcttgtggttatatggcacacaaatggcaacattgataatccatccatgtgccttttctgccagcaagaaat

SEQ ID NO: 29225 - DNA, 120 bp, synthetic construct
  source 1..120: mol_type = other DNA
tgttgagtgcatgttcctgtgtatcctgtggattggtgcctacagttagatcaagagaagattgattaaattcaggggtgcatgtgtgtgtgggtttgtttgtatttcaggaatatttca

SEQ ID NO: 29226 - DNA, 120 bp, synthetic construct
  source 1..120: mol_type = other DNA
aaacagtatacttctctgatgggtattatttggttcaccaaactatgaacatcactaggaaatagataaagccttctgtctatagctgagatgttttgttttgttttgtttttctgagac

SEQ ID NO: 29227 - DNA, 120 bp, synthetic construct
  source 1..120: mol_type = other DNA
tctccctgacgtgtgagtgtgtggtgtgtttatgtgtgtggtgtgtgtgcatctgtgttgtgtgtgtgcatgtgtgtggtgtgtgcacttgtgtgttgtatgtgtgcatgtatgtgtgtt

SEQ ID NO: 29228 - DNA, 120 bp, synthetic construct
  source 1..120: mol_type = other DNA
acttggcttttccatcaccacgctgtacccatctattttcttcagactgttctttattcagagttttggtgaagaacttgctgcttctgataaatggagttgggggtgagggtgagggtg

SEQ ID NO: 29229 - DNA, 120 bp, synthetic construct
  source 1..120: mol_type = other DNA
aactctatgattcagtgaactaactttttaaatattaaaaagaaagtcctttgaagtagctactgcatacatggttgtttgtgtaatccacacataagcagtatttaaattgaggtagag

SEQ ID NO: 29230 - DNA, 120 bp, synthetic construct
  source 1..120: mol_type = other DNA
ttttcatctggaaaatgggtatattgctagccaaggccattattatgaaacacttaacacagcacctggctcatagcatgattcagttattgctgcttcagttatttttatttttataaa

SEQ ID NO: 29231 - DNA, 120 bp, synthetic construct
  source 1..120: mol_type = other DNA
cacatctccctcgttagtggtgatgattttgttcagccaactactttgacccagttcttctgtttctctcctttgcacctgataagctatctatgaaaaggtaccttaagacaatgcagt

SEQ ID NO: 29232 - DNA, 120 bp, synthetic construct
  source 1..120: mol_type = other DNA
cattgagaaccacaagtagtttgggatggctgaaggtcaagagaagggttgcagggaaaggagattattaggcagggttaagatcacagatagcattgaatggcatcctaaatgtcattt

SEQ ID NO: 29233 - DNA, 120 bp, synthetic construct
  source 1..120: mol_type = other DNA
attgaaagaagtgtgacacagcctaacgttgaaactgggaactatctcaagctagcagttgttgaaatgcccaacagatgtccagtgtcactgcgttcctctttaaaattcaagataccc

SEQ ID NO: 29234 - DNA, 120 bp, synthetic construct
  source 1..120: mol_type = other DNA
ctgcagagaatggatgttattcctttcttaaatgtttggtaggattcaccagtgaacccacctaggacaaggaactaggaaactatcaggccactcctcacctccacctgtctgtctgtc

SEQ ID NO: 29235 - DNA, 120 bp, synthetic construct
  source 1..120: mol_type = other DNA
tctttgtctggctttggtatcaggataatgctgacctcactgaatgagttgaaagtattccctcctcttcagtgttttggaaaagtttgagaaagattggtgttagttctcttttaaatg

SEQ ID NO: 29236 - DNA, 120 bp, synthetic construct
  source 1..120: mol_type = other DNA
agaactcaaaaggcattcagattcctaatcctctgtgtatgaccatgtttttctcattcgattttctctttgtctccattgttttgaaatttcgctataatgtgcctcagacggtgtgtc

SEQ ID NO: 29237 - DNA, 120 bp, synthetic construct
  source 1..120: mol_type = other DNA
gatttcatggagcagccacttagcattgaattgcactaccctgagctaaacgtgtctgtgctttctaagataagagcttgatccctttcttctatcttaagacagcacctcctgaaaaga

SEQ ID NO: 29238 - DNA, 120 bp, synthetic construct
  source 1..120: mol_type = other DNA
caagtaacaaccccatgtcaacagtggcttaagcacaaaagacactgaaccctctcacacggtaaccagtctgaggtggttgttctgcatttgtttcgctgtttagaaatgtcagcaatg

SEQ ID NO: 29239 - DNA, 120 bp, synthetic construct
  source 1..120: mol_type = other DNA
cagtattcctgggatctcttgtacatgataatctcactcttgcacatgataatctcactcttgtacatgataatctcactcttgcacatgataatctcactcttgtacatgataatctca

SEQ ID NO: 29240 - DNA, 120 bp, synthetic construct
  source 1..120: mol_type = other DNA
tccgtaagcgtcggttccagttaggccgttccatgaacccgagggccaggaagtaccgctctcgcatacccttggtccgtaagcgtcggttccagttacgccgttgcatgaacccgaggg

SEQ ID NO: 29241 - DNA, 120 bp, synthetic construct
  source 1..120: mol_type = other DNA
ccactgccaaggtcatcaaaggggtgactctgaaataataaatttcagacgccatggcccaaatagctgcatgaggtggggaagtcctccacaagcctctgcttccttcagtacctgttt

SEQ ID NO: 29242 - DNA, 120 bp, synthetic construct
  source 1..120: mol_type = other DNA
aggtgacaagactccaatcaccctgctctgaatggctctccatcttcccaaaagtataccagaggcctgttttgtttcagtacattgattaaataaatattcctgtgtgcacaaaggaac

SEQ ID NO: 29243 - DNA, 120 bp, synthetic construct
  source 1..120: mol_type = other DNA
ggctaatgaacagtggctgtcaacagttatcttgaaaatctagacttgtagccttgaaggagagggacccgaactgtgaagagatttgtcactaaccatgctatattggatgtaaacctg

SEQ ID NO: 29244 - DNA, 120 bp, synthetic construct
  source 1..120: mol_type = other DNA
agattttggagcatttcagacttcagattttcggattagggttgtgcaacctgtacttcatgagccaattgagaaaaatgccttcataatttctttctagggcctcaaacgcctggacgt

SEQ ID NO: 29245 - DNA, 120 bp, synthetic construct
  source 1..120: mol_type = other DNA
ctaataaactagaaggaactacaaaaagttttaaggttaagggatgcaaaattgattagcaaaggcagatcagaaagagtttctgactcatgcttcattggtgagaacagcaaggaagaa

SEQ ID NO: 29246 - DNA, 120 bp, synthetic construct
  source 1..120: mol_type = other DNA
gatgactaaaaatacggtaattgagttagactgtatgggtctgtaccctgctctgccacttcctggacatgtctcagttttctcatctgtgtaatgatgatagtagcgtccacttcttgt

SEQ ID NO: 29247 - DNA, 120 bp, synthetic construct
  source 1..120: mol_type = other DNA
cttggttcaagcctttgaccttacatagtcccgaggttcagctgaaagtaatgtgctgacatcagagagataatggcactagtgcaaaacaggaatgattctaaaaaaacagtagagagg

SEQ ID NO: 29248 - DNA, 120 bp, synthetic construct
  source 1..120: mol_type = other DNA
ttgcgacatgtggtaaaaggccctactttttggagtcagaaattgtgctcatttctgtatctgccaccttgtagctgttggctcttgaacaacaactaagcctctactttgaacatcaat

SEQ ID NO: 29249 - DNA, 120 bp, synthetic construct
  source 1..120: mol_type = other DNA
ttattttcctaataattcataccagtgatgtaagatagtggtacccagaccccataatctaagaggaatttgttgccatttgaacaaggaatgtgttgcctcattcatattttcaaaagg

SEQ ID NO: 29250 - DNA, 120 bp, synthetic construct
  source 1..120: mol_type = other DNA
cttaaactagggaccagatgaaaagttccttttggggctcactgttcaaagaaccaggattaatctctgttttcgatgtagcttacttggtcaaccactgcaagtattccccttatctgt

SEQ ID NO: 29251 - DNA, 120 bp, synthetic construct
  source 1..120: mol_type = other DNA
gtcacacacacgcacaccccacacatgcacatgtcacatcagcgtcgatcacacaccccactcacacacaccacgtacacagtcacacacacaccccacacatgcacatgtcacatcagc

SEQ ID NO: 29252 - DNA, 120 bp, synthetic construct
  source 1..120: mol_type = other DNA
tcacttcttgaggcttcagacaggttgctttatctagggcaagtcaaagtttggaaacagaagaggtcatgatggattgttgtgctgtttcccttacgtgtaaccatggttagactttct

SEQ ID NO: 29253 - DNA, 120 bp, synthetic construct
  source 1..120: mol_type = other DNA
gacggcaaatagccaggtcctgaaacttgcttctaatgaattccttacatgctgttgaaatggcaggaatcataatagcttatttcatgtgcctttgaagggttccagcaaatggagtct

SEQ ID NO: 29254 - DNA, 120 bp, synthetic construct
  source 1..120: mol_type = other DNA
acaggaatatttcatctttgtcagtattacatggaaagactaaattgaatatcctctttgtccctaaaagctagccccagagtcaaaatatgctgcacttcagaattccccccccccatt

SEQ ID NO: 29255 - DNA, 120 bp, synthetic construct
  source 1..120: mol_type = other DNA
ggaagcgcccgctgtacagattgtcaagtgcatagtgcttggaggcatttgaaggaagtaaaaggctctatttttttccccagagaaactgttttaatttacctttctgagttgtagaga

SEQ ID NO: 29256 - DNA, 120 bp, synthetic construct
  source 1..120: mol_type = other DNA
atcacagtggcatgaaatctgagagagcattgccttaaggcatgcctggtggcctgaaatacagagaccctgttctagatctaacacttcagaacattcttcattgtcttcgtgcttcaa

SEQ ID NO: 29257 - DNA, 120 bp, synthetic construct
  source 1..120: mol_type = other DNA
agccccacaaatttttggctaaaggcaattacctcatccctggaaaagcaactctttatgactcaaagaaaaatacatatttcccaggtagccgtggagccagtaggtgaatattcggag

SEQ ID NO: 29258 - DNA, 120 bp, synthetic construct
  source 1..120: mol_type = other DNA
ggcactcctgggtatctacccaaagaaaaaggagtcatcctatcaaaaagatgcctgcacttgtatgttcatcacagcactatccacaataacaaattcatggaattaacctaagtgcgc

SEQ ID NO: 29259 - DNA, 120 bp, synthetic construct
  source 1..120: mol_type = other DNA
aaatatatattttttaagggtgagatttttagaccaagagctcaggcatcagggtggctacagctggaatgacaagagataagaggctgtcacagagtctaaggggaagatgaggaactc

SEQ ID NO: 29260 - DNA, 120 bp, synthetic construct
  source 1..120: mol_type = other DNA
ttgttctgtcaatctgcctagaggctggattttatacagcaggcaataaagagcagtgaaagatgtttatgcaggaaagttatcacgatggattgtgatagggaactctgacaggaatgc

SEQ ID NO: 29261 - DNA, 120 bp, synthetic construct
  source 1..120: mol_type = other DNA
aatagaccattttgttccttttacctaaaatgcaaaagcaggagaagtgaatacacagtgttagaagtaaaggtagtggctgctctccaggaaggctggggatttgaaaggcatcacaca

SEQ ID NO: 29262 - DNA, 120 bp, synthetic construct
  source 1..120: mol_type = other DNA
gttttcaaggcttaggttctgtttcttgacctaggggctggttatcccacttggtgaaaattgtctgagctgtacaatatccttggtacacttttctgtacctatgggatacttcaatca

SEQ ID NO: 29263 - DNA, 120 bp, synthetic construct
  source 1..120: mol_type = other DNA
agaactgcatcgatgatatcaaaggatgcagaaaaacacattgattagcctcctataaaaaaaaattcaacctcactagtagtcaaagtaaaacaaaactccagtcttatttgaagcaac

SEQ ID NO: 29264 - DNA, 120 bp, synthetic construct
  source 1..120: mol_type = other DNA
accacagagcaaacttcagcatacgtatttaaaaagttggtctaccacagttgaatttaagtagagacaataatgaaagtcaatactttcagtgtatactgggcagatgatgggtgcacc

SEQ ID NO: 29265 - DNA, 120 bp, synthetic construct
  source 1..120: mol_type = other DNA
tgatggacagaaatctgctacaagaaatcagaacttttctttgctcaagatgtgtaataaacaaaacgacagaaatccacaaactagggctgggtgcagtggctcacacctgtaatccca

SEQ ID NO: 29266 - DNA, 120 bp, synthetic construct
  source 1..120: mol_type = other DNA
gtgcaattcaatgctaagtggctgctccatgaaatccaagggccaggtgaggggaagaggcccagggatttcttccttgtctgacactctcaggactagcattctggcaggtcttagaag

SEQ ID NO: 29267 - DNA, 120 bp, synthetic construct
  source 1..120: mol_type = other DNA
ctcgtggaatcctttttagactcaacttggcttgagttattagtgaaggtttcatcaataacttctaattcaaacatgctaactaaatgactcaaactagcttttctggcctaacgtgga

SEQ ID NO: 29268 - DNA, 120 bp, synthetic construct
  source 1..120: mol_type = other DNA
gttaagtatcctgagacacgaggtcaccctgctaaaagaatccctcgaatccaacagtaagggaagaacggaatctatgcagaattacaaataaactcaaaaggtcataaatgatcttaa

SEQ ID NO: 29269 - DNA, 120 bp, synthetic construct
  source 1..120: mol_type = other DNA
gcatgcatcaaaaggcagtatcaacagagtaaaaaggcaactcagaaaatggggaaaaaaattgcaaatgatgtatctggtaagggatactacccaaaatatatagagaatgcctaaaac

SEQ ID NO: 29270 - DNA, 120 bp, synthetic construct
  source 1..120: mol_type = other DNA
gaggcactagagcactatgaatgtgcaagttggaaacctccacgttagggtatatctggtgtttaagtaattaatttcaagcattttggatgcttgaccatctgtctcactctgggcatt

SEQ ID NO: 29271 - DNA, 120 bp, synthetic construct
  source 1..120: mol_type = other DNA
accaatgcaatccagtccgtattttacagtgaaggaagtgaatatagagatgataaaatctgcctaggagaccatacaagtagctactgacaaagacagcaggctgatgctcttgctact

SEQ ID NO: 29272 - DNA, 120 bp, synthetic construct
  source 1..120: mol_type = other DNA
tgccaaaagggaaatatatttgtgcatgtacctacatacctttacacacaactacatatacacatgtatttcaccaacacagaaattcttaagtacaactgcagaaagttaaattatcta

SEQ ID NO: 29273 - DNA, 120 bp, synthetic construct
  source 1..120: mol_type = other DNA
gttttctctctgctgcgactgccccacttcatcctaccctctagtctactgatggcttgccctgactttattcctgagcacagaattatctaaaaaactttcccttcatatcacagctgt

SEQ ID NO: 29274 - DNA, 120 bp, synthetic construct
  source 1..120: mol_type = other DNA
caccacacacatgcacgcacacaaaacacacatgcataacacacacaacacacatgcacacacactacacaaacacaccacacaaacacaccacgcactcacacatgtcagggagaaaag

SEQ ID NO: 29275 - DNA, 120 bp, synthetic construct
  source 1..120: mol_type = other DNA
ctctttttgtttccttccaagtacttactctatgtttaatctactgctcttttctttttaaaaaaaaaaaaaaacattgtgggtaccaattaacttcttaatatatgcatttagcttatt

SEQ ID NO: 29276 - DNA, 120 bp, synthetic construct
  source 1..120: mol_type = other DNA
gaagggggtcctaatgtgacaaatgtcccaaacagtctaactacagacatcttggttatcaaacaaaagaccagcactgtgcaatagagcttctcacagttctccactaaaatactccca

SEQ ID NO: 29277 - DNA, 120 bp, synthetic construct
  source 1..120: mol_type = other DNA
gttgcagtgagccaagatctcgccactacacttcagtctggacatcagagtaagactctgtctccaaaaaaaaaaaagaagaagaagaagaatataatgggaggaaaagaatcagctgaa

SEQ ID NO: 29278 - DNA, 120 bp, synthetic construct
  source 1..120: mol_type = other DNA
ccagagtccaaaaagaatcactgcctttacgctaggaggaatggtgaagacatggtcatgtcataatgggttataaacagacaaatggacctacaacctgggaattctccagtgtttttc

SEQ ID NO: 29279 - DNA, 120 bp, synthetic construct
  source 1..120: mol_type = other DNA
actactgagcaaagcacgttaattactgaaaatgtaaaacaaaagcatcagtaataacagcattctgtctcatcacccctttgctgagtgcctctttaataaaagacaagctatgcttcc

SEQ ID NO: 29280 - DNA, 120 bp, synthetic construct
  source 1..120: mol_type = other DNA
tctaagaaaatgaactcagtatatctgcataagaacaagcttcttctagaccaatcattcctcaagtatcctgaactgggaaagtaaatgtagttggtccaaagctgtacaggagagaaa

SEQ ID NO: 29281 - DNA, 120 bp, synthetic construct
  source 1..120: mol_type = other DNA
tatagccaaggctaaaagccactgcatgaaaccagaggggcccaacctgtctgcacattggaatcaccttggaatcttaaaattcccacaatccaggccacagctcagatcaactaaacg

SEQ ID NO: 29282 - DNA, 120 bp, synthetic construct
  source 1..120: mol_type = other DNA
ccatgcccagccaagacatagggttcattgaagggactcacaaactcacaaacagggcagtccagtggcagtgggctgggcaggagaaccacagttgcttgtaaaaagcatgcagtttgg

SEQ ID NO: 29283 - DNA, 120 bp, synthetic construct
  source 1..120: mol_type = other DNA
atcatttgcagagaaatgcaaattaaacttacaatgggatatcatctcatactagtcagaatggctattattagagcaaaacaacagaattggcgtggattacacactattggtggggat

SEQ ID NO: 29284 - DNA, 120 bp, synthetic construct
  source 1..120: mol_type = other DNA
tcttcttttatgactatgtaactgcaattgtaagaatgtatttcgtgtcagtatttttggatggatgaataattttttaggttattgaaatctaagatcttaactcaagtaaaacaaggt

SEQ ID NO: 29285 - DNA, 120 bp, synthetic construct
  source 1..120: mol_type = other DNA
aggacaggaggaaacctagaagcaaagacaccaaagccatcctttccagaaagctacaaataaaaatatcataatcatattcccccatttagacaatcacaaaaacaaacaaaatacaag

SEQ ID NO: 29286 - DNA, 120 bp, synthetic construct
  source 1..120: mol_type = other DNA
tgaggtttttcataaattagtttctgaaaacaattaacaggtggtgttctcttccccaccttcacattttctttatgatgtgtatgttagcatacctagcttgtgaaaaccatctgttgg

SEQ ID NO: 29287 - DNA, 120 bp, synthetic construct
  source 1..120: mol_type = other DNA
tttagaaaactcactaaacaaacaaaacccagagcaagcaataaaaaacaaaccctgaagagtgagaaaaatctgacttccagagttaacacattctaataatcaaaatatgcagttttc

SEQ ID NO: 29288 - DNA, 120 bp, synthetic construct
  source 1..120: mol_type = other DNA
tgtcacctgcaaaacaagacagctttatttctgcctttgcaacctgtatgcattttctttttcttgactaattccagtggctagaatttacaatactatgtaaaacaggagtggtgaacg

SEQ ID NO: 29289 - DNA, 120 bp, synthetic construct
  source 1..120: mol_type = other DNA
tcctagaatggttatcgcctcaccatgtttttttgttgttattgtttatgatattgacatttacaaagtctaaaaggcttgtggcaaatactggatttgtctcattgtttccccatgatg

SEQ ID NO: 29290 - DNA, 120 bp, synthetic construct
  source 1..120: mol_type = other DNA
ccagtattcgacagagttgtttgctatgtatgctgcaatgcataagcctgtggaaatgctgttttgcattaatgaagctgtatctttaaggcaaattcatacaactgggcctgctggatc

SEQ ID NO: 29291 - DNA, 120 bp, synthetic construct
  source 1..120: mol_type = other DNA
tgcgccagatgataggattatcacggacagctatgacaatacataaatgaatgagcatggccatgctcccaaaacttttattttaaaaaattaaaaaacaagctgggtgcagtggctcac

SEQ ID NO: 29292 - DNA, 120 bp, synthetic construct
  source 1..120: mol_type = other DNA
tgagccatgatcataccgttgtactctgactgggggtgacagaatgagaccctttctcaaaaaaaaaaaaaaggagtgttgttaaagtagaggccacagaatgaggtcatagtaagcatg

SEQ ID NO: 29293 - DNA, 120 bp, synthetic construct
  source 1..120: mol_type = other DNA
gagtagaagtgaaagggagctggcgagcacaaagatcacatagcaagagaggaaacaagagtgcaggagaggttccaggctcttcttaccaacaagctctcttgggaactaagacagcaa

SEQ ID NO: 29294 - DNA, 120 bp, synthetic construct
  source 1..120: mol_type = other DNA
ctattcccaaacaaacatcttttcttttggagagcctctctatggtatttaggttgacaatggcatggaccaggggagtagcagtgaaggtggtaagaagtgattggaaactgaatctat

SEQ ID NO: 29295 - DNA, 120 bp, synthetic construct
  source 1..120: mol_type = other DNA
ccccccaaaaaagagagaatgggaagcatctttcaactagatatcagctgtatttactttagtgtctacctttaacacttttagcactattagaaatcaaaacaagtttcattacataga

SEQ ID NO: 29296 - DNA, 120 bp, synthetic construct
  source 1..120: mol_type = other DNA
ctatgtaactatgaaaaagaataaggcaactgaagaagtactcatgagaatgatctcaaaaagcaattacataaaaacaaggctcagaactgtatagtatcctctattattcgggctttt

SEQ ID NO: 29297 - DNA, 120 bp, synthetic construct
  source 1..120: mol_type = other DNA
ccttgtgccagtctttgttttacccctagccttatactttaagtcttgatagagtcagtcatcccactttctcatttctcttcaggactgtcttgtatcttggccttttgcattttcata

SEQ ID NO: 29298 - DNA, 120 bp, synthetic construct
  source 1..120: mol_type = other DNA
cagagcacaccgtttgccttcaacgtgagcagcacaactgagagcaaacctgtgtttggaggtaaggaggggcgtggacttgggctaccgggccggacactgaaaagctgtgcctgcgaa

SEQ ID NO: 29299 - DNA, 120 bp, synthetic construct
  source 1..120: mol_type = other DNA
tagcatggcatgtgtttcccagcgacactgtgggtgtagacctaaggtcagcggacagctggtgccacccggccatggagaccccagcaagcacagcaggaggggcagcgggtcagtgcc

SEQ ID NO: 29300 - DNA, 120 bp, synthetic construct
  source 1..120: mol_type = other DNA
ctttggtctgaacacccctgcgcctggagtgggcacatcaggcagcagcctctcctttggggcatcctcagcacccgcccaaggctttgttggtgttgcacctttcggtaagcagcaagc

SEQ ID NO: 29301 - DNA, 120 bp, synthetic construct
  source 1..120: mol_type = other DNA
cgtaaagctttatcttgcttggcttagctgtgagaagtggttctcttcctctggtcccttctggggactctgtttccccatttcttgctgctgtgtccctcaccagttccttgcaggatt

SEQ ID NO: 29302 - DNA, 120 bp, synthetic construct
  source 1..120: mol_type = other DNA
ccttcaagcttggttcattgaggtggttaagtataaatgctattaactaggaattagctgtatagttaagttatgcctgtgcaaagaagaggctcaaatgctgtccccggcagctttcct

SEQ ID NO: 29303 - DNA, 120 bp, synthetic construct
  source 1..120: mol_type = other DNA
gcatctcgacccgttcaattacagcaacgaagaagccaccgctaagcgtggtcttgggggaagcccggaggcagtgctcggcacccgggaacgtgctcaggcctcggtggggccgggcag

SEQ ID NO: 29304 - DNA, 120 bp, synthetic construct
  source 1..120: mol_type = other DNA
ctttcagccttcattacccactgaaaggcacaaaatcaaaccccatgtcctcctcctcctcctgtggcactcacccttggttcttcagaagagcagccaagtgactggtctttattgcct

SEQ ID NO: 29305 - DNA, 120 bp, synthetic construct
  source 1..120: mol_type = other DNA
tcagaaatctatcgaagtggcagagctggaattcaaacacaagcagccgttctctgctattccaccctggtgtccaagcaacatggtagggcagaaggaagaggatcttacaaagagtaa

SEQ ID NO: 29306 - DNA, 120 bp, synthetic construct
  source 1..120: mol_type = other DNA
aaatgattggagggaggggaaggaagcacctaggatgactcggtttctggcttgaccaaatgggtggaaaacggtgacatctgttagattaaactggggatgtactaagtgtaaagtctg

SEQ ID NO: 29307 - DNA, 120 bp, synthetic construct
  source 1..120: mol_type = other DNA
gacgctgcgagcccgtttcgccacttcttctccagttcttcagtctttgtcaatctgatggataaataatgggattttactgctgtttaaccgcagttattgcgttgaatatgttcacat

SEQ ID NO: 29308 - DNA, 120 bp, synthetic construct
  source 1..120: mol_type = other DNA
tgtctcaaaaaacaaaaaataagagagaagcagaggaagattagaccggcacatacagaaaaggccacgtgaagatggaggcagagattggaatgatgcggtcacaggccaggaaacacc

SEQ ID NO: 29309 - DNA, 120 bp, synthetic construct
  source 1..120: mol_type = other DNA
ggacggtaagcaagggatgcctggtgctcctggatgttgcttctggccatttcccacctctcccagctcccactcctcctgatatcctgccttacatccagccaccctgaacttctcata

SEQ ID NO: 29310 - DNA, 120 bp, synthetic construct
  source 1..120: mol_type = other DNA
ggtgggaagccagggcactgttgggaaggggaaggccctggcgggtatggggatgggacgcctccctgtccactcacccagatgaactcatggtggtcctcatttccgaactgttccagc

SEQ ID NO: 29311 - DNA, 120 bp, synthetic construct
  source 1..120: mol_type = other DNA
acaggggcggaggagtcacgcccatgctttcagctgtttacccccgagactcaagtcctgggttatctcagtctcaaggacacagagggcaaaagccaacttggagccagtcctaacgac

SEQ ID NO: 29312 - DNA, 120 bp, synthetic construct
  source 1..120: mol_type = other DNA
ggaagggagttgggtaaagaatcaagcacttgctggcataaacggacagagtccttgctctggagaatgaggcatcagaacatctcacagaggcctaagaacagcattccaatgtcaccc

SEQ ID NO: 29313 - DNA, 120 bp, synthetic construct
  source 1..120: mol_type = other DNA
tgcacacccctcaacccgactgcacatccccaggcacctcccgctccacctgcccacgccggatcctcccctgcgatcacttcctctgtgcaagggggaattacagagctggagtcaacc

SEQ ID NO: 29314 - DNA, 120 bp, synthetic construct
  source 1..120: mol_type = other DNA
tgcctataattccagcactttgggaggcccaggcaggaagatcgttggaggccaaggaattcaacaccagcctgggcaacataaccagaccccatttctacaaaatataaaaaatgagct

SEQ ID NO: 29315 - DNA, 120 bp, synthetic construct
  source 1..120: mol_type = other DNA
atggggcagcgcaccttggtgtccaggtggtaggacagggaaaccaggcagcccttgcagtaggagtggccgcactgtagcattagggactccttgaagacctccaggcagatgggacac

SEQ ID NO: 29316 - DNA, 120 bp, synthetic construct
  source 1..120: mol_type = other DNA
ttggaatacctagcttctcaggatccactgggcctcccactatggcctcaagccagcatcactggcttttcttcttcccagcagggaacagcaggcacagagtcagaagtgggaagtgca

SEQ ID NO: 29317 - DNA, 120 bp, synthetic construct
  source 1..120: mol_type = other DNA
gcaagtgcccaatgtgccctgtgtggtcccgttacgtgtcccatcatgttttgtgcgctccgattacgggccacacctggcaactcaccgtgcgacctctgtagttccagagctcgcgag

SEQ ID NO: 29318 - DNA, 120 bp, synthetic construct
  source 1..120: mol_type = other DNA
ggtgaaagcagtgttgtgggtgtgcttaatgaaggcatgattaattctagctgggaagttcagggaaggcttcctggaagagggggcatttgaactgagcccagaagtttgaataaaatt

SEQ ID NO: 29319 - DNA, 120 bp, synthetic construct
  source 1..120: mol_type = other DNA
accttggctcttgaagtgccaggattacagaagtgagccgccacacccagccacagctgggattttgatagggattgtgttgaatctgtagatcacttctgaagtaatgaaattttaata

SEQ ID NO: 29320 - DNA, 120 bp, synthetic construct
  source 1..120: mol_type = other DNA
acagaaagcgcctaggggaggtggcacacactgagctggtctgaatcagcagaggagagaaggaagcatttgagtcacactgcacggtgaagatgcccaagtgcagaggtcaggaacagt

SEQ ID NO: 29321 - DNA, 120 bp, synthetic construct
  source 1..120: mol_type = other DNA
ggctcttcaggctgagctcttaggttccactccacggtggcacgcgtggttaacctgggcatgcacagggtacatgaccttcaacctgcaggtcgatggcaattggaaaacaactgacaa

SEQ ID NO: 29322 - DNA, 120 bp, synthetic construct
  source 1..120: mol_type = other DNA
gtggattcgagtgatgcaagggggacctggactgtgacctctgtcacgggaacccggaggaggctgatggcttttgcggttgatgtgggaaggagagagaacaaccggaaacgtctgctt

SEQ ID NO: 29323 - DNA, 120 bp, synthetic construct
  source 1..120: mol_type = other DNA
tggggccctgctgcttgatggagaaactgaagaacgtaaaggatcttgtttgagggtttgtgttgttgtgttgttgttgtatatttgtttgttttgaggcagggttttgccctttcaccc

SEQ ID NO: 29324 - DNA, 120 bp, synthetic construct
  source 1..120: mol_type = other DNA
actcccaatgtgttggtatttggaggcgagaagtttgggaggtgatcacgttgagaggaggttataagggtggaattcacttgatgggattagcagccttttgagaagagtcatcagaga

SEQ ID NO: 29325 - DNA, 120 bp, synthetic construct
  source 1..120: mol_type = other DNA
tctcagagaagagcaactgccacagtggggacctggagcacaaggggaaactggggcagcagctgcaccacagggttggcggtacctgataagggaagaggatgacttccataagtaggc

SEQ ID NO: 29326 - DNA, 120 bp, synthetic construct
  source 1..120: mol_type = other DNA
caggattctcttctggatagcctgtttagattgcagtaggacctgaagacttgaaattggtgttcagccctgggagaggggtctggccaggcttgcacagctgggtccaggctcaggact

SEQ ID NO: 29327 - DNA, 120 bp, synthetic construct
  source 1..120: mol_type = other DNA
ccaatctgcacccatccaagccctttgtgtcaggcaccatctcatcttcataaatcctgtttctattgcctggaggactcccccagccctaacttcccctgttcctaaatgacatttcac

SEQ ID NO: 29328 - DNA, 120 bp, synthetic construct
  source 1..120: mol_type = other DNA
ttttgtgagtctggcagaatgcatacctttaggtagacatcatcacaatcaagatataaaagggttccatcattccccaaaattgcacactgccctattgtagtcaagtcttacccccac

SEQ ID NO: 29329 - DNA, 120 bp, synthetic construct
  source 1..120: mol_type = other DNA
actccgaagggagtgactcaactcctctgagcctcagtttccctctcataaaatgacagagattgtgattgtagtggaggataaaaaaggaagggaaggagatgtcctcactttaatcta

SEQ ID NO: 29330 - DNA, 120 bp, synthetic construct
  source 1..120: mol_type = other DNA
catctcatgagcaattccagcagtgtccactgcagatgtttttggcatcttcacaaaggagttaaagagatcagactcgttcccaagagagaaaaatcatctttgcaatgtccaaaaaga

SEQ ID NO: 29331 - DNA, 120 bp, synthetic construct
  source 1..120: mol_type = other DNA
gttataggtatgagccactgtgccatcccagtttccagaatattaaagagcttctgttgggttaggcttaggaacaggcaaaataataacaacaacaattttcctctgttgggcacttcc

SEQ ID NO: 29332 - DNA, 120 bp, synthetic construct
  source 1..120: mol_type = other DNA
tcagcagagccggtctcagggggcatgagccatgcaattacacactcggtttcatgctgtacggtggccattttgaaatccttaataatttttcaacaagagccctcaagtttcattttg

SEQ ID NO: 29333 - DNA, 120 bp, synthetic construct
  source 1..120: mol_type = other DNA
tggtacaggatatatgcgaatcctactgtcttaacaatttttctgtaaatttaaaaccattgtaagatgaagagtctatttttagagtactgagtaaattgtatggaactaaacacacac

SEQ ID NO: 29334 - DNA, 120 bp, synthetic construct
  source 1..120: mol_type = other DNA
aacagaagagacctcccctcatcgcacccagccccatcatgatttgaacctctctagaacctgccatgttgaattgggtgctgacttcactctgctatttttttttttttttttttttga

SEQ ID NO: 29335 - DNA, 120 bp, synthetic construct
  source 1..120: mol_type = other DNA
gttcctcatagataagaaatgaatctccgggttggccactcctggattccttagcttagaactttcaacacatactcttcttagaccatggggtcattttcaaggtatgctgatgttact

SEQ ID NO: 29336 - DNA, 120 bp, synthetic construct
  source 1..120: mol_type = other DNA
aagatggtctcgttcacatcttagcatgctctagtagttggtgctagctgttggcagaggcctgacacagctggaacacctggacctcttcatgtgatctttcttgcaagcttctttaca

SEQ ID NO: 29337 - DNA, 120 bp, synthetic construct
  source 1..120: mol_type = other DNA
tttgggatttctggatctctagattctaaaggcatagataggtgcattgatgcattccacaaatattgaatgagtgtctctcataggccagtcactattgctgacaatgggaacacagcg

SEQ ID NO: 29338 - DNA, 120 bp, synthetic construct
  source 1..120: mol_type = other DNA
gccccgtgcctcccctcggccttccccttagtcctgagggtgcccgcgctcctgcatttcccgtgcaccgggctgccggtagctccggccgcccagcccccgcggcagcaacagcagcaa

SEQ ID NO: 29339 - DNA, 120 bp, synthetic construct
  source 1..120: mol_type = other DNA
aatccggggggctggggcggctgcagtgacggatccgtgaatggatgaaggaacgaacgaatgaatgaatgaaaaacaggtgtggggacgaggccgtggaaaaaacaaacgcccccatcc

SEQ ID NO: 29340 - DNA, 120 bp, synthetic construct
  source 1..120: mol_type = other DNA
tacttttcgggtcaaggttagcgtgaaaatgacagcccccttaggctgccccctttggcactgagctctagggacacagggaaataattccagcctgttatctgcctgtgaaaagttctt

SEQ ID NO: 29341 - DNA, 120 bp, synthetic construct
  source 1..120: mol_type = other DNA
gcccagatcatggcttcaggtcatgtgtgaccacagccccctgcctgcctggctgaggcgaagtctgtctcctctggctcacacttcgtccgtctgtaaaatagagatagcactatttgg

SEQ ID NO: 29342 - DNA, 120 bp, synthetic construct
  source 1..120: mol_type = other DNA
ccctacatacctctgtgcctttgtatctacctctcttccatttgcctggaatattctcccccacccacccctagtaaattcctattcagtcctcaagagctaatgatagcgctaatgata

SEQ ID NO: 29343 - DNA, 120 bp, synthetic construct
  source 1..120: mol_type = other DNA
cgttctgtgtattaggtattaaacctgctttgcaaaccaggaagctggggttcaaagattaagtgacttgctcaaggtcaggcaagaagtgatagatccgggatttaaatgtgccaatct

SEQ ID NO: 29344 - DNA, 120 bp, synthetic construct
  source 1..120: mol_type = other DNA
aacaacatgttattggcttgtctttttctcttacctagattatcaaccttcaagttttttgtgcatgatttgatccaccccttcccaccacatcaccacagtacctaccagtggtgatga

SEQ ID NO: 29345 - DNA, 120 bp, synthetic construct
  source 1..120: mol_type = other DNA
accgtttgccttcaacgtgggcagcacaactgagagcaaacctgtgtttggaggtaaggaggggcgtggacttgggctaccgggccggacactgaaaagctgtgcctgcgaagcctgtgg

SEQ ID NO: 29346 - DNA, 120 bp, synthetic construct
  source 1..120: mol_type = other DNA
ttgaaatagtcattttggacagtgggggaaaggaacatcatattaaaaagtgtgatcagtttccaggcagtttgtgggctggaaaattgtgattgtgaagttaaagtgaggccagttagc

SEQ ID NO: 29347 - DNA, 120 bp, synthetic construct
  source 1..120: mol_type = other DNA
ttttctctgccctggcgtggccattagcgggtgggagaagcaggctgagctggggcaccaggcatgaagactcggttgtctggctcagctgctgatggaggagtgccccagaagcagaag

SEQ ID NO: 29348 - DNA, 120 bp, synthetic construct
  source 1..120: mol_type = other DNA
taaagcaaacctaccccggatctctggcttcagccgccagggggcagtggcagccctggggccctttcccttctggaggaagcacaagcctcagggaaggggaagcaggatgcggagggc

SEQ ID NO: 29349 - DNA, 120 bp, synthetic construct
  source 1..120: mol_type = other DNA
ctcctgaattttcccatggtgttctgacttcaagggctggcagccagggagaatgggcccaggggaagcaaagacctcttccctctgccgtttctgtcccacttaactgacctcactgga

SEQ ID NO: 29350 - DNA, 120 bp, synthetic construct
  source 1..120: mol_type = other DNA
aataacctttcaaaacccaaactgcttcctgcggtgagggcccagggtcctccacggagaggacaggcatcttcctttcccaccaggaaggagtcagcccggagcctctgctatgtgcaa

SEQ ID NO: 29351 - DNA, 120 bp, synthetic construct
  source 1..120: mol_type = other DNA
agcttgtcaatgagacagaagcagcaccagcagcccccgggggagcccgacattggaatacctggcttctcacaatccgctgggcctcccactacagcctcaagccagcatcactggctt

SEQ ID NO: 29352 - DNA, 120 bp, synthetic construct
  source 1..120: mol_type = other DNA
agttcaagagggtgagttggagatgagggggaacgtgaggtcactgggtccgggacaagcttggtttgttggaaggtcaacaggtggagcctaggagtggggtgaagagtgtaatggggc

SEQ ID NO: 29353 - DNA, 120 bp, synthetic construct
  source 1..120: mol_type = other DNA
gggctggatctcacttcctcaacctgggtcgccttccactttcggtacaggtagacaatgccggagatgaagccatccttggcagagatgccggataccacctccagctcggaggtagcc

SEQ ID NO: 29354 - DNA, 120 bp, synthetic construct
  source 1..120: mol_type = other DNA
aaagattggggacaaataaacactgtaacctaatcccatacatgttactgtggaaacaaaaagtgaaaataaaacctaattaatgttccaataaaaaaaaaaaaaaaaaagaaaaagaaa

SEQ ID NO: 29355 - DNA, 120 bp, synthetic construct
  source 1..120: mol_type = other DNA
ttatccatccatcactccctcgctccattcatccatccaccatctatccatctattcccccatatacccattcatccatccaaccattcctccatgcatccatctatccctccatccatt

SEQ ID NO: 29356 - DNA, 120 bp, synthetic construct
  source 1..120: mol_type = other DNA
accttgttttcacaactaggataaaaatatctgcagggtcctttccattcctatttagagggagtcctggctccatgaccccctcccgagtggactgtccaagcagataggctcacacga

SEQ ID NO: 29357 - DNA, 120 bp, synthetic construct
  source 1..120: mol_type = other DNA
tcctagtataggcaacataatgagatactgtgcttcccacctccccttcagttcagagccaaaatgggtctagaatctggcactttactcatttcctttgataaattgtactatgcagag

SEQ ID NO: 29358 - DNA, 120 bp, synthetic construct
  source 1..120: mol_type = other DNA
aaagctggtgatgattagaaataggatgccaattttttcccctcacttgctaaaaatgtccttttcccaaccaggcagaaaccttgaaagtctggctgtttttggttaggtaaaggaaca

SEQ ID NO: 29359 - DNA, 120 bp, synthetic construct
  source 1..120: mol_type = other DNA
aaactatgcctcaaaaaaaaaaaaaaaaaaaaaaaggttgaggggaggagtcctttggagtgggaccgaatgaagttgcccttgaaattgcgaagctggaggctttttcttgcctgtgcg

SEQ ID NO: 29360 - DNA, 120 bp, synthetic construct
  source 1..120: mol_type = other DNA
tgctgactgaatcaacagtatctgtttcatcataatgcagccctatttctttaagcccatacattttgcacttgttaaaagtatttgaacaggccaggcgcggtggctcacacctgtaat

SEQ ID NO: 29361 - DNA, 120 bp, synthetic construct
  source 1..120: mol_type = other DNA
gtgaccttttccttcatcttctggattctcagtgtgactgataaatgttgcaacatgctctgcagggggaaaatgctttagcgtctattactgcatcataatctcatctttggaaagcca

SEQ ID NO: 29362 - DNA, 120 bp, synthetic construct
  source 1..120: mol_type = other DNA
cccctggagacctttatcgtggtctcccttttgtcgtgtttcatttgcttgatcttttctgccctcctgcttttcagaaattaaaaggctaaaaagaggtgctaaatgttaaaacttctc

SEQ ID NO: 29363 - DNA, 120 bp, synthetic construct
  source 1..120: mol_type = other DNA
cagtgttggcattcgaagcatgaacagtgcccgcactggattggcatgcaactcacattttctttcacaattttctgctacttttgctaaagaacatagaatccacgccttgtttttagg

SEQ ID NO: 29364 - DNA, 120 bp, synthetic construct
  source 1..120: mol_type = other DNA
cagaatggaatcaccctgttgatatttactaagatagaaggactgcagcaagatcatagccctaatcttcctgtagcaagtgttacctgctagctgttcctgaatacactgagttttgct

SEQ ID NO: 29365 - DNA, 120 bp, synthetic construct
  source 1..120: mol_type = other DNA
gattcacttagtgaacaaatattagtataagcatcagatgtgcaaaattgggtctaacaagaacactgtccttggggccttcatacaaagaaaaatgcactgaaggccgggcgcggcagc

SEQ ID NO: 29366 - DNA, 120 bp, synthetic construct
  source 1..120: mol_type = other DNA
acagaattgagctggtttgggggaaaagtgactttcgcctgtttatcttaaatataggatgattttgaaggtctcacccgaatatctgaaaattgccattttcaaaataaactcgtcacc

SEQ ID NO: 29367 - DNA, 120 bp, synthetic construct
  source 1..120: mol_type = other DNA
cccatgttctttatttgacagttggcgcgtctttcatactcacagcatatttcagttccaagtagccacatttcaaacatttcaactgctcggggatagtacctgctatatgcatttaga

SEQ ID NO: 29368 - DNA, 120 bp, synthetic construct
  source 1..120: mol_type = other DNA
ttctgtagcagggtaacaaaattatcttggtccaggagtcctgtagtggagaagataaaagtcaatgcttaactcataggttaacctcagcatgcttttgatttggtcaagcaatcaaag

SEQ ID NO: 29369 - DNA, 120 bp, synthetic construct
  source 1..120: mol_type = other DNA
agagtccgaggtctttattggtagtattcaaatgtggttcatccagagttattttctgtggctgaatggcctactctgaaatccacagggaaaaaacaactcacattcaacccttgagat

SEQ ID NO: 29370 - DNA, 120 bp, synthetic construct
  source 1..120: mol_type = other DNA
ctgctcagcccttgccaccacagatctggccctctcttcttcctgctgagccacctctttggttccactgcttctgcaaattccttcccgaaggtcagatccaaggtcacagcatccagg

SEQ ID NO: 29371 - DNA, 120 bp, synthetic construct
  source 1..120: mol_type = other DNA
cctccctgctctgaccgagttccctgagggacttctccaaggaggaatgtgtgagaagcactgattttgagcactctttcatgtggacaaatttcactttatttacaatgtaaacttaaa

SEQ ID NO: 29372 - DNA, 120 bp, synthetic construct
  source 1..120: mol_type = other DNA
aagagtgtttcagttgattgggtgtgtctgtcatggagaaggaagtaaggagtgggcagtgctagcaaaattcccggggcacttctgtccattatctcaatacctggggttgacatttcc

SEQ ID NO: 29373 - DNA, 120 bp, synthetic construct
  source 1..120: mol_type = other DNA
gaggccccgtggtgactcgcagtatgcctgagtacttgaatggaagtttaatttgctggtttttatctgctctgttattcctggtcaatcttgagagcgactaaatattgatgattgagt

SEQ ID NO: 29374 - DNA, 120 bp, synthetic construct
  source 1..120: mol_type = other DNA
ttccctacaatatacaaaaggaactctgcttattttacagctttgcagtcccccaaaagaccacgaagtcctgggagtaattcaaaggttcctgaaattgaggtcaccgtggaaggtaag

SEQ ID NO: 29375 - DNA, 120 bp, synthetic construct
  source 1..120: mol_type = other DNA
tccatctcttcataaatgcagaaggaaatcactgcattaggatcattctctacatcccaggtgtcaagtttttaaataagagtttgccgtactggtgttgagtggcgcagaagtccctat

SEQ ID NO: 29376 - DNA, 120 bp, synthetic construct
  source 1..120: mol_type = other DNA
aacctcagctgttcgaaccccgacccagactaacggttctaacgttcccttcaagccacgagggagagagttttcctttggtaagtaagcgttttatttttctttctttcatagttttaa

SEQ ID NO: 29377 - DNA, 120 bp, synthetic construct
  source 1..120: mol_type = other DNA
acactcctgcctgtgaatgtgtattgataagtactgtgataagtattgcaatttaactctcttatgttttatatgcagaggcctggaatgccaaaatcacggacctaaaacagaaagttg

SEQ ID NO: 29378 - DNA, 120 bp, synthetic construct
  source 1..120: mol_type = other DNA
gttgtagttcaggctatttcacaatttttagttatttaataattgggtggctctgtgagtgtgtgatgatctcctaagtacccccaggaagagaaaaacagtgaaaggcagcccttcagg

SEQ ID NO: 29379 - DNA, 120 bp, synthetic construct
  source 1..120: mol_type = other DNA
aaaaatggaaaatgcttgaaaacattacacagagctcctaaaaattgggattaaaagtgcatcattgagcagcggcttgtacctgtagtctcggctacttgggaggcttaggcaggagga

SEQ ID NO: 29380 - DNA, 120 bp, synthetic construct
  source 1..120: mol_type = other DNA
acagcagagacagtctttaaaataaatgttgatcttgtgcttttgacaggctgtttaaggcggtgggttaatctgtgctgttgtgctgtttgtctcactgtccctgtaggtgaagctatt

SEQ ID NO: 29381 - DNA, 120 bp, synthetic construct
  source 1..120: mol_type = other DNA
accttgcatcagccatttgttagccaggtcactctgttctttgtctgtaaatgagattgatcgttgttcccactgagagtgtcagctccttcccgtagagcaggcatgatgattgtactc

SEQ ID NO: 29382 - DNA, 120 bp, synthetic construct
  source 1..120: mol_type = other DNA
gtgtgtgcgtgtgagtgtgtatacatgcttaacgtatatcacgttacttcacctatgtcagtaaccaggccaaatacttgttttagccctcagtaaaaacaccaggcacttcctagttgt

SEQ ID NO: 29383 - DNA, 120 bp, synthetic construct
  source 1..120: mol_type = other DNA
tcaggacaaaggattgtgcatttaaactatttcactagaactgggtggtggttttgctctctttcttctgggtgaattggatttgcaggttatgctgttgagtgatgacgcatagctgct

SEQ ID NO: 29384 - DNA, 120 bp, synthetic construct
  source 1..120: mol_type = other DNA
cagagtctcacagagctgcagatcttttgttcatcttgcagagttaacaagtctgatcctgttagtccagatttcttaaatttggccaagttataataggagcagtagcttgagacccga

SEQ ID NO: 29385 - DNA, 120 bp, synthetic construct
  source 1..120: mol_type = other DNA
atctcagcgtgtgaattatagaggaaatacagagagaacctcttccacttttacttttcgtccaaataaaatgcatggtgtaccagaagttgaagatcgggttgaggattggggctagct

SEQ ID NO: 29386 - DNA, 120 bp, synthetic construct
  source 1..120: mol_type = other DNA
atcagggccatggcaaggctgccgttggcaaaagcccagctctgccatgaatctccgttcagttactggtttcacactcatttgtgaggtcacagacttgccaaggatattcatgattca

SEQ ID NO: 29387 - DNA, 120 bp, synthetic construct
  source 1..120: mol_type = other DNA
gtgattgttcagagggtgaaggggaagttaaacttgtccagtaaaatcttcgttagcccggtattctggattgaaaaagcaaaatatagttcaagtaggtctcttcagtgtatctaataa

SEQ ID NO: 29388 - DNA, 120 bp, synthetic construct
  source 1..120: mol_type = other DNA
agaacaaatccacttctggacagccattatataggggacatttttatcagaaaaacagtaaaagcaaggaaatgtctccctcccaggactgtatgaattaaaccctgcctgctgattgcc

SEQ ID NO: 29389 - DNA, 120 bp, synthetic construct
  source 1..120: mol_type = other DNA
tgtttttgttttttctccaaagaccaaaagttccaccagagaggaagatcgagggaccaggcctttctagtttccacattacactctaagtgctggtcttagtaaattcaaggcacctgg

SEQ ID NO: 29390 - DNA, 120 bp, synthetic construct
  source 1..120: mol_type = other DNA
ttccttccgtcagtgatgtatctggaagattccactgtgtcgccctgtgggacaggtccttgtcattgctgagtagatcctgttgcaaatgcctatctctcttcatggaaagatccaaga

SEQ ID NO: 29391 - DNA, 120 bp, synthetic construct
  source 1..120: mol_type = other DNA
tccagcttgggcaacaagagcgaaacttcgcttcaaacaaataaattaacgcccagcatgtcttggctttcatctgccagacctcaaccctcacccccaggagatcaggtccggaccatg

SEQ ID NO: 29392 - DNA, 120 bp, synthetic construct
  source 1..120: mol_type = other DNA
aagtgccagggagcactggaggccacccagtcatgggggacaccttcatccgtcacatcgccctgctgggctttgagaagcgcttcgtacccagccagcactatgtgagtagctggtgga

SEQ ID NO: 29393 - DNA, 120 bp, synthetic construct
  source 1..120: mol_type = other DNA
acttttatctccaatttacagatgagtccatttgagagaagctgaccctcttgccctgggtctcaaggctggggcgtggcagcacttgggtccacgtttgtgccctttctgcaatccagg

SEQ ID NO: 29394 - DNA, 120 bp, synthetic construct
  source 1..120: mol_type = other DNA
ccttcctagaatggaaccattcttgtcgcttttgaaaaacaaagccaagttctagatcccaaataaatgcacctgctggtgaacattctccttgtggttctcgtccctatgttagttatt

SEQ ID NO: 29395 - DNA, 120 bp, synthetic construct
  source 1..120: mol_type = other DNA
cttctgtcttagtgtgcaccctgtggtggctgtgggcatctgtgcatggcaggccggggcggggcatgtctgcgtgttctgtctggatgggtatgggaccgtctgttcattatgaagtgg

SEQ ID NO: 29396 - DNA, 120 bp, synthetic construct
  source 1..120: mol_type = other DNA
gtccccggagagggggacgacagaccgaaggctggtgaggggcgtggaaaaccgcccaggctctgctgcagggcaagggtccttgtcgtgacgggggcagccgcctcttgtcccgccggg

SEQ ID NO: 29397 - DNA, 120 bp, synthetic construct
  source 1..120: mol_type = other DNA
ggttatttctaagttgaggacaggaggttgtgagttctgctggggggaagttgcaagagccgaggtctggttgcatgttgccctggtcttggccaagaacaggtttgcacaaggccaagt

SEQ ID NO: 29398 - DNA, 120 bp, synthetic construct
  source 1..120: mol_type = other DNA
tttcaggcttttctcaacacgcgaaaagatctcgttgccagattttgtacccgtcatgggcaccgtgtccagaagttcttcggacacatcgaaattctcatcgacaccacggatgaatat

SEQ ID NO: 29399 - DNA, 120 bp, synthetic construct
  source 1..120: mol_type = other DNA
acctcgggcaagtcagagtctccagattccttctcttgactcacttacctgatgactgtgaatttgataaactcagctgcctccaagatcctcctcatggaactgatttccagatagccg

SEQ ID NO: 29400 - DNA, 120 bp, synthetic construct
  source 1..120: mol_type = other DNA
ctaaatggcagcatgctagatcctaggtaaacacacatgggtgctcgccagtttttcagacaggtagtaattaaaatcttccatcccaaataacttttggggaagaaaattattatcaaa

SEQ ID NO: 29401 - DNA, 120 bp, synthetic construct
  source 1..120: mol_type = other DNA
tgaattgtgctgagctgaaatactgcgcccgtttctttccattcaacttgtcttggtttgacctagaaccacactgcacaggagaagcaccattttttgttcagactctcatctgaagct

SEQ ID NO: 29402 - DNA, 120 bp, synthetic construct
  source 1..120: mol_type = other DNA
catagttgtggattttggttgctgtgatttatcttttacctttcacttggtgatactatggatctctccgcatctgttaccatcccagggccacctgtagaggaatgaaaaaacacacac

SEQ ID NO: 29403 - DNA, 120 bp, synthetic construct
  source 1..120: mol_type = other DNA
aatgggatcaaggaagaaagagtgatcaatacagaagtttccacagagcagaagatccaagatccacatcatcttctataagaacacttaatctggtaattaagaactggtgggccgggc

SEQ ID NO: 29404 - DNA, 120 bp, synthetic construct
  source 1..120: mol_type = other DNA
gattataggagtgagccactgcacctagcctcacattctatgtccatgtgtacctattatttagcccctcttgtaagttaggacatgccgcatttgcctttttacgtcaaatgataaaga

SEQ ID NO: 29405 - DNA, 120 bp, synthetic construct
  source 1..120: mol_type = other DNA
ctcccacctcgactcccaaaccgctgggattacagtctgactatgctaattttgatcacttgaatgaggtggtgtctgtcaggtttctgcactgtaaagttactgattttccatttttaa

SEQ ID NO: 29406 - DNA, 120 bp, synthetic construct
  source 1..120: mol_type = other DNA
gtagccccagctatgttttgcatatgggactgcaggcatgtattaccaggctcagctaatttttaaacatttttttgtaaagatggggtcttgctctatcgccaaggctgatctcaaatt

SEQ ID NO: 29407 - DNA, 120 bp, synthetic construct
  source 1..120: mol_type = other DNA
ctttagcatccccgggagagaaaagggcgtagaagtattctcattttacaacttagcaagttgtccaagcaaagctagaacatacaccaggacaatttttgcctagtgctatttccactt

SEQ ID NO: 29408 - DNA, 120 bp, synthetic construct
  source 1..120: mol_type = other DNA
ggaggtggcattaattaacaatgaacaccagaggaggcatcgggccaggcaggtgacgccagcttaggaagcacctgatgcactggtccccacgggaccacatgccaggagagccacggg

SEQ ID NO: 29409 - DNA, 120 bp, synthetic construct
  source 1..120: mol_type = other DNA
aaacaacctccaaactcagagaggtctctccctgacgccgaccaaaaggcaatcaaaacaccgatctcttaactcaatgcttaagtctgcatactttatttagcatgaagaaaaatggtc

SEQ ID NO: 29410 - DNA, 120 bp, synthetic construct
  source 1..120: mol_type = other DNA
acaaagtttgcccatcactgatctagaatctgtatctatcccttacaacctttcatcatttggaatgtcatccacttcctttatgaaaactctgaaatcttgaaatagaggactggttta

SEQ ID NO: 29411 - DNA, 120 bp, synthetic construct
  source 1..120: mol_type = other DNA
catcttaactaagcacttatcacgcactgtggccgtcactttagcagttggaggtgagacagcaaaactagcacgaatttctttttccttcttcacaatttcacggatggaagattcatt

SEQ ID NO: 29412 - DNA, 120 bp, synthetic construct
  source 1..120: mol_type = other DNA
gccaatcaggaaggagagggatgtgcgctccgtgcgtacgaccattgcccccgcggcaaggcttccccgcccccaccctcacacctctggtcctgccagcagggatcggggttcgggggt

SEQ ID NO: 29413 - DNA, 120 bp, synthetic construct
  source 1..120: mol_type = other DNA
cattttcatatggttatgactcccaaatattcatctccagcccagaccattcccctaaactccacatctatatagccaactgcctgctttgaaatctccacttgtacagcgacttaagaa

SEQ ID NO: 29414 - DNA, 120 bp, synthetic construct
  source 1..120: mol_type = other DNA
agagtacatcagcatacacgtgtgacataatcacttgcttctagggaaagaaccatctgaatgcattggaatagtgcttgacactcagacagggccaagaacaatgcctgttcagaattc

SEQ ID NO: 29415 - DNA, 120 bp, synthetic construct
  source 1..120: mol_type = other DNA
tacaggcgtgagccactgtgctcggcgtggtttccaagtaacttaactgtattccagaacacagctcaagaagagttctggtaatacaaatatatccagcttcaagaaaggtaaaattca

SEQ ID NO: 29416 - DNA, 120 bp, synthetic construct
  source 1..120: mol_type = other DNA
gcagaagaaaaggttagtgaatttgaaggcacagcaatagtaactaccacaacgagaaaaacacacagagaaaaaagaattagaaaaagaaacattaatgagctttgggacaacttcaag

SEQ ID NO: 29417 - DNA, 120 bp, synthetic construct
  source 1..120: mol_type = other DNA
taaaaaggaaaacaaaattatatgtatgtgtatacaacagttataacacccatcacacagctttgtagaaacagcatctattcaaaaataccagtatttccaaaatatttaaaataatat

SEQ ID NO: 29418 - DNA, 120 bp, synthetic construct
  source 1..120: mol_type = other DNA
attctgcaagtcaaaaacaaggtggtctaaatttgcaaactttatggcagtctggcttgatgaaatataaagcccacaatgcttttaaacagttttggccaggcacagtggctcacgcct

SEQ ID NO: 29419 - DNA, 120 bp, synthetic construct
  source 1..120: mol_type = other DNA
attttttttgtgtttttttttgccgggaatttttccattttgttgaagagacgatgtcactctgttactcaggctagagtccagtggtacaataatagttcacagcggccgggcacagtg

SEQ ID NO: 29420 - DNA, 120 bp, synthetic construct
  source 1..120: mol_type = other DNA
gaaaataaagtgggagggggatatgcatgctctaagatctatctaccacagattacaggcttttcacccttttgtggaaatgacaaaacctagtatgttcctacctaacagaggagggct

SEQ ID NO: 29421 - DNA, 120 bp, synthetic construct
  source 1..120: mol_type = other DNA
ggccttccccttagtcctgagggtgcccgcgctcctgcatttcccgtgcaccgggctgccggtagctccggccgcccagcccccgcggcagcaacagcagcaacagcaccgggggagccc

SEQ ID NO: 29422 - DNA, 120 bp, synthetic construct
  source 1..120: mol_type = other DNA
atccggggggctggggcggctgcagtgacggatccgtgaatggatgaaggaacgaacgaatgaatgaatgaaaaacaggtgtggggacgaggccgtggaaaaaacaaacgcccccatccc

SEQ ID NO: 29423 - DNA, 120 bp, synthetic construct
  source 1..120: mol_type = other DNA
agcccccttaggctgccccctttggcactgagctctagggacacagggaaataattccagcctgttatctgcctgtgaaaagttcttgcttggaaatctcactttgatgtgtgtgtctga

SEQ ID NO: 29424 - DNA, 120 bp, synthetic construct
  source 1..120: mol_type = other DNA
ttcaggtcatgtgtgaccacagccccctgcctgcctggctgaggcgaagtctgtctcctctggctcacacttcgtccgtctgtaaaatagagatagcactatttggccccctcatggaca

SEQ ID NO: 29425 - DNA, 120 bp, synthetic construct
  source 1..120: mol_type = other DNA
accttcctgaacttttccctccgctccttagcaggcttaagtcacttctctctcgtggagtggagttgtggaaagggaatggcattaggaaacattcactctgtgttggggtgtggctgg

SEQ ID NO: 29426 - DNA, 120 bp, synthetic construct
  source 1..120: mol_type = other DNA
ctcactgcagcctacacctcccgggcttgagtgatctgctaccagagctgttttcttctcccagggatacttggtccttatcactcccatctagacggttacttccttttttttttgaaa

SEQ ID NO: 29427 - DNA, 120 bp, synthetic construct
  source 1..120: mol_type = other DNA
tcagcataaagccagaaggcaagaccctgggtaggtctgtccgatgagcttcccttgtcctctgtggtaaccctgaggctctgtgacctagctgagggccctctgtggcccacctcacct

SEQ ID NO: 29428 - DNA, 120 bp, synthetic construct
  source 1..120: mol_type = other DNA
gaaagccaggacataaccaataagaagtttgaactttgtgtgatcagagtttatgggttgggctgccccaggcttggataacttaaaggcttgatgaggtcatcaatttatgcttggcta

SEQ ID NO: 29429 - DNA, 120 bp, synthetic construct
  source 1..120: mol_type = other DNA
gtgaacactaacgtcttacgaggtatttatgagagaaaagcttaaaattgcaaaaagtccatgcagagccctcattcctcgcaacacattgggctgaggccactgtctaattgcagttta

SEQ ID NO: 29430 - DNA, 120 bp, synthetic construct
  source 1..120: mol_type = other DNA
ctgctgcccagagaaaggggctggctcaaccctagctcccaaatctttttcctatgcctttttcctttttcctcatctctttcctgaactatccagatatcttcctgcctcctgcctcct

SEQ ID NO: 29431 - DNA, 120 bp, synthetic construct
  source 1..120: mol_type = other DNA
ctaagtcactaggagatggtaaaagcaataccatgagacttccgaggctagggcacgaaaggatggcttctgcgtggtgctccctctctcccagatcccttgctctgtaggaaaccaacc

SEQ ID NO: 29432 - DNA, 120 bp, synthetic construct
  source 1..120: mol_type = other DNA
taataacaacaacaacctgcagacaatagggcaaacctgaccatgtgatcaccctacctttagtccagccagagaagtcttgtgagtccttaaacctaacacagacacttcttgaggtcg

SEQ ID NO: 29433 - DNA, 120 bp, synthetic construct
  source 1..120: mol_type = other DNA
tgacccaggtgtctactgatggatgaacagatcaacaaagtgggatgtattcacacaaaggaatattattcaggggggaaaaggaaggaaattctgacacatgctacaacatgaatgaac

SEQ ID NO: 29434 - DNA, 120 bp, synthetic construct
  source 1..120: mol_type = other DNA
cgcccattacccaaatagtgaacattgtacccgataagtaatttttttaaccttcctccccttcccaacctcccctctattggaatccccagtgtctgatgttcccatattttttttttt

SEQ ID NO: 29435 - DNA, 120 bp, synthetic construct
  source 1..120: mol_type = other DNA
ttttaaaaaagatttttagtagcaacagggtcttactatgttgcccaggccagtctcaaactcttgagctcagacaattctcctgccttgaccttccaacgtggtagaattataggcgta

SEQ ID NO: 29436 - DNA, 120 bp, synthetic construct
  source 1..120: mol_type = other DNA
aacagagtgagactctgtctcaaaaaaaaaaagaataagggggtgacacctcagagaacaagctgcaggcctggtgtcacctgcagatgacaaggctaccgtatccattcctcaagccag

SEQ ID NO: 29437 - DNA, 120 bp, synthetic construct
  source 1..120: mol_type = other DNA
aatgtctcccaacaagacaccttatcaagcgctctctctccactctgctgttcctaccacatattcccaggcaggtcaccctacctttcttgttttcttttgaagacagggtctcgctcg

SEQ ID NO: 29438 - DNA, 120 bp, synthetic construct
  source 1..120: mol_type = other DNA
gtgaggctccccttgactcaggttcctatgggccaggcccaccgccatgccctttggatgcattatcaactcaggtgggtatgtgacctcccccatgtctcagataaggaaaccgaggcc

SEQ ID NO: 29439 - DNA, 120 bp, synthetic construct
  source 1..120: mol_type = other DNA
gcatcatactaggtgctggggtagaatgggaagcaaaagaggcccagtttccaccctcagagagttctagtctagtggacgaggcagatgtcaaccaaaattaacataaaatgacatttg

SEQ ID NO: 29440 - DNA, 120 bp, synthetic construct
  source 1..120: mol_type = other DNA
cacccagcttggtgggcgagctggtgatattgtagtgacccagacctaacacagtggaaaatacagatttttaattattcgctcttttaacaaacacataggcagacttactatatgcca

SEQ ID NO: 29441 - DNA, 120 bp, synthetic construct
  source 1..120: mol_type = other DNA
agaaaactcgaaatatcttccccagggacattgtttaagaactgatcacattcctttcatttgacaaatatccatgaagcacttcctaagccaaggccctcttctaggaactggagtcac

SEQ ID NO: 29442 - DNA, 120 bp, synthetic construct
  source 1..120: mol_type = other DNA
cttggatctgcccttgtagataatacatcgctttttgtttctgtttcagtgtaaagaactggccaagtccaaggcagaagtggcctgcatcgcagtgtacgaaacagacgtgtttgtcgt

SEQ ID NO: 29443 - DNA, 120 bp, synthetic construct
  source 1..120: mol_type = other DNA
tgttctgaaattggtgtgataatctttttatattttcttttcttttaataatgtcaacttttagtttagattcggggggcacacgtgtagatttgttacatgggtatatcgtgtgatgct

SEQ ID NO: 29444 - DNA, 120 bp, synthetic construct
  source 1..120: mol_type = other DNA
cgaatagatttttgtgtggaatttttaggattttctacatacaaaatcatgtatcatctatgaacagagataattttacttctttctttcaaatttggaggcctttttttttcttaccta

SEQ ID NO: 29445 - DNA, 120 bp, synthetic construct
  source 1..120: mol_type = other DNA
tcgcttgaacccgggaggcggaggttgcagtgagctctcacctgcctgtgatgaccaacagcatttgggatacccagtgtggcactcattccagtgagttttagtgacacccccaccaca

SEQ ID NO: 29446 - DNA, 120 bp, synthetic construct
  source 1..120: mol_type = other DNA
tttagagtcctcagtccctctagcagctaatcccatgttaccagttgacgactcttctaggaaacttcacctgttggtgtaaattagtacaagctctatggaaaacagtatggagatttc

SEQ ID NO: 29447 - DNA, 120 bp, synthetic construct
  source 1..120: mol_type = other DNA
catctctaaaaaaaatttaaaagttagccaggtgtgatggggcactcctggaggctgaggtgggaggaccgcttaagcccagaaatttgaggctgccgggaacttcgatcatcccactgc

SEQ ID NO: 29448 - DNA, 120 bp, synthetic construct
  source 1..120: mol_type = other DNA
cacagcggctgctttgagtcagtttctctctcgatgacttttccacgttggcttcgatctgggagttccgttttctgtgtatttgctgtcaatttctatgcctttggatgttagtcattt

SEQ ID NO: 29449 - DNA, 120 bp, synthetic construct
  source 1..120: mol_type = other DNA
cacgtgcctttgttggagatgtggtttcatttgaacaaaaatatgcttccttattcacaaaacttcctactgtagactttataaagcgatatggattgctaccagctgccagcaggctcc

SEQ ID NO: 29450 - DNA, 120 bp, synthetic construct
  source 1..120: mol_type = other DNA
ttacaaacattcatggttaaattacatgtacattttagtatcagtcatctattgctgtatttaaaagtacccctgaaatgaggctgggtgtggtggctcacgcctgcaatcccagcactt

SEQ ID NO: 29451 - DNA, 120 bp, synthetic construct
  source 1..120: mol_type = other DNA
catagcccctttgctactggagtggacagataaatatcaaaggtaactccgcaggcctgcagccggtgaactcagttgaagtgcaagtatctaaaggaagtgaagttgaaagtgtgattt

SEQ ID NO: 29452 - DNA, 120 bp, synthetic construct
  source 1..120: mol_type = other DNA
tataaaatattctgcaagttgctacacaacgagcatcttgctcacatcagacattattaatcggatattttgcttctcctggacaagcccgggcattacctggaaaatgcatctcagagc

SEQ ID NO: 29453 - DNA, 120 bp, synthetic construct
  source 1..120: mol_type = other DNA
cgtgagcctgggacccaagtatgcagccttcgatgcatgctttatttttcctgcatgtgataaagttagataactctgttacttgagtttgattaaccagtctgaaggagagtgatctat

SEQ ID NO: 29454 - DNA, 120 bp, synthetic construct
  source 1..120: mol_type = other DNA
ctgggattacagatgtaagccactgcacctggctcagcatctgttctgattgagcaatgcccaggcactctgcttctgaaatattctcttttttttccccttcaacttttattttaagtt

SEQ ID NO: 29455 - DNA, 120 bp, synthetic construct
  source 1..120: mol_type = other DNA
cttcgtggaagtacagaatattccaacatgtctcatatgcaaacaaagcatgtctgtgtccaaagaatataacctaagacgccactatcaaaccaatcacagcaagcattatgaccagta

SEQ ID NO: 29456 - DNA, 120 bp, synthetic construct
  source 1..120: mol_type = other DNA
attaagtggctcagtcgcgggctcgtgctaaagagatttttcgaatccttggaagaaatcgactccttcatgtcatccagagggaaacccctgcctcaactgagctccatagattggatc

SEQ ID NO: 29457 - DNA, 120 bp, synthetic construct
  source 1..120: mol_type = other DNA
ttcatgaagctgttctgctttgaatcaattcccaaggccccaggaatgtgtgttgggaccaggatggcttgagatatgatggccactgacatgcactgtcactcataggactgagttgag

SEQ ID NO: 29458 - DNA, 120 bp, synthetic construct
  source 1..120: mol_type = other DNA
tggcgcaacaactggggaggtggaggtaggaagattgcttgaggccaagagtcccagagcagcctgggcaacctatcaagacgctgtctttacgaaaagaaaaaaaactagctaggtgtg

SEQ ID NO: 29459 - DNA, 120 bp, synthetic construct
  source 1..120: mol_type = other DNA
gggtggctgccacccatcttgttacccagtgtgcagaattgggtgctggaggcacgagcctgctctatacctatttttaaaatttttaaattattattattatttgagacggagttttgt

SEQ ID NO: 29460 - DNA, 120 bp, synthetic construct
  source 1..120: mol_type = other DNA
ggattataggcttgagtcaccaccgtgcccagcatacatctgctttctgaatatttgagaggcggaaggcacaaggcgtgacaattgatgggatttgggatgtaaagagcaagagaggac

SEQ ID NO: 29461 - DNA, 120 bp, synthetic construct
  source 1..120: mol_type = other DNA
gtattgtgggaagtaagcattcgtcgatttttacttaataaatgaacaaagaaacattcccagtggtgagttaagtcagagtgcaaagattataccttgcccattaagccatctcccaaa

SEQ ID NO: 29462 - DNA, 120 bp, synthetic construct
  source 1..120: mol_type = other DNA
catgtgcgggagcgccaggcggggcatgtaaccagagcgtgcggggcatgatggggcacggacatggggggttaggtggggcacgtaattggagctcgcggggcaggatggggcatctaa

SEQ ID NO: 29463 - DNA, 120 bp, synthetic construct
  source 1..120: mol_type = other DNA
tgcactccagcctgggcaacagagcaagacactgtcttcccctgccccccagccccccaccccccccaaaaaaggatataagagcaagagattgagattcagaaagaactgtttcccagc

SEQ ID NO: 29464 - DNA, 120 bp, synthetic construct
  source 1..120: mol_type = other DNA
gtaaaaaatgtagacacacacacacacacacacacacacacacacgtatcttcaagggaccagttttttcactgcagtcttttgttttacagctgtggaaactgaggcccaaggtcatgt

SEQ ID NO: 29465 - DNA, 120 bp, synthetic construct
  source 1..120: mol_type = other DNA
acccaggtgctggggattgaagctacacgcacaggatgggagctccctggtgtcacgtgctcaccccttcctgttttttgtttgcagttctggtttgtttctttttctttttttctttct

SEQ ID NO: 29466 - DNA, 120 bp, synthetic construct
  source 1..120: mol_type = other DNA
gggaatggatttggagtttattcacaggatgagggagaaaggcgggggctggagtgttttaagccagtgatgacatgctcagatctctctggcagaggggagctttgagggtgaggcaaa

SEQ ID NO: 29467 - DNA, 120 bp, synthetic construct
  source 1..120: mol_type = other DNA
catttagtgactgtctccatgtcatgcacaggggtgacatcgagaccctcttatgcctgggaagttcctgctgtcaatgcagaatattctctttttttttttttttttgagacggagtct

SEQ ID NO: 29468 - DNA, 120 bp, synthetic construct
  source 1..120: mol_type = other DNA
ctgatctcctgaactgagaggcacatggggctgggacgcatagtgccccggccctggaggtggctgtgaaacagaaacaggagccgagcaagatccagaagcacttggcctccctcattt

SEQ ID NO: 29469 - DNA, 120 bp, synthetic construct
  source 1..120: mol_type = other DNA
cctggaggggatagggggtcacacccgtggcctggtggcctccctggacatgcagctggagcaggcccagggaacccgggagcggctggcccaagccgagtgtgtgctggaacagttcgg

SEQ ID NO: 29470 - DNA, 120 bp, synthetic construct
  source 1..120: mol_type = other DNA
ctggttatgagaagttcagggtggctggatgtaaggcaggatatcaggaggagtgggagctgggagaggtgggaaatggccagaagcaacatccaggagcaccaggcatcccttgcttac

SEQ ID NO: 29471 - DNA, 120 bp, synthetic construct
  source 1..120: mol_type = other DNA
gagatttatcctgtggctgtggtgtcctgtggctactgtaacaaatgaccacaaacttggtggcttcaaacaaatttaatctctcatggttctgaaggccagatgtccaagatcacgatg

SEQ ID NO: 29472 - DNA, 120 bp, synthetic construct
  source 1..120: mol_type = other DNA
ttgtggacctggagttgctaggaccttttctgccattacacagaaaaatcctccctgagaacacagccattggaggacacatggcagaggaagataagacaataaacagagacacataat

SEQ ID NO: 29473 - DNA, 120 bp, synthetic construct
  source 1..120: mol_type = other DNA
aagcagctgtacgcgctggtgtgcgaaacgcagcgctactccgccgtgctggatgccgtgatctccagcgccggcctcctcagtgcgaagaagctgcagccgcacctggccaagggtagg

SEQ ID NO: 29474 - DNA, 120 bp, synthetic construct
  source 1..120: mol_type = other DNA
aggctgggaagcgagacgccaggttccgatcctgttgtgtagttaatttctggtgtggtcttgagtaaggtaccccacctttatctgtaaccatctagtcaggtgatctctttagccatt

SEQ ID NO: 29475 - DNA, 120 bp, synthetic construct
  source 1..120: mol_type = other DNA
acctgtcttattttgtcctttggtggctctgagaagcagcctctgcccctctccctttcccttactctttgtaagatcctcttccttctgccctaccatgttgcttggacaccagggtgg

SEQ ID NO: 29476 - DNA, 120 bp, synthetic construct
  source 1..120: mol_type = other DNA
ctgccaggctcccatgtcatcgatgcctgtgccgccccaggcaataagaccagtcacttggctgctcttctgaagaaccaagggtgagtgccacaggaggaggaggaggaggacatgggg

SEQ ID NO: 29477 - DNA, 120 bp, synthetic construct
  source 1..120: mol_type = other DNA
gggttccagcagcgagccctgtgccacgcgctcactttcccttccctgcagcggctcgtctactccatgtgctccctctgccaggaggagaatgaagacatggtaccagatgcgctgcag

SEQ ID NO: 29478 - DNA, 120 bp, synthetic construct
  source 1..120: mol_type = other DNA
tgcattttgaaaggttattgggtcccttcctcgggctgtgttcttgctggtgagcaaaagtgttgcctgcagaaataaaatgcagaacgtactctacgatagatcacagttttttattct

SEQ ID NO: 29479 - DNA, 120 bp, synthetic construct
  source 1..120: mol_type = other DNA
gaggtctttgcttcccctgggcccattctccctggctgccagcccttgaagtcagaacaccatgggaaaattcaggagtcggcacttgtagccgtcaagtggtgctactttccacattca

SEQ ID NO: 29480 - DNA, 120 bp, synthetic construct
  source 1..120: mol_type = other DNA
tctagcacgtgccaaggtccagatttagggaaggggtggggggaacagggacaggggacaaaggctactttttgcgggtgtgctgccttcgggcctgcagtcgctgtcgagcccctgggg

SEQ ID NO: 29481 - DNA, 120 bp, synthetic construct
  source 1..120: mol_type = other DNA
tctggggcactcctccatcagcagctgagccagacaaccgagtcttcatgcctggtgccccagctcagcctgcttctcccacccgctaatggccacgccagggcagagaaaaagcccccc

SEQ ID NO: 29482 - DNA, 120 bp, synthetic construct
  source 1..120: mol_type = other DNA
cacgtgcgcaggcacgatcttgatcgtggacgcaggtgcaggtgtgggtgcagtagccggggccggggctgcagagtttccaaaagtgaaagagctgccaaagctgggggtaagggctgg

SEQ ID NO: 29483 - DNA, 120 bp, synthetic construct
  source 1..120: mol_type = other DNA
tgctgaagatgcagcaggggcggcagggctggaaggtgaggtgttctgtgttccaaacaggaagctttgcttgggggcgggggacggggcagatgtggcttggggtttggtagccgtctc

SEQ ID NO: 29484 - DNA, 120 bp, synthetic construct
  source 1..120: mol_type = other DNA
gatgctgctcagaaggctggatccacggccccactccagctcacctgggcagggtggcaggctcgggggagtctgcatcttcttcaagctctctaacagtgggttggtgcttggggccag

SEQ ID NO: 29485 - DNA, 120 bp, synthetic construct
  source 1..120: mol_type = other DNA
agaacctgaaggcgactgcccgctgacttgactctctctgctctccactctgcatggcctctgtgcttgcacccgatccctcatgctggagtgggaggcgacagccagaggccactggag

SEQ ID NO: 29486 - DNA, 120 bp, synthetic construct
  source 1..120: mol_type = other DNA
tattagcctcagtaatgaagagccaggacacattcaaacctgtgccagactgtctacggaaaggatacaagtaaattaaagaagacaacccagtaaactaatttagtcttgcttccatta

SEQ ID NO: 29487 - DNA, 120 bp, synthetic construct
  source 1..120: mol_type = other DNA
tcaaggaatatttggtcttcttcctccactgtccttttcttcttcttctctttgagggcactcagtacagtctcctttgcacatgggtctggggcattacttgatggtgacgacagtgtt

SEQ ID NO: 29488 - DNA, 120 bp, synthetic construct
  source 1..120: mol_type = other DNA
ccgagccagaggatgatctgggaaaatcagcgcatctcaccgtggggaaggcctcccggagggtcggagaagaggagtggggagagaggggtaaaagtggtgaacgcgatgggtcggctg

SEQ ID NO: 29489 - DNA, 120 bp, synthetic construct
  source 1..120: mol_type = other DNA
agcctgttaccaggtgcttttcacaaacgccactggcggctgagttttcccccccacttccatttctactttacaagttgataacgtgggacgattacctaccaaatttcacatcatggc

SEQ ID NO: 29490 - DNA, 120 bp, synthetic construct
  source 1..120: mol_type = other DNA
gaaaagttggaaaggtatagatgcctctggggcaactcagagagatgagaagaaggtgcagtttgggttccagatcctccccaacccagtgccaaagtaattcttctatttaatatactg

SEQ ID NO: 29491 - DNA, 120 bp, synthetic construct
  source 1..120: mol_type = other DNA
acacttctgtatgggaaaagacaagatacacatctaaaagacaagccaagactgggaaaaacaacgtaacacatataaccaaaagaggattcataagtagaatttataaagaactccaaa

SEQ ID NO: 29492 - DNA, 120 bp, synthetic construct
  source 1..120: mol_type = other DNA
atgtaatgaaaaatataaacccacagacctgaagctcaatgtcaagtacaagaaatacaaagaaaactgtaacaaatcacataatcaaattgctcaaaaccaatgatatagatcaaatcc

SEQ ID NO: 29493 - DNA, 120 bp, synthetic construct
  source 1..120: mol_type = other DNA
tgagaaaataacttccagctgttgaagccatggtctgtggcattttgctatggtagcccgagcaaactaatagagacttcctaaatccgagaaggaaagctggggagaattcctctgaga

SEQ ID NO: 29494 - DNA, 120 bp, synthetic construct
  source 1..120: mol_type = other DNA
acggatcaagctaggaagcacagaactgcaggccagagacaactctggaagcagaaacaggtgtgtgcttccaggcgcacagacaccaactgtatgacacccacaccttctactcacaaa

SEQ ID NO: 29495 - DNA, 120 bp, synthetic construct
  source 1..120: mol_type = other DNA
gggcaagcattccatgacaacacagcagaaaggcatgacatttttacagtgcagcctggctatctcatagcgtcgcttctgtcctactttatttattggtcagggcaatcacaaagatgt

SEQ ID NO: 29496 - DNA, 120 bp, synthetic construct
  source 1..120: mol_type = other DNA
tgtacagtgtatataattaatgtatgatatcagactaaattatagataagacaagagatgaaattagagttaagtagggacccgatgacgaagagccttgtaaatcagggagagtctggt

SEQ ID NO: 29497 - DNA, 120 bp, synthetic construct
  source 1..120: mol_type = other DNA
gcctcaaaagtgtgtttatgtaaaattaaatgagcactagcagcaagctgcactttttttttcccaaatgggaaacgggttaaatatgtgtaggaagtcctgggccatgccctccaagtg

SEQ ID NO: 29498 - DNA, 120 bp, synthetic construct
  source 1..120: mol_type = other DNA
ctctcgaaacacactgaaaaatataacgtctcattgaagatatacggaagaactacattgtaattttagaactagaaattacaataactaagtaaaaaactcaatgggtgaactcaatag

SEQ ID NO: 29499 - DNA, 120 bp, synthetic construct
  source 1..120: mol_type = other DNA
atatgaagttaaatggcatactaagaaatgtctaagtaccccataaaaaggcaagaaaagggaaacaggtataaaaaaacccagagggaacaagtagaaaatagataataaaaacccgtc

SEQ ID NO: 29500 - DNA, 120 bp, synthetic construct
  source 1..120: mol_type = other DNA
atccatgttaggtggctggctgactgcagagataatgaaacaaatttcagtgaccacacaagcacaaggaagaaacactttgcaaaaatagtttggaaaagtaacaaaaggggagcttca

SEQ ID NO: 29501 - DNA, 120 bp, synthetic construct
  source 1..120: mol_type = other DNA
agtgagtcgcaagggaaactggaaaacatattgaattatgtaaaagtgaaaatataacatgttgactggtatcagcaaaaatggcagagtaggtatctccaagtccccatccccccacag

SEQ ID NO: 29502 - DNA, 120 bp, synthetic construct
  source 1..120: mol_type = other DNA
ggctacacagagggtattccttgaaaacactgtaaatcaaatgcataccctgctgatgcctaggcaaaagattacagttgaggcaaactataggtgtgctgacagcatgggagaagaagc

SEQ ID NO: 29503 - DNA, 120 bp, synthetic construct
  source 1..120: mol_type = other DNA
ttgaacacaagctaacggcagagagactttcagagaccgcacatgtaaaagaagacacactttgcaaaaatgtttagaaagtcactgaacaaacagctacagcccacagcaaaagcaaac

SEQ ID NO: 29504 - DNA, 120 bp, synthetic construct
  source 1..120: mol_type = other DNA
agcttgaaagccacagatctagagcttggatggcattctaatgagctaagcatctaaaccgaccacagttgggagccactgaaagtttttgagcaggtaaatgatagattgattgattta

SEQ ID NO: 29505 - DNA, 120 bp, synthetic construct
  source 1..120: mol_type = other DNA
tgggagaatactgaacacgaatgtcaaaagaaacagaatgtgctgacgatctgcaaggcatttcacagaagacaaagaacacaaaccatggagagaagactagcacaatcaaatagtggg

SEQ ID NO: 29506 - DNA, 120 bp, synthetic construct
  source 1..120: mol_type = other DNA
acagctcctctccctgctccaacttaatgatgacgtttggcttggtgatatcatatcttgttaatgggaaaagaagaaggacttgggcaagttgctcggcttcagaatctccgaagtaca

SEQ ID NO: 29507 - DNA, 120 bp, synthetic construct
  source 1..120: mol_type = other DNA
taaagatgaattgtgtattctatgggatgaaggggaggaagaatatgatgaggtgtaaaagtaccaatggcaaacatgaagcagcttcaatttttaagaggttggggctgggcatggtgg

SEQ ID NO: 29508 - DNA, 120 bp, synthetic construct
  source 1..120: mol_type = other DNA
agaaaaatcttgtatccatgaagatacttgaaaaagcttgacagaaaaagctgatttaaaaaaacaaactaaagaaaatagaaactgatggatacttcattaacatcaatattatataca

SEQ ID NO: 29509 - DNA, 120 bp, synthetic construct
  source 1..120: mol_type = other DNA
ataatatatatattagaaaaaacatatagacagagacatgaggacttctgccctcaggtgtgataaattaacaagtactggatataccctccaacctgaaacagcacacaccaaagaaca

SEQ ID NO: 29510 - DNA, 120 bp, synthetic construct
  source 1..120: mol_type = other DNA
gatagtacaatatctgagatgaaaattatactggaaaagatgaacagcatcatggaaaaaagagattagtgaatataaagacagcaacagaagttacataaaatgaaacagagaaagaag

SEQ ID NO: 29511 - DNA, 120 bp, synthetic construct
  source 1..120: mol_type = other DNA
atcccctctcccccacaattgatacaagtgggcacacaatcaacaaggatatagtacacctgaacaacacaaccaaccaacttgatctcattaacatttatcaatcactccacccaacca

SEQ ID NO: 29512 - DNA, 120 bp, synthetic construct
  source 1..120: mol_type = other DNA
aacccatgagctcatgatggtaacaaaacaaaataccctcctgcttaaaagcctactcaatattttagaaactgtctttcctgcatgaattacataaacaaatagagaatagaaatttat

SEQ ID NO: 29513 - DNA, 120 bp, synthetic construct
  source 1..120: mol_type = other DNA
ccctcttcctcctgctctggtgatggaagatgcacccactttcccttcacctttcacttgactgtaagtttcctgaggactcctcagccacgcttcctatgatagagcctgcagacgtga

SEQ ID NO: 29514 - DNA, 120 bp, synthetic construct
  source 1..120: mol_type = other DNA
ggagataagtctcctgggttctactatgagcagctctacccacaaagccggtgacctggtcaagtcacccacctaaggcccagtctcttcccctagcaactgaggcagcagcagagaatc

SEQ ID NO: 29515 - DNA, 120 bp, synthetic construct
  source 1..120: mol_type = other DNA
actcttctggatcctagcagtgatcagaagaaggccatggacagaacggagactaggttccgtaagaggggacagattacggaaaagatcacgaccagccgtcaaccgcaaccccagaat

SEQ ID NO: 29516 - DNA, 120 bp, synthetic construct
  source 1..120: mol_type = other DNA
ttgaatcaaaaaaatactaagcagaaagcagcattcaacattaagactgcccaatttctagtgctgatacttccttagcccagtatggaggtcacacgtctgagtatggtcatccgaggt

SEQ ID NO: 29517 - DNA, 120 bp, synthetic construct
  source 1..120: mol_type = other DNA
agcaggatgacctggctggggctcttagcatcttagctcaagtcatggccaatgaggtccaagccagtaagcctgagacagagaaaggcgctttaactgtgtgcacaggatgtgcggctg

SEQ ID NO: 29518 - DNA, 120 bp, synthetic construct
  source 1..120: mol_type = other DNA
aaactaaatgactcacccagagcacatgttattttgcttctgaactggaagataccataaagctcctttcctcgatgacatcttcatttagagaggggtgggcttaaacagatgtttggg

SEQ ID NO: 29519 - DNA, 120 bp, synthetic construct
  source 1..120: mol_type = other DNA
cctaatcatagcccagacagatgagtcttctggtcttgctcagacacctctaggaaagaactactgcttagttttctacatctccacccccatagctgcagagaggattttttttttttt

SEQ ID NO: 29520 - DNA, 120 bp, synthetic construct
  source 1..120: mol_type = other DNA
aacccccctcccatcagaatcccccaaatcacatcctggtaccggctgaaggctgctccttggtctcaatcaataagcaatgatttcttcaagatcctactgtattcgcggtggaggtgg

SEQ ID NO: 29521 - DNA, 120 bp, synthetic construct
  source 1..120: mol_type = other DNA
ggttacttttaatattttgaggaaccacctgactgttttctacagtggctgcaccatcttacattcccaccaacactgcacaagagttccaatttctccacatcctcaccagtacttgtt

SEQ ID NO: 29522 - DNA, 120 bp, synthetic construct
  source 1..120: mol_type = other DNA
tctcattgcctaattgctgacacatgactaaggctttcctgattgagtctgggtgctctggttgtggtgaaaaacccagtcggtcatatccatgattgcaaaatggaatagtgtgaattt

SEQ ID NO: 29523 - DNA, 120 bp, synthetic construct
  source 1..120: mol_type = other DNA
ggggagggggagggggagggaccagactttgtctcttaaaaaaaaaaaaaaaagactcccaggcataggaaagcaggcattcaccataaatctcattgttaacaggaactaccttcatag

SEQ ID NO: 29524 - DNA, 120 bp, synthetic construct
  source 1..120: mol_type = other DNA
gtacgacatattctgttttcaaaaaaaagttacagtatgggatacatgtgcatcatagaaggaaacatggcagcacagtgctgctaaggtgtcaggtgagagtggaagtgtactgggaat

SEQ ID NO: 29525 - DNA, 120 bp, synthetic construct
  source 1..120: mol_type = other DNA
gctctgaggtgctctcagttacaagacagaggagtaaataattaccagaagatgcagtcagtgataagataaacaaaggacactgcttgccctaatgtccccactccaaaataaatgatc

SEQ ID NO: 29526 - DNA, 120 bp, synthetic construct
  source 1..120: mol_type = other DNA
ctatttttagccatcttctagaatggtggttcttaaactctgcagtgtgtcagaatcaccagaaagctaataaaaaacagacgtctgggttcattgaagaagcttaagactgcggggggg

SEQ ID NO: 29527 - DNA, 120 bp, synthetic construct
  source 1..120: mol_type = other DNA
gtgacacttgatatgggacaggaatgagtaaacttaggacaggtggaagcgatgaaggtcttagggaatgagtaaacttaggacaggtggaggcgatgaaggtcttagggaatgagtaaa

SEQ ID NO: 29528 - DNA, 120 bp, synthetic construct
  source 1..120: mol_type = other DNA
aggatttggagtggggacacacctagattccttggacatgatgcagatggcttttcttttccagcttgataaagtatcttgacaaacgattgttgcacacacttatttttaacaagaccc

SEQ ID NO: 29529 - DNA, 120 bp, synthetic construct
  source 1..120: mol_type = other DNA
atgtgctgctctcagccaatcagtggtagggtaaagacttcccatgtgctgctctgcctccaaagaagtacagtgtcaatgcccccaaagaccagaacaagttagagttagggttcagat

SEQ ID NO: 29530 - DNA, 120 bp, synthetic construct
  source 1..120: mol_type = other DNA
aaccattcaagctgcttaaatatcaagtctcccattccctctccgttttcagccctcaggtgtgatttttatcttgcattattctaaaaagcagccagagccaaagctgaaatttaaagg

SEQ ID NO: 29531 - DNA, 120 bp, synthetic construct
  source 1..120: mol_type = other DNA
tagcaaaatgaccctaaagccacctgtttggctttttgagacagtgtcactctgtaacccaggctggaatacagaggcttgatctctgccctctgcaacctctgcctcccaggtttaagt

SEQ ID NO: 29532 - DNA, 120 bp, synthetic construct
  source 1..120: mol_type = other DNA
aaaaaaaaaaaggcaggtgttagccttcctggaggctttctgcaggggcaaagaaaaccagtgtgaacttcgtagccagggtggcttcttgaacttggtcataggttaggctagtgattc

SEQ ID NO: 29533 - DNA, 120 bp, synthetic construct
  source 1..120: mol_type = other DNA
tgaggcggtgagcttagaataggtggttaggaagtgattaaagtaggggtttccagtgctggctctatactaatcatctggagaggttgtaaaaatactgattgtagagagtctcatacc

SEQ ID NO: 29534 - DNA, 120 bp, synthetic construct
  source 1..120: mol_type = other DNA
acttttcaaagatgacatcgatgccacttcacctcctccagcagctgccttgtgggaagagaaagatcaacacacagatcagtagggtagcaaaagggaaaagcatctaatattgatgag

SEQ ID NO: 29535 - DNA, 120 bp, synthetic construct
  source 1..120: mol_type = other DNA
gtcagggtatcagcctggtgagtcttctggtcgtcatatcccttacaggtgaagggagactgacgtaggcttgactaatagcagaggtatgtgcaaggaagaaaagcccagggaagcttg

SEQ ID NO: 29536 - DNA, 120 bp, synthetic construct
  source 1..120: mol_type = other DNA
gtgactggagtagaaactgaatcggcgaccccttgtctatttcccccaatatattatcagcaaactgcttcctgcaggcaacaaaaatctaagctgcttctctttcatctcagctggttc

SEQ ID NO: 29537 - DNA, 120 bp, synthetic construct
  source 1..120: mol_type = other DNA
tcgaccagcctgggcaacatagcaagaccctgtctctacaaaaaagatgatgtactagggaatccctcttgggtgacctgctttctccgtatgagaaagctgtctttttcttttttcttc

SEQ ID NO: 29538 - DNA, 120 bp, synthetic construct
  source 1..120: mol_type = other DNA
gtccttagacaactataatctatcacctccatgggaaccaacatggaaactcttagatgaaggtcagtctggctggacccaccttacttctaggctagcaaagaatcttatatctctggc

SEQ ID NO: 29539 - DNA, 120 bp, synthetic construct
  source 1..120: mol_type = other DNA
ctggctggctacttgctgtgagcctgccagtcctcatgggcaacatgggggtggcacctactgagcaggattaggcataaactgatgaaagctgaaagatgctcaggtgcaactggcatg

SEQ ID NO: 29540 - DNA, 120 bp, synthetic construct
  source 1..120: mol_type = other DNA
gttctctagactccattgcttaatcctcctctttccctaaagtttccagaagcttcctattgcattggaaagcctctgtaaaccaacactttgggtgtgggtttattttttgagatgggg

SEQ ID NO: 29541 - DNA, 120 bp, synthetic construct
  source 1..120: mol_type = other DNA
ttcagaagtcagcacactcttctctctcctgtctaaaatacaaaagtccatgccccccactctccctcttgatactgtcctattttacttcttttcacaaccagaactctttatttttcc

SEQ ID NO: 29542 - DNA, 120 bp, synthetic construct
  source 1..120: mol_type = other DNA
attccaggtaagtatctttaactgggtacttggtcctccaagattcagaggaccttgatccccctgaaactgtatacataatattcaacatacatagtatgtgcacacatgtgcaaacac

SEQ ID NO: 29543 - DNA, 120 bp, synthetic construct
  source 1..120: mol_type = other DNA
gtaaaaactagttaaaattaagtcagtaattaatgaaggaataagtcaatgagtgagcaggcgaaggaagaaaacatagaccggagcaggtgcgccttgggttgagcccttccccgctga

SEQ ID NO: 29544 - DNA, 120 bp, synthetic construct
  source 1..120: mol_type = other DNA
cgccaacagcgatggaaataaatagcatgtgtacagacgcctggacccttgagaaactcagaatatttctgcatgccttcctagctcctctagcgctctagaaggtagactttctggtag

SEQ ID NO: 29545 - DNA, 120 bp, synthetic construct
  source 1..120: mol_type = other DNA
cacacggatccaacatctgtacctttgtttttactaactgctgtttcttaatttaaaacctgatcatcttcttcctcgttggcaaaggtgccttggaatttgtgtcgctgagtcagcaag

SEQ ID NO: 29546 - DNA, 120 bp, synthetic construct
  source 1..120: mol_type = other DNA
gaacgttagttcaggaagcttaatcttttctgcccccccatctgagatgtacaagagggttagaaagcagagttggagaagctgtttgggagggagcacttatttgtttttttgttttgt

SEQ ID NO: 29547 - DNA, 120 bp, synthetic construct
  source 1..120: mol_type = other DNA
tcaggtccccttagaacatctaatcatttcatttgaacttgttttctgttcttaccctgaggtaatcattatctcctttctttcatttttttcttagttttatcttacatgtgtatttct

SEQ ID NO: 29548 - DNA, 120 bp, synthetic construct
  source 1..120: mol_type = other DNA
gtccctgagccctgctgctgaatatctcctcttatgtttattggcatatgtgtttcctgtgaaatattcatgtcttttgccagtttttcattagggttcttggtgctttattttttgttg

SEQ ID NO: 29549 - DNA, 120 bp, synthetic construct
  source 1..120: mol_type = other DNA
gtcatggtagctgtggccacccagagaggacgttccagccaccattgcagtttagctggtgttgctaggtagatcatggatctaggtccagcctgcaaatattgccatctttcctgattt

SEQ ID NO: 29550 - DNA, 120 bp, synthetic construct
  source 1..120: mol_type = other DNA
tcggcctccttctgcctgtaattttccttcaggatctggtactgttctggagtggcctgtagcagacactgaaccaccagccagctgcatttgttgtcctggaagtcattgccaactctg

SEQ ID NO: 29551 - DNA, 120 bp, synthetic construct
  source 1..120: mol_type = other DNA
atattagtgaaactacactgggatagcagcagccatttaaagtaataatggtaagacacagcggtggtggtggtttggtttatatttatgaccttttaaaagtgtttggcattttaaggg

SEQ ID NO: 29552 - DNA, 120 bp, synthetic construct
  source 1..120: mol_type = other DNA
ccctccacctcccgagtagctaagattataggtgtgagccaccatgctcagccgctgattttaacttgtatgttttaaacaaaatttctagtaaagtagaacatttctttgatatgtttg

SEQ ID NO: 29553 - DNA, 120 bp, synthetic construct
  source 1..120: mol_type = other DNA
gcatgagccaccgcgcctggccctttctttcattttttaagactgatttgtattccatcattagaatgttccataattggtgcaagaattcctttattgtaaagtgtttaggctgcctcc

SEQ ID NO: 29554 - DNA, 120 bp, synthetic construct
  source 1..120: mol_type = other DNA
gccgtggctgcccgagagatgcgtgacacccaggagtaattggcttggaaggcagtcctctgatttgtacctcattgtggttacagaaacttccaattgaagacactgagctgaaccatt

SEQ ID NO: 29555 - DNA, 120 bp, synthetic construct
  source 1..120: mol_type = other DNA
tggccagtagggcccccactgatacaatctggtgattcccgagcatacacatcatattttatccccattttgccaatgaggaaactgagacccaggtagttacagtgacgtcctcatagt

SEQ ID NO: 29556 - DNA, 120 bp, synthetic construct
  source 1..120: mol_type = other DNA
gtagaacattctagaacactcaccacgtggcatgcccctgctgggtcccggtgatgcagctgtgaatgaagcaggcttggggttgctgccacctggggaggagcagaaggactgtggtca

SEQ ID NO: 29557 - DNA, 120 bp, synthetic construct
  source 1..120: mol_type = other DNA
ttgactttgaattcttcctggctgccacagcaaagagacaggatcaggttcttgattcatgatgcccttaaggtgttaggggaagaaaagcaagcgtgagaccaggcgcggtggctcaca

SEQ ID NO: 29558 - DNA, 120 bp, synthetic construct
  source 1..120: mol_type = other DNA
gttggggtgatggacgtgacttacagagcttctgctctctccctgcagcacacgtggtggtgggtgggtgcagtgagtgggaacatccacataggttgagtgcagctcacagtgggagag

SEQ ID NO: 29559 - DNA, 120 bp, synthetic construct
  source 1..120: mol_type = other DNA
acccggtgaccaccatcatcgctccgccgggccacacaggcgtcgcctgctcttgccaccagtgcctcagtggcagcagaactggccccgtgtcaggccgctaccgccactccatgacca

SEQ ID NO: 29560 - DNA, 120 bp, synthetic construct
  source 1..120: mol_type = other DNA
aagggctgaaacttcacagggtggttgagaccgccttggcagcttcttggacctctagtatttgttcagactgggtttccgaggaccctgccagcttgtgtaagacacagtgacagcgcc

SEQ ID NO: 29561 - DNA, 120 bp, synthetic construct
  source 1..120: mol_type = other DNA
gggacttctgtcagccctgttccactcagcttcctggagcttcttaagttcttaggaattattttgaggcaaatttctagatagtgctagagctgggattctggagttaagtcatttaat

SEQ ID NO: 29562 - DNA, 120 bp, synthetic construct
  source 1..120: mol_type = other DNA
taatgatgttggatggaaatctttcctaaatgtgtcatgcatgctcttgtctcccttaatggagagagtgtgacactgcttagcacttggatggcttggggtggtggttatgaccagcag

SEQ ID NO: 29563 - DNA, 120 bp, synthetic construct
  source 1..120: mol_type = other DNA
cttagggcctggcttcacctccctctgctcctccaagaccttggccccatggatatttgtcctgggtctcaccactgccctggcggcctttgggaatcatcctcacaggtagaggaattg

SEQ ID NO: 29564 - DNA, 120 bp, synthetic construct
  source 1..120: mol_type = other DNA
agcatgcttccagtgtgtcactctaccggcatgaccctacctcttaaaaaaaagaaatatgatgacttaagaccaaatgagtggccaggtatggtgtctcatgcctgtaatcccagcact

SEQ ID NO: 29565 - DNA, 120 bp, synthetic construct
  source 1..120: mol_type = other DNA
ctttgcttccagttcttattctccccgtcctcctctgggctggaacagtttgtcagtctttatctttcataaccttgttactttcaaagaggtgctttgttgaatgtcccttaatttgag

SEQ ID NO: 29566 - DNA, 120 bp, synthetic construct
  source 1..120: mol_type = other DNA
gctctctgggtacgtgggcctgatgacggtgggcgctcgggtgcagaccttttcacatcctttaacatttttgcattgaattgcattatatttaaatagtcactttcctgtcctgaaata

SEQ ID NO: 29567 - DNA, 120 bp, synthetic construct
  source 1..120: mol_type = other DNA
gccgtagggaaatcacagtgtaccgtgtgtgcatgtgcggccgtggtggcattggagacaggttgtgggtaaacagacggggcccccacacggttcctcatggcccagctccttccagtt

SEQ ID NO: 29568 - DNA, 120 bp, synthetic construct
  source 1..120: mol_type = other DNA
ggaggggtgtctgcaaattggaagtgagaatcagtgagtgggggcttcactcttcagggctctgacagcgggaatcctcccagatgggtggagaaaaaggctgtggccctccgagttatt

SEQ ID NO: 29569 - DNA, 120 bp, synthetic construct
  source 1..120: mol_type = other DNA
gctctaggcttcccctttctctggagaggaggtgcttttgacctaactgaccgatgacagggaggaccggggagctggcactatggaaagtggggtaggccgagggtgtggcaggaacgg

SEQ ID NO: 29570 - DNA, 120 bp, synthetic construct
  source 1..120: mol_type = other DNA
ctgattcctggcctgggtagtccccagggagacctgtgcgtccccgtggccattgatggtgtcacatccttggcctgagcagggtttgttggcgtcacatgccgaaggagtcttctaatg

SEQ ID NO: 29571 - DNA, 120 bp, synthetic construct
  source 1..120: mol_type = other DNA
agtgtctgtgtcatctcagcaggtcctctcggagcctccgcttagcagaggggcttggcgaggtctaggaaatactcgaagcgcctggcatgcggcaagggtggcttccgatcgtgtccg

SEQ ID NO: 29572 - DNA, 120 bp, synthetic construct
  source 1..120: mol_type = other DNA
gccatgccatcacagcaattccagcttggttacatattcgtctttcccgtttgagatcagggaaccgaggctcagaggtggcatgattcgttcacagcaagagaactagaattaaacaaa

SEQ ID NO: 29573 - DNA, 120 bp, synthetic construct
  source 1..120: mol_type = other DNA
tgtctgactcttccgcgcagcctcagaagcgccggggtcggttcctcactcaatgtgcgcggggatgcggctcccaggagactgtgctgctgtttctgctcttctgcatcctccatggct

SEQ ID NO: 29574 - DNA, 120 bp, synthetic construct
  source 1..120: mol_type = other DNA
tgtctgccatcctgggcagccagggcccagctccgcagatcagacgctgcaaggctgtctatccgactgcaaatgcgattcacccgtggagatttctgctcaggatccgagttttcccac

SEQ ID NO: 29575 - DNA, 120 bp, synthetic construct
  source 1..120: mol_type = other DNA
aggtggatcgtagggcctggggcagggtgggaagataacggggcagcaggcagcgggcactggctgccagccaaggtccacctgtggtggatggaggcatctttttgtcttgttgaacca

SEQ ID NO: 29576 - DNA, 120 bp, synthetic construct
  source 1..120: mol_type = other DNA
atcaggaccaaacggatggcagtgccaggcactgaggcggggtgggctggagcccaggttcatgtgggatcctaatgtactatccagtgggcagttttggggtccctgcagatggggtga

SEQ ID NO: 29577 - DNA, 120 bp, synthetic construct
  source 1..120: mol_type = other DNA
cacttacatttgcaggtctttccagcccctggggcagcctgattaaccagcttctccagggccaagctgttgggggtgaggtgcagcccgaagcagccagaccagcccctgagcctcccg

SEQ ID NO: 29578 - DNA, 120 bp, synthetic construct
  source 1..120: mol_type = other DNA
tttctcccctcccacctccatctgttctctcctcctgcagcctccaggggcttccagaacccggagacactggctgacattccggcctccccacagctgctgaccgatggccactacatg

SEQ ID NO: 29579 - DNA, 120 bp, synthetic construct
  source 1..120: mol_type = other DNA
catgtgccctgctaagccaccttcacctgctcttttggcttgtgacatttaggaaccagggcccctaaaccagcatccccggcccaggtctggtgtctggagagcaattgctcgggggga

SEQ ID NO: 29580 - DNA, 120 bp, synthetic construct
  source 1..120: mol_type = other DNA
aaaaaaaaaaaaaaaaaaagaaaagagagagagagagactacacatgagggagctgggagggaggagagcaggccttgacccagcacgtgccccatgtggcagggacatatgtctcttcc

SEQ ID NO: 29581 - DNA, 120 bp, synthetic construct
  source 1..120: mol_type = other DNA
actaccaattctggccaccacctccaaccctcttgtgcatatggatggctctagcccttatccaccccctcaagcatttattaagcatctgctgtatgctacatacagtgttagacttgg

SEQ ID NO: 29582 - DNA, 120 bp, synthetic construct
  source 1..120: mol_type = other DNA
ctaggatctcaggcgtgagccactgcacctggcctgaaaccaagctttcttatcccaagttctgacctttatcaagttgacctaatcctttatcatctcctaagtgtccctcatgagtga

SEQ ID NO: 29583 - DNA, 120 bp, synthetic construct
  source 1..120: mol_type = other DNA
aaattacagtattttaccccaaaacatattttctttgacaaactttaaaatagtcctgcaaagccatctctttgggggaaatttgcattctgtagagaatctctttcccttacagaaaag

SEQ ID NO: 29584 - DNA, 120 bp, synthetic construct
  source 1..120: mol_type = other DNA
ctgatggaaagaacttccccatctgaaaagaggatggtgataagtaaacagattgtcaggggtagaagtacccgtcggaccccaagcctggagcattttgccagagaccttttttttttt

SEQ ID NO: 29585 - DNA, 120 bp, synthetic construct
  source 1..120: mol_type = other DNA
ggcctcatgtctataatcccagtgcttttggaggccaaggagagagatcacgtgaggccaggggttcgaggccagcttggggaacatagcaagacccagttcctaccaaaaatagaataa

SEQ ID NO: 29586 - DNA, 120 bp, synthetic construct
  source 1..120: mol_type = other DNA
atgctatgtgagtgcacggggcgggtggtatacagtcgtccccacccgacacagtcagtactaattctgaccttccatctgaccaccacaccacgaccagatattgctttcttcttttat

SEQ ID NO: 29587 - DNA, 120 bp, synthetic construct
  source 1..120: mol_type = other DNA
gaaccagctgagatgaaagagaagcagcttagatttttgttgcctgcaggaagcagtttgctgataatatattgggggaaatagacaaggggtcgccgattcagtttctactccagtcac

SEQ ID NO: 29588 - DNA, 120 bp, synthetic construct
  source 1..120: mol_type = other DNA
cacttgactagttgacaagctacttttcttcagggatgtagtcactgtattgccagctaaggcaagaccaagttgtttctgggacctgaggtccttgggcacataaagaagccttttgga

SEQ ID NO: 29589 - DNA, 120 bp, synthetic construct
  source 1..120: mol_type = other DNA
atattagatgcttttcccttttgctaccctactgatctgtgtgttgatctttctcttcccacaaggcagctgctggaggaggtgaagtggcatcgatgtcatctttgaaaagtttctact

SEQ ID NO: 29590 - DNA, 120 bp, synthetic construct
  source 1..120: mol_type = other DNA
ccccaatagagtgaaggtatgagactctacaatcagtatttttacaacctctccagatgattagtatagagccagcactggaaacccctactttaatcacttcctaaccacctattctaa

SEQ ID NO: 29591 - DNA, 120 bp, synthetic construct
  source 1..120: mol_type = other DNA
attccttccttctccttccctcttagtgtcaatttgagttttctagtttaggttctcaaggggaggacccagactggcagaaccaacacttaagaatgcagattctaggcttcactagac

SEQ ID NO: 29592 - DNA, 120 bp, synthetic construct
  source 1..120: mol_type = other DNA
gtcattagcaaagtggaagacatccactgtgaactggagtgtatctggcccgggtcgaggaactttgaatgcagaagaggcatcagtgagaccgtcgacaagacagcttggaagaaaaca

SEQ ID NO: 29593 - DNA, 120 bp, synthetic construct
  source 1..120: mol_type = other DNA
gttaaataagagcaattttgtttaagttgggggttatttaaagattgtttcaaaatatggatttaggaaggaaatagaaacaaggtgggaagaaggccagtaagtaggagagacgtgaaa

SEQ ID NO: 29594 - DNA, 120 bp, synthetic construct
  source 1..120: mol_type = other DNA
gttttaatctcattactgataaaactaccaaactctagttttcatttttctttcccaagcatttccttcagcacaattaagacactagaactggtgggccgggcgccgtggctcaagcct

SEQ ID NO: 29595 - DNA, 120 bp, synthetic construct
  source 1..120: mol_type = other DNA
atacactcacaacagttccccttagcaagtaaagctactttttcgttaacggcaaaaagtgaaaaacaaacggttttactagaatttggtatttctcattcaaacaagcagattcgtcct

SEQ ID NO: 29596 - DNA, 120 bp, synthetic construct
  source 1..120: mol_type = other DNA
tggggagagaggggtaaaagtggtgaacgcgatgggtcggcggggagggcggtgtggagcgcggcgccgggcgggcgggcggcggccaggcctattccgcaggtcctggccctccggagc

SEQ ID NO: 29597 - DNA, 120 bp, synthetic construct
  source 1..120: mol_type = other DNA
tgagaaagtagattagtggttgcctagggctaaggagtgggtttgggggtggggaatagaaaatgactgcttatgggtataggctttctcgtagcagcataaacatagtttaaaattaga

SEQ ID NO: 29598 - DNA, 120 bp, synthetic construct
  source 1..120: mol_type = other DNA
tgttgcttaagaaaaaaatctcagtatcagtagactagtgggacaaaagccaggctgccctgggttgaacagtgactggaaggtgaagaaatggaggcagtgactgcagactccctactc

SEQ ID NO: 29599 - DNA, 120 bp, synthetic construct
  source 1..120: mol_type = other DNA
caagatcaagtcttagcatggatgtgaaacaaacagaactcatgccgttgtggatatatgaaacagtacaatttggaaagcaatttggcaataactagtaaaaaataagggtgaagaagt

SEQ ID NO: 29600 - DNA, 120 bp, synthetic construct
  source 1..120: mol_type = other DNA
cccacagacctgaagctcaatgtcaagtacaagaaatacaaagaaaactgtaacaaatcacataatcaaattgctcaaaaccaatgatatagatcaaatcctgaaggcagctgggaaaat

SEQ ID NO: 29601 - DNA, 120 bp, synthetic construct
  source 1..120: mol_type = other DNA
acggaacagtggccacgaggggccccaacagaggaagaaaccaggtgaggtgtggtatagtggactcgactgccttctaaatctcagtggttgtccgggtgcggtggctcacgcctgtaa

SEQ ID NO: 29602 - DNA, 120 bp, synthetic construct
  source 1..120: mol_type = other DNA
caggggagatgacctaatcccaatgtcacattataataggatgtaactggagagctacgggcatgcagaagttggaagacgagggaaggcatcacagaggctgtgaggtgaaccgacttc

SEQ ID NO: 29603 - DNA, 120 bp, synthetic construct
  source 1..120: mol_type = other DNA
atggaagtcccattgttaggaagctctgcttttctggagttcaaatttgcattcatgacgctttaaaccgtcagagctgggtgtgtcctcctacaacaaatcactttactctctctccta

SEQ ID NO: 29604 - DNA, 120 bp, synthetic construct
  source 1..120: mol_type = other DNA
actaaccctctgctaaacactctgactctgggtgtgagaaacacacctactgtgccccacatatttttccaaatacaacttaatttagccttcacgacaaccctggagtgaaggatcatt

SEQ ID NO: 29605 - DNA, 120 bp, synthetic construct
  source 1..120: mol_type = other DNA
aatcacaaagaatttcatggcagagtgcctgtctttcacagctttaactgctgcaggaactttctttttttttttttttttttttttgagagggcgtgaggagacacaatctctgctagt

SEQ ID NO: 29606 - DNA, 120 bp, synthetic construct
  source 1..120: mol_type = other DNA
agtctgtaagaaacaggacctccaggttccggcccagggaggttggaattcagcaatatagaaagggtggtggtgccgcaggaaagggtggaactggaaacactcctgttttcttacttt

SEQ ID NO: 29607 - DNA, 120 bp, synthetic construct
  source 1..120: mol_type = other DNA
taaagagcaagattggtgctttttgagggaattgcctctttggaagtgtattccctcctatattccaaatataggaatagagtacttgctccgtcctgaccctaagtgaccttactttgg

SEQ ID NO: 29608 - DNA, 120 bp, synthetic construct
  source 1..120: mol_type = other DNA
atttcttaccatctagatataaatgtcaacgaatattttatttaatgatttatgttcaataaatggacagcagaggtcataagagagttttcagaagaaaaggtaaccaaaacaaagaat

SEQ ID NO: 29609 - DNA, 120 bp, synthetic construct
  source 1..120: mol_type = other DNA
cttcagcgggagttctcttttctgaaaatcctttacattctagattacaataaaatttttcttgttccctgtagaacaattttggatttgcttcagtcagaactcgaccaatttccatgg

SEQ ID NO: 29610 - DNA, 120 bp, synthetic construct
  source 1..120: mol_type = other DNA
agggtcagccctactcctgcacaaacatggagtacagtaggcccctcttatctttggctttgctttctgaggtttcagtttcccatgatgaactgcagtctgaaaatattaaatggaaaa

SEQ ID NO: 29611 - DNA, 120 bp, synthetic construct
  source 1..120: mol_type = other DNA
tggaaaaggctaaataaaaacgatagggagcagatcacttgttgccaggagttacatgtggagataaagtttgactacaaaggggtactgcatgaaagaatttactttgggccaagggaa

SEQ ID NO: 29612 - DNA, 120 bp, synthetic construct
  source 1..120: mol_type = other DNA
ctcaacttgctaaagaatatctatataaaacctgtagctaacatcatacttaaaggtgagaaactagaagcttttccactaagatcaagaacaaggcaaagatgtcccctctcaccactc

SEQ ID NO: 29613 - DNA, 120 bp, synthetic construct
  source 1..120: mol_type = other DNA
gtggagatagagaggaaggaagctataaagctatagtaatcaagacagtatggtactggcaaaagagtggacaaataggttaatagaacagaataaagggtccagaaatagacccacata

SEQ ID NO: 29614 - DNA, 120 bp, synthetic construct
  source 1..120: mol_type = other DNA
ggaggatgttgatgataggggaagttatgcacatatgggaacaaggagtatgctggaaatctctgtacatttctctcaatgttgctatgaatctaaaactacccccacctcccaaaaaat

SEQ ID NO: 29615 - DNA, 120 bp, synthetic construct
  source 1..120: mol_type = other DNA
atactcatgacctaattacctcccacaggccccatctggaaatatcatcacattggggattatgaacttttgaaggacgcattcagtcaatagcacccgtcctctgaaaagtataaaaca

SEQ ID NO: 29616 - DNA, 120 bp, synthetic construct
  source 1..120: mol_type = other DNA
aagaaggagcaaggaggaggaggaggtggaagaagggaggaacctggctaacagaaatcagtggtgggaagcagtgatagtccatatttcatggagttctttcctaagcaaacagatcca

SEQ ID NO: 29617 - DNA, 120 bp, synthetic construct
  source 1..120: mol_type = other DNA
ctaagagaaagaagccatatccaaaaggtgacatgtgatataattccatttatatgacatcctggaaaaggcaaaattataggaacagagaacaggtcagtagttgccaggggttggggg

SEQ ID NO: 29618 - DNA, 120 bp, synthetic construct
  source 1..120: mol_type = other DNA
aatttctgaagcctgcctaaacttgcagaatgactgtaaattattgtggatataagaacagtgtttctcgccacactgtgtatatgtgaaggttgtccttttgtttgtaactatagcaac

SEQ ID NO: 29619 - DNA, 120 bp, synthetic construct
  source 1..120: mol_type = other DNA
ggtttccgagaaaaaagggaaaaaatatataagatgctttaaagagagagtgaggatcttttcttgggtctgtgcttggggtatggtaggaatgggcaaaggaaagcaaggggatggtga

SEQ ID NO: 29620 - DNA, 120 bp, synthetic construct
  source 1..120: mol_type = other DNA
tataattaccagagatacactgacagaattgaaggcacttgtcatacaactttataccacaatttttgtaaccctgttttgaagtttctatgttttttaacatgttaggaaactaaaaca

SEQ ID NO: 29621 - DNA, 120 bp, synthetic construct
  source 1..120: mol_type = other DNA
tggccaccctgtttctgtggtccaagttatcatagcaccaatttcagttaaaacgtttagaattttatgtctgtgattttttgattaacttgtcttgctgccagtctctgcgtcccctaa

SEQ ID NO: 29622 - DNA, 120 bp, synthetic construct
  source 1..120: mol_type = other DNA
agtcctttcctgcctatttaattagattaattagtgtttttttgttttaattcacacagacttttttatatttgcctctgttgggttttctttcactactcattctccctgtctttcctt

SEQ ID NO: 29623 - DNA, 120 bp, synthetic construct
  source 1..120: mol_type = other DNA
ttttgttccattggtcttttatttttatttaatgccagcaccatactgttttgattactataactttgtgctacaatttgaaatcagaacatgtgattttttctagcattgttgttcctg

SEQ ID NO: 29624 - DNA, 120 bp, synthetic construct
  source 1..120: mol_type = other DNA
tttaatatccatgaaaggattgagtgtacatattttagtttattcacaaaacaaatttaaatatatagccaaaccatttttagctgcttgaagatttaagcaataaactgtgattaccta

SEQ ID NO: 29625 - DNA, 120 bp, synthetic construct
  source 1..120: mol_type = other DNA
attttatttttgagcttgagttttgtaaataaagtctgttggaacaattgaacattcacatgagcagcacagataggccaggcagcagtgtgcacatgcacaggcctgaatcgatggctg

SEQ ID NO: 29626 - DNA, 120 bp, synthetic construct
  source 1..120: mol_type = other DNA
atttatctaaatgttatcacagcctataaatattcttataaacttcagtgaaagatgcatgagcaggaagattcttctcaaattaaaaattgccaaaaattatttatgatcttgcatttc

SEQ ID NO: 29627 - DNA, 120 bp, synthetic construct
  source 1..120: mol_type = other DNA
tgattgatttgaatgcaacaatagagagtgtctttgcaaaaaacagtcttttataatgagattgtagctaactttcctgatttgtagtttcattgaacaatagcttattccagttttttg

SEQ ID NO: 29628 - DNA, 120 bp, synthetic construct
  source 1..120: mol_type = other DNA
taaaaagtcttaaggcaaaaacagtttattaaaaaccaagaagcaaaaccaaattggaacagaatgcaataaaaaagtaattttaaaaataatagtgctatatatgtgtatacaggatct

SEQ ID NO: 29629 - DNA, 120 bp, synthetic construct
  source 1..120: mol_type = other DNA
ttacccagatcaactcttgttatgatggttgtcaaatggtgattttctaattccatcatttcttctatatttattaggtggctttctactataaggaagaactttctcttctttccttat

SEQ ID NO: 29630 - DNA, 120 bp, synthetic construct
  source 1..120: mol_type = other DNA
ttgttccgctcagcagggactctcccatatttagaaggaataacgtcagatgtctaaggaaactggcataaattcaaaatacatgatgtaagatcatggctatccaccaatctgcctagt

SEQ ID NO: 29631 - DNA, 120 bp, synthetic construct
  source 1..120: mol_type = other DNA
tgtgggttaatgtaggacacctgctccccaaattggccattgctgcgtaactatgaggcctggtactccagacttttttttgtcctattggatatttaatcctgtcccattttctttata

SEQ ID NO: 29632 - DNA, 120 bp, synthetic construct
  source 1..120: mol_type = other DNA
gttctgtgatcattatgcatgccttgtacttaagaatgaacttatcttgggtatatacacaggagtggggttaatctgtcatagtctaggtttatattcagctttagtaaagaccttcaa

SEQ ID NO: 29633 - DNA, 120 bp, synthetic construct
  source 1..120: mol_type = other DNA
actcctccttggttttgagcacctcctgtgctggattatgctagataccatgagaatttatggacataaagcataaaaaggttcctattctttagaagcattatttgtgaacaagaagat

SEQ ID NO: 29634 - DNA, 120 bp, synthetic construct
  source 1..120: mol_type = other DNA
aatgattccttgaatatgacatccaaagcacaaacaatgaaaacaaaaatatgtaagagggactacacccaacaaaaaagcttctgcacagcaaaggaaacgatcctgggcctgttgtgg

SEQ ID NO: 29635 - DNA, 120 bp, synthetic construct
  source 1..120: mol_type = other DNA
tcaagactaacaggattcttgcatgacttgactgggtaatttttctgtacctcattgtcctctgtaatttcagaggtaggagccccccatacccaaaggactataaatcatgctgctata

SEQ ID NO: 29636 - DNA, 120 bp, synthetic construct
  source 1..120: mol_type = other DNA
agtgtatctgtatgttaattatgtaattagcctctcatctggtcaaatcagctttcatttccttaaaaaaaagtagataagtatataagaaaatattttaggagatgtaatgtagaaata

SEQ ID NO: 29637 - DNA, 120 bp, synthetic construct
  source 1..120: mol_type = other DNA
catacctgttcacccagtaattcttttaggattctatcctgggaaatgaacatgatggcaacatagatcataacctccattctagcaaactatctgcactccatcctttagagaatgaaa

SEQ ID NO: 29638 - DNA, 120 bp, synthetic construct
  source 1..120: mol_type = other DNA
tttaattttgttctcaacattccatggacagtggccctcagtttccttcttccctctctctgtctttttttgtttgtttgtttttggtttcagatggagtctcgctgtgtcatccaggct

SEQ ID NO: 29639 - DNA, 120 bp, synthetic construct
  source 1..120: mol_type = other DNA
ggttctcttgttactttcctactttccgacctcatctgacttcagtgcagtggccagtgtgtgacaaaagagtgtcactttccgctatcacaatcgggagaattaattttttaaaaccaa

SEQ ID NO: 29640 - DNA, 120 bp, synthetic construct
  source 1..120: mol_type = other DNA
gatggaaactttttagcagcctcaatctcattatttgttactggtctattcaggattttgatttcttcaaggttcaatctgggtaggttatggatgtctaggaatttatccatttcttct

SEQ ID NO: 29641 - DNA, 120 bp, synthetic construct
  source 1..120: mol_type = other DNA
atgggaattgtcaaggtcatcaaaaacaagaaaagtctaaaaaactgtcatggccatgaggagtctaacgagacatgacaactaaatgtaatgtggtatcctggatgggaccctgggaca

SEQ ID NO: 29642 - DNA, 120 bp, synthetic construct
  source 1..120: mol_type = other DNA
tagtcaggttggggaggcaggggctggcaaataagaatttccaattcagctgagggaggatcagataaaaataagcatctttcataaaaagcagattgtttcctgatgaaccaaaggctc

SEQ ID NO: 29643 - DNA, 120 bp, synthetic construct
  source 1..120: mol_type = other DNA
accccaaaatgattataagttagaatgagcagatgaggactttaaagtagcttgactacattaaggaaagtatgaccataatgaatgaacaaatgaggaatcacagaagagcaacagaag

SEQ ID NO: 29644 - DNA, 120 bp, synthetic construct
  source 1..120: mol_type = other DNA
tatgtccacacccctgcccaatcccctcattattccatggctaccaccgatctgttctccatctgtatgatttcatttcaagattgtcaaataaaacaaagcgtgcagtattgtaaccaa

SEQ ID NO: 29645 - DNA, 120 bp, synthetic construct
  source 1..120: mol_type = other DNA
gcaaactctgttactgccacattcttttttttttccactgagaatagtttcccatgttttcaaaagagcacagttgtgtgatatgtgttgtggggggaagaggtgaaagaaagagggggg

SEQ ID NO: 29646 - DNA, 120 bp, synthetic construct
  source 1..120: mol_type = other DNA
gtcctacacagaagagacacctactgaagccataacactcggaattttcaatccagtcacagagcttttaggaaaagaacatcttggaatcataatttcattccagttagaaaatggaga

SEQ ID NO: 29647 - DNA, 120 bp, synthetic construct
  source 1..120: mol_type = other DNA
tgtgaaattaagaagaccattagtcaagtttctatctctacctttctgcttgttctagccttcacactagtttgtgagtcccaggattcttccatagtcaatcccctatggtcctgctag

SEQ ID NO: 29648 - DNA, 120 bp, synthetic construct
  source 1..120: mol_type = other DNA
aaagaaagaaagaaagaaaatttgaaaagaaggtggtgattgtcatggtgggagagctggggagacaacaatagactgtaacataagagtaagagaccgtagcccttgggatgcggagaa

SEQ ID NO: 29649 - DNA, 120 bp, synthetic construct
  source 1..120: mol_type = other DNA
gtcccctacttttacttcgaggtcatgctttaataattgtgctctccaggttggaggaatccttcaaaagttagatagggaaaggtgctttattttgacatgtgatttggccactgaaat

SEQ ID NO: 29650 - DNA, 120 bp, synthetic construct
  source 1..120: mol_type = other DNA
attgcagtgcagcctcagaaatctaggttgtggtagcctcctggtggcacgcatcatagctcctgcactgacagactgtacttgaccagtaaacagctccagtagggtgccccaatagag

SEQ ID NO: 29651 - DNA, 120 bp, synthetic construct
  source 1..120: mol_type = other DNA
tgagcccaggagtttgaggctacagggagctgtaacgatgccactgaactccatcttgagtgacagagtaaaatcctctcgaaagaaagaaagaaagaaagaaagaaagaaagaaagaaa

SEQ ID NO: 29652 - DNA, 120 bp, synthetic construct
  source 1..120: mol_type = other DNA
taattttgccttggttatgaagagagtgaaggcattaagaaagacatgcaaatctgcagtgaacattcaaggactagcaccttgtctcccatatgttcagcctaattccgcctctcatca

SEQ ID NO: 29653 - DNA, 120 bp, synthetic construct
  source 1..120: mol_type = other DNA
acaattagcagtgaaaataaggaatacagcctttgggcctaccatctttcctccaacctacaagagatcggcatagaagggggaaaaacttgagtcaaacacattttcagattggcttca

SEQ ID NO: 29654 - DNA, 120 bp, synthetic construct
  source 1..120: mol_type = other DNA
gaggtgaattattgggcactgggtgatgggggaaggcaggcgctaagaaggacattattatatgctgagaatttaattcatctaagcttcctaaagtgctaatctgatatctgttcacag

SEQ ID NO: 29655 - DNA, 120 bp, synthetic construct
  source 1..120: mol_type = other DNA
tttcaggatgtcaagtttccaaagcagtgatcctcatttttaaaaaagtcagggaaaaccttagcatcttcaggttacaagtctactcgtccttcagagtacaacaaaatgccttttcag

SEQ ID NO: 29656 - DNA, 120 bp, synthetic construct
  source 1..120: mol_type = other DNA
tgttttgaactcctgatatttaaaatagcctctttcatgcctttgctgcaaccctcaattatggccatttttttttttttttgaggaggtgggaagagggaggtagggagagacagggag

SEQ ID NO: 29657 - DNA, 120 bp, synthetic construct
  source 1..120: mol_type = other DNA
gcgttcctagagaccataaaagatgatgcatactttcctcatgatctgatcctatctcatctaatggctttagacaacaaaaaggccaagtaccatttgacccagccatcccattactgg

SEQ ID NO: 29658 - DNA, 120 bp, synthetic construct
  source 1..120: mol_type = other DNA
catggctggttgtccaaagtcctaaaaggatcaagattagaagatgttcctcatacatagttttggagaagcaacatgaggatggacctatggaggtaggcatgaagcataaagatgtct

SEQ ID NO: 29659 - DNA, 120 bp, synthetic construct
  source 1..120: mol_type = other DNA
ggttcagaatctgatgttatgaaccgatataagttgacaaggaagttgccagaaaacagagaaaaaaatcaggtgaaaataagaatggagaagaaagacatgtacacagccaaagcacag

SEQ ID NO: 29660 - DNA, 120 bp, synthetic construct
  source 1..120: mol_type = other DNA
ccttccatcccagaaaaaaaactaaacagttcaaaatggggcacttgggagacatcactgcaactgacccctaccttcactacattaaaggtgcctaaactataataggaaatcttctac

SEQ ID NO: 29661 - DNA, 120 bp, synthetic construct
  source 1..120: mol_type = other DNA
aagaaaaacaactgaaacacttatactgtagaatgcagattcagccaaaatccaatattgtaaatttttacttaccttcagtgtctgctagtcctactcctacccctggctgttttacag

SEQ ID NO: 29662 - DNA, 120 bp, synthetic construct
  source 1..120: mol_type = other DNA
agagtgaacttttcggtcacaccgatctggttttgactcccaacccactctttagcaactgtacactgcttttctcatttgaaaacaatgggagtcagtaatgcctacctcataaaattg

SEQ ID NO: 29663 - DNA, 120 bp, synthetic construct
  source 1..120: mol_type = other DNA
aatacaagtccagatggaattgaagatggcttaggaggaacaggaggaggtgcagtagtacatattcttgtaacaggtaatccattacttctcagaacagctgtggtctctagagtagta

SEQ ID NO: 29664 - DNA, 120 bp, synthetic construct
  source 1..120: mol_type = other DNA
agtccaacagttgggatctacacatcacactgtgtatagagcagagagctacaaataattaatcttgtctcaatatttaaaaaaactctacaggggatatcccttcgatctggaacttga

SEQ ID NO: 29665 - DNA, 120 bp, synthetic construct
  source 1..120: mol_type = other DNA
gtatatattacatgtatacatacacacacatacacgtatatattacatgtatacatacacacatatacacgtatatattacatgtatacatacacacatatatacacgtatatattacat

SEQ ID NO: 29666 - DNA, 120 bp, synthetic construct
  source 1..120: mol_type = other DNA
tgacctgttttcaatttctgcttctattcaggtctgaagcaaaaatgatctgctataaaagcaaactattttaccttcatgtgttggaacttatccaaaaagttatcttccaggggtagt

SEQ ID NO: 29667 - DNA, 120 bp, synthetic construct
  source 1..120: mol_type = other DNA
tgctgtttctgagtgttttgtaatgttaaggtgtggttcccccacattttcttttttttttttttttggatcttaaagtggaaaacatgtttattaacattcaaactcccctcatacaag

SEQ ID NO: 29668 - DNA, 120 bp, synthetic construct
  source 1..120: mol_type = other DNA
atactgaggatttttttgtttgtttgttttggctatactttcattccaaaagaagagctgaattgatgtttgagttacagcaccagtctattattagtgaatgaagtatactcttgcaga

SEQ ID NO: 29669 - DNA, 120 bp, synthetic construct
  source 1..120: mol_type = other DNA
tttgggcagtcaaggtttatccatatggagaaatccaacaagcagtaagatgcccgggtctagagataaaagagagttcggatgtacagatatgtatccaatcggccctcagtgcaagag

SEQ ID NO: 29670 - DNA, 120 bp, synthetic construct
  source 1..120: mol_type = other DNA
tgaaatccagaatcccaattacccttccgtaagcagcaatcattacatgttttgtcagcattcagcatcctgctggtaactgtacttgacgacaaaattgaaaattgactgctgtctggg

SEQ ID NO: 29671 - DNA, 120 bp, synthetic construct
  source 1..120: mol_type = other DNA
ctgttaagtccacacaaatgcttctatgtataattgtaccaacacttcctgtttggtgcaactggaaatagttcctatttcaaccatttgggtgatgctgaagagctcccactgagcgaa

SEQ ID NO: 29672 - DNA, 120 bp, synthetic construct
  source 1..120: mol_type = other DNA
tatgtcaccaacaatctaaaatttaaataatgccctgtccattgctcctaaataaaatattgtcttatcaatacacattcactgatcatctgctataaatagaaaagaacactatagtcc

SEQ ID NO: 29673 - DNA, 120 bp, synthetic construct
  source 1..120: mol_type = other DNA
aggttttcatgacataaagtttacaatcgaaattcaaagaaagtgtttcttaggcagagaaagattaacagctaatgtaattgaagtgaaattagctagctctaaatactttcaaaaatg

SEQ ID NO: 29674 - DNA, 120 bp, synthetic construct
  source 1..120: mol_type = other DNA
ttagttgcactgggccttagatcagatttcctggtgagggttctatggggagtcttatcaatgatgattgctctagataaggtatgacatctttgttgttttgcccaaaaacacaagcag

SEQ ID NO: 29675 - DNA, 120 bp, synthetic construct
  source 1..120: mol_type = other DNA
taagacattttacactactgacacagacagacgtgctatctcctcaaagcataagatactttatgtctgggatcatatgtccaagttaatcagacagtgccaaggtagatgagaagtgct

SEQ ID NO: 29676 - DNA, 120 bp, synthetic construct
  source 1..120: mol_type = other DNA
tatgagatcattgcatatatatgtaatatatgtttattatctatgtagctagacctagatatagatccatatttagaagaatgacccaacctgaagaatggactgatgggggcatgatag

SEQ ID NO: 29677 - DNA, 120 bp, synthetic construct
  source 1..120: mol_type = other DNA
tcggcttccaaagatatgtagccacacagaatcagggaaggggccagaataatgctattttttctgctcttctacccctgttgctattataacttctctacgagtgctctgtgtgataaa

SEQ ID NO: 29678 - DNA, 120 bp, synthetic construct
  source 1..120: mol_type = other DNA
gccaaactaaaatagcacacaccttatcagggcatgctgggttaagaatgtgggtggagatttagaatgataaatatttactgtcacaaccagaagctattcagccgagtgctttactag

SEQ ID NO: 29679 - DNA, 120 bp, synthetic construct
  source 1..120: mol_type = other DNA
gccattagaaaggccatttgttatgatgggcatgaggacagatgatatactggctgtgtgatgttatgtaacatgttgaacttccctgagccttagtttcctcaattgagaaacagagat

SEQ ID NO: 29680 - DNA, 120 bp, synthetic construct
  source 1..120: mol_type = other DNA
cttgatgttttcatttgagaattgtaattttacgcagcatctttcactcagtatcagaatagggtcttatgatgtcactactgaacttttgctatagcctcaaaagaggatgttatgtat

SEQ ID NO: 29681 - DNA, 120 bp, synthetic construct
  source 1..120: mol_type = other DNA
catatctgccctttgctccagagggagacactctgtttcccaagaccatttgcaaaccagccttctacttcagagaaaaacactatcgtaactgtataaacagctttttcttactttaaa

SEQ ID NO: 29682 - DNA, 120 bp, synthetic construct
  source 1..120: mol_type = other DNA
agctgagattatgtacttggctgtgtctctaagtggcaatatattttcataaaatttccaagattttaaaaatgtattttatttttatatttcctgtaagagaattatgtaaagcaggca

SEQ ID NO: 29683 - DNA, 120 bp, synthetic construct
  source 1..120: mol_type = other DNA
gggcatgtggttgatatgtctaggtggcagttgaataaagctcgaagtcatacaaattcttacaatatatcacagccacagccatcctctgaataatagaaacagtagttcctggccatg

SEQ ID NO: 29684 - DNA, 120 bp, synthetic construct
  source 1..120: mol_type = other DNA
tttctgatgatgcttactcccatggtgagacttaacttgagaaacagcaaattccctggagtttcttcacgccaaagaactatgcatattctcactcacaggtgggaattgaacaatgag

SEQ ID NO: 29685 - DNA, 120 bp, synthetic construct
  source 1..120: mol_type = other DNA
cagatacacattcccaaggaggcaaaactatatttggattgggggctattcttttaaatgtacagattaaaatgaggcaaacagacatctttacaaagttgagcttttgccagctcagag

SEQ ID NO: 29686 - DNA, 120 bp, synthetic construct
  source 1..120: mol_type = other DNA
ctgttgttcccaaagaaatatcaatggtaaacaatggggatctctgaggtccacgttttcctgagtagaagcccagttactttctgctagggcaggaccaaggactgatttataaggcat

SEQ ID NO: 29687 - DNA, 120 bp, synthetic construct
  source 1..120: mol_type = other DNA
gagagcgagagacagtgagagagagacagtgagagcgagagagagagagagcaagagacagtgagagcgtgagagacagtgagagagtgagagacagagagagaggacagtgagagagaa

SEQ ID NO: 29688 - DNA, 120 bp, synthetic construct
  source 1..120: mol_type = other DNA
gaattgcaggacagtcaaactctgttgatagtcaataacctgtcatggcttaggtaggttttcagtatcacaggctatctgcccctttcctggaaataagaggtttcttatttcgcatag

SEQ ID NO: 29689 - DNA, 120 bp, synthetic construct
  source 1..120: mol_type = other DNA
tcaaggtcaaaattgcctcctttatgtttgtatgtccaattacaccatacctatagcttcagccatcaaaatacatagaaaacaagtctagcaccaagttccttttatttgtgcttcacc

SEQ ID NO: 29690 - DNA, 120 bp, synthetic construct
  source 1..120: mol_type = other DNA
ccacagcttcagtgactccaaaatatatctagagctattcaaatcctctccctcttcacagttaatgctctggttcaagtccccatcatttcttacctctcctgtaacaagactactgta

SEQ ID NO: 29691 - DNA, 120 bp, synthetic construct
  source 1..120: mol_type = other DNA
aaagatagcggaaagtttaagtcgctccttatcttaccttcaagaaaagctgctagaaacattcttaacattttgatggatggcttttcagctttttctatgcatagatacagtattttc

SEQ ID NO: 29692 - DNA, 120 bp, synthetic construct
  source 1..120: mol_type = other DNA
ggccaacaatagtagttgtatctttatagttgcttatactgaaaactttgaagtcatccttaaattctctgctataactcaaataggatccatcagcaaattctttgtcaactccacctc

SEQ ID NO: 29693 - DNA, 120 bp, synthetic construct
  source 1..120: mol_type = other DNA
tcacaggcattgtgtgctaaaggaatttatttttgtttggtggtgtaattcaggctgtgatgcagtagatggcatttaagagtaagggctggcagatatgcttactcagctataagcctc

SEQ ID NO: 29694 - DNA, 120 bp, synthetic construct
  source 1..120: mol_type = other DNA
caaaagcttgagtcaacaccattagagggtaattgacattgtgggcttcctgagtaaaaggtacttaagcacccagggtacaccaaaggttagtcttagaaggccattacataatggtaa

SEQ ID NO: 29695 - DNA, 120 bp, synthetic construct
  source 1..120: mol_type = other DNA
aggtggatgttacccatactccatgaaatcttcatgcctctaaaagatcttcatatactagtttaaatcagaaaaatataccagtagagaacaggcacattagtataattagcttcaaga

SEQ ID NO: 29696 - DNA, 120 bp, synthetic construct
  source 1..120: mol_type = other DNA
gcctgtgtcccccaccaaaggaaattcttggtattatactgattctctcttctcaaacatacctttttccttaaactaaaaaggcagggtctaagagtaactttctgagagccatcctgg

SEQ ID NO: 29697 - DNA, 120 bp, synthetic construct
  source 1..120: mol_type = other DNA
cactgtctatactgagaatatagagatccaaactttccagttagcatggttgtttcaaatttattttcaattattgatagttcagaaaaatttatttcagcttttcaccctgttattagt

SEQ ID NO: 29698 - DNA, 120 bp, synthetic construct
  source 1..120: mol_type = other DNA
cggcttgcctgatggtaagcgcatcctccacacagaggctcacattcatgcgttttctttctaaggtattttagagccacgtctgatcagttttaaattttaagtcaccaaatatcaaca

SEQ ID NO: 29699 - DNA, 120 bp, synthetic construct
  source 1..120: mol_type = other DNA
aagtcctagtgtcagcatctttctcagtactcgttccagtctgccttctggttttccaaatggactcaatgttgtgagaatcagagagaagatatttgtgccttctaagggctataaatg

SEQ ID NO: 29700 - DNA, 120 bp, synthetic construct
  source 1..120: mol_type = other DNA
ttggggggatgttatgaaatattgaataatgtatgttgtcccaattacagtggtttagatatgagatatattatgtcatccatgactcatcctttataaattaccaagtgcgtactgttt

SEQ ID NO: 29701 - DNA, 120 bp, synthetic construct
  source 1..120: mol_type = other DNA
gaaattgttgctcttctggatggccctatcagatcacattatactgtagttggtttttattgggaagagaagttcaggcatgagggccagttagcatcatgttgagcacaactattgcaa

SEQ ID NO: 29702 - DNA, 120 bp, synthetic construct
  source 1..120: mol_type = other DNA
gccaaggcttcttacctaggtttcccttgcatttggaagatgtatcagccagaggtcagctgcagataaattagtaaaaccagcctagcaattttaagaagaaatggcttaaatataggg

SEQ ID NO: 29703 - DNA, 120 bp, synthetic construct
  source 1..120: mol_type = other DNA
tatgattgcgccacttcactccagcctgagtgacagagcaagaacctctccctaaaagaaaaaaataaaatccatgatatttcttttttttctttatgttttattttatttattattatt

SEQ ID NO: 29704 - DNA, 120 bp, synthetic construct
  source 1..120: mol_type = other DNA
tacagaatatacagggttgggaaactgtagcccatggaagaaatcttgcccactgcctgtttctgtaaataaagttctattggaacacagctggaaaccatcattctcagcaaactatcg

SEQ ID NO: 29705 - DNA, 120 bp, synthetic construct
  source 1..120: mol_type = other DNA
atatcaagtgttcccagaacaacttaagagggtgtactttccttagtggatatacttgacacctttgtcaaaagttagttggctgcagctatgtgaattacttcctgggttctttatttt

SEQ ID NO: 29706 - DNA, 120 bp, synthetic construct
  source 1..120: mol_type = other DNA
ttatgtctgtgttttagtgtatatgtttgtgtcttttgggctataggtgtacatctggaatttgctagcattagcacacagaaatgtacactcaagtgatttgaagcaactttggtctgt

SEQ ID NO: 29707 - DNA, 120 bp, synthetic construct
  source 1..120: mol_type = other DNA
gtcatcaatgcccatataacagtaattttgtaagcaagcatttttgtcatagacacagtggcagcttaccaagagatcagtaaattgacgattcactgtataaccaaataaatctacttt

SEQ ID NO: 29708 - DNA, 120 bp, synthetic construct
  source 1..120: mol_type = other DNA
caccctttagcaacttcccatcaacaatatttttataaaattccaatcctggtcatcaacaaagtcttgccaatggtttccatcactctcttggcattggtttacctgccaggtgtgata

SEQ ID NO: 29709 - DNA, 120 bp, synthetic construct
  source 1..120: mol_type = other DNA
ttccttctggtagggaaaagtgtcagttaagagtgagtatgagtggcagaatgacaatagctttgttaaccgcactgtagattagatgattgttgcctgaaatgtcagttcctggttggc

SEQ ID NO: 29710 - DNA, 120 bp, synthetic construct
  source 1..120: mol_type = other DNA
ttcttaaagcagtagatgtaactgtaaactaaatcagtctacaaactattctaggcacccatagattctgttgtaggtactgtaaactttgttggagactttagtcggcagattatgttg

SEQ ID NO: 29711 - DNA, 120 bp, synthetic construct
  source 1..120: mol_type = other DNA
ggtttcaacttcaacctctccattttatactttgttttgtgaggctggggttggaactctgtaaattatgcttcccagattcactggatttccagtttgttcctggcagtaggagacact

SEQ ID NO: 29712 - DNA, 120 bp, synthetic construct
  source 1..120: mol_type = other DNA
ggctggccgggcagaggggctcctcaactttattcttattttataaaattttacttagcatgctttcttattgaatatgccttctcctctaacctctcactccttaccctcttcctcttt

SEQ ID NO: 29713 - DNA, 120 bp, synthetic construct
  source 1..120: mol_type = other DNA
gagtggaaacttgacttttcttgtgtgatcctgggtgtgtatgcctctgttagagaaagagggggcatttatgactctgctcaagaaacagaaacagaatgctttaaacacatctttgga

SEQ ID NO: 29714 - DNA, 120 bp, synthetic construct
  source 1..120: mol_type = other DNA
agtaggtttcaaatctcagtatgtgtgaaaaatcaatctgaaaaactcataaggatctacatttacttattttttatgaaactatcccatctcatcaaacacggcccttctctagtaatt

SEQ ID NO: 29715 - DNA, 120 bp, synthetic construct
  source 1..120: mol_type = other DNA
caagttgtctaatttgacaaatgggagcctctggaatctctttgacatgcctcagtcgtttttgtacttagatgttctgtgtctgtttccttggctaaactattggctccttaaatgggg

SEQ ID NO: 29716 - DNA, 120 bp, synthetic construct
  source 1..120: mol_type = other DNA
tgagtaggaagacctactgactctccatttcccaatttggattttgtgctatttctgtatagttcagaaaagcacttatcagtcaggtcagccctataattctggcagacagaaacttga

SEQ ID NO: 29717 - DNA, 120 bp, synthetic construct
  source 1..120: mol_type = other DNA
ttgcaacaaagctctgatgagtggtctgaaaattttggtgtaactgttaggcaccagtttgactcacagtatgtacttgaaaacttctgacactagttatccaaaatgaaataaaatgac

SEQ ID NO: 29718 - DNA, 120 bp, synthetic construct
  source 1..120: mol_type = other DNA
acttcagtgctctaccccccgtaatcttggcttttcataaattggcctgtgatgaggcctggcttctttcctgatgtttttgatccaaaaacgttatggtgagaaaacaatcaagtttct

SEQ ID NO: 29719 - DNA, 120 bp, synthetic construct
  source 1..120: mol_type = other DNA
tgttgtcatgtggctccgcataagtcagtctcccattcacaatgtagcacttaatctattcaaagcgatatcccaaaacatttttttctcaacagcatttccagtcagcccaatgggaca

SEQ ID NO: 29720 - DNA, 120 bp, synthetic construct
  source 1..120: mol_type = other DNA
ctcaaagccagcaagggagcaagtccactagcacaatggctgttatcattgtacacaatatacagttgacctgtgaacaacacaactttggaattcacaagtccacttagatgtggattt

SEQ ID NO: 29721 - DNA, 120 bp, synthetic construct
  source 1..120: mol_type = other DNA
cccaaacccccacagcctcaggcaactactcatctactttctgtttatgtggatttaccaattttggacacttcatataaatggaatcatgcatatgtggccttttgtgactggcttctt

SEQ ID NO: 29722 - DNA, 120 bp, synthetic construct
  source 1..120: mol_type = other DNA
caggaaagggcagagaagaaagacaagggaatgagtttttagaagcatgggatggtcatagaacatgagaaggcagttcacagcaggaaaaacctaaacggccaataacatttgaaagaa

SEQ ID NO: 29723 - DNA, 120 bp, synthetic construct
  source 1..120: mol_type = other DNA
aggtagtcacaaaagactacaaattgtatgatcccatttacatgaaatatccagaataggcaaactcacagaggcaaaaggagattaatggttgccaggggcagcagtcagggagaatga

SEQ ID NO: 29724 - DNA, 120 bp, synthetic construct
  source 1..120: mol_type = other DNA
tttttattatgtcacaaattctttgtgactgactctcccttctgactaaaacccacaagatattgtgcgacatccaagtacctccccaatctgaccaatgcttctaattcaaccctgtgg

SEQ ID NO: 29725 - DNA, 120 bp, synthetic construct
  source 1..120: mol_type = other DNA
gtccaaagggagctgataagaacacagctatttttaagtaaaatagctatttattcagcctgttgtcatgccaacatgttctgtgcatataccactataattagcacaccctttgtaaca

SEQ ID NO: 29726 - DNA, 120 bp, synthetic construct
  source 1..120: mol_type = other DNA
aatgtaatccctccttcaaaaattctaactagagtcatctggtcatttctgattacatcttaaagatgtatccagattcaatttctgttggtttatccttagacgcttctagtcaaaagt

SEQ ID NO: 29727 - DNA, 120 bp, synthetic construct
  source 1..120: mol_type = other DNA
gcgagaaggggtggtcagacatctgctcagaaattgcttcctttctttctactttcagtttttctacgaggagacatttaaaaacgactcgcatacacaaatggtctttttggggtaaag

SEQ ID NO: 29728 - DNA, 120 bp, synthetic construct
  source 1..120: mol_type = other DNA
cgccttttgccaggaattaaacaaacggcgcgacccccacgatgagcgggtggagcggaccgcggcgagagcagagcttctggcactcactacattcagaactttccttaaaagccgagg

SEQ ID NO: 29729 - DNA, 120 bp, synthetic construct
  source 1..120: mol_type = other DNA
actgagccatctacctgccgtagaattaatgtttttctgcacctcctttctgtgtttccaaagctcttattgagtatatctttttctgctactcacagaaaataacacaatattaggcag

SEQ ID NO: 29730 - DNA, 120 bp, synthetic construct
  source 1..120: mol_type = other DNA
gcatttctataaaatgtagtccaatataacataagagtttttgcattagtaagaaaaagcagaaaaagacagtgcctggatgcagtgcaactgcaggcagtagtccaggctccttcacca

SEQ ID NO: 29731 - DNA, 120 bp, synthetic construct
  source 1..120: mol_type = other DNA
ttgcttccagagtactccttttaaaaacatttgttcttctgaaatagagttgtctaaatgtgtaagattaaatcaacaactcataatttagttgccatccttgtgtcattctcaaggttg

SEQ ID NO: 29732 - DNA, 120 bp, synthetic construct
  source 1..120: mol_type = other DNA
agtgaggataaggcttttatttgcgtgcctatgaagctgggtgttttccttgaatctctaggtgattaaccctagcctatttgcctatgtataataaattgtgcctgcacatggtaggca

SEQ ID NO: 29733 - DNA, 120 bp, synthetic construct
  source 1..120: mol_type = other DNA
ttgtggggaggtgaccaggaaaagcatggtgaagagtaaggtttgttatgcagatttgagtcagtgccttctccattgataggagtctcttatgatttagtaattcttcatttcctgcca

SEQ ID NO: 29734 - DNA, 120 bp, synthetic construct
  source 1..120: mol_type = other DNA
tggaggcatcacgctacctgacttcaaactatacttctactctgtttttagagcttctcatgtgtccgctgtttctcaaaataatcaatatgcaaaagaggcatgttttagggtggcatt

SEQ ID NO: 29735 - DNA, 120 bp, synthetic construct
  source 1..120: mol_type = other DNA
atgacctgacaaggtgagagcctgaaggtaaggaacacagacgccatatgagtaatctagagaaggattttagatgtttcttgagtgggtgactagacaatgagaatggagtgaaaaatc

SEQ ID NO: 29736 - DNA, 120 bp, synthetic construct
  source 1..120: mol_type = other DNA
tgtccctgtatatttgaaagaatgcaaatgtgatagattcattttcactgtcaggtacgtagacaaacctgccagtgagagcaaacacccacatccccctcagtgcaaataacacaatat

SEQ ID NO: 29737 - DNA, 120 bp, synthetic construct
  source 1..120: mol_type = other DNA
aaagatctctttttccctgtgattgtgttttaatggcgcttatgtattagactatagacatttaacttagaaaatactataaattagcattttatattttttcatcattatattggcatg

SEQ ID NO: 29738 - DNA, 120 bp, synthetic construct
  source 1..120: mol_type = other DNA
gcataagaagttcacaaaagcaggaacctaaacattagtaaacatagacattcaacttcactggcaaaaatcaaacaattggcaaagataaagtgtcacagtaaaatgtgatagccagca

SEQ ID NO: 29739 - DNA, 120 bp, synthetic construct
  source 1..120: mol_type = other DNA
gagccttaccctgactacacacgggaagataattctgaaatggcctttctgcaagaaacagacaaaaattgtgaagtcttttgcttaattccatccaaagtgtgaaggggacttggtctt

SEQ ID NO: 29740 - DNA, 120 bp, synthetic construct
  source 1..120: mol_type = other DNA
ttgatttgcatgtctctgataattagtgatgttgaacactttttcatatacatattggtcatcttatgtcttctttggagataagtctatttagggcctctgtgcatttttaaatcaggt

SEQ ID NO: 29741 - DNA, 120 bp, synthetic construct
  source 1..120: mol_type = other DNA
aatgatgcatgtaaatagttttaaaaaattaaatagtttttcagggtttatcataaaaatagtgaatccctgtcctgtcccgttcctccccatccctgctgctggctcccagtggcaacg

SEQ ID NO: 29742 - DNA, 120 bp, synthetic construct
  source 1..120: mol_type = other DNA
ataattggccgtgtctatggtaaattaacatggatatcaaggtataccagttcaccagaatggtgacggaagaattgcgatagcttcccaccgaacgtcacgtaaaaggtttccacaact

SEQ ID NO: 29743 - DNA, 120 bp, synthetic construct
  source 1..120: mol_type = other DNA
cttcgattcctctgcttagttcacaaactccttgagacaggattgcctctctctaaacagccacagatccactacccacctacccacccacccatccatccatccatccacacatctgtc

SEQ ID NO: 29744 - DNA, 120 bp, synthetic construct
  source 1..120: mol_type = other DNA
cccatccgtccagtggcacaccttctgtcacccacacacccacccccacactattcctgaagactgtgggaggcaccagcagggagctcagaaactgtcttgaggaggccgcattgatgt

SEQ ID NO: 29745 - DNA, 120 bp, synthetic construct
  source 1..120: mol_type = other DNA
ctgaactattagtgactgcccctttatccgatttactttatccataactccctacctgatgtgtctgttctctgtcactcccctcatacataatgtccattacagcagggactttgcatt

SEQ ID NO: 29746 - DNA, 120 bp, synthetic construct
  source 1..120: mol_type = other DNA
tgggtctttgtaaagtgtcagtacagaagggagtgactgaatgaatttgagagagatgaatctgttatgctgaaaggtaaatacttaacctgggttctctctggcagcaaggaaatgctg

SEQ ID NO: 29747 - DNA, 120 bp, synthetic construct
  source 1..120: mol_type = other DNA
agtctatcattgttggacatttgggaaagacacatgcacacgtatgtttattgctgaattacaccagtttcattaaaaacctacaacgcaaatgatgacagctctgggtacagggactgt

SEQ ID NO: 29748 - DNA, 120 bp, synthetic construct
  source 1..120: mol_type = other DNA
tctagtggtgtgacatggtaaatgatgagcaactgtcattcatgttggctgtgtgtcagggagatttggtgtactatatacaccactcatttaatacccagggaaacctaatgaggttca

SEQ ID NO: 29749 - DNA, 120 bp, synthetic construct
  source 1..120: mol_type = other DNA
gaatgagaaagtagacttcctttccagttttctagcttaacacagaaaagatggagaaatgccacctctacacatcacacccagcaaattacaatgcgtgctctgagctttcacttctga

SEQ ID NO: 29750 - DNA, 120 bp, synthetic construct
  source 1..120: mol_type = other DNA
agaaatcaggtcacagggattgtgactttatagatcagagggctggtgagttactcaggaactggaatggtcaagagagggaggtaatatgtacacgataaataataacagcaactccaa

SEQ ID NO: 29751 - DNA, 120 bp, synthetic construct
  source 1..120: mol_type = other DNA
attctttggggcctaggccaaagctgggtttttaagaaaggaacctgcttttgctttgacagttgtctggggacactccagaatcacttttttttttttaagacagggtctcattctttc

SEQ ID NO: 29752 - DNA, 120 bp, synthetic construct
  source 1..120: mol_type = other DNA
catttcaccttttcctgggcctgccactgagatattttacctagtgaccaatgatgaacccatcaaggcgctgaaccttgaaattcccctagcactggggagagtaggataaggtagaga

SEQ ID NO: 29753 - DNA, 120 bp, synthetic construct
  source 1..120: mol_type = other DNA
aatgacatggaggaggacgacgaggcccccaaacaaaagatcttctacttcctgtacgggaagacccactctcacatacccttgcgccctaagcattggttccagttatgccgtcccatg

SEQ ID NO: 29754 - DNA, 120 bp, synthetic construct
  source 1..120: mol_type = other DNA
ttccttcagaaaaacccaacatgccctcagaaaaacccaccattccctcagaaaaacccaccatcctcacagaaaaacccaccattccctcagaaaaacccaccattccctcagaaaaac

SEQ ID NO: 29755 - DNA, 120 bp, synthetic construct
  source 1..120: mol_type = other DNA
aaaaactcaccatccccacagaaaaacccaccatctccccagaaaaacccaccatctccacggaaaaacccaccatccccacggaaaaacccaccatccccactgaagagactaccatct

SEQ ID NO: 29756 - DNA, 120 bp, synthetic construct
  source 1..120: mol_type = other DNA
tctacacttacatctgagaccgcctaccctagttctcccacaagcactgtcacagagtccacaactgaaatcacctatcccaccactatgacagagacatcatctactgccacctctctt

SEQ ID NO: 29757 - DNA, 120 bp, synthetic construct
  source 1..120: mol_type = other DNA
tatctacattggtgaccacattctccaattccgacaccagttctacacctacatctgagaccacctaccctacttctcttactagtgctctcacagattccacgaccagaaccacctatt

SEQ ID NO: 29758 - DNA, 120 bp, synthetic construct
  source 1..120: mol_type = other DNA
gcttcacttcctcaatcaccacctctgagatgccctcacacagtactcccagcttcacttcttcgatcaccaccactgagaacgccacacacagtactcccaacttcacttcttcaatca

SEQ ID NO: 29759 - DNA, 120 bp, synthetic construct
  source 1..120: mol_type = other DNA
ttcacttcttcaatcaccaccactgagaccacctcagagagtactcccagcctcagttcttcaaccatctactccacagtcagcacatccacaactgccatcacctcacattttactacc

SEQ ID NO: 29760 - DNA, 120 bp, synthetic construct
  source 1..120: mol_type = other DNA
taactccagtgttttccactaccattcattctgttccttcttcaccatacattttcagtacagaaaatgtgggctccgcttctatcacaggctttcctagtctctcttcctctgcaacta

SEQ ID NO: 29761 - DNA, 120 bp, synthetic construct
  source 1..120: mol_type = other DNA
ttctatggttccagttgtgagtttgctgtggaacaggtggatctaggtgagttgccagagctatgccttctgcacttcctcccacagggtgtcactgactctccccagacttatccctct

SEQ ID NO: 29762 - DNA, 120 bp, synthetic construct
  source 1..120: mol_type = other DNA
ggtggatattgcagtaaagcgagatttcgccactgcacactagcgtagatgacagagggagagtgagactctgtcttaaaagaaaaaaaaaaatcagctgattgtcttataatccctgca

SEQ ID NO: 29763 - DNA, 120 bp, synthetic construct
  source 1..120: mol_type = other DNA
gacctcaatgacaacacttcccaggcctacagggatttcaacaagaccttctggaatcaggtaaagggcaaagagaggggattttttttttttttttgaggtgtagtctcgcactctcac

SEQ ID NO: 29764 - DNA, 120 bp, synthetic construct
  source 1..120: mol_type = other DNA
ctcaggaatggcagcatcgtggtggactacctggtcctgctggagatgcccttcagcccccagctggagagcgagtatgagcaggtgaagaccacgctgaaggaggggctgcagaacgcc

SEQ ID NO: 29765 - DNA, 120 bp, synthetic construct
  source 1..120: mol_type = other DNA
atcaggcccctgaatagaatggatgaggtccttgtctctgtgcatccccctccccaacccccagccatctgccgccgcgccgctcccacgggctatgaagagttctacttccccttggtg

SEQ ID NO: 29766 - DNA, 120 bp, synthetic construct
  source 1..120: mol_type = other DNA
ggccccacctaggtcctgggaccaggacaggaaatggttcgagacctgggatgaggaagtcgtgggcactttttcaaactggggtttcgaggacgacggaacaggtgagtcctgcctcct

SEQ ID NO: 29767 - DNA, 120 bp, synthetic construct
  source 1..120: mol_type = other DNA
gtttcttactttgaacctggaggcagcctgcagccccatcccatctcctgccctctcctgatctaactccctgctgcatctcttgctctcattccttagacgtcctccccttttgacccc

SEQ ID NO: 29768 - DNA, 120 bp, synthetic construct
  source 1..120: mol_type = other DNA
ccttgatactgggggcttagggagcaattagacccctggtgttggttcagggagttgggtggtccaggggctagggctgcctggtccagccaccttttgcaaggatgggtaaagctgagc

SEQ ID NO: 29769 - DNA, 120 bp, synthetic construct
  source 1..120: mol_type = other DNA
tgatctggattctgacgctggctctccggctctgcgcgtccgttactacagtgacaccaggtgagtgctcctgggctgatgctccaggtccagtgctcctgggtggtaatagtacatgcc

SEQ ID NO: 29770 - DNA, 120 bp, synthetic construct
  source 1..120: mol_type = other DNA
ccaggccccacagacacaacattgtcccctggcagtaccacagcatcatcccttggtccagaatatactaccttccacagccgcccaggctccactgaaacaacactcttacctgacaac

SEQ ID NO: 29771 - DNA, 120 bp, synthetic construct
  source 1..120: mol_type = other DNA
gctcaacgcacacaacagcattccctgacagcaccaccacgccaggcctcagtcggcattctacaacttcccacagcagcccaggctcaacggatacaacactgttacctgccagcacca

SEQ ID NO: 29772 - DNA, 120 bp, synthetic construct
  source 1..120: mol_type = other DNA
aagaatctacagccttccccggcagcccagcctccacccaaacagggttacctgccacactcacaaccgcagacctcggtgaggaatcaactacctttcccagcagctcaggctcaactg

SEQ ID NO: 29773 - DNA, 120 bp, synthetic construct
  source 1..120: mol_type = other DNA
cccgctctgcaacctcagttcttgttggagaacctacaacgtcacccatcagttcaggctcaacggaaacaacagcgttacctggcagtaccacaacagcaggcctgagtgagaaatcta

SEQ ID NO: 29774 - DNA, 120 bp, synthetic construct
  source 1..120: mol_type = other DNA
caacgggaacaatagtcctacctgcccgctccacaacctcagttcttcttggagaatctacgacctcacccatcagttcaggctcaatggaaacgacagcgttacccggcagtaccacaa

SEQ ID NO: 29775 - DNA, 120 bp, synthetic construct
  source 1..120: mol_type = other DNA
acttcgggccacagtgagaaatcaacaatattccacagcagcccagatgcaagtggaacaacaccctcatctgcccactccacaacctcaggtcgtggagaatctacaacctcacgcatc

SEQ ID NO: 29776 - DNA, 120 bp, synthetic construct
  source 1..120: mol_type = other DNA
caacagaggcaacactgtcccctggcagtaccacagcctcatcccttggtcaacaatctacaaccttccacagcagcccaggcgacactgaaaccacactcttacctgacgacaccataa

SEQ ID NO: 29777 - DNA, 120 bp, synthetic construct
  source 1..120: mol_type = other DNA
acagcaccacaagctcaggcatcgttgaagcatctacacgcgtccacagcagcactggctcaccacgcacaacactgtcccctgccagctccacaagccctggacttcagggagaatcta

SEQ ID NO: 29778 - DNA, 120 bp, synthetic construct
  source 1..120: mol_type = other DNA
tcccacagcagcccagatacaaatggaatcacacccttacctgcccattttactacctcaggccgcattgcagaatctaccaccttctatatctctccaggctcaatggaaacaacatta

SEQ ID NO: 29779 - DNA, 120 bp, synthetic construct
  source 1..120: mol_type = other DNA
ctaccaaggctcccatcactcatcacggcctctccctacagaccagaatctgagggagagcagattcggccttgagaacgcctacaacaacttccggcccaccctggagactgttgactc

SEQ ID NO: 29780 - DNA, 120 bp, synthetic construct
  source 1..120: mol_type = other DNA
ctcttctctcccgtcccccagctccacatccagaggccggagatggtagcatccactgtgtgagccaacgggggcctcccaccctcatctagctctgttcaggagagctgcaaacacaga

SEQ ID NO: 29781 - DNA, 120 bp, synthetic construct
  source 1..120: mol_type = other DNA
tttaacaagtatgcctgtcagcaccacactggtggccacttctgcaatcagcaccctttcaacaactcctgttgacaccagcacacctgtgaccaattctactgaagcccgttcgtctcc

SEQ ID NO: 29782 - DNA, 120 bp, synthetic construct
  source 1..120: mol_type = other DNA
tcaacatctcccgttgacaccagcacacctgtgaccacttctgctgaaaccagttcctctcctacaaccgctgaaggtaccagcttgccaacctcaactactagtgaaggaagtactcta

SEQ ID NO: 29783 - DNA, 120 bp, synthetic construct
  source 1..120: mol_type = other DNA
caaggaaatacacctttataagtaatactcaataactactgggtttgagaatgaaggtgtcagaacgaatgagattgtcctatgaaagaagaggcaggagccagggaggaggatcccacc

SEQ ID NO: 29784 - DNA, 120 bp, synthetic construct
  source 1..120: mol_type = other DNA
ctcatgagaactgggctttctctgccaatagttgtgctgtcctgacctaagcttaccttctctaaatgtgtcaatctagaaagagaacagggctttggttttgcaagattaaaaaggtct

SEQ ID NO: 29785 - DNA, 120 bp, synthetic construct
  source 1..120: mol_type = other DNA
ctcctgacatcagtcatcctgtgatctcttagaaagataaaaacacattttctgcgttctggtgcctctccttgccagacattttctcagtaaagtttctgtctcagcctcgttggaagt

SEQ ID NO: 29786 - DNA, 120 bp, synthetic construct
  source 1..120: mol_type = other DNA
gaagttagaaggccggttatccttccattttttactgacagctttcaacgtcgatgctccttctgttgtcatgagaagtaggaaaagacataaaaagtcctaggaaccatttccttggca

SEQ ID NO: 29787 - DNA, 120 bp, synthetic construct
  source 1..120: mol_type = other DNA
cttcttttcatgaagctcctgccatctacaaaacatgtctcccttcttgaatcacttctctgttattgaaactctagaagtcaaccgggcatggtggctatgcctataatcccagcattt

SEQ ID NO: 29788 - DNA, 120 bp, synthetic construct
  source 1..120: mol_type = other DNA
acaaagaattgcatgtcagagtgcctgtctttcacagctttaactgctgcaggaacgaactttttttttttttttttttttgagagggtgtgaggagacacaatctctgctagtgattct

SEQ ID NO: 29789 - DNA, 120 bp, synthetic construct
  source 1..120: mol_type = other DNA
gattgtaattcagaaactgaggtggggcctgatttagctccatcattggaatccattcagatttgaaattctctgggttggacagttcaagagagatcctaaagaaagcaaaatcactat

SEQ ID NO: 29790 - DNA, 120 bp, synthetic construct
  source 1..120: mol_type = other DNA
ctctggcccctactcaattccttcctgcttgtcttttatggccacctgggagagaagaaggtggtggagactgagctggaacagctggggcaaggacgctggaaacacatgcccagcatc

SEQ ID NO: 29791 - DNA, 120 bp, synthetic construct
  source 1..120: mol_type = other DNA
cagccagctcagagcagaagaacagactttctagccaaaaatcccccccaacttttttcccaaaaagtcttcaaggaaagtaacacttttaggaagatacctcatgtggggacaccctat

SEQ ID NO: 29792 - DNA, 120 bp, synthetic construct
  source 1..120: mol_type = other DNA
ttatcctaaatattccataaacattccactatgtagctctgaaagataaggacgcttacaacacaactgcaatatcttttttgtttgtttgtttgtttttgtaaagacggggatttcgcc

SEQ ID NO: 29793 - DNA, 120 bp, synthetic construct
  source 1..120: mol_type = other DNA
ggtcagagggggaaggaggtgactgcatggcaaggcaagagctgaaggccttctggagaaggagggtccagtccttgtccccaccctgatccaggtcactgtggacgcagctgggagctg

SEQ ID NO: 29794 - DNA, 120 bp, synthetic construct
  source 1..120: mol_type = other DNA
gcctcacgtctgcagctccaggaggcagttgggctctgagggtggggagccggccgggctggagctatgggcctcgcggaggtcctgcagcacccggagcagccgggccaatgagtcctc

SEQ ID NO: 29795 - DNA, 120 bp, synthetic construct
  source 1..120: mol_type = other DNA
gctgagcgcatgggaagcactggatcaccttgaagtatcctggcaccagccacatctccagagaccctgagtgatggggccttggcatcctgttttttaaagctgatctttaaaagcatc

SEQ ID NO: 29796 - DNA, 120 bp, synthetic construct
  source 1..120: mol_type = other DNA
tgtgtctgaaaaaaaaaaaaaaaaagaagaagaagaaataaaaagaaatgggattctaacgtgttttcgggcctccttagagccttcagcgaattcactcatatgcatcacacacatcac

SEQ ID NO: 29797 - DNA, 120 bp, synthetic construct
  source 1..120: mol_type = other DNA
ctcgtaggtattccagaacccgccaaatatatttggtggccctgatatcactacttttcccagtggctctggaccctgacacaaaagggaactcctagagggaagggcacagagggacag

SEQ ID NO: 29798 - DNA, 120 bp, synthetic construct
  source 1..120: mol_type = other DNA
ccctcacctagaatcatgcctggaacctaggaggtgctcagtaagtattttttaaataaatgaatgaatgagttaatgaaggaacagatgagaaggttacttgagaacatgcacccagag

SEQ ID NO: 29799 - DNA, 120 bp, synthetic construct
  source 1..120: mol_type = other DNA
tcagccagggcagagcacagactgatggtgaccaagtgcccagcaactgggagaggaggacctggcctctctggggggcactcccagaaggcctcggaggtgtgagctttggggtagtgt

SEQ ID NO: 29800 - DNA, 120 bp, synthetic construct
  source 1..120: mol_type = other DNA
tcaaaaaataattatcatcatctgaggggtctttggtcggaaggggcgggcccctcatctggtgggacccctgagctggttgagaacagggtgggtgatgagctccttcacctactccta

SEQ ID NO: 29801 - DNA, 120 bp, synthetic construct
  source 1..120: mol_type = other DNA
tcggtagtgagggagaagtagagcttcttgaaggaggaggacatgagggggcccttgcccttggtcctgtggatgaagagtggcccctccttcacaggtggcgcctgcaaactcagcgtc

SEQ ID NO: 29802 - DNA, 120 bp, synthetic construct
  source 1..120: mol_type = other DNA
acagaggccatgcccacgggccccctccagccccactagggatcagggaggagaggatcatgaagtttgatgccttatgataactgagaccacttgggccttcctctgtaggtttaactg

SEQ ID NO: 29803 - DNA, 120 bp, synthetic construct
  source 1..120: mol_type = other DNA
acaggaacagtggctctcacagcagccaggacacggacacaggggacaatacacgggtgggcagaagcacaaacacacatgctgacagggcctgatcccaacccgctgccgctgcacccc

SEQ ID NO: 29804 - DNA, 120 bp, synthetic construct
  source 1..120: mol_type = other DNA
ttttttcccttggggccggcttcccatctctctgctcatgccctccattcgggtgccctgcatagctctgcctcccaggctctgcccgggctatttattttctgtttttggaaagccctt

SEQ ID NO: 29805 - DNA, 120 bp, synthetic construct
  source 1..120: mol_type = other DNA
ccttccaagggtccctgagtgccagtggtggtggggggaagttgctggttctggcagacggtggaggtgggggggtagtcccaggcttcctgagtgtccctctttggggaagccggaggg

SEQ ID NO: 29806 - DNA, 120 bp, synthetic construct
  source 1..120: mol_type = other DNA
acttggcctcaaaaaaaaaaaacaccacgaaacacaaaacaaaaacagtagcgactatactgagaaagcagaccttggtgtcttcgtgcccaggactgggccctcgactctggacatttc

SEQ ID NO: 29807 - DNA, 120 bp, synthetic construct
  source 1..120: mol_type = other DNA
agctaaaaataccctgggggttggggggtggccctgtcacaggtgactcaggcccatggaaccatccaaaccactgtccctccttgggggaaccctcaatttgcccatcgggagattttc

SEQ ID NO: 29808 - DNA, 120 bp, synthetic construct
  source 1..120: mol_type = other DNA
ggaagccagtaagcgggacacaaaggctctgatggcagagcccatagcatccaagaactggtttgaaccctcagagaagcccagagaaggcaggagctgcccaaggtcacacacagtgag

SEQ ID NO: 29809 - DNA, 120 bp, synthetic construct
  source 1..120: mol_type = other DNA
cacacgtgtagtccatgcacacttgtgcctgcatgcctgcacacacacgtgtgtatgtggcgcatgcaccatggagccacgcatgtgcacacccacacgctcaagcttttcgccctccca

SEQ ID NO: 29810 - DNA, 120 bp, synthetic construct
  source 1..120: mol_type = other DNA
ggatgaaagttcaggggaccacctcatgccaaccacttctcagacaggtcatctgtttcccttctgtatcaagagcatcagagccatcacacccctctccctcttgctgtctgtggtttg

SEQ ID NO: 29811 - DNA, 120 bp, synthetic construct
  source 1..120: mol_type = other DNA
ttgtccaccttcacgatgcagtaggggtcgctgctgccagtgctgcaagacaaataggcaggggcggggctggagggcgggatcggggcggggactcgcggcaggctcctctctcttttg

SEQ ID NO: 29812 - DNA, 120 bp, synthetic construct
  source 1..120: mol_type = other DNA
agggacagagggagggggtactggaaacctcctgttcctcccgcaggggatagaatgttcctcctttctatgccctcctaccccatccctgcctccccccagaacagctccaagcaacag

SEQ ID NO: 29813 - DNA, 120 bp, synthetic construct
  source 1..120: mol_type = other DNA
aagtgggaagtgtaaccccggctcacaagggagcttccctgggtcctgagacgatagagaaggtcttggaggtgctcagtaaatgttagcactgcctgcatctctgactgtaacctcccc

SEQ ID NO: 29814 - DNA, 120 bp, synthetic construct
  source 1..120: mol_type = other DNA
attgaataggagttttctggaggactgaagtggagtgcttgaaggcagaagtccccacacatgggcgaaagcagagatgtgaagggtagtagcccaaatgtgagggactgtttatgggat

SEQ ID NO: 29815 - DNA, 120 bp, synthetic construct
  source 1..120: mol_type = other DNA
tttccccctcttcctctagagggatttcaacccctagtttaaagaggggaaactgaggctctaggagcagggagctgcctaaaccctgtacatgaggaaggtggtggcaagaccaagatg

SEQ ID NO: 29816 - DNA, 120 bp, synthetic construct
  source 1..120: mol_type = other DNA
agcaatcagatccaggagtgcttaggccccattacagccaagtcccaggtcaccctctctggtccattcccctaatgctgcccacacctttgtaaacgctctcaattgccctgtgagaca

SEQ ID NO: 29817 - DNA, 120 bp, synthetic construct
  source 1..120: mol_type = other DNA
ctgttctgaaaaggttctggagaggccagggcttatctcacagaggttggcagcctgtctgccccatcccctgcctgcctctcccagcctggtagcttcaagatcatttgagcatttcct

SEQ ID NO: 29818 - DNA, 120 bp, synthetic construct
  source 1..120: mol_type = other DNA
taaggtgaaactccatttcaaaaaaaaaaaaaaaagaaactgcgccttttgccttttgtgtactctaggaaaggactggaggaagtggaggcagagggcttgaagtcctccagccaacag

SEQ ID NO: 29819 - DNA, 120 bp, synthetic construct
  source 1..120: mol_type = other DNA
agggggccggaggctggggcgaaagagcccaacagaatgggttcaaatctaggtgtgacatttccagtggtgtgacgtccctccccctctctgggcttctgtgtcctcatttgggaaagg

SEQ ID NO: 29820 - DNA, 120 bp, synthetic construct
  source 1..120: mol_type = other DNA
cagtgtgagatagtagcccctctgggagaagttggcaggagcagggatgtcctggtttgtccgtggggccgtgaagctctgggtggctaagggtggcaccatggtcagacaggtcacaca

SEQ ID NO: 29821 - DNA, 120 bp, synthetic construct
  source 1..120: mol_type = other DNA
acacccagctaattaaaaacaaaaatcttaaaaaaaaaaatctttttgaaaaaaggggtcttgttatgttgcccaggctgggcttaccagagcttcctggggacatgcattgtcctggac

SEQ ID NO: 29822 - DNA, 120 bp, synthetic construct
  source 1..120: mol_type = other DNA
ggcttgtttcccctttttgaaaacacgttcttgctcatcgactcatcctctccttgggtccccagagatgggcagggcaggtgttatgactaatctcattatatggatgagaagaaacct

SEQ ID NO: 29823 - DNA, 120 bp, synthetic construct
  source 1..120: mol_type = other DNA
tcctcccacagtcctggagaggggcctgcatgtttctgcacctggagggccgggccagggtggggaagactggggatgggggggaggctggaccctgcaggttcttggacctgtggtcaa

SEQ ID NO: 29824 - DNA, 120 bp, synthetic construct
  source 1..120: mol_type = other DNA
ctgcttcctctttcagtttgtgccttttctatgagcgagagactcctaggaaagcagcagcccattaggaaaacgtgtgggaactcactcgcaggttctttattttttttgagatggagt

SEQ ID NO: 29825 - DNA, 120 bp, synthetic construct
  source 1..120: mol_type = other DNA
caacaacaacaacaacaaaaaaaaaaaaaaaaagggactcagagagccagggaccagggaaggatatgaggaagtgttctgaggacagaaaaacgggagaatggggaggagaaggagcgg

SEQ ID NO: 29826 - DNA, 120 bp, synthetic construct
  source 1..120: mol_type = other DNA
atgaggtcggtgatggcgttggtaaaggcttcctgggggctgtagtccggcgtggtctgcactcggatgatgatcttgtgctccaaggggtgggggactttgtagccagcaaatagcact

SEQ ID NO: 29827 - DNA, 120 bp, synthetic construct
  source 1..120: mol_type = other DNA
tacttctttctcttgttaaatagaagttctagtctctgccacatacatcttagaggcccaggtggcactgaggtcacaaacgggtggcatgaggggagctaatcttgactgcttttcaat

SEQ ID NO: 29828 - DNA, 120 bp, synthetic construct
  source 1..120: mol_type = other DNA
cagatctatgacaagccccctgcccaggctgcctataccgactgctgcaggacctctgcctggggggtgcagctggcttgttagccgggagggacaattgggtgagggatgcagaaggag

SEQ ID NO: 29829 - DNA, 120 bp, synthetic construct
  source 1..120: mol_type = other DNA
atctggggaggggaggagaggcatggtggatgctgccagaagggtggctgtgtgtgtgcactcaagatccaggtttccacttgtagccctaataagtccacggctccttccctttcactg

SEQ ID NO: 29830 - DNA, 120 bp, synthetic construct
  source 1..120: mol_type = other DNA
gtcaagttttgccaaccatcggaccagccccgggcctctatgatgaaggcatcagagaaaccccatggggccagaaaggggctggggcaacggtgcacctttgggatctggggtcagagg

SEQ ID NO: 29831 - DNA, 120 bp, synthetic construct
  source 1..120: mol_type = other DNA
acagcgtctgtagggagctggggacacttccggccagccatgacaggcccaagcctgctcagctctgcacttctggggatccccttattcctgactctcccccctcccccacctggaaga

SEQ ID NO: 29832 - DNA, 120 bp, synthetic construct
  source 1..120: mol_type = other DNA
tccatggactttgaggccagagagttgctccggaacagggtgttggtctcacctacaaacagaggtcccagtgggtagggggctggcacaaagcttttgggggagggggaggacagagga

SEQ ID NO: 29833 - DNA, 120 bp, synthetic construct
  source 1..120: mol_type = other DNA
ccaccaggcaccttgaggcacctccataatctgggaatcccctaggcacccgtgaagcaggggctggtatccccaatgacagatggggaaactgaggctccgcaggtgaagaaacagcag

SEQ ID NO: 29834 - DNA, 120 bp, synthetic construct
  source 1..120: mol_type = other DNA
ctactcagaagataggcggggtgctggtgaggcacagtgaaactccagtactcagtgagggcctcccatgatctccaaacccctgcccgactctgcagccaaatgctttgcataggattt

SEQ ID NO: 29835 - DNA, 120 bp, synthetic construct
  source 1..120: mol_type = other DNA
gaagaggccaagatgacctagttcctagtgccagtggtggcagggggtgggggatgcttaaaggctgggcctggaggctgagacccttctcagagctcctctgccttcccagcccacaga

SEQ ID NO: 29836 - DNA, 120 bp, synthetic construct
  source 1..120: mol_type = other DNA
acaagcgacagttactaccctccttccctcccccacagtcctgcacctgtcctggcctcctgacctgttctcacttttcatgccagtccctcctacccgagtgcacagcaggaagcccgg

SEQ ID NO: 29837 - DNA, 120 bp, synthetic construct
  source 1..120: mol_type = other DNA
aggcctcagagaacctggagaagccagcctcacatggctgggattttcatcgggagaatcccactggccatgtactgggctctctcccagtccctgagattgggctctgggctcagcgct

SEQ ID NO: 29838 - DNA, 120 bp, synthetic construct
  source 1..120: mol_type = other DNA
gactgcccagagggtccgggggctctggagccagagcttggttccgagtgagtctagaacgtcctcttcaacctgcctggttctctgccgcctcccaacatggccccgaggcatcttcgc

SEQ ID NO: 29839 - DNA, 120 bp, synthetic construct
  source 1..120: mol_type = other DNA
ctggtcttgaactcctgacctcgtgatcaccctgcctcggcttttctttgctgtggctctttcccctctaaactgttctagattcccaggcgccctgctaggaacaggtgtgggccaccc

SEQ ID NO: 29840 - DNA, 120 bp, synthetic construct
  source 1..120: mol_type = other DNA
taggccctccgcagccggcgtcacttacttctcgccctcgaagagcaagaacgactcgaaggctggaggggcgttcatgctcccgccgccgttgcgtccagaccccaagtgtccgccacc

SEQ ID NO: 29841 - DNA, 120 bp, synthetic construct
  source 1..120: mol_type = other DNA
cttgtttcagcaaaccctgacttacgtctcctatttgacttgaggcggcacagtggccaagtcgattggccgtggcaagtgaccctccctgtggctgaagtgttctgaggactggcgaga

SEQ ID NO: 29842 - DNA, 120 bp, synthetic construct
  source 1..120: mol_type = other DNA
gcatttttctaattttatttcactattatttttttaaaagccttaagctatgaatcgtactatcaaactcaagagattcttctgtttttcagaacattgtcattcattcatctctcagaa

SEQ ID NO: 29843 - DNA, 120 bp, synthetic construct
  source 1..120: mol_type = other DNA
tactcttagtgcttcttgcatttgcatagtcaaaacttgatacttttgtgaactttgaaagcatgcaattttgttgaagtcagtcatctttgcttcataattgcaaaatattttcatttt

SEQ ID NO: 29844 - DNA, 120 bp, synthetic construct
  source 1..120: mol_type = other DNA
gactgctttatgcaagtccatcattcttctgttttcttatttagtttttttaaaaaacatagttgggaataatttatgaataatgatgaaataactcctaggatgatgaattagcaaaaa

SEQ ID NO: 29845 - DNA, 120 bp, synthetic construct
  source 1..120: mol_type = other DNA
ggaagaaactagaaggcaccaagagattgaggaactcacttgcgttcacatagctaaaaaaaattgagctgggatttgaccttgggtctttctgatttccaagctcatgctttttccacc

SEQ ID NO: 29846 - DNA, 120 bp, synthetic construct
  source 1..120: mol_type = other DNA
tgcctgtcctgtgtcataaaatgggagccacttgctgcattatcaaggggaaggcaagactgggatgtctagttcacaggaagacctacaccactgtcgacttcacacaggttaactcag

SEQ ID NO: 29847 - DNA, 120 bp, synthetic construct
  source 1..120: mol_type = other DNA
tagaccaaacatctaatggctcatatataatatgagtttatttcttacttgtgtccaggtgtatgggtgggtctttttcattcagtgattctaggttccttccgtcttccggctctgcca

SEQ ID NO: 29848 - DNA, 120 bp, synthetic construct
  source 1..120: mol_type = other DNA
gagaaaatgccaaataagtgataactattattgttattaatgatgaatagtaactgattattattgtcatcttcatcactgtggatatttagttagctggtcacagtgatttttgattcc

SEQ ID NO: 29849 - DNA, 120 bp, synthetic construct
  source 1..120: mol_type = other DNA
gctctcacagcttttttttttttttttttttttttttttttttatagtagctattgggatttttgttgttataggaagatagttggtattttttaatcaactccttttgtagcttttggt

SEQ ID NO: 29850 - DNA, 120 bp, synthetic construct
  source 1..120: mol_type = other DNA
gccactgtttcctctcagttatttatttgttccaatgtttatggtttattgaatattcatgtgttttacttgctattatacaattttatttcttgattgagttttgttatgtactaaaga

SEQ ID NO: 29851 - DNA, 120 bp, synthetic construct
  source 1..120: mol_type = other DNA
ctaagtcaatgggggaatgtattggatctgttccatattctgcagagaatgcactattgctcagaatctcgtaattagaggtagggaatcagagtcaataaagtgattgtgtactaggta

SEQ ID NO: 29852 - DNA, 120 bp, synthetic construct
  source 1..120: mol_type = other DNA
gcaagtagtcttctaaaaaaaaattttaaaaagcatacttatatgcttgaaatagttctggagcctcaatttaatggttaaacctcaagcattcttgcaaggttaaagtattatttgagc

SEQ ID NO: 29853 - DNA, 120 bp, synthetic construct
  source 1..120: mol_type = other DNA
ggggtgagaggagctggacgtttatatccccaatcattagatgcaagctgccccaggaaggagtatgatcttgggccgaagtgactcctttttgctaggtaattcccaaagacggctgac

SEQ ID NO: 29854 - DNA, 120 bp, synthetic construct
  source 1..120: mol_type = other DNA
gggaattatttctcccaagatcttcccaacctagaactctggatatatatttcaatgaattctttgtgctaaatgctgatggttatataacacaaattaggtatatattttggctatatt

SEQ ID NO: 29855 - DNA, 120 bp, synthetic construct
  source 1..120: mol_type = other DNA
tataccctgatggcaaagcaacatctaacatactagtgccgagtacttagagcatgcccattaatgaggaaaagagtaatgaaaggagcaatatatctttcctggccttgcaagttgatt

SEQ ID NO: 29856 - DNA, 120 bp, synthetic construct
  source 1..120: mol_type = other DNA
tttgaaattttcaagaagtacaatttacatgaactgtacaaaacacaggtgataactttgatagcactcaaaatttcagaagaaatgtcccaatctgctttaagaaggacttgtagtcac

SEQ ID NO: 29857 - DNA, 120 bp, synthetic construct
  source 1..120: mol_type = other DNA
gggcatcttatatacttttgagtctgaactacccttacaagggtgtttcaaatctgattattcaaatctatgtctctagccctgactaatttatacatccatctggcaggtagacatagc

SEQ ID NO: 29858 - DNA, 120 bp, synthetic construct
  source 1..120: mol_type = other DNA
ctccctttccacctccccacccctacccaccaaaaaccacaaaatgacttaatctttaaggatacttgattactctgtttggattttaagagttctatgtgcttgaaccataatcacatt

SEQ ID NO: 29859 - DNA, 120 bp, synthetic construct
  source 1..120: mol_type = other DNA
agtgggtgactggattcactagctaaatgactgtaaaactttatcatagttctttattaataaagttacgaatatcagggacctgtctatcttttattgttcaggaggtagagcagtgtc

SEQ ID NO: 29860 - DNA, 120 bp, synthetic construct
  source 1..120: mol_type = other DNA
ccttcagatggatttttgcaattaggcgcatctggctattgagtaaatgaatccagtgcctttttttggtttttcccagatactgatacaagtcagtattcataaggtatatgaaatgag

SEQ ID NO: 29861 - DNA, 120 bp, synthetic construct
  source 1..120: mol_type = other DNA
ggtatatttgtgatgactttattagaataaatgaattctacagtttaactgatgaacttgacaggatcacaagtcaaatataggcagaaccaatgtactaattatgtccactcgaagaaa

SEQ ID NO: 29862 - DNA, 120 bp, synthetic construct
  source 1..120: mol_type = other DNA
atggacacctgggccatttctaattttttggcaactgtaaataaagctgctatgaatatattaatgtaagtcattttatggatgtatatatatttttcctcttgggtaaatacgtaggta

SEQ ID NO: 29863 - DNA, 120 bp, synthetic construct
  source 1..120: mol_type = other DNA
gccttatcagactagctatgaacttcagtataatgttgaatgtagtgatgagagtgtgattccttgcacttgatccctatccttgtccccaatattagggggaatgcattaagtgtgatg

SEQ ID NO: 29864 - DNA, 120 bp, synthetic construct
  source 1..120: mol_type = other DNA
ctcttgataattaattttagttctgataatttgtgttaaacaaaaaaaataggagggcttgttttgctgcatagttttaaaatatcacctttgccttctttcttgaaaacatcttgcgtt

SEQ ID NO: 29865 - DNA, 120 bp, synthetic construct
  source 1..120: mol_type = other DNA
taaagatacctgttcaattccagaaacttgaaaagaactattagatataaacaagctattcttcaaattattccaccctgcccttctgccccttaaagaaatgcagcaagccaggaacag

SEQ ID NO: 29866 - DNA, 120 bp, synthetic construct
  source 1..120: mol_type = other DNA
tatcttctgatagaacctaatttaaaggcactggtctgctagctttctagaccagtgatctttacaacttttgggatagatggccatgcagactatctttccctttgtagtacaaacaaa

SEQ ID NO: 29867 - DNA, 120 bp, synthetic construct
  source 1..120: mol_type = other DNA
acagagtaagaacaaagttttgaataagcagctgttacatacaaataatttaatgttttgcacagtaggcaaaataaaacaaacagaaaactgtaaaacttttgaagattgttagtcttt

SEQ ID NO: 29868 - DNA, 120 bp, synthetic construct
  source 1..120: mol_type = other DNA
acaagtgttcataaagttagcacacttgaaacttgatacatttagacatatcaagccctacaaaaaagtttttaaatccatgattttctacttttgaaagtatgtttggtagaaaaacgt

SEQ ID NO: 29869 - DNA, 120 bp, synthetic construct
  source 1..120: mol_type = other DNA
tctccattatatttattacaggttctattattgtcaaggtcccatcttcacttcaagctcatttacagttatcagggaaagaggttgatgtgaactcagaagtccatgttcaggaaatgg

SEQ ID NO: 29870 - DNA, 120 bp, synthetic construct
  source 1..120: mol_type = other DNA
ttttactttttaaactttgttaaaaacgaagacacaaacacacacattagtctaggcttttactgggtaaagaatgtcagtatcactttcacctccacatcttgtcccactgaaaggcct

SEQ ID NO: 29871 - DNA, 120 bp, synthetic construct
  source 1..120: mol_type = other DNA
tttctttatttgctcagttactcaacaaatgtttgagtcaacactgccggaaactaggagtgcaagggtaatataaagcatggtctcactgccttctgaggagcttacattctagtgagg

SEQ ID NO: 29872 - DNA, 120 bp, synthetic construct
  source 1..120: mol_type = other DNA
agtctctggagggagctgtgagtatgaacaggtgattgggtttaagagaaacttccatatttcattttggttttaaaactgtttggtacccagtcagccacaggccttatgtatcaactg

SEQ ID NO: 29873 - DNA, 120 bp, synthetic construct
  source 1..120: mol_type = other DNA
tacaactccacaatttagatgtttaaatgttcaaagaatattagaggtaaagtgcgttgccagtgaacggattggtgtttgtcattgtctggatagtagggaagctagcactactgggtt

SEQ ID NO: 29874 - DNA, 120 bp, synthetic construct
  source 1..120: mol_type = other DNA
tccccacctttttgttaaagaataagatcttgagagtatcatgggtaatcagatgtcaatgttgttaatgtttgccccaaaaaagaagatcaggttttctttccattcatctgcaaactt

SEQ ID NO: 29875 - DNA, 120 bp, synthetic construct
  source 1..120: mol_type = other DNA
aactggatctcttctacattactggtgggaatgtaaaatgatacagctactctataactcagtctggcagtttcttaaaaaaatagaaaaaaaaagaaactaccattaatcacctagcat

SEQ ID NO: 29876 - DNA, 120 bp, synthetic construct
  source 1..120: mol_type = other DNA
tcccaccagactggaaagaaaatcataactcatggggcattgggtagagcatttagtagtgggaaacaatcagtcttaggctgagcaccactctataattgcctaacaaattataaaagc

SEQ ID NO: 29877 - DNA, 120 bp, synthetic construct
  source 1..120: mol_type = other DNA
tcctcccaaaagttagttcagcctgtacctagaaatgaacaaggacagcttggtgattagaagcaagatggagctggttatgtcagatctctttcactgtaataattttctcagttatga

SEQ ID NO: 29878 - DNA, 120 bp, synthetic construct
  source 1..120: mol_type = other DNA
tttcatgttgtttcatagtgtatgatttattttcctagtgagttggtaagctttgtgagagcactggtgtgtcttttcacatcttttgaacctccctaatatacttagcatggcacttcc

SEQ ID NO: 29879 - DNA, 120 bp, synthetic construct
  source 1..120: mol_type = other DNA
cactccataagtaagaaatatattattggggaggtgataaataatatattaaggaagagatctcagatatgtagaaaagccttactattattgatgctttattattggtgctaaatggta

SEQ ID NO: 29880 - DNA, 120 bp, synthetic construct
  source 1..120: mol_type = other DNA
ggaaaaacgcaatgagctccaggacatagacaagattatggctcagagtgaaagggagagataagaattcagagaataatttgcatcagaaaagcacctgacaaaaagatcagatggtac

SEQ ID NO: 29881 - DNA, 120 bp, synthetic construct
  source 1..120: mol_type = other DNA
tttatattatgcttcattctaggaaagaggaatcagaaatgcaaaccagattaagagtataaaaagcaaccagaggccaggcacggcgcctcacacccataattccagcagtttgggagg

SEQ ID NO: 29882 - DNA, 120 bp, synthetic construct
  source 1..120: mol_type = other DNA
ctgtatttgctttatcacatatccacccactcattcatctctatctatagccctcaatcatcttatttttgtatgcatttcaaagtaagttgcagacaccagtacacttccccccaaata

SEQ ID NO: 29883 - DNA, 120 bp, synthetic construct
  source 1..120: mol_type = other DNA
cccagctctgtgccctgtggtgtatgggcactaaatgtttgatgaaaaaatgagttcccatgaaaaccgtatgatgatcttaaaaaagaaaatggttgtttttcccaaataaccacattc

SEQ ID NO: 29884 - DNA, 120 bp, synthetic construct
  source 1..120: mol_type = other DNA
gctcttgaggccattcacctgccaacctgaccatactgctttcaaaagtcttttctcatcagtagaatctattttggtcacttctagtcaatgaaaaatgtaaacttttaggagagaatg

SEQ ID NO: 29885 - DNA, 120 bp, synthetic construct
  source 1..120: mol_type = other DNA
ctactataacaatttattgatacatctgggattcagccaggtcttatagtatttaaatttataacccctgccatgcttagcattaagtaaatcagtatgcaagcagtatttaaggcaaag

SEQ ID NO: 29886 - DNA, 120 bp, synthetic construct
  source 1..120: mol_type = other DNA
ttggtgtggtacagtctatgcaaatgtacaatgacaggtagccatcatgatagtgtgatataaagtagtttcactgctcagaaattctctgtgctctattcatacttccctccccccatc

SEQ ID NO: 29887 - DNA, 120 bp, synthetic construct
  source 1..120: mol_type = other DNA
ggttcaattttctttaggctcagtgcaaaacaaaaacaaaaacaaaaactactgttgtttattgccgacgtataaatctgtaacctcacaattaaatgttttccactttctcatgttctc

SEQ ID NO: 29888 - DNA, 120 bp, synthetic construct
  source 1..120: mol_type = other DNA
ctagaaatacgtactcagtattctgccacctgaaaaacaggtttcaattttgtatgtttccttcagctttgtctacacgcaagttattttgttcttaggtaattgcccttttatccctaa

SEQ ID NO: 29889 - DNA, 120 bp, synthetic construct
  source 1..120: mol_type = other DNA
ggtatcagttcctctttggaagagagggcaatccttgctttgctcattggtgtatttcaagatttctttatttctggagacctaccagagattttaaatagtagagtctatattagaaat

SEQ ID NO: 29890 - DNA, 120 bp, synthetic construct
  source 1..120: mol_type = other DNA
ctccatcctgaatagggatgcttttccctctaagacagactggaatgatgagtggagatcctgtgattgtttttgtgattttttttttaaggtagtgaagagggcgaggtagcatcaaca

SEQ ID NO: 29891 - DNA, 120 bp, synthetic construct
  source 1..120: mol_type = other DNA
cagagtaggaaagtatggaccaagacaaggacttaaggcaaggcacctctttcttctaaagcctgtttgtagcatctgcaggaactcagattagtgtttcacttgaaatttgcatttctg

SEQ ID NO: 29892 - DNA, 120 bp, synthetic construct
  source 1..120: mol_type = other DNA
aaattatgggtaaggggggactgttgtacattccaatatggaaactctgattaagttaggagatgttgccaatgagatgataaaaaatatacagtggctgtatattttagctttaaatac

SEQ ID NO: 29893 - DNA, 120 bp, synthetic construct
  source 1..120: mol_type = other DNA
tgaagaaagtcattggtagcttgatggggatgacattgaatctaaacccactgcatttttaaggcatctttctttcttaaaaaaaaaaaaaacctttatgtggtgttattggctaattca

SEQ ID NO: 29894 - DNA, 120 bp, synthetic construct
  source 1..120: mol_type = other DNA
aaaggagacatctcaaatcaataaatctaagcttccatctccagaatctagaaaaagcagagcaaaataaacccaaagcaagcagaaggaaagaaataataaaggtaagagcataactca

SEQ ID NO: 29895 - DNA, 120 bp, synthetic construct
  source 1..120: mol_type = other DNA
tgcaagtggaatttatcctgcctatttctcgggacttctgcattgtcaaagtcttggtgaatgttaagttatcaacacaccgagaaaagaaaattagtggtgagaaagggcatccctgtc

SEQ ID NO: 29896 - DNA, 120 bp, synthetic construct
  source 1..120: mol_type = other DNA
aaagaaatgaaagacaatacagaaggtctttcttgccatttgtcctgtgctccagttcatgtaaagaggattttatttgaagctaagcccactggggaaggctcacagcatggtgcagga

SEQ ID NO: 29897 - DNA, 120 bp, synthetic construct
  source 1..120: mol_type = other DNA
atattcataggttttgggggaaaatctgtatggccccatagccatctcaggatataagctaaccactagcacaagacactttgtgtaacaagtggtgattaggcaaacacccacatgatt

SEQ ID NO: 29898 - DNA, 120 bp, synthetic construct
  source 1..120: mol_type = other DNA
aataataataataataaaaagaaaaaggggtgccaagcctaagaccaaaggcaccacgcctggcagttaggagcatgcccttgtttttttgaagtgagaatgaggagtgaatggtattgg

SEQ ID NO: 29899 - DNA, 120 bp, synthetic construct
  source 1..120: mol_type = other DNA
ttttgtttaccaccttgttcttagtacaggtcatgtacagagaactggcacctggtaaacacacactgagtatgtgtggaatgaggagaaagttctgaataggcccactttcttccaaat

SEQ ID NO: 29900 - DNA, 120 bp, synthetic construct
  source 1..120: mol_type = other DNA
ggcaaagtgaagaaactcaggaacgggaacggtcgaggacaggaagtgagtcatcacagactgggacctccaccacatctggcagaaatgcatgaaggagagagagtgagaagtctctag

SEQ ID NO: 29901 - DNA, 120 bp, synthetic construct
  source 1..120: mol_type = other DNA
gtggtgcgttatgtcaccatgcagttgccagtgtgattagtgcctaggggtctccatttagcagaaatggtaatgacagtgatataacgcctggaacctggttgggcagtaggggaggga

SEQ ID NO: 29902 - DNA, 120 bp, synthetic construct
  source 1..120: mol_type = other DNA
cactggatacctttgtagaccttttctctcaagtcccttgagagaaaaaattagatttgtcttcatcaccactatctctggacctgggacataaataacagttacctgactgaagaggcc

SEQ ID NO: 29903 - DNA, 120 bp, synthetic construct
  source 1..120: mol_type = other DNA
gaagttaaaataaatcttgggagactattcccccattactcagaaactcatttctctttggctgtctcttgggatgcattctgaattaatcccttccttcaccagctaatgcacacccac

SEQ ID NO: 29904 - DNA, 120 bp, synthetic construct
  source 1..120: mol_type = other DNA
gcctccatcagagggaagcagaaatgggggcatataaaggaagagagtagaaaaaaagtaaaaggacccactcttgcagtggagagtgatagatgtcatagctgcttttttttttaatta

SEQ ID NO: 29905 - DNA, 120 bp, synthetic construct
  source 1..120: mol_type = other DNA
gtacaaaagacagcattgaataccaagaagcaacacatagcaatggctaaccacatgagatctggtatagcacagatgagttcaaattctagctctaccacttaccaactctgtgaccac

SEQ ID NO: 29906 - DNA, 120 bp, synthetic construct
  source 1..120: mol_type = other DNA
cttggagccccaatgcctggcacacagcataaattcaatactgaacagagattattagaatgaagaattccagggtcaaataatgattctctatttaataaatggtgctgggaaaactgg

SEQ ID NO: 29907 - DNA, 120 bp, synthetic construct
  source 1..120: mol_type = other DNA
aaaagagcaatgttaattatttccttagtatggctgtcaagaagcttaaagccaattttgttagtcacctttactagttgcacagcaaatacccgtatctgcgtgtgcatctgactatcc

SEQ ID NO: 29908 - DNA, 120 bp, synthetic construct
  source 1..120: mol_type = other DNA
gatggtgcctgtgaacagccactgcacactacactcctgcctgggtgacgtagtaagacctgctctctttaaaaaaaaacaaaaaaggtaaatgatggccaaataattcttcgctttttt

SEQ ID NO: 29909 - DNA, 120 bp, synthetic construct
  source 1..120: mol_type = other DNA
gggtgggggctctttattccagcttccaattcaagatgtagagagctacaatgtctaaacctattgaattgctcctttagtccttgagacattatttctcagaagcagccacttaatctc

SEQ ID NO: 29910 - DNA, 120 bp, synthetic construct
  source 1..120: mol_type = other DNA
tcatagctcactgtgaccttgaactcttggcctgaagcgatcctcccaccccaggcctttcaagtagctaggatcataagtgtgtgtcattacacccagctaatttttaaaaattatttt

SEQ ID NO: 29911 - DNA, 120 bp, synthetic construct
  source 1..120: mol_type = other DNA
tcactcccttttacctcatcagcttcacttttctttctcagtactaacatattgtctatttagttgcttgctgcctgctgttgcccattaaaaggcgatttccatgaaagcaggggcttt

SEQ ID NO: 29912 - DNA, 120 bp, synthetic construct
  source 1..120: mol_type = other DNA
catccatccatgctttcaatccttttgagccccagccaaattccagccactgcatatttaagatagtatttggcacatcatcttatctttctctctggattgttaaccctcctaatggca

SEQ ID NO: 29913 - DNA, 120 bp, synthetic construct
  source 1..120: mol_type = other DNA
ttgcaaatgagaacaggatatgatttatttatgacgaccatatgtgtttgatgcccaattgcagcaggttgtggcttctcttgcatatcttggtctgggatgacctatctactcagtgtg

SEQ ID NO: 29914 - DNA, 120 bp, synthetic construct
  source 1..120: mol_type = other DNA
gcacctaatgcagattcagtgctcagccaaaagtagcatgagctatcatactgtaattcatctgttatatggccatttctgcctcctcaactagaatgtcagccctgcaataacagattt

SEQ ID NO: 29915 - DNA, 120 bp, synthetic construct
  source 1..120: mol_type = other DNA
ttagcctgaatttttctgctgaagttcgtgaaccacactgacccctagtcaaggcatgaagcatgctgattaatagtgttgctttggctaggtgcggtggctcacgcctgtaatcccagc

SEQ ID NO: 29916 - DNA, 120 bp, synthetic construct
  source 1..120: mol_type = other DNA
tggcctctgtggatctcctgctgaggcagccttcagctgtagtgcatatccttactttcatgttgttgctatgctgtatccgttttctgtaataaaactgtagatttataagcattgtca

SEQ ID NO: 29917 - DNA, 120 bp, synthetic construct
  source 1..120: mol_type = other DNA
ctcatgttgctactttttcctttacctaatctgtatacacaaactgctttccatgcgatacctttaatgacacgggataaactcttccttcaggacctttgcactggctatttcctctgc

SEQ ID NO: 29918 - DNA, 120 bp, synthetic construct
  source 1..120: mol_type = other DNA
ggccaggaatagactagtgtgtataagacaaattgtatctaacagagttgatttgtagatcacggaggaaaggaatgtggtggttttaaagatatgcccacaaactctttgatacaactc

SEQ ID NO: 29919 - DNA, 120 bp, synthetic construct
  source 1..120: mol_type = other DNA
ggagtagtgggaaagcagccatagacaatctgcatttataaaaagaagtccaaatttggcctttgggctatagttggccaaccgctgcctcagaagaacagatctacatacataaaagaa

SEQ ID NO: 29920 - DNA, 120 bp, synthetic construct
  source 1..120: mol_type = other DNA
attttatgcaaatctgttttatgtgatcatcagttatatataaaagtttctcagttctgttatttgtgaaaagatcaataccagattgaatgactacctattggcaaagggccctaaaaa

SEQ ID NO: 29921 - DNA, 120 bp, synthetic construct
  source 1..120: mol_type = other DNA
cagaagtggacttgttgaatcatgtggtgattctgtttatttttttgaggaactgctgtgctgttttccatggtgctgcaccattttacattcccactaacagttcacaagggttccagt

SEQ ID NO: 29922 - DNA, 120 bp, synthetic construct
  source 1..120: mol_type = other DNA
tttaatgataaaaacttctggcttagaaaatcaaagtatcatatctataatcccccacacagctaagctggcttaatcctgcaaataagaatctacagcctgttttccaatgtgtggatc

SEQ ID NO: 29923 - DNA, 120 bp, synthetic construct
  source 1..120: mol_type = other DNA
ttagctattgcccaaaactactttcttcttttttcttgataaaaacctaattttctcaggcaatggctgataagtagcctgagccgatgttgacaattctgttcctctttgccagacact

SEQ ID NO: 29924 - DNA, 120 bp, synthetic construct
  source 1..120: mol_type = other DNA
agtctattgatttttaagttatttgtttacatattatttcttgaggccattctcagaacacaatcataaaattatctaaaaagctccacacacttgattcttcatcacatccctgcctga

SEQ ID NO: 29925 - DNA, 120 bp, synthetic construct
  source 1..120: mol_type = other DNA
ggacctcacagacatatcatcgtggaaaactatgaataactgaacaacttagcaaaacgaccagagctcatacaagattatctgagttgatctagaacattaagggaactgaatttgtag

SEQ ID NO: 29926 - DNA, 120 bp, synthetic construct
  source 1..120: mol_type = other DNA
ccaattttatacttttcgaaggatatgtgtaccacttgtctcctctccctaaaaagctccccctaagtactgtcaaggttgactgcctcacttcgttctagtctgtactcaaaatgtcat

SEQ ID NO: 29927 - DNA, 120 bp, synthetic construct
  source 1..120: mol_type = other DNA
tgtggtaggaggtctctgaggaaaatgctcttgagtcctcagaaccatagaatcaacacagaagagagacagggtgagggaaatggttatttgttctctactatttatgaagaatgcact

SEQ ID NO: 29928 - DNA, 120 bp, synthetic construct
  source 1..120: mol_type = other DNA
agaagtagatcatgaatgcagagtttaaaaattagccaatgataggctttcatgccaaatattgacatccttacaccgcggaaccgagaggagaggagaggagaggagaggaggagcagg

SEQ ID NO: 29929 - DNA, 120 bp, synthetic construct
  source 1..120: mol_type = other DNA
atggaggctgtgggttaacactccttacagcaggttcgcccttgaaggtagatctgagtcctctgtgtgtgtgtgtgtgtgtgtatatatacatatgtttacatgcagatataatgaaat

SEQ ID NO: 29930 - DNA, 120 bp, synthetic construct
  source 1..120: mol_type = other DNA
ttcatataatggaaaagtattcagcaataacaaagaatgaactactgatatatgcaacaacatgcggcatggatgaaacctcaaaactatgctgagtgagcctctccctctccctctccc

SEQ ID NO: 29931 - DNA, 120 bp, synthetic construct
  source 1..120: mol_type = other DNA
cgaatcgtctcattcctcaatatcaccattatgccttttaaccaccatgatatagagctggatgaaaacacacattatttgagctctgaggttgactctcttccagttagagggggctaa

SEQ ID NO: 29932 - DNA, 120 bp, synthetic construct
  source 1..120: mol_type = other DNA
aatggtgctgagtcaactggataagtgtattttttaaaagtcaggacttctgacacacaccacacaaccaaatctattctagatgaatactagatagaagagtaaaaggcaaagcaaggt

SEQ ID NO: 29933 - DNA, 120 bp, synthetic construct
  source 1..120: mol_type = other DNA
aaacttaaagtataataaaaaaaaaaaaaaagaaagaaaaccggtaactagctctttttccggctggaaccatggtgggtgtagaagagaagaagaaggttcctgctgtgccagaaaccc

SEQ ID NO: 29934 - DNA, 120 bp, synthetic construct
  source 1..120: mol_type = other DNA
atgaggctgtgatggaactgagaaaggccttcaagcccaagcagtttctatatgatatgaactttaccctacatgaactgtgatgcatatattttggctgaagtgcagaaatgtccccat

SEQ ID NO: 29935 - DNA, 120 bp, synthetic construct
  source 1..120: mol_type = other DNA
gaagggtaagcttgtaacaaacggatgggggtcttttatatgctaaggtatttgcccttcatcctatggttaatcaataggggagctttcagatgtattcaagccagatgacactgtagt

SEQ ID NO: 29936 - DNA, 120 bp, synthetic construct
  source 1..120: mol_type = other DNA
gggttcatgttggaaaaaccctgagttctttggtttgtctgaaatgtggtttaatggaaaccaccaaacgtaggttgtaggttggggatggaccgtagagagactttaatatcaatctaa

SEQ ID NO: 29937 - DNA, 120 bp, synthetic construct
  source 1..120: mol_type = other DNA
aagaactctttttctccattaagatttagaactccctttggtgctctagtcatgtacaaccttgcaaaaagacgcttatgtgggcatatcgcccatgctcttcatgggtagcagttgtaa

SEQ ID NO: 29938 - DNA, 120 bp, synthetic construct
  source 1..120: mol_type = other DNA
ttacggactgagtctgtcttcaggatgctttatatatgtgagctcatttatttccattgactaccctatgagttcctttttatgagtgtcgacgattctaaaatccatgtgttttccaga

SEQ ID NO: 29939 - DNA, 120 bp, synthetic construct
  source 1..120: mol_type = other DNA
atgccaactaaagagtagttgttttgagaagaaacaacaggaatttttaaatgtatggcatgacgttgccttgctcaccagccattcaatcattcccaagatacatattctgaatgtgaa

SEQ ID NO: 29940 - DNA, 120 bp, synthetic construct
  source 1..120: mol_type = other DNA
caagcaaaaaaaggaaatgtcatgatgaactggtcttccgagaaacttggtctaggaagtaacgtacaggatgacttcccaaaagcacagactaaagaaacagacaaattaggcgcctct

SEQ ID NO: 29941 - DNA, 120 bp, synthetic construct
  source 1..120: mol_type = other DNA
aacaggaccaaacactaagtacccaacagagacacttgggaggcatagtaaacttcacagaggtgccatcacccaagctgacccaaaaaataaccagttatttttgtcaaaactaagaag

SEQ ID NO: 29942 - DNA, 120 bp, synthetic construct
  source 1..120: mol_type = other DNA
aaaaaacaggagagaaagggacaaaagaaaagccattcctgcaatgagcttctactcaatctttcaaggcccaattccattgtgtgtcatctgtgacatagttccccacctttcctcttt

SEQ ID NO: 29943 - DNA, 120 bp, synthetic construct
  source 1..120: mol_type = other DNA
tcctaatagcaaacagttaacatgagtctgccctacgaataagatcattgcttccaaacgtttttaaaatactcccaatggtattattagtatcatttatagaactagacttgtgtgata

SEQ ID NO: 29944 - DNA, 120 bp, synthetic construct
  source 1..120: mol_type = other DNA
ataccaaaatttgtgggagaaaactaaagtactgctcagaacagtgtttccccaaatgtgctacacactaaaaatcacatagggagtttttaaaaatcccattgtacctcatatcaattt

SEQ ID NO: 29945 - DNA, 120 bp, synthetic construct
  source 1..120: mol_type = other DNA
tgaaatctcatatatttttccactacaggtgctctcagcttaagtgaggaccagctccccaagtcagaaaacatcttaccatctttactccttcctagcaatttattccccctttcctag

SEQ ID NO: 29946 - DNA, 120 bp, synthetic construct
  source 1..120: mol_type = other DNA
gcaaataaattgtgtccagtgaaatgaaatggataattggcctgtggctattaaccagttttgcgtctgtttcacattcatttcagcatccttgattgcccatatatgtgtgctcttaaa

SEQ ID NO: 29947 - DNA, 120 bp, synthetic construct
  source 1..120: mol_type = other DNA
ctttagggcaagaaaaggtgagatccttgactgaactaaggttattcaatctcttgtttactaaaacagtggtaggggtggtttggtctctagcagaagggcaaacaagatggtatcaca

SEQ ID NO: 29948 - DNA, 120 bp, synthetic construct
  source 1..120: mol_type = other DNA
ggaaatacacatattgacagtcagatagctcacttctagtggaactagaatatttaattttcctgtgtctcaagtcctttatctgcaaaagcaggtgaaatgcagatgatcaataaggtc

SEQ ID NO: 29949 - DNA, 120 bp, synthetic construct
  source 1..120: mol_type = other DNA
gcattaaattcacatttcctgaattgtgagcctcctcttcttttccagtaatgctctcctacattacttctactccatgtagtcactggtccccaaaaaggagcatggtaatgagactca

SEQ ID NO: 29950 - DNA, 120 bp, synthetic construct
  source 1..120: mol_type = other DNA
attataaaggagcatgtgggagatgtctcaatctgatatgtgctgatcctgctccaagccaaggaagcaagagcaataaaagctaccctggaaacaaggtacaagtggttgctattttca

SEQ ID NO: 29951 - DNA, 120 bp, synthetic construct
  source 1..120: mol_type = other DNA
agcccccaaaagatactggagtagctctttctcttccattcctcattccagaatacaaataatcagggtggggggaggggtgaataatatgtgccagtaaacacaatactatgattttct

SEQ ID NO: 29952 - DNA, 120 bp, synthetic construct
  source 1..120: mol_type = other DNA
aaagtaatgaaaagttataagggaggtagtcaaccagtaaacagctttgttttcactggtccataaaaatttactgtctaggaggaggagccaagatggccgaataggaacagctccgga

SEQ ID NO: 29953 - DNA, 120 bp, synthetic construct
  source 1..120: mol_type = other DNA
acacatccgtagctgcacaacctatggaaagcataaacaaataccatgactctatcaccatgtagtacagaagccaattttaaatgcaagctaaaggagacacagtagcaaataatgcta

SEQ ID NO: 29954 - DNA, 120 bp, synthetic construct
  source 1..120: mol_type = other DNA
tctccacattagagatgaaggtaaagctcacaaaaatacctacagttaaaatgggtaagagtggtgagttaaacaccatctccctgacttccaattcctcatattagatcagctccccgc

SEQ ID NO: 29955 - DNA, 120 bp, synthetic construct
  source 1..120: mol_type = other DNA
taatatcttctggcaagggtagattccagtactctccttccccaatcctaaaagattctaagttctgtaaccagatgaccttctcagtgttaaattactctccccttaaaaactgatccc

SEQ ID NO: 29956 - DNA, 120 bp, synthetic construct
  source 1..120: mol_type = other DNA
ctgatccctctcatatactgctggtgaaaatgtagaatagatagtcactgcggaaagcaggttgggtgttgcttataaaactaaacatgcacttacataacctaatagctacactcttgg

SEQ ID NO: 29957 - DNA, 120 bp, synthetic construct
  source 1..120: mol_type = other DNA
ttaagtaagaaagattctctcagttggtcttacttcctggaccaagagatacattgacaactagtaagtctcttgtccttgctttctttggcagcatttgtccccgattctcattctgcc

SEQ ID NO: 29958 - DNA, 120 bp, synthetic construct
  source 1..120: mol_type = other DNA
gctgatgtgcagacattcagcttcctcataataagtcccaggttttgcctaggatggaggaattcctgcctagcaaacaatgagcagtctttaagatcaaaattgattactctagagaag

SEQ ID NO: 29959 - DNA, 120 bp, synthetic construct
  source 1..120: mol_type = other DNA
ttctgaccatttggcttacagtggattttgtgatagagatgcatacagggcttctggctttatacatctaagctgaaaaggtgaggggatgtggaaatgaatcctagaatctgcagtaaa

SEQ ID NO: 29960 - DNA, 120 bp, synthetic construct
  source 1..120: mol_type = other DNA
cttagtggggaaacagacatgtaaacaaacctgagtgaggtcatgtaatcaaaggacaggccacagtcaaccacaaagaagagagttctcagcagtctccaaagccgaacatatgtttac

SEQ ID NO: 29961 - DNA, 120 bp, synthetic construct
  source 1..120: mol_type = other DNA
gtttaaattcccagcccttatgtgctttgcagctgttagttcctcttattacaattgtctatttaaaaacctagtcacagcccggtgcagtagctcacgtctgtaatcccaacactttgg

SEQ ID NO: 29962 - DNA, 120 bp, synthetic construct
  source 1..120: mol_type = other DNA
gtgagctacgaacacatcactgcactccagcatgggtgacagggggataccctgtctctcaaaaaagaaactaaaacaataagatagaatcttatgggaccaccataatatattcagtct

SEQ ID NO: 29963 - DNA, 120 bp, synthetic construct
  source 1..120: mol_type = other DNA
taaaaccttaacagttagatggttcccaaatgctgtttcctaggctgactgtgttagaatcatcgaaacatggatttctggtcttcattctcaaacatctcaaacatatagtcatagatc

SEQ ID NO: 29964 - DNA, 120 bp, synthetic construct
  source 1..120: mol_type = other DNA
gcaagcatcattgattggtcatgacactcttgcaggattagcatcagccactaaaggttggaatgttgtccactcagaacacttcatcagtgcaaatgttttccatgtaagtatgagtaa

SEQ ID NO: 29965 - DNA, 120 bp, synthetic construct
  source 1..120: mol_type = other DNA
tatcacttttaagtgggacgtaaataatgagaacacatggacagaaattgggtaataacaaacactggggcctacttgaaggaggagggtgggaggagggagaggttcagaaaaaaaaaa

SEQ ID NO: 29966 - DNA, 120 bp, synthetic construct
  source 1..120: mol_type = other DNA
tcctgtatgtcagcactctcctcctactcctttcctgcgctgccacgcgttcatgttttccagggagctctattcactgccctctccctccttgctcgaagctatctttttttttttttt

SEQ ID NO: 29967 - DNA, 120 bp, synthetic construct
  source 1..120: mol_type = other DNA
ctttcactgattgcagtagcttaggagtgaaaaacaacacaactgctccaatgtatggcaatgggcaaatatcccgatttattcacagggtggcatgttaggcagtgcttagaataaatg

SEQ ID NO: 29968 - DNA, 120 bp, synthetic construct
  source 1..120: mol_type = other DNA
cagagccttggttgacatagttaattaaaaataaaacattgtatataaagcacagaatgagcagctacacaaagctgctcaatcaatgacagctctatatgggttagggtttcttgtggg

SEQ ID NO: 29969 - DNA, 120 bp, synthetic construct
  source 1..120: mol_type = other DNA
gccattagtcagagtggtaaattgagatttaaggaacaggaagaaatttcctaacgtcacacagccaataatggcagtctggactttagttcctaagccctgtgtcagaaccacagaatt

SEQ ID NO: 29970 - DNA, 120 bp, synthetic construct
  source 1..120: mol_type = other DNA
gccatttaaaaaaagtggtgttggtttgagttgagatttttggagtttatgatcactgaggtggcattgatgggtactgctatgtggggtcaaacttgggtcctaaaggaaccctgtatt

SEQ ID NO: 29971 - DNA, 120 bp, synthetic construct
  source 1..120: mol_type = other DNA
ttaagcatacatttgccatttgttgaaaatcaactgaccaaatgtatattggtcaattttcaaactctgtattgttttccatcagtctatatgcctgtctttatgacaacatcacactat

SEQ ID NO: 29972 - DNA, 120 bp, synthetic construct
  source 1..120: mol_type = other DNA
atttggctctctgtttgtctgttgttagtggtttgcatttcaaaagaggaacccagagcttaggaagtttgaatctttaataatgtgcagtgagtatgcctaccatttgccccagaggga

SEQ ID NO: 29973 - DNA, 120 bp, synthetic construct
  source 1..120: mol_type = other DNA
attttgtggtgacctagcctaatatgataaaaggataggcaaattgaagactcagaggcctcagttctgggcctgccctgtcattaacagcatgatcccacttctgttatttaactcttt

SEQ ID NO: 29974 - DNA, 120 bp, synthetic construct
  source 1..120: mol_type = other DNA
tgttgtttcttttagcagtacggccattctctacaaccagaaactttagaaacatctttcacatagcagaccctcgttttctccaagatatgcagtcagttcttctggctcactcctgtc

SEQ ID NO: 29975 - DNA, 120 bp, synthetic construct
  source 1..120: mol_type = other DNA
tatatctggaaaagctatccttttacagtcttaataaaagggctttttccgccatctagatacttagcttcttacatgttaagacacatctaggatattactatttttaaccacagcaac

SEQ ID NO: 29976 - DNA, 120 bp, synthetic construct
  source 1..120: mol_type = other DNA
aaatatactgacttagctgtcctgaatgacctaattaggttggggaggggacttggcctggttctccagttctgtgaagctgccacctccagcctcactctaaatagcttatacaaaatc

SEQ ID NO: 29977 - DNA, 120 bp, synthetic construct
  source 1..120: mol_type = other DNA
attactggtcaagatattaaatgagtgaccctcaggctgtatcacatacatggcagaccttcaaataacagctgaaagaatacattgcacgtgcttttaaaggattatttgctactcaaa

SEQ ID NO: 29978 - DNA, 120 bp, synthetic construct
  source 1..120: mol_type = other DNA
cctcttactacagggttacctatagcatgcacaccagaattactagtgtgttttttaaaatgcaaactcctgagccaactgcatacctggagaatcagaatccctaggagtgggattaaa

SEQ ID NO: 29979 - DNA, 120 bp, synthetic construct
  source 1..120: mol_type = other DNA
taaattggctgtaaatctctgtgtgattaaagaaactgaagatgtttccaactttttacacactatagatttacattcaagacagcaagaaccccctacaaattaataagtggaaatgaa

SEQ ID NO: 29980 - DNA, 120 bp, synthetic construct
  source 1..120: mol_type = other DNA
aaatgtatcttaaaactataaaaatgtttgaaaagtccctagtagatgacctcaggactcttccaaatccagcattccgtgcgccatgagtttctagagcctggagacaacagatgcagg

SEQ ID NO: 29981 - DNA, 120 bp, synthetic construct
  source 1..120: mol_type = other DNA
agcaccttggcctgagaacagtggctgctgatacagtccttttttcaattgttgaaatcttataatcacatcaatattttgaccccatatccctcctctgagctccagacccaaatagtt

SEQ ID NO: 29982 - DNA, 120 bp, synthetic construct
  source 1..120: mol_type = other DNA
ttgctttcaaaagatccttccaacttttctaaatcccttatgattaatctaaacccctcatatcaaatctaaagcccttagaccaggccaggcatggtggctcatacctgtaatcccagc

SEQ ID NO: 29983 - DNA, 120 bp, synthetic construct
  source 1..120: mol_type = other DNA
aaaaaatcttcctaagccacaatcagtcattgaaagtttgcatatgcattgccttcctaatacaagtcctatgatggttaactctgagtgagtctgtggttaactctgagtgagttccca

SEQ ID NO: 29984 - DNA, 120 bp, synthetic construct
  source 1..120: mol_type = other DNA
atccatactgaaacaggaagtacttaagagcaaggtagaaccaacacgccctgcaggacgcctggatgacacctcacagatagcagatacctatttacaagataaattcatccatatttt

SEQ ID NO: 29985 - DNA, 120 bp, synthetic construct
  source 1..120: mol_type = other DNA
ctagcggattccaaaaagccaaatcctaacctgataatgtagagagttcagtaccatccctagttaataccaaagaatccttgaaaactggactaagaaaatgtggcacatatacaccat

SEQ ID NO: 29986 - DNA, 120 bp, synthetic construct
  source 1..120: mol_type = other DNA
gcactgattctcacctgaagccagcaactcttagagtctctacagtctcacccaaagctcttgatgtaactcctgagtcttgctttcaggggcaagaactttttttttttttttttgatg

SEQ ID NO: 29987 - DNA, 120 bp, synthetic construct
  source 1..120: mol_type = other DNA
ctggctacttcttttgcatgtgtcctttgacccagcatccaagaaacagtgactaatttattagtttgtacatagggtaaaacgccagacccctcacagttcctgatacttactagctat

SEQ ID NO: 29988 - DNA, 120 bp, synthetic construct
  source 1..120: mol_type = other DNA
ccactgaccgtcaggtactgtatattctcattttgataaatttcaaattaatgataaaaatgtattaacctgctggtcaattatacattttataaatatattttaaccaatgacatatta

SEQ ID NO: 29989 - DNA, 120 bp, synthetic construct
  source 1..120: mol_type = other DNA
gataaaagtgtggcacaaaaaggttaatcaagtagcagaggcaggatttgaacccaggaattctggttccagggcccggattcggagttacaaaggtgagtaaactgaaaagagtcctac

SEQ ID NO: 29990 - DNA, 120 bp, synthetic construct
  source 1..120: mol_type = other DNA
aattcaaaacgagtctactcaacctcgtcttggctccgaggccccgccatgcagacccctctagttttttactattaaaaatagtgctgcaacaaacattttatacatctatctctgtat

SEQ ID NO: 29991 - DNA, 120 bp, synthetic construct
  source 1..120: mol_type = other DNA
tgggataccattttgaactcccaggaccaagaatgagcatgacgagcattttgacaagaaatatggataaacagaggcaaaaacgtttgcaggagcaaaaacagcaggagggatacgatg

SEQ ID NO: 29992 - DNA, 120 bp, synthetic construct
  source 1..120: mol_type = other DNA
aaatgccccagctcagtgagacctttcctgaacacaccattgaaaattgtaacccccaaccttctaccagtattcctagctttatcacactccttagtatctaacacattatatcctaaa

SEQ ID NO: 29993 - DNA, 120 bp, synthetic construct
  source 1..120: mol_type = other DNA
gcttccaaataaaagatgatgtgatgtgatcgtagtattcattaagagatctatctaatctagttccctgagagaactgacctgtgctagtccaatatctcttggcatactctgcttcat

SEQ ID NO: 29994 - DNA, 120 bp, synthetic construct
  source 1..120: mol_type = other DNA
gcattcttatacaccaacaacagacaaatagagtggcatttaaagttctaacagaatatagagaaagggcccagggaattgactcacacttatgctatgtaggaaaaggagtgcatcata

SEQ ID NO: 29995 - DNA, 120 bp, synthetic construct
  source 1..120: mol_type = other DNA
gcatagctgcaataattatgaggaagaaaataaatcataatctccctagttttgtaatttctcatcgtctaattttctgagaacttgggtgactggtgctgcatagacatatcactttgg

SEQ ID NO: 29996 - DNA, 120 bp, synthetic construct
  source 1..120: mol_type = other DNA
gcaacctggtccaagatgaatcctgtggcattgggtttatctgttaacagtttataagaagaccacattctagatcaactggagcaaaatacttcaactttttacaccagggaaccaggg

SEQ ID NO: 29997 - DNA, 120 bp, synthetic construct
  source 1..120: mol_type = other DNA
ttgaaaacaagccctctggctgctgcacgtagcccactagagagaggggaataaaatgttactgaaataattaagataggagcaatctagtggggaagaacaggtttgcaagatatttca

SEQ ID NO: 29998 - DNA, 120 bp, synthetic construct
  source 1..120: mol_type = other DNA
ggtgtctaaaaaaataatttgccttaagacaacctttctaggaaatggtgaagatctgtttcaaacccaggcctgcctcatgccaaagcctatgaccttttcactattaatgaccaaatg

SEQ ID NO: 29999 - DNA, 120 bp, synthetic construct
  source 1..120: mol_type = other DNA
tgacctctttctcttcctgccctccaatatcctgctagagccttccataggccccacccaagataaacacagagagcagagagtcccagtcatgcaaatgacaagggtcagcttcgcaga

SEQ ID NO: 30000 - DNA, 120 bp, synthetic construct
  source 1..120: mol_type = other DNA
ccttgatttaaaaataaaagccaaaatataacatgaacaaatactctatttgtctgtatcactaagggggtaaggaagaggtcattctgctctttttgagctacttcttattacaatata

SEQ ID NO: 30001 - DNA, 120 bp, synthetic construct
  source 1..120: mol_type = other DNA
ttccaagtctcttttgtctgcttaggcctgattttcctgggctaggtaaacaccctgaatttacaagagaatgttcagcctcattttaactatgcaactggtagaagaagaagaaatagg

SEQ ID NO: 30002 - DNA, 120 bp, synthetic construct
  source 1..120: mol_type = other DNA
cccctcaaatagtataaatgtaattttatttttttagaaaaacaaaacactatggagtcatggcatttataatgaagtaatcaaatattccaattaaatattcaggtaaccaaatattcc

SEQ ID NO: 30003 - DNA, 120 bp, synthetic construct
  source 1..120: mol_type = other DNA
aaccaatatgttatttttgcttcactttatagttggtgattaaaattccaaaatgtattccatcacacataaagtatcataaagagcaaaacaggaaaatatttttcaactatgtggtaa

SEQ ID NO: 30004 - DNA, 120 bp, synthetic construct
  source 1..120: mol_type = other DNA
gtgcattcttaccatcaattgatgctcgtttgggcaaaattgtcacagccccttctgcaatctcctcttgctgatagacaggtgctattttggatccccaactatctgagccaatccaga

SEQ ID NO: 30005 - DNA, 120 bp, synthetic construct
  source 1..120: mol_type = other DNA
atttatttgggggaaactccttggggaggaaatgaggagggagcctgtggagggtgggaaaactgtgagtccacaatgctggtctggtctgctcttgagtgagaaggggaaggggaagga

SEQ ID NO: 30006 - DNA, 120 bp, synthetic construct
  source 1..120: mol_type = other DNA
gtaaaaccagtgtagccaaaccccactgactgaagaattatagctacataaaagataactgtcctgcaagttacttctgtattccttgtgaaaaaaaaaaaaaagagactggctacccaa

SEQ ID NO: 30007 - DNA, 120 bp, synthetic construct
  source 1..120: mol_type = other DNA
gaataatttaaaaagtggtaagatgtctgcatgggacctcagaaactgaccaagtgttcacagtggttcacctcttaccctcttactttgccttgacagaactttagtcaggattctctc

SEQ ID NO: 30008 - DNA, 120 bp, synthetic construct
  source 1..120: mol_type = other DNA
cccactggtcattcccccgttccactggtcatccctccattgcttaatcccttttacaattttaattaagcttttgcttatctctccctaccctatataatggaagcctctttctttttg

SEQ ID NO: 30009 - DNA, 120 bp, synthetic construct
  source 1..120: mol_type = other DNA
atgtgctccttctgtataaaatacaccaacttccacttccacatgacagcacctcattttaaagctaaggctaaatattcttacccaccaccctcagaacactgctaccaccagaacaca

SEQ ID NO: 30010 - DNA, 120 bp, synthetic construct
  source 1..120: mol_type = other DNA
cctaggtgaaaggatactgtgtaatctgatcctagcattctggtgtagttccatatatttatacagtctagtgctttttgcctctcccagactaactcagtctcactgtttctcctggta

SEQ ID NO: 30011 - DNA, 120 bp, synthetic construct
  source 1..120: mol_type = other DNA
ttgggggagtgctcatcattaaaaaacaagcttagaccagagaatgcaaatcctattttgataatatgtgattacttgtctgctgttttgcatgctgtatttgagctacttgaattgtag

SEQ ID NO: 30012 - DNA, 120 bp, synthetic construct
  source 1..120: mol_type = other DNA
tgtgaccccctcattacaagcaccatggaaagtaacctgttaaagctcaccttgaagagcagtgctctaaggtataagttggcaaacttttcttcaaagggccagatggtaaatattttc

SEQ ID NO: 30013 - DNA, 120 bp, synthetic construct
  source 1..120: mol_type = other DNA
gtaaaacagcagagtctttcctgttagaattttattactttgctgccagtttaattttctgatttctttctggtgtctttctcccttttttcattctcgccagttcagtgctgactaacc

SEQ ID NO: 30014 - DNA, 120 bp, synthetic construct
  source 1..120: mol_type = other DNA
ctgtgtgaaaatgcaaagcatgggcagggtgcagcaagttgttcactttggatggaatgtggatggtggctgagtacccagagataagactagagcggcatatttcttttcttttttttt

SEQ ID NO: 30015 - DNA, 120 bp, synthetic construct
  source 1..120: mol_type = other DNA
tagcttcccttcccaaatcctgtagcacccttctgcaatcagaaacactgagaacctcagtcagtcaccctcggtttcccccatgctcccagtgggtgttgcacagtcattagatctgtt

SEQ ID NO: 30016 - DNA, 120 bp, synthetic construct
  source 1..120: mol_type = other DNA
tcaggaagttgtctgttgttccctgctttagagtatggtaactaaaaaataaatagatgaataaggcaaatgccattcttgacccacagctggcccaggattcaagctactcaggatagg

SEQ ID NO: 30017 - DNA, 120 bp, synthetic construct
  source 1..120: mol_type = other DNA
cttgagagtagcctctcatatcaatgcttccctgctatcctttcaaaactctttttgatgggataagtgggcaaagatcatgccatcgtctcaaatgctaacttcctttgacaagacagt

SEQ ID NO: 30018 - DNA, 120 bp, synthetic construct
  source 1..120: mol_type = other DNA
agagacctttgtcccatgggataggtaagatgagcagaaaatctgaaaccagtggcttgaaaactgtttaccacagaatttcctgtatgggtcccatacgtgtacaacacacttattttg

SEQ ID NO: 30019 - DNA, 120 bp, synthetic construct
  source 1..120: mol_type = other DNA
gtaactcagaaaattagtgacctggaaatttgtgctgatgagtttcctggatcctcagccacctaccgaatactggaggtaaccttttattgtcttggtagtgggatatgtgaagctatt

SEQ ID NO: 30020 - DNA, 120 bp, synthetic construct
  source 1..120: mol_type = other DNA
caaggtctctggctgtgttcttatacggtctgtgttcttacggtctaaaagtaaaagatttactgataacgagcataccttgttttattgcagttcactttatcacactgtacagatgtc

SEQ ID NO: 30021 - DNA, 120 bp, synthetic construct
  source 1..120: mol_type = other DNA
tcagtagtgggggtagagcggacttttcttccaataggaagtcagagaatctaacaggagattcttggccttggcacgcagttaaggatcagttaatagttgttgaatagatcaaggaga

SEQ ID NO: 30022 - DNA, 120 bp, synthetic construct
  source 1..120: mol_type = other DNA
tcagcctgcttcacacagagtggggcccttccttcctcagccaggacagggcacatcgtctgtcatctcccacacaccaagcacagctaggatagcaggtgcacacatagggttgcatac

SEQ ID NO: 30023 - DNA, 120 bp, synthetic construct
  source 1..120: mol_type = other DNA
tggtcacttatactcccatggcccctggcaactacctcattgccatcaagtacggtggcccccagcacatcgtgggcagccccttcaaggccaaggtcactggtgagtgccagtttgggg

SEQ ID NO: 30024 - DNA, 120 bp, synthetic construct
  source 1..120: mol_type = other DNA
ctccatccccaagttctcctcagatgccagcaaggtggtgactcggggccctgggctgtcccaggccttcgtgggccagaagaactccttcaccgtggactgcagcaaagcaggcaggtg

SEQ ID NO: 30025 - DNA, 120 bp, synthetic construct
  source 1..120: mol_type = other DNA
tttctctctcactgtctctttttttaaaatggttgcacggctctgccccatggggggccttttttacacactgcgaggcccagctttctaggggacttttgcacatgtcatgcagctcag

SEQ ID NO: 30026 - DNA, 120 bp, synthetic construct
  source 1..120: mol_type = other DNA
aaaaaaaaagaaagtgagattgagttcaaagggaagtcattgcaaggaggcagtgccagtactaaacttaatacctccgtcctgtgtagacacatccactttgttgaatggaaagctggc

SEQ ID NO: 30027 - DNA, 120 bp, synthetic construct
  source 1..120: mol_type = other DNA
aagtctcctttttcagattttgaaagtcaggttagtaaatttcttttaggatactacagaccagggcctagtggatgggctaagtcagttcctctcaaacttcagagtgtgcagcagtca

SEQ ID NO: 30028 - DNA, 120 bp, synthetic construct
  source 1..120: mol_type = other DNA
gtgcaagcaaaaattagattaaaaaaaaaaaacatcctgactgcatttggtatagttaaaaaacaagcacacacacactaaactggaagccagaagatggactctgcaactagtgcgtag

SEQ ID NO: 30029 - DNA, 120 bp, synthetic construct
  source 1..120: mol_type = other DNA
tcaagatcacccaaagctgcactatcgtcccaaagctgaccaagtagaataaaaagaaaaaaaaaaaaaaacaacccatgcgcaaagatagacatttgcttgatctgctggctcagggcc

SEQ ID NO: 30030 - DNA, 120 bp, synthetic construct
  source 1..120: mol_type = other DNA
actgaagttgcctagaagttactctgctatgtgaggattggctaaaagtgacagacatttcctagggaaacatgaatgaaaatatcacaggggaagagaaagagaagatggaggctggaa

SEQ ID NO: 30031 - DNA, 120 bp, synthetic construct
  source 1..120: mol_type = other DNA
ggagagtcaggttgagactgggtgcgtttgtgctggcggggcagggggatgagggtgggtaggtggaggcgggacaggagtgagcgctgatgacaaaagtgctgtggtgacaggaagaag

SEQ ID NO: 30032 - DNA, 120 bp, synthetic construct
  source 1..120: mol_type = other DNA
acagacaaggtaggatggtttcaaacagcagatggactcagtacagcatgctggggataaagaggctgtggcaatggtggcagcagtgagggtagggaaggaagaattggatgctgaaga

SEQ ID NO: 30033 - DNA, 120 bp, synthetic construct
  source 1..120: mol_type = other DNA
gtctgtagggattttaaagaacaaatctctcatacagagtggattttgagacatgtgtgtttcagtgagtagacagggaggagaacaaggtgatttcaagcagagagtgcctggcataca

SEQ ID NO: 30034 - DNA, 120 bp, synthetic construct
  source 1..120: mol_type = other DNA
gtcaggttgagactgggtgcgtttgtacccgtgggatgtgggggaagagggtgggcaggtggagtggggacagcagtgagcgctgatgacaaaagtgctgtggtgacaggaagaaggtag

SEQ ID NO: 30035 - DNA, 120 bp, synthetic construct
  source 1..120: mol_type = other DNA
ggaaacaattgtctccagcatagtagaaccaaaaatgtaggacggttaagggtgccttaagatagcagatggatccaatgctgcatattgtggataaaaaggatggcaatgttggcagca

SEQ ID NO: 30036 - DNA, 120 bp, synthetic construct
  source 1..120: mol_type = other DNA
tatgttgagccaagcccccagcattgagaacaccactgtatttaactgatagattatatatgttcagggttgagggtgatgaattcaggctagggaagaccctgaatccagggaaaaaag

SEQ ID NO: 30037 - DNA, 120 bp, synthetic construct
  source 1..120: mol_type = other DNA
gaggatgggcagaaagtgggacacgaatgagtgacaaagacaaaactactctggtgacaggaagaaggtaggagattcagaggcagaggctccccagagtgtttttccacagtgtgaaag

SEQ ID NO: 30038 - DNA, 120 bp, synthetic construct
  source 1..120: mol_type = other DNA
aagattcctgagtctgtggattgacctggcggagacagggcacgcaggactggatgttgaagaggaggtggagcatgtctggaagatgaaagtgggaggaaacagtggtgcaggaattaa

SEQ ID NO: 30039 - DNA, 120 bp, synthetic construct
  source 1..120: mol_type = other DNA
gacgggcagagagcgagacacgagtgagtgacaaagacaaaattgctatggtgataggaacaaggtaggagattcagaggcagatgttccccagagtgtttttacacagtgtgaaagaaa

SEQ ID NO: 30040 - DNA, 120 bp, synthetic construct
  source 1..120: mol_type = other DNA
gttcaggacagattcctgagtctgtggattgacttggaggtggcagggcatgcaggactggatgttgaagatgaaaaggagtttctggaagatgacagtgggaggcaacactgtgtgtag

SEQ ID NO: 30041 - DNA, 120 bp, synthetic construct
  source 1..120: mol_type = other DNA
cctctttgacaatcttccccaatgcagtcctcttctcccagctccctaaagataatgactataatgataatttgttatttatctttcccaatataaaaaaatatttaccccccgccacac

SEQ ID NO: 30042 - DNA, 120 bp, synthetic construct
  source 1..120: mol_type = other DNA
ttatttaagcctttaccccatctataacctatttttatgaatgtaagagtccaaatttctctacttctttaaatgttcaggagagctctccctctccctctccctctccccacggtctct

SEQ ID NO: 30043 - DNA, 120 bp, synthetic construct
  source 1..120: mol_type = other DNA
ggcctttcttcatggtctaggacacatagccctcctgcacaaataattcacaatcttcctatgcccaacttatcactagaccatcagctaatagaaaaatgcaagttagctaactgcaac

SEQ ID NO: 30044 - DNA, 120 bp, synthetic construct
  source 1..120: mol_type = other DNA
tagttttatatttgttccatctggtctttgtttctctgcccatctcctctacccccgccccctttctgcctgagtttgggttaactgaacacttttttcctttaataactttggtaccaa

SEQ ID NO: 30045 - DNA, 120 bp, synthetic construct
  source 1..120: mol_type = other DNA
cagttctttccatcacagtaaatgatatcaccacttaccctgttattgaagtcagaaactatgtcatcatccttaatgcctccctctttttcccctgcatccaatctgtcaccaaatccc

SEQ ID NO: 30046 - DNA, 120 bp, synthetic construct
  source 1..120: mol_type = other DNA
aactattatttcttctaaaggtgatggggaagataaccgtccaggaatgagaggaggccatcagatggttattgatgttcaaacaggtgagtagcagttgcagtggaaagcaaaatcttc

SEQ ID NO: 30047 - DNA, 120 bp, synthetic construct
  source 1..120: mol_type = other DNA
actgttcgtccatcaaggctctcagatagtccacagaccaggaaatgtgaagccacagacgattaaagcagacagactacacctctcattttctcttgcttttcttttctttctgtaaaa

SEQ ID NO: 30048 - DNA, 120 bp, synthetic construct
  source 1..120: mol_type = other DNA
gctggacccattccagagccaggtatgtcctggctgcgtggcttgagggcagctcaagccaggaccaggctaaccagggagagggaggagggaatgggtaagtgctgctcaaagccccag

SEQ ID NO: 30049 - DNA, 120 bp, synthetic construct
  source 1..120: mol_type = other DNA
agaaagaaggccttgtatatagtggcaatgaccccaggtgggattttccagtgagggaacaaaacagaaaacacattctatttgttctgttctgttctgttctgttctgttctgttctgt

SEQ ID NO: 30050 - DNA, 120 bp, synthetic construct
  source 1..120: mol_type = other DNA
aaattatgagaatgagagtccacctacctccatgcccctatccaaaaagactgggtagagcatggtcatgtctccttgggaattatctcaaaaagtcaggaatgttttcccaaaagccaa

SEQ ID NO: 30051 - DNA, 120 bp, synthetic construct
  source 1..120: mol_type = other DNA
ttccacatcctttggaacttcccttgggagcccttctagagtttcatttgcaatgacagaaagttcattcttgagtctaacttgcatctttcatgctacaacacaagcccatctactctt

SEQ ID NO: 30052 - DNA, 120 bp, synthetic construct
  source 1..120: mol_type = other DNA
tgcctggcctgcttgcttgtaaatgaaacacatacacatacacatacacacacacacacacacttgtaaatgaaacacatacacacacacacacacacacacacacagcctccagcactg

SEQ ID NO: 30053 - DNA, 120 bp, synthetic construct
  source 1..120: mol_type = other DNA
cacatacacagatgtgcatgcacacacatatgcacacacgcacacacacatggcctccagcatggggccactcagtaccttccttgcactccagggccacacgggactccaggttgtcca

SEQ ID NO: 30054 - DNA, 120 bp, synthetic construct
  source 1..120: mol_type = other DNA
ttctcttgttctgtaacttgcagtacctcttcaaatggtacttgtgcccatcttaaagtatccccaccaaccttcccagagaggaaaggaaaggaaaggaaaggaaaggaaaggaaagga

SEQ ID NO: 30055 - DNA, 120 bp, synthetic construct
  source 1..120: mol_type = other DNA
agatgttgggttcccagcatctctgtgcctctctaatgcatgaatgactgatgcatagaccaagggaggcagacactagctagtatcaacactatattaaacacaagtaaaaccagattt

SEQ ID NO: 30056 - DNA, 120 bp, synthetic construct
  source 1..120: mol_type = other DNA
gctgacttgatgtccttgggattgaacatctggagccaaacatccaaattaatggggtcgcgggcagctgccctgtgaagccagaaatccaggttagggaggtgggggctcagctctgtg

SEQ ID NO: 30057 - DNA, 120 bp, synthetic construct
  source 1..120: mol_type = other DNA
cctctgcttatgagttcacaaagccaatctgagggatccttcaaaacatcctctaaaactcaactggatgcccctcttcctcctcctcctccttctcctcctctttctccttcttctcct

SEQ ID NO: 30058 - DNA, 120 bp, synthetic construct
  source 1..120: mol_type = other DNA
cttctcctcctccttctcttcctctttctcctactcctccttctcctcctcctcctcttctttctctgcctccttctcctcctcctccttctcctccttctcctcttcctcctcttcctc

SEQ ID NO: 30059 - DNA, 120 bp, synthetic construct
  source 1..120: mol_type = other DNA
ccgagaagcagagaaaagtcatgacattagaggaaaaaaaagttgaattgcttggtaagtaccatagattgaggtctgcagctgcagtttcctgccactttgagataagtgaatccagca

SEQ ID NO: 30060 - DNA, 120 bp, synthetic construct
  source 1..120: mol_type = other DNA
cagcttctgctgaccaagaaacagcaaaccagttcccagatgccattaagaaaatcattgagaagaaaggataactgcctgaacagatttttaatgcagacaaaagtgccctactctaga

SEQ ID NO: 30061 - DNA, 120 bp, synthetic construct
  source 1..120: mol_type = other DNA
gatggtaagtatgggtgactccagatgccgactgcctgcgttcaaattccagctcctctgctttctggctatgtggctataagcaagtgacctctgtgtttcggctacttcatctacaaa

SEQ ID NO: 30062 - DNA, 120 bp, synthetic construct
  source 1..120: mol_type = other DNA
ggtgggtgtagggaagtcacgtagggtcttgtaggtcactggaaagacattgattttaactatcggtataatgggagaaatgattgtaatgctttgagcacaggaataacatgatgtggc

SEQ ID NO: 30063 - DNA, 120 bp, synthetic construct
  source 1..120: mol_type = other DNA
gttggtcctggacctcacttgcttttcttattctgcatattatccccgagtgatctcatctcctcaaatatttatcacttttaaaatttccagtatcattctctctgctgagctccagac

SEQ ID NO: 30064 - DNA, 120 bp, synthetic construct
  source 1..120: mol_type = other DNA
attaatctcagtgaccagagggatgacgttgagttctgtctgttctttgtccatgaggaatttccgtgtggacaaaatgtgagggaggtatgtagctttttaaaaaaatcttggtagcta

SEQ ID NO: 30065 - DNA, 120 bp, synthetic construct
  source 1..120: mol_type = other DNA
cttggacataatagtgagaggtgacaacgtgctagcagccctcggtcgctctctgtgcctcctcagccttggcatccgctctgggccctctttggggctggcagaggctgaagccggctt

SEQ ID NO: 30066 - DNA, 120 bp, synthetic construct
  source 1..120: mol_type = other DNA
agccctaccttcaaatagtccctcttagccatttcatctgcttgggtgtatcctcctcaccatcccttttccttattccctagaagccaataaaaaaaaaaacttgcctgttggcattaa

SEQ ID NO: 30067 - DNA, 120 bp, synthetic construct
  source 1..120: mol_type = other DNA
cttgtgagtgtcaagaattccatgatagcgacttgaaaatccctattctgtgtccttccagagaaaaaacttgctcaggtcttgggaagaccagcgctgtgtaagatacttatttggttg

SEQ ID NO: 30068 - DNA, 120 bp, synthetic construct
  source 1..120: mol_type = other DNA
gatagataggtaaagtgcagtacataatcaggtgctacttgtacagtatagactgtgagggcagaaggaacaaaaaacaagaaagagaaaggggttgtagtcgggaatggttttgcaggt

SEQ ID NO: 30069 - DNA, 120 bp, synthetic construct
  source 1..120: mol_type = other DNA
tccatcaatgatgagtggataaacaaaatgtggtatatccatgcagcagaatattatgtggccatagtggacttgaagtactgatacgtgctacatgctgccaagtctgtcctgcagact

SEQ ID NO: 30070 - DNA, 120 bp, synthetic construct
  source 1..120: mol_type = other DNA
tggcctttgcttggtggactttttttgtgtgtagaactccctaggaacaatgcaaaacagagccggctttccccgtgatgaggattgtttgctgttgcaggttgagtgtcacccatacct

SEQ ID NO: 30071 - DNA, 120 bp, synthetic construct
  source 1..120: mol_type = other DNA
tctaggaaacacaagagctgtcactgaagcaaagatagcttctgtctcacagcttcctgtcaagccctacagcccagtggcaaagcatggctttggagtctagggatatgggtgcagatg

SEQ ID NO: 30072 - DNA, 120 bp, synthetic construct
  source 1..120: mol_type = other DNA
actccaagggcatcaccgttacggcctacagccccctgggctctccggatagaccttggtgaggcttccaagtggtgggtctttctcttgataatcttaaaaacattattttataattgg

SEQ ID NO: 30073 - DNA, 120 bp, synthetic construct
  source 1..120: mol_type = other DNA
aagaagccagccacaagggatcacatattagaggatttcatttatatgaaatacccagaataggcaaatctttagaaacagaaggtagagtggttgttgcctagagggtagggaggatgg

SEQ ID NO: 30074 - DNA, 120 bp, synthetic construct
  source 1..120: mol_type = other DNA
ttataatattcaacaagatacagaattccgcttaatttaatgtgattattcaaacacacttaatgagtttgctattacgtattttctcactcgggccctggttgaaatcagggaacttga

SEQ ID NO: 30075 - DNA, 120 bp, synthetic construct
  source 1..120: mol_type = other DNA
aacatttgttgattgccttttgccctgagaactggtcctactcctggttttccattattcatgctatgctgtgtagattctgggtcagtgtatttcttctagcaggcaatcaatccagtt

SEQ ID NO: 30076 - DNA, 120 bp, synthetic construct
  source 1..120: mol_type = other DNA
gcaaggcaaaatggacttttgggggtcaatatatgtttaaatgaaagcacttggttccctgaacaaaaattaaaagtgtgctttgtagtcccatttaagaaatcttttagttacagctag

SEQ ID NO: 30077 - DNA, 120 bp, synthetic construct
  source 1..120: mol_type = other DNA
aagaggcttgtctgactttacctcaatcaggattcccagagcaacatcaactatctcagcctcattcatgcagtacacagtccttgtcgcagggagtctgaaaaaaagacatgcaaggca

SEQ ID NO: 30078 - DNA, 120 bp, synthetic construct
  source 1..120: mol_type = other DNA
accttctaaaagctcaagagatgatcagactgaaacacccgcccatcttgctgttctgcctaggctggaagacctggcccaggtcatggaggcccctgctccacttgccagattcgcagg

SEQ ID NO: 30079 - DNA, 120 bp, synthetic construct
  source 1..120: mol_type = other DNA
atagttttgcccttgtacatgcccaagggatgcatgcagcccctgacagatataggtggtcagcctaacaaacaacatttagcattgctcgtttttgaataatcttgctgttaccatttt

SEQ ID NO: 30080 - DNA, 120 bp, synthetic construct
  source 1..120: mol_type = other DNA
ttgggtatgaccttggaaagagttacactgctcatcactctaatttggcaagtctttcctgtgagaaatcttatctacaaattcatccctactacctactgcctctgtatgcctaccctg

SEQ ID NO: 30081 - DNA, 120 bp, synthetic construct
  source 1..120: mol_type = other DNA
atctgaaggaccttggtaaatctctttgggagtattagtctgatttgggtattcttcaactagagctacccccagtttcttcccttctctcaccatcattctttttcccaaagcagggct

SEQ ID NO: 30082 - DNA, 120 bp, synthetic construct
  source 1..120: mol_type = other DNA
tgacacaacccacttccaacccgttcttctttgctttcctctactacagaggttgaaaataagtgaaatcctcagactcccttaaagctacaggtgactatctgacctaattttggcctt

SEQ ID NO: 30083 - DNA, 120 bp, synthetic construct
  source 1..120: mol_type = other DNA
tgagttcatgataggaagcagatcaagagactttttcaaggtgacacagctaaccaagaactgcataagaacacacacatcccaatcccagtctagttgtctctccattttttcatgcta

SEQ ID NO: 30084 - DNA, 120 bp, synthetic construct
  source 1..120: mol_type = other DNA
gagatgccaccgagatatccctgggaggatagtctgatagaatattctgcacatttaagtctttaagacttctaaatggaagtcttctatctttagaatggaaacatttttcttgctgaa

SEQ ID NO: 30085 - DNA, 120 bp, synthetic construct
  source 1..120: mol_type = other DNA
aatcaatagcctgtcatacttccattatttattctctccttctgtcagtgacacaatatagtctgctgcttgccaagaactctactttccaggccagtgattccattccctctagcgttt

SEQ ID NO: 30086 - DNA, 120 bp, synthetic construct
  source 1..120: mol_type = other DNA
gtgatgacggtgacggtgttagggatggtggtaggtgatgacggtgacggtgttagggatggtggtaggtgatgacggtgacggtgttagggatggtggtaggtgatgacggtgatggtg

SEQ ID NO: 30087 - DNA, 120 bp, synthetic construct
  source 1..120: mol_type = other DNA
ctggtaaggaggcccaagtgcaacatctggccaggggctttttacacttaagggaacttcagtgaagtcaatagcaaatcaggtggtgtctgcaattttctttcataaataatcatacat

SEQ ID NO: 30088 - DNA, 120 bp, synthetic construct
  source 1..120: mol_type = other DNA
gtagacccaaacctagaagaggatgctgataagcaaaagtttgaagataacagagacaaagtcaaacttaagagcagcacaccaaatcactaagaccgaccatccatcccaaactagaag

SEQ ID NO: 30089 - DNA, 120 bp, synthetic construct
  source 1..120: mol_type = other DNA
aacttaaaacattccattcccacctttaaggagcttgtaagggagtcatggagtaagaccagcatctcacagagtattggagaaaactgttggaggattgttgttcttatgtgtgatgcc

SEQ ID NO: 30090 - DNA, 120 bp, synthetic construct
  source 1..120: mol_type = other DNA
aaagctactgacgtctctcagttgggtgagaaatgtaattatagatcaagacatttggaagtgattcaaaatatttagtggcaactatgaaagctaataaataaagagattaaacagaaa

SEQ ID NO: 30091 - DNA, 120 bp, synthetic construct
  source 1..120: mol_type = other DNA
attataggtgtgagccactgcgcccagcccactggtgtgttttaaagctccatggtaaaacatgctgtagggaacctaaatgctattagtagtggtggtattaattattgtccacactaa

SEQ ID NO: 30092 - DNA, 120 bp, synthetic construct
  source 1..120: mol_type = other DNA
tttttgccaactaccatctgcgattatttctctttttcctacaaatgataggagaagaataaaaaggatctggcagaacccctccctctccaaaacaatctctcctgaaaagatctcctg

SEQ ID NO: 30093 - DNA, 120 bp, synthetic construct
  source 1..120: mol_type = other DNA
caaccacaatgtgtaagttttatctggattccgactcaaagaaactgcataagaaaataaatgatatttgtgagacaactggaaattcaaactctgagtaaatatttagtgatattcagg

SEQ ID NO: 30094 - DNA, 120 bp, synthetic construct
  source 1..120: mol_type = other DNA
ttcattctccagatactcttactcatttgctggtggctctctggacctttctgtccctttgcttctcacctttcacctcttcgtctcttctttcctctccatatacattttgttcatgtt

SEQ ID NO: 30095 - DNA, 120 bp, synthetic construct
  source 1..120: mol_type = other DNA
acccaaacctggaagaatctcaggctttctcctacttcagcctctcaggcagaggccctttatcccacctttgccatcacaggatacagacagaatgcgtcttctgtggatccaacctct

SEQ ID NO: 30096 - DNA, 120 bp, synthetic construct
  source 1..120: mol_type = other DNA
catatacacttttctagctttcggttgcaattaatatagtagaacatgttcagaatcatcatggtttataaatcctttttggtccacccccacccccccccccatccttttaggtagagc

SEQ ID NO: 30097 - DNA, 120 bp, synthetic construct
  source 1..120: mol_type = other DNA
aaagtgattctactgaacgggaagaaaatactccccagagatctgatgaagtcttcaatacaaatacagctaagagaactaactagagggccaggtacttgccacaccattccctgtgtt

SEQ ID NO: 30098 - DNA, 120 bp, synthetic construct
  source 1..120: mol_type = other DNA
atacacacacctacatacatacacacacacaccccccagagcaactggttagtcatgtggatataacaaagctaaatctgtactgtgtttcttgtacccaattaaacccacagagatcta

SEQ ID NO: 30099 - DNA, 120 bp, synthetic construct
  source 1..120: mol_type = other DNA
agaagagattagttctgaatatcttgtattgaggagcctgtaagacattcaagtaactatcgggtcattggctacctaggtctgaaggttaaggaggcgctctaggttgtagagaaagat

SEQ ID NO: 30100 - DNA, 120 bp, synthetic construct
  source 1..120: mol_type = other DNA
aaaccttggaattggacctatggcttcaagcattcccaggcctctttggttggtacaaaataatagacagtgtatcaaccgaagaacaatcaaccagccaaaaataaacatgcacaggca

SEQ ID NO: 30101 - DNA, 120 bp, synthetic construct
  source 1..120: mol_type = other DNA
aaaaaaaaagagtgagatgagataacaaaacaagaaactgatgaggaaaagaaaagatcaaagaagctagagcagtcacgctgcagtcacagatgtctgcggagggagacgtccaggaag

SEQ ID NO: 30102 - DNA, 120 bp, synthetic construct
  source 1..120: mol_type = other DNA
aggaaggaaggggggaatgcagtcacggatgtctgtggagggagacgtccaggaaggaagggggggcgtgcagtcacggatgtctgcggagggagacatccaggaaggaatgggggggat

SEQ ID NO: 30103 - DNA, 120 bp, synthetic construct
  source 1..120: mol_type = other DNA
ttaaaaccacccaaaactgtacatcctagatatgactactactaacattttgagaggattcattccaaacatttttcattgtatatgtgtatatattacaaaactggaattatattgaca

SEQ ID NO: 30104 - DNA, 120 bp, synthetic construct
  source 1..120: mol_type = other DNA
tgcattatacaaactattccaagacagcctgggcaacctggagaaaccgtgtctctattaaaaaataaaaaaattagtcaggtgtagcggtgtgcacccatagtcctagttacttgggtg

SEQ ID NO: 30105 - DNA, 120 bp, synthetic construct
  source 1..120: mol_type = other DNA
ttctggtgggagtataacttggcaaacacacttcggaaaacaatttggcattatcacataaaactttaagaatcaaaattccactctccctctctttccacggtctccctctccctctct

SEQ ID NO: 30106 - DNA, 120 bp, synthetic construct
  source 1..120: mol_type = other DNA
ggggttcgtacttagtgcattttatttgccaatgtaagttctaatttacaaaaagaggaggacgagaaatccttcatggaggtcagaggatgacaaagaagtggcaccaacagtttgtcc

SEQ ID NO: 30107 - DNA, 120 bp, synthetic construct
  source 1..120: mol_type = other DNA
tatacccaacatacacacccaacacacaccacacccaacacatacaccccctccacacccacactatacccaacatacataccccaccacacacactatacccaacatacacacccaaca

SEQ ID NO: 30108 - DNA, 120 bp, synthetic construct
  source 1..120: mol_type = other DNA
tgtgcgtggagtcagcttgcagtacctatcaatgactgctcattttccaactaatttttaaatcagttagtggagcacaattctgcctgccacctagataaaccatactgtgggaatgag

SEQ ID NO: 30109 - DNA, 120 bp, synthetic construct
  source 1..120: mol_type = other DNA
ccaggtaatgggattttaatgagtgagtacatcttttgctcccccacagtgttcaaacaccccagtgctctaagccctgtggctttatgaacagcaaatctattttcccaagatggctct

SEQ ID NO: 30110 - DNA, 120 bp, synthetic construct
  source 1..120: mol_type = other DNA
ctgtctgagtgtcgggtgcactgtcatgaagaagagaacagaaatgaaaccagcaaaagattgttagacgaagtcagattttgcctcagtacaacaacataccttctgagaagcagatta

SEQ ID NO: 30111 - DNA, 120 bp, synthetic construct
  source 1..120: mol_type = other DNA
tataaacagcagagcagaaaaggaagttggtgcaggtggaccaggaagctggtgatctcacctgaggaccagacagaaactagagaacctgggtgaagtagttagaattcatctaacagg

SEQ ID NO: 30112 - DNA, 120 bp, synthetic construct
  source 1..120: mol_type = other DNA
tcaccagatatgagagagacaaggtgtcacaattctcacccagaccagaggacaatctgcttctgctcaaaggatttgggggtgaatgtagggagagtgagcatttttattttattattt

SEQ ID NO: 30113 - DNA, 120 bp, synthetic construct
  source 1..120: mol_type = other DNA
gtttgctttgagacttgctttatacttagaagtgaagttgtgggggaagaagccaattcatctcaagcttcttttatggatactggtatctaccaaaagaaggaggaggaagaggaggag

SEQ ID NO: 30114 - DNA, 120 bp, synthetic construct
  source 1..120: mol_type = other DNA
accaaggattcaattcaccagaaagacgtatgtaaccacttagaatttgtactcaataacatagtattgaaaatatagaaaacgcccctcccccttcccctcccctttccacggtctccc

SEQ ID NO: 30115 - DNA, 120 bp, synthetic construct
  source 1..120: mol_type = other DNA
ggcagcagagtgagaccctgtctcaaaatgaaataaaagtattttctttctgatggaaacggacattcccacctaccaataagactcaggtgagccccctcaattcctgtttttttaatg

SEQ ID NO: 30116 - DNA, 120 bp, synthetic construct
  source 1..120: mol_type = other DNA
agtggggtccaagataaaaaggaaggagagcaactggacagtgaataccaacaagtcttttgagaagttttactgtcgaaggaagaagaggaatgaggtaataactgaagagagaagcag

SEQ ID NO: 30117 - DNA, 120 bp, synthetic construct
  source 1..120: mol_type = other DNA
ttaatatcattaagcttgtgccattattttttttttagtttttttaagagatgggggggggggtgggtcttgcatgttgcgcaatctagtttcaaactcctaggctcaagtgatgctacc

SEQ ID NO: 30118 - DNA, 120 bp, synthetic construct
  source 1..120: mol_type = other DNA
aggggtcacctggtatctggcacagtggagcagcacaaatccatgtggatggcacagagcctgtttctcctagagaagcttctttgagatgatgctttttttaaaaattttattattatt

SEQ ID NO: 30119 - DNA, 120 bp, synthetic construct
  source 1..120: mol_type = other DNA
acactattgtccaatgaactacacattatataactcttactaccatcacttctagcatcccaccattaccaccaccaacactacaatcatcaccatcaccaccacaaccaccaccatcat

SEQ ID NO: 30120 - DNA, 120 bp, synthetic construct
  source 1..120: mol_type = other DNA
tgtggaatccaaatgcctccatggaaggacagcttctgcgcagacgatgctgaaaagagctgtttgaacttcctttatccttatattccttatgtaagctcaaggacatttgtttgtttc

SEQ ID NO: 30121 - DNA, 120 bp, synthetic construct
  source 1..120: mol_type = other DNA
ttgctagatagaaagatgtaaatgtttatatagaaagctattgtctagcttatatctatctccatcttctctgagcatctctctccctatctatactcacatacccacaaatacactaag

SEQ ID NO: 30122 - DNA, 120 bp, synthetic construct
  source 1..120: mol_type = other DNA
agcctaacaattctggttcgtaggatgatcaagaagaaaacacctcatggaatagtcaatgacacaatcatttcttcgttaactaaaataattaatagaaggtcagatgggggcagtatt

SEQ ID NO: 30123 - DNA, 120 bp, synthetic construct
  source 1..120: mol_type = other DNA
gacaggaagactctgaacaatgacatcatgttaatcaagctctcctcacgtgcagtaatcaacgcccgcgtgtccaccatctctctgcccaccgcccctccagccactggcacgaagtgc

SEQ ID NO: 30124 - DNA, 120 bp, synthetic construct
  source 1..120: mol_type = other DNA
ctcccttgggctgcatcttgtctgcttaggaagaacagagaatgggccaccatgagaaggacatggagccacagagctggctggaaaggggtcttttaaggttcagagtaaatgtagcta

SEQ ID NO: 30125 - DNA, 120 bp, synthetic construct
  source 1..120: mol_type = other DNA
gagagatgttccacctaccatagcaggagccagactgcgacttgggaatcaagcgcagatctacacactgggcttgattttcgtcttctttgcctttggggtaggatgccacagtgaatc

SEQ ID NO: 30126 - DNA, 120 bp, synthetic construct
  source 1..120: mol_type = other DNA
agtaaatttgagacaaaggaaggttggagaagacatatctgaggaaatagggccaggagcattggaaaagtccagtcatccccaccttgtttgtgttttctcaatttctaatcactcctc

SEQ ID NO: 30127 - DNA, 120 bp, synthetic construct
  source 1..120: mol_type = other DNA
gtaaaaccttcctgaggcctcatcagaggctgaggagatgctccctgtacagtttgcagaaccataagccaattcaacttcttttcattgtaaattaccagtatcaggtatttccttctt

SEQ ID NO: 30128 - DNA, 120 bp, synthetic construct
  source 1..120: mol_type = other DNA
gtcaggcttatgcactaaagtatcaataattcatttaattatgaatggtctaccaagagacagataatagaagagtgtatgtaaaagtatgaccctttcttatatgtttcttgcatgctg

SEQ ID NO: 30129 - DNA, 120 bp, synthetic construct
  source 1..120: mol_type = other DNA
acttgaggatgaaatcctctgtctagaaaaagacttaaaagaagagaaatctaaacattctcaacaagatgaattgatggcggatatttcaaaaagtatacagtctctagaagatgagtc

SEQ ID NO: 30130 - DNA, 120 bp, synthetic construct
  source 1..120: mol_type = other DNA
ttgaaatttgaacttttagaaaaagatcctaatgcacttgatgtttcaaatacagcatttggcagagagcatgccccgaatggtcccgcaccattgggtcagcgttcatctgaaacgaga

SEQ ID NO: 30131 - DNA, 120 bp, synthetic construct
  source 1..120: mol_type = other DNA
aactattttaatttggtgaattaatccactgttatagaaacaataatgggagttttatatatgtaatcttgcaggtggggaggctttaaattctaaaggttgtggtgtcttcatgccaag

SEQ ID NO: 30132 - DNA, 120 bp, synthetic construct
  source 1..120: mol_type = other DNA
tgagtttgcttgtgttgcaggaggaacactgcattttgtccattttgtctaagttgtctaatttatgtgtgtggagtggtttgtaatattccttgattgtcctttgttatatgtggtgtc

SEQ ID NO: 30133 - DNA, 120 bp, synthetic construct
  source 1..120: mol_type = other DNA
agacttggtcaggaatgtgaagtatggcttacaagtattttcttgctagctgtgaaatagattggaggaagtattatccggtcccccatttggcagatgcagaaccttgaggttaaaaga

SEQ ID NO: 30134 - DNA, 120 bp, synthetic construct
  source 1..120: mol_type = other DNA
gtcttctatcctagaaaatttggtgttagtatcagaaagatagaccaaggcaagaatatgcaataaatattggcttgtgccccacaaatggctgctttttggtcaggaacgtgtgccagg

SEQ ID NO: 30135 - DNA, 120 bp, synthetic construct
  source 1..120: mol_type = other DNA
agaggttacgatgttcagggaaagtagcaaagagtacaccagggagactgacagatggacagaaatgctctgacactagctggcctcatataagactaaaacttattaaagctgtcaaat

SEQ ID NO: 30136 - DNA, 120 bp, synthetic construct
  source 1..120: mol_type = other DNA
taaatgatatccacattattttggctatttaaatacttcttactgggagcctagtataagctaggatattttcttccctacacacccaatatcatcatgcctgtgccatagaaaaggaaa

SEQ ID NO: 30137 - DNA, 120 bp, synthetic construct
  source 1..120: mol_type = other DNA
agatgtagattgtattgggccctctcaatctggagacttagcttgctctgttcttcaattctttttctttttatttcttcacctacactgtctctgttctctcttccaggaactcctaac

SEQ ID NO: 30138 - DNA, 120 bp, synthetic construct
  source 1..120: mol_type = other DNA
gctgggggtaggggcacttatttccactagaagagaaatttttttctggagcaccaactcttatctctctgcaagcagcctgttcaattcctttatacaaacaacaacagcaacaataac

SEQ ID NO: 30139 - DNA, 120 bp, synthetic construct
  source 1..120: mol_type = other DNA
atatgcagccaaagctctggcaagtaggaacataatgatcctttggtttgctggtcggcttctttatttacccattgatggggtcattcaaagcactgtagttatgaatgcccattctgt

SEQ ID NO: 30140 - DNA, 120 bp, synthetic construct
  source 1..120: mol_type = other DNA
agtttgggtcaactctatccaatcatcttgtttcagagtaaagtcctctatgtgtgtggacttcgtctgccaaactgttgagtaactcttgacaggcactatgtcttgaatctgtgttac

SEQ ID NO: 30141 - DNA, 120 bp, synthetic construct
  source 1..120: mol_type = other DNA
agttgaaatgactttcccgagagctaaccctacctagttctgggctcttcccactataccagaatgcttgtctactttgaaaactactcaagtcacaaaatatatgagtccatccaagag

SEQ ID NO: 30142 - DNA, 120 bp, synthetic construct
  source 1..120: mol_type = other DNA
tcaacaccaagtggatactaaatcagtgagggccatggtaacaactgcaatgattaatatcaatattttctaccagtatcattacccacgtatcccactagatcacgcaaatagagatag

SEQ ID NO: 30143 - DNA, 120 bp, synthetic construct
  source 1..120: mol_type = other DNA
ataagtcatatcctatggattatgtgtatggttggggggaactggttttagatagctattaagtaggagagtttggcttcagtctcaggtatgtctggctttaaagccagagagagtgaa

SEQ ID NO: 30144 - DNA, 120 bp, synthetic construct
  source 1..120: mol_type = other DNA
aggtgttccttctcctcttttcattctggaagaattccttcatctctactctgacccagaatagtgtggctatggaaggagatgcagcttatatataaggagctgttcatgttaccattc

SEQ ID NO: 30145 - DNA, 120 bp, synthetic construct
  source 1..120: mol_type = other DNA
attatatatatttccttcccatttaaataacaaggatacatctatatgtcttgctagcaaaatatgtttcccctactggctgcccactgcatggctgatgaaagacaggaaggcgctcag

SEQ ID NO: 30146 - DNA, 120 bp, synthetic construct
  source 1..120: mol_type = other DNA
aatctaaggaagctgacccttattcctctgttagcccgtgtctctctccttctgcaccaaacagactctagtcacctcctggactcccatgctctctggaatcctcatctcagttcttcc

SEQ ID NO: 30147 - DNA, 120 bp, synthetic construct
  source 1..120: mol_type = other DNA
tttatgctaatcaagttccaggataggtacaggcacagaatagatgctaaccatcacagtgacccccaagggggatagggaaggacagcaaactaactttgcaaatgggttctatgtgaa

SEQ ID NO: 30148 - DNA, 120 bp, synthetic construct
  source 1..120: mol_type = other DNA
cccttatcttcttcaaagttcatggtaaaaaatggagaccaccttctggacatgatcgggtccctgaaatggactgctgatgtcagcctgtccccattcccccattcccataatactgag

SEQ ID NO: 30149 - DNA, 120 bp, synthetic construct
  source 1..120: mol_type = other DNA
ctgatgtccagctctgaaatcccatgcagaagctcttctctgtcgtcggagaggtcatcttcacaactgcaaaagacacatgcattctttattagaggtacagttctatataaagctgtt

SEQ ID NO: 30150 - DNA, 120 bp, synthetic construct
  source 1..120: mol_type = other DNA
caacaaatttgcagtgttcgtgctgtactctctatggctggcagagctctactgatgggaaagctatggtcctcttagcaagtatgaacctttactaaagataaagctaccaccatacta

SEQ ID NO: 30151 - DNA, 120 bp, synthetic construct
  source 1..120: mol_type = other DNA
tcgtcttctacagctgtgtattatgccattctggagataggctacactttgtttatcctgtcatctgttgatggacatttgggtagtctttggtttgggcttgctgccctaaacattaat

SEQ ID NO: 30152 - DNA, 120 bp, synthetic construct
  source 1..120: mol_type = other DNA
catgtactttttgtgtcctatgtaggcaaaaattgcaaaggtcaaggtcagatattttctcctatgctttcatttagaagtttttaaaatttagcttttgcatttaggtctagatctatt

SEQ ID NO: 30153 - DNA, 120 bp, synthetic construct
  source 1..120: mol_type = other DNA
ttttttaaatttccaatctctatgccttattttccttgccttattacactgggtaggacctgtagcacaatgttgaatagaagaggtgagagcaggtattattccttgtcatgttctcag

SEQ ID NO: 30154 - DNA, 120 bp, synthetic construct
  source 1..120: mol_type = other DNA
ctaagaagtcaacagtgatcaaacactactaactaaactccagattttatataaatatcatcactcttcacaccaatgtcttttaggatccaatccaggataccacattgcatttagtgt

SEQ ID NO: 30155 - DNA, 120 bp, synthetic construct
  source 1..120: mol_type = other DNA
atggagaaaaccccacatggaataaaaacaggcccaaatgtaaaaagcaatttgaatacttttgaatatagtacttgctggactctatatgctcagtgtggtgtattcagaaggcaaaaa

SEQ ID NO: 30156 - DNA, 120 bp, synthetic construct
  source 1..120: mol_type = other DNA
cagaagtggctgaagtggtagaagtagccactttcataaatatttactcaggcacagatcaccaatgaaagctaaaaccactgggtgaaaggttgttggcaaacaggatattcatacaga

SEQ ID NO: 30157 - DNA, 120 bp, synthetic construct
  source 1..120: mol_type = other DNA
atgcagcatatgtggcaaaatgtaaccactggtgaatctaggtaaagggtgcggtgattattatgttattctgacaacttttccttaagtgtgaaaaatttgaaagaaagagctgggaaa

SEQ ID NO: 30158 - DNA, 120 bp, synthetic construct
  source 1..120: mol_type = other DNA
acactgttggagattggcttcaaaacaaacgggaaaggttaaggagtgggtggggtgtgatttgataccattacctgggtgatgagtacatgtgctcattgttctatttctatttctgtt

SEQ ID NO: 30159 - DNA, 120 bp, synthetic construct
  source 1..120: mol_type = other DNA
acattcaccccaccatgcctgggcattgattctgacctaaaacctataattaggattctatatatgcctaacatataaccagcaataaccagcaacgacctccaaggatgtgcaagatcc

SEQ ID NO: 30160 - DNA, 120 bp, synthetic construct
  source 1..120: mol_type = other DNA
tccctaaaagtcccatgccaaggagaagtcatagctcattccccataccttcgtagtacccttggtgtgtcgtcctcacccaatcctaccttgctccattcccatcagtcagaaatatca

SEQ ID NO: 30161 - DNA, 120 bp, synthetic construct
  source 1..120: mol_type = other DNA
tctctaagtggtgctttcaaaatgttatccctttgcctatctgtattaaaatctgggtagattccttcatgacatcttccactacacaacttcttccctttaatggtagatgtggacatt

SEQ ID NO: 30162 - DNA, 120 bp, synthetic construct
  source 1..120: mol_type = other DNA
gccttgaattccttatctgtcaattacgagtttccattttggttaaggaccgttgatggagagctagcgtaatgtgaatgtagattcagatctttcatggtgccagcattcttacactgg

SEQ ID NO: 30163 - DNA, 120 bp, synthetic construct
  source 1..120: mol_type = other DNA
ccatatttcaagtactcattttaccatgatgtttttccttttcagtacagtattcaataaattacatgaaatattcaacagcttactataatataggctttgtgtaagatgattttgccc

SEQ ID NO: 30164 - DNA, 120 bp, synthetic construct
  source 1..120: mol_type = other DNA
gacaaaacaggttgtgtcagatttctttctggaagctttaaaatgctcactttattttcatagattctaatttcctaaattatgtttgatgtttcaagcaaaaatcatagcattgtctag

SEQ ID NO: 30165 - DNA, 120 bp, synthetic construct
  source 1..120: mol_type = other DNA
cgctccggttggttgtcacgtgcgcattcgggttccagacccaaggctgcgtgttctccaccgcttgttgtggccagtgttactgcggtgaccgccagagcagcctcgacgctatggagg

SEQ ID NO: 30166 - DNA, 120 bp, synthetic construct
  source 1..120: mol_type = other DNA
caagatagagctgtcctaggccctaaaactcgccacaacaaatttaaaagagatagtaatcatccagagcagatgaaaaccagaaatcattgtagggaatccaattggaaatcagcataa

SEQ ID NO: 30167 - DNA, 120 bp, synthetic construct
  source 1..120: mol_type = other DNA
tcatcattaacctgctctatcatctgttcctcccctaatagcccatcggcacaaacatcctccctcagagttccttccccccgaaatcctgcttcctgctgtccctgctcctccagaact

SEQ ID NO: 30168 - DNA, 120 bp, synthetic construct
  source 1..120: mol_type = other DNA
tagcgaccctgttaagtgtggggcattcagtagtgaatgagataaagatcttgtcgtcatggagactgtggtcttgtgagggaaacaggtcataatgaacaattaaattatagcagagga

SEQ ID NO: 30169 - DNA, 120 bp, synthetic construct
  source 1..120: mol_type = other DNA
cacattcttctcatctttcaaatgactagaaggagttgctcttatctgctgtcttcatactctcacatcccacctgcctccaactgagctttgatagcggcattctgccaatattcccta

SEQ ID NO: 30170 - DNA, 120 bp, synthetic construct
  source 1..120: mol_type = other DNA
ttctgaaacactaaggttttcctgcatacatgtcattaaaaataatgaaatgcttctttaaatatgtatgtgccatacatctaagagtcatcgtataagatgggtaccattattctgccc

SEQ ID NO: 30171 - DNA, 120 bp, synthetic construct
  source 1..120: mol_type = other DNA
aacagagaatcctttgcttctcctcaaacacaccttgcacttgtcatgtcatatttaatgtctattttccaggctagattatgagcaccatgaagggacaaacactgccatataaccccc

SEQ ID NO: 30172 - DNA, 120 bp, synthetic construct
  source 1..120: mol_type = other DNA
gtacacaggcagaaggacttttatgtccttttccagttaactgacaccatatgcgattggctccctatgtctagcccttaagtacaaaatactataatccctatgggtgattctgtgatg

SEQ ID NO: 30173 - DNA, 120 bp, synthetic construct
  source 1..120: mol_type = other DNA
caacactgtatttcaaggatacaacccctccccaatcaaactgccaaatctttgaactgagactcagtgccatatatatatttttgaggaccatgcttcctggattttctagcaaggttg

SEQ ID NO: 30174 - DNA, 120 bp, synthetic construct
  source 1..120: mol_type = other DNA
cagattggttaacaaatgacacccattttgctaaggcctatgccaggaacttcttcatgctccaaatgtggataaaacaagacgtctgagacagaggccacatcaagagctttttagctg

SEQ ID NO: 30175 - DNA, 120 bp, synthetic construct
  source 1..120: mol_type = other DNA
aagcaaacttgtaggcaacaacatttcctctagttcctctcctcttccccaccagggtcctcagccacacaccccgagccctgcctgcgggcccagcccccccatttccggagcctgcgc

SEQ ID NO: 30176 - DNA, 120 bp, synthetic construct
  source 1..120: mol_type = other DNA
tgcccattggctgttgccaatgatcctggttgaacgtgttcactagttattttgaggtggctgtagaatagaatgtaattaaggaagtatagcctcttctgtaatagagtcctgaacagc

SEQ ID NO: 30177 - DNA, 120 bp, synthetic construct
  source 1..120: mol_type = other DNA
tgacttgtcagcatatttttttttgaagtcacaaccctggattcttgtgcgcttgtccagagagttagcacacaaggcttttcctgacttttcaactagtaggaaagttacaaccgacca

SEQ ID NO: 30178 - DNA, 120 bp, synthetic construct
  source 1..120: mol_type = other DNA
tgctagttcttggaacactcctaaggcctttctgcctctgctttttgcctgatcctgtgacccaacattgaacctttcgaactgattttgaactcagttcttcttttttttgagatggag

SEQ ID NO: 30179 - DNA, 120 bp, synthetic construct
  source 1..120: mol_type = other DNA
acaagatctctgctttcaagaagctctcaatctgattgaggagagaaacaggtagcaaataatggcagcagagcatggtaagtgttatgttgagatggacacaaagtacaatggaagcat

SEQ ID NO: 30180 - DNA, 120 bp, synthetic construct
  source 1..120: mol_type = other DNA
agagacatgaccaaatttccccgaaatctattaagactgtggggaagtatccacttgcctacatgcttagcgatgctagaaagtatccatcttttaatttttgtccatctaatgggtgaa

SEQ ID NO: 30181 - DNA, 120 bp, synthetic construct
  source 1..120: mol_type = other DNA
ttttcttgatccttacttaactgttcacagaaaaagattctgtaagtccaggatagagggaggccatatgacccagtggttatggagtcaggctcacctggattagagtccaagttatgt

SEQ ID NO: 30182 - DNA, 120 bp, synthetic construct
  source 1..120: mol_type = other DNA
aaaaacagagaaacacagcttggaaaaacacagataaaaatgagccaatgctatttaaaatttatgaagaaagcaagggatgtaagacacttctctgctggctgcgaaaacatgagagct

SEQ ID NO: 30183 - DNA, 120 bp, synthetic construct
  source 1..120: mol_type = other DNA
cacatagcacttttaagtcttcagaaaaaaaatgtgtccatttgcatcttgctttgggttttcagtggcactctgtggtgtcctaaacagcttccatatgcataattttcagatgaagga

SEQ ID NO: 30184 - DNA, 120 bp, synthetic construct
  source 1..120: mol_type = other DNA
aagaggctcctcctccgtctctgacccttggagtcacagttccttcttgctaccacctcatctcatttcacgcaccagtataaaaaaagctgttttttgtttgtttgtttgtttgtttgt

SEQ ID NO: 30185 - DNA, 120 bp, synthetic construct
  source 1..120: mol_type = other DNA
cttttttccattgaattgtctctgtgtggggctttccattcgtccccagcagtgaaaagttgtgtggtggtactaacttcctctaagtgaagagcatgtgcttatttagagacaatcata

SEQ ID NO: 30186 - DNA, 120 bp, synthetic construct
  source 1..120: mol_type = other DNA
ataggatacatagagccattgacacatcatgggaagaaagaatgtcgtaccaaaagtggaagtaaaatgaccatctaataaggattgtcttgaagctgcacatataaaaattactaagag

SEQ ID NO: 30187 - DNA, 120 bp, synthetic construct
  source 1..120: mol_type = other DNA
cattttcctcaatataccatgtagaaatccagtattttgccagtgcacatgtttttgttagtgcctttgctaggcaaaaataacctgcggctgagccgttgaacctgcttatctctgaag

SEQ ID NO: 30188 - DNA, 120 bp, synthetic construct
  source 1..120: mol_type = other DNA
gagaggtcatggaagctccatgccccttctccaatacctcaccagatgcatctctctcatctggatgttcatctctatcctttgtaatatccttcgtagtaaatggtcaaacttaagtaa

SEQ ID NO: 30189 - DNA, 120 bp, synthetic construct
  source 1..120: mol_type = other DNA
aaaaaaaaaagaaaaggaagaaaacgcaagctcaaggtcagtcaaccacagagcacacctctgagacaaccattcccatcccggaatacttggcatgatttgaatttcatgaatactcac

SEQ ID NO: 30190 - DNA, 120 bp, synthetic construct
  source 1..120: mol_type = other DNA
aaggcagttaggaaatccaggtgtctagagatgactgctgtgtaagaacctagataatcttcatatagaaaaggcaaacatttctacagtgtggctgagtttactgatggtgctgggaac

SEQ ID NO: 30191 - DNA, 120 bp, synthetic construct
  source 1..120: mol_type = other DNA
atgtattctacttatcagagtaggtttaccctcatggattatatttgaggtcccacatctgagtggttgacatattgtgccaatatacctagccaaagtgcccttgcattaggcctggct

SEQ ID NO: 30192 - DNA, 120 bp, synthetic construct
  source 1..120: mol_type = other DNA
taaaagcagacatagttcctttattcttgattttagagaggaaccattcagtttttcaccactaaatatgatgttagtatagctatgtcctacataacactttggtcggtgatggactgc

SEQ ID NO: 30193 - DNA, 120 bp, synthetic construct
  source 1..120: mol_type = other DNA
aacccctcggtggatagatgtttctcattgcaaatggagcatgtggtggacctgggaaatcccttggtggaaaataacctcgagaagctccaaacatggttcctggaggaggtgggggga

SEQ ID NO: 30194 - DNA, 120 bp, synthetic construct
  source 1..120: mol_type = other DNA
gtggcacggctgatcttttcttccactctagaaagcttctcttcttcctctattcggtaattttcctccactgttaatttcctgtagagtttcatttcattttcttgatagaattcagtc

SEQ ID NO: 30195 - DNA, 120 bp, synthetic construct
  source 1..120: mol_type = other DNA
ccaaaatggcatgtatacacccatttctaggttctttctctctcccatatggtacattgacccccaattcctaaccaatttagcagctttgaactctattcattgcttcttttggttccc

SEQ ID NO: 30196 - DNA, 120 bp, synthetic construct
  source 1..120: mol_type = other DNA
caccaaaccaacaacatgcatctgcacctgattatttgacttatgtgctgttttgcacacaaactccgatactagtccttctgttcaataaatgagaacaggtgttatcggtcccactct

SEQ ID NO: 30197 - DNA, 120 bp, synthetic construct
  source 1..120: mol_type = other DNA
agcatggtcaaataccaggaatcggctacccctgcaaaatacaaatcttttcaacctgattctagagtttccatacttcacctaccctcataaccttgggttcgaaatccctacatctac

SEQ ID NO: 30198 - DNA, 120 bp, synthetic construct
  source 1..120: mol_type = other DNA
cctcctagacatgttgtagctcctggtcttggttaactttcacatccactacaaacattggtaaggaaattcactcctctctaattatgtgctgattatctttctgcaatggggatagtt

SEQ ID NO: 30199 - DNA, 120 bp, synthetic construct
  source 1..120: mol_type = other DNA
aatcggtatacttgaaagacactactatttctccacccacccccaccccatagtttctttcattctatgtgatacaaagaaaatctcatttaaatgcaaatggattaaattcatcaaagg

SEQ ID NO: 30200 - DNA, 120 bp, synthetic construct
  source 1..120: mol_type = other DNA
agtaagtatttactgtcaggattacaaaagtgagagcaccttttccttgttcacaaggagtgtgttaacaacccagtcctgtaaaagaaatcagggtttcaacccatgtggcaactgtcc

SEQ ID NO: 30201 - DNA, 120 bp, synthetic construct
  source 1..120: mol_type = other DNA
cttaagcttcagtccttcatctgaaaattatgcatatggaagctgtttaggacaccacagagtgccactgaaaacccaaagcaagatgcaaatggacacattttttttctgaagacttaa

SEQ ID NO: 30202 - DNA, 120 bp, synthetic construct
  source 1..120: mol_type = other DNA
tgagtgtagagtaccattgttaaatacaggttcttgagaatagacaaaaaggaaagacatttggaatgctgtctcactggacttcacagctctcatgttttcgcagccagcagagaagtg

SEQ ID NO: 30203 - DNA, 120 bp, synthetic construct
  source 1..120: mol_type = other DNA
gggaatggttctaggaactagactaaaacataaatatctagttttgtacccatattacccacattgtagatatacttttaagagctagtatttgctgagagcttatgaaatgtcaggcat

SEQ ID NO: 30204 - DNA, 120 bp, synthetic construct
  source 1..120: mol_type = other DNA
ccagcctaggtgacacagtgagaccctatctcaaaaagaaaaaaatatatataatccaccttatccattcaggcttctctgattccccaaggagtgccacctactctctcctttatgctt

SEQ ID NO: 30205 - DNA, 120 bp, synthetic construct
  source 1..120: mol_type = other DNA
gagactccatctcaaaaaaaagaagaactgagttcaaaatcagttcgaaaggttcaatgttgggtcacaggatcaggcaaaaagcagaggcagaaaggccttaggagtgttccaagaact

SEQ ID NO: 30206 - DNA, 120 bp, synthetic construct
  source 1..120: mol_type = other DNA
gttgtaactttcctactagttgaaaagtcaggaaaagccttgtgtgctaactctctggacaagcgcacaagaatccagggttgtgacttcaaaaaaaaatatgctgacaagtcagagctg

SEQ ID NO: 30207 - DNA, 120 bp, synthetic construct
  source 1..120: mol_type = other DNA
ctgttcaggactctattacagaagaggctatacttccttaattacattctattctacagccacctcaaaataactagtgaacacgttcaaccaggatcattggcaacagccaatgggcac

SEQ ID NO: 30208 - DNA, 120 bp, synthetic construct
  source 1..120: mol_type = other DNA
gcagcatgtgacaccgaccaggtgggtgccctcctcccgtctcggccctgggctcccggcggctgtggagcccggcggaggtggggcagggacaggaaggaagaggaagccaggcctttc

SEQ ID NO: 30209 - DNA, 120 bp, synthetic construct
  source 1..120: mol_type = other DNA
cccagctccagctaaaaagctcttgatgtggcctctgtctcagacgtcttgttttatccacatttggagcatgaagaagttcctggcataggccttagcaaaatgggtgtcatttgttaa

SEQ ID NO: 30210 - DNA, 120 bp, synthetic construct
  source 1..120: mol_type = other DNA
tgtagtagtcagtggtccagaaagctacccctgttttgatatctttgtagtattgagggcagtgatgtcaaacagtgaataaagttatatatctatgtggtgatcttattttaacctcaa

SEQ ID NO: 30211 - DNA, 120 bp, synthetic construct
  source 1..120: mol_type = other DNA
tgtacttaagggctagacatagggagccaatcgcatatggtgtcagttaactggaaaaggacataaaagtccttctgcctgtgtacaattatgtcagacatatctctttgccccatatag

SEQ ID NO: 30212 - DNA, 120 bp, synthetic construct
  source 1..120: mol_type = other DNA
ttcatggtgctcataatctagcctggaaaatagacattaaatatgacatgacaagtgcaaggtgtgtttgaggagaagcaaaggattctctgttgcaaaagaggattccaggcagaggag

SEQ ID NO: 30213 - DNA, 120 bp, synthetic construct
  source 1..120: mol_type = other DNA
cattgaagtaaaaggatcacattttattctgacctgaattttattctttatgtgaaaaatatttattaaacactgagtataggccactattaggctaagtatggataattcagcaagtca

SEQ ID NO: 30214 - DNA, 120 bp, synthetic construct
  source 1..120: mol_type = other DNA
tgaggtgagagaaacccagttccatcagtttctattttctttgcaaaataggagatgaggtgttctgctggaagtgagaagaaaggcaggaaggtcgaaatcaaaagacaggaaggtcaa

SEQ ID NO: 30215 - DNA, 120 bp, synthetic construct
  source 1..120: mol_type = other DNA
aagaagatgaggacccatcctataagtggagagaggaacacagactctcagcaactcagcagagtgagttaagggatgtgtgtgactatgcgattgagacgatgccctcttttcccaagg

SEQ ID NO: 30216 - DNA, 120 bp, synthetic construct
  source 1..120: mol_type = other DNA
ggggcagtgggaagagcgaggagcagggaagaggagaatgagcatcatgggccttcaatgcccgctctgatagcccctgaggactctcctcactgtgacctgtttccaggtgcctcatat

SEQ ID NO: 30217 - DNA, 120 bp, synthetic construct
  source 1..120: mol_type = other DNA
agaatccatctcaaatctagagagacccagcagtcctcccagcatccagccctgggtctccccacataatccagcctttgccacagagtctcccgcctacggttcttccccatcctttgt

SEQ ID NO: 30218 - DNA, 120 bp, synthetic construct
  source 1..120: mol_type = other DNA
gagagaacctttgagaaggacaacccctcagcaaggagccagtggcccagggaggtcacctgtgggccaagcaaggcagccagaaaaacccagccatctgcacctggagaaggcgtccag

SEQ ID NO: 30219 - DNA, 120 bp, synthetic construct
  source 1..120: mol_type = other DNA
actgtactctcttcacttgggatactgagagtcccctagtgaggatttcagttgataagggttctgagaccccgaatggctcattcctgtttcttcttggtgtaaggaggagaagagaga

SEQ ID NO: 30220 - DNA, 120 bp, synthetic construct
  source 1..120: mol_type = other DNA
tatacatggtggccattgcctctgaatttgtgtggaggaatgtggagttaatcccatcatcactgctgtttcagggtagaggaaagcttccctgttcaaccagggtttcaggctacacta

SEQ ID NO: 30221 - DNA, 120 bp, synthetic construct
  source 1..120: mol_type = other DNA
aacatcactaaatctcagtttcctcacttgcaaattgaggataataatgcctacctttcagggttgctgaatggtttaaatgaaataatgcatatctaatttagcagtaatatttgatgt

SEQ ID NO: 30222 - DNA, 120 bp, synthetic construct
  source 1..120: mol_type = other DNA
tctgtctcctgcttctcatctgtcctcaaacctcaaactgagctcatcaccttcatcccctaaatctatgccttttcaaagttctctggctcagtaaatgactccatcattcacccaggt

SEQ ID NO: 30223 - DNA, 120 bp, synthetic construct
  source 1..120: mol_type = other DNA
caggcctcctcgactgctgcagcttcatctctggccactactgctgtacacttggttcaaaaaatgctcaatttatttagtttagttagtttgtttgtttgttttgagatggggtttcac

SEQ ID NO: 30224 - DNA, 120 bp, synthetic construct
  source 1..120: mol_type = other DNA
atggataagtaaatgagcaatgcttcctgggttgaggttttggattactgtggtcatgcactgcattggagatgaggtggaaaaaccatctaaagatcagaaaacctgaacagggtcaaa

SEQ ID NO: 30225 - DNA, 120 bp, synthetic construct
  source 1..120: mol_type = other DNA
ctcaaactgctgctccaggtagggcagatgctaccttgatcctctccccttaactcaaagggatgccctcaggaagacccacaacaaaggaccaaccattcttctgccaggtgtccacat

SEQ ID NO: 30226 - DNA, 120 bp, synthetic construct
  source 1..120: mol_type = other DNA
ctaacctggaaccaccttgctcacattatccccagcccctcccctcatttctgcccaccttctattctgtcctatttctgggaggcctacttgggtctccaagacatactgctaagtgaa

SEQ ID NO: 30227 - DNA, 120 bp, synthetic construct
  source 1..120: mol_type = other DNA
aaattccagctccaagacgccccacctagttcttctcacccccatgtttgattccagctgctcacatatctctggtataaaaaatggaattgataccagacctgcctctaatattttatt

SEQ ID NO: 30228 - DNA, 120 bp, synthetic construct
  source 1..120: mol_type = other DNA
tctggtcttaaggttcttgggaaatgtatataaattccatctcttcacctctttaaagtggtaatgtatccactgcactaggtgtgtggtttgccagactaggacaaatccctgaggacc

SEQ ID NO: 30229 - DNA, 120 bp, synthetic construct
  source 1..120: mol_type = other DNA
gggcacagatgtgaataagacaagtgctgggtgacttttactttctgtgctcccatcttccaaaccagtcctctattgaccagaaatccatagtgttgagaatgctgatttgctcatgtt

SEQ ID NO: 30230 - DNA, 120 bp, synthetic construct
  source 1..120: mol_type = other DNA
catatagttcaagattgtgtcatgtttccaaccaaaaagagtcctatatagtgtttgatagaagtcatggaactagataagtccttcccacagtcttttgccatccccatccttggccct

SEQ ID NO: 30231 - DNA, 120 bp, synthetic construct
  source 1..120: mol_type = other DNA
tccccatctccaatgactgatatccctttcagctttcagagcacctcacttctgtttctgtggttaccacgttcctggaatgaattttatgcccctgctctctttatttttaattcagtc

SEQ ID NO: 30232 - DNA, 120 bp, synthetic construct
  source 1..120: mol_type = other DNA
ctcagcatattctttttcccaagtctgctacatcgaggtcagggaactaactgggaaggagtaggacccagaaaaacagaataggaaaatctgagttcaagaactcaaaaaactttgcag

SEQ ID NO: 30233 - DNA, 120 bp, synthetic construct
  source 1..120: mol_type = other DNA
tgattaatatctatgcatttgtaaaactctgcattgtaagcaaggctgtggcttttccatcccaacgaggttgaggtatggagttaatgagaagtgagactgtggggaatgaacaggaac

SEQ ID NO: 30234 - DNA, 120 bp, synthetic construct
  source 1..120: mol_type = other DNA
aattatgcatttttacaaaaattcatttacaaagatgattttagcagagtttacaaagcaaaaaaatgcacacccgaaatgtacattaattgggaattggttaagtgaaataaggtacat

SEQ ID NO: 30235 - DNA, 120 bp, synthetic construct
  source 1..120: mol_type = other DNA
cctaggcgacagagccagaccctgtctgaaaaacaacaacaacaaaatgtgcttcctaaatctgaggacccatgactttcttcagttctggataattcttagccacttttaattccatta

SEQ ID NO: 30236 - DNA, 120 bp, synthetic construct
  source 1..120: mol_type = other DNA
ggttatacacagatgtctgttggccttgaataatagcactggccattgtcagagttggtattggggaggttggtgtataaagagtacgaacttcatagagcagcaattctcatatgctaa

SEQ ID NO: 30237 - DNA, 120 bp, synthetic construct
  source 1..120: mol_type = other DNA
acatttctaacatgctcccagatgatgctaatgctgagactgatctatggaccacacattgagtagcaatattttaaactttgaatctataatgaaagatgtcatagaaaatttcctact

SEQ ID NO: 30238 - DNA, 120 bp, synthetic construct
  source 1..120: mol_type = other DNA
agtaactgatgtcgtctttttagaaaagagaagaacaaaattaccatggaaagcatttctggttttgtctcttcattattcttggcacaattaccaaagatgttttgaagatcttggcca

SEQ ID NO: 30239 - DNA, 120 bp, synthetic construct
  source 1..120: mol_type = other DNA
ttggatgagaccatgtatcctagagaaagactactaactttagaattctgtctcctctttccagatatgagaccttggggaggtcatttaaactctttgtgcctgcttcttcatttgtaa

SEQ ID NO: 30240 - DNA, 120 bp, synthetic construct
  source 1..120: mol_type = other DNA
ctttctaaactgaaagttccatggacatagagactatgtcttgtttctttattgtattcatttcactgtatggctagaaactagggctggccattttgtgtattattgtacttgttccat

SEQ ID NO: 30241 - DNA, 120 bp, synthetic construct
  source 1..120: mol_type = other DNA
aaatttccactgttaccatgtgcctggaacagcttagacataactatttgcttttgagtagactgaccctagaaacaccatactgtattcaaaacaactagtttctaatcatggaattaa

SEQ ID NO: 30242 - DNA, 120 bp, synthetic construct
  source 1..120: mol_type = other DNA
agaagatgctaaatagatatttcgagcagtgctcattgaggtatgtagagcatctcatgctttctgaattaaaagaacatgtacagtgtacataatatttggtcagggaccctaagactg

SEQ ID NO: 30243 - DNA, 120 bp, synthetic construct
  source 1..120: mol_type = other DNA
aaaaactcagacatttgtcccaccttcccctgtttttaataatgctcgttgttttgttcctacagtgtctgagtattaagtattttctaatgagaccttttgtgaattagatggttaacg

SEQ ID NO: 30244 - DNA, 120 bp, synthetic construct
  source 1..120: mol_type = other DNA
tcttcagtatatttacatggaaatatactcattcttcagtatatttacatggaaatatactcattcttcagtatatttacatggaaatataccattcttcagtatatttacatggaaata

SEQ ID NO: 30245 - DNA, 120 bp, synthetic construct
  source 1..120: mol_type = other DNA
acctgtagtgctaagaccatgttttatttgtaatatcccctttaaacctcaagaaagagtccttattctaatctcataatttagtgataaaatgtatattcactttcccatttgtggcat

SEQ ID NO: 30246 - DNA, 120 bp, synthetic construct
  source 1..120: mol_type = other DNA
ttaaatatataatcagttacttccaggctctgcctcttattggataaggatagacactgtgacatcagagatcaccgtgctgtggaccgaacaaatgccatgtaaacagtgaccatgacc

SEQ ID NO: 30247 - DNA, 120 bp, synthetic construct
  source 1..120: mol_type = other DNA
accattacaatcaacacattattgccaaggagaagtaaatttattcctgtagcgtaaaaagccatgcttcaggatttgatgaattcttggaaagcattttctacatcttgctggttccaa

SEQ ID NO: 30248 - DNA, 120 bp, synthetic construct
  source 1..120: mol_type = other DNA
tgggacatgcagtttgggatgttgctcccgtgaaaaacagtattcaaaagacccacagcctgactccttctttataatacacaccctggatagcattaggagatatacctaatgctaaat

SEQ ID NO: 30249 - DNA, 120 bp, synthetic construct
  source 1..120: mol_type = other DNA
cccttcaaggccactcccctgaaatctcatacaatgtttacgcatgtatcacctcattggctggaacatattaatgtggccacatatagttgcaagggatattggataaccaaatatcca

SEQ ID NO: 30250 - DNA, 120 bp, synthetic construct
  source 1..120: mol_type = other DNA
cagaactattaggaaaaaaaaaagaaataagatcatgaaggtatagtgtgtagaataggaaattaagaggccagagaaagtatctttggaattaggaagctgtctaagacattgatggct

SEQ ID NO: 30251 - DNA, 120 bp, synthetic construct
  source 1..120: mol_type = other DNA
tatatgagaattgataatatcatttgggggttgatgtaacagagaaacagcatctcaggaatgagctcttagaaactcaataggcgggacacgatgactcacgcctgtaatcccagcact

SEQ ID NO: 30252 - DNA, 120 bp, synthetic construct
  source 1..120: mol_type = other DNA
agtgtttggaaaaatatacataattgagggtaagtagagaaaaagtgtctgagagcatttggggggcaaacagatcatctgtgtggaggttaaaatgactgcttggatcctagagaatga

SEQ ID NO: 30253 - DNA, 120 bp, synthetic construct
  source 1..120: mol_type = other DNA
gagagggagagggagagggagagggagagggagagctctatgaagttttatcaacctgcacttttaaggtaacgtgtaggttaattttcacttctcaaaaccctcacttcagatagaaaa

SEQ ID NO: 30254 - DNA, 120 bp, synthetic construct
  source 1..120: mol_type = other DNA
cattttgcagataaggaaattaacacccaagtgaaatactttaccaaaggtcacataggtagtaagtaacaactgtgtgatcagaggagagcattatctccaaacttcgtgagagacaca

SEQ ID NO: 30255 - DNA, 120 bp, synthetic construct
  source 1..120: mol_type = other DNA
ttcctattcggccatcttggctcctcctcccttcagttgcatttcaagtatctttttctgctaagaatttggcctgtctgaatttcaaaaggcatttgggcttcaaactttagttaatgg

SEQ ID NO: 30256 - DNA, 120 bp, synthetic construct
  source 1..120: mol_type = other DNA
ggtggctgtcagactgttggagagaattgctttcaaaacccagagtatgccaccatctactcagtttcagattagcgtaacccacagcaccatgctatggcaggggaagctataatcttt

SEQ ID NO: 30257 - DNA, 120 bp, synthetic construct
  source 1..120: mol_type = other DNA
acacaactgagtagaaatagttgatgatcctgagaaggaaagatccacaaacacaagtgcaggaagagagatggatccatgtagaacctaagaagtccaaagacccaagaatcaagacag

SEQ ID NO: 30258 - DNA, 120 bp, synthetic construct
  source 1..120: mol_type = other DNA
caaacatgttagaagaaaatatggttgaataatcatattattttgtattgtagaaggtctttataagcctctgaccaaaggcaggaatcacacaaataagacaggtggatgtgactacaa

SEQ ID NO: 30259 - DNA, 120 bp, synthetic construct
  source 1..120: mol_type = other DNA
ttgagtatgttgattttaatgacagggacgttctttatccagccttatgcctgaccaactctgattcatccttcaagtgaggagatatctcttcaccctcgaagctttccctgatgcaca

SEQ ID NO: 30260 - DNA, 120 bp, synthetic construct
  source 1..120: mol_type = other DNA
atggagtggatggatagaatggcctcctctttgtctaaaacccccagtagctacgaattcccccaacaactactacacactgccctgcacatgatcacgttcggtaagttgtgtgagagg

SEQ ID NO: 30261 - DNA, 120 bp, synthetic construct
  source 1..120: mol_type = other DNA
gtaagacttttatttcactctttctataaaattaagtccacaatttttccatggatccttgcccaagaccacatgttgaaaagaacttatacgaatggcagatagcatcacggctaaaga

SEQ ID NO: 30262 - DNA, 120 bp, synthetic construct
  source 1..120: mol_type = other DNA
gctgaaactccagtggtttccatggagatattttctctaggagatgtcagatatgatctaatttttttgtctctgatatatgacaacctgaagcttccagagcctttcattttggggggt

SEQ ID NO: 30263 - DNA, 120 bp, synthetic construct
  source 1..120: mol_type = other DNA
catatagcacgtagctaaatttgtgaattacaggtacataacttcagagaaacaaggatggtttggatttattttgtctgtttccctcccctgagaaattcgtatgaccttgccttaaaa

SEQ ID NO: 30264 - DNA, 120 bp, synthetic construct
  source 1..120: mol_type = other DNA
agctgattactaagtactttctatgtgctaggctattttaaacacattacatgtcttctatttaatcctcattacaacactgtaagatgggtactactcttagcccccattttacaggtg

SEQ ID NO: 30265 - DNA, 120 bp, synthetic construct
  source 1..120: mol_type = other DNA
cagatgactgacgcttgctaaacattaagaaccagtgctctagaccaccaccaagacccgtgacctctgatgtcatttccttacactcctgtttatttattttttgaaacagagtctcat

SEQ ID NO: 30266 - DNA, 120 bp, synthetic construct
  source 1..120: mol_type = other DNA
tacccagtaatgggatggcttaccccagcaacatttattgaatagggaagggagtcttttcaccattgcattttttttagtcagactacaggtgcacgccaccatatccggctaattttt

SEQ ID NO: 30267 - DNA, 120 bp, synthetic construct
  source 1..120: mol_type = other DNA
atcagtctggggtccttcctggtctttccccatcgtggtctggtctggcctggctggaaaggcactgcatgaaaacccaggcatcagatcccaggcatgtggtccgatgatgatggaaaa

SEQ ID NO: 30268 - DNA, 120 bp, synthetic construct
  source 1..120: mol_type = other DNA
atatgtatcattatatatataagtatattcaagcgatccaaagatgagtagtggaaaccaatctcccttttcctttgtccttcacttcctccccaggagcacccacaggcccagttgctt

SEQ ID NO: 30269 - DNA, 120 bp, synthetic construct
  source 1..120: mol_type = other DNA
gtaaggatgcaacagtttgtggttctctagagagctttgccaccagttttgcagggagagggcttttagtgtcttagccatagtgacatgtaaacaattgatatgagagtttttcttgag

SEQ ID NO: 30270 - DNA, 120 bp, synthetic construct
  source 1..120: mol_type = other DNA
gcgttctgctctcccttccctcccgtactggccctgggcccaaaggagactgaacagatacacagccctggtgctacatctcaacagagaagctggctattaaaaaaaaaaaagagtagg

SEQ ID NO: 30271 - DNA, 120 bp, synthetic construct
  source 1..120: mol_type = other DNA
acaggtgtgagccactgtgcctggccatacctcatgagtttttaaaagcgatatttgatgtttgaagcaaaagttactatgccatctgatgggatgctcaatgcatgtagaagaaatacc

SEQ ID NO: 30272 - DNA, 120 bp, synthetic construct
  source 1..120: mol_type = other DNA
cagaccaaaagacccaagagaaggtcatagtccaagagaaggagcagaaagctcactcttcactaagaccataaagaatgtgctgggagaggggcaccatcatcaataataagtttggtg

SEQ ID NO: 30273 - DNA, 120 bp, synthetic construct
  source 1..120: mol_type = other DNA
ttgggtttctgcaatgtgagaaaaaaactgtcatcatggagaaaggccaagtggaaacctctgaaattccctctcacccctctgccaaaatagtaagtaaaaaacaatattgtatcctgg

SEQ ID NO: 30274 - DNA, 120 bp, synthetic construct
  source 1..120: mol_type = other DNA
aaaaacagcaaggcctttaacctgctcccagaattaccgatttcatggtctggatgagcttagccattagaattttgacaaggaaatgagtctccattttctcctgtcagagagaaataa

SEQ ID NO: 30275 - DNA, 120 bp, synthetic construct
  source 1..120: mol_type = other DNA
ataatttctgctggtgagaccgtcacaggtattgctaatgcaactgtggctgctgcctggatgcataatggaagtagaggctaaatttcggttagcagaaaaggaaatcagatgtaattt

SEQ ID NO: 30276 - DNA, 120 bp, synthetic construct
  source 1..120: mol_type = other DNA
tgcagtcaccatgcatctttctttgttccctgactttgtttgcacaggaaaattaaagaaacaaattgccgtttagtacttttccacctctgcagtaaaaaatcgtcaggaaagcacaag

SEQ ID NO: 30277 - DNA, 120 bp, synthetic construct
  source 1..120: mol_type = other DNA
gccacaggagtccacaaattgtacaggtgaacatatgtcccccatatattcacctatacaatttaaagcagaaacatatgtatagtccagtggcgatctggggccaagatgttctgtgag

SEQ ID NO: 30278 - DNA, 120 bp, synthetic construct
  source 1..120: mol_type = other DNA
acgagtaggcccctaaaacagagccaagtcacttcaggagtggcatccatctcaagagattctgtgaagggaggtcacaacccagcaacaggcgggggccaaacatccctcattcgcgct

SEQ ID NO: 30279 - DNA, 120 bp, synthetic construct
  source 1..120: mol_type = other DNA
gctctgtaataatttttaccactgtaatcaaactaggtcaccaaaaagatagtgagagataaaatttatcctcagaaaacttcaaaaaggccagtttacccagccaaactgagagctgga

SEQ ID NO: 30280 - DNA, 120 bp, synthetic construct
  source 1..120: mol_type = other DNA
aaggtggcatcggggacttaaatgagaagaaagatgccctaaagagggtgtacatttggccaatgtgtacagtctctaactcttcatttctcaatgttctgtaactgtgtgaggacataa

SEQ ID NO: 30281 - DNA, 120 bp, synthetic construct
  source 1..120: mol_type = other DNA
ctgccagagcgagagtggagggtggaatacagtctaaaaggaacatacaagtgttaagtgacaggctctatggaactgccggagcagagcccagcagaagacaagcgtttaagaagacaa

SEQ ID NO: 30282 - DNA, 120 bp, synthetic construct
  source 1..120: mol_type = other DNA
acagaaatagcatacatcactgctttatttcactgcttatagagcacagaccaaccttttttttttttgaaatagggtgtccctttgtcgctaaggctggagcgcagtggtgcaatcaca

SEQ ID NO: 30283 - DNA, 120 bp, synthetic construct
  source 1..120: mol_type = other DNA
ataagtaactcctcacatgtctacaacaggctctctcctgcttttgtaaataaaactttataggaacccagccactcctagtcgttcaacacggtcttcggctgctctggcagaactgaa

SEQ ID NO: 30284 - DNA, 120 bp, synthetic construct
  source 1..120: mol_type = other DNA
aaagccacagagaagaaatgattatcctagtgacaaagtggtcagggacagggtttccctctttgaagaataatcttgccggctatggtggcatgttcctgtagctacttgggagactga

SEQ ID NO: 30285 - DNA, 120 bp, synthetic construct
  source 1..120: mol_type = other DNA
agctacatagtattccacggcacaggtgacacaatgctgagtgctgtcagttgagcctgattctcttctctgtacaattcagcgacctgagtctgagtaaggcgagtgagtcatgccact

SEQ ID NO: 30286 - DNA, 120 bp, synthetic construct
  source 1..120: mol_type = other DNA
tctttaacaaatcctatgaaacagaaggtgaaacagggatatttactagtaatagacagtaataccgtcttctaagaattatgggcctttaattgtggaatgaaatcaaagtaccttacc

SEQ ID NO: 30287 - DNA, 120 bp, synthetic construct
  source 1..120: mol_type = other DNA
tataagtgaaataaacaaaatatttaaactgagtagaggtggggaagtatcaggagagaaaggttaagaaggtatgaagatttctgagtacagctggggaaggtttcttgcctcccagca

SEQ ID NO: 30288 - DNA, 120 bp, synthetic construct
  source 1..120: mol_type = other DNA
tgaggcatccttagaatgaaagccatatattcaagacactagagtagagagattgttagccacaccagagagctgccatatcagcactggactctactgcaaatttatttaagaaaaata

SEQ ID NO: 30289 - DNA, 120 bp, synthetic construct
  source 1..120: mol_type = other DNA
ttctcccactgactcagagctgcataaacgggcccttcctgaaggattttcatgggtggttttgactatacatatctccttacataattttaagaacctcgcaaatgacagaactccctt

SEQ ID NO: 30290 - DNA, 120 bp, synthetic construct
  source 1..120: mol_type = other DNA
accaccctttgcccagatctgtccccagtcgcaggagctgtgccttgctgtgtggacggcaagttcagaggtcacaacagagctgctcatctctttaaaaaggggctggagaggaattca

SEQ ID NO: 30291 - DNA, 120 bp, synthetic construct
  source 1..120: mol_type = other DNA
agggaaccacatggcccttagtgaaaccaaatgccgagcttccaggctagcatttcttcctctactgcccaggctagaggatctagatttgatcctactttaaggaagcaaaaagtgtct

SEQ ID NO: 30292 - DNA, 120 bp, synthetic construct
  source 1..120: mol_type = other DNA
tatgtgacatatacctcccaccccaaaaggggagctctccagggaaggggttccaagggcttccatttcctcatgggcaaaaaggggcaacgtgcctccagggtccttactactgactgt

SEQ ID NO: 30293 - DNA, 120 bp, synthetic construct
  source 1..120: mol_type = other DNA
gggatcatttatagggtcttgggggccgctgtagtcatctagacccacccaaatccactgcatgtggcatgcctgagccatctctgccccggaccacagcaatgcctcagaagatctctg

SEQ ID NO: 30294 - DNA, 120 bp, synthetic construct
  source 1..120: mol_type = other DNA
tgtaggcttctaggtctgtgctctgtcttggctcctagcataccccagacagcctggtaagctttgataaagccctgtcccaattccagctctgccatgagtcacagcttaaaccaagag

SEQ ID NO: 30295 - DNA, 120 bp, synthetic construct
  source 1..120: mol_type = other DNA
atccacaaatagctatgtcagcctttaaaaaacagaatgaagagagaggatttgcctcagcagacgctaagacatacggaaggctataggtttttgttaagctatatcaatgcaagagcc

SEQ ID NO: 30296 - DNA, 120 bp, synthetic construct
  source 1..120: mol_type = other DNA
tctctgatcctagtactttctgctcatttgggccttcttggggctgcgtccttactgacctgtcaccctgctgtcaccttgaggttctttttggctcccaggctgccacttgtgctgtcc

SEQ ID NO: 30297 - DNA, 120 bp, synthetic construct
  source 1..120: mol_type = other DNA
gggtcagaggcaggaggagggtgcacagtgctgagaggggcacttagaggatcttgatgggcgttcaggaaggaccctgtgcccctttgtgggccaccctcaagtgcacagcttcaggct

SEQ ID NO: 30298 - DNA, 120 bp, synthetic construct
  source 1..120: mol_type = other DNA
ctgatactaaagatgttgaagcatcagagtccccacacttgcaagtggtgcctatttttcttaaatagggcccagcaaattgtataagctttggaactcagaacacctgaatctgtctag

SEQ ID NO: 30299 - DNA, 120 bp, synthetic construct
  source 1..120: mol_type = other DNA
aaagtgctgggatcacaggtgtgagccactgcgaccagctgaaaagttgagttctgtgtgtttgagttttacatggtctaattcagtactaacagaaaaatgaacattgctgatactgat

SEQ ID NO: 30300 - DNA, 120 bp, synthetic construct
  source 1..120: mol_type = other DNA
aaaaagtccagaagtaggataggtctcagggttaggtgattcattcagtggcttactgatgtcactgaggacctgaggtctgtcttttacccccaccccccaccccatgtcatcagtgtc

SEQ ID NO: 30301 - DNA, 120 bp, synthetic construct
  source 1..120: mol_type = other DNA
gcaagcagctcaacgacacatgactccactcaaatgccaactatccctttccaactggcttcttccctgagacccagataggatgattgtcacaaaacatgtatttatttatttattttg

SEQ ID NO: 30302 - DNA, 120 bp, synthetic construct
  source 1..120: mol_type = other DNA
cgacccggctcccaggcgaggccccggcggcgcgaggaggccgcgcggccaccggccactcacccacagaccggtagcccaggatcgcgatcttccgggacttggactgcggcatcttgg

SEQ ID NO: 30303 - DNA, 120 bp, synthetic construct
  source 1..120: mol_type = other DNA
gtgttgatttctaaattatttcaatgaacattgtattttgaataaatatatgttccagatttacaaaaaagttgcaaagctggaacagttcctatatactccatatcaggttcccccaag

SEQ ID NO: 30304 - DNA, 120 bp, synthetic construct
  source 1..120: mol_type = other DNA
ctcaccgcacacggagggacacgctccgtcctcaccgcacacggaggcacccgctccgtcctcaccgcacacggagggacacgctccgtcctcaccgcacacggagggacacgctccatc

SEQ ID NO: 30305 - DNA, 120 bp, synthetic construct
  source 1..120: mol_type = other DNA
caagttaaacccctctctcttttatcacgaccactgactattatattttaaaacacatattcaagggaaaatagtggataggaagcaggactggaatgcagctcccactcagacggacag

SEQ ID NO: 30306 - DNA, 120 bp, synthetic construct
  source 1..120: mol_type = other DNA
gtgtggggaagtgggtgagggtgttgatgaaacaaggctgtctcaggaattgatgcattgaaggtggatggtggctatttggaatgcattgaaccattctctctaccatttcatatgttt

SEQ ID NO: 30307 - DNA, 120 bp, synthetic construct
  source 1..120: mol_type = other DNA
ttccagaaagggtggaggctgctagctcaggaggtcggtctataggcaattaaatctctgtgggtgtaacacagactgtgttcttactgctatttgtggaaaacaattttcttaaaatag

SEQ ID NO: 30308 - DNA, 120 bp, synthetic construct
  source 1..120: mol_type = other DNA
tcatgcagaaccgagggtgaccagccacctcccacaggaggcgtgccacccctctgccccatggtcacctaatgtccccctccaggcctgcccgtgacagtgggggacatatgctaggac

SEQ ID NO: 30309 - DNA, 120 bp, synthetic construct
  source 1..120: mol_type = other DNA
atttagcctagttccaacagtctgaacctctcatggtaactgattcttcccaaatgactatgcacatgaggaggagactatgtcagaccagttaaataacccccgagctaaagattagta

SEQ ID NO: 30310 - DNA, 120 bp, synthetic construct
  source 1..120: mol_type = other DNA
tgcccagatctgccattcccacggggcctccatccacagaagccagagatgcccagatctgccactcacacggggcctccatccacagaagccagagatgcccagatctgccactgccat

SEQ ID NO: 30311 - DNA, 120 bp, synthetic construct
  source 1..120: mol_type = other DNA
atcgcttgagtacaggagcttgagactagcctgggcaatacactgagacccaatttctacaaaaagttaaaaaattaaccaggcatggtggtgtgcatctgcagttccacctattgcggg

SEQ ID NO: 30312 - DNA, 120 bp, synthetic construct
  source 1..120: mol_type = other DNA
atgcactttcctttcctcatctccaaaggcaagatcaccctaaaccaacttgcaaaatcttttgaagctaaagattcactgttctggaagctcctgcagccactcagccacgtaataatt

SEQ ID NO: 30313 - DNA, 120 bp, synthetic construct
  source 1..120: mol_type = other DNA
cctccctgggtacctccatccaggtagaactaatagttctaaaactgcaggattgcaaagacatttggagtcattaagaccttgtgtcctgattttaatggagtctaaacaaaaacaaac

SEQ ID NO: 30314 - DNA, 120 bp, synthetic construct
  source 1..120: mol_type = other DNA
attactcctccacacccactgccgtgggctcctttgacttccgtcattttgatgcttggggcccggcccctgtggcttctgcagggcacactctactcggaacaccgctccgtggcctgg

SEQ ID NO: 30315 - DNA, 120 bp, synthetic construct
  source 1..120: mol_type = other DNA
aagtcttaaaaaataacttcatgaaaggagtaagactgaagctaagataagcaagatcaggtaaaaatcagaggcactgaagggtccttgcattttgtaaggccccagagcatcctcctc

SEQ ID NO: 30316 - DNA, 120 bp, synthetic construct
  source 1..120: mol_type = other DNA
aagcccatttaaagacctcaccccatgacaactgccactggggacagatacagagactctgaaccttaaggcaaggtaggaaatggcagaaagtaaataatagaatgttccagaaacaga

SEQ ID NO: 30317 - DNA, 120 bp, synthetic construct
  source 1..120: mol_type = other DNA
agactacagatgcatctggcccccggacctgcactgtgtggatgtggcttctgtcagttcactgcctcaggagcaagagtaggaatgggaggtcctcccaagatggaagttcactgttct

SEQ ID NO: 30318 - DNA, 120 bp, synthetic construct
  source 1..120: mol_type = other DNA
gatggtagtgatagtaggtagtaatggtagtgatggtaggtagtgatgatggtagtgatagtaggtagtaatagtagtgatggtaggttgtgatggtagtgatggtaggtagtgatgggt

SEQ ID NO: 30319 - DNA, 120 bp, synthetic construct
  source 1..120: mol_type = other DNA
aattctgattgtgaaggcttcagaactctgatcttctcaattcaggtggaaacgtgtctttaggatagaaaacaagtaaactgcaggattcccttcaaggtctagttcttccctgtccct

SEQ ID NO: 30320 - DNA, 120 bp, synthetic construct
  source 1..120: mol_type = other DNA
aggatgatttgggctcaaaataagaccttctgaccccaaaccgaggctcctcctatgaaatcatgctgcttcccaccgaaaaaccaaaaacaaatagaatccaggccccctttattctac

SEQ ID NO: 30321 - DNA, 120 bp, synthetic construct
  source 1..120: mol_type = other DNA
ggctcagtcaaagaaaggacacatctgagcagagggatggcctcgcagcccagttccaggatggctgagggctccatactccagggctggagctggggaaagcacacacaccactttaca

SEQ ID NO: 30322 - DNA, 120 bp, synthetic construct
  source 1..120: mol_type = other DNA
tccatgatgctatgtgcaccctgtctccatttccaaaaggatgcttgcaatgcagttacataaaataccttgaaaggaggaaaaacagtagccacaggaagataaagtaaggcggtctct

SEQ ID NO: 30323 - DNA, 120 bp, synthetic construct
  source 1..120: mol_type = other DNA
atcgtatgaccctggatcatttgctagcctttgtctgaaagcctcattttcccagcgaggttataactgccacctagcctggcacaatgatccataggtaatgaccattaggcagatgag

SEQ ID NO: 30324 - DNA, 120 bp, synthetic construct
  source 1..120: mol_type = other DNA
tacttggcatcaggtgtctggagacccgcccctggactccaccctcttcacccaagcgttaggcacgtgtgggccggagtttacacaggaggaccttagcggggcgtctaaaagaagggt

SEQ ID NO: 30325 - DNA, 120 bp, synthetic construct
  source 1..120: mol_type = other DNA
gcctgcttaaacctatactaagccacttagaattgaaaatggaccatcacatataggttattttctacagataatccagatgatccaacaccatttgttgataaacttccctttccccac

SEQ ID NO: 30326 - DNA, 120 bp, synthetic construct
  source 1..120: mol_type = other DNA
tacagtgatgtttgaagggcaggggagaaaggtataaaaatcactcatggttcacaacctgttactgaaactgaggttagtatttatattacatggtatggcagtactagaaaagatttc

SEQ ID NO: 30327 - DNA, 120 bp, synthetic construct
  source 1..120: mol_type = other DNA
tacacacatatcctgaagttaagaaaacagaacatattttaaatggagactaagctaaaaacctacaaattttactttaaaaataccttcttaactaatatagctctatagctaaatatt

SEQ ID NO: 30328 - DNA, 120 bp, synthetic construct
  source 1..120: mol_type = other DNA
atatgtggttctcattatatttctattagcactgctttagaatattattttgaataacatcaaaatttcagtattagccatatgattatcaaccaatattgctcagtctggacttagttc

SEQ ID NO: 30329 - DNA, 120 bp, synthetic construct
  source 1..120: mol_type = other DNA
tcaaattaaactcaaagtgagaagataggaaaaaataaagatgataataaaaatcaataaaacagaaaggggaaagaaaatagacaaaagtccatgaaaacaaaggctgactcaagaagg

SEQ ID NO: 30330 - DNA, 120 bp, synthetic construct
  source 1..120: mol_type = other DNA
gcacaggtctacaaccatggtgcatccacagttttattaatactcagcaagaaaagggagtacactgttaacaaatgcaacagcacagatgaatctccaaataattgtgctgaaataaat

SEQ ID NO: 30331 - DNA, 120 bp, synthetic construct
  source 1..120: mol_type = other DNA
acctgcctcggccacctcgccccgacagtcctgcacctcgaggtctccgctttcctggaaatccagacccacggccctatgtaacagattgggaaaagtcaacattctgtgacagaccaa

SEQ ID NO: 30332 - DNA, 120 bp, synthetic construct
  source 1..120: mol_type = other DNA
ctgcctcccaaagtgccaggattacaggagtaagccaaagcgtccagccaggaaaaattatttgaggattataggaaagctgacaaaaggctttgtgaaagctttgctttaaataatctg

SEQ ID NO: 30333 - DNA, 120 bp, synthetic construct
  source 1..120: mol_type = other DNA
tctgaaatgtctggggaccaggaaggtgggctcactgtattatgggtactccaagccccctaggatatggcagttgagaaaatagatgtgtaaaactcagcaacataaaaggtcaaagcc

SEQ ID NO: 30334 - DNA, 120 bp, synthetic construct
  source 1..120: mol_type = other DNA
tgaattaggtaattcaatggtgcatgctataattttaccaattaagtaaccaaaacttaagacaaggtacatagtacttaccaggtttctagaatatcatcaaattaaaaagtactatct

SEQ ID NO: 30335 - DNA, 120 bp, synthetic construct
  source 1..120: mol_type = other DNA
cacttcatcaatgcaaatcatcagcaaattcaagactttttatcttcaagttttgtctccaatccttctacttcttgtcacttccaccactagcagctcagtcgtggccaccaccatctc

SEQ ID NO: 30336 - DNA, 120 bp, synthetic construct
  source 1..120: mol_type = other DNA
cacagccaggaaaatgcagcttattttacagccaatccccaacgtgaagaatatgtagaagaaacagtaaataaaaacagaagtataatacagaaatgcctaataccaaagaaattcatg

SEQ ID NO: 30337 - DNA, 120 bp, synthetic construct
  source 1..120: mol_type = other DNA
aatctcacttaaaaagaaatggaactcattcttaaagggtagaatgtacatgatgtaaagcagacaaaggaagatttatctttacttactgaaaatcaacagtacaattctaagattttt

SEQ ID NO: 30338 - DNA, 120 bp, synthetic construct
  source 1..120: mol_type = other DNA
tcaggacataatgaaatactttcctcatgtggggacactaaggtttctagtggaagagtgacagattccatgactaattttggaggccttgattcttctctggataccactgtttcaggt

SEQ ID NO: 30339 - DNA, 120 bp, synthetic construct
  source 1..120: mol_type = other DNA
atgtgaaagaagtgttcttgcttacaaaagaaagcagagggctaactggtaaatgcggtgggagtgctagagctggaaatgcatcatttgcaaccaaaacaaagcaggttaaaatggcat

SEQ ID NO: 30340 - DNA, 120 bp, synthetic construct
  source 1..120: mol_type = other DNA
tgaaaaaactgcattttgactccacagcataagctttgaaccaccacactatagtcccttcatagaacaggataaaaagattaagtatccaatagtattcccagaaattatgtaattctg

SEQ ID NO: 30341 - DNA, 120 bp, synthetic construct
  source 1..120: mol_type = other DNA
ataaccattcaactgttaaactaacaccctacgtggccatagtgtcaggcaaagcaaaatacctgcccttcctgatccctcaacaaaaaacacattacatagaataaagaacaatttcat

SEQ ID NO: 30342 - DNA, 120 bp, synthetic construct
  source 1..120: mol_type = other DNA
aatctcctccccagtaccccttaagaaaaactactttattcttctgtttgttttaaattgttaatatcgcttattttttaaattgttggcaaatttaaattagctctttagacgaccaga

SEQ ID NO: 30343 - DNA, 120 bp, synthetic construct
  source 1..120: mol_type = other DNA
taaacagactattcaaatcatataagggcttttttttaattactggaaaatgccttatgtggaagaacattaaagacagaagctacatattcatacacaaacacattacttaatatacta

SEQ ID NO: 30344 - DNA, 120 bp, synthetic construct
  source 1..120: mol_type = other DNA
ttatttgcactcttttaaaaatgtaaaaataattcctcgcttgagggcagtacaaaaacaggcttcaaaatgtggacgctggctggacctctgacgtacttcatgaaggctggcttagca

SEQ ID NO: 30345 - DNA, 120 bp, synthetic construct
  source 1..120: mol_type = other DNA
gacatcctgtctaaatcattttctgcacatccagaacaatctttcaaaaatgtaaatctaattgttaacctctgtataaattaaaactccaccaatacctcatttttcacctaaaagaaa

SEQ ID NO: 30346 - DNA, 120 bp, synthetic construct
  source 1..120: mol_type = other DNA
gggatgttatgtttcttaagacagtaccagtatttatctttcaaaatatgtacatttaaaaattgatctttttgctcaccgtaaaacttttaaaaattgggggaaataataaactaatta

SEQ ID NO: 30347 - DNA, 120 bp, synthetic construct
  source 1..120: mol_type = other DNA
aagcaataatcaactaagaaatttttctttaaacagttgaaaaagcaaagacaggctataactaaagataatttaaaagggcagaggagtaaattccaggtctatttggattctaagatc

SEQ ID NO: 30348 - DNA, 120 bp, synthetic construct
  source 1..120: mol_type = other DNA
ccaaactccttcccttgcttacaaggcctacatgatctagcctttgttcgccttgatgatgtctctactacccacctagtaggctactatgctccaagtaaaatgacatgctgcctgttc

SEQ ID NO: 30349 - DNA, 120 bp, synthetic construct
  source 1..120: mol_type = other DNA
aagactaagatagatgaatcatgaaaaggtactagcagagatttctattatacctatcagggaaacacaatttctaagaatttcagaagtctttggtgttcttattaacgtaaatcctga

SEQ ID NO: 30350 - DNA, 120 bp, synthetic construct
  source 1..120: mol_type = other DNA
tatttatgagacatattactattttttaccctgcctaaaaataaatacaaaataaactcatcaattgtaagttaacagggacacaaatggttaaagactcacagaaaaaaacacaaaact

SEQ ID NO: 30351 - DNA, 120 bp, synthetic construct
  source 1..120: mol_type = other DNA
tgagaagtactggaatatatctaacatactaatttacaatatcatataaagatatcagtgaataaaagaaggaaaataaaacactacatttaggagaacgcttcaaacccatctgttaca

SEQ ID NO: 30352 - DNA, 120 bp, synthetic construct
  source 1..120: mol_type = other DNA
ctgttcaaaagtgtatggcatctccacccctctcctttgctcctgttctggctatgtgagatgcctgctcccccttctccttcaaccatgatttcaaactttttttttttaatttatatt

SEQ ID NO: 30353 - DNA, 120 bp, synthetic construct
  source 1..120: mol_type = other DNA
ccacatattttaaaaagcaggtatttcctaggttatattcagtaaaagcagatgtgtccctagacctaatacaataaaaattagaaattcacaatataaggataaagtcccaaatctatc

SEQ ID NO: 30354 - DNA, 120 bp, synthetic construct
  source 1..120: mol_type = other DNA
tcctaccctaatacagaggctgtaaatatgatgaaatatcatggcaaggataatgccattaatatattatatggcaaaggaattctgcagatgtgattaaagccaccaatcaactgcctt

SEQ ID NO: 30355 - DNA, 120 bp, synthetic construct
  source 1..120: mol_type = other DNA
agtttatggtaattgctttattgtaacagataacaaacagagcagcatttcaaggccctccatgctttggtctctgccaaatcactattacatttttaagatttttttttaaacattata

SEQ ID NO: 30356 - DNA, 120 bp, synthetic construct
  source 1..120: mol_type = other DNA
caggtagatattactatttttcattttacaaatgaagcagagaggttaaatatccttgttcaagcccaatgagtcaggaaatgaaaggaactgaactcaaggagttcataattagttata

SEQ ID NO: 30357 - DNA, 120 bp, synthetic construct
  source 1..120: mol_type = other DNA
aatggaatttctggggcgctattatttgtttcctgatgtgattttagtatatacgttctaatatttggggtattcctagaaatgtgtacctattattcacttgctatatatatagcaaag

SEQ ID NO: 30358 - DNA, 120 bp, synthetic construct
  source 1..120: mol_type = other DNA
agttttatttcaagaacagtaaaagaacttctggtcttacaaacattacacagataaaacgagtttctccaaacagatgtatgtaaaaatctagtacatatacccccaaggtgagtcaat

SEQ ID NO: 30359 - DNA, 120 bp, synthetic construct
  source 1..120: mol_type = other DNA
atacatccacaacgaagcatgttacataaatgctcacagcagctttatatactggccaaaaattgaacgaaacttaactgtaagctagtgaatggaccaatctcaaaaccattatgctaa

SEQ ID NO: 30360 - DNA, 120 bp, synthetic construct
  source 1..120: mol_type = other DNA
tatcaaatatactaacattcatgtaattagagttacagaggaagaggagagagaaatgagacagaaaaagaataagaaataaaagtcaagcttttcacaaatttggtgaaaaatatcaac

SEQ ID NO: 30361 - DNA, 120 bp, synthetic construct
  source 1..120: mol_type = other DNA
gggacacaggacattcatacccactgagcagtaacgcggcttcctccctctagagtgtgggtggaaaaaaagtggggagcctgagttcaacacccacccagtgataaggacatatcccta

SEQ ID NO: 30362 - DNA, 120 bp, synthetic construct
  source 1..120: mol_type = other DNA
gaaaatatagtcaaaaggtgcaaacaatgagaattcatagatgtcataattatctatcaaagattttaaactatataacactgcttcaacaagcaattacagccggacacagtggctcac

SEQ ID NO: 30363 - DNA, 120 bp, synthetic construct
  source 1..120: mol_type = other DNA
aaaccctgagataaataagagaaatgacaccttatccacagatgaaaaacaactcaaatgacagcagatttctcacctgaaaccatggaggccagaacaaagcagcataacatttttgca

SEQ ID NO: 30364 - DNA, 120 bp, synthetic construct
  source 1..120: mol_type = other DNA
ttaaatataaataaaaataattatctttttaaaagcttatgagttcaggtagaaatatgaagggctaaaaggaattggaagacattttcctactatttgttctttctcttgattttcatg

SEQ ID NO: 30365 - DNA, 120 bp, synthetic construct
  source 1..120: mol_type = other DNA
tctttccaaaatgacttgatattactcccaacgtccttaacttttagagcaattactctcgctgaaaggctaatagtcttttttaaagtttattttctatggacacatctttgtttacct

SEQ ID NO: 30366 - DNA, 120 bp, synthetic construct
  source 1..120: mol_type = other DNA
ttaatgacccctaaattccctttttgtcttcccagctctgcagactgccagaagcttctcagcttttcaacctctcagctggatttttttgaactgagtaattaactcaaggggaaaaga

SEQ ID NO: 30367 - DNA, 120 bp, synthetic construct
  source 1..120: mol_type = other DNA
ccactagccaaactgggaaaactattaattcatggaacattcaacagagtccacagaaagtcttgcctcagtggtgaggaataattagtcctggactaagcactccttcatatctgtcta

SEQ ID NO: 30368 - DNA, 120 bp, synthetic construct
  source 1..120: mol_type = other DNA
aggccaactagaattccatgcctggcaaaaatatctttcaaaaatgaaggtgaaataaaggcacaccagaaacataaataatgaaataattcatcaccaggagactttcactgcaagaaa

SEQ ID NO: 30369 - DNA, 120 bp, synthetic construct
  source 1..120: mol_type = other DNA
aggtgactagagtaaaaccgtagtgtgctgccctgctctacaattgcctaagcccacagatgtaactcatcccaactaaacacagaggtatcagcttcaaatttagctactaaatcataa

SEQ ID NO: 30370 - DNA, 120 bp, synthetic construct
  source 1..120: mol_type = other DNA
ttcagacctcccgtttccccaacacacaaccatattgaaattaggccaattagttaaccctaatcctacaatggcctcaaacaattcagggaaaggaaaagtcatgtgcctctcacttta

SEQ ID NO: 30371 - DNA, 120 bp, synthetic construct
  source 1..120: mol_type = other DNA
gaaagaaacaggcaatcaatgtagcaaacttcattgttgtcttattgtaagaaactaccagaggcaccccaaccttcagcaatcactgctgggatcagtcagcagccaccaacatcctct

SEQ ID NO: 30372 - DNA, 120 bp, synthetic construct
  source 1..120: mol_type = other DNA
atttatatactgggaaaaaatagcctcctcattttaataatccagattgggaaatcagatctaaaacagatgttcaatggacatcccatttcttttgtaaaagcaacttgagtggtcagt

SEQ ID NO: 30373 - DNA, 120 bp, synthetic construct
  source 1..120: mol_type = other DNA
ctgaaatattttactaactggtttttctgaagctcaatgtccatgtctccttccctcccaagctatccctacccattaatactgtatttttcacctgctcaaaagtccatatggttgccc

SEQ ID NO: 30374 - DNA, 120 bp, synthetic construct
  source 1..120: mol_type = other DNA
aaatatttgtatacatttttctacttttctatattttccacacatctatatataatttgtgtgtgtgtgtgtgtatgcatgcatgtaaataaaatatacctctaagtcttgtaaccttaa

SEQ ID NO: 30375 - DNA, 120 bp, synthetic construct
  source 1..120: mol_type = other DNA
caaattctgaaaaaaaaaacaagaactaagactctagaaggagatccgagaggcagacatgtgtgtctgtgtgtgtgtgcgtgtgtgtaggcgcgtgtgcatgtagatgaaggaggaatc

SEQ ID NO: 30376 - DNA, 120 bp, synthetic construct
  source 1..120: mol_type = other DNA
tatcattttacaactcttaatgaatcaacagatctaggcattagtcaccaacagttgctaatgtcacaaaaagagacaaccatattttgtgcctcctgatgaaagaatgcaccacaatat

SEQ ID NO: 30377 - DNA, 120 bp, synthetic construct
  source 1..120: mol_type = other DNA
tatggactcatcacaacaaccattattcctattcaacagttgaggaaactgaagtataaagaaagtcatggtcaattactcaatggtagatccagaacttgaaccagcactgtcttaata

SEQ ID NO: 30378 - DNA, 120 bp, synthetic construct
  source 1..120: mol_type = other DNA
gcctatcatgcttcaaatcatctgttaccctgctaatattatctaacatgcctgcttcttccttgatctccttcattctagtctcaacacagcagccagcatgagagttttagagtcttg

SEQ ID NO: 30379 - DNA, 120 bp, synthetic construct
  source 1..120: mol_type = other DNA
atggggaacacttaacacactgtgggcgggaatgtaaattagtaccacctgtatggaaaaccatataaagagttctcaaatgactaaaaaataaaactgctggccaggcacggtggctca

SEQ ID NO: 30380 - DNA, 120 bp, synthetic construct
  source 1..120: mol_type = other DNA
acctgtaacccttaaattgatacaaaaaagttgtttggagagtggcaataaggagtgaaacagaattcttgatccttattataagcattctgggctattagacttttttcaaccatgtac

SEQ ID NO: 30381 - DNA, 120 bp, synthetic construct
  source 1..120: mol_type = other DNA
gtgtggggccaaaaaagggtttttttattttttggttttttttttctgttgttagaggtggaggtggtaatggtttctgttttggagggagaagaggtagtggtggtaatggtttcttct

SEQ ID NO: 30382 - DNA, 120 bp, synthetic construct
  source 1..120: mol_type = other DNA
agcagcaactatttattcagaaacatatactattagttacatttaaaatttatcttgttagaatacactgtttccaaatcaacagtccttacaaaatatggaacatatacttcagtatta

SEQ ID NO: 30383 - DNA, 120 bp, synthetic construct
  source 1..120: mol_type = other DNA
tgagttactctactatagctaataaaactacttaaactaagtggaaaaccttgagaactaaagggggaggggatattatttattctcattactcttaaatcaaccaacttccaaatccag

SEQ ID NO: 30384 - DNA, 120 bp, synthetic construct
  source 1..120: mol_type = other DNA
tcattctttggtcaattttgcagagcaaaaaatttaaataaataaataaatagatcttcaatgtgtatcaaggatgtcctacttgggcctcactctcccaaacagagcctattttcttcc

SEQ ID NO: 30385 - DNA, 120 bp, synthetic construct
  source 1..120: mol_type = other DNA
taggaatcccactaaaattcagaataattaaaaggagttaagatttaagacataaccaaaaaccagcccctctacaaggcagttgactgtacagttcatgcttgtatacagatggacaga

SEQ ID NO: 30386 - DNA, 120 bp, synthetic construct
  source 1..120: mol_type = other DNA
attaggatcacagggggcaatctcggtgaaggatttaactgtcacaagggagacaaaactgattctcaagtttcttgggaatcagcacagatttgacaacccttctatatgacaaaagaa

SEQ ID NO: 30387 - DNA, 120 bp, synthetic construct
  source 1..120: mol_type = other DNA
ttcaagatgttggcatttttgacagccagttgttacctagtgtttctctgtgatagatacaggatatgcatatttgtcaggactaccacagaagtcctgttgatccttcttagtgcatcc

SEQ ID NO: 30388 - DNA, 120 bp, synthetic construct
  source 1..120: mol_type = other DNA
agttgtcgttctgttcaaagaatgataatccattatgccgtcctcattgttgtcagtgggttatctattgcttaaattgtcccagattttgccaagtgaagctcattcaggctgactccc

SEQ ID NO: 30389 - DNA, 120 bp, synthetic construct
  source 1..120: mol_type = other DNA
tgccggaattccagagtcccagaaggaaagcaaggcattggcataaaccacgttgtttgccactctaggagcagtgaactacttttagcatttagggaatggtgggaacgcctgaactcc

SEQ ID NO: 30390 - DNA, 120 bp, synthetic construct
  source 1..120: mol_type = other DNA
agtctattggtctgttcataatagcagcaccacacagttttaattaggctctttagaatgatttcatttctaatggtgccggcttcccctgcccatctaattcctttttagggctttccc

SEQ ID NO: 30391 - DNA, 120 bp, synthetic construct
  source 1..120: mol_type = other DNA
acacagtgcagaggccattacctccaaagcaatgttaatttaaatcagagtggagttagtgggcattattattttattcctgattttagtgggatagttctggtgtttgtttgtttgttt

SEQ ID NO: 30392 - DNA, 120 bp, synthetic construct
  source 1..120: mol_type = other DNA
ttcctctctccctttctccgtttcagcatctgatttgtaaaaaaaaaaaaaaagccttttacttctaattaaaaaaattattagtagtcaacaaatttattatattttatgtgcattctt

SEQ ID NO: 30393 - DNA, 120 bp, synthetic construct
  source 1..120: mol_type = other DNA
tagtgggaaagtatacccaagttcaggctctgattgctcactgttcagccaattcttctaaacaaccagaggactacacagagatttcaagacattgtattcagtgtcattgtaagcatg

SEQ ID NO: 30394 - DNA, 120 bp, synthetic construct
  source 1..120: mol_type = other DNA
gaaggcatctactgtagtcagagctggtgttcctgctgaagagaacagagtgtgtggaacagatgtaacattaataaataaaagacaaagttttcctggaatataatgaaagatcatata

SEQ ID NO: 30395 - DNA, 120 bp, synthetic construct
  source 1..120: mol_type = other DNA
gacatttgcaaatgggcaaaagctcaggaattaatggcattcataaacctcactgaaaaatctacttgcagatataacccagccaactgaaagatgaatcagtgagggctccagaaatag

SEQ ID NO: 30396 - DNA, 120 bp, synthetic construct
  source 1..120: mol_type = other DNA
gggcaacagagtgactctgtctctaaaaaaaaagcaaaaggatggttcaaaaataagccaagcaaatgcacagtaaaagaaagcgtgagtattatttgattgcaaaacaaaaaaaaatta

SEQ ID NO: 30397 - DNA, 120 bp, synthetic construct
  source 1..120: mol_type = other DNA
gagatgaagaaaccaaggaatgaagggattaatttacttgcctgaaatcacatagctggtgctgggatttgaacctagcattgtgtccctattaagctggcctcacattataaatatata

SEQ ID NO: 30398 - DNA, 120 bp, synthetic construct
  source 1..120: mol_type = other DNA
taagggtaacattctattgctgttgccattctgagtgggatgttttcatccattatatgttcttattgttagacagggtagttgttgatttctgtctattcatttagtaactggtcatct

SEQ ID NO: 30399 - DNA, 120 bp, synthetic construct
  source 1..120: mol_type = other DNA
gcaggccagtctagcattgagttctcctcctgggaaagaatttgaggatgcgtactttttagatgacatctactgagttatatttaatagattgtcattgaagttagtgatggatgagcc

SEQ ID NO: 30400 - DNA, 120 bp, synthetic construct
  source 1..120: mol_type = other DNA
ggtctgcttgttggattccataggcatctttagccttgggttagtaattcacttatttatatttattttctggaatataattccagaaatatgttaaaattgggaaggatctggaattct

SEQ ID NO: 30401 - DNA, 120 bp, synthetic construct
  source 1..120: mol_type = other DNA
gccagtgttggaattagcctgcatatgtagatgggagttctttttctgcagttcactaatgtgggcagtttaatcaacttctcagtgcctcccttttctcatttgcaaaacagggataat

SEQ ID NO: 30402 - DNA, 120 bp, synthetic construct
  source 1..120: mol_type = other DNA
agaataacagaagtgtccttgcagtttggcatggggcgttctactcactctttatttcctgtaggagtcttcccgaggttagtcggttgttaaaggataggattcttggctgggcgtggt

SEQ ID NO: 30403 - DNA, 120 bp, synthetic construct
  source 1..120: mol_type = other DNA
ctggggacctcgctggtgtctctttctctgctgataaggccaccactcttattgatggggaccccacatttaccccaaccacctctctaaaagtttcatctccaaatacagtcacattga

SEQ ID NO: 30404 - DNA, 120 bp, synthetic construct
  source 1..120: mol_type = other DNA
gacttgcaagtgtcctcttaaggaattctgtttttattttgcataccaggaattttcagactgtttttgaggcttctctctggggcctggcccactggactagagaatcctcaagccccg

SEQ ID NO: 30405 - DNA, 120 bp, synthetic construct
  source 1..120: mol_type = other DNA
atgtacaaagatacattgttttgtgagttcatacatttccaatatggtatcacactgtaaataactttctgcatggtctttaaaaagaaaaaccctcaatattatgtttttatcatacat

SEQ ID NO: 30406 - DNA, 120 bp, synthetic construct
  source 1..120: mol_type = other DNA
tacgttccatactcacagtgttaaacactattactttatcatgttttaatctagtgggttcgattcctactcattttttttctcagaatagctttggctcttactctttagtgttcattt

SEQ ID NO: 30407 - DNA, 120 bp, synthetic construct
  source 1..120: mol_type = other DNA
tctaacacttcgtgtttcttttcttggtcttgctgtgttggctagaacttctattaaaatagtgatcagaactgcagacagcaggtgcttttttgactttctgactttaaagagaatggg

SEQ ID NO: 30408 - DNA, 120 bp, synthetic construct
  source 1..120: mol_type = other DNA
tacttgagaactttgcatcaatattcaaaagtgagattggactgtaattttgatttcttgtttttgtctggttgtgtatcaggattatatgggcttcataaaatgagtttgttagctttc

SEQ ID NO: 30409 - DNA, 120 bp, synthetic construct
  source 1..120: mol_type = other DNA
gagaccctgtctctaaaaaataaaaacaaaaacagaccagccccaggaaacggatgttggtacaatgtgtgtgtatagttctatgtcattgtaattctacctgtagattccttgaactac

SEQ ID NO: 30410 - DNA, 120 bp, synthetic construct
  source 1..120: mol_type = other DNA
tgaagtaggtgtgctgttgacaaattgtgttagttttatttcaacggaaagtcttgatttgctctattctcgggatatttttgctgaacatagaattctggatggacagttctttcagca

SEQ ID NO: 30411 - DNA, 120 bp, synthetic construct
  source 1..120: mol_type = other DNA
tggaagtggggactgtggtatgttgtgctgtactagagatagcttgggtgacatagattatttagacagatttctccattgtgttcataagaactgtttgggccacatcttgttccatag

SEQ ID NO: 30412 - DNA, 120 bp, synthetic construct
  source 1..120: mol_type = other DNA
gagactttaaatgtggcagtgagttgcaatgagaaaaggaggtggggaaagtgatttctgccctgtgtctttttcttttcacctttttatcctgttacctcaagatgcccttctgagaaa

SEQ ID NO: 30413 - DNA, 120 bp, synthetic construct
  source 1..120: mol_type = other DNA
caccaccctgataggtagtggtatatgcattttggaggagagagcactgagggttaataataactttcctcaagtcagctaactagtaagtgctcaaacctaggttttcataacttcaga

SEQ ID NO: 30414 - DNA, 120 bp, synthetic construct
  source 1..120: mol_type = other DNA
acattttttaagaatgcaatatatcgtcattaactgttgtcacgtcgttgtatgctagatctcttgtaatttatttctcctatctaactgtagttacgtattttttgaccaacatctcct

SEQ ID NO: 30415 - DNA, 120 bp, synthetic construct
  source 1..120: mol_type = other DNA
aacacttagcagagtgttcaataaatgtaaactttaattattattattagttattgacttcagagcctcccactggagagacagttaaagatgggggttatctgatgtcaaggaatctat

SEQ ID NO: 30416 - DNA, 120 bp, synthetic construct
  source 1..120: mol_type = other DNA
aggatattatcccttttgatcatttaaatagatatggatagtgatagaaatctgtgtgtgtgtgttttttttaaggtattgccatcagagagtcagcaaaggtagttgaccaagctcaaa

SEQ ID NO: 30417 - DNA, 120 bp, synthetic construct
  source 1..120: mol_type = other DNA
ggcgtgagccactgtgcctggcctgcctccgtgtcattgttaaggtgattctttgtttgtggaaatgagtggaggagaatatgaacaataatgtaacttaatcttttttttccaaatgct

SEQ ID NO: 30418 - DNA, 120 bp, synthetic construct
  source 1..120: mol_type = other DNA
ggtaagtagctaaacaggcctccaaaagcaaggacaatagaaggaggaatggatttggataaaccaactgcctactttagttttcttgagacatagcaagatgattgtaattattgccac

SEQ ID NO: 30419 - DNA, 120 bp, synthetic construct
  source 1..120: mol_type = other DNA
cattgtttgttaggttgccctcagtccagcactttgctcccagtcccagtatgttgaagctgagaccgcctgagaacaatcaaactcccagagccagtactcattaaggagcccgggcag

SEQ ID NO: 30420 - DNA, 120 bp, synthetic construct
  source 1..120: mol_type = other DNA
atgttgtcgcctcctctcctatctcgcttccttgaggatttgtatttttaaaaatgtttctttactgtagttttagaggggcatggaggtggagtaatattagatacatgtgttcaattt

SEQ ID NO: 30421 - DNA, 120 bp, synthetic construct
  source 1..120: mol_type = other DNA
cacattagttagttgtatttcctcttttgcgagctgtctgttcatgccctgtgctcttttacgtatcgttgttttattgcttttcttgttgctgtgatttctatgaactttgtttttact

SEQ ID NO: 30422 - DNA, 120 bp, synthetic construct
  source 1..120: mol_type = other DNA
gttccaaagtgtttagtgatgggtatttaggttgtttctgatcttctgatacagacaatgttgactttttacctttccaagctactttgttttagttgggtctcttaacctcagaatgta

SEQ ID NO: 30423 - DNA, 120 bp, synthetic construct
  source 1..120: mol_type = other DNA
ccgtgatgacctcttgaaaggccctatttccaattatagtacactgggagttagggctttaatgtatgaactggaggtagggggagcacagttcattcataataaagggtaatgtatacg

SEQ ID NO: 30424 - DNA, 120 bp, synthetic construct
  source 1..120: mol_type = other DNA
tgctgctcctctggctctcctttgctgagacctgaagtcaccggttcgcctttgatgtcctcactcgtcttggttgtgttttcatagcccttggcaacttgcttctgggatattcagttt

SEQ ID NO: 30425 - DNA, 120 bp, synthetic construct
  source 1..120: mol_type = other DNA
gtcattatttgcctgccaccttatgtaagggaattgactgaaattttggggaataaatgagatgggtgttgcccaaatgttttctgcataatactagtcacttctaaggaggaggaggag

SEQ ID NO: 30426 - DNA, 120 bp, synthetic construct
  source 1..120: mol_type = other DNA
cacagtcagccacgtttctttattgaaaacttgactcctatagttgtaagtactcaacattttcgtgttagttgtccaagtttgaattggaatttgagggacaggggttagaggatggat

SEQ ID NO: 30427 - DNA, 120 bp, synthetic construct
  source 1..120: mol_type = other DNA
ttatgtattagaaagctaatattatttttatgggtttaagttgagttttagtaatttatacttttatctccatcttaaaataccttacaaatacttggactctgcagaaaggctactttt

SEQ ID NO: 30428 - DNA, 120 bp, synthetic construct
  source 1..120: mol_type = other DNA
cgaaatcactaacacagctgttctgcctcctcttcttccctaggcagaaggttatgtaattggaagctgcatcaaacacatcccgattgcaggtagagatattacgtatttcattcaaca

SEQ ID NO: 30429 - DNA, 120 bp, synthetic construct
  source 1..120: mol_type = other DNA
atctaccagagggctccttccatactgcctccatgcttcgctgtagaatcaggaggcgaccacagcagcagaacactgccaccctaggatccagagctattgcacaaaattcacacacag

SEQ ID NO: 30430 - DNA, 120 bp, synthetic construct
  source 1..120: mol_type = other DNA
ccccctgtgaaggctgggagtaaaagagactgttcatagcctccgagtcagctgccctggccctgctgtgtggggtagccctgttagttctcacctcacttctctctttgaaggaacaga

SEQ ID NO: 30431 - DNA, 120 bp, synthetic construct
  source 1..120: mol_type = other DNA
acctaccatgtcatttacttattatggttgcttattgttttctgactcccagctagagtgtaatcttggcagggatctgtgtgtttcgctaccttgtgtatcccaagtgcctagacaata

SEQ ID NO: 30432 - DNA, 120 bp, synthetic construct
  source 1..120: mol_type = other DNA
ttttgtgtgctcaagtgtgggatggagcgatactgccacccagagtgtagaaagagcagttcccagcgaagggcctgtgagcagggtggccgtcattcggtctctctgcatcccctgtgc

SEQ ID NO: 30433 - DNA, 120 bp, synthetic construct
  source 1..120: mol_type = other DNA
aattagccttcctgcacctttaatcagtctttgcttgagtgagtcgcgccgtcagctcagtggcatgactcactcgccttactcagactcaggtcgctgaattgtacagagaagagaatc

SEQ ID NO: 30434 - DNA, 120 bp, synthetic construct
  source 1..120: mol_type = other DNA
ctttgtcactaggataatcatttcttctctgtggctttcagaagggtgtagcttggccctggctgtcaagtttgtgcagaataaatcctgtcttccctcagccgtcttggtttttttgaa

SEQ ID NO: 30435 - DNA, 120 bp, synthetic construct
  source 1..120: mol_type = other DNA
cacagctacctttttcagtgtgtacagtgagaatatgtaagattcctctcagcagatttccactacaccgtaccctcttcctaactgtactcaccatgctggaattaggccttcagagct

SEQ ID NO: 30436 - DNA, 120 bp, synthetic construct
  source 1..120: mol_type = other DNA
aaaatggaccggagtctgggtcccaccctgggagattctgatgtaattgggcttgggctgggtggagcctggacacctggatggtaaaagcttcccaggtgactctaatgtgcttctaac

SEQ ID NO: 30437 - DNA, 120 bp, synthetic construct
  source 1..120: mol_type = other DNA
gtacataccttcatttaaaaatatgttattgctaaaatatgctgatacagagacacgaagtgagcgtgtgcttttgggaaaatggcgctgacagacctgcttggtgccgtttcctcaaac

SEQ ID NO: 30438 - DNA, 120 bp, synthetic construct
  source 1..120: mol_type = other DNA
tcttccatcaagactcctgctgaatacattttaggaatgagaggcagactctcaaccatgtcattttctcagagaaaattggattgtgtgttggtaataacggtacctgtcacactgaga

SEQ ID NO: 30439 - DNA, 120 bp, synthetic construct
  source 1..120: mol_type = other DNA
ttgtattccatgaaatgacttcaagtgatattctggaatcgcgctccacatccaggccagggcagcagattcctcacccgctgcggcctctagccgattgacttttctatttttaaagtt

SEQ ID NO: 30440 - DNA, 120 bp, synthetic construct
  source 1..120: mol_type = other DNA
ttcagatatcctggatacaaattctttgtcagatttatgtgttgcagatttttttgctagtctgtggcttgtcttttcatattcttggtggtttttgaagaacagaaatgtatggaagcc

SEQ ID NO: 30441 - DNA, 120 bp, synthetic construct
  source 1..120: mol_type = other DNA
agatcctcagaatgacaaagtatgtgttttaaagttccctgtttacatttctgaacttttaggaatctctaggttggggaggttgagacatcttcaagcatcccagtgagccccagcgcc

SEQ ID NO: 30442 - DNA, 120 bp, synthetic construct
  source 1..120: mol_type = other DNA
gctgcagtctgtagtgagccccagcgcccgggctgcagtctgtagtgagctctagtgcccgggctgtagtctgcagtgagccccagcacccgggctgtagtctgcagtgagttctagcgc

SEQ ID NO: 30443 - DNA, 120 bp, synthetic construct
  source 1..120: mol_type = other DNA
tgtctgtttttaacagcatgctgctatggttcctaaggagagaattcgatcggcctgtgcttacgagttggtttattttttatttatttcgtgctccgggaacacagcctcaggcacctt

SEQ ID NO: 30444 - DNA, 120 bp, synthetic construct
  source 1..120: mol_type = other DNA
ctgttgttattggtagtttttgttttatgaatgaaggatgtggaaactttaatggagatcacaaaactttgtgggagatgtggtttgcacacacacaggtacacaccccctacagccctg

SEQ ID NO: 30445 - DNA, 120 bp, synthetic construct
  source 1..120: mol_type = other DNA
aaatgcattgcacatatgtcctttaaattgtataattaaactcatgacacaggctgaatgttgcatcctttaaaaacaacaacaaacttttatgcactcttcttagaaaagttcctcaga

SEQ ID NO: 30446 - DNA, 120 bp, synthetic construct
  source 1..120: mol_type = other DNA
tcccaactgtgtggctccacaggaaagcctgttttgggtgggtcagtactaacatgcaaagtctgacttcaaaatagaaataaaaccagagggtcttctctatccacttccttgtaaatc

SEQ ID NO: 30447 - DNA, 120 bp, synthetic construct
  source 1..120: mol_type = other DNA
gggactgagagctatcctctcttccgcacctggctgttggtacccccatcgtagggggggggaggcaccctccgcgaggcagggactgagagccaacccctggttcccccactggctctt

SEQ ID NO: 30448 - DNA, 120 bp, synthetic construct
  source 1..120: mol_type = other DNA
gagcctgcccctgttcccccactggctcttaggacacccatcgcagaggggggaggcaccccccttgaggcggggactgagagccagaccctcttccccccctggcttagggcccccatc

SEQ ID NO: 30449 - DNA, 120 bp, synthetic construct
  source 1..120: mol_type = other DNA
ttccgcccctggctgttagtacccccatcgcagggggggaggcaccccccacgagagtggggactgagagctatccccttttccgcccctggctgttagtacccccatcgcagggttggg

SEQ ID NO: 30450 - DNA, 120 bp, synthetic construct
  source 1..120: mol_type = other DNA
tagagcatccaagaatgagaagagccctagagcaaacgcaaagcccaggaagagataattggtttgagaagaaaagggtccaggagttattgcaacccagctagcaagcagagtcctggg

SEQ ID NO: 30451 - DNA, 120 bp, synthetic construct
  source 1..120: mol_type = other DNA
cctcctttcaggtcccattctaatgctgtcacctccaaagcagcaacctcatctacctgtctcaactccctaaatgggtgactgttcctgcatctgaatttccatagcattatcatgaca

SEQ ID NO: 30452 - DNA, 120 bp, synthetic construct
  source 1..120: mol_type = other DNA
ggatgtcttctgactggcctgcatgagggcttcaggaggtgagttgttttatcctcctaagaagccgccttggtatcccactggccttaagcagtcccagaatacccataatttttcctg

SEQ ID NO: 30453 - DNA, 120 bp, synthetic construct
  source 1..120: mol_type = other DNA
ggtgacagaaaggctgtctatctataccatccaatccaatagccacttgccccatatggctgttgagtgcttggaatgaggcctgtgagattgaggaactcaattttaaattttatttaa

SEQ ID NO: 30454 - DNA, 120 bp, synthetic construct
  source 1..120: mol_type = other DNA
tgctgcacaggccctcctcttcccagacagcagctgctgagtgtcaggtggggggataaaggccagaagcagagatgccgctaagcccacaaacaggtgcccacgggatcagcctcggcg

SEQ ID NO: 30455 - DNA, 120 bp, synthetic construct
  source 1..120: mol_type = other DNA
taatcaagtcagtgtttattcctccttcaagtggcatcttcttaaaggtagctttgcaaaatgcccaattatttggacaacttaaaaaaagaactatggggccgtgcgcagtggctcacg

SEQ ID NO: 30456 - DNA, 120 bp, synthetic construct
  source 1..120: mol_type = other DNA
tagcacagataattcttcacatcatttggttaattgaaggtatgggaaactgtatttgtagtgttcactcaaaccattcccaataagtgaattacccatgggccaaactctggaaattgc

SEQ ID NO: 30457 - DNA, 120 bp, synthetic construct
  source 1..120: mol_type = other DNA
tgcccgtattttatactaagccttcacataagttatgttctaggatgtcttcaaatgagagtaaaagaggacaccgttgtcttactgctggggaaaagagagggggctttcttctttctt

SEQ ID NO: 30458 - DNA, 120 bp, synthetic construct
  source 1..120: mol_type = other DNA
ccatgctaatgagcccaagggcttgggcttgatgtccctggtggttccatcagagcaacatgaaggaaagcaactgtcggaagccacaggccctcacttaatgtggtttgcagagtggta

SEQ ID NO: 30459 - DNA, 120 bp, synthetic construct
  source 1..120: mol_type = other DNA
tgtgtaaaggccaagatccagaataaaacctttcatttcttagctaaaaatctccccacatccattagttttacatccttggcattaaagatcctaaggagaaattggtattcctgtctg

SEQ ID NO: 30460 - DNA, 120 bp, synthetic construct
  source 1..120: mol_type = other DNA
taacgtttataggtctccatttaatgctttaagaaaatagaaaaagaaaggttaaattgctgaaagagtcacataagaggaattggcataagagacacaccggctactccctgggtgtga

SEQ ID NO: 30461 - DNA, 120 bp, synthetic construct
  source 1..120: mol_type = other DNA
acacatggggtacagtgtatactgcacaggtgatgggtgaaccgacacctcagaaatcaccactaaagaacttacccatgtaaccccaaaccacctgttcctcaaaaactattgaaataa

SEQ ID NO: 30462 - DNA, 120 bp, synthetic construct
  source 1..120: mol_type = other DNA
ttgaaatacaggatgcgtaccaaggtggatcacagattgagaggagaaaatgtgtgagattctccactgatagccaggtgtggcttcttctttttaagcatggcgtgaaacaaattatga

SEQ ID NO: 30463 - DNA, 120 bp, synthetic construct
  source 1..120: mol_type = other DNA
gagccagcaactgagttattcccaagctcatttagtgacaaagttgtgggttggttaggcttgttagagctcaacaaagcacttagtgaaggaaatatgaaaattagaaaccactgtagg

SEQ ID NO: 30464 - DNA, 120 bp, synthetic construct
  source 1..120: mol_type = other DNA
gggcacctgttacctgttcagcagagatttgtaaaaaaagacacatcaggtggcctttgcttgcaagaaatcagcctttggaacctgtggagaaaagttaagtactgcgtactgcgcaaa

SEQ ID NO: 30465 - DNA, 120 bp, synthetic construct
  source 1..120: mol_type = other DNA
tattagcgtacttttgagagtagatgtgctattaatgatgctaaaacaacagacatacactaccagaatgctcctagcaaaatgaggacatgtagtcaccctttcctctgctccctcccc

SEQ ID NO: 30466 - DNA, 120 bp, synthetic construct
  source 1..120: mol_type = other DNA
ctttcacctgcctgagttgtagaactctgcagaagtccttttatatctcttctacattcatcttcagagccattgtatcataggggttgttttgttattctccatacatcctaatttata

SEQ ID NO: 30467 - DNA, 120 bp, synthetic construct
  source 1..120: mol_type = other DNA
caccagagggtgccaaaggagtcagagcttgggttctgcccattgagaagaatgaagagggatgctggtttcagtttagcaggaggaaaatggtaaaaataacattgaaaagaacaaata

SEQ ID NO: 30468 - DNA, 120 bp, synthetic construct
  source 1..120: mol_type = other DNA
agagcttcattatccctagagtaagaaagggaaagaataaagaaaaaaaaagagcttctttaaagaccagcaatccgtggacaggcatttagcagttactgacttagcctacacactggg

SEQ ID NO: 30469 - DNA, 120 bp, synthetic construct
  source 1..120: mol_type = other DNA
ctgaggactgttgtcaaatgaaatgatgtggttcagggagaccaatgagtgggatgtggctgctgagaatgaggtgcagggtgatgttacatatttttttcccaagaaagggatgtgtag

SEQ ID NO: 30470 - DNA, 120 bp, synthetic construct
  source 1..120: mol_type = other DNA
agtgatgggaagcccctcgtggcacagcacctgccccagcaccattggctgaaacggaaacaaccatccacttggcctagcagagtccttgactatcttttagggctttgctctgggagg

SEQ ID NO: 30471 - DNA, 120 bp, synthetic construct
  source 1..120: mol_type = other DNA
ttcagatgaactggagccacatgtggctccggctggagtgtcaggcagcacagtggagagcatgccctgtcctctggaaggatgtggctcagagcacgtccagcccagaagtcacagagc

SEQ ID NO: 30472 - DNA, 120 bp, synthetic construct
  source 1..120: mol_type = other DNA
agactgttttgttgtaaatactataagaaagacaacatcctttcttctcctccatttctatgcctgtgaagatgtgatgagcaagccttggaagcctcagttcctcagactcttccaggc

SEQ ID NO: 30473 - DNA, 120 bp, synthetic construct
  source 1..120: mol_type = other DNA
ttaaattactgtccttaagctttttccatattagcctggagccataaatagtttgtgtggctactttcaaaattcaattctgggccgtttgcggtggctcatgcctgtaatcccagcact

SEQ ID NO: 30474 - DNA, 120 bp, synthetic construct
  source 1..120: mol_type = other DNA
tgcccagcattttgttcatcgtgcagctttataaactgtccaaagcaaggttcagaagaggcaggattttgcaaaactctcacatcagttccatctaggacgtgtggacatcacagtgat

SEQ ID NO: 30475 - DNA, 120 bp, synthetic construct
  source 1..120: mol_type = other DNA
gcatgacacatagcacataacacaccacatgccacacaacctacataccacatcctacacaccacacacaccccataacataccacatcacataccacacacaccatataccacatcata

SEQ ID NO: 30476 - DNA, 120 bp, synthetic construct
  source 1..120: mol_type = other DNA
gcctcactggtgagcctttctcccaaatgagaactcctcgctcttgcctccctttctactttctacatcttcctgggacttcctggccatctcctttctgcatgcatgctgcaggaattt

SEQ ID NO: 30477 - DNA, 120 bp, synthetic construct
  source 1..120: mol_type = other DNA
acaggacaatccctttcactctgggagctgagtcccaggtgagagctaagttccaggcgagaccagggagtcgaggggactggatttctgcttctctcccaggagctgcgggctgggaag

SEQ ID NO: 30478 - DNA, 120 bp, synthetic construct
  source 1..120: mol_type = other DNA
caggtattagtagttatggttatgtagcaaggctggctcaagaaatggatcagactctgagaggaaagacccacggttttgttgggtattcaccgtgtgctccccttgtaggtagaggtg

SEQ ID NO: 30479 - DNA, 120 bp, synthetic construct
  source 1..120: mol_type = other DNA
atgccaatctgctcatacaggcagaaactaaagagcctttaaatttgttttgcaaacaatcacatcaggatttgttctaatatactgatgcagtggacagatttatgatttttaggaaga

SEQ ID NO: 30480 - DNA, 120 bp, synthetic construct
  source 1..120: mol_type = other DNA
agggagcataacagtcaggtttctggcccagcccctgcaagtatagagtgccattgtttttagattgggaatgctgagaaaggaacaggtttagggttatgtttggtttgtaaagtttaa

SEQ ID NO: 30481 - DNA, 120 bp, synthetic construct
  source 1..120: mol_type = other DNA
actgcacataccgcacaggtgtgacctgctggtgatgatctgctttctctaaaatggactttcccttctgtctgcacttgctgatcaacaaaaagcctgctgggcctttaagacaggcct

SEQ ID NO: 30482 - DNA, 120 bp, synthetic construct
  source 1..120: mol_type = other DNA
agaggataactgaatggacaactataaaacctcctgtttctctatttcatgtcagacaaccctagctcccttagctttgcttccagctcctttttcctgatgctttaatcattgctgttc

SEQ ID NO: 30483 - DNA, 120 bp, synthetic construct
  source 1..120: mol_type = other DNA
agaacaaagcaggcagaagaaggtaagataagcttactcgctggttcttctggcttcttgctttatcctgtgctggatgcttctttcagcttctcctgcccttggacatcagactcccgg

SEQ ID NO: 30484 - DNA, 120 bp, synthetic construct
  source 1..120: mol_type = other DNA
tctgcctatgcgcccttgtttcttactcagagataaaagttcattcagaaaacatcttgagttcccccaggctccgttacttccttctttgctcccatagcattacctggtgaaaagtgc

SEQ ID NO: 30485 - DNA, 120 bp, synthetic construct
  source 1..120: mol_type = other DNA
atccaaaatagaattactggatgatccagcaatcccacttctgggtttagaaccaaaggaactgaaatcagcttgtcaaagagacatctgcactcccatgctcactgcagcactgttctg

SEQ ID NO: 30486 - DNA, 120 bp, synthetic construct
  source 1..120: mol_type = other DNA
gagaccctccatgcctggtgacatctcagactcagtgaacagcctcaggggcccttcacaaaactgggctgtcagggccacctggagctcagagtggtaatttggttccatttgaacttc

SEQ ID NO: 30487 - DNA, 120 bp, synthetic construct
  source 1..120: mol_type = other DNA
gcagaaacattcaatgcaatgagtttgttcaattccatccaactaaaaattgtgtttgtgctattagtgcctaccctctgatcagtcttgtactaggtaggaaacatggtgcttaccctt

SEQ ID NO: 30488 - DNA, 120 bp, synthetic construct
  source 1..120: mol_type = other DNA
atggtgtctgtctcataagaatgttttgagaaacaaatgagaaaacccaagtcaagctcttctagaagtgcatggcagatagtaaacagtcaatcaacattatcagtcctatcaccggtg

SEQ ID NO: 30489 - DNA, 120 bp, synthetic construct
  source 1..120: mol_type = other DNA
cagcaacaggtatagagcattgggagctgcactctccatactgatgttataattaatcttccacctcagtcaaccgatcatagagttccacttttggaagtgttccaacctgcacccagg
